United States Patent Application Publication US 2005/0228172 A9 - sequence listing, part 34

SEQ ID NO: 115941 - DNA, 639 bp, Homo sapiens
gtaattcagcttattattcctaagtcacagcattttagaatatcctttgactaattaagcattgtaagattgaaggtgtagtagttaagagtgctggtgctagagtcaggataccaacaattgactcctggttcaccaactgtgcgacattgggcaggttattgaacatgcctaggtctcacattacttactgggataaagagaaaaattaaactgtagtttcaagtattaggatacaatgatataatatccataacacccttaacayagtgcctggcattaaatgcccaataaaggttaacttttaaattacgatattttggatttttacattgtcacttgtgtaagttctttccttattttacacagtgaattactatttctgatttaagatacctagtcagtttatattttattatggttttcctattgaacacaattttgtattagttctacactttcaataatttaacttctattattttttcttacctagtttaaacgtgaaatgttcagtaattcaacactcataaagtctatgtaaaaatgaataaaaaatgaatatttttgaggaaataataaagtagtgtctgtatatacacagaaatagtgtttaagagactggtttgttttataatt

SEQ ID NO: 115942 - DNA, 683 bp, Homo sapiens
ccagatgtacattgaggttagttttataaaagacaactactgtataattgcttatatccatactgaaggaaaagaactatggtcacacagtaaaaacagttatgtctaaatcatgttttaattgattattataatggaaaatcaactaaacaattaccaaaacatatmatattctattcttctgtatatttcaattcaaaagtccattcaatttttattggtctcaatgtttaaccacatatcctaaaggacctgaccattctacacaataaacatttttaaatattgtaattaactcccttcacttttcaaactgttgcattgaatacagacaaatattctctgttcatggctgtagacacatttagtccaacatgagtaattttgttttatgtaaatcatatggcaaaagatcattttttaaaaatgggaatatgtatgactcaattttatttaaatcggcctcctccagcttctcctcattagaaaaaaaaatactgttttaacctacattttgctcttccactgtatttcttattaacaaggtgataagaatgaacacccaggaacccaatcctaatagtggttggtacagtggtagcaatcgtatttacagaatttctcctccataaaataaaatttattgcacaatatgctctgcatattttgttatattgtgtgta

SEQ ID NO: 115943 - DNA, 536 bp, Homo sapiens
ctagaagagtaatggtaacagtgcccggtcaacatctcatcactaatgtgataygtctgctgggttcctttccttagtagttatctttagtataaggcgatgctgaatctccactattttcagccatgaattttcactacaattttgagacagcatgaaaactactattcactatcctattagttatttataactttgttttaaatgtttgaagagattcaattaattaaataggtgctcagtgtttaaatgctaaagaaaaattggcttccaagtgctgttccataagatgtgaatctaataaattgagcattatgaaataaaaaatagctgtgggtgttctttttcatgtacaaacattccctcagacttttaagaaccttcttaaacataaatgacctttagggaatcccaggaattaccccaactctacacagtggcctccatcttgaatactgtgacatttacttttttctctaataaggccagtcacctcactggtgtagaaatctcagttaatatgtcttttcttaatc

SEQ ID NO: 115944 - DNA, 487 bp, Homo sapiens
ttgcttcctttattcccccatgcaaatttctttttaatatactcttgtacaaattagtgtccacaaaaagaaaaagaaaattctgattaagaacactaagtacactacaattcagttatttgaaatagcagcacctattttgtttatagaataacagattttattttttaactcctactcctactagcataactgaagatttttcatcttcagttaagccattgaataactgcccagccaaaatcactgataaccctcctgtactcctatagttttcttgtatccttaagaaagtgggtttttcatgcatattcctatacyacaagattttaatactttcaaataaaataacacataaataatgttttacaaactgcaaaacagtgtagaaattacagcaactattattattctttgagtaggaattgttcctaattcatctttgtgcataaaacataatttttgctcagaaaatgtattgaatata

SEQ ID NO: 115945 - DNA, 572 bp, Homo sapiens
tcggcttattgagagaactggcagggcacattatacacacgtcagctgtggcaaaaattagtcaacattgtttgtagaaagcctgtgatgtctgcattaccagctgtctggaaaaaggagaacatagcttcctttttyctgcttaatgtggtctgccagccagctggcactaggggaagaggaagggagctcatgtttattgaacgtctactctgtgccaaatgcatcgtgtaagttgtctcatttgatcctcccactttgatggtggggtggtatcagtaaccctgatgaacacatgggagactgagacttagcgaggtcaattaacccagccaagaacctaccggtagtaaatgagattctgactcaaagggcagtcaggccatactatttactcctattgataatgctacagatactttccaatgaccagttggagttagcagtaaaaactgaatatttcataataagttattattttacatattattttgtagaaaatgcaagtttcctttcaattttcatgactgcctttatgtttttaaaagattagattgatggtacagtaatat

SEQ ID NO: 115946 - DNA, 538 bp, Homo sapiens
atgtttttctttctaaaattctgaactgataaacactatagaagaggtcatcttaaaaccttgtaaagaaaataaaaatcgtgttyccaggtcatcttcaaaactgcaatcctcattaattcctaaaactaaattccaaaaaattgtttgaaaagacagacctaaaatagtctcaatggtaagacaaggaagacactagtatttttgtttgttttctgacaaaccaccgtatttcatgtgcatcaaagccttctgtgtttttcttgctatatctgccccatgaagggacagtcattagtagtaaaaaaaccacagcttggggaaggatatgcatagcagtcaaatattccagtaaagtatttccttttgattccactctaacccaatctaccatcatgactcagatttgtttgccttcagagtcaatgacaattagccataggtagtacagaaagaaaagaatataaaaataaaatataaaataaataagtatatatttcaatatacagagtatgttatgtataatttgcatgactat

SEQ ID NO: 115947 - DNA, 558 bp, Homo sapiens
ctggggcactgtgtcctcacaccgaggctacagctggaccctgtcacttcccgcttttgcatttataacagtcccaactgcagcagtggacaccctgccatcagaatctgctggggagcttttccagagtgtgggtgtcagtcccaccctggcctactggatcggaacccaaaaccaaaagccctgcctcagcgagcaagttcaaagtcattggcccaaaggaaaaactccaagtcctttgttggtcattcaggtaccttgagattttggcttgcatcttcatctccagcctgatcccttgccccaatcccagaccccacaccccatgttccatttgccctaaactcctgatgcctgggtcacacccacatttttgctcayactctccttgctgtccagaacatcttctccccagcaactttccttgtggcaaactcctattcacattccaaggcactactcaaaggtcacctcctctgtgcagccctccctgattgctcccacagccacactcctacctcacattcattttcagtgctttccactttgttttgtgcc

SEQ ID NO: 115948 - DNA, 545 bp, Homo sapiens
cggaaattatttcctctctggggcagttgaaccagcataacaaaatcatgaatgctctgactgggttagcttagttgtttcagaaacaatgctaatgatgtcagggttgccgggtcaaaccccatatgggctcattgtctttggagagggaaacatagtgttctgtggcctgggtcactttgggagcaaatgtctctggtcgaacaggggcctrgcaccaggattcaccaaaacccatcagcagttcaggacaagttatctccatctaattatacccaataagtatgatctctgaaagaaagacacaggttataatagaatcttgtcagcccagagtacaaacagacagggaaatggtctgacttttatcttatgtcgccaagcagtcacagaagagacagctaggaaatcaggaccggaagcataattgttttagggagagaaggtctctcaaaaataaagattgatcgaacaatcacaaatgacttcaatgggaagaacaaggagaacaaggtaagaaggcatagagagctccaaagacagga

SEQ ID NO: 115949 - DNA, 586 bp, Homo sapiens
gtcctctctgcagggccaacagatcacctccctatgtcaatcttagaatgagtaaatcctgacatctgggatgacagcgtgctcagaagggctctttgagctcaacccatgctcattaaatgaaaggaccccaataggtaccccagtgaaaattgatatcccctaaagttagaagctaagaaaggattggagcccttaatttctaaattcttatagcatggttactagtgtccttccaatcaccttgtaatacccctcttctaccagtcttaaaaccaaatggggaatatcaactggcacaacacttgagaatcataaacgaggcagaaccctctttacttcttactagctaatacttataccttgttaaccaaattccagggcattgtgaatggtttagtgtaccagaccttaaagatgctgtctttttgcatcrcagtgcacttgtcctttcagtttctatttgcctttgaatggacaaatataggaaacacccatgaatagtattgccccagggctttcaagatagccctcacctgtttgcaccagccccaggcaaagatctttgagaattacaacttagtta

SEQ ID NO: 115950 - DNA, 592 bp, Homo sapiens
tgccaaatgcagtatgtagaataagtgcatctttaaaagcactaaacagaaatatcacattccaaccagatatatcttatgaaatttcctgacattatagaaaaatgattatataaaaatgacgaagacctatttattcatccttttttatttgaaaattagtacttgatttctgtatgtgccctgccataggttttgatgttgccatctggcagaatctgcttattatcttcattatgaacctagactttctttttatgctggtktctatttcccattaaatcaaaagttatgtcaatttcaaattaatgagaagtaagtataaagatggaaacttcccctcaatattactatttttatgcttttggagcataatatttagcactgctcaaatctggttgtaaataatttctttcattgatgagatgaactgtctttactttttctcctgttactatatttactgtttcccttttgtttgatgtcattggaaaatgaaattgccagatggtttgcaaagagaagtgagcaacaactctttttttaaaaaaaagtttctttatatacaaataagtaagcaagcaagcaaaaa

SEQ ID NO: 115951 - DNA, 587 bp, Homo sapiens
agtcgctgaaggtacatgagaaatggaaatttaattggcataactaggaggatctccttgaaggctgagaagattttcctcggccggttgtttccacacaaacaatgttggccagggagtgattccactttcatgtctcttccctccacagaggggaagcgccagccactgcctgtatgcctttagggacaggccctactcttctctgccaagatcaaggagtccagtggccactcagggggtattgtctctttgccagcgctagtggtctgcatgtgtcaactagatcttcaccaaggtttatagatgccttgctcaaaaacttgccttgatgttaaaacagatggactgagtactttctcctgcaagaagcctgtatggatgtctcaatacctcttctcttcctccctctcttcctccctcccactattccctccttccctccattacctcctccccttcttcccctcccttcctatctcctttcttctctgcttccctccctctcttcctccctcacttcatttccttsttcccttcttctgcctccttacctccccgctccctatcttctttcttccttccct

SEQ ID NO: 115952 - DNA, 521 bp, Homo sapiens
tcaccaaagttgagataaattcaccatgccttctttaaaaagcgtgacagcaaggcattcttcctgtaggagtcagactgtaaaaggtgatttccttttactccagttggtttaagcctgtaaaaagcattaagtgaaaaatmtgatatatttttagggcatttattgcattactaagttatactttcagttctcagtgaaaggtttattgagaacataaactttgaagaggtttgttcaggattaaagatatattttttcttctcttttcatgaaataatattatacaaaattatgcctttcaagagctatttttagtgctacttatagttgaaggacatactgttccaaaaccttcctctgatgatgagatttgtaacttctctagggtttcagaagaatgaaaggctaggtagccaccatttctgttaactccatttaccataatgcagatgcgccaataagttacactttttaccagagcctctgatggtgaaaatgtttttcatactgcttggata

SEQ ID NO: 115953 - DNA, 630 bp, Homo sapiens
gtactttttagctcgacaaaagaaatgtatctttcaaaataactgtctcttgaaggtagaaaacacagtctatctcagttgaaacagctcattgtgttaaatcacttgtcaacttcagcatggctccactgtggtatataatttagctgagtgtcccatcattgcccagcatggatggtactaccaatgggtactatcacagcacatttatgaagttctgagtattaaaaagaacccagatgccaactgctttaaaatgtaaacaatacgaatttgcttgtgacagaataaactcaagttgaaatagtaaatccacaagtaattgggacaaaatgtataaaaaaagtaaactaaatgttgtttggcatttcactgaaatttctcatttagctgtcatggatacatactatattttagatttgtgggagttcatttcttcggaaaacagccatgcatcacatttacataaaaaacgtacrattctttgtgatttcatggatgacttctcaaagcagcatgtatattaatgtaacacaaaaatatgagtaaattgtgttgtaggaaatttttcaaggaatatgtttatgctcagtgcctgactggatacaacattttaaaattttttattaa

SEQ ID NO: 115954 - DNA, 522 bp, Homo sapiens
aatatatatctgattcactaatatactaattcactatttattattgaaaaaggtatattaccatcaggtcacaattaataatgacaagaataataattatactccatgtccaaggtcattctgtatccacaatgtcacaaaactgattaatttatttttaaactttgatatgtgaaaaaacagtcttttcattttaactcaacagatatttaacagaattagattttttattagaagtttacatgtcagaaaaatttcttctttaatttattgaaacctttcagcaggaaacaaagcatattttgtaggttgtcagcaggaaaataattagtgkgtaagatgatgacttcataacctgcaattacgcacataaatgaattagaacaaaatgaagtattatcaatcttaatgcacattacagaattgagagaaacattagtaccatgacagcaaattacttaagaatcagtgatgttagatttactaagatatactttaataatggtcaccatagaatgaatt

SEQ ID NO: 115955 - DNA, 543 bp, Homo sapiens
atcaagtattttctgatattaccccacccaagtagatttcagacatcctggctttcatatacacaaaaaatgtaagttttatttcagggcaggaatcatgacttgttttcttttcyaactagagcggttcacccagtgctaatgacacagtacgaaattaacatttgttgcagaagtgatggaagctgaagcacttggggttacaatacttcagtgaatgttaccctgctgggattccaacttacatgtgtcacacttcaaagcttgtgtcactttggtatagattatatcattctgctacttttctggcaatggacgagtattctaatcttttcatttaataaaggaatatgatacaaaactcaacttgctccataaagaagttaaacaaattaactgagttgttacaaattgtactgtggttatgcatacaacagtcagaataaaacctgggtctgacctgtaaaaaaatgtgtaaaaaaagaccagtgggaatttttgtgtttgaatttactgaattcattgaaaataaataatggtatt

SEQ ID NO: 115956 - DNA, 543 bp, Homo sapiens
atcaagtattttctgatattaccccacccaagtagatttcagacatcctggctttcatatacacaaaaaatgtaagttttatttcagggcaggaatcatgacttgttttcttttctaactagagcggttcacccagtgctaatgacacagtacgaaattaacatttgttgcagaagtgatggaagctgaagcacttggggttacaatacttcagtgaatgttacmctgctgggattccaacttacatgtgtcacacttcaaagcttgtgtcactttggtatagattatatcattctgctacttttctggcaatggacgagtattctaatcttttcatttaataaaggaatatgatacaaaactcaacttgctccataaagaagttaaacaaattaactgagttgttacaaattgtactgtggttatgcatacaacagtcagaataaaacctgggtctgacctgtaaaaaaatgtgtaaaaaaagaccagtgggaatttttgtgtttgaatttactgaattcattgaaaataaataatggtatt

SEQ ID NO: 115957 - DNA, 543 bp, Homo sapiens
atcaagtattttctgatattaccccacccaagtagatttcagacatcctggctttcatatacacaaaaaatgtaagttttatttcagggcaggaatcatgacttgttttcttttctaactagagcggttcacccagtgctaatgacacagtacgaaattaacatttgttgcagaagtgatggaagctgaagcacttggggttacaatacttcagtgaatgttaccctgctgggattccaacttacatgtgtcacacttcaaagcttgtgtcactttggtatagattatatcattctgctacttttctggcaatggacgagtattctaatcttttcatttaataaaggaatatgatacaaaactcaacttgctccataaagaagttaaacaaattaactgagttgttacaaattgtactgtggttatgcatacaacagtcagaataaaaccygggtctgacctgtaaaaaaatgtgtaaaaaaagaccagtgggaatttttgtgtttgaatttactgaattcattgaaaataaataatggtatt

SEQ ID NO: 115958 - DNA, 539 bp, Homo sapiens
tacttttcagtctgtgaatatgaatgaatacagtgtgcttattttcttgytctttattatttactatgttaaaactcactaaacattagcagtgaaaactacgttaataacccatgcgtgcattatggtaaccacaaacccattccagtacaatgagatgaatgagttcagtgagaatgagaaacagacacagcttggcaacaattgagaatattaccattgtcttgcctgccatttcccattgagatgacttaggttgaagttgaagtctgagttgtgtgcattccaagactgaaatattttgcttttccaagtaaatagacttttacagcctctgcttctattacaaatcttaggacaatgagatgcctgaaaagcaatttgggaaggcagtttccttaaggttaccaaaaaattgcattgcttaacttgaggaattttgtattttcatagactatatatgtgggacattcatagataaaagtttttttgtgaccctagcatcatattaatataatgcagataaaatcatgtttcaa

SEQ ID NO: 115959 - DNA, 511 bp, Homo sapiens
gtataatgtggaaccttagtctgaggaaaggaacagtaatttaaaaaaatttaaataatattatattcagttttaaactcaattttgcattacatattttcccccaatttatgccaatgcaatgcatgaattcattaaaattgacaattttagaagcttgttactgggctttcttactatttctctgtacagtctctctattcataatgtatccatgtcaattgctttaaatatcatctacatactggaaattccaaaaattactgatcagtccagtgatgctccttccctgtgttgcaaatccaacagcctactcagcatctacacaccaaggtcctgtaagttsttgaaagtaacatttccaaaccaaactactgattgttatattagttttctaaggctgccatcacaaaatactacagattgtgtaacaaaaatatatttgtatatatataacaaaaatatattttcccccagttctggagactgcaagtctatgttcaaggtgctg

SEQ ID NO: 115960 - DNA, 591 bp, Homo sapiens
atgtataatgtggaaccttagtctgaggaaaggaacagtaatttaaaaaaatttaaataatattatattcagttttaaactcaattttgcattacatattttcccccaatttatgccaatgcaatgcatgaattcattaaaattgacaattttagaagcttgttactgggctttcttactatttctctgtacagtctctctattcataatgtatccatgtcaattgctttaaatatcatctacatactggaaattccaaaaattactgatcagtccagtgatgctccttccctgtgttgcaaatccaacagcctactcagcatctacacaccaaggtcctgtaagttcttgaaagtaacatttccaaaccaaactactgattgttatattagttttctaaggctgccatcacaaaatactacagattgtgtaacaaaaatatatttgtatatatataacaaaaatatattttcccccagttctggagactgcaagtctatgttcaaggtgctggtgtggttggttttctcyggggcctctcttcttggcctgaggatggcttccctctggctgcctcttcatatggtcatc

SEQ ID NO: 115961 - DNA, 620 bp, Homo sapiens
tatgtgattattagagaatatgtttataagtggtgtttttaaaacaaaaacaaatttatatttctttgtattttagttcattaagatcagaatcagaggaagaaggcagtaaaactgtgtttttatagacgaataaagtaagttaaaaaaacaccatacagaagttgtcattattctcctgagatttaaagtggtgaagcaatagtgacttctctctagagcaagcacaaatgacataatagtttcaatccagaattctgagttattcacgtactaaaagacatcttaagttctacagtgaactaaagaaacaatcttttattattaacagcttttyagaaaattatacctttggattactttagaaaaatgtaaattatctaatttttaaagcattaaaatattatgtaatattatttaattatatattttatgtcagtactactatttgaactggcttacaatatgaggccttggaatttcctactatcctttattacagaatcactccaatgcccacagccccacagacacttggaaagagccaccaaattgcagtactgaggtcactggagaaagcagccagcgtcaatgttgcatgtccagccaattcaccccaa

SEQ ID NO: 115962 - DNA, 537 bp, Homo sapiens
tctttgggggtttctgtctctggtttctccagatatttgccttcttggagtcaggtgagtggagggtaagtccttctcatccttctctccataaaccaacaaatttctgttcatgacaaaagcaggaggtctatcatcctctaaatccagattgtagttattaagrcctgggcttgacttcttccattgcactctcaacttttcaaaagatttgaaagtaccctttacctggatcgaaggggtactgtacagttcatagttccaggatagttcatagctttggaaagatttttataatttcatgagaaataaaaatcagaaatgtcattttcaaatacaaatgataaaacatttccatagccagagttaaaatacttttggcttaactcttcagtttgtactccagtttgagtaattaattgaatgtattcctgttaagttaaagttcagtattccataaagtagaagataaaaaaatataatcccacctaaccttctattttaaaagttctttattttaaattacaaattgtaaga

SEQ ID NO: 115963 - DNA, 589 bp, Homo sapiens
gttttttcaaaacttttggtaatgtatattttctaaactatcaatatacgttattggcagtttagaaaaacctctttcagatatatatatattatatatatatattatacacacacacatatatatgtacttttcacatatataatcaaccatgctagaggaagtattgagttatcctttcattctctctgttgcaaacataacaaaaattgttttcatttgaagcatatgcaggtcaaaaaatgtaagaaacagtgtgtgtgtgtgtrtatatatatatatatatatataggtatgtcaggtagttaataaaatattatgttatattcatgaatttgtgatgattatgatttgtcagtttttttaagttagtaatttttgtagtttcttttttattctaaataattactttatacctaacttttaaatatatgacttagaggaaaggggtttgagggggaaggacagatatctaaattgtataagctttagcctccgcagaatctagaatcactcccattttgaaattgaacgtcagttttgtttgctcttttttgttgttgtttcaagatggcagattagaggcttt

SEQ ID NO: 115964 - DNA, 580 bp, Homo sapiens
aaaaatgaaaaactttaaaatgccagttagcatacaaataggcacatcaatcagtggaacaaaatagagagccctaaaattaacccacatatttactgtcagttggttttcaacaaagtggccaagaatatacaataggttaaaaaaaaacaaaaaaaacaaaaaaaaaaaccagtctcttcaataaaattattgacaaaactgggtatccacctgcagaagaataaaaccggccccttttctcacaccacatgcaaaaatcaactgaaaaaatcaattaaagacttaaatgtarcacttgaaactgtaagactactagaagaaaacaagggtgaataactggatggcaacggcctgagcaatgatttttttggatttgactccaaaagctcaggcaacaaaaataaaactagaaaaatggggttagatcaaacaaaaacgcttctgcacaacaaagtaaaaaattaacagagtgaaaagacaacctgggaacctttggattgggagaaaatatttgcaagccatgtatgtaacaaggagttaaaaccaaacatatacatgaaactaaaacaactcaata

SEQ ID NO: 115965 - DNA, 373 bp, Homo sapiens
gaaaaaaatcatgaaagttcctcaaaacattaaaagcaatactactatatcacccacaatcccagtactgggtgtatatccaaagaacatgaaatcaatatgtcaaagctatatctgccctcccatgctcattacattattattcacaataacccagatatggaatcaacctgtgttcattaactgggaataaagtaaatgtgttaygtatacacaatagaatactattcagcctcataaaagaaggaaatcttgccatgtgtgataagccagatgaacctgaaagacattatgctaagtgaattaagccagacacagagagacaaatacgacatgatctcacttacaagtggaatctaaaagagttgaattc

SEQ ID NO: 115966 - DNA, 591 bp, Homo sapiens
cactatcacacacactcccactattctccaaggcaccattagctctcacccaggtaagagtgatagcctcctttctcagccaggttacagtgacagcctcctgctgtcattattgccttccatagtctcactgaaacacagcagccaaagtgattctttgaacgtgtcaatgagatcgagtcactgctctgctaaatactctccagtggctcctcatctgattcagaggaaagccagtggttttcaatggcctaatattttctgcacattccaagttccagtcaaaactctgagctcatccaccacactgtcacracacactacttccagttactcaaatacgccagtgtgctcatgtctcagggtattactactgttccctctttttgaaacactgtgcccaagtgtcattgtctcaattcctatcctggtttcttaaacttaagaggaaaaaaataaggaaactcccttatgtcctcctctgactagtgatcatattttagtttccccggcctgtctcttctgctaatattccattttctgaacttacttatgtttaccctctttatcttcctattaatagataatgag

SEQ ID NO: 115967 - DNA, 560 bp, Homo sapiens
caatttagtgacaataatgttagcaattttgctctgtaactgatcactagcccacatctctggttactgtgaagatccgctggtagagtcatcaggcatcggtcagaaacacgtaagatagtaaaaggcttttctgtggctaagagattcatctacatgagtggtaagcccatcctattaataatcctgtcaaactagagacaaaccaagtgaatgtaaatgcatcttaggaaaggcaaaggcagggacatattctgcctgttttacctttgatgagctgacttcaccatttttctaacatgaaaaatccttgcatgtttctagttcctaacatctggagaatggcagggggtgtactgtgccgtgttctgcatgtgttawaacctaacgtgttcatcataagtggggtgctcggttaaaatgaattttaagaaaagttcaaaaaattggaagactttagaagattcattttcgaagagttaacaggtacacatgatacatatttcaaatggtatgaaagtgaatacaatgaaagcaagcaggaagacttgattggaagc

SEQ ID NO: 115968 - DNA, 534 bp, Homo sapiens
tgagaccaccttgggcaacaaagtgacacctatcactacaaaaataaaaaattagccagatatagtggctcatgactacagtcccagctacttaggaggctgaggcaggaggatcacttgagcttagcagtttgaggctgtaatgagctatgattgtgtcactgcactccatcttgggtgacagagtgaragactgcttcacacacagacacacacacacacacacacacacacacacacacacacacacacaaataggtattgtcagggtaatggatgtgactgctataaagggtgatcaggacccaatgagagacctgtgtagcttaaaggattgagtaattatttaaagacatgttgaagagtgtggggggagatgtcctgttttgttggggtctgagaatgactgagatctgtgaccaattaatttcaagatgctcttcagatatccaagagcaatattgactgttaagtaaaagttgaatataagattctggatttcgtagagaaattcataagtcttggtttgagata

SEQ ID NO: 115969 - DNA, 578 bp, Homo sapiens
aatgttcagtcttttttttttctttttagtcacctgcctttttgccagtcatactaagttgtataaaagttctttgtcataacataacccataaatatccctggaggtttgcaggggcacattgtcaatgcacaatatctgaaaataaaatagatgtttgatatgccattttaatttttaaccttccaaaatcttacacacacacacacacacacacacacactcacacacgtcaataaggaaatgcaaatgacttggccactaatctacttctgctaattagactctgcttaattgatcctatactttctattaagaaaactaagaaatattttctattttgaaacatccactagatattagygtatttcttcagtttttattttatgcagattttctggtttgttaaaatgtcactggtttatttttctctgagggattttgatctgtgtctttgaaggccttctctaatcttccactttttggataggtgatatttgaattaatgttactttcctgaaccctgagtccatcattgtaaagggtctttaattcaacccttaaaattgcaaaaaata

SEQ ID NO: 115970 - DNA, 578 bp, Homo sapiens
aatgttcagtcttttttttttctttttagtcacctgcctttttgccagtcatactaagttgtataaaagttctttgtcataacataacccataaatatccctggaggtttgcaggggcacattgtcaatgcacaatatctgaaaataaaatagatgtttgatatgccattttaatttttaaccttccaaaatcttacacacacacacacacacacacacacactcacacacgtcaataaggaaatgcaaatgacttggccactaatctacttctgctaattagactctgcttaattgatcctatactttctattaagaaaactaagaaatattttctattttgaaacatccactagatattagcgtatttcttcagtttttattttatgcagattttctgrtttgttaaaatgtcactggtttatttttctctgagggattttgatctgtgtctttgaaggccttctctaatcttccactttttggataggtgatatttgaattaatgttactttcctgaaccctgagtccatcattgtaaagggtctttaattcaacccttaaaattgcaaaaaata

SEQ ID NO: 115971 - DNA, 552 bp, Homo sapiens
gtgtttttgatgatttttaagccaaatgtgagttctctctaaaactctgtcttaatgtacttattacacctaacagtttcaacactaaaattaacttatgttcacatttgtctttttctgatagattgtaagctccccaagggaaaaattcatgtataagctaaacttgcagctcccaaagtgacttgtacatagtgaacactcaatgcatatttgagcaatgaatcaatgaataaataaatgagtgaataacattgatagtcatgatgaaaaaacaaattattttctgtcacccttaaaatgaatgcatttcattatttcctctgaagaacaaaaggaaaatttccagtgttagtwttctctagaactagatttaatcacagcagatttatgcactgagctgagtagtaaatccgttttagtattgatcctgtttagaatagtgagtgactttggacaatttcaatcttgtaaagtagaacatttagcaatgacatgtcagaaaggcctatgctctattagaaatagcagcagatttattccagcatttat

SEQ ID NO: 115972 - DNA, 368 bp, Homo sapiens
taaacagatacaaaaagaaatatgtggacttgccttatctatgctcacctccagacttctttctgctaatggggtttcctctacctgaattccatttccaccactctctctgcacgtccaaattctactgagccttcaaggtctttgacttccccatgtcaccccctccaggaaggctttgttgatgtctactgccttggtctcccaccagcactctctttgtcctttcttgtggctgccttttatttccagagtgtgtgcatytgttctcgagtagtctttaaactccttgagggtaggcagtgaggaataaggtaaagaacacaggtatgtgcatcagactgactagaggttcaatcctggccctg

SEQ ID NO: 115973 - DNA, 577 bp, Homo sapiens
accacgcccggctaattttttgtattcatttccagtgattttatccatctaactccacctcctttatttttacattaaaactgtctttttttttttttttttttttgaggccagggtctcattttgtctctccaggctggagtgcagtggtgtgatctctgttcactgcaacttctgcctccctggttcaagcaattctcttgccttagcctcctgagtagctgggattacaggtgcccaccaccatgcctggctaatatttttatatttttagtagagacagagttttgccatgttggccaagctggtctcaaactcctgacctcaggtgatcctcccacttcagcctcccagaatgctaggattacaggcatgagacaccatgcacagccaaaatctgtcatttttatgaatgttgggaaaggaggaggcaaaaaagaagtgcattcaatccacttttgcaagctgaaagctgatgtgctttactgagcrataaagttggtggaattatagtcaccaaaacaggaatattacctaaaggtaggtacaacttttgtgcacatgaatatcacaaaaa

SEQ ID NO: 115974 - DNA, 645 bp, Homo sapiens
tctctgtactatatggtaacatgctttggctgatttcagagccacagaatcttaaagtgtgaaagtgatttgctacttagggctgaatccccagggttcastcattcagcattacattagaaaatccattagaaaataaatgataggaaataatttagatgaatgaggttggaattatgtggttgcccacttgatttaaaactcatcttacgaattaaaaatatataccccatcagcttatagggcatgagactatgaacccctttatgtcagtagatttctgctgtttgtctttgtaacccttgattgttagatgaagaattaagaaataatacttactgtaagcctactgtactgttttaaagatttggacaaggcttcatgaagaaggtcatatttgagcttgaacttaaaaggtgcatatgagttcactatacagtaaagagacaaaggaatgagccagctaaagagaacagtatctgcaaaggcacagaggtttgaaggtggtaaatttggaatggcaagtggttcacagtggctgcaagttaaggtgactgtgaaagactggccagcaataaaggtgggcagagaggaagcagctagatcatgaagggcctgggaatatgaatatgcatgcataagtat

SEQ ID NO: 115975 - DNA, 645 bp, Homo sapiens
tctctgtactatatggtaacatgctttggctgatttcagagccacagaatcttaaagtgtgaaagtgatttgctacttagggctgaatccccagggttcactcattcagcattacattagaaaatccattagaaaataaatgataggaaataatttagatgaatgaggttggaattatgtggttgcccacttgatttaaaactcatcttacgaattaaaaatatataccccatcagcttatagggcatgagactatgaacccctttatgtcagtagatttctgctgttygtctttgtaacccttgattgttagatgaagaattaagaaataatacttactgtaagcctactgtactgttttaaagatttggacaaggcttcatgaagaaggtcatatttgagcttgaacttaaaaggtgcatatgagttcactatacagtaaagagacaaaggaatgagccagctaaagagaacagtatctgcaaaggcacagaggtttgaaggtggtaaatttggaatggcaagtggttcacagtggctgcaagttaaggtgactgtgaaagactggccagcaataaaggtgggcagagaggaagcagctagatcatgaagggcctgggaatatgaatatgcatgcataagtat

SEQ ID NO: 115976 - DNA, 557 bp, Homo sapiens
tgataaaaagttttgggagaacactaaaacatggtcaggagagtagggtgtctgatgacaagaacgaggagtctaatgttaaacagggtggcatttgaggaaaactggaagggagttggggagtgagtagtgcagattggttagaggagagaggaagggaattttgagaaaaattcttcatcttttttagcagggagtctatcaatgctatttaaagttcaaaaaaatcaagacattgtgtgtgtgtatgtacacacacacatatatatgtatataaatcttggagttatgtaaccaccaaaaaagtcaaaaatagaagtgctacaaaaagacaacttctggtaagttgagcctgtcagtgaaagggagacttttattttttatttttatatttccttccttctgcaaggtttgaattgttttgaaaatcacattttaaatggtcacattaggacacaagtaggccaggaaggagtgacattattaggtagagaaccttgaaaccactgtaattatatcttgaaaagataaatcrtttgcacaatttagtgcttatt

SEQ ID NO: 115977 - DNA, 549 bp, Homo sapiens
cttaacacattctcagaagactctaacatgagaaacttaagtgttcttatgtgaacaggatagagaaatgtaaaaaaaaaaaaaaaaagtagggaaaacaagaatgaaaaatagtaaatatggacaaaaagtaaaaaagtcaaactgtgggatracagtgactaacagaagtctgggtatcaggttataatcaagcgtcatataacaaataaggtgttctaaatgagggcatgagggcagaaataataagatctatcagtcaccaaattatacttcattgtcaataaatctgtgctcagaacaattaaatcagttttcttctattattaaatcaatgagttatatatattagccccaaacatcatgggaaaactttgatggatatacccttcaagtctcttgcccttccactaagtatacctaaattatcaaactgactaataaatacttaccccgttcccactttgtttctaaaccctgccttttttcagaagaacgggatgtggaatgttcagacaagagatctagttttacatgttagtgtgtaaa

SEQ ID NO: 115978 - DNA, 549 bp, Homo sapiens
cttaacacattctcagaagactctaacatgagaaacttaagtgttcttatgtgaacaggatagagaaatgtaaaaaaaaaaaaaaaaagtagggaaaacaagaatgaaaaatagtaaatatggacaaaaagtaaaaaagtcaaactgtgggataacagtgactaacagaagtctgggtatcaggttataatcaagcgtcatataacaaataaggtgttctaaatgagggcatgagggcagaaatrataagatctatcagtcaccaaattatacttcattgtcaataaatctgtgctcagaacaattaaatcagttttcttctattattaaatcaatgagttatatatattagccccaaacatcatgggaaaactttgatggatatacccttcaagtctcttgcccttccactaagtatacctaaattatcaaactgactaataaatacttaccccgttcccactttgtttctaaaccctgccttttttcagaagaacgggatgtggaatgttcagacaagagatctagttttacatgttagtgtgtaaa

SEQ ID NO: 115979 - DNA, 549 bp, Homo sapiens
cttaacacattctcagaagactctaacatgagaaacttaagtgttcttatgtgaacaggatagagaaatgtaaaaaaaaaaaaaaaaagtagggaaaacaagaatgaaaaatagtaaatatggacaaaaagtaaaaaagtcaaactgtgggataacagtgactaacagaagtctgggtatcaggttataatcaagcgtcatataacaaataaggtgttctaaatgagggcatgagggcagaaataataagatctatcagtcaccaaattatacttcattgtcaataaatctgtgctcagaacaattaaatcagttttcttctattattaaatcaatgagttatatatattagccccaaacatcatgggaaaactttgatggatatacccttcaagtctcttgcccttccactaagtatacctaaattatcaaactgactaataaatacttaccccgttcccactttgtttctaaaccctgccttttttcagaagaaygggatgtggaatgttcagacaagagatctagttttacatgttagtgtgtaaa

SEQ ID NO: 115980 - DNA, 539 bp, Homo sapiens
ataaaaccagtgctacagaatccaagggacctgagttccctgtgtttctgccattgacttgatatattactagacccaattccttaacctccttaagtcttggtttcctcatatttaaaatggaagtttattttaaatttctatccaaagaaagacacagggtcattgaaaagattaactatatatatatatakagagagagagagagagagagaaagagagagggagagagagagagagagagagagagaagagaagagagagagaagagagcatatagttgctcaataaatgctattacctcctgcttgtgaaactgcaatatactctggttccactttgcaaccagtccttccaaagttaccacttccagaggctgtgtgagcagccgttgggaagtcaatcctaaaatgtgagccaccataacctgtggtcccaatgcatgcccagaatcaggaaaatctacaatacataatttccttaccatgtacaataaactttatcattccaaaacaatgtctaaattattattattttac

SEQ ID NO: 115981 - DNA, 607 bp, Homo sapiens
tttcccctgacatgtgtagattttagattctacctcctgcataagtttgtgatcctcattaccctgtgagagtggatattcctagccctgtcttatatccctaatctcattttatagatagagacacaaagggttagaaaagtcaaatgacttgtacaagatcacgcaggaagctagtggtagagagacaactggaactacaccagccctcagatgcctgtgattttggtttgtttccttaaagcatgcttgggaagcttctctttattttccaagagaggggagaccattctttcctgtgaacccactgagttttgccttgtttatagcacacttgcagttttcttgtcatggtttatttgcatgcttatttccttsatggaccatcagctcctcaagagagcagactttccttgtgcctgcctagcttggtacctgatccatagtagatgctcaataaataactattgagtggatgaaaaaaattagactaagttgaacctgactttccagtgcaagcttctgtgtagtaagaaacctaaatttctgattcattgcttgatatccaacttattatactaatagttgtgtctaaaaatgctatatg

SEQ ID NO: 115982 - DNA, 717 bp, Homo sapiens
gaatgctgggagtttgcatgttaaattattcaagacagattgtcaaggtgtgagcaccaaggtgggacctggaggaaggaagatgaggcaagttcaaaagagagagaggcccttttcctctgtggaaattcaggaatgaataatcccactctaatctgactttctgtgggccttccaatcatttgctctgtgtgtattaaatttatcatcactggcatagctggaaaatggaggtcaaatttcattttggcccacaatgtgataaaaatgacctgcaaaaggtagatgrcaggttgttatttcatgccctggaaaatagcaaagatcagatagatagtggttcctcactgtcctccttgatccccccttcttgggtggctaatactaactttccttagtaatgcatcataaatgcacatcctgatttgttagaagggtggtcaaggtttaaaacaagaacaatctatttctaactggcaatttccatcagtacaggttgactaggcacctttcaccgtgtaagttttttatggaaccactgacaagtcataaaaatatccagtgctcaagcatgacattcaaacacactgtctcttctgcttatagttcattgactcccagaagtcatctatttatagcaattaatgatttctaagcaattagatccccctgtttcaacaactatcatgttgtaggataaatccttcctcacagaaa

SEQ ID NO: 115983 - DNA, 366 bp, Homo sapiens
agatgtaaggaaagtcgacatataatttcacacaatgaaaaaaaagattcatatgttgggattggaacagtggatcctgggaaatggatatctgaaatgatcaatgatcatgtccatatagcagttgccagcagcggtattacaatccagatcctgaaacttggtctgttttgtatgtacgccatgttcattaaacccaggagtctcaattragccaggatcctcaaggaggactaatgtgattcctacctccgtggggcccttagctgctgcaagaagtagatgcaaatattctctggaagaaggttttcccatttaggtctgcaagtctcccaaaggaaggataaagtggtcaatccacgttca

SEQ ID NO: 115984 - DNA, 583 bp, Homo sapiens
agaaagaatcataatctaagtgttttgggaaacctcacagtgttcataggaatagttaaaatgttatttgaattgttaatgtaaatgtatatggtgaacttttgaaagtaacttcctgtaaagattggcaaacattttcggtaaatgtttagactttgacagtcagatctctttcttagctactcaactatgccattgttayttgaaagcagacagacacaatatgtaagcaaacagatatggttatgctttaataaaacttgacttacaaaaatatatattaagccacatttgcctccctaggaaatagattttatatctctcctctagaaaataaaatagacaaaccaataaagagagaataaacaagaaagcatgaaataagaaaattaaaattataatagtaataagagctccatcaatgcaacagaaggcacgagcattaaaaaacacaagcacagaaatgtaagactaatggacattataaagtaagttggtgaaagtaagccaatgtattaataaatgaaattaaaacttcttagttaaaatacagataacaaaaaataggacgcagaaaaacaac

SEQ ID NO: 115985 - DNA, 588 bp, Homo sapiens
tcgggtagggagatgtcatattgtggaggggggacatgtgaaattgatcttaaaaatcaagaaaagatttagttttgtttgtttgtttttgagacagagtcttgctctgttacccaggctggagcgcaatggcgccgtctcggctcactgcaacctccacctcctgggttcaagtgattctcctgcctcagcctcctgagtagctgagactacaggtgcgtgccaccacacctggctagtttctgtatttttagtagagacagggtttcactatgttggccaggctggtctcgaactcctgacctcatgaactccctgcctcggcctcccaaagggctgggattacaggcgtgagccatcgtgcccggccaagatttacaattttaaaaccttgctttctgagtgataaaccacaagttaaagggttatattgaaaaytttccatcctgagaaaacatttttgttatcaaagactgaaacaatagacccaggctggggtgcctaacttagatggggtgagaaaaaagaagacttgagaatccttcccagagcagggctcagtttttatagataatatccatattattg

SEQ ID NO: 115986 - DNA, 539 bp, Homo sapiens
ctctggagaaaatctgccttatattcctttgcactaaggtgtggctgaattatgttctgcaggcagaagcatggcctcagaaatgaagyattaattttaataccattctgaagctggaacttttctgtagacatgagagcaaatggtttgaagtcccacatgtgcagactttctttgccttgcagggaagttcggacctttgccaacattgtaggattgattctgccctcctggtggcaatttcagaaaaggctgcaaggggcaatcccagggaaatagagaagcaaaccccagaggtacctccattgggggaatcatctccttccacttcccttatccaggttctctctaagtttgttccatcctagaaatcttagttttaggcacttttgcccctacaacaggctggcaaatatagtctcattaaggtccaaatttgcttttctctacggaacttaaggcagattaagagagatcttggcaagttttcaaatgaccctgacatttgcatatagaggctttccagaatttaacccaag

SEQ ID NO: 115987 - DNA, 539 bp, Homo sapiens
ctctggagaaaatctgccttatattcctttgcactaaggtgtggctgaattatgttctgcaggcagaagcatggcctcagaaatgaagtattaattttaataccattctgaagctggaacttttctgtagacatgagagcaaatggtttgaagtcccacatgtgcagactttctttgccttgcagggaagttcggacctttgccaacattgtaggattgattctgccctcctggtggcaatttcagaaaaggctgcaaggggcaatcccagggaaatagagaagcaaaccccagaggtacctccattgggggaatcatctccttccacttcccttatccaggttctctctaagtttgttccatcctagaaatcttagttttaggcacttttgcccctacaacaggctggcraatatagtctcattaaggtccaaatttgcttttctctacggaacttaaggcagattaagagagatcttggcaagttttcaaatgaccctgacatttgcatatagaggctttccagaatttaacccaag

SEQ ID NO: 115988 - DNA, 548 bp, Homo sapiens
ttctatgtgccagatattcttctacctctgaataatatagttttttattaaaaaacagctaaagcctcctctctcatgaagcttacagtaatgaagaatgagaaataatataagtaaataaattttaatgttgctattataaatgttttcccagaaaaaatgaaatgatacagytgagtgacaatttatattattctaataatttaagcttcttaaaatttgatctagctgatacagttgaaactcggcatttgttatgtatataagctgcatcccaaaaacaagtgttacatagggaagaataaaaacaatgagatgtttccaaagtattgtcagtttattaattaaatatttttgaattggtattaatacattatagtatgaactgcttattacaatttttttatttctaaaacagaggctgattttattaaataacattgagaaaaataatgtaactccactaatagtaattatgatgcttaatacttacttttggttttgccagaatagatttaaaatattgattgatggcacttttattaaat

SEQ ID NO: 115989 - DNA, 554 bp, Homo sapiens
gaaatattgggtaaaactatgaatttttattgatattgagcaattatgcagcaaaaagtttacacagtttttttctttcttttargaattgagtatctgcttatcaaaacctcattaccatttgatattattatctacattttttgaattattatctacatttactgaatttcatatgttttcagtaatagtgatattaaacttttttgtacatatttctttttttgtatttatgtctttgttgattaatagtttattaaattatattttctttttttaatcttattcataatattactttggaaatatatgtagatatcaacttttgttgcaatgttttccagtcaccattcatttaattattccacaaatatgtattagcataaactataagctacacagtgtcctactcctaatgacaaaaaacaatcggtagtaaaaagctaacaagctcccattttcattgagcctacagtctgggaggtggctataaattaaataattatagaggatgtatgcaaaattatgaatataagtgtttgatggtatttctg

SEQ ID NO: 115990 - DNA, 554 bp, Homo sapiens
gaaatattgggtaaaactatgaatttttattgatattgagcaattatgcagcaaaaagtttacacagtttttttctttcttttaggaattgagtatctgcttatcaaaacctcattaccatttgatattattatctacattttttgaattattatctacatttactgaatttcatatgttttcagtaatagtgatattaaacttttttgtacatatttctttttttgtatttatgtctttgttgattaatagtttattaaattatattttctttttttaatcttattcataatattactttggaaatatatgtagataycaacttttgttgcaatgttttccagtcaccattcatttaattattccacaaatatgtattagcataaactataagctacacagtgtcctactcctaatgacaaaaaacaatcggtagtaaaaagctaacaagctcccattttcattgagcctacagtctgggaggtggctataaattaaataattatagaggatgtatgcaaaattatgaatataagtgtttgatggtatttctg

SEQ ID NO: 115991 - DNA, 576 bp, Homo sapiens
cagaacccaactctccaggcaatataaagggtgaaagagtaaagccaggagacccataggaagaaaaaaaaaatcttagaagagagaaaaagagacagagagacaaagagggagtcaaagagacagagacagagagtcaaagagagagagagaaaaagagacagacagaagtagtaaagagaaagcaatgtaccctattcctttaaaagccagggtaaatttaaaacctataattgataattgaaagtcttctctgtgaccctataacactccaatactgcctgtaaagaagccagacgggtcacaccggtgagtgcaagaccttcgagctattaatcagatagtccaaactacccgccctgtcattatagtaatagacttaaaagatgccttctgggcttgtccgttagcagagracaactgggacctatttgcctttgagtgtgaagaccctcactccagtcaaaaatagcaatactgatagacattctgaccccaagggtttatggagtcttcaaatttatttagtcaaatattagaacaagtcatttaattagcaaaggtaaatggctaatt

SEQ ID NO: 115992 - DNA, 576 bp, Homo sapiens
cagaacccaactctccaggcaatataaagggtgaaagagtaaagccaggagacccataggaagaaaaaaaaaatcttagaagagagaaaaagagacagagagacaaagagggagtcaaagagacagagacagagagtcaaagagagagagagaaaaagagacagacagaagtagtaaagagaaagcaatgtaccctattcctttaaaagccagggtaaatttaaaacctataattgataattgaaagtcttctctgtgaccctataacactccaatactgcctgtaaagaagccagacgggtcacaccggtgagtgcaagaccttcgagctattaatcagatagtccaaactacccgccctgtcattatagtaatagacttaaaagatgccttctgggcttgtccgttagcagagaacaactgggacctatttgcctttgagtgtgaakaccctcactccagtcaaaaatagcaatactgatagacattctgaccccaagggtttatggagtcttcaaatttatttagtcaaatattagaacaagtcatttaattagcaaaggtaaatggctaatt

SEQ ID NO: 115993 - DNA, 412 bp, Homo sapiens
gaattcaataacattaaaaagatcttcattgtgaccaagtgggtcacatccttgaatctgagggattcaagcatggtttaacatatgcgaatcaatcaatgtgatacatyataataagagaataaaggacaaaaaccatatgatcatttcaattgatgctgaaaaagcatttgataaaattcaacattctttcatgataaaaacccttaaaaactgggtacagaaacaacatacgtcaacccaatgaaagccatcaatgacagatccaaagctagtatcatactgaacatggaaaaactgaaagtctttttcctctaagatctggaacaagacaggatgccctgttgaataaccactgttattcaacatagtactgaaggtcctcactagagcaatcagacaaaagaaaaaa

SEQ ID NO: 115994 - DNA, 406 bp, Homo sapiens
gtaacaaaatcctagtgaaactccaatccgtggatccatatttaaagaacaattctcagatgacatctgaaaactggcaaatttatgacctggccatcctatttaatatcaagacccacataagtacttccagtcactctctccctagcctacttcctccctattggattgatcrctttttaacaaactaattaaaactacagtttaattagttattcatagaaaataaacaatgagcatgtctaaccaatttattaactgactcaatgctagtactgaccatgtcaaataacagtttcttaagtaggtgagtgtggatatgggtgtgtagttttctacagcttcttaagtaggtgagtgtggatatgggtgtgtagttttctacagtttcttaagcaggtgagtg

SEQ ID NO: 115995 - DNA, 589 bp, Homo sapiens
tttctacctctttttacttgtactttctgagtaatttcctcagctatattttccaaatcttctattggtctttcagttctgccatagtatttcaaatttccaagagatttttttccttgtgaatatttctattttcatagaaatattttaacttctataaaatattttttctttgtatcactgtatattctctattttcttaaagttgtatttttttttccttgctgtttgtattgatctctttcataatacagattttcctaaaaagtctagtgattgttgacctggaagttccatgccagggggagcaggagttgaagaaaggttttttttgttttgttttgttttgttttytattattatactttaagttttagggtacacgtgcgcaacatgcaggtttgttacatatgtatacatgtgccatgttggtgtgctgcacccattaactcatcatttagcattaggtatatcacctaatgctatccctcccccctccccacaccccacaacagtccccagtgtgtgatgttccccttcctgtgtccatgtgtccatagaaaggtttttgatggttatctttattgtt

SEQ ID NO: 115996 - DNA, 581 bp, Homo sapiens
tcttttctttcacaaagcaatattccaattcagctaagagtatttttagcttttgtaatttccagtttttatttttcaaaatacactcgtgtaaacagagtggctctcattcatctctgagactccgtagcatgtacagtacagaaggacaataattcaagcctaagaacatctgtgtatcttaataagtaaatataaagcatttatgatttaatgacttccttctgtcttgaaatgataaaaacaaaaacaaagcagcaaaaaaaaaaaaaaaarttaaacacacgtacaaaaataaaacccgaatgtttaggacatctgtaagtaaaactcaagagaaaaggtactaattctataaatcatgaacaaataatagattctagttagctcagtaattacgtactgataaacacttgcatatgtatttctgtctacttgtttcacttaaagtatagtttactggtgattctgtttctttctgggtaatcatttccattgactgtggtcctcagatcacctcccccaagccccctcttgccatgaaatgtctgcatcacatcagtttaacacttggtaacata

SEQ ID NO: 115997 - DNA, 581 bp, Homo sapiens
tcttttctttcacaaagcaatattccaattcagctaagagtatttttagcttttgtaatttccagtttttatttttcaaaatacactcgtgtaaacagagtggctctcattcatctctgagactccgtagcatgtacagtacagaaggacaataattcaagcctaagaacatctgtgtatcttaataagtaaatataaagcatttatgatttaatgacttccttctgtcttgaaatgataaaaacaaaaacaaagcagcaaaaaaaaaaaaaaaaattaaacacacgtacaaaaataaaacccgaatgtttaggacatctgtaagtaaaactcaagagaaaaggtactaattctataaatcatgaacaaataatagattctagttagctcagtaattacgtactgataaacacttgcatatgtatttctgtctacttgtttcacttaaagtatagtttactggtgattctgtttctttctgggtaatcatttccattgactgtggtcctcagatcacctcccccaagccccctcttgscatgaaatgtctgcatcacatcagtttaacacttggtaacata

SEQ ID NO: 115998 - DNA, 604 bp, Homo sapiens
ataaacccttcattctctgattacctcctcttcttggtactttttcatcaagtctgttgtaattggtacaaatgaaaggcaaggaaatagagaatctatgccatattagcagtatactattcaccaaaatagtaatttttccctgtaataaaggataatttaattggtgtaggagctctccacccttgaayaaagtacaaataatattagaattaggagacatatattttaaaattgattctcttgtgttctttaattgcttaaagacaatatctgaaactaatgttcatctctctaacaaaaagaacaagtactcagaatactgatacattattaaccattattcagcttatgttatatattaatagcataattaaacacgtttattgtgattaagaggctctaagttgcctgtcacgctacagttaaaaaaatttgtttttgtagcaccacaactctttaaaaataaaactttttttgattataaaaacattacgtgtttgctacagaacaggatacacttgttaataagtcaaagaaaactctttcatcaaaaaaaccattatttttgtttttcctaacactttacttatgatcacacatg

SEQ ID NO: 115999 - DNA, 604 bp, Homo sapiens
ataaacccttcattctctgattacctcctcttcttggtactttttcatcaagtctgttgtaattggtacaaatgaaaggcaaggaaatagagaatctatgccatattagcagtatactattcaccaaaatagtaatttttccctgtaataaaggataatttaattggtgtaggagctctccacccttgaacaaagtacaaataatattagaattaggagacatatattttaaaattgattctcttgtgttctttaattgcttaaagacaatatctgaaactaatgttcatctctctaacaaaaagaacaagtactcagaatactgatacattattaaccattattcagcttatgttatatattaatagcataattaaacaygtttattgtgattaagaggctctaagttgcctgtcacgctacagttaaaaaaatttgtttttgtagcaccacaactctttaaaaataaaactttttttgattataaaaacattacgtgtttgctacagaacaggatacacttgttaataagtcaaagaaaactctttcatcaaaaaaaccattatttttgtttttcctaacactttacttatgatcacacatg

SEQ ID NO: 116000 - DNA, 519 bp, Homo sapiens
tccaggtaacagtttcttccacccctcactgactaacttctccagaaatgaaatggctatttaactacattcacaaaaatggagatcctccttttagcattttaaaagataaatccttagcctaataaggttctttgctcgtggttctttttcttacaacttcagtaagaatgggctttatgaaaaataagaaggcatattgtttaaaaagtgatgtttgggggctgataactttcattagttctcatgcacaacaattttgacggcattcagtcacaaagtaccatgcaaatgtttggattttagtaaatattgartataatgttaactgaaaaccgaattcctcacttttcatttgattgatctgtcttctataaacacaacttgggtacaatgtatatttttgcttcaggaacaccaatacagtataaaaattatgaaaaattagaagttagtataaaatgtggacatcatcgccatcattctcaatctgtttcattttattccctttgaatctca

SEQ ID NO: 116001 - DNA, 584 bp, Homo sapiens
tcttcattgtgctttatatccccagaaatttataacaaatgtaaaaaggcattggtaaccctgctgaagaaactaaaagatttataattatcagatattacccactgtgtggttgctacctccagaaacaatggcttcaccaaggactgatgggacaaatcagtccgatttctgccaaggtcttttaaatgtcctttacttgaatttctcacagtctgactgggtttgtcaacataatttattttaatttaccctgaatgcccatccctctaggaggtcaaatccaaccctctctkagatgccaatggtgttatttattcatccatcatttattaatccattcttgtatttaacaaacttagggtgagggctcacaggcactgcactaagctttactgatacaaggaccaatgaaacacttgtcttttcttctaggagcttacgtttcaaatggaaaggcagagaagtaaacaaacagttacaatagagggtgtcaatgcaatgatgcaatgatagctatttactgcattctatcattgctcttcactcataacaggagcatacactggttgcgatggtaccta

SEQ ID NO: 116002 - DNA, 584 bp, Homo sapiens
tcttcattgtgctttatatccccagaaatttataacaaatgtaaaaaggcattggtaaccctgctgaagaaactaaaagatttataattatcagatattacccactgtgtggttgctacctccagaaacaatggcttcaccaaggactgatgggacaaatcagtccgatttctgccaaggtcttttaaatgtcctttacttgaatttctcacagtctgactgggtttgtcaacataatttattttaatttaccctgaatgcccatccctctaggaggtcaaatccaaccctctctgagatgccaatggtgttatttattcatccatcatttattaatccattcttgtatttaacaaacttaggktgagggctcacaggcactgcactaagctttactgatacaaggaccaatgaaacacttgtcttttcttctaggagcttacgtttcaaatggaaaggcagagaagtaaacaaacagttacaatagagggtgtcaatgcaatgatgcaatgatagctatttactgcattctatcattgctcttcactcataacaggagcatacactggttgcgatggtaccta

SEQ ID NO: 116003 - DNA, 617 bp, Homo sapiens
cgctgggggagtggggatatgaagggccacttccctagcaaagccccagagagatctaggaggcaaagagtagaaggaatctatgctctgcatatgaaggaggcagaaggaccagagttgcacaattgcacaccagagtacagcacagaaaagatgcccatggcccaggactgggaacagcagaacagtctccatgccctcaggctgggctcaaaacagaaccactgctcagaaacagtggtgaggacagggacaaagccgggctgtgtggactagtcaccagactagatgagataatggaagattcagtggatatctgcaggaacagatagatggctggggaccagaggtgcatcctcattctaccttctacctttgcactaataagacacctgacacttagctcaaaaacaaacaaaaaaaaatagaagagacaagccagagttgactgaaattaagtttccaccaacatggtaggaggaggagaatataaagaaattagattrggttatggaagaataaagaaagttttatttctctgatactcaagtttctggacagaattcataactgctacacttgtgtaagcatgaacaatttccagaaggactcacaga

SEQ ID NO: 116004 - DNA, 572 bp, Homo sapiens
gacatgccaagaattcactttcactactttaaaaaatatctcaatgataattatcagaatcacatctaggaagcaataacattayacaattattttaagtttttcttggatttaactgccaggaaaagtcaactttatccaagagtatttataagtcaatgagtgtgaacatggaactcattcatcattatctggaaaccccaaaaaagggctggaaaacctcaaacctcaagagtaaaccacactacaaataaaatgactgcgaggtcagagtcaacctttgaagtttattccctgaagcgtatacttcaatcctgtctcctgttaaaatgaacagtctgacatactcagaaaaatgccactctccttagaaaacagcatcttttatcagcaaagacccatgattcctaagtgtttttttttttttcctcaattcgtatttaagaaagagagagaaaagtattcctgattctgtttttatctggtgagggataaggcttcatttacggaaacttatgttccagaattcttaaactttggcacatgagaaagtatcccatgtaatgacctcc

SEQ ID NO: 116005 - DNA, 483 bp, Homo sapiens
gaattcactttcactactttaaaaaatatctcaatgataattatcagaatcacatctaggaagcaataacattacacaattattttaagtttttcttggatttaactgccaggaaaagtcaactttatccaagagtatttataagtcaatgagtgtgaacatggaactcattcatcattatctggaaaccccaaaaaagggctggaaaacctcaaacctcaagagtaaaccacactacaaataaaatgactgcgaggtcagagtcaacctttgaagtttattccctgaagcgtatacttcaatcctgtctcctgttaaaatgaacagtctgacatactcagaaaaatgccactctccttagaaaacagcatctyttatcagcaaagacccatgattcctaagtgtttttttttttttcctcaattcgtatttaagaaagagagagaaaagtattcctgattctgtttttatctggtgagggat

SEQ ID NO: 116006 - DNA, 567 bp, Homo sapiens
acagatatacagaccaatggaacacagcagaggcctcagaaataatgccacacatctacaaccacctgatctttgacaaacctgacagaaacaatggggaaatgattccctacttaataaatgatgttgggaaaactggctagccatacgcagawaactgaaactggaccccttccttacactttatacaaaaattaactcaagatggattaaaaacttaaatgtaagacctaaaaccataaaaatcctagaagaaaactttggcaataccattcaggacataggcgtgggcaaagacttcatgactaaaacaccaaaagcaacggcaacaaaagccaaaattgacaaatgggatctaataaaactaaagagcttctgcacagcaaaagaaactatcatcagagtgaacagacaacctacaaagtgtgagaaaatttttgcaatctatccatctgacaaagggctaatatccagaatctacaaggaacttaaacaaatttacaagaataagacaaacaaccccatcaacaagtgggtgaaggatatgaacagacacttctcaaaatt

SEQ ID NO: 116007 - DNA, 649 bp, Homo sapiens
ggttgcaatgagcggagattgtaccactgcactccagcctgggtgacagagtgagactccctcctaccgcccgccactccccccaccccayccccgccaaaaaacaagaatagccaggtgttgtggctcacacctgtaaacccagcactttaggaggccaaggagggaagatctcttgaacccaggagttcaagacaagccttaacaacataccaagaccccatctctacaaaatatatatatatattttaaattagccaggcatggtagtgtacccctatagtcccagccattcagcaggctgaggcaggaggattgcttgagtcaaggaggccaaggctgtggtgagccatgatcatgttactgaactacaggctggatgacagagtgagaccctgtcacaacaaaatggtaaagttttttaaaatactgataagaaataaactttgacatacattgttatgtgcaaaaaaaaaaaaaggcaaacctagaacagtgtatccaatatgctatttgtgtaaaagtaggaaaaatgtttatatggaaaaagtattaataaaatgcttttcttgctcctctcagtcatcacttaaggagctaggtaaagatgcagcccctccctgaggctttccctgccattcacctggga

SEQ ID NO: 116008 - DNA, 649 bp, Homo sapiens
ggttgcaatgagcggagattgtaccactgcactccagcctgggtgacagagtgagactccctcctaccgcccgccactccccccaccccatccccgccaaaaaacaagaatagccaggtgttgtggctcacacctgtaaacccagcactttaggaggccaaggagggaagatctcttgaacccaggagttcaagacaagccttaacaacataccaagaccccatctctacaaaatatatatatatattttaaattagccaggcatggtagygtacccctatagtcccagccattcagcaggctgaggcaggaggattgcttgagtcaaggaggccaaggctgtggtgagccatgatcatgttactgaactacaggctggatgacagagtgagaccctgtcacaacaaaatggtaaagttttttaaaatactgataagaaataaactttgacatacattgttatgtgcaaaaaaaaaaaaaggcaaacctagaacagtgtatccaatatgctatttgtgtaaaagtaggaaaaatgtttatatggaaaaagtattaataaaatgcttttcttgctcctctcagtcatcacttaaggagctaggtaaagatgcagcccctccctgaggctttccctgccattcacctggga

SEQ ID NO: 116009 - DNA, 625 bp, Homo sapiens
gagcccacactttgcaccagtgtcccctggatgtgggacatggagttgaaggagattattttggaggtttaagatttaatgactgccatgctgagtttcagacttgtgtggggactaatgaccttttcttttggccaatttctccctttccgaatagtaatgtttacccaatgcctgtactaccattttatcttgggaataaataacttgtyctgattttacaggctcataggtggaaggagatgagtctcagatgagacttatgactttggacttgaggctacaatgagttaagaattttggggactattggcagaggataattatattttgcaaggtgagaagggcattcaatttgaggtgccagaggcagcatgatatagtttgattgtctgtccccacaaaatctcatattgaaatgtaatccccattgatggaggtggggcctgataggaggtgtttgggtcatgggagtggattcctcatgaatgtattgatgctgttctcatgatagttgagcctcatgagatctggttgtttagaaagttgtgacacctcccactctttctcccactgtcatcaattgacatgctggctccccatcaccttacaccacgattacaag

SEQ ID NO: 116010 - DNA, 622 bp, Homo sapiens
ctggaataaagatgtgcagcctgtagcatcagccgtccttgatatggtttcaatagtgcaaaaatacagtaggccaaagagaatgatgctcagtgatttatcttgcaaattctttttttcctgtatcaatcagaaaagagccaaccatagtttggctttacatggaaggatcccattttacatttactgtatcgccacagggttatttgatataaccagcttattttcataatttgattagaagagattcagacttgatgcaggtctgaagtttaataatgcacayatattaataatataaaaaatcagaaacagaagaatgagcaaaactgacattaatgcaatgctggcgcacattgccaacaaaaacctgattgataaatctagcaaagattcagggttctgcccaaatgataaaattcttagtaataacctggacaggagccaccacaggcattccacagatgactgaaaataagctgctgttgttgtctctcctgagaactaagtaagaatcacagtaccttgccaatttccttgtattttggaggatacatattccacatctgggaatattgctagattctatccataaaactacctgaaagaaggtcatatttga

SEQ ID NO: 116011 - DNA, 556 bp, Homo sapiens
cccaaagttgtttagtcttagtaccacagttacaaagatgcaacgctcactgatacttctgccattctctctccagtcatcctttggtgggtatataggagattcatacagaaaccttcatggkagcaatattcttcatgtttttgctgttctccatacattatcagatttaatttttatgtttttgaatagagacatgttaaaatatcagtgaggatagatgaatgctttttggatagtgaatactttttgtccttctgttcttgctcctgcctgcttcttgccatctacctggttatagaggcagggatctcagcagctttggttttatgagatgactgtatatcctttggccacagttgattggtccaaggtaggcaccagatctaagttttgacaatgagagtcccaactatggagatttggggagaggagtgagagcaaaagaaagaaagaaagaagaaagagaaattgagagaaagaccagtcattctctgggtggctggacctgtaaataaggctgtttatggccatgtttttagacagtaattaggaa

SEQ ID NO: 116012 - DNA, 580 bp, Homo sapiens
atgctttaaagtaaaaagaacaaatagttaaaaaaaagtggtctctacttattaataaacataatacttaggaaaacacgacatgttaaaccagtatatatgcaagaacaaatagcctataattaaaatgattattcaaagaaattaaaaatgttactttcatagtgggaaatttaaaaatagtggcttacatccctttgaatgaatagrcacattaacaaatagtaagaacataaaaaaatgaacatatcaattaccaaacttgctatgatactacatatacagaatcatgcatgccaaaattaaagattgcacaattttctcaagtgcatgtgattcatttacaaacaattcatcaagcaccaagcactaaaataatttcaaaaaccaaaagacagttaacatataaagcatattcttgaataataaagcacttcatttatgtgtagttaattttaaaaataacaaaaggcggccaggcgcggtgactcaacccctgtaatcccagtacattgggaggtggaggtgggcggatcacaaggtcagagttcaagactagcctggccaacaggatgaaacc

SEQ ID NO: 116013 - DNA, 533 bp, Homo sapiens
cctgtaatcccagctactttggaggctgaggcaggagaatcgcttgaacctgggaggtggaggttgcagtgagccgagatcatgccactgcactccagcytgagcaacagaatgagactccatctcaaaaaaaaaaaaaagaaaagaaaagaaaagaaaaaaggttaaatcttaaataagaggtgttacctggagttgcaaagcagacattgattaacggtaaatgtgaagagcttatattcctaaagaaagaaatatttttatccctattcatctaggatataggctcccccttataaaaattgctttaatgtttaaaatagaaaaagaaaaaataattttatctatagaaaaagggacaaatatagctcattaatattttggttgaactttcatagtcatggaagtattttaatatgacaatattattttcaataatacatagctatggaagtagaatgatagttaattgaaatcatttttctagaatagcactgtcccccccaaaatataacaagagttactatacaata

SEQ ID NO: 116014 - DNA, 533 bp, Homo sapiens
cctgtaatcccagctactttggaggctgaggcaggagaatcgcttgaacctgggaggtggaggttgcagtgagccgagatcatgccactgcactccagcctgagcaacagaatgagactccatctcaaaaaaaaaaaaaagaaaagaaaagaaaagaaaaaaggttaaatcttaaataagaggtgttacctggagttgcaaagcagacattgattaacggtaaatgtgaagagcttatattcytaaagaaagaaatatttttatccctattcatctaggatataggctcccccttataaaaattgctttaatgtttaaaatagaaaaagaaaaaataattttatctatagaaaaagggacaaatatagctcattaatattttggttgaactttcatagtcatggaagtattttaatatgacaatattattttcaataatacatagctatggaagtagaatgatagttaattgaaatcatttttctagaatagcactgtcccccccaaaatataacaagagttactatacaata

SEQ ID NO: 116015 - DNA, 541 bp, Homo sapiens
tatatgtggaaaagtcatctgataaaattcaacatctctttataataaaaaccttgaagaacctggtataaaagaaacagccaacatcctactgagtgagtaaaattgaacgcctttcctgtaaaacaagggtgccattttcatcacttttattcaatgtgatactggaagtcctggctagagcaattaggcaagagaaagaaaaggtatacaaattagaaaggaagaagtcaaattaggcttatatgcagatgaaatgatattatattttttaaaaatgtaaatgctccatcaaaaaccggtaaaactgatgaacaaattcagtaaaackgcaggatacagaattaatatataaaaaatagtagcatttttacacttttttagatttataatctggaaaagaaatcaagaaagcaatctcatttacagtagctaaaaggagtataaaatactttgaatcagtttgaccaaagacatgaaagatctatacaagaaaaactataaaagagagatgaaaaaaattgaagaggacacaggaaaa

SEQ ID NO: 116016 - DNA, 509 bp, Homo sapiens
aaacatttttttttctgtcagagagccataagatttcacccttggttcagccttctctgaactagaaaattctaatcctgtttttttattttgtgtaataacagaacaggcatacacacatatagaaataacattcaaattaatgattcgtaattttaaaaataaaaaagaattatgaatttttatatagttggttatataggaaagaacaatatatctgtacagatggagtgttaaaaataaggcaaaataaataattttggttctgataacaaaacattwgacagtaggacatgtagaatatgtgggtttggttgacaagtagtattgtgaatgaaaatcagtatatatgtgtacagtgtatttataaaattacatatgtattcataattgcagtatttctctgaatatttatgtagcataggatatacacaagtttaaaaacacatgtcttaggaaatacattctacttttttgtttgtatgcttattgttttatgcctatatcca

SEQ ID NO: 116017 - DNA, 558 bp, Homo sapiens
catttaattatttttctattcttcccttctttgggatgcaagaagtttttctcagcccctgaagaaaagctgagaattaaaccgaccttttgcttgaaaataagaaaataagtttccagttgctgtgtattcatgctctcattctaatgtacaacccagtctattgtgagagagaaagagggtattgggtttgagaagagaggtacttctgagggaagtagggaggcaaaaggaggtcagtggatgaaatggagaattaaatgaaaggcattactgaaagggagcctcagaaactcaagaaatgaaccgagaacttctgctaaaaatgggagctttatagtccattaagagccaaataagtttgtctagtaaaggaacaccataagagacgacattcagaaggtcaggagccaaataaaattgcttttcctattcaaaactcattatgttttatttgcttgacattctcttcctcccttctttagctggtgaacacttcaamaagtatctcaaatgttcctccatgaaacattcccagattcccgcaatggactttag

SEQ ID NO: 116018 - DNA, 574 bp, Homo sapiens
gaattcccttgcagaatgaatgtagctggtgatggatgcagtatcaaggttttctcctagtctgtgtgctactgggcccctattttcagaagcatattaaaatggagatgttggraattgaatttggtttcaaagcatccttcttatggcagtgtcctatatattggaactagagtttgtctctttcttgctcctgttattatcatagctgatgggacatgatttcactgaaatatttcttcaaaatcatttgatcagaagtggtggactatttagtactggcttgtttacttaaaatatcatttcttgtgatatgtggtcctgtatattcattgaataactcatttgcttaaatgagcttggtgaagcaaaatttaggaccacatttttatggtcagtgattcttagtaatataatattgttaattgttttcttttcataaacatgatatttgttctatttttgttttcttttcacaaactttatacttgttctattttctttccccaagaatgaaaatcaaaatggattttttagagtttttttaatatacaacaatatatagcacaaatgt

SEQ ID NO: 116019 - DNA, 581 bp, Homo sapiens
tacacacaaggctttatgaattgcatattcactaaaatagtatttcaaatagtaaataatttgaaacaatgtaatactcaatatgaattaaattataatatagttgcatgatgtaataagatgcagttatagacagtcatgaagtagaacatgatttaaacatgtagtaaaatactcataaaatatgtcgaattttacaaattctaaaatgtgtgtgagaatgtgtgtgtgtgtgcagatagagagagggagagatttacatcaagtcttctataacattaatattatttggttgagatacaattttgtcaaaatgagaaaaactgaagttttatatggaaaaactttccatactttgtaaagatattccaggatcataatattctcttaaacacatagtayggattcaagccaatgattaaattaaattagatttaaaatattcataaaaataaaattgctgatctgaaggtcctgaatagggtatcctttggcttttatgtggtaaattgacaattaaatattagtactttcatttctctggaattaatagatttcaaccttggtgacctgaactctta

SEQ ID NO: 116020 - DNA, 573 bp, Homo sapiens
attttctgattaagactctaggtgatcagtttatatacagagagatacttctaattttaaaaagaaatttgggcatagattgctccttctgagtatggggtagtgggaaggggaaaggctcaatgctgcactttggggatggttaatattgccgtctcttcaggaacagtagaaccaactcccaggcaaatagccccattacaggtctgaagaatttccaaagttagccaaccttcaaagacaaacacacatttctctaaatgctcctgcaccaaaattacattaatgtgttctttaattcttgtgtcttaaaacccatgattttcttgtggtgagaatttcagagccactggaggcctcgaggatgrggacttgccaaagccagttgtggcctaagcacatgtgccagctggatggtgatacttaactttggggtttttattttccttcttcttgcagctttgagtaaaggaccctttcttggctctcttgggttcgcaaatactagactccagactgcagcaatcttcagaactaggctgtcacacctgagggaaagtaaaatttgttttt

SEQ ID NO: 116021 - DNA, 518 bp, Homo sapiens
cacctgtaatcccagctactcggaaggctgaggtaggagaaccacttgaacccgagaggcagacgttgcagctagctgagaccgtgccacaggaaaaaaaaaaaaaaaaaaggcctgtatccctttattcagaggagaagctctgacagcagatgttgtctcttagcattgctttttataaccatttaactcctttaggtctagagcaggggatacattgtaccttgagtaggttcaagcaaccttaaaggtcatgtaaggaggtcaattactaaagcaaacraactttactgttattttaaaagtaacaagaagacagcatcctgtgcctggctccaatgctgataaattatgtagttatcaacaagtactttaaatatatggccttttctgtaccaataaaatgaggcagccgtacattctctctattgtaagaaatgttcctggccatacaaatatctgggttcaagtcaaaggcatgactgcattgtgaaatcttggacagtaattatacatat

SEQ ID NO: 116022 - DNA, 554 bp, Homo sapiens
tagggtatctggcaggagaaatttctgagcagcaaagcattcaagacatgacttggtgctgttaaaagcattcagttttaaaaagggaaacagcataaaattttggaaaatttccagcctggcaatgtgatagaaaagaaaaaccccattttctgaggagaaattcaagccagctgcagaaatttgcataagtaatgaggagccaaatgttaatccccaagacaatggggaaaawgtctccaaggcatgtcaaaggtcttcatggcagcttgtccaatcaagaggcccaaaggcctaggaggaaaaaatggtttcatgggccagacccagggccaccctgctgtgtgcagcctagggacttggtgtcctgcatcccaaatgctctagccatggctaataggggtcaagatacagctcaggccatggtttcagaaggttcaagtaccaagccttggcagcttccatgtgttgttgagcctgccagtgcacagaagtcaagaatttaggtttgggaacatgcacctaaatctcagaggatgcatggaaatgcctgg

SEQ ID NO: 116023 - DNA, 569 bp, Homo sapiens
tacttttttagctcccacatataaatgagatcatgcgatatttgtttttctttgtttggcttatttcacttaacataatgacctcccatttccatccatgttactrcagatgacaggatttcattcttttttatggttgaataatattccattgggtatatgtagcacattttcttgattcactcattcattgatggacactgcttgaatctgtattttggatattgtgaatagtgcttcaataaagatgggagtgcagctatctctttgatacattgatttcctatctttcagataagaccccagtactggaattgctggattatatgatagctctaattttagttttttaaggaacttccaaactgttctccacagtgtctgtaccaatttacattcccaccaacaatgtatgagggttcccctttcccctttctccatatccttgctagcatgtgttattgttattgccactttttgatacaagccattttaactgggatgacttaacgtcacattgtggttttgatttgatttgcatttctctgatgataggtgatgttaagcat

SEQ ID NO: 116024 - DNA, 578 bp, Homo sapiens
cctcggtagtacagaattgagaactggatttataattagaaagtgacttagtgagcataaaatcatagcaaaaggaattggatagccttggggcaaacttagtcagattatgaaaagcacaatacagtagactttttaatgaatggaaatatctctgtgtgccagctataatcatttgcttaattctggctggcaaattctttttcttgcagctatcccatttgtaaattctatacatgaatatcttgatatcctcaacaaatattagtgaacaaggcaaatataatacagtccctgtctaggattttactatctaggagaaaatattgatgaataaatgttagtacactaacacttcagaggaatgaaaatgcrgttgagtagattcagctttctttggatatactctcgttctggaaatgtatactgatcactttgattggatttggtgtcttccaagtctcctgagcaacacaagaacacattacaaatgttccctataagtcagctaaatttgtagttggccaaacgtgtctattacgattatgcgtggtttccgtagggaaggaaagatttct

SEQ ID NO: 116025 - DNA, 595 bp, Homo sapiens
gagcagggatgtggctcagaaccgtttttaacaaaagttttctcagagcatgtattgtctttcccaggaggttggtcactgaggcagaagaaacttcaaaataaatcacctgccatyccattaatattcaggcttctaaacatattttgcttttatatttttaaagaaaaaatgcaaatgaaaaaaatctaagtgatgtttcactgcaattaatgatttatataaattaaagctactagggcaaaacactcatactcattcactgtagtttattaatgtcaataaatataatttgactcatatgcataaaatagtctgtattgccccaaagctttgctgttctgaaggattataaaatcattggttgtaaatattaaccagctcctaatataatctgacatctacttatgaaatttgcaaaaacagttaataatgttagctatgcaagttaacaaatcagtgtaaccaaataacaaactatttttattttgaacaagcattatactgatatgaatgcaaatataagtattcaatgacataggtaaatttttattttgagaattactgttatatttatgtctagtatgtctataat

SEQ ID NO: 116026 - DNA, 580 bp, Homo sapiens
tggggaatctgggtaagaccgtattggaattctttattctgtttttgcaatctttctataagcttgaaattatttcaaagtaattggtagagacagtgagaattttttaaaaaagtctctccacaaacacacacagagacacacacatgcaaaaacatgactgacagaaatttagcgaaagtgttaataaagtttgtatctggatggtgagattacgtagtaataaaaacattacatttgaaattaatctttgtgtttttacatactacacatgctcaatcatgtgtatttattttaaaaatatccatttatttaaatttttagaagctctagcagggcctgtggcccttgctctgcctgtcacgaaaggcacctttttgatgacagttgtttgtctttgttgctgcttggctatgcatggacacacccatctkggctccaccagcagctgtggtggtggcaaaatagttctgggtatgaccatgacagcaagacagctgtagtctcatatgactgagagtgtcacatgcttttcccctgaggtgctgagtagaccgtataccagaaggaattctaaaaa

SEQ ID NO: 116027 - DNA, 608 bp, Homo sapiens
gccttgtttccaggctctacrcagccatgcaaggtgtttcttagatgtcagctggatcaggcaaattctcatagactatcagattcacagtgtcagcaggaaggaagtcctggggctatagctggttcatttccaaagtaaggttcagtcatccattatcatccttatatccagccaccggatcatttgagtaatactctctcattttctctggggccagtctctgtaggaattttctaaagcatggagtttgggaaatgtagaatattaaggcctaagtattcttctcctacttggattaaatatattcagatatcttcctctgtcagatttgaaagttaaagacacatctgcattggaccatttcaaaatacaagtttggtgttttaggccttattctcactaggatatgcgaagagaagtgtctttcataagcgtaattctctgcttggcaattcgtttctgaacatgaaagaaagtggccccttcctgttttctttcctctgagattgaacctttacctatagtttcctgggacaatctcaagatcgtggtgtcttacaaaaaacatgggcttcaaagtcagacaggtctcagttccaatttgg

SEQ ID NO: 116028 - DNA, 608 bp, Homo sapiens
gccttgtttccaggctctacacagccatgcaaggtgtttcttagatgtcagctggatcaggcaaattctcatagactatcagattcacagtgtcagcaggaaggaagtcctggggctatagctggttcatttccaaagtaaggttcagtcatccattatcatccttatatccagccaccggatcatttgagtaatactctctcattttctctggggccagtctctgtaggaattttctaaagcatggagtttgggaaatgtagaatattaaggyctaagtattcttctcctacttggattaaatatattcagatatcttcctctgtcagatttgaaagttaaagacacatctgcattggaccatttcaaaatacaagtttggtgttttaggccttattctcactaggatatgcgaagagaagtgtctttcataagcgtaattctctgcttggcaattcgtttctgaacatgaaagaaagtggccccttcctgttttctttcctctgagattgaacctttacctatagtttcctgggacaatctcaagatcgtggtgtcttacaaaaaacatgggcttcaaagtcagacaggtctcagttccaatttgg

SEQ ID NO: 116029 - DNA, 607 bp, Homo sapiens
ccatgctgttcttctcatgctggtctttcctgtgctgttcctatgacagtaaataaatcccacaagatctgatggttttaaaaaggggaatttccctgcatgaactctctttgcctactgctatccatgtaagatgtgacttgctcctccttgccttctgccgtgattgtgaggcctccccaggcacatggaactgtaagtccattaaatctctttcttttgtaaattgcccagtctctggtatgtctttatcagcacgtgaaaatgggctaatacgctgtggctgctgatagctttcccagctataatggtgaatttatgggaaaaccataagggaagctcaagcccaggcccctctccagttcatctttctttgttccttaatgagggttacattccaatagcaatataaacttctccccttcaagttctgatcactccattcgtgttatttaggaggaaaactttaagtctcctgaaccattactctgcagaagttttggtctgaaatataccaattctggtcaacatttgcctaagcagtgtccattyccccactgagttgtcagcaataagcagagagatctactgaggtaccaacataggg

SEQ ID NO: 116030 - DNA, 593 bp, Homo sapiens
atgaaatttaaaatttcccttctgctctcttattttgacttcctccatttaaaaatatttctttcatgtaattgtcttatgcctacctttaaaccataatgttaattatggtgcacattttgcattcaacttttcctgtctaaatgatctttgcagactcttctccrtaagtgttgtgtcacaagtatttcccctattaacatcttcaaaacgatcacctttataaatacagataacttgccatataattaaatatgcttttatttggggacatttagttgtatatagttcagcaataaataacattggggttggtttcttttttcttctcttctactgtttctttcagtgactaaagaattggaattctatatatgagagtaatgagatgtttttcttctgtattaagcaaggtgagagatggactgatattttggggtcactcaaatttatcctatccaatctattctagatttatcctagaattccagttggctagaagaactagtatgaagcccaaaaggaaaccaaacacattttgtaatgcgtgatgcaaacatgtttttctcttctttttattaaaagtaaaaaaa

SEQ ID NO: 116031 - DNA, 593 bp, Homo sapiens
atccaggatgggacacagactctctcgccccaaagcacaagttctttcactctatccagcttccacatgcttttccttcctctattcaggctgcagagataacagtgataattgggtttaataccttaattgtggaagcagatatataattgatctaaaggcttaatcttcaattggaaattggtccaaatgttacttcatcattttaagctgtgggacagtcataaaagatgaaataaaaggagagatgttagggctcatagctcaggttgctatcacaaataaaatctctacaccctcgggctcttctctgttaagagggtttctaaagagtatttggccaaagtatgggaggacttaatattcccatttcacaccctaacttaatccrttagtatccaaacaatgttagcggttatactttgggatattgagtgggagagaactggctgaggctctaaggaaactttctatggtttagggagccattaggaaaaagcttcttattcttgtaaaaatttctcaaactttcagggctgggttcctgtggctggctgatagtcagcctcagttagattcttgccaaattgagc

SEQ ID NO: 116032 - DNA, 566 bp, Homo sapiens
gaggacagaatacctccaaactcattatatgaggccaaaactagacaaagacacattattcagcatggtactggaactcttagctagataaatcagaagtaaagagcattcaaattggaaaggaagaaaaaaatacacacaaatcaaacccacaaattattcttgtttgcagatgatatgatcttatatttggaaaaatctaaagaatccaccaaggaacctcaaaaatctaccaaaacctaaggaatccaccaaaaaactattagaactgatargcaaattctgtaaagttgcagcatacagaatcatcatacaaaaatcagtagcatttctatatgccaacacaaaaaataaatgcttgaagggatgaatactccctttttccatgatgttattacacccattgcatgtctgtatcaaaatatctcatgtaccccctaaattcatgtgcctactatgaacccacaaaaattaattttaaaaagctaatacagtacaaccaagatgtgcaaaggatacagagtctttattttcttattcttataaactcaatctcttccagatta

SEQ ID NO: 116033 - DNA, 501 bp, Homo sapiens
taaattacttaaggaatatagcaagaacaaaataaaagtaaactctcatcaaattaataattcagtgtagatggaaatgctgctttcatttcacagaaatgtaggaattatcttatgcttaagactgtacaattgtactaatttagatatacaatatgtatattaaagcttggcaaatgcttctcaaatctgtccactgctctgctttcctgtcacttccatcctatcttctctctcccaatccgtcctgaggaaggatcattgcaatgatcttgtgatgggttttctacattttttttccttctttatatccatttcccatggtgctacaggagtgatccatctaatgcagatgttatcgtgttatattactctctctcaaggttactcctctactgactaccaggtccttcataagcaccaaytccacctttccctgtgatatggtttggctgtgtccccacccaaatctcatcttgaattgtaactcccacaattcct

SEQ ID NO: 116034 - DNA, 536 bp, Homo sapiens
gtgggaatgaggaaggtattgccagtgagaatcaaaattgcccacgtcttttttctgttttcaggtcagtccttagagggtgaagtaggttctcttttgtcttgttcttctcatttttcttatcctaaggatttaatgaatttgaattcaattcattttataggaatgaattattttacaaaaaaaaataatgtcacgtttccatgcctcagttatctcacaggcatataaattatttaaaaatatttaacaactggtgttgcacagacactgaccaatcagaagaaaacactatgacttatgaccaatcagaatcagcatgagccacaaatagaatggttatataattaattgtccaaatcaggacatgtttgaaagtgaaaagggatactattaatcattatgcyagaagtaaaggcataaactaagaccatctcaaggaaggagtatatagtgtgttctggttgaataaaataaaaaatttggcttgaggtcttttttagattctgtgacatcctaatgtgtctattgaacat

SEQ ID NO: 116035 - DNA, 398 bp, Homo sapiens
tattccgttataattcttttttatttctataaagtcaataataatcccccccactcccactcccaacttttcattcctggttttaatatttctatctttgtttcttggtcagtctagctaggtttatcagttttactgatcttttcaaaaaaccaacttttcatgtcattgatttttcttgatggtttttcttattccataattcatttatttccattmtaaactttattatatccttccttctgcttgctttaggtttagtttgcttttatttttctaatttcttaacataggacattaagttattgatttgagatctttattccttttaatatagacatttgcagctatgcatttccctctaagcactgctttagcagcatcctgtaagttttggt

SEQ ID NO: 116036 - DNA, 264 bp, Homo sapiens
ctgtgggcaggcccaggccatacagtcacatcacggaggtgctgggctcagtgatatctcacaatggctctgtgggcagggccctggctgaaaataagatacacatgacctaagcactgagcccagtgatattctacagcaccytctgtggatagggctcaagcatgagagtcacatcacctaggtgtttgacccaggtatctgtcacaatcccctctgagggctgggtccaggcagggaagtaaaatcacttaggtgctaggc

SEQ ID NO: 116037 - DNA, 546 bp, Homo sapiens
ccagcaaccatgtgatatatctctcctgctttggcctcatcaacagagagcattgtgacatacccgcgagccaagcacacagatgatgttattctgctgcctgtgccctgctttcaggagtggattgcaatgtaacactggctgagtacccaggttaatgacactgttgcctggtccctgttctcagggaagactgtaatagacccctgacccaatatccaggtaatatgactctcttgctcactcactacccacagttttgtttgtgacatatatcttggccaagttcacaggtgtaatgatgactctcatacttcaaaccagtaaatagaagagatactgtctcttgttattaggtattggcaaatgagtagaatgctaggtctcctctgcayaaatgttatagaggtattccactcttttaaatatggaataaagctcctcagtggcacagagtgtttcagcacccaggtgagattgtgttttctgcatgcacacttttcaaccactttgaatgtcaccttcacacatagacagagcccactt

SEQ ID NO: 116038 - DNA, 554 bp, Homo sapiens
tggcaggaaacaggtgatcctataacttaatattttaatatttgctatctagaaggcaggaagaatggatcaaggctaagcctgtaattggccaagaaacagtggtcacttatattaaccagaatgtttggtcatttttgtggtttagagactgttcttgtatttgctgtgttcagacatgattgtggaggggtcttatttttgtcttgcctattgtagtcataaartgactataactgatgttgatgttttgtgggactgtttatatttgacaaaacaatgagaactgagaatgccaggacagctgccagtaccacaaatgcctagctaatagtgccagtccagctcctggctgtccggagttggtttccactgcaactccaccctctctgccccccaactagcaaagccatcagctgctacaactgtctctataattctaatttatgactcttattcataattctgtatctttaacatttacaacattagtattattatttagggtactgagttccaaaactcattacagctctcctgataatagtagtagc

SEQ ID NO: 116039 - DNA, 536 bp, Homo sapiens
aatcatccaaaacacttttagcattttaaagtaatataaagtattaattatagagtgctaaaagaaatttccacttgggtccttccagtcctgcccccctgcctcatttgccagtgggtgccactattaatgatatgaagtatattaacgccaatatacttcataacattacgaagtatatgaagatacacaggagtttataaagatagaactatatgtactaatcacacatagatttttaaaacctagaatcgtgcaatacatatttgtctataatyttccttttactcatagccatttactatgggcttctttttggtcagaataagaagattattattcattagttttaagagttattcaatattttttgtagtggcagatcatagtttattcaaccattttcctactaatggtcatttgttttagtacattgccaccgcaaaaaaaaagaaagatgtttcaatggatatctttacatttatatctgaatattcttgtactatcatttctttaagataaattctgggaaaaac

SEQ ID NO: 116040 - DNA, 536 bp, Homo sapiens
aatcatccaaaacacttttagcattttaaagtaatataaagtattaattatagagtgctaaaagaaatttccacttgggtccttccagtcctgcccccctgcctcatttgccagtgggtgccactattaatgatatgaagtatattaacgccaatatacttcataacattacgaagtatatgaagatacacaggagtttataaagatagaactatatgtactaatcacacatagatttttaaaacctagaatcgtgcaatacatatttgtctataattttccttttactcatagccatttactatgggcttctttttggtcagaataagaagattattattcattagttttaagagttattcaatattttttgtagtggcagatcatagtttattcaaccattttcctactaatggtcatttgttttagtacattgccaycgcaaaaaaaaagaaagatgtttcaatggatatctttacatttatatctgaatattcttgtactatcatttctttaagataaattctgggaaaaac

SEQ ID NO: 116041 - DNA, 636 bp, Homo sapiens
tcaatgtcatatatattataaaagggtaattttagttaatttaggaaaataaawttcagcatggcaactagtcctttgcaatcatctcaaataccaaaaatgaattatgtactttatggtagttcttgataaaccagaggccacctggagcattggataaaaagcacgtatctagggctattgacagcaaaagtaacaactgaagctgggattagagctgaaaaagtgtgcttctggaaagtgtgtttgtttctcagtgtttacctgatgacattccattatatgctgaataaattttaattttcaatttaaagccactgttaatatctctcccttgctgagcatggtggctgatgcctgtaatcctaggactttgggaagctgaagtgggaggatcacttgagcccaggagtttgagccagcctgggcaatatagtgagactccatctctataaaacatttttttaaaaaaattagccaggcatagtagtgtgtgcctgtagtcccagctactcagaaggctgaggcaggaggatcacttgagcctcagaggcagaggttgtagtgaaccgagattgtgccactgcactccagcctgggcaacagagcaagaccctgtctcaaaaaaaaaaaaaa

SEQ ID NO: 116042 - DNA, 648 bp, Homo sapiens
atactatttcccacaagaaagccatgggtcaattacactcataataacactgatgcaaaaattctgcagtcttcataagcaaattgaatccagcagtgtgacaaaaatggagttcaaaagatgggaaaacataaatgaacattaatactctacaaggaaacacaaaagacttgaaataaattgaaaggtaaaatatgtaaggaaaggaagaattttatgttttaaaaatataaattcttcttcaaytaaactacaaattcaggccgggggtggtggctcatggctgtaatcccagcactttgggagcccaagaagggcgaatcatgaggtcaggagttcgagaccagcctgaccaacgtggtgaaaccccatctctactaaaaatacaaatattagccaggcgtgatggcacgtgcctgtaatcccagctactcaggaggctaaggcaggagaatcacttgaacctgggaggcagaggttgcagtgagccaagatcatgccactgcactccagcctgggtgacagagtgagactctgtctcaaaaaaaaaaatgaaaataaaaaaataaactacaaattcaatatgatttcaaagaaacaccaacaaatacattatagttgttgttgttataattagagttgaaaaga

SEQ ID NO: 116043 - DNA, 587 bp, Homo sapiens
ctattaaaaataacaaaataatcccctttccctgtggttacttaagagcaatgagaatttcaggaagcctatggtctctctctgtggccaccagmacatgattaatataattgatcacttatgcttagcaaaatgcataaagggtagtatcctcatgagaacttttggttgctcacgctctactagaatctttgggctgccacaaatgaaatccaggacgttgtttctaggttttatgcccctttgaaaaattcaaagccaggtaactaagatgatgtaaagcaacctcagagagaatccttctcactctgtaacagttgtgttctttgcaggagacatacagctgatactctttgtttaggttttatcttcattctccaatgtctctctcactgggatctgcagatctaaaaggagacaaatcaaattctacattgggggaaggtgtgctcagccacaacatagtactaatttcatttagatgggcaataatcatctattgagatcttcccaccaagaaccgtggctgtctgagaccaggaagatgcagcaggatgtctaaggacctgtaatataaaaaccaacct

SEQ ID NO: 116044 - DNA, 535 bp, Homo sapiens
ggaggacaggaaatgggcagaattcagctctagtgacataaatctccacatgcaaatcccaatcctggatatgtggctacaacagtgcccccaaatgacacagaaaagcatttgtctgatttctttatttaagtatatttttcatgtgttaccattataaacacataaaaaaggatttcatttcctacttgacatattcattcccaatgatttgcatgtccaagtgaagatctgaaaactctccaaacaacccacaataacatgagaggaggaaggaaatgaagaaggtaggggttgaggaggggttcggggttaagagcaatctgcatttctttttatgttccgtacttgtttaacaggctataatcaatatcactactgattttgttccagctaagttgcaagcacagctggtttcagcactaggaaaactgactaccagattaaaatattatgtataagttaatgtamgagtgcctatatttcttaggcatctcttagttaatggcatctgtgtttcattcttggttgccca

SEQ ID NO: 116045 - DNA, 590 bp, Homo sapiens
gtgaatagctttggttcctactggccttccagacccagtggccagtctttttgtggtccagttgtgcttggcttttgtctcagatttatatacaattctataaagtatccttaaaatgaatccctattactataatgtgagkggattttttttcttagcaaaaagttcttttaacccttatttcattttgcctccttatagtattttgcaatattgaccaatccctctcttgaaagtttctcccaccttgcttctccgacaggaggagcctctgcttcatcttctattgatacctctcatttcttctcagtctccttcagtggcttctcttcctctgccaatctgttaaatgtgaaggtgactgaaattcccctgttggctttggtccacactccctggacactttacccactgtcatgtcttcaactccaatctagctgcaaactcttgggatttaattctgcccaactaatgtgaatttttggaaaatcactgtattagggttctctggaaggacagagctaataggatatatgtatatatgaaagggagtttattcaggagaactgactcacgtgatcacaaagtaa

SEQ ID NO: 116046 - DNA, 597 bp, Homo sapiens
agtcatttacttcctctcataagacagctagctggggcttgaggtgtggagagaggcaaatgagaaagaatcacaaaactaggatatctaaatatcaagtaaattatatcttgacagatagacttgttttctcagtcacagaatgaaaatattggttcaggttatctttttgttcattccaaattttatgttacctggctattctaactccaaatttagaagtctaacacctacagaggcaaagtaaatttttctaagttagcaaagttggccaggaagaggctgtggaaatttgaagagttatgtgccacttaaggtggtcacctactccttgtctccaggtaaccattgccacgtgaagctctagacattagaaaatatttggaggtaaatgaggatggcatgttgagtcctcttggcctagttcttagttcatttctggaggagagatccacgtgagctctaagtcatcttgtgatgacaacatcccatctttctgcctcaaagtcttcccgaaagttgtggaacgtactgatttgcatacaagtgaaatctagaaatgygggcaagttagcaccctggggggccactcccagc

SEQ ID NO: 116047 - DNA, 616 bp, Homo sapiens
gtgcaaggtaaactttcatcagcctcagtaactcaggttgagctttaggcttgagatgtgaagagaaagctgatttctttgactaaacacatttggttattttttttgaattgcagttgagggaggcagagtgacatggtgcaggctaagaagagcactgaacggggtgtctggagccctgcatcctactcctggcctacccctttgtgatcttagataagccctttacttttccaggcttccactttccttacctgattcagaagggccaccaagccccagttttcctacctcctcaggatatgatgaaaatagaatgagacaatggatgtagagcaaaagctactcagggtgtgatagcaccctgccaagtgtrcgttaccagtctgcaggaggatgattgcagaaagtaagagtaagtgtttagaaacttttatagcaatttaatattgtggtgacatccaagtttgtgatccagggacatgcttcattcaatagatcatgaggcagcttgggtgctgccaaattcacaagatatgtcatacctggcctgagctgcatgccagtggtccaggatggataagaaataaaaccaacaaaacaacaacagcaaaaa

SEQ ID NO: 116048 - DNA, 598 bp, Homo sapiens
ttgtccctcaggaaaaatgcacaactctacatttatgtatgctttgtgtacagttttaagactctgggatccagttgtgaactcctttgcccaggttaagtgttctaggtacagaactcatagtctctttccaacatctcttgaatctctcttctcatgcttccctgttgaaacttcccagtcctccaccttacctcctaagggacttgtaaccttatcaattaattcacatgagacaatgttagaacaaaaattcattaaaatgtagagcycttggaaatgatttcaaaacaccctcatccatagtatctcagttaatccttttgacagctctgtaaaggatgtgggcatgacccatcctctttatttttccagtgaggagaatgagccttagtccaaggatgtcactgtccgagatcactcaatcagtaatgggaagcatcaggattcctagtgtccttcacttttcagagacattgcatgttgatggtagcaaatacagatggggaaggcgtatcctgtgtgaggagcatctgcaaggcctctgtggatgtatggagagcagaaaaagagtggtaggagctgatatcaagttgga

SEQ ID NO: 116049 - DNA, 575 bp, Homo sapiens
cctgtctgagaaataaacaaagcagatgtgaaagtgatttggaaggtgcagagtgctctacgagtgaggagggggccatgatggaaactagataagcaagtgctttytcaaatctctgtttcttcattgtctgtctcaacaaaaatgaatctggagctgtgctgtttgcagagcaattctcacttactaattactgtgaaagttaaaaataataggtagatatggaagaaaggagaactacgtagttgctaaattattcacaaatgctcctgttcaacaattaccttttactaatcttcacctccctctgcctcaggtcctaaactccactcgccacaaaaaacccactcacaggaagatggactagaaggcaaggcaagagatgggtggtgggagccacctgccacctttgcctagttgtgataagagtgggctcttgtcagttttctctgccaagcggggggcatcacttcttggccagctggaagtgagatttctgctcaaatttcattagaagaaaacttcataaccaagaacactggtgtcctcttcaggaaacggccctgtattttact

SEQ ID NO: 116050 - DNA, 557 bp, Homo sapiens
gctgccaacaacacatagggatattctccctaatccgtctccagtgggaaatgtcccagtgatgctgaggaaagggggttctgaaagaagcagtccagggacgcctcccatattagtccccatggtgggattacatgcccattcatgaactagtccggtgccccaaagatgggaaaagctgtctaataggtacttttcataattcctaccccatgacatcccatgcaggcttctgttgtactaatatgctctataacctgatgtcagtgactgtatcacaggtgatgtacaaattgtgagaagtcatcaagakgtagagtcatgaattgtacactttacatacattggatttcaacaaagtgtataaaaaacatttcaggcacatatttaaaagggtaagtggggaataatagtaatgttaatctccaatttaaagccaatatgtcatggatataacaataatcaaaatgtggagatttttaacacactttctcaaagtttgagagagcaaacagacaacaaaaaatacaaaatggaaagatttgaataataaaatg

SEQ ID NO: 116051 - DNA, 557 bp, Homo sapiens
gctgccaacaacacatagggatattctccctaatccgtctccagtgggaaatgtcccagtgatgctgaggaaagggggttctgaaagaagcagtccagggacgcctcccatattagtccccatggtgggattacatgcccattcatgaactagtccggtgccccaaagatgggaaaagctgtctaataggtacttttcataattcctaccccatgacatcccatgcaggcttctgttgtactaatatgctctataacctgatgtcagtgactgtatcacaggtgatgtacaaattgtgagaagtcatcaagatgtagagtcatgaattgtacactttacatacattrgatttcaacaaagtgtataaaaaacatttcaggcacatatttaaaagggtaagtggggaataatagtaatgttaatctccaatttaaagccaatatgtcatggatataacaataatcaaaatgtggagatttttaacacactttctcaaagtttgagagagcaaacagacaacaaaaaatacaaaatggaaagatttgaataataaaatg

SEQ ID NO: 116052 - DNA, 598 bp, Homo sapiens
catttatgttttacctcttcaattaaaaagcacttcctaaatacaacttagtgattcaatgcattgattttaaattatactgcattaaattttatgccctgagagaaatcttctctggagaactgacacacaatttatacagactttcctgtatgggggcaaggaatctccgctgcacaaacttggaatacgactcttccaggtttccatagggaattaacacctcttcacaygagagacccaattccaccaagacctttcccattaagaaatgaaagcagagactgaatgaatgttaataaataggcacaaatgcagaagggagaaaagaatgtgagcgtgagtaaaggcagagtgatttggacagaggatctgattggacaagatagacagtttgtgcaatggtaggaaatgtgttatggcaagtaaattgaagttactttgtggaaagcctggagataccaaaacttatattttctagtagtaatatggaaatactaaattttgggggaaagtcttttagataattttatagtcgaaactttttaacttgaagtcaaaacatctgaactaatatgactttgagcatcatgtctct

SEQ ID NO: 116053 - DNA, 563 bp, Homo sapiens
ttgtagggcatccaactagagattataagtaattagcctcataaatcagaagttcagaatagaatgttgggctggagataaagagtttggaatctttcctactccatttcatttttcacattgcttttaaaattctcttttaaacacagatctaactatatgagactattaactataactattaactattaactataacacctatttaaaatccaattgttgcctcctcagtattttcataatacagttgaaactctaacatggtggtgtacaaatacctctaacatctagtccttaccaaactttctggactaacacctcaatttctacttatatttcagtcrgatacaatttctgtctgttcactgaacccaaagtttattcttgcctccttgtgcttttaatatgtactgtttcttctactcagaatgctttgccccccctcttttcaacctgaataactcctattcgaccttcaataccttagttccaatgctatctcccctgagccttttccattgctctcgtcttttcataaatatttctaaagcaatgtttcttaa

SEQ ID NO: 116054 - DNA, 603 bp, Homo sapiens
agttaggtgggcaaactcctctccactacagattcayaacacatggctcttcctctcaatgctttttctcatgctctcctttacagagttgatatttctgacctgggctgcccatattttattaaagcattgtttcactgtattgcaattacttattattacatatcagtttctactagcagactctgagtttcttgaggacaagaagtgtgcaatatttatgttcttttttctagcacctagcgccattcctgacagatacgaaatatatttaaatattttccgtatggatcaatcagtcaggtttagtctttcattagcaggcacagttacttgtgcttacatcaccccacagaaatggtctgattctatatgtgcaaagtcattaaaatcactgggtaaaaggaacagtctaagtacaaagcctaattcagttgcaagaaatgaaaactttttaaaatctgcattccaggagctcagggacctggtctgtctggttcaatgctcagtgcctggagcaatgcacatacaaagtagaaatcacaaactggtttacagagtggataactatgatgaaagttctgagataagaatgtcttaatc

SEQ ID NO: 116055 - DNA, 613 bp, Homo sapiens
cctatttctccacaaccttgccaacacttgctaccrctttttaaaaaattatagcccttctagtgggtgttgaagtagcatagtattgtagttttaatttgcatttttctaatgaccaatgatgtcaagcatctttctatgtgcttattatttaggctaaacttttatggtttttcagcagtagatgttatttgactttctagcaatctttgtactgttttttttttcttctacttttgaatctactgtttagccaacaatttggcagaaattagataaaaaagataaaggccactttgggaagctgaggcaggtggatcacgaggtcaggagattgagaccatcctggctaacacggtgaaaccccgtctctactaaaaatacaaaaaaaaattagccgggcgtggtggtgggcacctgtagtcccagctactcgggaggctgaggcaggagaatggcgtgaacccaggaggtggaacttgcagtgagccaagatagcaccactgcaatccagcctgggcgacagagcaagactctgtctcaaaaaaaaaaaaaaaggtaaaggcagggcgcagtggctcatgcctgtaatcccagcattttgggaggccaa

SEQ ID NO: 116056 - DNA, 645 bp, Homo sapiens
tggaaacataaataaatttatgaactattttttaaaaaattaactgctgagaatatgagtaaaaaatgcacctttttacaaacatccctgaatgagattgtcttctcttttatgcatataatttgtgaattaaaagtttcattgatctgatttaaacaggtcagaattwttcactgaatgagcaagtactgtcttgtccatctcctcaacatttctcagatctgtaagtcttacctctctccatttcatcctttaaagttttcccttagaaccctcagtgtctaccaggagacactctcaagtggtcacaggaggaaggggcataaagtatcatcatgacatagctccaccagttttttgtctccgcactccacacaccctccagcatacttacagcctaccaaaaatttcatgttctttcctttcatctttctttcatgtttttgtagagatgggggtcttggtatgttccccagggtggtcttgaactcctaggctcaagggatcctccttcctcagcctcccaagtagctggaactacaggtacataccactatgtctggctttcatgctctttcttgtctcaggacattgcacccatttcctctgactgtaatgaccctttccacgcctcctccccacgag

SEQ ID NO: 116057 - DNA, 645 bp, Homo sapiens
tggaaacataaataaatttatgaactattttttaaaaaattaactgctgagaatatgagtaaaaaatgcacctttttacaaacatccctgaatgagattgtcttctcttttatgcatataatttgtgaattaaaagtttcattgatctgatttaaacaggtcagaatttttcactgaatgagcaagtactgtcttgtccatctcctcaacatttctcagatctgtaagtcttacctctctccatttcatcctttaaagttttcccttagaaccctcagtgtctaccaggagacactctcaagtggtcacaggaggaaggggcataaagtatcatcatgacatagctccaccagttttttgtctccgcactccacacaccctccagcatacttacagcctaccaaaaatttcatgttctttcctttcatctttctttcatgtttttgtagagatgggggtcttggtatgttccccagggtggtcttgaactcctaggctcaagggatcctccttcctcagcctcccargtagctggaactacaggtacataccactatgtctggctttcatgctctttcttgtctcaggacattgcacccatttcctctgactgtaatgaccctttccacgcctcctccccacgag

SEQ ID NO: 116058 - DNA, 602 bp, Homo sapiens
taataaaggaaaaatgtcatattcacaaatgaaactagttgctagaaattaacaacataaaatatgggagattttcatatcataaaacattttaaagtgtattgaaagatctaagaaaatagcagaaacatattattcctggaaacactcgttcttgtattttttttattccagatttatctgtaaatttatggcatatcattcaaaatcccagtaggatatttttaaactwtacaaactgattctaaaattcatcttgaagagtgaatatataaaaatagttagcaaattttgggaaagaggagattagggcaggattttctttgctatctatcacaataataatcaaatgttattttactggcacaggaattgacaaattaacttatcaaagttaattacaaacagatttggatttaaatgctattataaaatatagaaaaactttctttaaaccttcagtgggagcagatctttctaaagatcttttgaagaattacattgaggccaaaatcctttaaaaagtcaacagatttgcttacacaataattgtatacttttatacatcagaagacatcattggcaaaatagacaaaaaacaa

SEQ ID NO: 116059 - DNA, 593 bp, Homo sapiens
gctcacctgattgggtcaggcccacccaggatgacctctcttttgattattgggtcaggcccacccaggatgacctctcttttgattaactcaaagctgactgatgaataacccaactacagaagtgatatcctatgatatgcacagattctaatcacataccagggaaataacccctatccatagcacaaccagccaccctggcagaggaagtagagttttgtactgataattaaattctctggcctgaaagtgacascatgcactttagctgacaactcgttgaccaaagctaaacacatggcccatccaaccacaagcagccaggaagtgccttggaggtaggtaactggaaatatttggtaactattaccacggactatcacacagggtagagattgtatctttcatttctggatcattggtacttattcggtgactgaaagactgtcaacaaatgtggacatcaataaaaaacattcccataaacatttttttaagaaaaacattttcaagatatcttacagagattgttttcttcccttcttctaccaccttgaaccctagaaaatgaaaatttattcaactgtgtt

SEQ ID NO: 116060 - DNA, 599 bp, Homo sapiens
ttgtgtgtgttttcctactatgtgccaggtacagtaacttttgtgtaatagtagtgagaaaaagcaatttaaaaatcatttccattttatagaaatttagaagtggaaactctgagaagtgaaataatttgcctaagatcattcaggaaggtattgagtgtttgagctgagctttctgatattggccagtagagagaagtggaataaagaagaaagggcaccttgggaagaattattggtataacaaaagcagggggtggtgatggggagatgggagggccagatcaggttctgcaaagagttttgtgcattgtcgtttgaaccgtaataagagagaagtttggattgggaggaaagcttgataacatgaagcaaggtttggaatatcaagctctgccaatgaaattcattcttaaacacctggatttattcctgtcaacaacagtaataggtaagactgagttaataaagataatcaaataatccatcagtgatttttattgtgtttctccatkataaaaccagtgcgtactcattataaacattttgggagtgtcaaaaaaaatagaaagaaaaaaattgacctttgagttatttct

SEQ ID NO: 116061 - DNA, 611 bp, Homo sapiens
aacttttactatccagacaactactgtgaatattttggaatactttcttctatctgaataatgtgtatatttttcattgcaatattatggtatgttaaaattaaatatagctatttttaatactgtccacttacttttcattaagcagagcaaacttctttccgtagaaaattttaaaaataaaaaaacacaaagaatatataagacacaatttaactttatgaaaacagtgatcagtataatcaatcatatataattataatctatcatatataatgaagtatataactaatgataaccagaaataactacttttgtttatgtcctccactttttctatgcattttaatgtgcttgaaataatgacctccmtactgcttttaagtgtaaagaactgagacatgttcataattcctagatgaaagataaaatggagtggcttaatgacagataatatctgccagtgggtggtttatttctttccaaaaacttgggctttttctgattttactataaattttaaagatgcagaaaattattattcaagttctgtggcattgaaaatggtcatatgtcactctctgcagctccactttatagagaagaaatgg

SEQ ID NO: 116062 - DNA, 605 bp, Homo sapiens
tggatgtcaagagaaacacacaggcagaagaacacaccaacagacactggcaggccattgatggtgggatgacgtggaatttggctgaggacagttggaggatagcccagccacagagcagcctgacccaagggaagaccactttcccactccatccctctcatgctccccatccatctgctgagagctacttctaccactcaataaaaccttgcacycattctccatgccaacacgtgatctgatttttccagtacactactgcaagaaccccgggatacagaaagccctatgtccttgtgataaggcagagggtctgattgagctgattaacacaagccgcctgcagatatctaagctgaaagagcacactgtaacacactggggcttccagagctgtaaacacccaaccctagacactgctgtggggttggagtccatgatccccacgatctgcccatctgcatactccccctagaggtttgagctgcaggcaccaaagaaacgagtcactccccccatcacacaccctgctagtgggataagggaacttttcccatttcataactcaccagctgaatgcccacagctcctagatcagctcc

SEQ ID NO: 116063 - DNA, 588 bp, Homo sapiens
actcctgctacagcagccgtagctgtgactgcaattaatcccataatcactgcaattaaagtaaaaatgaatcttttggatctatttaaaacaccttttaatacttcagtcaaaatatggacggatggtgaggcctcccatggtcggtccatggacacagggatccacacgccctctcttgctctcaccagcagaatacggtgttgccaattaaaagttgaatcaatgcaastaagcaatctacaattttcacaggttatagtctgggagtctggtttaataactatatttcctacaactagcatataagggggctttacgcaactttgtaaaggaactgttagactggaatttaggtcgatagtataaaatggcttacaatctcttgtttctaaagtttgatttccagaccaaattctaatgtggtgtgaggccacagtaagcctccataattctggatgttcaggaccagaaacaggacttactatttttggtcttggggtagagattcctttttctccccattcccaagggtagaaagactgcaattttttatgcttatgtttgtctaaactttctgttaagtcg

SEQ ID NO: 116064 - DNA, 588 bp, Homo sapiens
actcctgctacagcagccgtagctgtgactgcaattaatcccataatcactgcaattaaagtaaaaatgaatcttttggatctatttaaaacaccttttaatacttcagtcaaaatatggacggatggtgaggcctcccatggtcggtccatggacacagggatccacacgccctctcttgctctcaccagcagaatacggtgttgccaattaaaagttgaatcaatgcaagtaagcaatctacaattttcacaggttatagtctgggagtctggtttaataactatatttcctacaactagcatataagggggctttacgcaactttgtaaaggaactgttagactggaatttaggtcgatagtataaaatggcttacaatctcttgtttctaaagtttgatttccagaccaaattctaatgtggtgtgaggccacagtaagcctccataattctggatgttcaggaccagaaacaggacttactatttttggtcttggggtagagattcytttttctccccattcccaagggtagaaagactgcaattttttatgcttatgtttgtctaaactttctgttaagtcg

SEQ ID NO: 116065 - DNA, 449 bp, Homo sapiens
tgtcaacaaaaaattgcaagacatgcaaagaaaaaggaaagtgtgacccacactctggaaaaaaagagagtcaacagaaactcactgaggggtcccagatgttagactttgtctctctccttccctytctttctccctgttccaatttccagggacgaggctctgactggccaggttccacccctgatcctatcatctgtggaggaggtggagtgggcagagaaaaattgtaataacatagtacgtggaagctacttgaccccacatgggtgaagatcatttcctagagaaaagaggggtcactggttccagtttaggtagacatccccagaggtgtctgttgctcttgtttcttttctgaaaggtaagtggtgacacctccaggagcccagtggcatttggatttgttatctcccactgggaggacggcatccttcatttgctggcca

SEQ ID NO: 116066 - DNA, 449 bp, Homo sapiens
tgtcaacaaaaaattgcaagacatgcaaagaaaaaggaaagtgtgacccacactctggaaaaaaagagagtcaacagaaactcactgaggggtcccagatgttagactttgtctctctccttccctctytttctccctgttccaatttccagggacgaggctctgactggccaggttccacccctgatcctatcatctgtggaggaggtggagtgggcagagaaaaattgtaataacatagtacgtggaagctacttgaccccacatgggtgaagatcatttcctagagaaaagaggggtcactggttccagtttaggtagacatccccagaggtgtctgttgctcttgtttcttttctgaaaggtaagtggtgacacctccaggagcccagtggcatttggatttgttatctcccactgggaggacggcatccttcatttgctggcca

SEQ ID NO: 116067 - DNA, 630 bp, Homo sapiens
aggctaataggaacctaagattgtatccatttgcctcattgtctacccttctaggagcgcagtggagcgatctcggcttactgcaacctccacctcctgggttcaagtgattctcatgcctcagcctcacaaatagctgggattacaggcatgcatcaccatgcctggctaatttttgtatttgtagtagagacaggtttgcaccatgttggccaggctggtctcgaactccttgcctcaggtgctccacctgcctggatctcccaaagtgctgggattacaggcgtgagccaccacgcccagccccctyaccccgtttttttttttttttttttcctcttctgcttgctctttccccttcaaatactgaagttcctgaaaccttccttggaaaaatcacaggttgtagatgcttctgtgacttgtttttgttttgttggtttttttgcatcctcaatcatggttaaataagcttctaatcaattgagacctgcctcagtcactttttggtttacatgtgtcactactggatcaaaaggtgtaagttctccatgccctctcttcccatgccatggtgactggtgattgtctagatggtggctcttctagcaacctggatccctgagaccc

SEQ ID NO: 116068 - DNA, 630 bp, Homo sapiens
aggctaataggaacctaagattgtatccatttgcctcattgtctacccttctaggagcgcagtggagcgatctcggcttactgcaacctccacctcctgggttcaagtgattctcatgcctcagcctcacaaatagctgggattacaggcatgcatcaccatgcctggctaatttttgtatttgtagtagagacaggtttgcaccatgttggccaggctggtctcgaactccttgcctcaggtgctccacctgcctggatctcccaaagtgctgggattacaggcgtgagccaccacgcccagcccccttaccccktttttttttttttttttttcctcttctgcttgctctttccccttcaaatactgaagttcctgaaaccttccttggaaaaatcacaggttgtagatgcttctgtgacttgtttttgttttgttggtttttttgcatcctcaatcatggttaaataagcttctaatcaattgagacctgcctcagtcactttttggtttacatgtgtcactactggatcaaaaggtgtaagttctccatgccctctcttcccatgccatggtgactggtgattgtctagatggtggctcttctagcaacctggatccctgagaccc

SEQ ID NO: 116069 - DNA, 630 bp, Homo sapiens
aggctaataggaacctaagattgtatccatttgcctcattgtctacccttctaggagcgcagtggagcgatctcggcttactgcaacctccacctcctgggttcaagtgattctcatgcctcagcctcacaaatagctgggattacaggcatgcatcaccatgcctggctaatttttgtatttgtagtagagacaggtttgcaccatgttggccaggctggtctcgaactccttgcctcaggtgctccacctgcctggatctcccaaagtgctgggattacaggcgtgagccaccacgcccagcccccttaccccgtttttttttttttttttttcctcttctgcttgctctttccccttcaaatactgaagttcctgaaaycttccttggaaaaatcacaggttgtagatgcttctgtgacttgtttttgttttgttggtttttttgcatcctcaatcatggttaaataagcttctaatcaattgagacctgcctcagtcactttttggtttacatgtgtcactactggatcaaaaggtgtaagttctccatgccctctcttcccatgccatggtgactggtgattgtctagatggtggctcttctagcaacctggatccctgagaccc

SEQ ID NO: 116070 - DNA, 575 bp, Homo sapiens
aggtaacttattgccctccttctaagcctaatccaaggacagcttgtccaaattctcagcttaatatttgccctgtgcttacttcaagcaaacatcattttggggaaagggatctcaagaagatattttgtccttcctacatactcctttaaaatcaagaaaaatattactattataactgttacagactactccaaaaccaggatttgaagaggctattaaatggggacagatactttggctactttgttcattcattgaaggaaaaggtagtacaacactctcacttggaagagtccaagagctctcactctcaagaagtgtttatttaagtctaactgaatttctttggttgaaatttaagccaatttccattttttttaaaaaaaaaagagaggaaggatgttatattgaaaacastctactctgtcaaagaattcctgaatgttcaaggccaagaacttttctttctctgatcatcaattttctcatttgtaagtcaagaaaaacaatactttactcaaagtgctgttgtgaccattcaatgataaagcaccaattgaaagggcagtcat

SEQ ID NO: 116071 - DNA, 299 bp, Homo sapiens
tgggtgacttagtcattttagtttgtgggctttggagagtctaggccaaatsgggtagaagcagtaccccagcacattaagtggctccacagaaacatggccagactgcttgtttaagtgggaccacaattgcattcctattcactgagcagacacttgcatctcagatctccagccacctcctacaggtgtgtgcaggctggccacaagtccatgcctccctaggatggaactctcataggaagatgcaggttgcagtctttgatgtttcacagccttcactggtgatatatctaggt

SEQ ID NO: 116072 - DNA, 628 bp, Homo sapiens
ttcttggcttgcctgggatattcccagttttagcactggtagtcctgtggtcctcggaatccctccactccttggcaatcccacatggttagtcaacctaggattgttccaggagttatttttccaggtgaatcctatgatagaataatgtgaataagtagcatgagatataagcaaaakagtggctgtagtgatgggtgacgattccaagctagctgacacagggactgagatcagaataaagcccagtcgtacccacactgaagataagatataactatgatgacagaagagacagttacctaagcttggatgtcttaccacatataatgcatgcaaattaagttactttaactgatgacagaatttctcttagaaagacaacagaattcaattatgaaaatacattggtaagccattttgtgtgtgaaattgttgtgttagtgtacatgtttatggtgtgttggctctactgtattatacataatgttttcaaagtgttttggatgtcctatggtagtttgactcatgaagggaacacatttcatttttatgcaacttatgaggtgatttgaaatttatactacaagcaaagggtattccaaattattatgcaatgaagcaaata

SEQ ID NO: 116073 - DNA, 178 bp, Homo sapiens
cattctgtctcctctccatgtctatctttactataaatctgtacttaaaataaatattttrgaatgctaaagatttaaataaatgtatttacatgaatggaaaagctcctacaaattattttgtctctatttctttttttttccaacattttttgtctttgcttttcacttctttgag

SEQ ID NO: 116074 - DNA, 552 bp, Homo sapiens
ttccttggagcctctatcaactaatttcacagattctttttttttcctttttgctgctgtcatgttaatgggcattatttaaaaagggatcttaccacagaatttgatttggtgtctccttgttgacaccatataagagcaaatctaaccacatgtagtgttttcacaaaagtgtacctatccatcaattctagccacaaacctctaaggtcagaaatctcaaagattaagccagagggaggtggaatagtccaaactggtttagctgcttgagtcttctcttttatttgaaaatcacttaaactctgtcattgacacagtatgagtcctttcctaaagacattttaaaaactaacttctctatgaaaagcagtgaataggagggctgacacaatttttaaaactctcaacatgtgcagctcataaaaagtaggcatatgattatatatacctttgattcaaccagtttctattacaagtaacctgtgaaccctagaacttagttatttttttttttwaaaaaaaggaggggaatctccaccttaacctttt

SEQ ID NO: 116075 - DNA, 581 bp, Homo sapiens
ctatactttttactttcgggcacttattgttacttgtgactatataattgtattatcatttgattaatgtcattttcctcacaagggccctgttagggttcatttatcacgcctttgtattcccagcaattagcacaggtttctgcatgtatgtacttgatcaacattttaaaataattgaattactaaataagtaaataaaacctaagaatcctaacaccacacttcttgttctagcctggttcatacacctagagtctccttctatctgaagatatagaatctgaattgaaatacaagtacttcccccagccaccaccattcaaagatgcttttggagatggagaatgggagtggggcwgtgggcagacaaataaagtgaagaccctataaatgcaaaagcaacttattcatataacagtaaagttaaacaatcatctagacaaaatagatgattgaattgtttactgtatgtgaagtttaatgtaccataagcattcctgaacagtgtcagaaggcttaatttttaatacagtctactttttgtgagtagaattttgtccctttggccagattgcatg

SEQ ID NO: 116076 - DNA, 600 bp, Homo sapiens
agtggtgtaaaatatttaaggtgttgaaagaaaaaaaaaacaccactaatctggaattctatattcastgaaattatcctttagcagtaaagcagaaataaatactttctcagataaacagaaactgaatacatcgccaggtgactttctctccaaaaaatattagaagaaattcttcagggagaagaaaagtataagtcagaaaacaaaacgtatttgaaagagatattaaaataaattttttttctctctattttctaaagatctagaagtctaagtacaaaataacagaggtcagtttatagtgaatcttatttggagatgttagaaaacttctgtaggtattgcaagaaaaaaaattttaaagaatgttatggtctttagctcatacgctctcttaaaaatataaaagaaagaaagctaaagactgatagtgatgggcttcattaagattagttggagaggttagtgtgtgtctcctaaagtgagaaacagtgggagctactgcttgattcatgtatcacagaaaagaatggcagtgtctgttttgcttctctgatggtagagaaaggagagcctacattagaattagtctacacc

SEQ ID NO: 116077 - DNA, 600 bp, Homo sapiens
agtggtgtaaaatatttaaggtgttgaaagaaaaaaaaaacaccactaatctggaattctatattcactgaaattatcctttagcagtaaagcagaaataaatactttctcagataaacagaaactgaatacatcgccaggtgactttctctccaaaaaatattagaagaaattcttcagggagaagaaaagtataagtcagaaaacaaaacrtatttgaaagagatattaaaataaattttttttctctctattttctaaagatctagaagtctaagtacaaaataacagaggtcagtttatagtgaatcttatttggagatgttagaaaacttctgtaggtattgcaagaaaaaaaattttaaagaatgttatggtctttagctcatacgctctcttaaaaatataaaagaaagaaagctaaagactgatagtgatgggcttcattaagattagttggagaggttagtgtgtgtctcctaaagtgagaaacagtgggagctactgcttgattcatgtatcacagaaaagaatggcagtgtctgttttgcttctctgatggtagagaaaggagagcctacattagaattagtctacacc

SEQ ID NO: 116078 - DNA, 238 bp, Homo sapiens
agatatccaatttcatcactcacaagttctactttccacaaaaaatatgaaacaaaaccaattctgccaagttatttgctacattataataamgatgatctttcttcagtttccaaaaacattcctttgcattctgagttctcatcagaatgccctttactatccatatttatatgaacatctgttcaagattacttaggtattctcttaaaatattgaggcattctctgtaatttct

SEQ ID NO: 116079 - DNA, 607 bp, Homo sapiens
ccaacttaatggctttggaaagaagttcatgtagaagaggcagaaggaatagaaaaattaaaagcatgtaatgtcatagaaagtgagagaaaatgttatcacatattgggaaaagtcaaatataatggaaacaaaaaattgcaattttttaattaacaaaaatgtttccttagtgactgtgttgagagacattttagtgttatggcagaactagcaacatgagaacttgaagaaygaatgaaaggtaagtgactgaagatgagggtgtaaaaaaagtcatgaaaggtcttttattgtgaaggaaaattgagacagttttatttgcaggaagttatggaactgagggagttcaggttagtgtttccaaaaaattaaactgtaaacagaattgagcatattttaattcattaagaattaaataagacttaattgagacttaattattaatgaagaaactaagtgtgtcagaaaactacaagcaacaatagacaaggggtgactgatagagttatgtaacagagagaacaggagggtataagatccagggcataaatagaaaactaaacttgctaacacaaatgacttgcaaatcattggtaaagataca

SEQ ID NO: 116080 - DNA, 607 bp, Homo sapiens
ccaacttaatggctttggaaagaagttcatgtagaagaggcagaaggaatagaaaaattaaaagcatgtaatgtcatagaaagtgagagaaaatgttatcacatattgggaaaagtcaaatataatggaaacaaaaaattgcaattttttaattaacaaaaatgtttccttagtgactgtgttgagagacattttagtgttatggcagaactagcaacatgagaacttgaagaatgaatgaaaggtaagtgactgaagatgagggtgtaaaaaawgtcatgaaaggtcttttattgtgaaggaaaattgagacagttttatttgcaggaagttatggaactgagggagttcaggttagtgtttccaaaaaattaaactgtaaacagaattgagcatattttaattcattaagaattaaataagacttaattgagacttaattattaatgaagaaactaagtgtgtcagaaaactacaagcaacaatagacaaggggtgactgatagagttatgtaacagagagaacaggagggtataagatccagggcataaatagaaaactaaacttgctaacacaaatgacttgcaaatcattggtaaagataca

SEQ ID NO: 116081 - DNA, 607 bp, Homo sapiens
ccaacttaatggctttggaaagaagttcatgtagaagaggcagaaggaatagaaaaattaaaagcatgtaatgtcatagaaagtgagagaaaatgttatcacatattgggaaaagtcaaatataatggaaacaaaaaattgcaattttttaattaacaaaaatgtttccttagtgactgtgttgagagacattttagtgttatggcagaactagcaacatgagaacttgaagaatgaatgaaaggtaagtgactgaagatgagggtgtaaaaaaagtcatgaaaggtcttttattgtgaaggaaaattgagacagttttatttgcaggaagttwtggaactgagggagttcaggttagtgtttccaaaaaattaaactgtaaacagaattgagcatattttaattcattaagaattaaataagacttaattgagacttaattattaatgaagaaactaagtgtgtcagaaaactacaagcaacaatagacaaggggtgactgatagagttatgtaacagagagaacaggagggtataagatccagggcataaatagaaaactaaacttgctaacacaaatgacttgcaaatcattggtaaagataca

SEQ ID NO: 116082 - DNA, 578 bp, Homo sapiens
ttaaatccacaattccaatagacccaaataaggtgaagacaaagaaatccacactgaggcacataagtgaattgtcaaaagtcaaagacaatgataattttcaaagtagcaaaaataaatgatttgccatgtactggataattccttaagactatcagtgcatttctaagcagaaatcttgcaggctagaagataatgacaggacacagtccaagtgctgaaagaagaaagctacccaccaagaacgtaatacatagagacactgtccttcaaaaatgaaggggagataaagatgaaaggtaggttaaaaaaaagagaatagatcacatgttaggtcacaaaacacaccttaacaaacctgagaaaaattaatcacaccaagtgtcttttctraacacaatgaaactagaaatcagtaggagaagaacaactaagaaattctcaagtattggaaatttttgatttcattgcatcaaggagaaacagaagaggggaattagaaaatatctccacacaaattaaaatgaaaacacaatataccaaagcttatgaaacacagcaaaagcaggctaagaggg

SEQ ID NO: 116083 - DNA, 549 bp, Homo sapiens
atagacaaaaattatttctcaattcataaccagaaacaacacatcctctgaatatgcttttatttaacttattttaagattttatacaaataaatatttagcaaatatttattgagggcataatttatgccagactctagttaagaaatggaaaaaaagtttggtaacgtagagtttctttcattgatgaattcatatttcttttgaggtgtaactcatgcttgcaaaagaagtgtcaaytggaaaatattttcaaaatgaagagtttccttgtaagagaatatctgtaatacaagaaaaggaatgtcatcacatgaagacattagggaaaacaacttgtagcattatagtatcgtaaacatgttttcactctatgcacatattttctaatatatctcactcattcagtcacagatactcgttgagcacttatatcaccattctctggtatgttatggaagagagctatattgaaaacatacacagagtacagcttcctggaacttacatcgtagtggagaatctagacatgaatacataatcataaat

SEQ ID NO: 116084 - DNA, 467 bp, Homo sapiens
ttcattgactcatcagttgtggaagagcatgttaattaattttcatgtatttgtaaaattgtcaatattcttcctattgatttctagtttcataacattgtgataaaaatatatttaatatgatttcaattttcttaaatttgttccaagacttgttttgtggcctaacataagatctatcatagaaaatgatgggccaggmgcggtggcttatgcctgtaatccccgcactttgggtggcctaggcgggtggatcacttgaggtcaggagttcaagaccagtctggtcaacatggtgaaatcttgtctctactaaaaatacaaaaaattagccgggcacagtggcatgtgcctgtaatcctagctgctggggaggctgaggcaggagaatcacttgaacctgggagacggaggttgcagtgagccgagatcgtgccactgcactccagcctgggggacggagtgag

SEQ ID NO: 116085 - DNA, 467 bp, Homo sapiens
ttcattgactcatcagttgtggaagagcatgttaattaattttcatgtatttgtaaaattgtcaatattcttcctattgatttctagtttcataacattgtgataaaaatatatttaatatgatttcaattttcttaaatttgttccaagacttgttttgtggcctaacataagatctatcatagaaaatgatgggccaggcgcggtggcttatgcctgtaatccccgcactttgggtggcctaggcgggtggatcacttgaggtcaggagttcaagaccagtctggtcaacatggtgaaatcttgtctctactaaaaatacaaaaaattagccgggcacagtggcatgtgcctgtaatcctagctgctggggagrctgaggcaggagaatcacttgaacctgggagacggaggttgcagtgagccgagatcgtgccactgcactccagcctgggggacggagtgag

SEQ ID NO: 116086 - DNA, 467 bp, Homo sapiens
ttcattgactcatcagttgtggaagagcatgttaattaattttcatgtatttgtaaaattgtcaatattcttcctattgatttctagtttcataacattgtgataaaaatatatttaatatgatttcaattttcttaaatttgttccaagacttgttttgtggcctaacataagatctatcatagaaaatgatgggccaggcgcggtggcttatgcctgtaatccccgcactttgggtggcctaggcgggtggatcacttgaggtcaggagttcaagaccagtctggtcaacatggtgaaatcttgtctctactaaaaatacaaaaaattagccgggcacagtggcatgtgcctgtaatcctagctgctggggaggctgaggcaggagaatcacttgaacctgggagacrgaggttgcagtgagccgagatcgtgccactgcactccagcctgggggacggagtgag

SEQ ID NO: 116087 - DNA, 521 bp, Homo sapiens
gatttcctaagaaaactttcttatccctccttaggaaattaatctcagttaccttccctgtttctctttgtctgaatagctaaccataatcattaacacataccctggaagatgtgcattttattaaaagcatttgtttcaaactgtcaaaattagaaggatttaatcaggctaaacatggaatatctgaaatgtttacttgagagcactggatgacaaagaaaatgtaaatagcctcctcarccccctcctttaatggagggaatataatggcatgtcccacctctcagtgtttatattaatttcagttaaacaatttggtgtgagagcaattatcacaccatatgtaaataaaaacacaggtagaaataaaattaaagcacaaaaaaatataagcaaaattaatttaaaagaattcacagaatgctattctttaaatcaggtatgaaaataatttgacaccaaaaggattgattccccaaattctattgtagtcagtagttacaaagttccctataatg

SEQ ID NO: 116088 - DNA, 551 bp, Homo sapiens
actactattcaattcagcaatcccactacagggtataaacctaaatggaactaaatcaccatatcaaaaagacacctgccatcaaatgtgtatcgaagcactattcacaatagcaaaaatatgcaatcaatgttaagtgtccatcaatggatgactgaataaagaaaatgtggtatatattacacacacacacacacacacasgtgtgtgtgtacgtgcatagtggaatactagttacccataaaaatgaatgaaatcatgtcttttgcagcaacagtgatggaaatggaggctattttcataagggaaacaactcaaacagaaagtcatgttctcacttataaataggagctaaataatgcatatacacggacataaagggcggaataatagacactggagtctctgaaaagtggggtgatgggagggggtgaaggatgagaaattacttaataggtacaatgtaccctattcaggtgatggttacactaaaagctcagacttcaccactatgcatatatattcatgtaacaaaattccagttgtagctg

SEQ ID NO: 116089 - DNA, 645 bp, Homo sapiens
gtctgtttagtttggcgacaatacaaatcacaatgtggcctactggaaaccatctatagacctgtgctaaatattatccatcaactatgtagaaggtggattgcattcttcaactcttaattcacaactcaatttgggaaacactattgaaaaggttcagagggagctgacctcacacccctgaactgaggaaacagggcctgcattcagcaaagtggagactcatgcacatcaaattacagagttttcgttggagttagaataattgttatgtgtaatatgctaacttggcatatggagaaatatcatttcaaagtcatttagtgaatgcttcagatatttgcaaacatttgcattttcatttgacatttttaacactctgtaaaaacacaacacagttgaactcgatttgcttagtgcacrtatcaattcatgaaaaaaactgaaaactactagttttatattaagatgatgaaaatgaacctacattgattaaatgcttaaataagtttggaacgagtttaacaaaagctttccaaacatttgtgaaactttttataatcttccttacatgtgggattggtagtaaaatctgatacgagggttagcttttcaaatacatttcaaaaataataagacctgtca

SEQ ID NO: 116090 - DNA, 498 bp, Homo sapiens
ttccttacatgtgggattggtagtaaaatctgatacgagggttagcttttcaaatacatttcaaaaataataagacctgtcagtattccatttgaatcattaactgtatacggtcccttcccatatgtaccaatggcttcctcgcayacttgtggttacaacattaccttctactgctaaatgcattcccaccccaatatacctgcctgcctattgtatattttgagtttcctagaaaataaatttaaaagaataaatgtagtttaaggactttttttttgccttttactagtattctatttttttcacacatgattatttttcccctagatactggaagagaaagaatactaaattcagacttagaaaactgtagatatgatcatagataatattttgacatggggagattcaaataaaagtctcaggctttcaatatgtttgtcaacagaaagagacggactgaaactcagagagggatggactgaaactcaggga

SEQ ID NO: 116091 - DNA, 666 bp, Homo sapiens
ccttacatgtgggattggtagtaaaatctgatacgagggttagcttttcaaatacatttcaaaaataataagacctgtcagtattccatttgaatcattaactgtatacggtcccttcccatatgtaccaatggcttcctcgcacacttgtggttacaacattaccttctactgctaaatgcattcccaccccaatatacctgcctgcctattgtatattttgagtttcctagaaaataaatttaaaagaataaatgtagtttaaggactttttttttgccttttactagtattctatttttttcacacatgattatttttcccctagatactggaagagaaagaatactaaattcagacttagaaaactgtagatatgatcatagataatattttgacatgggragattcaaataaaagtctcaggctttcaatatgtttgtcaacagaaagagacggactgaaactcagagagggatggactgaaactcagggagggtttcatcttggtggcaactttaatcaatttgttagtggatatctgagagctgttctgagagattctgaaaacaagcccattcagactaagaatcccaactcccaatgtggatgaatgccatgaacatgggctcatgatacttgtgacaatgttgccatgtagttacc

SEQ ID NO: 116092 - DNA, 446 bp, Homo sapiens
gaattcttgattctgtgacttggaatgggaaaaaattaattgttgttagaatgtgytgattttcttttggaagcatctgatgatgcagatataaaagagtttgaaaaattttctgttaatataattcatggctattgcatccattttcatacatctgtgcgtatacatacacactttgaacaaaagataagcaacattaatttagaaaagtatttaatacacaccaaaaaccatgcagacagaatgctttatatatgctttctgcagtaggccatgttaaatcattgctacaatcttctaagaataattactaaactttaaattactggttgatgctttgtcagcattgtcttggtttttatttcatcagtgcagcctttatattggttgattcatgtcaacaaatattttgtcttaagtttttcattaaacatacaattttgaaa

SEQ ID NO: 116093 - DNA, 551 bp, Homo sapiens
ttcagcctttgactttgtgagctggagtatcttcatagtgcttaggcatgaagctaaagaaatrctttttttgtaattgttatgacccagggaaagtgagactatgaaaacatttatttattttaaattatatttctaataagtaatatatgcagaaagtatgataaacattaacattgtagaaatctgaatatttcatttaactcatacttggtgactcatattttagctttaattcatcatttaaaatgggctatttaacacctattgtatgctatgtattgtgctaggccttagctacagagaatgaaaaaatgatgtccctgttttttaagcttattttgttgttttatccaattttgttttgttatagttttttgttttatttatttatttattttacgttgcctctaaaaagatgaaaagaaagaaagaaagaagaggaagatggaaggaaagaataaagggtttcggacatagctcaaaatagagtggtgggagactcactagttaaaaaaaaattgttaccagaaatctttgtatttacaaca

SEQ ID NO: 116094 - DNA, 600 bp, Homo sapiens
tagtaaagttatctaaaatatatatgatacatcttagataaacttgytttttaagggcacattttaaatactgttttatgctttactgtgtgagtttaaaaatggtttcaattttatctcatataaatcctctgttgtcttattatcctctgttcgtaaatgaggaatctcagactaggaaagcaaaggaatgacttaccagagccacacagaaagtaagtacaaaagtctccagacaccaaatttattgaacttgagtaaattatttgatggtgctttaaatcacaaagaaggcactgcattattatcacaatatcagtattgaaaagtgttcaacactaaacacagtcttttatgatgtttttatagaactggtaatgcttctagtggtaatgataatgctgaagaaaatctgactggtaatatactagaaaaacactccaggatcatgtgctgcctaagatgcctgttgaaacatgcagagaactaaaaaacaagacaaaacaaaaaaccaacaacaaaaaataaataaaaaccaaaacaaacaaaacaaatttaatgtatgttagaaaattgatgctaagtaatgagttggattta

SEQ ID NO: 116095 - DNA, 523 bp, Homo sapiens
tatttccttaatcaaaccgaatcccatggtcatgtscaagttaaactgtaaggaagtgcaattctaccaagtggtcaggagaaagggaaccagatattcatgagcaaccaaacaactactgcatccacttcccaaccaaagtaggaatctcctcatctacgtctctgacaagggctgaaggggatctgattgggaatatggggggtttgtgttgtcattttaaaaccaaggtatataggggatgtcttctgaattcaaagagtaacatggaatagttgcagaattaattgtttcagtttcacttgtctgccttgctctgtagtgtgggcaccaaagttccccagtccacatcacaggtggctagtagtcaacccccaccctcaaaagaccattacagcctaagattataatggccatagctggaccaagagcttaaagggtaacctcagtctaacaatgacaacagcattcaggtttgcctcgatttgcaaattcaagtgcaccgaggcataccatgtgaaat

SEQ ID NO: 116096 - DNA, 322 bp, Homo sapiens
aaggccacgtgccagcacctaagaatccgagatcctttacacatccccagtctgtcactcaagccctccgggyctcagtttccctccctgtgacatgcgtaccagaaggaatgtgaggataaaatgtgaaagaacattagaggaggaagtggcccagtgagaagggggaaaccaccttccaccagaaactgctttggtgtgaagcctcagaatacccaatcagcggctgccggctggaaaagcaggctttttattgacaaacccgcagaggatcaccttcacaaaacacacccagggcctaattaaaatcacagaagaacca

SEQ ID NO: 116097 - DNA, 531 bp, Homo sapiens
ctaagctgggcctttgactaaacaagaagatgmggaaaggcttccaggagtctcaggtcatggcccagaaagaaagcaaaatgcctattaaagtgtcaagcatggtaggaaggaggcagcttttcactggaggatgttaagtgagagatggagccaggaaaagtggaccaaggccctgagaatgaaaggatggttagttttagatcagaaatacccaattttaagctccttgaatttcaggtatgctgtggtttagatatgaatcatttgtcctcaaagctcatgttgaaatttgatccccaatgtggcgggggtgggaggcggggcctagtgggatgtgtttgggttataggggcggatccctcatgaatggtatggtgctgttctcatggtagtgagttctcactatagtgagactggattcgttctcctgggaatggattcattcccacgacagtgagttgttatgacaggatgtccctcagattttgtctttttgcacatgtctgcttctgctttgacattctccac

SEQ ID NO: 116098 - DNA, 531 bp, Homo sapiens
ctaagctgggcctttgactaaacaagaagatgaggaaaggcttccaggagtctcaggtcatggcccagaaagaaagcaaaatgcctattaaartgtcaagcatggtaggaaggaggcagcttttcactggaggatgttaagtgagagatggagccaggaaaagtggaccaaggccctgagaatgaaaggatggttagttttagatcagaaatacccaattttaagctccttgaatttcaggtatgctgtggtttagatatgaatcatttgtcctcaaagctcatgttgaaatttgatccccaatgtggcgggggtgggaggcggggcctagtgggatgtgtttgggttataggggcggatccctcatgaatggtatggtgctgttctcatggtagtgagttctcactatagtgagactggattcgttctcctgggaatggattcattcccacgacagtgagttgttatgacaggatgtccctcagattttgtctttttgcacatgtctgcttctgctttgacattctccac

SEQ ID NO: 116099 - DNA, 531 bp, Homo sapiens
ctaagctgggcctttgactaaacaagaagatgaggaaaggcttccaggagtctcaggtcatggcccagaaagaaagcaaaatgcctattaaagtgtcaagcatggtaggaaggaggcagcttttcaytggaggatgttaagtgagagatggagccaggaaaagtggaccaaggccctgagaatgaaaggatggttagttttagatcagaaatacccaattttaagctccttgaatttcaggtatgctgtggtttagatatgaatcatttgtcctcaaagctcatgttgaaatttgatccccaatgtggcgggggtgggaggcggggcctagtgggatgtgtttgggttataggggcggatccctcatgaatggtatggtgctgttctcatggtagtgagttctcactatagtgagactggattcgttctcctgggaatggattcattcccacgacagtgagttgttatgacaggatgtccctcagattttgtctttttgcacatgtctgcttctgctttgacattctccac

SEQ ID NO: 116100 - DNA, 531 bp, Homo sapiens
ctaagctgggcctttgactaaacaagaagatgaggaaaggcttccaggagtctcaggtcatggcccagaaagaaagcaaaatgcctattaaagtgtcaagcatggtaggaaggaggcagcttttcactggaggatgttaagtgagagatggagccaggaaaagtggaccaaggccctgagaatgaaaggatggttagttttagatcagaaatacccaattttaagctccttgaatttcaggtatgctgtggtttagatatgaatcatttgtcctcaaagctcatgttgaaatttgatccccaatgtggcgggggtgggaggcggggcctagtgggatgtgtttgggttataggggcggatccctcatgaatggtatggtgctgttctcatggtagtgagttctcactatagtgagactggattcgttctcctgggaatggattcattcccacgacagtgagttgttatgacaggatgyccctcagattttgtctttttgcacatgtctgcttctgctttgacattctccac

SEQ ID NO: 116101 - DNA, 567 bp, Homo sapiens
cagggagtcgaacaaaggaagagaaccgaatgtcaagttggyaaaaagagatgagctaataggcttaggcaggatgagacaaaccacagataatggatgggctgactggccagcgcagatgatggaaactcctagagtgagtcacagcccatcaccctcctctctgctcaaagctgaagccatcactgtcaggccactctgttgatgtgaggctcaaaccaccatctgggagccatgtgcgcactttcacagtaaaaaacaattattaatagaatgatgagtctaagatggagtgggtgcaaagacagagaactctggagaattaggggaagaaaaagactaggctttctgcaaaggtcaggggtgtagtgtaaatatcccctctgtttccttctgttacttgcatgctcctacactaccttctcagtcacaaggtgaatggaacctcaaatgctcactctcaagttggcactggcaacatatggcttggggtccacagatcctaaacccatgtttagcttcagcccaggttctttctacctggctcttgatttctcagtgaaaggc

SEQ ID NO: 116102 - DNA, 580 bp, Homo sapiens
gaattcaggagcaatgggcagagtcttggaagtaatagagtgggtaatgaaggatagggaaactgttgccaaatgggagggagcagcgggggcaggagttgggaagtgaatgagttaagatctaacaaaaaaatcagaactggaaggagacacctcctctctgtttctgcccatcttggatccgggctgtcctctgggcagacagatggctccagtctacatctctggctccracttctttccttagatcaattcccacaaatcactttctactgtccagagaaatgttctttctactactgtccagagaaatgaatcattctctacagaatgcaaatagaaaaagaaggaagcagacgtcctggtttaaccaatcagaggagtagaaattacccctggccatcagtggggagatagatttggaggccagattgcattttaaaaggctttgttaaccaagttcttttttaaatttaacattccttcatgagcatttccctcatcatgaagagtagtcacttaaaaaaattacggggctggacacagtggctcacggctataatctcagcattttggaagg

SEQ ID NO: 116103 - DNA, 650 bp, Homo sapiens
tttactagttaggtttacttcaatgcattctgcaccactgagggacagccttcattcacacatcatgagaatggcatcaggctcaatttctatcttctagaagtagagatttataacagcaaaactaaaaaaaactataccactgagcacagtgataaagtgcagtttcatatttttctctaaaacacaytcacacaacagaaatataacatcaagatggaaaactgtttctgcaaacagcaggggcccaaagatgcagtgggtaaggtttgttaagctatctcgttctgatcactgaaaataacaaggtttgaccaaaaaaaaagcgaacaaattttactgaacgtattttacaaagctcactcatctagatgagtggtaattccataaaagtattactacttattactgttaataagagcaccgaacatgtatccagcacaggctgttttcgaggccctgtcctaagttttctagacattagtacattcattagtacatttcttgacattagtacattcattgtaatatagctttagtcagaagtccccaacccgggggccatggacaggtactggtctgtggcctgttaggaaccagatggcacagcaggaggtgagtgatgggcaagagagacaagcttcatctgt

SEQ ID NO: 116104 - DNA, 594 bp, Homo sapiens
tttgaactcagctatatagatatttatttatttaaaatatcttctctatcattcccagccttccaggagagggaggctmtagcatgtgctcagtcagccattgtaatatgaaagcccaaggaccaactcagcacagacctgcatgcaccaagagctgggaccagctgggtcaacaggcatctctcaggatgccctcacctacggatgaccctgagggtgagacagctgatccaataccttgacactccacaaactcctgagtacttggctgtaactccagtgggacataggatgtacctgacattgattaggaacatgttttatcttgcccaaaggaataagggcttaaaatagaagttaaatttaagaaagaagaacttacattttttatatccttgtaaaggtaacagggtcagaaacatattcgtgcattaattctggaaattcttattcagtaactactacatgccgagcactgttctaggccctaaagatcacacaatgaaacagacagacatccaagtctcctgacttccattcggtgtttttatccatggatccccaaaagcacctcgttttacataatgcaactga

SEQ ID NO: 116105 - DNA, 553 bp, Homo sapiens
ggtttctttccttcccttacttacaaatyctctctctgaagacctcatactcttttatacaagatagcagatcacctggcaggaacgtgaaataaactctttggaatcctaacgtgaatgtcagctccatgtatttactaaatcttggcagatttcctttcttgagtccatgtaagctattattctctttattagtgtttctcaaagtatagatttcaggccaccttccttaaaatcacctcaggtacctattaaaaatgcactaattgagttgctcttaatatctactgagttggagtgaatcccaggggagctattgctccaagtattaattctagtatgagaagaaaaaatatgtttatacatatgatgggttatagtgaaaacctacttttttcagcattgtgcctttcattctaataatgttaattgagccccaattttgtgccaggcaatgtgttagaagcgaaggataaactactgaacaaaaactgggatgcaccttgccaacatagaattttcaagttagggaacagacattaataaaatagct

SEQ ID NO: 116106 - DNA, 566 bp, Homo sapiens
gtaatatgtttaggtacagttttttttttwaaaaaaaaaacagtctgggttaatatttactgaacttcttgattctgtaaaatttgatttttcttccaatttttaaatttttggtaccaatttcttcaaatattattttctgtccctttttttcaacttctagaagacatatgtattttaccacttttgatatagtcccagggaagactagacctctatcatgtttttttattaatttttaattctgttcttcagatttaaaaattcttaatcatctattttccagctcagtggctttttcctcccttatgtctattttgctctcagcccctccttgagtttacttctaatttagataataaatgttttggttctataatttctattttgttcttttccactgtttcttttgtcattccctcatcctttgctatttaaaagcacattttctttttgttcctgtacataaactactttaaaatccatgcacgcaaattccaacatctgtatcatctccatttctactgactatcctataattcttgaagccaacaacatggtagatt

SEQ ID NO: 116107 - DNA, 348 bp, Homo sapiens
ggtaactagaactttcttcatcatccactggtattgagggcttccttctggcaatgatgtcagtgaaggctacaaggagagcaataaagaggggcctcccaactttccagccagcaggggtgatggcattggaggaataatggggagcccagtatcccaccttcacaaaacagtcattgaacacccttcttcagggagtcaaaggtcagaaatacataagtaatatgcagagtttyacaacataaatgacaaaatgtccaagatacacttgaaaatcattcatattaagagccaccaaagacctaaaccaaagcagaaaacaatcaacagacaccaacactgacatga

SEQ ID NO: 116108 - DNA, 553 bp, Homo sapiens
caattttatgtctcccaaatcagtgtgttcataggcagaggtaggtctcagcttattcaaatgtgtttaaatctgcatgttcactgaagaaaaatgtgaaagcctaggaactaatctaaggccgtacatccactaatatacttcccaaacagctgaatgaattactgttcaatgattggtggcagtgccccctttccagtatgaatgcatcaaaagcagaatatagaagactcacatacatgcttccggaaacatgcacacctactaagaaaaacatgactattaaaatttaactagcattgaacctttcagctaagttgaaactatcttgagaaagctatttttagaacatacaaagttagaagaagcacrtttgaaacagtggcgacttctgggcagacctgctcagtcaatggaaaaggaaaggctgaagccattacccaggaaacctaaggagaaagcaaattagatcttttcattcaattttggtggcttttttcgttactgtgcatccttaacttgctaagggaagcaaaagcaatgaggtcattta

SEQ ID NO: 116109 - DNA, 553 bp, Homo sapiens
caattttatgtctcccaaatcagtgtgttcataggcagaggtaggtctcagcttattcaaatgtgtttaaatctgcatgttcactgaagaaaaatgtgaaagcctaggaactaatctaaggccgtacatccactaatatacttcccaaacagctgaatgaattactgttcaatgattggtggcagtgccccctttccagtatgaatgcatcaaaagcagaatatagaagactcacatacatgcttccggaaacatgcacacctactaagaaaaacatgactattaaaatttaactagcattgaacctttcagctaagttgaaactatcttgagaaagctatttttagaacatacaaagttagaagaagcacatttgaaacagtggcgacttctgggcagacctgctsagtcaatggaaaaggaaaggctgaagccattacccaggaaacctaaggagaaagcaaattagatcttttcattcaattttggtggcttttttcgttactgtgcatccttaacttgctaagggaagcaaaagcaatgaggtcattta

SEQ ID NO: 116110 - DNA, 556 bp, Homo sapiens
ggctaattggccatggtagaggcaggaggtggacacagggatggatgctgcttcatccagggctgtggatggtatagaccaccagagtagggtcccaggcaaaacaagaagcagtgacatgtctatagttggaagcatgagagagatgaggaagagtttggttggaggcaccctgcttctggaaaaagtctggctgagtgaattgggtactgctgagaagggccctgtgggtttgcacaaaggggaaccagattgcatgtttaagtttagaagtgccatgttcagtctrggacttgaagagggtctcctatcaccttgaagagggtaattctggaaggcagcaaagaaaccgtctggatagttaaagctgagctaagtcagtcccaataggaagattgaggagcagaaagtttgggttcaagaaacagggtttaaaaagaggaaaatatatatttaaaaacaacaacaaaagaaaacagttagtgaaagttagatgagggaagattgcagaataggagaggtagtggttatagagtgcaaaatccaagttttggag

SEQ ID NO: 116111 - DNA, 583 bp, Homo sapiens
tggctaattggccatggtagaggcaggaggtggacacagggatggatgctgcttcatccagggctgtggatggtatagaccaccagagtagggtcccaggcaaaacaagaagcagtgacatgtctatagttggaagcatgagagagatgaggaagagtttggttggaggcaccctgcttctggaaaaagtctggctgagtgaattgggtactgctgagaagggccctgtgggtttgcacaaaggggaaccagattgcatgtttaagtttagaagtgccatgttcagtctgggacttgaagagggtctcctatcaccttgaagagggtaattctggaaggcagyaaagaaaccgtctggatagttaaagctgagctaagtcagtcccaataggaagattgaggagcagaaagtttgggttcaagaaacagggtttaaaaagaggaaaatatatatttaaaaacaacaacaaaagaaaacagttagtgaaagttagatgagggaagattgcagaataggagaggtagtggttatagagtgcaaaatccaagttttggagatggacctattcttggtagtgaccag

SEQ ID NO: 116112 - DNA, 519 bp, Homo sapiens
ttctgaaaccttaagaagtttccactgggaaacttccaatgacagtttcccagtggaagcctgggttcagtggtgctccaggcttttcattccccagaccatctatttgttcagccttstacagctcagaagcttcctctgcttgacagcctgccagattccagccctcctgccctttaccacaaccagcagagagcatgtttatttgttcagtgccagttttcttcctttcttgttacttttggctcccggtagccaatataactcaaaatgacgtgtcggagattgaaacctgagcaagctgatagctctttccatggggtcaacaagtggataggacagagaagagtgagtggaataaagtaaaggtctgtactgctgtatctcatccttcttatgtgggaaatttttttaaatatctcaatgtaaaatgatgctacatttaaaaaaaaagttgattgtaaatgagcaaaatttaaatgtagtattcataaacacatatacaaatatactagcggt

SEQ ID NO: 116113 - DNA, 417 bp, Homo sapiens
taacaaggcaagcatcaaaggtaatagtttggggtgagctcgacctagttacattaataacgagaggactagcaatagaaggggaaaagaaatatagcataagaggatcaaacccgttttagctttaacttggttggaattggccctgaaatagctgtccatgattctggagtgggtggtgctcttttgactcaggtatggtgagtccattctttttcagtggtgtggacggctgtctcagtcattagaaacactagataatgtccctcccaggtgggcttgagcttcctttctttctgacctytgatgagaatgtgatcactgtccgggctggtggtggtgaactggaaattcaaggggtggtgtatgtgccaagaggcctttagtcctaaggaaagagaaagtggaggatagacc

SEQ ID NO: 116114 - DNA, 527 bp, Homo sapiens
taaatgtgacggtatcactctgctataaaaactatttccaaaacaaaacaaacctatctaccccctttcttgatttaaaaaaaaaaaraaagaaggaaaatttgagggtttttgattttttcaacttcacataccggtttgcctttgcaaaaaaaaaaaaaattgtttagtctcaaagtatagctgcaaggtggaccggctgcacgggtcccagagggccgctcgcctccgacggtcgcagtttcagccgggccgcgcccgcgagaaacagcggagaggccccagcagacgggcgccgccggacaggtttaccgtccgcgtcggccccggggaaccgctccctcgcgcccgcagcacttgttcgcggcgcggactccacaccgcggccgcccgccccaggggaggagtgagtccgccccagcggcgccaacccggggacccggggcaagggttcggggccatccgcggccggggcgcgccccccatccggaaagcggcgacggcccccaagttgggctgcggagtgg

SEQ ID NO: 116115 - DNA, 490 bp, Homo sapiens
taaaaggccttcccgcccatcattccttctctcatatccactttttcccattgccatgaactccttacctttctctatccatggcaggctttccttctatgccttggtgctcttgctttgtttgaaagacccattcctgcacatccatctggcaaactcctactcattcttcaagacccatctgaaatgtgcctccttaggaaatcgtccctgcactccctcccctggtgtggtaggctgaaaaatgagcctccccaccaacaaaaaaaaatacttatgtcctaatccccagagtctataagtatgttaccttacatggtaaaagggactgtgcagaggtgattgagtatcttgagatggggaggttatccaggtgggcccagtgtaatyacaagggttcttataagaggacagtgagagactcggagttagtgtaggatctgtgaagcaggaggttggagtgaggctggggagagaccacacaccacag

SEQ ID NO: 116116 - DNA, 564 bp, Homo sapiens
ggatgtgtgagcatgtggaggggtaatagttttttcttttttccttttcaccataggagcaaataaccatcccccaccccccaaaaaaaaactggtttgtgtccaaataagtttgataaatgccaaattagagaggttaatgtattttcatgctgcagaaagtctcagagtcttcactatgcttatgcgaatctccaagagaggcataartagcacataagagttcccaaacttctaatatgagttttcttttttctaaagcaaaaccatttttagcactctcacaagagtagggtttcttcagaagctctttgggaagtgctaactttgtggatttctgaatctgtagggttctgattatggttcctgtcttagtgatatggtccaagcaggaagcttggagagtcctgcaggggctgagtgtttccctcttgggaggctgcaagctgcctctctttctgacatcttagtagttcagataaatgaaatgcgtttttgttctaacccttcccaacctattttatggaaaacatcaaagtatttaaatacaaagagtaaggattt

SEQ ID NO: 116117 - DNA, 377 bp, Homo sapiens
aacctataaccctcatttctcccactatctgcttcctctcctgtctcagaatcctgggagatactggataaaaatcaccagtgtcccagaattaggaaaaaacaagcagcrcctttcagacattgttgaaaatgcaattcctaataatgaatactttttaggttctgcttagaacactcatatatagagtaacaatacttgctcttactattaggttggtgcaaaagtaactgcagtttcggccattaaacgtaatggcaggaaaagtaatgcattaaatgtaatagcagaaagtgcaattacttttgcaccagcctaataagtgtgatgaactctaacatttgttattcttttccgttgcatttcattttatttca

SEQ ID NO: 116118 - DNA, 446 bp, Homo sapiens
ttctaattctagttctcttgctgtttctaccacatctgcagttacttcctctggtgaaatcttgaacctttcaaagtmatccatgagggatggaatcaacttccttcatactattcctgttaatgttgattttgacctcttcccatgaatcacaaatgctctgtggcatctagattgtgaatcttctccagaaggattttaacttactttattcacatctatcagaggatcaccatggcagctatagccttgcaatatgtattttttatgtaagacttgaaagttgaaattactacttaaaccatggacttcagaatgaatatggtgttagcaggcatgaaaacaatattaatcttcttgtatatctccatcaaaactcttcagtgactatttgcattgccacttagcaataatattttgaaagaaaacatgctttttctggcagt

SEQ ID NO: 116119 - DNA, 535 bp, Homo sapiens
tatcttcttgttaagctgaaatctgttaacccataacttccaattattgatccattcacctgcctggatcaaccatcaccttccttaggtcagcctgtcaaatattggaatacrgtttctgtgttctgcttaatttttaaactccctttaagatgtgaaagtcggtccaactcctgctcttcctgaaagatattgctaccatttctcaatgcagtcttcattttaatactctttataagtaattacgagcaaaatcaaataccatgttctaaatttaatatgaagaacacagagtaaaataaggcaaatgtctgcctgttttccctttttccttccagttgtacagtgcttactaagtatcaagcacttttctaactactttacagatattaattgctctaattctaatgcctgagaccccttggccagggtaggtggtatggactccagacaggcagggtgttatctgtgaattaaatcttctaacttgtggattaactccatggatttttaacctacggattaagtcttaaaa

SEQ ID NO: 116120 - DNA, 535 bp, Homo sapiens
tatcttcttgttaagctgaaatctgttaacccataacttccaattattgatccattcacctgcctggatcaaccatcaccttccttaggtcagcctgtcaaatattggaatacggtttctgtgttctgcttaatttttaaactccctttaagatgtgaaagtcggtccaactcctgctcttcctgaaagatattgctaccatttctcaatgcagtcttcattttaatactctttataagtaattacgagcaaaatcaaataccatgttctaaattyaatatgaagaacacagagtaaaataaggcaaatgtctgcctgttttccctttttccttccagttgtacagtgcttactaagtatcaagcacttttctaactactttacagatattaattgctctaattctaatgcctgagaccccttggccagggtaggtggtatggactccagacaggcagggtgttatctgtgaattaaatcttctaacttgtggattaactccatggatttttaacctacggattaagtcttaaaa

SEQ ID NO: 116121 - DNA, 599 bp, Homo sapiens
gggaaaggtaaataaaatagtgccttactatcagaggaaattatgttttatgtaggttataattgtgaatgttcactaaaagagtgatagtaaaatatccaaaacagaaaaactgaactgagtttttaagtagaacaggcataagtaaattaaattgtaactttttatatatgaaaaggccaatgtaaaagctattttcaccataacagaattgaagtagtattggattcgagaggattgaacttgcattttcaatcccctttgtaaatataagctgcactcttgcttcactccaggctyctagctcggctgcagtctgtcttcaaaacagtgtcattatgacttttagtgtttttatccacactatttttttctgttttcactaaaatgaatccaacaatccacttcctccactactgacattgacttcacacagattatacatcattacgactataaatttcggatttgtcagtgtctactgagccatcagaactgtttggaaatcatttttctgtctcttttcaatttccttttgagtttccataatgtctataccaaagcctttattctgaatcctattgtactttcaatgccat

SEQ ID NO: 116122 - DNA, 569 bp, Homo sapiens
gtgaacgatgcaaaaaggggagtaggaaaatatggtgttctgtaatattacactatgctatgctatgcatattgtaattctggactatccctcagattttagacatcataaaattrtgaagtaataatccttttgacatacggtgtaaattacaaggaataaagtttaatcttaatagtaaattgtaaaaatttgaagagattaaaaacatattaaataaagactagttttaggagaataaaaattatactaaaatgcatcttcaatatgataaaagataattgaaaacaaaaatatcatactttgagaaagtcaaggaaaggaaccttggaataccttcaaaaatattatagatagagctactaaataattttgagaactcttctcctgcagatagtgaaaattgcttgcaagatgactagctgcagttgatattgtcaatttgttcatagcatggcttccaagtactgagcacctgaatcttgtgctcagctgacagagaggcatgcttcagtgaagtggcattggaatacaaataaattggataccacttagagacctgaaatgct

SEQ ID NO: 116123 - DNA, 585 bp, Homo sapiens
gcccttctctctcctctgtctactgaagaaggtgctggctttccgtttgcctcccgccatgattgtaagtttcctgaggcgtccccagccatgtggaactgggagtcacttaaatctctttcctttataaattacccagtctcgggtatttctttatagcagtaggaaaatggactaatacagacccccacggcttagagataaaaactcaaactccttaatatcttcttgcatcggggcccaatttttctttarcaattctatctcctcttattgttctataggtactttgctctgtaaaaatttcattctactttatgttttttcaaacataaatgaacaatttttacccctgtttttgcttatcctatgtcatcttccttgaatgccaatttatgatgtctacctcttagaatcctgttcttcaagatttagattgaatcctaatgtttttcatatccttctctgatatccccatcaaaattttctcttttcaccgagaacttaaactttgctttgttgtatgtgtttttcttatattcaagtttcattcttgcttgcatttgtattcatcacagaacctag

SEQ ID NO: 116124 - DNA, 459 bp, Homo sapiens
tcagcttggaaatgtcttaaaatacatattggtagtcgtaacaccagaggcactaattcagatactctagggcaggagatggagaatctataattttaagaaacacctctaacattttgtgtatcaagcaagttttagacgctttgaatataagcatatactctayttattatgaatgtgacagagattacatctgggtagaggagagaggaatgtacatgaatgctttggaaagaaagtggcttttatattggatcttgatagctgaataaaaatttgctaagtagtaaagtgagagtttttggtaatggcttttttcagagaggtattttactgcttgatgttagcaaaaataaaatggatttcctgtgctgaggtatctgatctctaattttctgtgatatgctacagattatatatataatatagacagacaggtggaggtatatatgactccaa

SEQ ID NO: 116125 - DNA, 562 bp, Homo sapiens
tatcagcttggaaatgtcttaaaatacatattggtagtcgtaacaccagaggcactaattcagatactctagggcaggagatggagaatctataattttaagaaacacctctaacattttgtgtatcaagcaagttttagacgctttgaatataagcatatactctacttattatgaatgtgacagagattacatctgggtagaggagagaggaatgtacatgaatgctttggaaagaaagtggcttttatattggatcttgatagctgaataaaaatttgctaagtagtaaagtgagagtttttggtaatggcttttttcagagaggtattttactgcttgatgttagcaaaaataaaatggatttcctgtgctgagstatctgatctctaattttctgtgatatgctacagattatatatataatatagacagacaggtggaggtatatatgactccaacagaatgtcttatgattagcagtgtgttaacagatagatagacggatatagatagatatttttcagtctcatatgaaaatccaactcgatacaacaaatgt

SEQ ID NO: 116126 - DNA, 588 bp, Homo sapiens
tatatttgtgccccacatgatctgttaccctcttactactatccaaaaatcagaaagaatatctctctggagattgtccattggtgtgcataaacaactgtgttgcttaaaactttttctttcagttacagtactgcagtgcaacattgaactgtaaaagttcctagagtgaaatgaaatggttctcctgacagaaataccctgaggyactctcgttatttaaatagagtgttcttcagcaaaggttgttccatcaacaattagtgccttcttcataactcctaaattattcattaaatgcaaatacaaaatctaatcactttattttacagtaaagttgaaagaagaaagattaatgctatttttttctttaaaatgcagttctaattcttttggtcttactttgtttgaatgataataaatataattttgatatgcaaggtttttgtagcaatttcatttttctgacaatgaaaaatgaaggctgaattttgctggtttgtttttcttctcagagagtcctaactgataaactacatctcctgtatacatgaatttctctttgctggcagcaaaaattctgctaat

SEQ ID NO: 116127 - DNA, 567 bp, Homo sapiens
atgtgttcaatttttctttgttcaaaatgatgaaaattaccagaaaactaagaggaaaatctcataagcataggtgtgtctgctgggaaaaaagacacctccttcatgtcacagtattattttgcctctacttgtgtcctaatataacgcctcaaagttccagagaaacaacatcttcctctgtagaaaggtaatagcatcacaacttatagcaatagatctatttgttctgtaagcattataaatatttcacattttccataaagtttgaaaagggaaacaaacaaaagctatgaatgttrtctcatagacagtcttattagagaagactgcccttgtcttccacaaggtccaagagaaaaattgctgatggttcgtgctcctaaaaaggaaagacaaaccaccctcttggtttcaatcagtgtcccaccaaaaggattttataattcactatcttatttgggagcaatgagtgttgagagagcacacacctggataatcctaagatgtctcctcttgagctccagaaaacaatgggctggtcatttcttcaaaactcagcaggtg

SEQ ID NO: 116128 - DNA, 567 bp, Homo sapiens
atgtgttcaatttttctttgttcaaaatgatgaaaattaccagaaaactaagaggaaaatctcataagcataggtgtgtctgctgggaaaaaagacacctccttcatgtcacagtattattttgcctctacttgtgtcctaatataacgcctcaaagttccagagaaacaacatcttcctctgtagaaaggtaatagcatcacaacttatagcaatagatctatttgttctgtaagcattataaatatttcacattttccataaagtttgaaaagggaaacaaacaaaagctatgaatgttgtctcatagacagycttattagagaagactgcccttgtcttccacaaggtccaagagaaaaattgctgatggttcgtgctcctaaaaaggaaagacaaaccaccctcttggtttcaatcagtgtcccaccaaaaggattttataattcactatcttatttgggagcaatgagtgttgagagagcacacacctggataatcctaagatgtctcctcttgagctccagaaaacaatgggctggtcatttcttcaaaactcagcaggtg

SEQ ID NO: 116129 - DNA, 580 bp, Homo sapiens
gggtatttccccagatcctctataagagaacgcagtcaagctgacatgttgatttgagctttgtgatactctgagtagagaacctaccatgccacactgtaattctgccctacaaacctctgagctaatacactggtgctgtttttagttttcatgtttgtgtagtttcyttatgcagaaataaattaatacatacattgtataaaatatttgctcaatataatttcaatgttaagatcatttgctaattatgcaggacattttagcatattatacaaattttaaaactgtttttttctttttaaaaaatggatgtctgaatctaaatgtggcttgatttattcaagaatgtacaattaattatattaggtcaaagaagataatgcagttatctcaatgcatgagtcaagtgctacctaactgatataacacatcatgagaaaatgtgtcattagatattattgttctcactttttaaaaataataatgccttctattgaaaaaacttggagaatatgaaataaaataatttgtcattctctgaattttgtttaagttatttgtctataaattcattgac

SEQ ID NO: 116130 - DNA, 600 bp, Homo sapiens
actctattggcaaagaatccaaactgctcttgttcatctttgtttgtttggttgattggttggttgtatttttgaacatctattctgtgcaaggtgcygagggcaaaaatggtgaacataccagaaataatctccattctgatcaagcacacaacccatagaggagacataaattaataaaacaatctctcaaatctatgtttataagatgagatgagggctataaatgaaaagcttagggatatgagtaatactatagatcaaatttctaggggatagagaaaccttacctgagaaaatgaattgccataaaagggggggaagctgaggggaagtgaacatgagcagatattctaggagtaggtttgttatatgcaaaacaccagagaaagggggaaaagaaaaaaaaaacattgtgacttttgtcaactgaaaagtgtcactatgatcttgatatcaagaaagagtggaaatggcagaacatgagtctggagcggtcagcacagctatattatactgggtttaggactttattttaagaaccacaggactcaactaaggattcttaaaaatggaaatgaattaatcatatatgggtta

SEQ ID NO: 116131 - DNA, 600 bp, Homo sapiens
actctattggcaaagaatccaaactgctcttgttcatctttgtttgtttggttgattggttggttgtatttttgaacatctattctgtgcaaggtgccgagggcaaaaatggtgaacataccagaaataatctccattctgatcaagcacacaacccatagaggagacataaattaataaaacaatctctcaaatctatgtttataagatgagatgagggctataaatgaaaagcttagggatatgagtaatactatagatcaaatttctaggggatagagaaaccttacctgagaaaatgaattgccataaaagggggggaagctgaggggaagtgaacatgagcagatattctaggagtaggtttgttatatgcaaaacaccagagaaagggggaaaagaaaaaaaaaacattgtgacttttgtcaactgaaaagtgtcastatgatcttgatatcaagaaagagtggaaatggcagaacatgagtctggagcggtcagcacagctatattatactgggtttaggactttattttaagaaccacaggactcaactaaggattcttaaaaatggaaatgaattaatcatatatgggtta

SEQ ID NO: 116132 - DNA, 645 bp, Homo sapiens
tctagttcattgtcagaatagtaaaggtatacatcattgtcttgttcctgattttaggggaaaagcattcaatttttttaccataagtatgatttttagctatgggttttctatagttgctttttagcattttgagtaagttcccatctattccttgtctgctgagagtttttgtcatgaataattgttgaattttgttaaatgccttacctgcatctattgaagatgatagtgtagttcttcttttttattctgatgatatggggaattatattgattgattttccaatgttaaatcaaccttctgccattcatgggataaactcaggcatatgttatcctttttatatattctagaattcagttagctaaaatttcatttagaatttttgtgagtgttcatgagggatattgggccgtagtttacttaaaatggttttgttttgtkattttctttgtttgtattccttttctgaagtaccttttaaccttagttgccatcttactttctctcactattttcagaggatgaacactttttataagaaatctgctgtgttttgagtgctatatgccaggaactacaagaagcccttcatattcgttatttcatataatcctcagaaccttcttcaagatagatgc

SEQ ID NO: 116133 - DNA, 645 bp, Homo sapiens
tctagttcattgtcagaatagtaaaggtatacatcattgtcttgttcctgattttaggggaaaagcattcaatttttttaccataagtatgatttttagctatgggttttctatagttgctttttagcattttgagtaagttcccatctattccttgtctgctgagagtttttgtcatgaataattgttgaattttgttaaatgccttacctgcatctattgaagatgatagtgtagttcttcttttttattctgatgatatggggaattatattgattgattttccaatgttaaatcaaccttctgccattcatgggataaactcaggcatatgttatcctttttatatattctagaattcagttagctaaaatttcatttagaatttttgtgagtgttcatgagggatattgggccgtagtttacttaaaatggttttgttttgttattttctttgtttgtattccttttctgaagtaccttttaaccttagttgccatcttactttctctcactattttcagaggatgaacactttttataagaaatctgctgtgttttgagtgctatatgccaggaactacaagaarcccttcatattcgttatttcatataatcctcagaaccttcttcaagatagatgc

SEQ ID NO: 116134 - DNA, 614 bp, Homo sapiens
agcagcctgccaacaagtaaacaaaaactgagttaagcgacatacagatacagctgaaataccaaattacccgtggcctctcctggagttatatttatttgcacacagtggggactagtatttccttgtgaaacaagagacttttactgttttgaaatagcagaactgaacctcagatgcatgagttcattaggatagatttatcctagtgaggcatggcacttgagaagagacaaagagcaaattatcagagaargttgaggtgtacacataatgccggatgtggaagggtcatagagaatttgaaaattagatttattgcctagatatctaggagtaaatgtttctgtgtagtgatagaagcagaaataattagactggaaggcatcttgagttcatttggtcctaaccattaccacagtacagaagtagtcacattgataaaatcttatcaaagcatggcttatgttacgctatgtaattttggagaatgggcctctcaaccttacaaggttgtatattccagcttttcataggaatcctagttaagtatttctcttaattccataccatgctttgctttagtagggtgaggtctgagagggaaagcagta

SEQ ID NO: 116135 - DNA, 614 bp, Homo sapiens
agcagcctgccaacaagtaaacaaaaactgagttaagcgacatacagatacagctgaaataccaaattacccgtggcctctcctggagttatatttatttgcacacagtggggactagtatttccttgtgaaacaagagacttttactgttttgaaatagcagaactgaacctcagatgcatgagttcattaggatagatttatcctagtgaggcatggcacttgagaagagacaaagagcaaattatcagagaaggttgaggtgtacacataatgccrgatgtggaagggtcatagagaatttgaaaattagatttattgcctagatatctaggagtaaatgtttctgtgtagtgatagaagcagaaataattagactggaaggcatcttgagttcatttggtcctaaccattaccacagtacagaagtagtcacattgataaaatcttatcaaagcatggcttatgttacgctatgtaattttggagaatgggcctctcaaccttacaaggttgtatattccagcttttcataggaatcctagttaagtatttctcttaattccataccatgctttgctttagtagggtgaggtctgagagggaaagcagta

SEQ ID NO: 116136 - DNA, 574 bp, Homo sapiens
ttgtaacttactggagaaaaatcttacaatgatctataccttagtgttgattgagaagtrttttattgcctagatgggtgtttgaattttcaggctacttttgcagctgagtatgaaaatgaatttccatttacttctcagatccccagagtcgagcttctccacatgtatcattctatcaacactgctgtcaagatcagagatgtctcattgccaaatccgattttcaagtatttatttttatactgaaatcctatagacttaaaaagtctttaagtcttttacttttaaaaagtacttttaattgctttccttttaaaaagtactcttctaggttttgaaaatttgccttccgatttcttcctgtgattctctttctctactcaccccttaaatgccaggattactcaggctcctttctccgtccttttctcattctcatgcatttttatggatgacatcatctaatgcatgccttctattcccagctgtgtaatcagtgaccctaaaatacaaatcgaaacctaaactcctcttctgaaccgcaaaatccatgtcctgccacctcctgggc

SEQ ID NO: 116137 - DNA, 574 bp, Homo sapiens
ttgtaacttactggagaaaaatcttacaatgatctataccttagtgttgattgagaagtgttttattgcctagatgggtgtttgaattttcasgctacttttgcagctgagtatgaaaatgaatttccatttacttctcagatccccagagtcgagcttctccacatgtatcattctatcaacactgctgtcaagatcagagatgtctcattgccaaatccgattttcaagtatttatttttatactgaaatcctatagacttaaaaagtctttaagtcttttacttttaaaaagtacttttaattgctttccttttaaaaagtactcttctaggttttgaaaatttgccttccgatttcttcctgtgattctctttctctactcaccccttaaatgccaggattactcaggctcctttctccgtccttttctcattctcatgcatttttatggatgacatcatctaatgcatgccttctattcccagctgtgtaatcagtgaccctaaaatacaaatcgaaacctaaactcctcttctgaaccgcaaaatccatgtcctgccacctcctgggc

SEQ ID NO: 116138 - DNA, 574 bp, Homo sapiens
ttgtaacttactggagaaaaatcttacaatgatctataccttagtgttgattgagaagtgttttattgcctagatgggtgtttgaattttcaggctacttttgcagctgagtatgaaaatgaatttccatttacttctcagatccccagagtcgagcttctccacatgtatcattctatcaacactgctgtcaagatcagagatgtctcattgccaaatccgattttcaagtatttatttttatactgaaatcctatagacttaaaaagtctttaagtcttttacttttaaaaagtacttttaattgctttccttttaaaaagtactcttctaggttttgaaaatttgccttccgatttcttcctgtgattctctttctctactcaccccttaaatgccaggattactcaggctcctttctccgtccttttctcattctcatgcatttttatggatgacatcatctaatgcatgccttctattcccagctgtgtaatcartgaccctaaaatacaaatcgaaacctaaactcctcttctgaaccgcaaaatccatgtcctgccacctcctgggc

SEQ ID NO: 116139 - DNA, 394 bp, Homo sapiens
aggtttatttgaggggctaagmgtgctggtatttacacacacattacttcttgtgtctcttcaatttattggttcatttcaaaaaaccaaagctaaaaatcataaaatattcattatgtaaaaagaaacaatgttcaatgaatccatacatacatactgaagacctttgtcggatagttgacaagtatatttgcatatatgttttccaaggtaaaagaaaatttgtggctgggcacggcaactcactcctgcaatcccagcatttcgggaggccaaggcaggtggatcagctgaagtcaggcatccaagaccagtctggccaacacggtgaaaccccatctctactaaaaatacaaaaaaaatagctgggcgtggtggctggcacctgtaatcc

SEQ ID NO: 116140 - DNA, 546 bp, Homo sapiens
tttcttctcattcatataataattcagtagaggattaactttctgaaattccttaaaggttttcactgaatcctctgcatttaatataaagaggagtatgagaagcattgtgtgaggtatcttatagctcagtctaaaagtgggaaatataactttaacctacatttcattcaccagtgaaatggtctcatcctacctgcaactgaggctgaaaaatacagcatttccgtatggtccaaaggaggaaataatgttatcatctcaccagtctctgtcaaggtcagtccttctgatgccaaagtatctgctttaatcttcstcccattataaaacacaccgacttctcctctcaaaatgaaaaatgcagagttctttcaaggtctggcatccagctcaaaatttagtatctccggccactcataattctcccaatgaagtccagataaggtcctcatttctcagtaaaatctaaacttaaaagactaaatatgtgtcctgtgtacaaatatgcaacggtgaagtgggaacaaggtggcagcaataaat

SEQ ID NO: 116141 - DNA, 556 bp, Homo sapiens
gatctgtactaaattcatctttgtatcatgagttacgtgtcaaagttctactttttgcatatgagtatctaaytgttccagcagaatttgttgaagggctatcttttatttactgaattacgtttgtatctttggagaacaccaatttaccaaaattctgtacatatatttctgaattttctattatcttccaatgacatttctgtctatctttatgccaatatcacactattttcattactgtagccttataagctttggcattagattgtgctaatccttcaaaaatattcttatttttaagaattattttggctattttagactctttgcatttctactgaagttttaaaattagtgtgtaaattcctataaaacaatgcctaataatattttaattgggattgtattgaatctatatttaggcataatcacattttaccatgtgaattttctaacccatattcatattatatctctccatttatttaagtcttctttaactttctgcagtgttttgagttttagtgtaccagactctcacatcatttgatag

SEQ ID NO: 116142 - DNA, 556 bp, Homo sapiens
gatctgtactaaattcatctttgtatcatgagttacgtgtcaaagttctactttttgcatatgagtatctaactgttccagcagaatttgttgaagggctatcttttatttactgaattacstttgtatctttggagaacaccaatttaccaaaattctgtacatatatttctgaattttctattatcttccaatgacatttctgtctatctttatgccaatatcacactattttcattactgtagccttataagctttggcattagattgtgctaatccttcaaaaatattcttatttttaagaattattttggctattttagactctttgcatttctactgaagttttaaaattagtgtgtaaattcctataaaacaatgcctaataatattttaattgggattgtattgaatctatatttaggcataatcacattttaccatgtgaattttctaacccatattcatattatatctctccatttatttaagtcttctttaactttctgcagtgttttgagttttagtgtaccagactctcacatcatttgatag

SEQ ID NO: 116143 - DNA, 556 bp, Homo sapiens
gatctgtactaaattcatctttgtatcatgagttacgtgtcaaagttctactttttgcatatgagtatctaactgttccagcagaatttgttgaagggctatcttttatttactgaattacgtttgtatctttggagaacaccaatttaccaaaattctgtacatatatttctgaattttctattatcttccaatgacatttctgtctatctttatgccaatatcacactattttcattactgtagccttataagctttggcattagattgtgctaatccttcaaaaatattcttatttttaagaattattttggctattttagactctttgcatttctactgaagttttaaaattagtgtgtaaattcctataaaacaatgcctaataatattttaattgggattgtattgaatctatatttaggcataatcacattttaccatgtgaattttctaacccatattcatattayatctctccatttatttaagtcttctttaactttctgcagtgttttgagttttagtgtaccagactctcacatcatttgatag

SEQ ID NO: 116144 - DNA, 607 bp, Homo sapiens
gtctagatgagtaataatagtgacctatcgtgggacttcaccttgtgatcctgtgagtcaattctccttaataaactccctttcatatatacgtatattctattagtctgtccctgtagagaaccctaatacaagcatattgatagtagtagtgacagttacacatgccagttaaatttggggtgtctgttacttgtggctctcaagtcccacgataggtcatcagcaagctgaggagcaaggaagctaacactggctcagtccaagtcccaaaacctcaaaagtagggaagccaacagtgcagccttcagtctgttgccaaagatccaagagcccctggaaaaccactggtgtaagtccaagagtcyaaaagccgaagaacttggagtctgatgttcaagggcaggaagcatccagcacgggagaaagatgaaggccagaagactcagcaagtttgctatttccaccttctcctgcctgccttctcctgcctgcactggcatccaattggatggtgcccacccatattgagggtgagtctacctctctcactccactgactcaaatgttaatcttctctggcaacactgtcacagacacacccagg

SEQ ID NO: 116145 - DNA, 621 bp, Homo sapiens
ttaaacatttatttaaatgctgaccctcaaagaatattctgatggccttaacagctgaccktaaccgctctcaactgatgtgggtattcactaaatagaccgcaggctatttaatgacttgatgactcagtttctctgtcaataaaattatgtcagtaattttacctaccccatagggctatttgcaatttgccacaaattttagggatgaaaggctgtaaatcactactggtgttattatttacttaacagctagagttcaattctcatcaacatgaacctcattaaccctggacttggatggttttgccagataaaatccttccaaatcatggggtctaaaaagaacctgtgcttctttttacgatgaagattgaaaaaatatctactagtgttaaggtaaaatctgaattgtatttatttattcactattaatgggctcatacatgattattttgacttttaatatggtatcctttatacatgctgaatttggtagcaaatacattttggcttaaacaaattagggattttttttttccttctctttatgaataaagaccagaaatactagtgtggtagctccaaaagtttattaaagacttaggccttttccatcct

SEQ ID NO: 116146 - DNA, 625 bp, Homo sapiens
attcacctgtagatcggcacttaggttgattccatatcttggctatggtaaatagtgctgaaataaaaatgagggtgcagatgtctcttcaacatactgatttcttttcttttggatatacacccagtaacaggattgtggaatcatatggtagttctatttttaatttttggaggaacatccatactgttttccataatggctgaactaatttacatacacattaacagtttataaaagttcctttttttctacatcttcaccagcatttgttaatttttgtttttctgataatagttattctaactgcaatgaggtgatttctcattgtggctttgatttacaattccctgataattagttatgttgaggatttttcatatatctattggttatttgtatgtcttttaaaaaatgtcaaatcagatcttttgcccatttttaattggattagttaattttggctattgaattgtttgagttccttatatattctggatatgaaactctggtcagatrtgtagtgtagtttgcaaatactttctcccattctgtaggttgtctcttctcttcaatgattgtttcctttgctgtgcagaagtttttcaggttgatgcaatctcat

SEQ ID NO: 116147 - DNA, 632 bp, Homo sapiens
ctgttgctttttcataaatactttttatcacatttaagaaatatttttgttttcatttatctttacatgtttaaaattagtaatggctgttgaatttttctaaacaatttttatagtttctaccatgattataagttttctctcttaatttttatacaataaaatattttatgtgtatgaatgcaaaagtttacagaatcaataaaggttagtaaaatttttctgtagtatataaatttacaaaacttctgttacctatgaatgtgtgtgtgtgtgtgtgtgtgtgtagtcttaatttcttttgctcctcttttttaaaccagaaaattatgtckttggaatttttatcaaatacttttcctaaaacattattttatttatgtttccagaaaactatttgaaaacatgcagctaaaaatattcagttaaatttctagttgtatttgctttttatcaattcctttgcaattaagttattttaaaatatatactcttaaagtgtgaacccttttttatcccaataactattagattagttaattcaattttggtgacatcaattatttgaatgattagtgagctttttgggtgagcattgtgattttaaactattcattaatacaaaaacataa

SEQ ID NO: 116148 - DNA, 632 bp, Homo sapiens
ctgttgctttttcataaatactttttatcacatttaagaaatatttttgttttcatttatctttacatgtttaaaattagtaatggctgttgaatttttctaaacaatttttatagtttctaccatgattataagttttctctcttaatttttatacaataaaatattttatgtgtatgaatgcaaaagtttacagaatcaataaaggttagtaaaatttttctgtagtatataaatttacaaaacttctgttacctatgaatgtgtgtgtgtgtgtgtgtgtgtgtagtcttaatttcttttgctcctcttttttaaaccagaaaattatgtctttggaatttttatcaratacttttcctaaaacattattttatttatgtttccagaaaactatttgaaaacatgcagctaaaaatattcagttaaatttctagttgtatttgctttttatcaattcctttgcaattaagttattttaaaatatatactcttaaagtgtgaacccttttttatcccaataactattagattagttaattcaattttggtgacatcaattatttgaatgattagtgagctttttgggtgagcattgtgattttaaactattcattaatacaaaaacataa

SEQ ID NO: 116149 - DNA, 632 bp, Homo sapiens
ctgttgctttttcataaatactttttatcacatttaagaaatatttttgttttcatttatctttacatgtttaaaattagtaatggctgttgaatttttctaaacaatttttatagtttctaccatgattataagttttctctcttaatttttatacaataaaatattttatgtgtatgaatgcaaaagtttacagaatcaataaaggttagtaaaatttttctgtagtatataaatttacaaaacttctgttacctatgaatgtgtgtgtgtgtgtgtgtgtgtgtagtcttaatttcttttgctcctcttttttaaaccagaaaattatgtctttggaatttttatcaaatacttttcctaaaacattattttatttatgtttccagaaaactatttgaaaacatgcagctaaaaatattcagttaaatttctagttgtatttgctttttatcaattcctttgcaattaagttattttaaaatatatactcttaaagtgtgaacccttttttatcccaataactattagattagttaattcarttttggtgacatcaattatttgaatgattagtgagctttttgggtgagcattgtgattttaaactattcattaatacaaaaacataa

SEQ ID NO: 116150 - DNA, 557 bp, Homo sapiens
tggttttctgttcttgtgacatggatgaagctagaaaccataatacccttaactattaagtttagttaaatgtgaacattttattatgaactacttagaaaatcaggatttgattaaatggcttaacacaaatttgcaaagatttcctcaagttacctactgatagatttcttttataagttgtacaaagcatggtatttttattgacttcaaatatttagctgcctttagctataatgactgaggaatatcagctggccccaactgtttcctgcttcctgaggcaaatcttctttatataggcaaatatttgggtgtcagtggcagaactagaatgaggtctggggaaatagcatcaaggggrtgctggagattcctgtcatcagactttgcatctcatattttaaattctaattttatttatatttgtttaatttcaactttttttatacttagaatttttaagtctctcttccttactgggttatcttgtagttttaacttgtattgagttttatttgatttttatagtattcatttttatcatataactttta

SEQ ID NO: 116151 - DNA, 469 bp, Homo sapiens
agcataataaggggagggacaggcatagaaactaaacttttctcaatatatacttattgttttgactttggaatagtggacatatttgacattaaaatggttatcttctacaataaaaagtaaactaagacaaatcaactttattctattttattttaattattgtggtaagaatacaacatgagatttgcccagtaacaaatttttaagtgtacctcacgttattgtggacagtaggcataatgttgtacagcagatctctagagtgtattctttattcatcttgcttggcagactttacacttgttggtaccccacagagaaaaactcttctaagttactttgaaacacagtagtctaactgcatatcttaatgygaaatgaattaagaacaaaaagaatttccaagcaactttaaaaaaaattcatgcaattatagatacttctataaatttcattctcagccagt

SEQ ID NO: 116152 - DNA, 469 bp, Homo sapiens
agcataataaggggagggacaggcatagaaactaaacttttctcaatatatacttattgttttgactttggaatagtggacatatttgacattaaaatggttatcttctacaataaaaagtaaactaagacaaatcaactttattctattttattttaattattgtggtaagaatacaacatgagatttgcccagtaacaaatttttaagtgtacctcacgttattgtggacagtaggcataatgttgtacagcagatctctagagtgtattctttattcatcttgcttggcagactttacacttgttggtaccccacagagaaaaactcttctaagttactttgaaacacagtagtctaactgcatatcttaatgcgaaatgaattaagaacaaaaagaatttccaagcaactttaaaaaaaattcatgcaattakagatacttctataaatttcattctcagccagt

SEQ ID NO: 116153 - DNA, 465 bp, Homo sapiens
aaaatgaaaactaatctattgttaaagaaaaaagtgggtatggacattgaaggagggttagattgcatgcaggcataaggaaactttgggagatgatggaaatatttttattttatgatccaggatctatgtataagacatgcagatttattacataggtaaacgtgtgacatgatggtgtgctccatctatcaacccatcacctaggtattaagcctcatatgcattagctatttatccggatgctgtcccttcccccataccatccctgcaacaggccccagtrtgtgtagttcccctccctgtgtccctgtgttctcactgttcagcttctacttgtaagtgagaacatgtggtatttgtttttctgttcctgcatagtttgctgaggataatggcttcaagctccatccatgtccctgcaaaggacatgatttcattcctttttaaggttgcatagaattc

SEQ ID NO: 116154 - DNA, 599 bp, Homo sapiens
catctcatgtacctcaatatggaattttttctcctttagaaatacatgagaaatgtgtcatttccagcttggagtaacaaatggtacaaccattttacaacctaattttactctccagctggttccaagatattaataactagggctaggccatccttgtcacattttggatttttwaaaaaatctccagctatcttccaatgtatgccattttgtaaaatatatttttccctagtatttttttccatttggaggaaacaaaagtatgttttaacagcatacaatccatatgcttttgatttcctcgtactcaagtcaccaaaatgtcgcttcataagagctattttattcctctttaaactctcctgaatataaatttttaacatttccttcctctcaaccaccaagcagtgttttgctgagggaaagaatatccagatagcatcaaaactagatagtttttcaactgacgttgggacttaagggggcttggaaaacatgctttcctgaccaaagctaaattacgggctgattccgaagctctaagtacctaatggctcaggttaagggacttatggccccaaagacaccaaagagtt

SEQ ID NO: 116155 - DNA, 586 bp, Homo sapiens
tgtggactccaggaagctccttatactaggctcagggcccaagagggccaaagggctttcttatagctaggactgcaggcatttgtggttggaatgtggactgctaggaatctctcacttaccgtttctcctgcattggagcatccctcctaggtgtgagccaatccaactgagtgccttgcttccttttctatgctcccatctcaaacttccatgcctcaaagggtccctgttgttttcttactggattcattaattcttccctagattttctacctgatacattgttacctacttgctgtaggttcctaatatactgagataaaattatttggttaagaaggttaagaacaagttttactcttggatatattaagcaacgtcatgttctagcagtgatctctgggtattgtagtttctacctccaatttacttattcttttaaaaatagctttaatttttaaaattttaacttccttagagtctcacttccatttagacaaaaarttaatattttctttcagtatccttctgcaattagtctaattaatttttttccaacagaaatagaagcatagattgaatt

SEQ ID NO: 116156 - DNA, 388 bp, Homo sapiens
tacactaaaatgtgaatgttattttacataaattgtactttaataaatatgactaaaaaaagaaacaaaatacataggaaagcrtccccacagattgggttaatcacttacctagttacatctatcaacttctgaattaactagtaattgttaagtggtatagcatgagagactaaaaattatgaaaatgagtgaaagtattcactgatggcaaaatacacaataatagtcatctgtaaattctggcctaaagatcagatgatggcctagcctcacaacagcagcagattataaacctttgtgaaagtatttatctctactcctagactcattctttccaaatttatgttcaattatagcattgcagcagagtaatcaacagtttggt

SEQ ID NO: 116157 - DNA, 549 bp, Homo sapiens
taggctgtaagaccaagctctgacccaatcctgagaacaacagagtttgatactcctttgttagtattttgtgactaacctctatgatattttgataaagatatatatttctatcatcctagccttcatttgaacttgatagcataataaatgtgttgtagattgtgcactgagaattatgaaggtgaatgtctacacaggtagcagcagtgtcaggacctaatgctagtwtagaaaaagatattaatccaagtaaagaattagaaaaaaggcatacattcaataggacattagaaaaacaaacaacatttagaaagacacagccccacagttgaaagcttggtaagttttcaattcttcgtccaaataaaaaggatctgttctctttaagaggttgtagtcctgtaccaggtaagtgaagctagggctgattgttagcacctactcaccctcttgggaggtcaagctgtacagtacaagttggtgagaaaaaaaaggttgtacagcctttaaaaaagtatgaacaatttatataattaaagtttaatg

SEQ ID NO: 116158 - DNA, 549 bp, Homo sapiens
taggctgtaagaccaagctctgacccaatcctgagaacaacagagtttgatactcctttgttagtattttgtgactaacctctatgatattttgataaagatatatatttctatcatcctagccttcatttgaacttgatagcataataaatgtgttgtagattgtgcactgagaattatgaaggtgaatgtctacacaggtagcagcagtgtcaggacctaatgctagtatagaaaaagatattaatccaagtaaagaattagaaaaaaggcatacattcaayaggacattagaaaaacaaacaacatttagaaagacacagccccacagttgaaagcttggtaagttttcaattcttcgtccaaataaaaaggatctgttctctttaagaggttgtagtcctgtaccaggtaagtgaagctagggctgattgttagcacctactcaccctcttgggaggtcaagctgtacagtacaagttggtgagaaaaaaaaggttgtacagcctttaaaaaagtatgaacaatttatataattaaagtttaatg

SEQ ID NO: 116159 - DNA, 602 bp, Homo sapiens
atacagtagtccctccttatcctcagggaatatgttccaaggcccacagtggatgtctgaaatggcacatagtgccaaaacctatatacagtatttttctcatatacatacacatgataaagtttaatttatcaattaggcacaataagagattaacaagtaataaaatagaatgattataacaatatgctgtaataaaagttatttgaatgtggtctctctgtctctcttctctcaaaatattatattgtaccgtactcacttattttcagaccaaggttgaccacagacttaatttcagaaagtgaaactgcagataaagggggactattgtacaaggtagagacatgggtttaagagttaatttgaaagacatatcaaatatgtagctctactaattctatcccctctctatcatttctctggtgtgttaattttttggattttcaactgtttgataaaaaattctcagcttaaaagcagtaaatttgatgaatccgacatgtctttattccagtaaaagacagaattataactcatcctagaacagaactttyatactgacatcacttccttctgcttgactttgatccattaaatac

SEQ ID NO: 116160 - DNA, 573 bp, Homo sapiens
taagacttgcaacagtaacagatccctcctcaaagggttatgaatggcatcaatggaataaagttattttgcataaatggtaaagtacttcacagatgcaaggttattttgggaaagtctataccttctcccttttatgtgagaaatttaagggcatgctggctgttaaagttcagcttttagcttagatatatttgatatgtaaaggaactctctttccaagataatagggttaccatgaaaagctgaacttctggcacacaggtgtgaataccactgcttattaaagaaattacagttgtcccttggtatctgtggaggattaattcctgcagataccaaaatctgmggatactcaagtccgttatataaaatggcatataacctatgtacattctctcatacactttaaattatttacagattacttataataactaatataatataaatgctgtgtaaatagttgttatactgtattgtttttatttgtattattttaattgctgcattatttttattttattttctattcacatattttccatctgtggctggttgaatctgcagatg

SEQ ID NO: 116161 - DNA, 524 bp, Homo sapiens
ccaacaggtcccaggccctcagagcacagggactccagtactagctaagcagtactcccttctcagaggcctcagtatcagcaccatgagaccccctcctgcaagctttataaactttgatggttccaatgtcttaactttgtcccctcagccctagaggtggtagctgctttctgtagtttacttacccagtgatgacttgatcttctcttcttactctctcagttttctagctaacaacttatacctagttaacacttaatatctgcggccatacaaccatgaacaagcctgatwttggaagctaagcagggtcaggcctggttagtattcgagtgggaattaatgcttaacattaaaatcttttaaaataactggtgtggactgaactccaactgacacaatggtaaggctaatctgttttgattttccagatcaaaaaactattctttaagggtaccctaaatgtggcagattcaagtgtttcacttgaatattaatccttatatgcttttaaaaaccat

SEQ ID NO: 116162 - DNA, 589 bp, Homo sapiens
ccaaatctatcagctccttgaccttggacttcaagcaaattcttacaacaaagttatgaagatttttaaaaattacttttgatctttattgtgttcattttcacatttagctctcaaatctacccatatctaatgactatgtacagttttagtttagaatgtgtttcataccctcctcatacacatagttttcctataattatttgttggarcatttttttcccctttgctttgctgaaccacctatgaaatatcttagcttatatctggcctctgttgtactaattgaactaatactattctaaattatgataataataacaaatgttgatatgtagtggagaggcggccatcccttgtgttttttcaaagtggttctcactattattcctgtaaattccatataaatttcagagtttcaccatctctacaatgttacatgattcctattacaagtggctaaaatttattgatatatttgagaaccattatttttaaaatagtctttatatagatagatagatagatagatacactctttctatatgtatatatagagtctatcttcttttttttgagacagagtctc

SEQ ID NO: 116163 - DNA, 611 bp, Homo sapiens
ttatttgttggagcatttttttcccctttgctttgctgaaccacctatgaaatatcttagcttatatctggcctctgttgtactaattgaactaatactattctaaattatgataataataacaaatgttgatatgtagtggagaggcggccatcccttgtgttttttcaaagtggttctcactattattcctgtaaattccatataaatttcagagtttcaccatctctacaatgttacatgattcctattacaagtggctaaaatttattgatatatttgagaaccattatttttaaaatagtctttatatakatagatagatagatagatacactctttctatatgtatatatagagtctatcttcttttttttgagacagagtctcaaattatatcaatattattttatggtttactgtgttgaattagaggtcttgcatttgtggtggtgttagaattattcctaggtatataatgcctttatggtattttttcttttttatgttattgctgtatgtaaacataaaattgggtttgtatattaaattttattcacaaatgtgtctggattataatcaaaacaatttgtaaacctgtttaaattttt

SEQ ID NO: 116164 - DNA, 611 bp, Homo sapiens
ttatttgttggagcatttttttcccctttgctttgctgaaccacctatgaaatatcttagcttatatctggcctctgttgtactaattgaactaatactattctaaattatgataataataacaaatgttgatatgtagtggagaggcggccatcccttgtgttttttcaaagtggttctcactattattcctgtaaattccatataaatttcagagtttcaccatctctacaatgttacatgattcctattacaagtggctaaaatttattgatatatttgagaaccattatttttaaaatagtctttatatagatagatagatagatagatacactctttctatatgtatatatagagtctatcttcttttttttgagacagagtmtcaaattatatcaatattattttatggtttactgtgttgaattagaggtcttgcatttgtggtggtgttagaattattcctaggtatataatgcctttatggtattttttcttttttatgttattgctgtatgtaaacataaaattgggtttgtatattaaattttattcacaaatgtgtctggattataatcaaaacaatttgtaaacctgtttaaattttt

SEQ ID NO: 116165 - DNA, 558 bp, Homo sapiens
gcaacagtgcttatgagtttggtggacattaaaactcaagagagatgatacggaccccagcatcacattaacctagctttagtgaagggcacaggacaccaacaacatagtactttaagtaacagcataatgtaagtctactaactcccaggtacagtttctgatatcttagtaactccacattcagatacgagcaatcacatactatgagactgagagtatgtagacagtgtcagcacggcaaagccattgggtccgggtaccctttcctttaacttccagctagttatgcagctcactcagggttacctgactagttctattgtgcaattggcacctcatcaatgccggtttcttcttacttgacgaacaattgttacaatgaggtcaaggtgcttggattggtgcagagccctctttggctagattctcatttatctcgtcataacaattgttggaattaacgtcacagggagggttgaccctgcagctcagtctgcagacacccctgaggttagasacagggtcacaggacttagaaccttccttccagccagg

SEQ ID NO: 116166 - DNA, 437 bp, Homo sapiens
tgaaactattttaaaacctatatgaaaattataatagtacatttttctaaaaggcaacttgtagtttctagctgtatagtatttaagacaatatgaaacaatgaagcttgtattttttctaatctttatctattgaattttcacatcaatttatctgaaatcataaaattaatttgttttttgaattttacctgtgtagaaatttgaaatgttcatatgtatagtataaaaatagttgccagaaataaaaatasaaagaattttttatccttggaatagttattccagtttcttaggttaaaaacctaagaaaaaaatcctagataaacaaataactgttgaagaggaaataattttacgttaatttttgcccacatcttatccagatttggttaataaattgtccaaataatcatatgttttaatcatatggctgt

SEQ ID NO: 116167 - DNA, 437 bp, Homo sapiens
tgaaactattttaaaacctatatgaaaattataatagtacatttttctaaaaggcaacttgtagtttctagctgtatagtatttaagacaatatgaaacaatgaagcttgtattttttctaatctttatctattgaattttcacatcaatttatctgaaatcataaaattaatttgttttttgaattttacctgtgtagaaatttgaaatgttcatatgtatagtataaaaatagttgccagaaataaaaatacaaagaattttttatccttggaatagttattccagtttcttaggttaaaaacmtaagaaaaaaatcctagataaacaaataactgttgaagaggaaataattttacgttaatttttgcccacatcttatccagatttggttaataaattgtccaaataatcatatgttttaatcatatggctgt

SEQ ID NO: 116168 - DNA, 437 bp, Homo sapiens
tgaaactattttaaaacctatatgaaaattataatagtacatttttctaaaaggcaacttgtagtttctagctgtatagtatttaagacaatatgaaacaatgaagcttgtattttttctaatctttatctattgaattttcacatcaatttatctgaaatcataaaattaatttgttttttgaattttacctgtgtagaaatttgaaatgttcatatgtatagtataaaaatagttgccagaaataaaaatacaaagaattttttatccttggaatagttattccagtttcttaggttaaaaacctaagaaaaaaatcctagataaacaaataactgttgaagagraaataattttacgttaatttttgcccacatcttatccagatttggttaataaattgtccaaataatcatatgttttaatcatatggctgt

SEQ ID NO: 116169 - DNA, 566 bp, Homo sapiens
cctcaaatctaaccttctctccaagtgttgatgattgaaaaaaattattatacatatctcaaatcaactgatagtcaaagggcattgactatttagaacagcaatttacagttctactgaaagcttaaaacaccacatatttctagaacctgctcatttggggaagtcctgagacttccatcttccccccaccaggcttctggacagggaaaacagatggacgtagacatgtgagcaaagccagatcaacaggttgtaagtcaggctgatttatactcactgtactataaggagcaaatgctccttatattcattttctatggctgttataacaaattgccacaaatggggcagcctaaaaaaacttacaccactgtagttaagaagtatgaaataggtcttaccctgctaaaatcaaggtatcagcagagctgtgtccctctttcagggagaatccattgacttagcctttccgtcttctrgagtttgtccatgtggcttggccagtggccctcttcctccatctttccagccagtaatggtaggttcatttatcacatcacatt

SEQ ID NO: 116170 - DNA, 563 bp, Homo sapiens
tttctaccaggttccgatcatctgttaggacccattaaacagttaaaaacaattctacttcctattgatctcaaaatggacaataatattttactttttgttataataaactttcttaaaagattaaaaactttcaaagcaaaacaatctttttttccccctctaactggagaataaataggcaaatatctatactatcatcaatgagggagaaacttctttaacactgatgacaaaaaataaattggcaaaacaattaattttacataaaatttgtgctcttatttttatggttagccttgacttttaggattggcccttctggactctcagcccaaagcctgggagtttataaaaatctctcctggctgcctgagtctaaaatccaactttgtttctttcttcttttttttttttttttttttttaaatgtgtgatggagtctcgctctgttgctgcctggagtgcagtgacacaatctcggctcaccgcaacctcygcctctcgaattcaagggattctcctgcctcagccttccgagtagctggcactacaggtgtgcg

SEQ ID NO: 116171 - DNA, 570 bp, Homo sapiens
tgcattccatgaaaccaggctgctgttggagaatacaggagttttctgattctaaagatctttctaagagaaggtcttcttgtaacaatgatttatgccaaaacttaagagatgtggaatggagctggaatttttttwaaaaattactgtgatgattagaatgaacgtggttcctgtcacatgctgagacctcagtttgggactgatgatgaagtggggagcagggcaaagctggggacattttaccacttataatgcacaagtcacaggccttctggccaaattgcagtgttttaaggagagtggcaaactttggcttcagctagattgaagcttttttccttttccagattcacaaatacttaattacttcaaactagctattctgcaagatacccacatgtgtgatatatctcttgtaatagttaccacaaacttgtgaactagacttaggttgacattctcgtacatatagtccagaaattcaagaagttatgaaaatggagagagagattatgtgtgtgtgtgtgtgtgtgtgtgtgtgtgtgtgtgtgtgtgtgtgtgtattta

SEQ ID NO: 116172 - DNA, 591 bp, Homo sapiens
aaccaatgattcatcatttaaactcttaaataaatttcctgaaccaaacattccattaatgtatccaaatttcaaaactctacatgtaagaatctagaaatttttaaaaaatatttaatcctggatgttaaatgcatgcataactacttaattagaaaaatggtgctaatattatgtatatgtgtgtatgtgtatttttaatcactascatatttaagccaatgtgatgtaagaggagagagagcagttcaaattaaactgaacaaaacagaacttttaaaatatctattgattttctacctttcaaaatacattcataaatcatgatcattgcatgtcattcctatgtgccttgattctgcaaactataatctaatcttttccctcaccctccataaaagaacatttttcctagcatttcttcttacttatacattatacttactttacctttttttattagcctacaatattgctctctgtacacatgatgatgacatctcaaggtcaacaaaatgaactaatgaataataatactcttgctctcagtgagattcttgcacacaagtttagtaaaccaagaaaaaataa

SEQ ID NO: 116173 - DNA, 591 bp, Homo sapiens
aaccaatgattcatcatttaaactcttaaataaatttcctgaaccaaacattccattaatgtatccaaatttcaaaactctacatgtaagaatctagaaatttttaaaaaatatttaatcctggatgttaaatgcatgcataactacttaattagaaaaatggtgctaatattatgtatatgtgtgtatgtgtatttttaatcactagcatatttaagccaatgtgatgtragaggagagagagcagttcaaattaaactgaacaaaacagaacttttaaaatatctattgattttctacctttcaaaatacattcataaatcatgatcattgcatgtcattcctatgtgccttgattctgcaaactataatctaatcttttccctcaccctccataaaagaacatttttcctagcatttcttcttacttatacattatacttactttacctttttttattagcctacaatattgctctctgtacacatgatgatgacatctcaaggtcaacaaaatgaactaatgaataataatactcttgctctcagtgagattcttgcacacaagtttagtaaaccaagaaaaaataa

SEQ ID NO: 116174 - DNA, 591 bp, Homo sapiens
aaccaatgattcatcatttaaactcttaaataaatttcctgaaccaaacattccattaatgtatccaaatttcaaaactctacatgtaagaatctagaaatttttaaaaaatatttaatcctggatgttaaatgcatgcataactacttaattagaaaaatggtgctaatattatgtatatgtgtgtatgtgtatttttaatcactagcatatttaagccaatgtgatgtaagaggagagagagcagttcaaattaaactgaacaaaacagaacttttaaaatatctattgattttctacctttcaaaatacattcataaatcatgatcattgcatgtcattcctatgtgccttgattctgcaaactataatctaatcttttccctcaccctccataaaagaacatttttcctagcatttcttcttacttatacattatacttactttacctttttttattagcytacaatattgctctctgtacacatgatgatgacatctcaaggtcaacaaaatgaactaatgaataataatactcttgctctcagtgagattcttgcacacaagtttagtaaaccaagaaaaaataa

SEQ ID NO: 116175 - DNA, 591 bp, Homo sapiens
aaccaatgattcatcatttaaactcttaaataaatttcctgaaccaaacattccattaatgtatccaaatttcaaaactctacatgtaagaatctagaaatttttaaaaaatatttaatcctggatgttaaatgcatgcataactacttaattagaaaaatggtgctaatattatgtatatgtgtgtatgtgtatttttaatcactagcatatttaagccaatgtgatgtaagaggagagagagcagttcaaattaaactgaacaaaacagaacttttaaaatatctattgattttctacctttcaaaatacattcataaatcatgatcattgcatgtcattcctatgtgccttgattctgcaaactataatctaatcttttccctcaccctccataaaagaacatttttcctagcatttcttcttacttatacattatacttactttacctttttttattagcctacaatattgctctctstacacatgatgatgacatctcaaggtcaacaaaatgaactaatgaataataatactcttgctctcagtgagattcttgcacacaagtttagtaaaccaagaaaaaataa

SEQ ID NO: 116176 - DNA, 572 bp, Homo sapiens
actgcacttcagaaaccaatttcaatttctctcacattacaagccaagaactttatgatgacaaacatagtttggggtagaatctccctgagcctcttctccaagctcacatcttacagttctgccattgtagcctacctcctactattacttaacaggccagactttcacatggagtgttccctctcccgttgccacagatttccatatggccaatttcttagtctttgcccacatgtcatgctctccataaacattcctatttataagcccaytgacttggtaccatctcctttaagagcatttattaccatcgaatatcctatatatgttacttgttttgtttattatttatttcctgtttccccaactccccctaaaatgagagtccaataataaaagaaatcttagtctttttgattcactagtgtatcctaagggctcagacgaatgcctagccagtagcaataactcaatacagtcacgcatcacttaacattgaagatagattctgagaaatgtgtcattaggtgattttttcattgtgtaaatatagagtgtacttacacaat

SEQ ID NO: 116177 - DNA, 572 bp, Homo sapiens
actgcacttcagaaaccaatttcaatttctctcacattacaagccaagaactttatgatgacaaacatagtttggggtagaatctccctgagcctcttctccaagctcacatcttacagttctgccattgtagcctacctcctactattacttaacaggccagactttcacatggagtgttccctctcccgttgccacagatttccatatggccaatttcttagtctttgcccacatgtcatgctctccataaacattcctatttataagcccactgacttggtaccatctcctttaagagcatttattaccatcgaatatcctatatatgttacttgttttgtttattatttatttcctgtttccccaactccccctaaaatgagagtccaataataaaagaaatcttagtctttttgattcactagtgtatcctaagggctcagacgaatgcctagccagtagcaataactcaatacagtcacgcwtcacttaacattgaagatagattctgagaaatgtgtcattaggtgattttttcattgtgtaaatatagagtgtacttacacaat

SEQ ID NO: 116178 - DNA, 609 bp, Homo sapiens
ttttttgaaagtttttatcataaagggatgtcaaattttatgaaatgttttttctgtattcattgagatgattatatgatttttgtccttcattctgttgatgtgacttatgacattttttgatttatgtatgttgaaccatttttgcagccctaggttaaatcccatttgatcatgatgtataatctttttattgtactattggatttggtttgccagcattttgttgaggatttttatacctatgcttatcaggaataatgttctrtagttttatgtttctgttgtgcctctttctggtttcgatcttaggataatgctggcctcataaaattagcttggaagactttcctttcttcattattttagaatactttgaatagaattggttttagttcttctttaaaagcttggtagaattctaccaagctttggtagaaaagcttggcagtaaagtaaaagattggcagtaaagctatccaatcctgagcttttctttgttggaagactttttgttactgattcaatctcattagtttttatttgtctgtttatgttttctatttcttcttggttcattcttgataggttatatgtttgcagaaattt

SEQ ID NO: 116179 - DNA, 486 bp, Homo sapiens
gaaaagacagaaggtggctggttgcctgtaataattatctgccttgtgaagtcggaggagaaatatgarataatggaatctggccccaggatttttaaaaatcagtatgcaggaaaaaataaaaacattgccaaaataaagaattttataccaacatcatgagcatgccttgtgaggtgagaattcatccaagtacaaataataaatagatgggagagaaacaacattattaggcttacattttccaattagcatgcagagcataaaagttctaacaagatgtgaaatcctttctatgcctgaggacggggagctaggtgaaatcatcatatctctctgcaaagggaaacctccctttcaaaggcctttgctttgaatactcttggctacagctcagcaaacctcacgaccctcctggtcctgtgctataacagtacatgctctaccctgaaatagcctcctgtcacagctgaacgtttcttatct

SEQ ID NO: 116180 - DNA, 486 bp, Homo sapiens
gaaaagacagaaggtggctggttgcctgtaataattatctgccttgtgaagtcggaggagaaatatgaaataatggaatctggccccaggatttttaaaaatcagtatgcaggaaaaaataaaaacattgccaaaataaagaattttataccaacatcatgagcatgccttgtgaggtgagaattcatccaagtacaaataataaatagatgggagagaaacaacattattaggcttacattttccaattagcatgcagagcataaaagttctaacaagatgtgaaatcctttctatgcctgaggacggggagctaggtgaaatcatcatatctctctgcaaagggaaacctccctttcaaaggcctttgctttgaatactcttggctacagctcagcaaacctcacgaccctcctggtcctgtgctataacagtacatgctctaccctgaaawagcctcctgtcacagctgaacgtttcttatct

SEQ ID NO: 116181 - DNA, 622 bp, Homo sapiens
gtcctttccttgaacttcctttgtgggctactattcatttcattcacttctttctttctttcttttctccctatcaagagcaggactcaggcatgcaggctacaatgctagcacatcttcaaactaataacttaaatatttgttcaacacttatttagtatagattggtagacactgatttcctattagtaaatgtattctagaaaaacagatacagaataattcacttcaactggctgacataggtttagttcttgttcttcagttttatttttgcaataattttccaaatcagatgacttcttaggaaacatattaaaggatttgaaatttaggcaataaaataaaccacttgttccagtaaacagcaccacacccatacattattcagtttcagatttagctatgaccgcygagttaagattactgaactttcgcatgtgtgctgaaaaacactacaacaaaaacccaaaaacaaaacaaaaaacacagaaagagagatcagcatctaagacaggaaagttctaaatattcagtggagggcacagtccactttgctgagagaaggaccagctttcattttgctagttatgtgaagagccctgtgtagagctttaaaatc

SEQ ID NO: 116182 - DNA, 594 bp, Homo sapiens
attcctctttttaaaaccatcagatctcatgagacttattcactatcacaagaacagtgaaggttccaattacctcccaccgggttcctctcatgacacatgggaattgtgggagttacaattcaaaatgagatttgggtggggacacagccaaaccatatcatactgttttattgaagtgacgatatatttctctctgacatttccctaatcaacggataagataatatgatcaaaattattttactgttccttactttgagtaagtgagcaatgatgctccctgcaggtcatcttatttttcacatactaataaacaatttctttaacaattgattctagaaatttactaagtatcaaccgtgaggttgtcatttccagtagttactagtaccttgattttggaaattcragcagttctcctaatattcttgatttcttttaatataaatgttcctagatggtatataaatgttctttcattaatctgttataaaattaataaggacttggatacttgagcatattaaaactactttgtctttctcattacattcttacctctaatgaactgctactgcttttttcccattg

SEQ ID NO: 116183 - DNA, 528 bp, Homo sapiens
atactagaaaggatttttttaatataaaacattctttgcctttaataagctagtaacattatcatgggaaacatataaaatgaattataatatataataaacaatacattcgtgatggaaacatgctctgggattacagataacagaccagtcaattcttgactttttagggaagaattcacaaaagaattgacatttaaaagggccttgaaagactggcttttgactarcagagaaagtaagggtattatacatagaaatagtatgagttaaaaattaagttccttaaatgcatgtgtattttttcttcaggtagattgaaatattactcatgtaaagtaagatgcacacattgtagatgtgccactctatgaattttgacagacttacacaattttgtaattacaaatcaagattaaaaaaaaatttaatcgcatcccaaaaaaactctctgatgctctcttgtagtcaatctgtaatgtatttttaagaactatcaagtagaatctttagtggaaattattttga

SEQ ID NO: 116184 - DNA, 573 bp, Homo sapiens
aacactaaatgaaacaaccagagatgttactgcttaccatctgtgtaatcytggattagaagccattaaattctctgaataacagggtctccatttttaaggaggttccctatcaatatcgtcactgtctacttctccagtttgtcacagcataatagtatcttggagcaggaagaggctttagaaatcacccagtatgcaattatacccagagaagtggtgtgactttgcctacaagcccatggtcagttaatagaagacctgggcttgaaagcaaggtgtcttgactccgtgtcccaagttctctgaagagaaaagaaggaaggtgatgggggaagagtgccagatgtgtctctcaacataggctattccagatgtggtccaccagcacgtggccttccagttgtgcctgaataacaccagatgtgatccaaggattaaatgtgaagggatgtgaaagtgctctggagcctgtaaactgttagcctgtctcccaaacgtaaggatggtgttagtattaatttgtctctgctgtatggccacaggcagctcttggccaacagcagtgtgagt

SEQ ID NO: 116185 - DNA, 573 bp, Homo sapiens
aacactaaatgaaacaaccagagatgttactgcttaccatctgtgtaatcctggattagaagccattaaattctctgaataacagggtctccatttttaaggaggttccctatcaatatcgtcactgtctacttctccagtttgtcacagcataatagtatcttggagcaggaagaggctttagaaatcacccagtatgcaattatacccagagaagtggtgtgactttgcctacaagcccatggtcagttaatagaagacctgggcttgaaagcaaggtgtcttgactccgtgtcccaagttctctgaagagaaaagaaggaaggtgatgggggaagagtgccagatgtgtctctcaacayaggctattccagatgtggtccaccagcacgtggccttccagttgtgcctgaataacaccagatgtgatccaaggattaaatgtgaagggatgtgaaagtgctctggagcctgtaaactgttagcctgtctcccaaacgtaaggatggtgttagtattaatttgtctctgctgtatggccacaggcagctcttggccaacagcagtgtgagt

SEQ ID NO: 116186 - DNA, 604 bp, Homo sapiens
tcaatttttattattacccccagagacagacatgctgaattatatttatcagaagcaaatgttgtcagtcaccaaaatgtcaagtcttagagacatgtttggtttcatatcctayttccagtcaccaggttcagtcttccccttaaagtgtttatctgtcctttcttcaccttttcaactgccatcatgtgggctatgctgccctcttcatgcatgtcaagtattccagcaacttctaaagagtattcttatgtttagactttttcttgcttctgtgcatcacatttaaggctgtccagttcatcttccataaaaaatatttagctcttgtcctttttgtgccagtggagcctctggtagcattccatttgtgataatattaaatccgaatttgtctctttgacttcaatgttctcataattggctcatgtatattaattccatctctgttttataatactgtcccaaaaaacatttcgatttgtcaaactgatatccaccaaacactgtgctcatttccatctctgtgttttcaactgcctcaacatattgtactttgtaatatttcactcgatctcaaattggaacaatttataaatttgac

SEQ ID NO: 116187 - DNA, 604 bp, Homo sapiens
tcaatttttattattacccccagagacagacatgctgaattatatttatcagaagcaaatgttgtcagtcaccaaaatgtcaagtcttagagacatgtttggtttcatatcctatttccagtcaccaggttcagtcttccccttaaartgtttatctgtcctttcttcaccttttcaactgccatcatgtgggctatgctgccctcttcatgcatgtcaagtattccagcaacttctaaagagtattcttatgtttagactttttcttgcttctgtgcatcacatttaaggctgtccagttcatcttccataaaaaatatttagctcttgtcctttttgtgccagtggagcctctggtagcattccatttgtgataatattaaatccgaatttgtctctttgacttcaatgttctcataattggctcatgtatattaattccatctctgttttataatactgtcccaaaaaacatttcgatttgtcaaactgatatccaccaaacactgtgctcatttccatctctgtgttttcaactgcctcaacatattgtactttgtaatatttcactcgatctcaaattggaacaatttataaatttgac

SEQ ID NO: 116188 - DNA, 577 bp, Homo sapiens
atttattttaccaatttttaatcatgggtattttggtcactttaaataaaatacagcagtgacaaacatccacatatgtatctttgtgctacattgcagatatttactttggaccaattcaaaaagtggaatcatttttggccaaaggatttaaactcaatgtatcttttgacattttgtacaaatttcttcttataagaagcccataggaatggctagtttcttgcatccttgataacatttattttcatcggtttttagaatctttgcttacttggggagaatgacatctcattttaccctgtactcttaaaagattaccaagtgatgttgagcatttaatttagaaaaatattggcaatacacattttctcttgtcatttgcttgatcatatcatctatcactttaatattggtatacttattttttattcccttccttataaaattaactgaaaattctgaaagtctttgaaaaattttactattttattttcartcactgagtacattaaatgttggttccattgatagagtacaaagttgtttccataattatttcaaaagattaaagttg

SEQ ID NO: 116189 - DNA, 579 bp, Homo sapiens
catacgttttaaactgtgtgccctccctccccatcttacccaggaggttaatcctctctttgtccagcgtctycatgctatctaccctccctgcctgtgatttacttagtagatttcttggttaacagatctgttgtcatgatagcagagtgcttgtgttcaagggacccttatgttacttcataaaggtcctaaccacaagagtagtgatgcaaggcaatttggatataccaaaaagaaaccatagtcttctttacatgaaaaggaggaggttctcaacttaataagaaaaaaagaattgtatgctgaagttgctaaaacctacagtaaaaacagacctatctgttaaattgtggagaggaaaaaaaaaatgtgtgctagttttgctgttgccctttaaactgcaaaattatggccacagtgcatgacaagcgcttagttaggatggaaaaggtattaaatttgtgggtggatgtgaacagaactgtgtttgattgggttcctacaatccatgatttcaggcacccactagcagtgttggaccatatccctcttggataagaggggactattgtaccc

SEQ ID NO: 116190 - DNA, 579 bp, Homo sapiens
catacgttttaaactgtgtgccctccctccccatcttacccaggaggttaatcctctctttgtccagcgtcttcatgctatctaccctccctgcctgtgatttacttagtagatttcttggttaacagatctgttgtcatgatagcaragtgcttgtgttcaagggacccttatgttacttcataaaggtcctaaccacaagagtagtgatgcaaggcaatttggatataccaaaaagaaaccatagtcttctttacatgaaaaggaggaggttctcaacttaataagaaaaaaagaattgtatgctgaagttgctaaaacctacagtaaaaacagacctatctgttaaattgtggagaggaaaaaaaaaatgtgtgctagttttgctgttgccctttaaactgcaaaattatggccacagtgcatgacaagcgcttagttaggatggaaaaggtattaaatttgtgggtggatgtgaacagaactgtgtttgattgggttcctacaatccatgatttcaggcacccactagcagtgttggaccatatccctcttggataagaggggactattgtaccc

SEQ ID NO: 116191 - DNA, 579 bp, Homo sapiens
catacgttttaaactgtgtgccctccctccccatcttacccaggaggttaatcctctctttgtccagcgtcttcatgctatctaccctccctgcctgtgatttacttagtagatttcttggttaacagatctgttgtcatgatagcagagtgcttgtgttcaagggacccttatgttacttcataawggtcctaaccacaagagtagtgatgcaaggcaatttggatataccaaaaagaaaccatagtcttctttacatgaaaaggaggaggttctcaacttaataagaaaaaaagaattgtatgctgaagttgctaaaacctacagtaaaaacagacctatctgttaaattgtggagaggaaaaaaaaaatgtgtgctagttttgctgttgccctttaaactgcaaaattatggccacagtgcatgacaagcgcttagttaggatggaaaaggtattaaatttgtgggtggatgtgaacagaactgtgtttgattgggttcctacaatccatgatttcaggcacccactagcagtgttggaccatatccctcttggataagaggggactattgtaccc

SEQ ID NO: 116192 - DNA, 579 bp, Homo sapiens
catacgttttaaactgtgtgccctccctccccatcttacccaggaggttaatcctctctttgtccagcgtcttcatgctatctaccctccctgcctgtgatttacttagtagatttcttggttaacagatctgttgtcatgatagcagagtgcttgtgttcaagggacccttatgttacttcataaaggtcctaaccacaagagtagtgatgcaaggcaatttggatataccaaaaagaaaccatagtcttctttacatgaaaaggaggaggttctcaacttaataagaaaaaaagaattgtatgctgaagttgctaaaacctacagtaaaaacagacctatctgttaaattgtggagaggaaaaaaaaaatgtgtgctagttttgctgttgccctttaaactgcaaaattatggccacagtgcatgacaagcgcttagttaggatggaaaaggyattaaatttgtgggtggatgtgaacagaactgtgtttgattgggttcctacaatccatgatttcaggcacccactagcagtgttggaccatatccctcttggataagaggggactattgtaccc

SEQ ID NO: 116193 - DNA, 498 bp, Homo sapiens
  misc_feature (1)...(498): n = A,T,C or G
actgcccaaagtaatatgggtgagtgaatgggtgaactcaatagtaaagccatctttttccttaagaaaccaaattaatggggtccattatcaggacagagaggttctctgtttcactgaaagtttgttacaaaacacccrttgttccctaaagagcaaaaagaacaaagctagaggtatcacactacctgacttcaaaatataccacaagttatagtaatcaaaatagcatggtactatcataaaaacagacagatggtacaatgaaacagaatagagaacccagaaataaatccacacagctacagtcaattgatttttgatgaagttgtcaagaacacacagtggggaaagaacagtctcttcaatagtgtgttgaggcaactggatatctacatacagaggaattaaattatatccttatctccaccatatataaaaatgatctcanaataaattaaacacttaaatgtaaaacctgaaactgtaaaaactaga

SEQ ID NO: 116194 - DNA, 599 bp, Homo sapiens
actctgaggcgtgtgcctagatgcattattacagattgtttattagtcacacatgtatatctataatgccaatttttgatccaggaaaataacttcatgactgaaactgaacacaatctgtgcatgaagatccttgcagaaagggagggcagaaatactgttagcctasaaagtgtgaggatggggataaggaaattcatattcatgtattaacccaattaccaaatgtaccttgcaaatctggagcgctgttggtttaacatgggatttcacatcattccgtcccaagtgacacagacagtattataaatgaaaaatcctttcctcaggctaggatacagagctcctctcatttgggcactacatgctatcacaggagaacctttatttaaggctggaaattctatttactcaggagcccaaaccactgtttttctgttcttgcaaaataaacaaaacaccctggcaaagcagatgcagaaaagacccgagggaacggaaaggaatgtggaatcaggtatgcaggtcagtgttaacacaataagtcaggagcacagcagtgatacatatttctcttctgatgctaaaaaaaggaggct

SEQ ID NO: 116195 - DNA, 614 bp, Homo sapiens
ttacttgcatccaaaagcatgctaattgatatagctaataataataggaagaaataaagtcagcacattagctttgaattgggaaaacaacaactaggaagatccaatgttgcagctgatgsggctaatgaatactttatccttcctttagtcctgagtataataccagtttcttgaagaataaataagaatccccactagaaagccattttaaaatatatcttgaccacaagatagttgctatgctagatgggttatatcatttgcttgatacttggttggcatcgggggaaaggaaatatgatctaaggtaagtagaatttaaaatatggcattatggtagagtctgcatatttattttgcttttttttcctgccagaggaaagggagaggaggtagggagaagaccatggatatcaatgaactatacacattctacggtttgttggtcactgttgagcgttgtgacgagcagatgacacaccatgcagaaggctatctggtgcctcactcctctatcatactggagtcacggggaagtgctgggaatttcctgagctttgtggaaaagattaacctcttggctttaattcccttagtcatagttccctatt

SEQ ID NO: 116196 - DNA, 614 bp, Homo sapiens
ttacttgcatccaaaagcatgctaattgatatagctaataataataggaagaaataaagtcagcacattagctttgaattgggaaaacaacaactaggaagatccaatgttgcagctgatggggctaatgaatactttatccttcctttagtcctgagtataataccagtttcttgaagaataaataagaatccccactagaaagccattttaaaatatatcttgaccacaagatagttgctatgctagatgggttatatcatttgcttgatacttggttggcatcgggggaaaggaaatatgatctaaggtaagtagaatttaaaatatggcattatggtagagtctgcatatttattttgcttttttttcctgccagaggaaagggagaggaggtagggagaagaccatggatatcaatgaactatayacattctacggtttgttggtcactgttgagcgttgtgacgagcagatgacacaccatgcagaaggctatctggtgcctcactcctctatcatactggagtcacggggaagtgctgggaatttcctgagctttgtggaaaagattaacctcttggctttaattcccttagtcatagttccctatt

SEQ ID NO: 116197 - DNA, 614 bp, Homo sapiens
ttacttgcatccaaaagcatgctaattgatatagctaataataataggaagaaataaagtcagcacattagctttgaattgggaaaacaacaactaggaagatccaatgttgcagctgatggggctaatgaatactttatccttcctttagtcctgagtataataccagtttcttgaagaataaataagaatccccactagaaagccattttaaaatatatcttgaccacaagatagttgctatgctagatgggttatatcatttgcttgatacttggttggcatcgggggaaaggaaatatgatctaaggtaagtagaatttaaaatatggcattatggtagagtctgcatatttattttgcttttttttcctgccagaggaaagggagaggaggtagggagaagaccatggatatcaatgaactatacacattctacggtttgttggtcactgttgagcgttgtgacgagcagatgacacaccatrcagaaggctatctggtgcctcactcctctatcatactggagtcacggggaagtgctgggaatttcctgagctttgtggaaaagattaacctcttggctttaattcccttagtcatagttccctatt

SEQ ID NO: 116198 - DNA, 529 bp, Homo sapiens
tatatatcaagcgggatgaatctccttgattccatgtctcacatccaggacatgctgatgcaagaggtgggctccctaggccttgggccccacccctgtggctctgcaggggacagcccctgtggctgctttcacaggctggtattaagtgcttgcggcttttccaaggtgcacagaggaagccgtcactggatttaccattctggggtctggaagatggtggccctcttctgagtgctccactaggcagtgtcccagtggggactctgtgtgggggctccaaccccacatttcccttctgcactgccatagcagaagttcttcatgagggccccagccctgcagcagacttctgcctggacatccaggtatttccgtacattctctgaaatctaggcagaggttcccaaacctcaactcttgtcttctgtgtacctgcaggcccaacactacatggaagctgctaaagcttggggyttgcaccctctgaagcaaaagccaagctgtaccttggccccttttagccatg

SEQ ID NO: 116199 - DNA, 601 bp, Homo sapiens
gtgggaggatcctttgagcccaggagtccaagtttgcagtgagctataatcatgccactatattccagcctggacaagagcgagactctgtctcaaaaaaaaaaaaaattttccatctacccctcccgaattaattccaaatttcaaacaggacagtcaaatatctctggggttacaatttcctctttaatcaaataagataactttcttaatgtaacaggtccagtagcatcatctaataacagtgtttgcttttacctcacttttttgcgaggccagacagctatatgacaacaaagtgcatgtgaacacaaaagtccctagcccttagaatgtagaatatagtgcagggaaggtatctttatttggtactggttctgaaaattactaatgtatcaccttttgtgagtaagtagctaatatttgatgatgtaactgtttaaagtaggaattacatacaggaaagatattgccaataygtcaaataaattccataaattctgcttgtcgtaatcaacacaccattcctttagccagacaaagcttaactgagctaagttaaactagattctagctctgtccaaaaatatagacctagagt

SEQ ID NO: 116200 - DNA, 314 bp, Homo sapiens
aatggaatataacaaagatattgagatgtcatgatggaatataacaaaggtattgagatgtcatgatgtagtataccacaagagaccaatcacagctataagattaataataaccacaggctcactcaaacatcttgcaaagctgacactacatatctcttcacaatatgatgtaacctggcccaaggctttccaggagacaaggccacctcagcacagatgcaatttttgrgaacattaaaacaaaatgtatcctcacaagaatcacttaaaaactcccttatgaaagacacctggtaactgacccaaactga

SEQ ID NO: 116201 - DNA, 451 bp, Homo sapiens
aaattataggaataatcctgaaaatgttcttattttacaaataaggataccaaaacacagagctggggtcttggaaattataaatggcagagttcaaagcagatggtagtttgcttggctaaatggttaatgtttttctctaggatattttgtcttaatagtagccgttktttattatatactggatgattacataagtatttcagagaaccattaatttgtattcttggtacataagccaaacaatgttttcttctacttaaagtcacatattctaattctatgtgtatatgacatatattatccagttacaaaaggaaaatgaagttggtaagtgggtggctggttcacagctatatccacattatgaatgagattaagttaaatttgggggtcattctggtctcttacacgttctctgctttcaatctgcactcattttactgtcatc

SEQ ID NO: 116202 - DNA, 615 bp, Homo sapiens
tgttatttgaaggaggtatccagaaattcaaagaatcaaactagacaggttcaaaaattcaaaattttggacctaatattaaagtgttagatatgtagtcccaaatacacattttcaagattacaacaaataatgaagtacagtaaaccagtatgttgcatagagagtattggcaacaaatgcatattggagagtccagtcttcatttgaattaatatgtgtgtctaatccatcttcctatctaatctggcaaatctatctaatctacttaatctattttatctacctaggtatttacctagctacctaatctagcaaatctakccatctacatatatttaattgttcatgccaatccaaacttactacaagtcagattcttccagaatccagccagattgtgacctctgggatagtacagataagaaactatactacctcccccccctcaacacacctgtaattatttaatattgaaggcaagagtattttgctttgagaatgagaaacgttgaatcagaatctggagtgatttccttctccatattctcttcttcccttccttctcttttataattgtttcatgatctgatctcccataatctagcagtacca

SEQ ID NO: 116203 - DNA, 569 bp, Homo sapiens
cataatgatatagtaatgggagataaactgaacagacatgttgagggaaattttggaatgtcttaaataccagaataagaagtcagaaattatttttgaaggttgagagtcactgaaataatattgagaagagtgacaagcgattagagttgtagagactgtagattagatgggatagaccaacgtttaaagagcatttggtaaggtactgcattgttctcagcatgagataatagtggcttgaattagaaaatgataggagttttagcttacttaatttttgtaaaatagaaaaatactaaaaatatcagtatattgttaatattagtttagayttatattttttgtatccacaaatacttgtatggacaaacatttacatagtcccagacattcatgaaatatctaacaaatacaagaaagtgagctattcattataaactatgaacagagccatggaccaatgttattttttcaaaagcaaactcaatactactatttccaaagtggtagcaaggttataattttaaagcagttttaaaatgaacactgaccattagttatctttt

SEQ ID NO: 116204 - DNA, 569 bp, Homo sapiens
cataatgatatagtaatgggagataaactgaacagacatgttgagggaaattttggaatgtcttaaataccagaataagaagtcagaaattatttttgaaggttgagagtcactgaaataatattgagaagagtgacaagcgattagagttgtagagactgtagattagatgggatagaccaacgtttaaagagcatttggtaaggtactgcattgttctcagcatgagataatagtggcttgaattagaaaatgataggagttttagcttacttaatttttgtaaaatagaaaaatactaaaaatatcagtatattgttaatattagtttagatttatattttttgtatccacaaatacttgtatggacaaayatttacatagtcccagacattcatgaaatatctaacaaatacaagaaagtgagctattcattataaactatgaacagagccatggaccaatgttattttttcaaaagcaaactcaatactactatttccaaagtggtagcaaggttataattttaaagcagttttaaaatgaacactgaccattagttatctttt

SEQ ID NO: 116205 - DNA, 569 bp, Homo sapiens
cataatgatatagtaatgggagataaactgaacagacatgttgagggaaattttggaatgtcttaaataccagaataagaagtcagaaattatttttgaaggttgagagtcactgaaataatattgagaagagtgacaagcgattagagttgtagagactgtagattagatgggatagaccaacgtttaaagagcatttggtaaggtactgcattgttctcagcatgagataatagtggcttgaattagaaaatgataggagttttagcttacttaatttttgtaaaatagaaaaatactaaaaatatcagtatattgttaatattagtttagatttatattttttgtatccacaaatacttgtatggacaaacatttacatagtcccagacattcatgaaatatctaacaaatacmagaaagtgagctattcattataaactatgaacagagccatggaccaatgttattttttcaaaagcaaactcaatactactatttccaaagtggtagcaaggttataattttaaagcagttttaaaatgaacactgaccattagttatctttt

SEQ ID NO: 116206 - DNA, 524 bp, Homo sapiens
ttgtgatttttcatgtttaatacaaataacagaaatgtatataattctgaatttgtaattttttattcttgtatttttcatcatactctcccaaattatataaatggccccaccaaaacctgatccacccatactaacatgtaaccagtacttttacatgctaggtgtttttaaagatcttacaggtaaatctcacattttacaaatgtgaataacaagttttacaaatgaggaaactccattctcagtcctttgtcacaacaggtcaacactgaattataaccccctgaatctctttctttcctgccacccagccctcaatgtagcttttcttctcttctctagcataactgcagattttaaaatctctatgatattgtctttgttttctcttacattttttttccagccacctgctactttgagagattatttataacttaatcccttttatttaaatctctgattcctgttttaagcaccacccaarcagtcatttacatctcagttccttggttttcaac

SEQ ID NO: 116207 - DNA, 615 bp, Homo sapiens
ggtttcatcttgaggctgtatctccacttttctgatttttcatatcctatatctttcttgtatttgtcacttcctgtcccttcaactaaactgtctgaaaagttcatggccagcccagttactggatgcaacccaacattctttattcagactcttttgggctrcagatataacacatgtatggcctgcacttgtatgtactccagctgagactgaactttctccttttttccttctctacctgtgaccctctttcaggcctttcttggtgttcttgaccatctgactgatatccagatttgtctgtattctgacaagacagagcgggccacctaacttcagaacaacatcataggtgccaatacaaagtagaccagatacaccgtccaaaatacccctccaaggttattccaaacctaaaactaagccaggagtttttccaaaaatacatcactatattttgtcttgggtgttacttccctacttggcaaactagggctagaaaaattggaacagagatttcctgtcagcctctcttatatatttttttcatatatatatatcttttacttgtaccgtctttactatgacagagttgccacagctttcacaatg

SEQ ID NO: 116208 - DNA, 615 bp, Homo sapiens
ggtttcatcttgaggctgtatctccacttttctgatttttcatatcctatatctttcttgtatttgtcacttcctgtcccttcaactaaactgtctgaaaagttcatggccagcccagttactggatgcaacccaacattctttattcagactcttttgggctacagatataacacatgtatggcctgcacttgtatgtactccagctgagactgaactttctccttttttccttctctacctgtgaccctctttcaggcctttcttggtgttcttgaccatctgactgatatccagatttgtctgtattctgacaagacagagcgggycacctaacttcagaacaacatcataggtgccaatacaaagtagaccagatacaccgtccaaaatacccctccaaggttattccaaacctaaaactaagccaggagtttttccaaaaatacatcactatattttgtcttgggtgttacttccctacttggcaaactagggctagaaaaattggaacagagatttcctgtcagcctctcttatatatttttttcatatatatatatcttttacttgtaccgtctttactatgacagagttgccacagctttcacaatg

SEQ ID NO: 116209 - DNA, 550 bp, Homo sapiens
aaaaaaaagtaaagacatttgatttactccaaggcttttgaaacgctaaaagcaacagcctaaaaagtaaccaagttgttagttggttgttcagaaaggttgyctttaagccctggccagaatatgcaagtcttgcagttttccaaaccattaaccatatcagtaacacagatacacagagaagaatgttgaagccaaaaggaactgaatgtgttctttgtgctcccttattctgtgtccttcaccagcaaggctgtgtcttatacatttcaacctttaagatgttcactaagtttccccttcctttatcccaaagctgctgaggagggtcttgaggaggaaaagggtgacaataatgctagtgtgtagcatcaagccaaagaatgaagcagctaaatagtaattgtaacttgtatatatttgtacattaatactgctgcttctatagtaaacatttttgaattcatttcagaatactttattaggtaaaaattttagggttggaaaattcttttattattccttgaaagcatctgcaaactttcaggtt

SEQ ID NO: 116210 - DNA, 603 bp, Homo sapiens
gctaaactgggaaaatgacttcacattttgacagaaacagagatgaacaatctatattcacatcaggcaaatgataagattcaatgtaattcaaattgagttaataatttttgagactgacttagcacaaattccataccaggcactctgctcagataaagacaatataaatgccatgctatagagacttgtggagcccaagtagtataattctagcttgtttatccttagagagaggattaagtgaacaaagctgtagagactcaacagaacctttctcaaagtgtattctagattgttgtagtaacagcaaagtaactttcagaaactttggatgcaacagaattaaacaggttattttactgcgagactttataatgtgctgtgtaaagctccaagatgagtacagaatatgcaaagttccctctatgtgctatctgagaaactgccctgccttctttgggggcagatttcaatgcttgggaattgtagacattgcttctttttccctacctataatattttgggacagaaagaagaccctgaccttactgctgataccagcaaaggagagagtatagcaayttgttaatatccattagc

SEQ ID NO: 116211 - DNA, 624 bp, Homo sapiens
aatcaaacctctctttttgattacatctgtaattataatgcactaacagaacgaatgtaaatacagaagactcatgtgcttttgacaycaaaatgtagttgtaatggcaaaaatgagatgctgtggcagccactcatgttaattacctcaggatttccatatagtcaatccagtgtcgtaatgcattatagaaattatgttttgcatgtttaattgatatgttttggcaggtggttcaaggtccttcttctattttcaaagctagagcagtttccagaatttccgtcatgtaccaagttatgcctgagatagacttggaaacttttggagtctgaaggaaattttgaatcatccttcaatcatctattctacttttctctccctctctcactctgtaggtggtgaaactgcagctcagaagtgagatgcactagaactcaggattctttcattgggccacgtggcacactttacttctggcatgaactaacctttcactagcatgcctcccagtgtaaaccaaactccttttaacaaagacttttgtctcagttatattcagagtgcaagtggtaaaatacaaaaataagactagttttgaactttcatattcgcaaaagtaga

SEQ ID NO: 116212 - DNA, 566 bp, Homo sapiens
tgctaggatttcaaccattcggtataacactggtaattaaagggaaataaataagtatttatcatgcttttgcctttgaccttgacccccaggggattaaatagccgaagtgaatgagggayatttctttttataaagaattccagtctcaaacttctgggttctagcaatcctcctgccttggcctctcaaagtgctgggattacaggcatgagccatggtgcctggctaataaaaaaaaaaaggaagaaagaaaagaaaagaaatgaaaatccaggtaataaatgcaaaagcaatgatagaattagaaaaaatacatcgctttacaatccatgataacatagatgattcaagtaaatggtcatcaaataatggtgagccattaagtgaaagattaataaggcactttataatgaaagaatcaggttgtctccatccataattattgatcaatcttagtaccactaaaagtgagacatgtatcttgtcatatgatgcaatagaaaagatatgataccacaatgaattttgaaaaattcaaattctgcatttcattgtacagaaaa

SEQ ID NO: 116213 - DNA, 629 bp, Homo sapiens
atttacacaattctgtttttatttaatgctaactgtatatcttaaagttttttcttcctaatagttcagctgtggatttacattcttagtaactgcacatttacataagttgctatggtgatattataaaattatttcaaatcaaaaggcttccctgaaatcacrttagatgtggaaataacattgctgaaaaccttgtgtttcaggtaagaaagtctgagtaagcagagattcttaactagaacacaatatggtaatataaacaaacaagcaacaaaaaacaaaaaaatctctactaagactagagatgttgtatagtgattaacagcattggttttagaaatccaaaactaagtgattatcatttggaactgaaatatttatatttgatgaccttctcacactccttggatttggaaaagggcattgtccttgtttcctgtttcttatccccagctcagtacaatgaaacgaggaagctccaggctgtccagcttcacaggacacaggggagaggagtctcctatactccagcttttctttcggaagcagagttttgaagttgaccttaagagtctgagtaaatggatagaagcatttttgatcccagagaggctctgctcgagttc

SEQ ID NO: 116214 - DNA, 629 bp, Homo sapiens
atttacacaattctgtttttatttaatgctaactgtatatcttaaagttttttcttcctaatagttcagctgtggatttacattcttagtaactgcacatttacataagttgctatggtgatattataaaattatttcaaatcaaaaggcttccctgaaatcacgttagatgtggaaataacattgctgaaaaccttgtgtttcrggtaagaaagtctgagtaagcagagattcttaactagaacacaatatggtaatataaacaaacaagcaacaaaaaacaaaaaaatctctactaagactagagatgttgtatagtgattaacagcattggttttagaaatccaaaactaagtgattatcatttggaactgaaatatttatatttgatgaccttctcacactccttggatttggaaaagggcattgtccttgtttcctgtttcttatccccagctcagtacaatgaaacgaggaagctccaggctgtccagcttcacaggacacaggggagaggagtctcctatactccagcttttctttcggaagcagagttttgaagttgaccttaagagtctgagtaaatggatagaagcatttttgatcccagagaggctctgctcgagttc

SEQ ID NO: 116215 - DNA, 608 bp, Homo sapiens
  misc_feature (1)...(608): n = A,T,C or G
acttcgtataaagctacagtaattgagatgatgtgattttggcacaaatatagacaaatagatcaacataacaaaataaagactcagaaagtaaacctacacattaaggaacaactaaattttgacagtggtgcaaaagaaattcaggagaaaaataatagtttttaacaaattgtacttgaacaattgaatattcatatacaaaacatcaactttgttttggaccawataaagaaatttaactaaaaaggaaacacagaactaaatgtaaaacctaacatgttaaaagtttagaagactatatgggagaaaacttttgtgaccttcaattatgcaaatattttttagacataacatcacaagcacaatccataagagaccaaattttaaaatgtaagcatcanaattaaaatcttttgctcttcanagaagtttgttaaaagaaatgacacaaaagccactgggatanaatattngnttatatctctatctatctatatattataaagacttgtatccagaatatatgtagactacttaataattccagaagaaaacaacaatccaatttttttaatggtcagaaaatctttatcaccaacacatga

SEQ ID NO: 116216 - DNA, 608 bp, Homo sapiens
  misc_feature (1)...(608): n = A,T,C or G
acttcgtataaagctacagtaattgagatgatgtgattttggcacaaatatagacaaatagatcaacataacaaaataaagactcagaaagtaaacctacacattaaggaacaactaaattttgacagtggtgcaaaagaaattcaggagaaaaataatagtttttaacaaattgtacttgaacaattgaatattcatatacaaaacatcaactttgttttggaccaaataaagaaatttaactaaaaaggaaacacagaactaaatgtaaaacctaacatgttaaaagtttagaagactatatgggagaaaacttttgtraccttcaattatgcaaatattttttagacataacatcacaagcacaatccataagagaccaaattttaaaatgtaagcatcanaattaaaatcttttgctcttcanagaagtttgttaaaagaaatgacacaaaagccactgggatanaatattngnttatatctctatctatctatatattataaagacttgtatccagaatatatgtagactacttaataattccagaagaaaacaacaatccaatttttttaatggtcagaaaatctttatcaccaacacatga

SEQ ID NO: 116217 - DNA, 548 bp, Homo sapiens
atctattaaaaaaacccatagctaatgtcatgcttaatgatctaagactgaatgctttccccctgagatcagaaacaagataagcatgcttacccttgcctcttctacttgacattgtactggaggttctagccagggtaattaagcaaaaaaaaaaaaaaaaaaaaaaaaaagagaaagaaaaasctttcagattggaaacaaagaagtaatctccatttgcacatgattttatatatataaaattctaaggaatacacataaaaaactattggagtcaataaacaaattcagcaagtttacagaatagaaaatcaatatataataatcaattgtataatgctaacaacaaaaattctgaaaataaaatattaaaatcaatttataattgaattagaaagaataaaatactgagaaatagttttacctaaaaatattcaaggcttgtgcactgaaaactgcaaaatattattaaaaggaatgaaagaaatcctaaataaatggaaagacatcacatggtcatggattgatctctgctcatgactagc

SEQ ID NO: 116218 - DNA, 531 bp, Homo sapiens
tctttgctattgtgaacagtgctataatgaacatacttgtgcatttgtctttatagtaggatgayttatatttctttgggtatatacccaggaacgagactgttgggttgaatggtagttcattttgatttctttggaatgtatctcaattgctttccctggtggctgaactaatttacattcccaccagcagtgtataagcatttccttttctccatcaccttgctgacatgttatttttgacttcttcttagtagccattctgactggtgtgagatagtatcttatggtaatttggatgtgcatttctctgatgattagtgatactgagcattttctcatgtttcttggcctcatgtatgtcttcttctgagaagtatttgatcatgtcctttggtaaggcacttttctattctacacatgacaacctgctgatgttggagataatatttgtgagttttgtgtaccccaatggttttggggaccagcccctatcaagaactagactatggccctttcataggtgttgtt

SEQ ID NO: 116219 - DNA, 529 bp, Homo sapiens
atacctggaaggccttcctaagaatgatgggtgcaaataagcccagactgaagactataaaaaatacctaagtcttcaatgcccagacatcaacagacattcacaagcatcaatattgtccatgaaaccatgaccttatcaaatcaatattgtstatgaaaccatgacctcatcaaatgaactaaggaaccactgacaatcccagagtgacagagatgtgtgacctacagacagagaatttaaaatagctgttttgacaaagctcaacaaaattcaagataacacagagaaggaattgagaatcctatcagataaattacaaagagattgaaataattttaaaaaaatcaagcagatattctggagctgaaaaattgaactgacatactgaagaattcaacaaagtttcccaacagtggaattgatcaaacagaaaaaatatccaatgaacttgaagaaaggctatttgaaaatacacagaggagaaacaagaaaaaaagagttaaaagaatgaaacatgcccatgaga

SEQ ID NO: 116220 - DNA, 515 bp, Homo sapiens
agaccactgacatggtaactctttgagtttgctagtgtcacagtgttatcaggtttgagatgacccccaatgaagatgtgaccaaagctttagatcacagcagtcaactctcttttgatacctggaaggccttcctaagaatgatgggtgcaaataagcccagactgaagactataaaaaatacctaagtcttcaatgcccagacatcaacagacattcacaagcatcaatattgtccatgaaaccatgaccttatcaaatcaatattgtctatgaaaccatgacctcatcaaatgaactaaggaaccactgacaatcccagagtgacagagatgtgtgacctacagacagagaatttaaaatagctgttttgacaaagctcaacaaaattcaagataacacagagaaggaattragaatcctatcagataaattacaaagagattgaaataattttaaaaaaatcaagcagatattctggagctgaaaaattgaactgacatactgaagaattc

SEQ ID NO: 116221 - DNA, 632 bp, Homo sapiens
acctttctttttgctgatcacaatctgctctagagaaaatctaggatatagatcattttcaaatagtttaaattttagttcctgtatttcccacccaaaggggatttttatgtcttgagattttgacgttatagcttattgaacaacttcaagcaccaaaaagcagatggagaagattttcttagatagaaggatctttttacttcccactatatttaaacaaaagttagagactatttacctagttttagttttgttgaaataatgaaagaattttcatattgctgtttaaaacaacacattaccttagrgtgacaaggtattttcttctcatttaatacatagctttaaccctaacaaaatggcttttcaatggccttgtaaatacagcttttattcctgaacccctttggcaaatttctttattcagagttcagggggattgagcggctgaaagggacttactgtgatattagaatacatcaattccaccaaccacaactcattttggtgatacttacaaaatggatatccacaaagtcttgtgttagaaaaaatgaggttgatcatttcattttgataatttttatcatcttcaataatcatgaatgcatccacagacagaaatttat

SEQ ID NO: 116222 - DNA, 560 bp, Homo sapiens
cacatgtatacatatgtaacaaacctgcacrttgtgcacatataccctagaactcaaagaataataaaaaatatatatatacatatatattaaaaaaagaagtcactgggcatcttgatggtacatcctagcactgcagccacttgctgtgtgatagtcagccaccaacctggttcttctaaacttctacctactggtcctttcccccaatgggtaacagcaaaggataggtgaagagcaagctgcacagtattaagaagaaatgagccattttaataaaagattcagcaatggaactctaagaggaaaacgttaaaggtagttgttcaatattactatttctatattataaaggaaaagaacctcataagttaaacatatttcactatacattcaagcttgagcaacccttcctgggaagggtgtatgggtacaagagctaaacttcagaaataaatttattttggcagctcaattgactaatgtattctggacacaatacagtttgttatacttccatcatagtaatagtgaataaaagcttgtgatataaagatttc

SEQ ID NO: 116223 - DNA, 560 bp, Homo sapiens
cacatgtatacatatgtaacaaacctgcacgttgtgcacatataccctagaactcaaagaataataaaaaatatatatatacatatatattaaaaaaagaagtcactggrcatcttgatggtacatcctagcactgcagccacttgctgtgtgatagtcagccaccaacctggttcttctaaacttctacctactggtcctttcccccaatgggtaacagcaaaggataggtgaagagcaagctgcacagtattaagaagaaatgagccattttaataaaagattcagcaatggaactctaagaggaaaacgttaaaggtagttgttcaatattactatttctatattataaaggaaaagaacctcataagttaaacatatttcactatacattcaagcttgagcaacccttcctgggaagggtgtatgggtacaagagctaaacttcagaaataaatttattttggcagctcaattgactaatgtattctggacacaatacagtttgttatacttccatcatagtaatagtgaataaaagcttgtgatataaagatttc

SEQ ID NO: 116224 - DNA, 560 bp, Homo sapiens
cacatgtatacatatgtaacaaacctgcacgttgtgcacatataccctagaactcaaagaataataaaaaatatatatatacatatatattaaaaaaagaagtcactgggcrtcttgatggtacatcctagcactgcagccacttgctgtgtgatagtcagccaccaacctggttcttctaaacttctacctactggtcctttcccccaatgggtaacagcaaaggataggtgaagagcaagctgcacagtattaagaagaaatgagccattttaataaaagattcagcaatggaactctaagaggaaaacgttaaaggtagttgttcaatattactatttctatattataaaggaaaagaacctcataagttaaacatatttcactatacattcaagcttgagcaacccttcctgggaagggtgtatgggtacaagagctaaacttcagaaataaatttattttggcagctcaattgactaatgtattctggacacaatacagtttgttatacttccatcatagtaatagtgaataaaagcttgtgatataaagatttc

SEQ ID NO: 116225 - DNA, 637 bp, Homo sapiens
gtcagccaccaacctggttcttctaaacttctacctactggtcctttcccccaatgggtaacagcaaaggataggtgaagagcaagctgcacagtattaagaagaaatgagccattttaataaaagattcagcaatggaactctaagaggaaaacgttaaaggtagttgttcaatattactatttctatattataaaggaaaagaacctcataagttaaacatatttcactatacattcaagcttgagcaacccttcctgggaagggtgtatgggtacaagagctaaacttcagaaataaatttattttggcagctcaattgactaatgtattctggacacaatacagtttgttatacttccatcatagtaatagtgaataaaagcttgtgatataaagatttctaaggtagccctaaatataatgaatatttctatttaaatgtctttgctaatctgytgttagctttaaaaaagaaagtgatttccaaagaggtcttttattgaggcagggagcattgaaataatattttataccatctttttaagttcttttttcctttagatttactttttctgaatttatattacttctcagttttataattcataagacttgatgatagtttataaaagtt

SEQ ID NO: 116226 - DNA, 433 bp, Homo sapiens
  misc_feature (1)...(433): n = A,T,C or G
tgggcatagtggctcattcttgtaatcatagcactttgggaggttgaagttgaggattgcttgagctcaggagttgaagaccagccctggaaacatagggagaccttgcctctactaaaaatataaaaattagccaggcatggtggcakgcgcctgtagtcccagctactaggtaagctgaggcaggagaatcgcttgaacccaggaggaagaggttgcagcgagctgtgtgtgattgtgccattgcactccagcctgagtgacagagtgagagcctgtctcaanaattaaattaattaattaaacacatcgttttataaaatattttctctacatattctgggaatgataattttatataaagaaagatcatgatgacttatttacaacgaaatgataaaacaaatctaggagtaatttatcacataaaaac

SEQ ID NO: 116227 - DNA, 433 bp, Homo sapiens
  misc_feature (1)...(433): n = A,T,C or G
tgggcatagtggctcattcttgtaatcatagcactttgggaggttgaagttgaggattgcttgagctcaggagttgaagaccagccctggaaacatagggagaccttgcctctactaaaaatataaaaattagccaggcatggtggcaggygcctgtagtcccagctactaggtaagctgaggcaggagaatcgcttgaacccaggaggaagaggttgcagcgagctgtgtgtgattgtgccattgcactccagcctgagtgacagagtgagagcctgtctcaanaattaaattaattaattaaacacatcgttttataaaatattttctctacatattctgggaatgataattttatataaagaaagatcatgatgacttatttacaacgaaatgataaaacaaatctaggagtaatttatcacataaaaac

SEQ ID NO: 116228 - DNA, 516 bp, Homo sapiens
  misc_feature (1)...(516): n = A,T,C or G
tcattgtaagaccactagttctaagatcagatgacaaggagatattttaaacaatatttaaataattaaaaataaagacatgagttaaagctcataaattttgttagaaatttttatntgatatccatgataaatagaggaatttttgatamtttacagtgaggtaattaatttgaccaaaaattattatctgtcttctctttcatttaattgtatatatctaaactcaacgtaatattctagattttgaagaagtagaatcaaactctatttctttaagaattctaaatgtgtatatgttttatgttatcaagttattgttcttaaaaattaaaatgataacaaaattgtgtttaattgaatgaatttgtaatttgtagatctttagttcactttaatatcattacaagttttaaatttaataaatttataaatatttaaataattttgatatgtaacttcgtaactaaattagttctacatttttaaataattagaaaatcaggtgatgtgcaa

SEQ ID NO: 116229 - DNA, 616 bp, Homo sapiens
aaaacaatacaaaggggtatttagagaggtttaatcaaagtactatgaaacaacagaaggaaagacttattccagtagarggaataatttgttgacaaatatgttgatggaaagcaagaggtagtgcaagggttacaataagagccaaagccaaggaatttggttatggtagactaatcttgaaccaggaatattagggaaatatttagtaattcagttgccaacaaccatctaaacctgtatgataattttgtttaggctaaattctaaataaaaattaaatagattttttgtgtgtgtgcgtgtgtgtgcacatatgacagttgacgttctctccatagttttatgatggcaattcacacacaaaaaactagagatctttatatttataactgacagtcagatatttgctagaaaattttgaaagatttgtgatgaggtgcaaagctactgaaattttcctgggactgattttaacagaaatggagaagcataaatttttgaaactattttaaatctttccttatatacaagcaaatcttatacataatacaaagaaggactaatcggacaaaatttctgactttttaaacttttgtttaagtgaaagaacagg

SEQ ID NO: 116230 - DNA, 616 bp, Homo sapiens
aaaacaatacaaaggggtatttagagaggtttaatcaaagtactatgaaacaacagaaggaaagacttattccagtagaaggaataatttgttgacaaatatgttgatggaaagcaagaggtagtgcaagggttacaataagagccaaagccaaggaatttggttatggtagactaatcttgaaccaggaatattagggaaatatttagtaattcagttgccaacaaccatctaaacctgtatgataattttgtttaggctaaattctaaataaaaattaaatagattttttgtgtgtgtgcrtgtgtgtgcacatatgacagttgacgttctctccatagttttatgatggcaattcacacacaaaaaactagagatctttatatttataactgacagtcagatatttgctagaaaattttgaaagatttgtgatgaggtgcaaagctactgaaattttcctgggactgattttaacagaaatggagaagcataaatttttgaaactattttaaatctttccttatatacaagcaaatcttatacataatacaaagaaggactaatcggacaaaatttctgactttttaaacttttgtttaagtgaaagaacagg

SEQ ID NO: 116231 - DNA, 463 bp, Homo sapiens
agattttggtccaggagggctctagaggaacagaatatgaagtatggaattttttcattgattttggtgtttctgaagttggctscttaatagtgatgtgactcaaaaatgctagaggactctacttctaatagtatggagaacactgatagtccttggcataaactgtttagaaagttatgcaaaataaatgagttgacactcctgattcaccacttatcagaggcaaggaggttagtaactctatacataatatatttgaccatatgggaagaaccaaggagcatattgaaactggttggttgctcctaaattcagtggacaaagtgatgaaagaaaatgatgaactcaaggattctgtctcccagcatcaggagcagatagtgagcctcaaatctgctaggattgccctgagtgattcttatctcctgaagagaaagagctgaaattgtggaaaaacaga

SEQ ID NO: 116232 - DNA, 463 bp, Homo sapiens
agattttggtccaggagggctctagaggaacagaatatgaagtatggaattttttcattgattttggtgtttctgaagttggctgcttaatagtgatgtgactcaaaaatgctagaggactctacttctaatagtatggagaacactgatagtccttggcataaactgtttagaaagttatgcaaaataaatgagttgacactcctgattcaccacttatcagaggcaagkaggttagtaactctatacataatatatttgaccatatgggaagaaccaaggagcatattgaaactggttggttgctcctaaattcagtggacaaagtgatgaaagaaaatgatgaactcaaggattctgtctcccagcatcaggagcagatagtgagcctcaaatctgctaggattgccctgagtgattcttatctcctgaagagaaagagctgaaattgtggaaaaacaga

SEQ ID NO: 116233 - DNA, 422 bp, Homo sapiens
atattttctcccatcctgtaggttgccatcttactctgttgactgtttcttttaatctacagaagttttttaagttgcgtgtggtcccatctctctatttttgcttttgttgtctgtgcttttggtttcrtgtccaagaaatcattgtcaaatctcatgtcatgaagtttttccactatgttttcttccaggagttgcatagtttcaggtcttgtgtttagatctttaatccattttaattgttgtatatggtataaaataatggttcagctttattcttttacacatgtattatccaggttttccagcacttttattgaagagactaacctctccctattggcacccttgccaaagatcttttgacactctatgtaagagttttattttaaaaccacattcaaattctataaaaaggcaat

SEQ ID NO: 116234 - DNA, 487 bp, Homo sapiens
tacataattcctattgtttgctccacagatgtccccacaactgccctaaagggtgactctggtctgcatctacctggtagttctcctaaagaactccaatatttcttggtaactcctagttcagtgtcactatctcaataccatctgttcaacaaatgtttgctaagtccctgcaatttgcctagcactgtgtttgatctatagaccataaatagaagagtggtgaagtgttctgcaacagtctragcaggcctcagcgaagcaaggaagacagatacctgaagcatctaacctctaatgagtgattcataacttggtcccctctcagcatttcaaacccacttctttcaaggaaataggtgaatatttctacaccttgaatccacagacatattctctggcatctgtatatgtgtgtgtgcttttatttcagtgattaatcctggttatgtaaaccaagactcaataaacattttttgttaagggc

SEQ ID NO: 116235 - DNA, 619 bp, Homo sapiens
tgaaacacttctctaagcaataatttcgaaggaacttgattcttgaaacgtcatctgatgttatttttgtcagtcaggtttctcaacgccaactgtcactgaagcattcacacatttatcttggccctcctctaaaatgattgactaaggcactttgcaggctaacaatttgtcttgggcatcctactcatctatatccatcccttcccccatttatgttcaaatatttccaaaagaaaatgctaccctctgtatttacctgagttcttattgaatccctgctcatggtatcaatgcagagaaagagaccaactgactgtccttattttcacccctatgtgtaatccctttgttgtacccataatgtcaggaaagacaggtaacaacatcccatggccagaaaggaagtcttaycatgagactttctctcctacccttgggacacaagggttgtggcaaacattttcctatttcatctattgagtcagttctcagcctgcagaggacccgtttcagataggcattcaggaatactttcttctcctagtctacccactcttttcccctctcattattattctatttctatcccactttcatgttccatggaggggaaaaa

SEQ ID NO: 116236 - DNA, 588 bp, Homo sapiens
ttgggttctttcaattattgacttgggatctttccaaatctgaatcatcctatagataaggctccttcattgtgacatggtaaattatcttataattaaaaactaagtcgtaggccaggtgtgatggcttatgcctctaatctcaacactttcagacaccaaggtggaggatggcttgagcccaggagtgcaagaccaccctgggcaacacagtgagaccccatctctaaaaaaaaaaaattaaaaattagtcaggtgtagtrgtgggtgcctgtggtactagctaatctagaggctgaagtgggaggattgcttgagcccagaagttcaaggctgcagtgagctgtgattgcaccactgcactccagcctaggcaagagaacaagatcctgtttcataagaaaaaacaaaaaaactaagcttttatcttagaaacattttaaagaaactacagtcaaaactggcataccagtacactataaaccaccatttaaaattttggcattttaactttgagaatgtgacattggttacttgaaatttgaatgttaggacataaatcttggaaatatttgggcttagttaaag

SEQ ID NO: 116237 - DNA, 588 bp, Homo sapiens
ttgggttctttcaattattgacttgggatctttccaaatctgaatcatcctatagataaggctccttcattgtgacatggtaaattatcttataattaaaaactaagtcgtaggccaggtgtgatggcttatgcctctaatctcaacactttcagacaccaaggtggaggatggcttgagcccaggagtgcaagaccaccctgggcaacacagtgagaccccatctctaaaaaaaaaaaattaaaaattagtcaggtgtagtagtgggtgcctgtggtactagctaatctagaggctgaagtgggaggattgcttgagcccagaagttcaaggctgcagtgagctgtgattgcaccactgcactccagcctaggcaagagaacaagatcctgtttcataagaaaaaacaaaaaaactaagcttttatcttagaaacattttaaagaaactacagtcaaaastggcataccagtacactataaaccaccatttaaaattttggcattttaactttgagaatgtgacattggttacttgaaatttgaatgttaggacataaatcttggaaatatttgggcttagttaaag

SEQ ID NO: 116238 - DNA, 513 bp, Homo sapiens
gaattctagccctgctgcagagctgttgctctcaacagccatggagggcctactgggaggatgagtagacaggttgtggatgtgaacttgcaatttcctaaacctcccctctgctcctgcatttctgttttaacataaatatttaggtggtagaaaattaattaggaaatctttaggttagttggagacatgctgtggtactacaaaaatagcttaggaaccatagatctcaatttacctatcaggctgrgtttttgcctcagctttttattctttaaacattaccaaagggaaaagagagaattttacaaataactagaaacttttacctgtgatgcattttattttcctttccttggtaaaataattctgatttttttctttagatctgaaaactcccctaaatgaccactgtaaatttctgcaaatttccagatataagcaaacatcccaagaaaatatcttatttttttcagactaatttaacaattggataccggtttcttataaaca

SEQ ID NO: 116239 - DNA, 523 bp, Homo sapiens
ctgcttcaactgtcacagctaagtgtttagcttgggctttttcagaccatccaggtaaatgtgaattcaggggtatctgatggtgataaatccaacggtcccaatgttttttttcctcctttatctacctagcattgttgctctagataggcaacctttcttgctgtcttcaacaagtagtggtggtggtggtgggaggtatgctagggtggttgggctggctgaatttaattctagtattcttacactgaaggtttagtgactgtctgagtccccacttgatgcagctggggtctgtcaccatgagaccaagaaagggacacaatagaagggaatatgcacctagcttatcaaatttcctcagggcaaagccagctttagtgttctgcttactattctgagttctgaaccyggtgtacagtctctatgaaatctttctttctaccttatccagacttgcatttatcttcatttatattacattcacaatttttagttatcactagaaggagacatacagtgt

SEQ ID NO: 116240 - DNA, 540 bp, Homo sapiens
aaatgcatgcccataaaaattgctagatatcatattaagctttctatatatatctcaatatatattgaatatatatatttgatacatataaatgtatatatcttgraaaaaaaggcaagaaattcagaagataaagaagctgccaagatcacacttgatatatgaaaaaaacctgatatatgaaaagtaaaggtaggttaactgtaagcagaaaaaacaagttactcataaaaatgaggctaattgccacatatatatagaagatacagacttttccttacctatcattcagtcttgaaaggagaacgagacacagaattatggtcacagaattattactgaaacatgttcaggatataggtttcaaatgatagagtcaattattcaggctcctcagttattctggaggagaggagctatcctgaaaatgagttgagaacatgagttatagtaacaccatgagtaagtaagagtatttcaggtgaagagattaggttagtagagatagtagtactccataactaccataataaaccttgt

SEQ ID NO: 116241 - DNA, 508 bp, Homo sapiens
tttgaggccaggcatttaagactagcttggcaacatagtgagaccctgattctacaatttttttttaattagccagatgtagtggtgcatgcctgtagtcttaggtacttgggaggttgatgtgggaggatcacttgagcccaggggtttgaggttacagtgagcttggcgacagagtaagaacttatctctttttttwaaaaaaggaagaaattcagaagttaaataagctgccaagatcacacttgatatatgaaaaacaacttgatacatgaaaagttaaggtggattaaccgtaggcagaaaaaacaagttactcataaaaatgaggttaatttcaaaagaaagtgaaagaatggcaatttggactctgggtgtctggctttaaagactgtgatttcatttatgtactattctacattactttactaaaaaggggtgttttatatataataataaagataaaaaataatgaacaaagatatataatcaatgtgaacatatgttc

SEQ ID NO: 116242 - DNA, 588 bp, Homo sapiens
tgaggtgtaattgtttcctttttattttatctatttcagagacctagttctcaaaaatatattgagaaaggaatataaaatgataattggcaaacttgcaagactggtattttttaaaatttatccttggcacacagaaaattgtgatcacaacctgtcaccatactaaacaccatttttatgattgtgaacacaatatatttggtggggaataaytttaggaagacaaaaattatcaccctgatttcttaaatgagaatagaaaatgttctgtgcaatcaccaacatatcaagcttatctacaaaaatgtttttggatatattgcatgtgctagggatatttttatttctaaggttaccacagtgataattacacacagtacaaattcaaaactatatttttaaaaaacaaacttaaactcagagaaagtttaaaaagtattgaaggaaaacaaacctaagtatttatatctctggtaaagagttattttaactatattctagtgaacccatgtaattttttggaaaaaaaaatctcggaaatagggcttggtcttgggaaaatttattaagaagttgaaggtgtag

SEQ ID NO: 116243 - DNA, 469 bp, Homo sapiens
atccgtatctctttaaattgccagcattaaaatatctgtaagtactatagtactctcatgagtcaagagatgatttatgctttttaaatttttcatcaaagcttaagtattttgcatttaggctaaaatgtcataatttaaattttaactgggttattgaaaaaaagttattggcgaagaaaaaaaytaagaggatgtataatggtcaagacagccagcaggggaagagaacagcattgaagaacccatatagatttggaacatgtagacacatggaggaatattatttaaccaagaaagcaaaggggaaaaggtgttcattattctaaaaataaagaaaagagtaaataagatggtgagtgcaatatgaaaatgagaagataatggtaaaaaaaaaaagtgtcagttctgctcttgagtatcattaatttgatgatgcaaatcaacttttaatttctttaataagagc

SEQ ID NO: 116244 - DNA, 588 bp, Homo sapiens
cagccacttaggaggctgaggtgggatggtcacttgtgccggggaggtcaaggctgcagtgagctgtgatagtgccactgcactcccgcttgggcaacagaatgagaccctgtctcaaaaaaataaaatgaataatagatttacatagatcgacatgaataacactcagaaatataacatcycgtcttcaaaaaaaaaaaaaacctagtaagctgtactgaattaatctatcctaccatttaaaatttttgttgagggtaaaataatattaaatattccctttatagcaatcctcttagtgctttaagtctgcttgttgggtccttaattgtttcaattttatacaaggtcgtttcctttcctgctttccagcatttcattaagttcttgttcaggtctccagctagatcagtctcattggttctagcaggtgtgggtcttggtgggttggtgcaagtccattcactatttcaactcttcagaaagtcccggaaccagtcagttttgcagttcattcctaatactaagattgtttctgcttcacttatctttttaacttacctcagtgtaccaagaaaaacagtcatc

SEQ ID NO: 116245 - DNA, 607 bp, Homo sapiens
tagaacagaatttagagtgtgaaacgaccataaagacttatctagttcagtcttgatttatagatgtgacaaatcaaggcacagacaacttaaattatttacttggattcttctgattgctagcagaatctgttgaaacacacatactcaaagtccctttgaagaaaacagctttgtttgtaaaccactagaatctttgcaacagacatttaatactgcacagtgacttcttttgtttacctcttgctatttgacctcagtaactcacagaaatgccatgcctgttgttcaaagcaagtgtgaaaaaacagtctttgtttataacctgcttttgtggtgagaactgtagaagctcacttacccaatgtgacttggactggtaattaagtgaaaagttggttaaaggctttttcttggaggtgtggtccatggattggagttctgtattatcttttgtgcatacactttacccrtaatttccaggtggatttctttgaaatggctggagaacttagactttgtagagcatctgagagtgccaaaacctcttggatttttgtagagttcactcccaaccttttctaattttaatgcttatacctagtta

SEQ ID NO: 116246 - DNA, 622 bp, Homo sapiens
gtgcccttgtaaccaacatctgtagaaggaaggcaggatccttggacggtgggtgaratagagccatgagacacagtttcaacagaggtctcagccaactctctggggagacctaaagctgtcatgaccctttgaagttgtcctgagttgggccagagcccaggccattgtactcccatgtcaatcagtcattgaatgctggccatgataggacgggggtgtgaccttaggtgaggcagttctcttcagccaaggtagtccacatcagggcctggtagctgagagcttctgccttcagaactctcagaaggtgagagtgagtcctttgttcctgatggaggattgggcagcatatcacggtggccaacacagtccactccttgggccatgtcttagtccatttgcattgcaataaaggaatacctgactgggtaatttgtaaagaaaagaggtttatttggctcacagttctgtaggctgtatgggaagcatggcaccagcatctgcttctggtgaggacttcaggaagcttccaatcatggtggaagagaaaggggagttggtgagtcacatagagagagagaggaagaaagagcagagaggtgccatgctttttcaaatg

SEQ ID NO: 116247 - DNA, 531 bp, Homo sapiens
atttctttacctgaacttttcttaggttggatttactgtaagattacatatttttgatgcaagttttacattctcatgaaaacatttacaacgtatttttaaaaatacattacactacacacacacacacacacwcacacacttctttttccaaacttggtgacagtgaatttctttcacaacccaaatgtaaatgtgggagatgaacaaaatggaatatttttaaaagttgccactgaggggagtacagatcctggtcaaaaacctctgcataactttcaggcccaaccttagacaattacaaagaccttatctggcaggcctcatagggcagagctgccatgccccctgagacttggcgacacccagtgcactgcagtctgagaaagcagtgactgtcaaggactcagccctggccagccatgctgttatacatggctgcattcctagcccagatgcctccttttggaagcctctttatccagggccatcagcagagacttccttattgtggagagggaggaggagacc

SEQ ID NO: 116248 - DNA, 552 bp, Homo sapiens
catactatgttcgtgtccaatgaagctgttaatttttccatgccaatgttaaaatgatatgacatagaaaatggcacttgtagataacctcatactttctgtttatgaatagttttaccctcttcctctcctctcctcactaagtcttttcccagatctgttacatgagataaaaacagctgacttgtgtcccaattctctttaaatgtcttgtggcagcagtaatgagagawaatgaacaccccaaactgtttccaattaaaggaaggaagaatatgatagcacttgagtcgtgttcttcagttgtttttcatatgtacatctgatcttctcaaccaaggtagtggtttctttttctgtctctcactgagcatgtcaccggagtgctgtgtatagagtaaggccttaataaatatgtgttcagttgacaggagcaggagccaggggctaagctgatctcacagtataatgtcagcttctgaataattgagcatggtctgtgtgattaatgtatttatgtattcagctggtattagcaatatcctccctgcc

SEQ ID NO: 116249 - DNA, 552 bp, Homo sapiens
catactatgttcgtgtccaatgaagctgttaatttttccatgccaatgttaaaatgatatgacatagaaaatggcacttgtagataacctcatactttctgtttatgaatagttttaccctcttcctctcctctcctcactaagtcttttcccagatctgttacatgagataaaaacagctgacttgtgtcccaattctctttaaatgtcttgtggcagcagtaatgagagataatgaacaccccaaactgtttccarttaaaggaaggaagaatatgatagcacttgagtcgtgttcttcagttgtttttcatatgtacatctgatcttctcaaccaaggtagtggtttctttttctgtctctcactgagcatgtcaccggagtgctgtgtatagagtaaggccttaataaatatgtgttcagttgacaggagcaggagccaggggctaagctgatctcacagtataatgtcagcttctgaataattgagcatggtctgtgtgattaatgtatttatgtattcagctggtattagcaatatcctccctgcc

SEQ ID NO: 116250 - DNA, 412 bp, Homo sapiens
aactcatggaaaacatccctatgctttattaagagatagaatgccacagaagtaaaaggaaaactattaaactagattgtgttaactagaactgactctgccaaacatgagccctacagtcattgacaagttacctaaaaattctaagattcagttctcacttacttaaaataaggataattgtaccatttaaattattgggttgctatgaagagtaaattgataaatttgaagcatttagcataggttctgacayataataagcacttgatataactctgctgccatgaaatctgaagttttaattgaaaagtggattttaagcatctgttacagaaacccattaggtggtttccagtcaattctccctactgagaggaaaccaaccctttcctaccaccacagcttcttt

SEQ ID NO: 116251 - DNA, 394 bp, Homo sapiens
ctcctgggctgcagactgctgcctttctccttgtagcctctggagcctcttatttatttattttttgagaccaagtttcactcttgtcacccaggctggagtgcagtggcgcaatctcagctcactgcaacctctgcctcctgggttcaagtgagcctcctgcctcagcctcctaagtagctgggattacaagcacgtgccacactcctggctaattttttttttttttttttttttggatttttagtaaaratagggttttgccatgttggccaggctggtctggaactcatgatctcaggtgatccacccgccttggcctcccaaaatgctgggattacaggcaggagccaaggcgctcggcctggagccttttttataagggtgtgaattc

SEQ ID NO: 116252 - DNA, 491 bp, Homo sapiens
ttctcccattctgtaggttgtttactttcttgatagtttcttttgatatgcagaagatctttagtttaattaggtctccattgtcaattttttttttgtatttgcttttgaggacttagtcataagttacttaactaggccagtgttgagaggggtatttcctargttgtcttccaggatttttacagtttgaggtctatacagttaagtctttaatccatcttgagttaatttttgtgtatggtgtgatgtagaagtccagtttcattcatctgcatggggcaacccagcttctccagcaccacttattgaaaagggtatcctttccctattgtttatttttgtcacctttgtcaaagatcaattgtttgcaggtgtgtggttttattttggggctctctattctgttctgttgtcctatgtgtctgtttttgcaccagtatcatactgttttggttacactagccttattgtatagcttgaagtcaggt

SEQ ID NO: 116253 - DNA, 583 bp, Homo sapiens
gtgtccttcattcatattaaaatcttcatttttgtggaggctatagaacaagtaacataatatctggtggactggctaaaatatgccacacaattcagttggctaaattgcaataaactgaaaaagtaaatggctaaaaartagtgttttattcattggggctcttcttgaaaacaagtatgcacgcttttttaaaaaagacagagacaaaatctaaagtacctaagaaacaccaggtccttttcaatgaattatgagcagttggttatttctcccaagtaactgtgaacacagattgtaaaatattaatcagcttcagcctctatttaacatgcagcaaagatggaaacctcagacacaaatgttattagccatgactcaggtcatttggaaaagtatcttctggagctggcaagggtgggtcagaagttcaggacaaatgtgattggacagtagaaagtagaatgatgtcactggttaagtcagctgagacaggtagtctgaaggctgcaccttaattctcataccatcttcataaccgtcagataaaattaatgacacattccaaacaacaaaggactgt

SEQ ID NO: 116254 - DNA, 569 bp, Homo sapiens
tctttggacacttattatcattaatcttgtttcagtgttttgtttaagaaacgcacgtgccaaggggaaagatgatgtactgaacttgaatgatgagcaggtgggaattttgtsagagcaaatgtgtgtgtagacacatacacatatgctgggtcaggtgtgcctgagattttgaatgtgtgcaaataattctatcagtgatagatttttttctttcattcattctgcagatatttacagaacatgccaagctctctgtggagcaacacagctgtgaatatagaacatatagggtctctgtccttaagtgtctaatacatttttttttgttatatgcaggtacattgacaatttaatttagtttagaaatatctgcaacatgtcacaaattgttcaatggccataatcttgctgacaatcttaatgaccaaagaggaacttaagggaaataagacagtgttaaagtgggaaaggaatgtacataaatctgaattagaaattgattacttcctttaaatttagtaaatattgaattgctttggggttttacatttcaagttggcttgcca

SEQ ID NO: 116255 - DNA, 612 bp, Homo sapiens
ggcttgcttccatagtagacacagagaaggaagttggatccatctttgctttcaatagagcattaaagagtctgctagttatccatctctctgcacctatttttatgtaatttttcaaagaattgagctrtaaaatgccctttgtgggcacacagcacttaaagttaatattttgttaatgatttgtttagctgattgcctttagctaagataaaattacccgtcaggctctgtttcaagcccttggacatcaaatgggaatttttaagcaattagagtggcagcactcttgccactcaaaagcaagagtgggatctctcttgcttttgagatccccgaagcaataagttgatgcttaaactatttttaattcagtagtggctgaaaggacaaatttctatgtatttcttgtaacacaaccacattaggttcttcctttagatattcttcaattgtcatagaatagcttccatcatgtccattcctggtgtggattttagatcctcaaatatcagttaataaaagatttcacaggcctttggttgtaaatatattttcaataccaaaaatattagaaactggattttgaaatgtgaatcattaaaaaaaaaa

SEQ ID NO: 116256 - DNA, 612 bp, Homo sapiens
ggcttgcttccatagtagacacagagaaggaagttggatccatctttgctttcaatagagcattaaagagtctgctagttatccatctctctgcacctatttttatgtaatttttcaaagaattgagctataaaatgccctttgtgggcacacagcacttaaagttaatattttgttaatgatttgtttagctgattgcctttagctaagataaaattacccgtcaggctctgtttcaagcccttggacatcaaatgggaatttttaagcaattagagtggcagcactcttgccactcaaaagcaagastgggatctctcttgcttttgagatccccgaagcaataagttgatgcttaaactatttttaattcagtagtggctgaaaggacaaatttctatgtatttcttgtaacacaaccacattaggttcttcctttagatattcttcaattgtcatagaatagcttccatcatgtccattcctggtgtggattttagatcctcaaatatcagttaataaaagatttcacaggcctttggttgtaaatatattttcaataccaaaaatattagaaactggattttgaaatgtgaatcattaaaaaaaaaa

SEQ ID NO: 116257 - DNA, 590 bp, Homo sapiens
ctattggtgttctccatattgttagaagtagaatccttagcgttttggggtctaatcatattaagcagccaactccaggaaccccaaaaccaacgaaagaacttcatttttaatattctgttcctctggaaccactcctggtacagaaatctgtattagtcagggttctctagagggacaaaactaataggagatatatatccatagtgaggagtttattaagtattaattcacacsatcacaaggtccaacaataggccctctgccggctgaggagcaaggagagtcagtctgagtcccaaaactgaataactgggagtctgatgttgcagggcaggaagcatccagcatgggagaaagatgtaggctggaaagctaggccagtctcaccttttcatgtctttctgcctgctttatattcgctggaagctgattagatggtgcccaccttattaagagtgggcccgtcttccccagcccactgactcaaatggtaatctcctttgacaacaccctcacagacacacccaggattaatattttgtaccttcaatgaagttgacacttagtattaaccgtcacaatggtct

SEQ ID NO: 116258 - DNA, 605 bp, Homo sapiens
ttcctacatttagcaaagtcagctagggcgactgagccagagagatggggcacacagcaagaggagacctgacaaagtgcaggtgtgtcctagagaaggcaagcgagaccactgcatgattggaataccagccaacccttgcctgttcttgttccagcaaagtgyccttttaaaataaatttatgtatatagtctctgtgtgtgtgtgtgtgtgtgtgtgtgtgtgtgtatagacatatagaaatatatattcctaattcagaactcattcgtaagtgcacacactgacatgtgtttcatgtttcccaatttatcccagagcctatatgcagtgtttggctgcacaagtaggcattaaatgcaaccactgggaatgagaatggtggccacaacgttggagcctccctgcaatgttaaagccttcccagccaggctgtaaatcttgctacttgactgcaaagccatccaggactgtgtcgcttcattcagaaaggtgtaccttaggcaattcagtacaccccatgaactgagtcactgccagcatgatttcaggttcactgtcgataatttaattagcacttgcctgacatctacaatacatgaat

SEQ ID NO: 116259 - DNA, 632 bp, Homo sapiens
gatgcaaattgaaatagaaatactctagctagtagatatcagggagggcaggtayaactcagcacaaattttctggaagtgtactgtttaaaatgatcctgtttgaacccattggccttttcttttgttttgagttagttcaaagtgacaaagtcctgacagtaaacgattcaaacattcctagtttgtgaatgacaaatttctctttcatttttgttctaaacactcaaaatctgcaagatctgttaatgatggtgtgcctctctgtgtgtttatctaggcatttacatctacatttacatatacagcaacaacaaaaaaagttcttttaagccttttctggcataagccaaagaacgtagaataattatctgtgaccaattctcatctataactaattagaatttttattttctcatagcatttcttcccgattcaggtccaaggtttttttgttattttttttcttttgctagaaaaggaagatacctggataatatgagaactgtaggatggaaagggagctgggtaaaagggggaaaggggcacttttcagattgcattgtcacttcgatctgattgaatcttttccttattcttttttttttttttttaatgcttttccagcacgg

SEQ ID NO: 116260 - DNA, 581 bp, Homo sapiens
cacacatacaattcatttttaaaactattgtgtgtgcattaaatttagattccctatatgtttatacaaacagaaaataaacattgtgtgtataaacatgaatactgggtacagtgtttgttsctaccaaataaggatatatagctgagaatttatatatagcttgaagattttctgcatttctaattaccacagttaggttctcatcttccctataaccattgcagagtagttgtatatttatttcaaatcttctgcagttgggatttaaataggcaaatttaaatactagtatctaatttggttcggaaattaaaatgcccctgcagcaacctcaacgagttttcttttgctcttagcactctgacagccctaaacacagcacagtatcttccttcccacttctgtcagatacaaggactccaggagcgtgttagttctccttcattcactttcaggtttatgcagaactgaagatgccataattcagaagtgtctgtgtttggcgacggattttagtatcgacattaaactgagaacttccttctttccctgaaggttacccaacaagtgctaatcaa

SEQ ID NO: 116261 - DNA, 536 bp, Homo sapiens
agtgacaaggaagctatgggttacaacacagttgtgaattcagcygggcacagtggtgacagggcttgctgctgtcaaagaagatgtgttttagacaatactcatgtgtatgggccaaaatctcaaggattatatttgtgaccaattgtataacacgttattttagtttctgttttgtgtaaagcattccagtgaacgtttttaatgcagatattttttgcacccttgatgttgattgctaaatgtaatagtttgatcatgatgcggaataaatgtgtctttaaaaaaaagaacgtaatttgccacaaagatgtgtaaactcaactttgaatgttgcatgtatgcaccaaaagtacaatttccagtggaatttagcaccatcggaaagcaactgcgcaggagtttccctacttcctcaaccctgcttctacttattttggttcctgaaatgtcatattttcaccaaaatgttgttttgcatttgtatgcctctcacagttgtaaagtagcaagacaccctcctctcaatatacatt

SEQ ID NO: 116262 - DNA, 557 bp, Homo sapiens
tataaatttaaaatagcagaatcttaggcagaaaggttttattggtttttgacatcttcttgtggatgatctctgtgtaaacaagttttgatctcagggtaggtgtggagggagactgtaaaatcagttaataaaggttttcattgttcaacagaaaagttctttcgctgagtggtttccacggaactgagttaatgctgacattagctcagcataattcttttaaaacacatttaaaaagaaartcttatctatcctcctcattccacaattagggggtctctttatgtagattttattaaaatggatgtgttcatgctagcaataatcactattaatattatccagctaattcatcctgctcttgttccaggttcctaaaataaccttcggattacaggttttattttcacatagatgttcacctgggagagtataaactaaaacactttcaatctgtttgaaattttattttttattttaaagaaactatcgtttgttctctgatatgtcctaagagcctacaccagtgcctggcatataatagggctgattag

SEQ ID NO: 116263 - DNA, 557 bp, Homo sapiens
tataaatttaaaatagcagaatcttaggcagaaaggttttattggtttttgacatcttcttgtggatgatctctgtgtaaacaagttttgatctcagggtaggtgtggagggagactgtaaaatcagttaataaaggttttcattgttcaacagaaaagttctttcgctgagtggtttccacggaactgagttaatgctgacattagctcagcataattcttttaaaacacatttaaaaagaaagtcttatctatcctcctcattccacaattagggggtctctttatgtagattttattaaaatggatgtgttcatgctagcaataatcactattaatattatccagctaattcatcctgctcttgttccaggttcctaaaataaccttcggattacaggttttattttcacatagatgttcacctgggagagtatraactaaaacactttcaatctgtttgaaattttattttttattttaaagaaactatcgtttgttctctgatatgtcctaagagcctacaccagtgcctggcatataatagggctgattag

SEQ ID NO: 116264 - DNA, 557 bp, Homo sapiens
tataaatttaaaatagcagaatcttaggcagaaaggttttattggtttttgacatcttcttgtggatgatctctgtgtaaacaagttttgatctcagggtaggtgtggagggagactgtaaaatcagttaataaaggttttcattgttcaacagaaaagttctttcgctgagtggtttccacggaactgagttaatgctgacattagctcagcataattcttttaaaacacatttaaaaagaaagtcttatctatcctcctcattccacaattagggggtctctttatgtagattttattaaaatggatgtgttcatgctagcaataatcactattaatattatccagctaattcatcctgctcttgttccaggttcctaaaataaccttcggattacaggttttattttcacatagatgttcacctgggagagtataaactaaaacaytttcaatctgtttgaaattttattttttattttaaagaaactatcgtttgttctctgatatgtcctaagagcctacaccagtgcctggcatataatagggctgattag

SEQ ID NO: 116265 - DNA, 557 bp, Homo sapiens
tataaatttaaaatagcagaatcttaggcagaaaggttttattggtttttgacatcttcttgtggatgatctctgtgtaaacaagttttgatctcagggtaggtgtggagggagactgtaaaatcagttaataaaggttttcattgttcaacagaaaagttctttcgctgagtggtttccacggaactgagttaatgctgacattagctcagcataattcttttaaaacacatttaaaaagaaagtcttatctatcctcctcattccacaattagggggtctctttatgtagattttattaaaatggatgtgttcatgctagcaataatcactattaatattatccagctaattcatcctgctcttgttccaggttcctaaaataaccttcggattacaggttttattttcacatagatgttcacctgggagagtataaactaaaacactttcawtctgtttgaaattttattttttattttaaagaaactatcgtttgttctctgatatgtcctaagagcctacaccagtgcctggcatataatagggctgattag

SEQ ID NO: 116266 - DNA, 603 bp, Homo sapiens
tggtaccagggcatacagaaagtgttccattgaacttaaagccacagctgccacctggtcactttgggttcctcatgcttgtgggccagaagataaataaaaawgttatactgtttgatataattgactcagattgtcaggaatagttcagatcattgacacttatggggacttgtgatgtttccatgccatggaaaaatggtaaataagcgatttcagcaactgtggttagacaagggcaagacaaccaagagctcaaacccctcagggatgaaaatttaggtgaccctaccaggtaagcatattgaattatttcaatttctgacaaaacacagtgaaaatctagaatggattgaaggagggagatgatgaatattgatgatggcctaaggaccaggtgcagtagtgatgagggtagcttgtttctctaaaactaaatgaccaagaaaattcaatatgagctcctgtaaattggagtaatgcaagactatgagtgatgcaattctgagtgaagcagaccatgacattcatttattttcctccccatcacataccccaaacttacctttcatctcagtcacaactgtagtgaagagctccaga

SEQ ID NO: 116267 - DNA, 588 bp, Homo sapiens
tgtcattgctaaatattgagataaaatcaactttataggaaaaataacataaaaaaaaacctcttagtagctgatatcttggaataatttgtcgttgttaggcaatggaaacacagtttctcattaaaaaaataaattttttaaccagctgatttaacattatttttgtaagaatactttgaaatctgcttcctaaggttaataagccacccattagatccattttcaagtcttcaccactgactttgtaatgtacaacacgcagacttgaattataattggcaacstcctttcctccctgggtaggcatgactgacaaaattggttagaggcaactaagtaacctctattgaccaatgacttagtaattttaatgaaattacaaattttaatgaaaactgtggttactaaagcattatatgccgcctatacatttttcgaattttttcagccaaaattcacatttgtaggttttttaatacacttacaattcctccaccaattaaaatatttttctctgctttatttcatccttgagaaaatttagtcagaaatctataattgaattaaatgttagggtgtttttag

SEQ ID NO: 116268 - DNA, 588 bp, Homo sapiens
tgtcattgctaaatattgagataaaatcaactttataggaaaaataacataaaaaaaaacctcttagtagctgatatcttggaataatttgtcgttgttaggcaatggaaacacagtttctcattaaaaaaataaattttttaaccagctgatttaacattatttttgtaagaatactttgaaatctgcttcctaaggttaataagccacccattagatccattttcaagtcttcaccactgactttgtaatgtacaacacgcagacttgaattataattggcaacctcctttcctccctgggtaggcatgactgacaaaattggttagaggcaactaagtaacctctattgaccaatgacttagtaattttaatgaaattacaaattttaatgaaaactgtggttactaaagcattatatrccgcctatacatttttcgaattttttcagccaaaattcacatttgtaggttttttaatacacttacaattcctccaccaattaaaatatttttctctgctttatttcatccttgagaaaatttagtcagaaatctataattgaattaaatgttagggtgtttttag

SEQ ID NO: 116269 - DNA, 596 bp, Homo sapiens
cattactgcttcctatttctgatacaccaaaatgaaaaataaaagcaaaagaaatatgcaaaaacttgaggtaagggtgaaggaatgtagaagcttcataagatttttttaaaaaaacagaaatctcactgccaaacaaagcaaggaaaactattttaaaacaaaactatatcaggcaaaacatttgtggttcctttgatgattatccaaggagaatatcttattctttcttgtttgtgtggtttaggctcttttaatgaactgatggttttgactgaatggaaaattcaattaagcaagtgattcatctttcctttacaaaaaatcctgactgcccattgtattcatcagggttcatcagagaaatagatagaaagatagattgatagatcaatagatagatagatatctaatagatctatctatctatctatctatctatctatctatctatagatcttgttagtattctctgcctagatagatagawctatctatctatctatctatctatctatctatctatctatctattcatctatctatctatctatctatctacccattgatatggtaagggacagaaagaaagacag

SEQ ID NO: 116270 - DNA, 524 bp, Homo sapiens
ataaataaagggtgtaacttgaatgagagaaagaaaaataatttgtcattaactagacagaattttttaaaaatatttttccctgttagagagtatttccctatcttctagaacagtggaacacacaagtgattttcagtagaagacccaacattgagtctgagaaatcatggtccaagaatttaacctcccttctgtgagctcttggccttggctttgtctcagctatcaatacatgaagacgtggagattttcaattagaaatagtttggtggctgggcgcrgtggctcacgcctgtaatcccagcactttgggaggcggaggtgggtggatcatgaggtcaggagttcaagaccagcctggccaagatggtgaaactccatctctactaaaaatacaaaaattagccaggggtgatggtgggtgcctgtaatcccagctacttgggaggctgaggcagggaattgcttgaacccgcaaagtggaggttgcagtgagccaagattgcaccactgcactccaa

SEQ ID NO: 116271 - DNA, 424 bp, Homo sapiens
cagcatcatgagcacaggaatccactatccaagcaacaggaaatttattttaaaataaataaatgtaactttggggaatagtaatggaattgttcagatttaaaacacagcaaatagagtatcagccagggttatgtgcatgagttagaaaccaacacttttaggagcagacaggaaggatttaattcgagagaatcggttgattgttgaatcatttttgtttcctgaaatggctcccaaaccactccgcactgagcgaccaccaytagtgctaagccagaatcaatacattacttccatggccaccacgatacacgctgctcattttcagaacgccagagaatgaagaaagctctgatgtaaggatgaaggtggcagatcaggaagacagatccactattactaccattgccattgagtgtca

SEQ ID NO: 116272 - DNA, 471 bp, Homo sapiens
aatgtatgaaaacatgctcaacatcactaattatcagagaaatgtaaatcaaaaccacaatgagatatgatatcactctagttagaatagttgttaacaaaaataacaaatgctggcaaggatgcagagaaaagrgaaatcttacacactgttgctgtgaatgtaaattagtagagctataatggaaataatgtaaagattcctcaaaacctaaaactagagctatcatgtgatccagcaattttacttcccggtatatatccaaaggaaaagaaatcagtatattgaagagatatctgcacctctatatttattgtagcattattcccagtggtcaaggtgtggaatcagtataagtgcccatcaatggataaatggataaagaaaatgtggaatattattcaggcatgaaaaataatgaaatcctatcatttatggaaacatggatgaccctggaggacattatgttaa

SEQ ID NO: 116273 - DNA, 561 bp, Homo sapiens
ggaatctgggtctggctgccaaatcagacagcaaaaagttaaaatgaaacaaaacaaaacaaaacaaatgaaactagacccattatgggttgacaaagacttttcccactggcactttaagggaaagtaggcagagaatcttaattaataaatagccattgccccattcaggcgaggtaatggcaatgcctgagtatctgccatggagcaatttgcagctgtcttcttgatctgaacagtgaatgagttgtcgaatatcaaagaagaaggaaaattaggcactctgctgctgacaattgaactctataaataacccacagtgaaaacgaataaaaaaatgcccttcctccagctctcagtagcctctygacagtgtgacagttgctagttttttcaataaacatgatgtcaattatgccttttacccatcatggtgaagtcatgtgtggggaataattgagtatctttttttctggcacttcacataacaatgcttttccattttatttatatcatactgaggtaaagcagctgtctgatctgtaatctatatgttccgtc

SEQ ID NO: 116274 - DNA, 561 bp, Homo sapiens
ggaatctgggtctggctgccaaatcagacagcaaaaagttaaaatgaaacaaaacaaaacaaaacaaatgaaactagacccattatgggttgacaaagacttttcccactggcactttaagggaaagtaggcagagaatcttaattaataaatagccattgccccattcaggcgaggtaatggcaatgcctgagtatctgccatggagcaatttgcagctgtcttcttgatctgaacagtgaatgagttgtcgaatatcaaagaagaaggaaaattaggcactctgctgctgacaattgaactctataaataacccacagtgaaaacgaataaaaaaatgcccttcctccagctctcagtagcctctcgacagtgtgacagttgctagttttttcaataaacatgatgtcaattatgccttttacccatcatggtgaagtcatgtgtggrgaataattgagtatctttttttctggcacttcacataacaatgcttttccattttatttatatcatactgaggtaaagcagctgtctgatctgtaatctatatgttccgtc

SEQ ID NO: 116275 - DNA, 497 bp, Homo sapiens
gcagaactgtgagtcaattaaacattttttctttataaattacccaacctcaggtagttatttatagcaatgtgagaatggactaatatagaaaatttgttttcttyaatcattattatttttaattcatttgcttatatggactgtttgcacctactaaaatgtaacctccataagatcagggatattttctgtctaataattgctgtttcattagtgtctcatgataggagctcacttcagcacatgaatgaataaatgaatgaaaatactatttattggtgattatgatgtggaatatttttttgttttaggtatctgatatcattcttatttgctgcacatccccataattttctacctattatcttgtttcaccaattattggtggcaacttgtaaagatatgccagtcaagtaaagtgtatgagcatgaaactaaaaatcaatataacaaattgtgttgttctaatggaaaacactaaaaacttcatgtat

SEQ ID NO: 116276 - DNA, 497 bp, Homo sapiens
gcagaactgtgagtcaattaaacattttttctttataaattacccaacctcaggtagttatttatagcaatgtgagaatggactaatatagaaaatttgttttctttaatcattattatttttaattcatttgcttatatggactgtttgcacctactaaaaygtaacctccataagatcagggatattttctgtctaataattgctgtttcattagtgtctcatgataggagctcacttcagcacatgaatgaataaatgaatgaaaatactatttattggtgattatgatgtggaatatttttttgttttaggtatctgatatcattcttatttgctgcacatccccataattttctacctattatcttgtttcaccaattattggtggcaacttgtaaagatatgccagtcaagtaaagtgtatgagcatgaaactaaaaatcaatataacaaattgtgttgttctaatggaaaacactaaaaacttcatgtat

SEQ ID NO: 116277 - DNA, 497 bp, Homo sapiens
gcagaactgtgagtcaattaaacattttttctttataaattacccaacctcaggtagttatttatagcaatgtgagaatggactaatatagaaaatttgttttctttaatcattattatttttaattcatttgcttatatggactgtttgcacctactaaaatgtaacctccataagatcagggatattttctgtctaataattgctgtttcattagtgtctcatgataggagctcacttcagcacatgaatgaataaatgaatgaaaatactawttattggtgattatgatgtggaatatttttttgttttaggtatctgatatcattcttatttgctgcacatccccataattttctacctattatcttgtttcaccaattattggtggcaacttgtaaagatatgccagtcaagtaaagtgtatgagcatgaaactaaaaatcaatataacaaattgtgttgttctaatggaaaacactaaaaacttcatgtat

SEQ ID NO: 116278 - DNA, 648 bp, Homo sapiens
aattttgagcatatcatttggtatgttaaattgcaatgatttacttacatagcaactagatggtttataagtgcccatctccttacagtgcagtcacatggaggatcaatagcatattcgtgagcacacaggtttggttttattaaccaaaatgaagataaatttttcttgtatccaactaccaaattcataaattttacaaatgagtgttaatttgaacccgcattcactaattaaactgagaccaatgattacrcagatattttgcatatgcacctcaattttgcctttcttccaaggataatttgaaggaaaaatagaaactttggtaagtatcagagagcaataaataacattataatagacaaagagagttaaaaccatgggaaaagaatgtcatcaatacaaaactgtgatttttattttgtacttagtaatggaaacaatattagagtaacatgtttattgttttattagtcaatgtgcatatgtctttaaaattttacttttaatgatgtatttgtttctgtcttttctacaaatataccaatgtactttataaattaagaaaaaatatgcatttattttagaaatttaggtatatggtatttatagaagtacactgtgatgcgctttggatttagatca

SEQ ID NO: 116279 - DNA, 613 bp, Homo sapiens
agtaatccatgaattaacacgtggaaattttttagcacttggcatttagtacatattcaataaattttcatgttcaccttaagtctgttgtgaatgagactgaggacataatttgtttctatgcaaaattttattccaaacaatcaacacccatacrgataaacagaatgcaatctatctgtaagacaggaagagtgaacaagtgtgatttataattacagttgttacagtgaccatccttttgccattatacaatacatgccagaacctaataaaattgatattgataattactatctccatagaacttgagcactttaaaatacctgcatattaacaatttaaaaaggtatattaaacaaaaattattgcgtttctttacatgtgaaactcagtgaaacccaaagttgcacaatcctcgttgacaaaactctggttttatcctacatatattatgaatctacatcctaaatatttcattatactattgtgtattatctattattagacctctcattactgaagttgtgcaaagttgaatagtgatatgattcaccaaatccaaactgaatctcttctaacacaagataataaaagtaaatttatttacaca

SEQ ID NO: 116280 - DNA, 613 bp, Homo sapiens
agtaatccatgaattaacacgtggaaattttttagcacttggcatttagtacatattcaataaattttcatgttcaccttaagtctgttgtgaatgagactgaggacataatttgtttctatgcaaaattttattccaaacaatcaacacccatacggataaacagaatgcaatctatctgtaagacaggaagagtgaacaagtgtgatttataattacagttgttacagtgaccatccttttgccattatacaatacatgccagaacctaataaaattgatattgataattactatctccatagaacttgagcactttaaaatacctgcatattaacaatttaaaaaggtatattaaacaaaaattattgygtttctttacatgtgaaactcagtgaaacccaaagttgcacaatcctcgttgacaaaactctggttttatcctacatatattatgaatctacatcctaaatatttcattatactattgtgtattatctattattagacctctcattactgaagttgtgcaaagttgaatagtgatatgattcaccaaatccaaactgaatctcttctaacacaagataataaaagtaaatttatttacaca

SEQ ID NO: 116281 - DNA, 467 bp, Homo sapiens
ctagtcttcctatttttcccagaaacctaacatttgtactttaatgtaaaatctcctaatttgaatattggtgattaatttcaattattaaaagtactgtgtagagagaaaaaaagaatccacacttcagtttaagcacataagctgccaayttttgacctttgtgttaaataagtgttttgtaatttcttaggatcaatttgactggagaacaggacatctcctttaatcaggaaagtgagtagtcaatgatcaagaagccatgaaaaaatgccctgtcatcaattgcttgattcttacatcagtgcttttagaagcaaaaactcataaatatagtatctgaatttgattaaaataaaatatcccccaaaatatatatactaaaataacactcttaataactattcagtataatagatcattttcatattcctagtgttttgctatttaagtgtattatggaaaag

SEQ ID NO: 116282 - DNA, 467 bp, Homo sapiens
ctagtcttcctatttttcccagaaacctaacatttgtactttaatgtaaaatctcctaatttgaatattggtgattaatttcaattattaaaagtactgtgtagagagaaaaaaagaatccacacttcagtttaagcacataagctgccaacttttgacctttgtgttaaataagtgttttgtaatttcttaggatcaatttgactggagaacaggacatctcctttaatcaggaaagtgagtagtcaatgatcaagaagccatgaaaaaatgccctgtcatcaattgcttgattcttacatcagtgcttttagaagcaaaaactcataaatatagtatctgaatttgattaaaataaaatatcccccaaaatatatatactaaaataacactcttaataactattcagtataatagatcattttmatattcctagtgttttgctatttaagtgtattatggaaaag

SEQ ID NO: 116283 - DNA, 570 bp, Homo sapiens
ccattgccttttgttgtataacaaatctccacacactgaatgacttaaaagaacaaaaatgtaccatttctcacgattctgtgtgttgcctgggtggtttcttctggtctgggctggctccattggacctggaatcagggtggcctctgtcacatgtctgatgattgrcaggttgatgatgccaggaggacctcagctggggtagctactctctgctccacatgacttttcagcatggtcacgacaggtttctaaagagcagtaagccccaatacaagcaccttcaaatctcttcttgtctcttgcttgctaaccttttattggatgaaaaaatcatataaccaaacccagatagaagggctggcaaaatagactctacttcttaatgtaaggacaggcaaagtcagtgcacagaggcaggtgtagaagaggaagcatttgtaattgttcttacaatcagaaaatagaaatttagtattacctgacataaagaggcagtacatttagaaaataaaatcaaaatgaattggcattattaaaccactattgctagaaaagtaaggttttaag

SEQ ID NO: 116284 - DNA, 594 bp, Homo sapiens
cttgggttacattcatttgttcaagcaagtaactagagccagcccagcttcagcaggagaggaatcatagttctcaaggagaggcatagctatttgttttttccaacagtgtttcagccagaaagagatggatgatctgattggaccagcctggtcatgtggccacctctgtttccaggragtatggttagctccacctaaagcatctgactaacaccgtagggagagtagctccccaaaggaaaattaaagtattgttcccagaagagaagggagcagatgctaggtatgtagaaataagagctatgtgacaaattgatgttgacatcaccaagcctcatataataattctaacaagcattatgaaatcaaaaaagatatcaaaatgtggggtccataaaagcctgaaccttaaaccttgccattcactagcttgggctaattaaaatctgaaccttaccttccttatgtgtaaaatgtggataataatgatcttcttcccaggattgctgcaagcattagatggagtgctatacacttatggtttactcaacaattatcccctttttttccttatgaaacctcttaaactgt

SEQ ID NO: 116285 - DNA, 594 bp, Homo sapiens
cttgggttacattcatttgttcaagcaagtaactagagccagcccagcttcagcaggagaggaatcatagttctcaaggagaggcatagctatttgttttttccaacagtgtttcagccagaaagagatggatgatctgattggaccagcctggtcatgtggccacctctgtttccaggaagtatggttagctccacctaaagcatctgactaacaccgtagggagagtagctccccaaaggaaaattaaagtattgttcccagaagagaagggagcagatgctaggtatgtagaaataagagctatgtgacaaattgatgttgacatcaccaagcctcatataataattctaacaagcattatgaaatcaaaaaagatatcaaaatgtggggtccataaaagcctgaaccttaaaccttgccattcactagcttgggctaattaaaatctgaaccttaccttccttatgtgtaaaatgtggataataatgatcttcttcccaggattgctgcaagcattagatggagtgctatacacttatggtttactcaacaattatccccttkttttccttatgaaacctcttaaactgt

SEQ ID NO: 116286 - DNA, 593 bp, Homo sapiens
aataatgtttcctttttacataaagtcattgaattaaaagaatcagttcctaaaagtgacaccctttgttttagaastcagatggagctcttttagtcatggccttatgtagtgcctttcaccctggctgcttgtttataaaccaagactacccagtttgtttggtgacctgggtgcagggaaagccgtgcaaatgtgtagtcaagtggtctgtaataagatgagcgatacaaatgctgaacaagcctcctctgggcagcatctgatagatttctgtactgaagaaaatatttgatgaggacagaccccttaatcctgtcaaacgaactaattcattttcagttccatctatgaaattatactccacaaaagcagaactatggcccaggaggagacagtcatctgacagagaaacagcattgctgagatgagatagaacttgctctggatcaaaagtgatcatttctattattctcatggtatctttgatttgtcacagcaattgcatttgtataaggcctagttaattaagactgtggactgtgatcaaatttaagcagcacagttcctaaaatatacccagccttatctgc

SEQ ID NO: 116287 - DNA, 593 bp, Homo sapiens
aataatgtttcctttttacataaagtcattgaattaaaagaatcagttcctaaaagtgacaccctttgttttagaagtcagatggagctcttttagtcatggccttatgtagtgcctttcaccctggctgcttgtttataaaccaagactacccagtttgtttggtgacctgggtgcagggaaagccgtgcaaatgtgtagtcaagtggtctgtaataagatgagcgatacaaatgctgaacaagcctcctctgggcagcatctgatagatttctgtactgaagaaaatatttgatgaggacagaccccttaatcctgtcaaaygaactaattcattttcagttccatctatgaaattatactccacaaaagcagaactatggcccaggaggagacagtcatctgacagagaaacagcattgctgagatgagatagaacttgctctggatcaaaagtgatcatttctattattctcatggtatctttgatttgtcacagcaattgcatttgtataaggcctagttaattaagactgtggactgtgatcaaatttaagcagcacagttcctaaaatatacccagccttatctgc

SEQ ID NO: 116288 - DNA, 607 bp, Homo sapiens
ggaacacccactttgctctcttttggctgctttaagtctattccaaataccaccagagaacatattaattcctttttagtctgaactggggwtgggaaacttccttattcagaagaaatcaggtgtggtaactactattgattgccttgtatttattttccacttcatccctttccttccaaggaatgttgatattattccaacccaaggaatcctgagtttatttctgtttctgctctcttccattcagtcacatgcttcaagggtggttgttctaagtcaatcatggtggtcttattttccatattagtgattggtttaggtatgagcatggaacataattctggccaatgagacctgaaaggaagtccaccaggaagcttctagagatacagaggaagaggtatacaggaagagatctcttcttcctttgcatgttgacatgtctggtgtgatacctggaactgtggaactatcttgtgaccatgaaaaaagctggtctgagaacaaaactgacgtactgaagatggaagagtatcagaatggaagaacttaggtccctaaacaattgaatgccctacctcaagacttcctcttgcataagata

SEQ ID NO: 116289 - DNA, 607 bp, Homo sapiens
ggaacacccactttgctctcttttggctgctttaagtctattccaaataccaccagagaacatattaattcctttttagtctgaactggggatgggaaacttccttattcagaagaaatcaggtgtggtaactactattgattgccttgtatttattttccacttcatccctttccttccaaggaatgttgatattattccaacccaaggaatcctgagtttatttctgtttctgctctcttccattcagtcacatgcttcaagggtggttgttctaagtcaatcatggtggtcttattttccatattagtgattggtttaggtatgagcatggaacataattctggccaatgagacctgaaaggaagtccaccaggargcttctagagatacagaggaagaggtatacaggaagagatctcttcttcctttgcatgttgacatgtctggtgtgatacctggaactgtggaactatcttgtgaccatgaaaaaagctggtctgagaacaaaactgacgtactgaagatggaagagtatcagaatggaagaacttaggtccctaaacaattgaatgccctacctcaagacttcctcttgcataagata

SEQ ID NO: 116290 - DNA, 534 bp, Homo sapiens
aaatattgtaaattcaaattttctttttttctatattgtatatacagccaaaggacaaagtattcattatgaaatgctcattaatatgggtaaaaagcatctcaactacattcacccaaattgtgccaaataaaccatatatttagaaaaaaatgaattcattctatctggcataaggsaaggtaggataattaattttaactagcttaaagtagaattatttttgtcatacatacccagccagttaatcatgtgtccatatgctaccactcctcacacctgcctcaccttggcggggaagacttctcacattttgctgctccttgcacatgctgtcaaggccaatgccactaaacagccaccaacctgtctccagcacagagcttcaagcgtgagtgcagcagatgggaaaatatactgtatttgtgatatctacttaaatgtaactagaagatatataaaatagccttaaaaatacatcacttaagattaccaataacaaaatatatttatctcaatcgctgccctcattca

SEQ ID NO: 116291 - DNA, 534 bp, Homo sapiens
aaatattgtaaattcaaattttctttttttctatattgtatatacagccaaaggacaaagtattcattatgaaatgctcattaatatgggtaaaaagcatctcaactacattcacccaaattgtgccaaataaaccatatatttagaaaaaaatgaattcattctatctggcataaggcaaggtaggataattaattttaactagcttaaagtagaattatttttgtcatacatacccagccagttaatcatgtgtccatatgctaccactcctcacacctgcctcaccttggcggggaagacttctcacattttgctgctccttgcacatgctgtcaaggccaatgccactaaacagccaccaacctgtctccagcacagagcttcaagcgtgagtgcagcagatgggaaaatatactktatttgtgatatctacttaaatgtaactagaagatatataaaatagccttaaaaatacatcacttaagattaccaataacaaaatatatttatctcaatcgctgccctcattca

SEQ ID NO: 116292 - DNA, 534 bp, Homo sapiens
aaatattgtaaattcaaattttctttttttctatattgtatatacagccaaaggacaaagtattcattatgaaatgctcattaatatgggtaaaaagcatctcaactacattcacccaaattgtgccaaataaaccatatatttagaaaaaaatgaattcattctatctggcataaggcaaggtaggataattaattttaactagcttaaagtagaattatttttgtcatacatacccagccagttaatcatgtgtccatatgctaccactcctcacacctgcctcaccttggcggggaagacttctcacattttgctgctccttgcacatgctgtcaaggccaatgccactaaacagccaccaacctgtctccagcacagagcttcaagcgtgagtgcagcagatgggaaaatatactgtatttgtgatatctacttaaatgtaactagaagatatataaaatagccttraaaatacatcacttaagattaccaataacaaaatatatttatctcaatcgctgccctcattca

SEQ ID NO: 116293 - DNA, 605 bp, Homo sapiens
tcatcaattctgtttttttatattgtactatgtaaatatttcagccaaaatatttttacagatactatcttattgctgtcattcagggaaactctttgtgatacaaaatttatgagataaaactcagaaaattatccatctcttcatwattcttttgaatattttaccaaattaagatgctacaaaatcataggctttctcaatttcagtttattctagtaaaaatatggatttatataatttttaaagagtagctccatcagaatattctttggcaatttgagatattccaaaagtccatcccctaaccctgggccatggactggtgatagtccatggcctattaggaaccgggctgcacagcaggaagtgggagggtgggtgaagccagccagcattaccacctgagctccacctcctgtcagatcagcagtgctattagattctagtaggagcacaaacactattgtgaattgagcatgtgagggatctaggttgcatgctcgttatgagaatctaatgcctgatgatctgaggtggaatagtttcataccgaaaccttcccccacctcccaatccatggaaaaattgtcttccatgaaacc

SEQ ID NO: 116294 - DNA, 605 bp, Homo sapiens
tcatcaattctgtttttttatattgtactatgtaaatatttcagccaaaatatttttacagatactatcttattgctgtcattcagggaaactctttgtgatacaaaatttatgagataaaactcagaaaattatccatctcttcattattcttttgaatattttaccaaattaagatgctacaaaatcataggctttctcaatttcagtttattctagtaaaaatatggatttatataatttttaaagagtagctccatcagaatattctttggcaatttgagatattccaaaagtccatcccctaaccctgggccatggactggtgatagtccatggcctattaggaacygggctgcacagcaggaagtgggagggtgggtgaagccagccagcattaccacctgagctccacctcctgtcagatcagcagtgctattagattctagtaggagcacaaacactattgtgaattgagcatgtgagggatctaggttgcatgctcgttatgagaatctaatgcctgatgatctgaggtggaatagtttcataccgaaaccttcccccacctcccaatccatggaaaaattgtcttccatgaaacc

SEQ ID NO: 116295 - DNA, 605 bp, Homo sapiens
tcatcaattctgtttttttatattgtactatgtaaatatttcagccaaaatatttttacagatactatcttattgctgtcattcagggaaactctttgtgatacaaaatttatgagataaaactcagaaaattatccatctcttcattattcttttgaatattttaccaaattaagatgctacaaaatcataggctttctcaatttcagtttattctagtaaaaatatggatttatataatttttaaagagtagctccatcagaatattctttggcaatttgagatattccaaaagtccatcccctaaccctgggccatggactggtgatagtccatggcctattaggaaccgggctgcacagcaggaagtgggagggygggtgaagccagccagcattaccacctgagctccacctcctgtcagatcagcagtgctattagattctagtaggagcacaaacactattgtgaattgagcatgtgagggatctaggttgcatgctcgttatgagaatctaatgcctgatgatctgaggtggaatagtttcataccgaaaccttcccccacctcccaatccatggaaaaattgtcttccatgaaacc

SEQ ID NO: 116296 - DNA, 602 bp, Homo sapiens
aggcagaaccatccagttctccacctccaccccctcgccacagacctttcctttgaaaatggaattggaattgctgtgtgtactagtctgttttcacactgctgatacagacatacctgagactgggcaatttacaaaaggaagaggtttattggactcacagttccacatggcyggggagacctcacatcatggtggaaggcaaggcggagcaagtcacatcttacgtggatggcagcaggcaaagagagagcttgtgcagataaactccccctcataaaaccatcagatcttgtaagacttacttgccatcacgcgaacagcatgggaaaggcctgcccccatgattcagttacctcccaccaggtagctcccacaacatgtgagaattcaagatgagatttaggtggggacacagccaaaccatatcactgtgcatacctcgtttgggtggtcatctactttctgccgtaggtgtctttcagatatgtccgttctgcagttagctagtctccttctcacttggatcttggctgtttgaatccctgcctgagtaaggaactgtgtatttagcacaactgcatctcatcctcggcctgcag

SEQ ID NO: 116297 - DNA, 591 bp, Homo sapiens
tgagttatttttattcggtttatactgtcccaagtgctgatgtgaccttgctattttaccattctgaaacaagatttccaagtaaggaaactattggtatggtaacttctttcacaaccatgtaccttgttcacctaccaaatttttgaaggtggaatggcacttgcaaggctttcctgtctagacctgagttgatgttagacctagttctgaatactataaattagattcatttgctgtgaaggcatttctacatgtcagcattttctattactttgtcattgacttctaatgcattcccagaatgatttgggtttttctttttyccttgagcaaagaagaaaaatgaacatagaaaaaataaaaacccttgatagtcattattatgcagatttcactttgcaaaacacaatttgtagccaaaaatctccttttctatattatgtgatacttcagatgtccaatgctaaacagaaagtgctataaaaatgtctgtcctcacttggaaagattcaaatacctgaaaatactgtgagaaatggctacacatgtaaccttggttccactttcatagaatattgattcatcaat

SEQ ID NO: 116298 - DNA, 591 bp, Homo sapiens
tgagttatttttattcggtttatactgtcccaagtgctgatgtgaccttgctattttaccattctgaaacaagatttccaagtaaggaaactattggtatggtaacttctttcacaaccatgtaccttgttcacctaccaaatttttgaaggtggaatggcacttgcaaggctttcctgtctagacctgagttgatgttagacctagttctgaatactataaattagattcatttgctgtgaaggcatttctacatgtcagcattttctattactttgtcattgacttctaatgcattcccagaatgatttgggtttttcttttttccttgagcaaagaagaaaaatgaacatagaaaaaataaaaacccttgataktcattattatgcagatttcactttgcaaaacacaatttgtagccaaaaatctccttttctatattatgtgatacttcagatgtccaatgctaaacagaaagtgctataaaaatgtctgtcctcacttggaaagattcaaatacctgaaaatactgtgagaaatggctacacatgtaaccttggttccactttcatagaatattgattcatcaat

SEQ ID NO: 116299 - DNA, 591 bp, Homo sapiens
tgagttatttttattcggtttatactgtcccaagtgctgatgtgaccttgctattttaccattctgaaacaagatttccaagtaaggaaactattggtatggtaacttctttcacaaccatgtaccttgttcacctaccaaatttttgaaggtggaatggcacttgcaaggctttcctgtctagacctgagttgatgttagacctagttctgaatactataaattagattcatttgctgtgaaggcatttctacatgtcagcattttctattactttgtcattgacttctaatgcattcccagaatgatttgggtttttcttttttccttgagcaaagaagaaaaatgaacatagaaaaaataaaaacccttgatagtcattattatgcagatttcactttgcaaaacacaatttrtagccaaaaatctccttttctatattatgtgatacttcagatgtccaatgctaaacagaaagtgctataaaaatgtctgtcctcacttggaaagattcaaatacctgaaaatactgtgagaaatggctacacatgtaaccttggttccactttcatagaatattgattcatcaat

SEQ ID NO: 116300 - DNA, 591 bp, Homo sapiens
tgagttatttttattcggtttatactgtcccaagtgctgatgtgaccttgctattttaccattctgaaacaagatttccaagtaaggaaactattggtatggtaacttctttcacaaccatgtaccttgttcacctaccaaatttttgaaggtggaatggcacttgcaaggctttcctgtctagacctgagttgatgttagacctagttctgaatactataaattagattcatttgctgtgaaggcatttctacatgtcagcattttctattactttgtcattgacttctaatgcattcccagaatgatttgggtttttcttttttccttgagcaaagaagaaaaatgaacatagaaaaaataaaaacccttgatagtcattattatgcagatttcactttgcaaaacacaatttgtagccaaaaatctccttttctatattatgtgmtacttcagatgtccaatgctaaacagaaagtgctataaaaatgtctgtcctcacttggaaagattcaaatacctgaaaatactgtgagaaatggctacacatgtaaccttggttccactttcatagaatattgattcatcaat

SEQ ID NO: 116301 - DNA, 564 bp, Homo sapiens
tagtacagatgccaacaaaacagagcactgtgtttggctggaaggccctttaaggaggtccaccttcttaaactaaagcaaagaaaarcaaccagagcctgaagagacaggtagaaggagatctgagagaaaaaggaacacactatgagaccagctgttctgcagcagcagcaagtggccaccccacgaccatgcgcactgagaaacaggcaccaggatgtcgagaacggcaatgtatttgctcacaaaaagctctacttcacacaccacctgtgcatgagcgtgccacatcaaaatgaggaagacaccagtctagaccctcttttgcataagtgcttcccagaagttccacagggtccctatctctggcccatgctcactgaaagcataaataaaaggttttatagcaacggtagctgacaaagaattctgtcatttttttgttccaggatggccaaggaagcatcacacggctggtgagaatcatggtatttttggctgccttttttataaaaatttgtagaatgttcaataatatcattacaaaagaagttttagagacat

SEQ ID NO: 116302 - DNA, 580 bp, Homo sapiens
tagttatcttggatttttaggcttactacctgaattttacccatttaatgctgcctcaaaattatattacaacatgaaattttatatttatctcactagcctaaagtagtttccctgctgaatagcccacaagtacctaaaatgcaggacttaaaattttatacactgtgtttaaaactgaattgatggctattctagactgtaactgttgaattttaacttaattatacattagatagttttgatttgaaatataaaattgcatggcttatatctgaattatcaagttcctctagagccaagtttgcagagcacccactggactgcctggcataagattaatctcatattatttcacaaagctataggaaaatgtagtatgggagaaaaacatatttggaaacctaaactcatataataaaaaacatttattttcaacttttagaaaaaaattttaaattttttattgttttatttcaattcaagatggtattaatccaattgcttaaaatttttatggttacttattaatattgaaagtatmatacttgattcttaatcttggaatataatagctgta

SEQ ID NO: 116303 - DNA, 627 bp, Homo sapiens
ggcacttttagccagaagaagaaaacactgagggttttataaatagtatttgtgaaaactatgtaagactttatacagaagaaaggttatcagcatgggaccaggtgctggagggttgttgggaggtgagtctcagacctatatgcatttaaaaagcttcacagatgttccacatgcacagctaaggttgggaacaattgctcttgtcacttrttctgtcatcctgaatgactaaataatgtaggtgtttgtagactccttatattccagggtctcttgtcatgaaatgcttagttcagctcataggcagggcaatgaagctgtcctaaaagaaagctcatactggttctggaagtggtattagatcttttacacaggacattttgtttcgttcttgaaacaaacttttgagaaacatattatcattctgattttatacatgaagaaatctcgcagtttcagtgacttgctgcacataataaagcataggaaccagagtccgggtagggactgtcagacttcaaacctgctccagaaaatggatctgaacacctaaggcagattggaatttaaaaacctactacattgactgtcactgatatcagaatcaggagtgagaattgaaat

SEQ ID NO: 116304 - DNA, 393 bp, Homo sapiens
gaggtgtttaattcttagttttcatgaggggaaaaaatggaatgtgctggtcttcataagagaagtcatgggaaagcagatttgggcttaatgtaaacgttttcaaatagcttgaacgttcccatggcaggatgtgcttcctcttgagagagtaaatctcatcactggagtgagtcgtcatgatttctgtctgttgagcacttagttcttgccaatgctttgtgtatattagttttaattctaatcacaccctcctagttattttttttaataaataaagaaactgaaattcacatgaagtatctacattgccacctgactgagattcaaacctcaatctctctggctccaaaggctatgttttttctctargatgacaggtattcaagcaga

SEQ ID NO: 116305 - DNA, 580 bp, Homo sapiens
atctatgataaaatatgaatttatggtgcatattcaatataagttcttgatggcaaaaatctgcctcttgataaccatactggatgaatgtttacttcttccaaattctactggacttagagactttggccaaacaaaacaaaacaaaacaaaacaaacttagatcggctcatactactccaaaatttctatctattaataatrtacagaaggtatctgaatgatgaaggattttttgtgttgaacttttagaaaatttcaaccagagtttttcttaatatgatttagcataaggtagaataagagcaaggaatgaattacttatctttgtcactttaatcttttgtttatgttagaaaaggctgaaaaactttatagtttcttgattattctaaataccaccttcagatcaatatttctaaaatattatgctcacactagccatttagtcaaaagttcctcaagagtagtaaatgcctacaagttcgatttcaaacaattttccagggctgttagaccttaatgtgacaacactgatatcctaagtccatatattcaattgtatctccttctatcctag

SEQ ID NO: 116306 - DNA, 580 bp, Homo sapiens
atctatgataaaatatgaatttatggtgcatattcaatataagttcttgatggcaaaaatctgcctcttgataaccatactggatgaatgtttacttcttccaaattctactggacttagagactttggccaaacaaaacaaaacaaaacaaaacaaacttagatcggctcatactactccaaaatttctatctattaataatatacagaaggtatctgaatgatgaaggattttttgtgttgaacttttagaaaatttcaaccagagtttttcttaatatgatttagcataaggtagaatmagagcaaggaatgaattacttatctttgtcactttaatcttttgtttatgttagaaaaggctgaaaaactttatagtttcttgattattctaaataccaccttcagatcaatatttctaaaatattatgctcacactagccatttagtcaaaagttcctcaagagtagtaaatgcctacaagttcgatttcaaacaattttccagggctgttagaccttaatgtgacaacactgatatcctaagtccatatattcaattgtatctccttctatcctag

SEQ ID NO: 116307 - DNA, 592 bp, Homo sapiens
agaattcaacaaaactagttttttcgtcattatttgaactaagaagtagattaatcattaatrtctatgttaattctatccctttttctagctttcccgactttcctttctagctcaggtccttatttcctctctttcagccagattcccattccatcaggtaatttcctttcaagcatgtaatgactgctccttcttctgaacaatttgtggccctttttttagactcggtttatgctatcttatgttgtagttctttgtttccctgggttttcttgcttataaattccctgaggaaaactttgtgtttcatatttatatttctagaggctagatctgtgtctaactcatactaataacataaagatatattataaggaaatctacagatgtagtgactgtgtagagccacttttaaaaatctctgagttcctgtttgtgtgaccttggcattaatatattattgagtgctataaaggtataaatgagctcaacactgtagatattgaaaagatagagtcgacagttattcattttcaaataacaactataagcatgggaaatatcataaaaagataatatgaaagttttg

SEQ ID NO: 116308 - DNA, 583 bp, Homo sapiens
tcgtcattatttgaactaagaagtagattaatcattaatgtctatgttaattctatccctttttctagctttcccgactttcctttctagctcaggtccttatttcctctctttcagccagattcccattccatcaggtaatttcctttcaagcatgtaatgactgctccttcttctgaacaattygtggccctttttttagactcggtttatgctatcttatgttgtagttctttgtttccctgggttttcttgcttataaattccctgaggaaaactttgtgtttcatatttatatttctagaggctagatctgtgtctaactcatactaataacataaagatatattataaggaaatctacagatgtagtgactgtgtagagccacttttaaaaatctctgagttcctgtttgtgtgaccttggcattaatatattattgagtgctataaaggtataaatgagctcaacactgtagatattgaaaagatagagtcgacagttattcattttcaaataacaactataagcatgggaaatatcataaaaagataatatgaaagttttgaatgagtttagaca

SEQ ID NO: 116309 - DNA, 583 bp, Homo sapiens
tcgtcattatttgaactaagaagtagattaatcattaatgtctatgttaattctatccctttttctagctttcccgactttcctttctagctcaggtccttatttcctctctttcagccagattcccattccatcaggtaatttcctttcaagcatgtaatgactgctccttcttctgaacaatttgtggccctttttttagactcggtttatgctatcttatgttgtagttctttgtttccctgggttttcttgcttataaattccctgaggaaaactttgygtttcatatttatatttctagaggctagatctgtgtctaactcatactaataacataaagatatattataaggaaatctacagatgtagtgactgtgtagagccacttttaaaaatctctgagttcctgtttgtgtgaccttggcattaatatattattgagtgctataaaggtataaatgagctcaacactgtagatattgaaaagatagagtcgacagttattcattttcaaataacaactataagcatgggaaatatcataaaaagataatatgaaagttttgaatgagtttagaca

SEQ ID NO: 116310 - DNA, 558 bp, Homo sapiens
tggattcagattttcatctgatatcgttttttcttctgcccaaagaaagttaacaacaatttttataggacagatctgctttgacttttgagatacatttttttgagtataaatttctaggatgaaagtcattttttctcaccttttcccatttgttttttaaatgagtactttctgtggagaagtcggctgtcatactgatctctccaacttctgtgtctttgatctctstctgctgttaagatttttttttctttttcaatgcttttcaaaaatttgactatgatgtgcattgatgcgcttttcattatatttattctcattgggtttactgaatttcttttatttgttagttcacagttttcatcaaatcagtgtattcttaggctaatattttttcaagtattttttctcccatttaatccttattctcattgttaccatgttttcaagcacactgatcttttatttctggttttttatttctggtatttttatttctggttttctagttatttatagcagtagaaccattcccatagaatgagttatgggtag

SEQ ID NO: 116311 - DNA, 605 bp, Homo sapiens
tgtcttttttctatctccttctactgaagaggtccagatgtaatgacatatcatagatacaagaataccagtacccagaattgtgctccaaatgctgctaaccactaaaatgaaccagaacttcttggagcaatgactgatttcataaatgagacaggaaaagttaaaaataagcctagaaatgttgctacactgaaaagaggaaaaaaagctaaaatattgatgaaggtgtatcaaaattttacagatgtctatacagcttaggtagacagtatttgaacaatttgagtatcaaaaaaatgagagttaaagtttttataaattgtgtagaaagaaaaagaatccttgaaactataattattcataaaattgtaaagagatgaaaatgctttttttaaacagttwtttttgattattatggaaaaaaactagataaaatattgaaggaaccatagaattagaatattatcaaattgcaattacttttataataattataatcctccaggtaagaaacattaatggatcatttggtgaaaattaagatgtgtgtttgtgtgaatttacggaaaagtaattaattacaaaggaaaaatcagtgctag

SEQ ID NO: 116312 - DNA, 512 bp, Homo sapiens
ttagaggataataacaagaagcctaaagtacatgatttccgaaaaggaggggagaaaatggggaaaatattaacactggctaaaattttcaaaaatttttaaaaacgtttactcacacatttaagaagaaagaaaactcaattaaataaataaaataaaaaccatgtgagggtcactacrtagtcaaactactagtaataagacataaagaaagttgcatggggttcactatttaccatttttgggggagtatcacaggaagagcacagttacaccacttttgactgtatgtgtagcaggtcacaacctactcttgtgtgtttagatgtgtatggaatacctgtgtatgctagtgaaagctgtttactgtaaaaaaagggaaaacaagattacttacatctgggccctctactgatcactaaagaagttcctgtcacctgctctctccgctgcttgcatctgtctacttggctaacttttaacatgtgtttttttaggttacgtaaattctt

SEQ ID NO: 116313 - DNA, 491 bp, Homo sapiens
gttttaggaatagctttattaatttatttagcttattgtttcccttttatgttattagagagtgatacatgataaatcagtctttaagcacactttaaacaaatataaaataaaaattctaagtaataaaaaggcattgtttttagttagcagcgtactttcttagtgggatataaaattgtggtgccacttggaatttatgctgtcataatttgttaacttggaagttccttttaaaaaatgttttactatatatagttttttttcamgaatgaatagtttgccttttagtttattaatcccagttatcacaactaattaaacttaatttgttcatgacataacttcctcattcataactttttaatgctaattcatctatcagctggaagcagtcttaaaatagatttttcttttctgaaaagagttttgactgataaatttcctgaggtttggtatatatatatatatatatatatatatatatctat

SEQ ID NO: 116314 - DNA, 623 bp, Homo sapiens
gcaaagtttagaggacaaggacaagtcaaaatctctagagggaacaaggaaaagcttcccagcttgatagagaacagacaggaggcatataagatctaatttttacagagaatggaccacctggtgtggtctcatacccataatagtttggcatcttaaacatggaaaagaaggcatgattttgccccaaatatcctttatctgacacctaacgcattgctccccagcctagctgctaccttttgattgtgtaccagtgacaagcactttacaaattagggttacacacaagcaaagtaaaaatgcattcaggtcacagacagagaataactgaaaaacttacagacaaatctgagtttatcacaaacaaatggcttaattgtctaacctgttttaggctgataaaaagtgactggacttctcacactgggtttcacagacagaaccaacagacaagccaatgctaaaaaacttgaagcaaggagagtgagttggtttggatctggattttcttgaaataatgaaaacagaaagagtgaagmcagcatggtgaggaggtggtaggtactcacgaatggttaaatccatcacttgggaggccaagcagaagacaggatgctcat

SEQ ID NO: 116315 - DNA, 607 bp, Homo sapiens
ggcagaatccaggtgtaaaaagaaatgtatgaattccacagaagaggaaacagtgtctggtccactgctccgcatayaaccagctttcaggctccagtcactaccaacaaggggtaaaactccagctgaagagggaatatactttcatctccaaatgcaaatgtccacatatgctggtgcaggcaccgtaaacatgatatattctctctctccaaatggatgcatgcctgcagaccgcatgatggatccatgaaaatgtccttaaacaagcatgataactgaatcctacttgctacgaaattgttccagcccagaaacatgagagcttaaagggccagagagggacagaatatcttagtagatgttctttgcagtgctccctaaataggacatttagaccaaacatcctcttttaaccactgacttaaaaagaaaaagagttctcccagaaactaactctttattacttctagttttagaatgatacctttgaatttaatccttgcatggaaagttttcctttgtctctttcaagtgattaataaccacaaattcaagatagcaccaaagcattatcttctcaaaaggagatatccctgcttgctca

SEQ ID NO: 116316 - DNA, 603 bp, Homo sapiens
gcttagcagcatctctggactttaaaacgttctagaaggctctcaaatggcataaaaggactagagaagaaagaaatctataactataaactgagtagatgccaggagcacccccaccctcgtggtgacaaccagaaaaaaaaaattgtcaacagatactctcaaatgtccccagggagtggaagggcaaaatcacccccaattgagaatcatctcttttagccaagaattctttttatttatgatatcaaagcattttaatttatttttattgacygaaacagtggtttaagagaatgattgttcagccgtgggaagttacaatttatgttcattgttcttgttggcaacattttcatgaaagacagtgctgaaaagtctggttacctaagggttagctcagaaaaatcatccttccaggatctaacactcctcacactattgacaaatagggaccaaggtacagctagcatgcagaaggactaggaatttattgtaaatcaatttagggcttgattcttgggtcatattatcttcttatatgccaaaaataaatagaaatccattccggtgtagtatatttcctgatggtgtccagggata

SEQ ID NO: 116317 - DNA, 573 bp, Homo sapiens
tcttttcccaaaatgccagggtaaaataaaattacaaaatctaagatgtctgtttttgtctgcaggatattttttacagggctaaagggacatttgattaaaacaaattatttctgagaaagaacatgtctaagttaatgcaaacttttaacatttggggcataatagcaatatatagataatatgataagtatctgtagcattagacgaaaactttcctcagccttggtgagtctctttgacacctcatatgtaaaatggaagtaatcatatcccgatcacaggactgttgcacatataccatatgctatatgtacagtgctgagcattatattgaggatatagtaaacatttaatacatgttactgttgttaatatacaaaaatgtgggrttgcaaactagatgtgctgtaacgtgattacagataaaacattgacccagccggggtccctggacatgaccagcaaattacaatttaactccacatggtaagatctgaatgtaagtccctgatcaccactgctgtaggaagagctaaattatgtatcagtcactcattgtgtcatgtatct

SEQ ID NO: 116318 - DNA, 467 bp, Homo sapiens
gttgagatcatagctcactgcagccttgacctcctgggctgaagtgattcttccaccacagcctcctgactagctgggactacaggcatcatcatgcccagctgatttttgtatttttcgtagagayggggtcatgctacgttgcccaggctggtcttgaacccctagcctcaaactcccacaggggcctcctagagggctgggattacagatgtgagccactgcacctggccctctgtcatctttgtctggttaacagtaaatcattaacccaaagcctagtatcaatattgctaccttaggggccttcttggtctcagccaaggtcacctcttctaggccaccctaacatcctgaacctcctcttttatcactcccatcacatttgtgtgatttgcttcttggcatgttctgtgcaagactgtaagtgcctttggcaaagaccttgtctgtcttgttcattataa

SEQ ID NO: 116319 - DNA, 547 bp, Homo sapiens
atgaccaaaaaaaggtctgtacatgttcagtatggatgtaatttttttctgaatattttcaatccaccgctggttgaatccatggatgcagaacccwtggatactgaagagctgactgcataattgttagtggagtaagccacagaatggtggttagttcataattacttcacagctgctgtaatttgtaaaattcaaaccgtcagtactaaatagatcaagccttacacatgggtaactcagtcaaacccacagtgttgattcatacttaccgtgaccaagtcatcttagtttgcccaggacgtctctccttttagcactgaaaatcctgtgtcccaggaaacgcttcaatcctgagcaaagtaggacggattggtcaccaggtactaccacgcaagaaagatgaaaaacagtcataacatagttgtaaagaacaaattttcattcttcacttacatttggttgccaatctatacactgatttattttaatcaagtcacatcacaaaaattaagtcaatcacagattctctagctaacaaaaaatg

SEQ ID NO: 116320 - DNA, 536 bp, Homo sapiens
gctagaggcaagagaatagctaatgcaactctaaagtcatctgtgaacccaaactgcaaattaaaaggtgactttgtatttctcttatacggaaaatgtgtgcttgtcatatctgcttgacagtacaagagtgaatgtatggtttggacaataacgaacaatgacagtagtcagcctcatcagaagacatgaaataaagaaatgacaatgactgatggcagctggttgtttatggatttttctagaagagctttccttggaatagtcaagtaaccaggggatgttgtgccctgcctgagctctgcacagcaagcaaaagactggtcctcacatgcctgctgcccagaggyacaaatggaccacttaattgagaaacaacttaattgcttcgtggtccctttagctaaactggggtaatatgaatggccaaaagaggatggcttctttggaagctctcaaggctcacattgcatcatgcagaaatcttgaatttaaaactactatggcaatacccccaaaaggataagtgtgtgatg

SEQ ID NO: 116321 - DNA, 522 bp, Homo sapiens
ttctccagctgatctttcctttcctcagtggaaaagaccagcgcaataaacagaaccttgtttccatggaagctcactctcttgctttttctttccagcccttgaaaaggtaattacttgatttctctttatattttgggatttcatagagtggagctgtcaagctcctcacgcgaggatggccttctctatcatgccaagctattttagggagcttcagttgcatttcccttttcatcctctcttcagatcattagctgtcaggcagcagtggccgccttctggtcactcccgctaattaaagtctaacagagcaaggggactcgaccccagagaaagtgggagacagaaaagccagggaaatttgtcaagagatgggagcctctgatcacatcatttctgctgcacagactgtcagaccgacaccctacattcacgccagtgagggacmctgtcccatctggtgccttctcttctgaacctttgacgccccactgtggcccatgtcagaaatgcagccaa

SEQ ID NO: 116322 - DNA, 564 bp, Homo sapiens
ttatgggtgcaagctaccatgcttaacaaaaacaawttttttttttttacatgaaacgtccgtgaatctacagttagataacaggatgaatttactggcctccacaaaacatgtgatgcttttgtttgtaacttttcgtgtatatgctacaacctacaacttccttaagctgtggtttttaaatttctttaaacaaccttcagcttgttaatgaactgaacacacatttgtttatgtaatcagcatgtgcatgcacacactcaactgggggaaaaatggagcaatttaaagcatttgttttttagtggagaattaacccagagaaaaatgctgttaaatataattttacagttcagaaaaggtttactgatcacagcaaaaagtatggagactatttaacatgaagagccaggatatttgtggtcattattaggagataaatatctctgtgaataaaaccattcattcattaccctacaagccttctaaggcaattaggcaattagaaggcagctttctgctttgtgtctgagatgataaaaactgaacatttagtgtatgctt

SEQ ID NO: 116323 - DNA, 564 bp, Homo sapiens
ttatgggtgcaagctaccatgcttaacaaaaacaaattttttttttttacatgaaacrtccgtgaatctacagttagataacaggatgaatttactggcctccacaaaacatgtgatgcttttgtttgtaacttttcgtgtatatgctacaacctacaacttccttaagctgtggtttttaaatttctttaaacaaccttcagcttgttaatgaactgaacacacatttgtttatgtaatcagcatgtgcatgcacacactcaactgggggaaaaatggagcaatttaaagcatttgttttttagtggagaattaacccagagaaaaatgctgttaaatataattttacagttcagaaaaggtttactgatcacagcaaaaagtatggagactatttaacatgaagagccaggatatttgtggtcattattaggagataaatatctctgtgaataaaaccattcattcattaccctacaagccttctaaggcaattaggcaattagaaggcagctttctgctttgtgtctgagatgataaaaactgaacatttagtgtatgctt

SEQ ID NO: 116324 - DNA, 564 bp, Homo sapiens
ttatgggtgcaagctaccatgcttaacaaaaacaaattttttttttttacatgaaacgtccgtgaatctacagttagataacaggatgaatttactggcctccacaaaacatgtgatgcttttgtttgtaacttttcgtgtatatgctacaacctacaacttccttaagctgtggtttttaaatttctttaaacaaccttcagcttgttaatgaactgaacacacatttgtttatgtaatcagcatgtgcatgcacacactcaactgggggaaaaatggagcaatttaaagcatttgttttttagtggagaattaacccagagaaaaatgctgttaaatataattttacagttcagaaaaggtttacwgatcacagcaaaaagtatggagactatttaacatgaagagccaggatatttgtggtcattattaggagataaatatctctgtgaataaaaccattcattcattaccctacaagccttctaaggcaattaggcaattagaaggcagctttctgctttgtgtctgagatgataaaaactgaacatttagtgtatgctt

SEQ ID NO: 116325 - DNA, 575 bp, Homo sapiens
actacagagacagatgtttcctggctggacatggtggctcatacccataatcccaccactttgggaggctgaagcaggagaataatttgagtccaggagtttgaaatcagyctgggcaacatgatgagatcccatctctaccaaaaatttaaaaattagccagatgtggtggcacacacctgtagtcccagctactgagggggctgaggtgggaggatcgcttgagcccaggaggctgaggctgcaatgaaccttgatcacgccactgcactccagcctgacaaaaatatctcaaaaaaaggaaagaaagaaaggtttccagagtacaggtgtgtgtctttgctcttagctgcctcattgagacagcaatggaaaaaacactgggctgggagtccagagattaatcacaatcttgtcccgtagcaaactgcataacagttggaaatccacttcactctctgagccggtttcctgctttaaagaacaagtggagttaacaggatcttactaattgatttcaagggtgttttccagctctgaaatttgggaaccattaacttagtatccagccagag

SEQ ID NO: 116326 - DNA, 612 bp, Homo sapiens
gataataaattgattgatagatgacagattgatagatatagacagatgtcagatacattagagagagagtgagagaggaaaatgtgggagacacagagggtgggagtataaaagtgagtgagagaaggagtcagaagaaaagtgaaagaaaacaaaagaacaacaacaaaagaaacaaaacaaaaaggactcatctaaccaacttttccattttatatcatgaggacttgaggcccaaagaaatggtgtgatttgcccagggtcataaggtaggtaagggaagaaaataacagrcagcctcctccactgtcttcctggagatcaaatagtcttggaggaagcatgtgaccatgaaaattagctagaagaggacaagttactcacctgctacccctctccgtgtgcatggaaagcaacatctccctcctgcactggacactctcagacctttggaaattcctctgctaagcaacacactccttcccaggagaaaacctctcatctccataataccactacagctctctggcaaatgaagattttggctctaaatatcctctcggaacctcataaatcctgaacgtcttttcccacttgagctgaaaccaggct

SEQ ID NO: 116327 - DNA, 528 bp, Homo sapiens
cctgtctcatccgtttcccttggaagtaaataccccttagcattctcactgggaggttatacatttggctacaaatgccattattgaacactgcaatcattgctttttcttttctagctgggaagtaaatgatatggactattggatcaaacagtgttttaaaagagcttgggtattcatacccactgttaagtgacgagacctgtggagtagctctggagagaagatgtgaagctacttcctcacatggaaagacacaaaacggaggccgggggcaggggctcatgcctgtaattgcagcactttgagaggcgaggcagcaggattcctcgagtccaggagttcsagaccagtttggcaacataggaaaaccctgtctctacaaaaaattaaaaaattatctgggcgtggtggtgtacatctgtagtcccagctacgtgggaggctgaggtaggaggatcacttgagcccaggggtttaaggctgcaatgaactatgattgtgccactgcactccagcctgggtgac

SEQ ID NO: 116328 - DNA, 620 bp, Homo sapiens
actagttaattaaaagatttcataatttcatgtgtaattttttggtgccagtcaacattatgtcagaagataccttcattctgctgaaagagtcagtggaartgaaggagttagaaaatgatgatggggtctgtaaactgacaggccagttagcaaacgtcatgcagttacatcagccaggtcgctcctgtgcttaaaacatttgtaccagacattctgtagatcatcaggtccttggctttgagttcttcttctttcttgagaccatttcagcattcatggacacctactctttccataggcaggtgaccagaaactattgtccacaaagcactaacagagcattttggggtaacgtaaaaaactataaaaaggggttgtttgtttatgaaattttcattatagctggaggacatataaaaataatctcaaagctcatgtgggataaattataaatctatgtatatagcttatatcactatatatgagtttttaaaaattctgtacaagcagagaacacaaggacacacctaggcatcagtttgattccctagttagcaggaagggaatatgaaagtattttagaatgatgggtctgatgatgaggaaaaagggcaggg

SEQ ID NO: 116329 - DNA, 620 bp, Homo sapiens
actagttaattaaaagatttcataatttcatgtgtaattttttggtgccagtcaacattatgtcagaagataccttcattctgctgaaagagtcagtggaagtgaaggagttagaaaatgatgatggggtctgtaaactgacaggccagttagcaaacgtcatgcagttacatcagccaggtcgctcctgtgcttaaaacatttgtaccagacattctgtagatcatcaggtccttggctttgagttcttcttctttcttgagaccatttcagcattcatgracacctactctttccataggcaggtgaccagaaactattgtccacaaagcactaacagagcattttggggtaacgtaaaaaactataaaaaggggttgtttgtttatgaaattttcattatagctggaggacatataaaaataatctcaaagctcatgtgggataaattataaatctatgtatatagcttatatcactatatatgagtttttaaaaattctgtacaagcagagaacacaaggacacacctaggcatcagtttgattccctagttagcaggaagggaatatgaaagtattttagaatgatgggtctgatgatgaggaaaaagggcaggg

SEQ ID NO: 116330 - DNA, 620 bp, Homo sapiens
actagttaattaaaagatttcataatttcatgtgtaattttttggtgccagtcaacattatgtcagaagataccttcattctgctgaaagagtcagtggaagtgaaggagttagaaaatgatgatggggtctgtaaactgacaggccagttagcaaacgtcatgcagttacatcagccaggtcgctcctgtgcttaaaacatttgtaccagacattctgtagatcatcaggtccttggctttgagttcttcttctttcttgagaccatttcagcattcatggacacctactctttccataggcaggtgaccmgaaactattgtccacaaagcactaacagagcattttggggtaacgtaaaaaactataaaaaggggttgtttgtttatgaaattttcattatagctggaggacatataaaaataatctcaaagctcatgtgggataaattataaatctatgtatatagcttatatcactatatatgagtttttaaaaattctgtacaagcagagaacacaaggacacacctaggcatcagtttgattccctagttagcaggaagggaatatgaaagtattttagaatgatgggtctgatgatgaggaaaaagggcaggg

SEQ ID NO: 116331 - DNA, 597 bp, Homo sapiens
atggtgctgaacttaatccagcttcttgtgtcctcaagtctatgtctttaaaaatgtcaataaataagtgatacattggcctagttgttcaggatgtagggaagagattagcacatgtgctatagtgtgggtggggacacaatggtatttaggagagtcattcattcattcattcattcatyctgtgtgcgtctgtccattcccttcatcatttcagtcatcagacttctactgggtgtctaccacgttccaagtactccactgaaaacagaggtaaccaaaagaataagagagaacctgtgctcaaaatcaccagtgtgtgtacaaagggttgtgttccatggtaccattaaaggaagtaaaaagggtaatgaaatttaaactcataacatacataaataaattataatgaagataagagcaaaaacatcaataatatttataatagataacaaatagagaacatgaatgaaaaccatagctactgctttgaaaagattaataacattgataaacctgtagcttaagtgaacactaataaaagacatacattaccagtatgagaaataaactaggtaacatccctaacatgctaca

SEQ ID NO: 116332 - DNA, 597 bp, Homo sapiens
atggtgctgaacttaatccagcttcttgtgtcctcaagtctatgtctttaaaaatgtcaataaataagtgatacattggcctagttgttcaggatgtagggaagagattagcacatgtgctatagtgtgggtggggacacaatggtatttaggagagtcattcattcattcattcattcatcctgtgtgcgtctgtccattcccttcatcatttcagtcatcagacttctactgggtgtctaccacgttccaagtactccactgaaaacagaggtaaccaaaagaataagagagaacctgtgctcaaartcaccagtgtgtgtacaaagggttgtgttccatggtaccattaaaggaagtaaaaagggtaatgaaatttaaactcataacatacataaataaattataatgaagataagagcaaaaacatcaataatatttataatagataacaaatagagaacatgaatgaaaaccatagctactgctttgaaaagattaataacattgataaacctgtagcttaagtgaacactaataaaagacatacattaccagtatgagaaataaactaggtaacatccctaacatgctaca

SEQ ID NO: 116333 - DNA, 557 bp, Homo sapiens
cttctgggcaatcagcttgtctctgagaatctcctgacctcttgaggactggaaatgctgcaaatgcaaatacagttaaatagcttcattgggcacccaccagcagagggcgaaagggccccagagtccatataaccacgtgtgtttctgcttcatgggcctgaaaatgaccagatttcttcccttgagcttggctgaagcttcattcacgaccaggcttaggagctacatctgagaacagagtgatggatcaggccccagcatctaaaatgtaggtgctggtcagtcacaggaatgataaacccatgggatgtctygcgcttaaattcctttcgtcacacctagaaaatgttcagatttcctctgtcttggtttgtcttccaaagctgaaacgaaagaatggggtacaaacctaaattaccctaatgggatcattaagagtatgtgttactcattcataggatgttaatggtaacttcccccaattcaaatcaatctggaaatacaaatatgactttctttggaaatagcttctttgctaatgtaattagttcagg

SEQ ID NO: 116334 - DNA, 557 bp, Homo sapiens
cttctgggcaatcagcttgtctctgagaatctcctgacctcttgaggactggaaatgctgcaaatgcaaatacagttaaatagcttcattgggcacccaccagcagagggcgaaagggccccagagtccatataaccacgtgtgtttctgcttcatgggcctgaaaatgaccagatttcttcccttgagcttggctgaagcttcattcacgaccaggcttaggagctacatctgagaacagagtgatggatcaggccccagcatctaaaatgtaggtgctggtcagtcacaggaatgataaacccatgggatgtctcgcgcttaaattcctttcgtcacacctagaaaatgttcagatttcctctgtcttggtttgtcttccaaagctgaaacgaaagaatggggtacaaacctaaattaccctaatgggatcattaagagtatgtgttactcattcataggatgttaatggtaacttcccccaattcaaatcaatctggaaatacaaatatgactttmtttggaaatagcttctttgctaatgtaattagttcagg

SEQ ID NO: 116335 - DNA, 405 bp, Homo sapiens
gtgaatacatcctttattcttggtgaggaaagtgtgttagaatgatgcagagtcagtttacttgcatctgctcattcggtttcacrgggagtcaaataggttagttcaatcattattataaccaagtgccaaggagttaattggagaatggtcagtgcagttcagaccagtcatcttaatgagcaaaataattgggcattgtcagcactctaatcctgctgttaaagactagctcttggcttcattgggcatgtttcttccaatgcagcaggccactctgctcggcatccctgcctgtgccctgccctcattaagaccatctgtcctttaggaaccagtgtcctaaacagagggggaaggatgtccagaatgtcttttttttctctctctctttcaggcagaatt

SEQ ID NO: 116336 - DNA, 645 bp, Homo sapiens
gtattaatttatataataggtctccccactttcttggatatttagatgatttctaatgggctttattagctatagttatacaatgaacactctttcacatatatacatatatacgtacatacttttccattattatgattatttattcaggataatttctacggtttgaatctggtggcttaaataatctaaaagatgcatgattaagagttttgatacatattgccaaatattatacccttttatactcccactagctgagtatttccttacaccatagccaaatttggatactataataaaaaagaaaataacacatttacaaatttggtagaaaaaattacattcttattatttcagttgactttaaaaattatggaatagactgaatgttttatgcaatagttagctgttggccagttttcttttggagtatttggatttttctttttgatttgtagcagtgtttacctgctatttttgcttcaatttagtttagtttatcatttggtggtggttgttggattcaatgtgtacatcttttactatattgcatytgtcttcatcctgatatcatgtaaacatcaaccatatttttaaagggctaatttatttcagcatatggtataaatttataccatagat

SEQ ID NO: 116337 - DNA, 596 bp, Homo sapiens
gattcttcctaacattaacaggaaacatgtttgtctacagcagatatcatgtactcaaatgcctacagatgccaagcaagaaacatggatgggtgaaatgggctgcttataaaaaccttcagaagtggctgggattttagtaacctagagtgaacctctctagtctaaaggggcaagcactgctcagcaagatctgatcttgggttttataaacatgggtcttgtcctacgcagcttaaaaattaatggggaagtcagatcattagacatgaatttcaacacagtttataagttctctaacagggaagtaaaaagtgctgtagaagcacttgatagtagcacataacccaaaatttaggagtcatgaaggaattgatgtttaagttcaacctgagtgataagcagaagttgcctaaataaagatgggtggggtggccgggcacatgcctgtaatctcagcactttgggaggyggaggaggatggatcacctgaggtcaggagtttgagaccagcctggccaacatggtgaaaccccatctctactaaaatacaaaaaattagccagacatgatggtgcgtgcctgtaatcccagct

SEQ ID NO: 116338 - DNA, 558 bp, Homo sapiens
ataatggggaaaaaagaactgtcctaccatattgattatatggtaacacagtaaatgattattaaaactttcctgttagtatttttgacagtatgtatccgaagccttaagagcatgaattttcttgtacctagcaattcgtttctaattatttagcctttaaaaagttaaggatatgtgcacatattcaactacaatggtgttcaatgtagttttgcttataaaagccccccaaaagcataatttaagcgtctgctgactagatatttctaaagtcctttattctactgagatcattttggcctttaatatttaaacaagattggatcagccaattttcttatgcagtgaaaaccttctgacccaaataccaatatctctggcgattcttgttttcctactcgcctctgcctccaaattctgtttaattctctatccctactccatatttcrtacctgtccctgctgtcccttttttacaatgtatcaccctgcataatacaacccaccccaaatatcctttactcttccaagtacctgggccacagcaaggagtat

SEQ ID NO: 116339 - DNA, 622 bp, Homo sapiens
ctattgttactaggttagaggtgtttctcctggaagcccctagaacaaaactggagagtaagtacttggcaggtggggaagacatccacccacctctatcccagcctagcttggaactctgcttctgacacccacagactgattttctgatcccacacccagtgaccataaggcccaggagctcagacagaggagatctgggccttgacattgtataggcttgagcccacttcatctctctcaacctcaagcctcatcttgaaaatggggcgataacagcacmtgcctcacagggttgttggtctttagctaaatgccaggaaactttctcagaaacagtagacttcagtgccgattttctgactctaattctgaaggttaatcctgtggagagagtacaggcttcacagagtcagcacaactgtcctctgggttttgcaggaaaggcctggagagtccccctgggttacttttaaagattacgtctatatgatgcattctattctagagaaatgtgctgggttttaacaactgggacatgaggctggaggccagaatttttcccctaggtctgccccaaagctgctgagttagctgctttgtgattcaaagttccagtcca

SEQ ID NO: 116340 - DNA, 622 bp, Homo sapiens
ctattgttactaggttagaggtgtttctcctggaagcccctagaacaaaactggagagtaagtacttggcaggtggggaagacatccacccacctctatcccagcctagcttggaactctgcttctgacacccacagactgattttctgatcccacacccagtgaccataaggcccaggagctcagacagaggagatctgggccttgacattgtataggcttgagcccacttcatctctctcaacctcaagcctcatcttgaaaatggggcgataacagcacatgcctcacagggttgttggtctttagctaaatgccaggaaactttctcagaaacagtagacttcagtgcygattttctgactctaattctgaaggttaatcctgtggagagagtacaggcttcacagagtcagcacaactgtcctctgggttttgcaggaaaggcctggagagtccccctgggttacttttaaagattacgtctatatgatgcattctattctagagaaatgtgctgggttttaacaactgggacatgaggctggaggccagaatttttcccctaggtctgccccaaagctgctgagttagctgctttgtgattcaaagttccagtcca

SEQ ID NO: 116341 - DNA, 641 bp, Homo sapiens
aagagtactgctgttcttgccccctgatactggtgctacttctgctcatatcttctgcaatggaaaaaacccctttctcccaaccttgtaccattgtctgttacactggtcccacagtggtatgatcccttactctcaaagtcttaaagaaacgatgggtaaaacattccatccaggttgttttctttccccatgatttgggcacaagtccctagggactgagccaygagatgagtcaaagggtggtcctcagtgtcattcttcctctattgctcagaggcacttttcaggcatctctgcctgggctttggcagctattccttagattgacttacttcccaagaggctcctcaagcctgttcagccctggtcgcccctccacagtcttctggtctttccctgactgtttccattttaggctgagagcacctgcatcttgaaccagggtgcctttgcactttagcctggataacatcacagctctagatttggtgaaaggaaacagaatcagggaacccctgagccacagccattttaggatgtcgctaggctcctctacttcctctttccttattgctcccaattctttgcttccttcttgctaagttggaaggagcccacctccccctagaaagaggatc

SEQ ID NO: 116342 - DNA, 641 bp, Homo sapiens
aagagtactgctgttcttgccccctgatactggtgctacttctgctcatatcttctgcaatggaaaaaacccctttctcccaaccttgtaccattgtctgttacactggtcccacagtggtatgatcccttactctcaaagtcttaaagaaacgatgggtaaaacattccatccaggttgttttctttccccatgatttgggcacaagtccctagggactgagccacgagatgagtcaaagggtggtcctcagtgtcattcttcctctattgctcagaggcacttttcaggcatctctgcctgggctttggcagctattccttagattgacttacttcccaagaggctcctcaagcctgttcagccctggtcgcccctccacagtcttctggtctttccctgactgtttccattttaggctgagagcacctgcatcttgaaccagggygcctttgcactttagcctggataacatcacagctctagatttggtgaaaggaaacagaatcagggaacccctgagccacagccattttaggatgtcgctaggctcctctacttcctctttccttattgctcccaattctttgcttccttcttgctaagttggaaggagcccacctccccctagaaagaggatc

SEQ ID NO: 116343 - DNA, 641 bp, Homo sapiens
aagagtactgctgttcttgccccctgatactggtgctacttctgctcatatcttctgcaatggaaaaaacccctttctcccaaccttgtaccattgtctgttacactggtcccacagtggtatgatcccttactctcaaagtcttaaagaaacgatgggtaaaacattccatccaggttgttttctttccccatgatttgggcacaagtccctagggactgagccacgagatgagtcaaagggtggtcctcagtgtcattcttcctctattgctcagaggcacttttcaggcatctctgcctgggctttggcagctattccttagattgacttacttcccaagaggctcctcaagcctgttcagccctggtcgcccctccacagtcttctggtctttccctgactgtttccattttaggctgagagcacctgcatcttgaaccagggtgcctttgcactttagcctggataacatcacagctctagatttggtgaaaggaaacagaatcagggaacccytgagccacagccattttaggatgtcgctaggctcctctacttcctctttccttattgctcccaattctttgcttccttcttgctaagttggaaggagcccacctccccctagaaagaggatc

SEQ ID NO: 116344 - DNA, 607 bp, Homo sapiens
gtaacagcccatgtctgcatttttgggctgaacttccctttccctacttcatctaaattcccccttttggtttctctacaaactgccgtagcctagcatcgtgctcttttgaacttctctaccaactagcatcagcctcctcatttctaccattgaggtataaaggagggaaagggctgctttcccttctgtcctgaatcagtgagttgtaggtacctcatgcccaccactccacctcattttgcttctgaaactcctgacctagtcaccccaaaataagacatggccatacatcaagggaaaagtactccaagaagttctrccctcagagggagccccctgatggacacatcacagtctttggccttactccctatgctcaggtacctttcaagagcttttatcttcaaacctccatagggacagtctccatacccctcaactggccaggacagtaattactaatgatgcattttcccaaatagaagtaatttcatttcaccaatactatggttgagtgggaggtggaggtggcttctccagaagagtccagagtagacttgatctttccgtgtttgtgtaaagacctttcctcatcatgcaatta

SEQ ID NO: 116345 - DNA, 607 bp, Homo sapiens
gtaacagcccatgtctgcatttttgggctgaacttccctttccctacttcatctaaattcccccttttggtttctctacaaactgccgtagcctagcatcgtgctcttttgaacttctctaccaactagcatcagcctcctcatttctaccattgaggtataaaggagggaaagggctgctttcccttctgtcctgaatcagtgagttgtaggtacctcatgcccaccactccacctcattttgcttctgaaactcctgacctagtcaccccaaaataagacatggccatacatcaagggaaaagtactccaagaagttctgccctcagagggagccccctgatggacacatcacagtctttggccttactccctatgctcaggtacctttcaagagcttttatcttcaaacctccatagggacagtctccatacccctcaactggccaggacagtaattactamtgatgcattttcccaaatagaagtaatttcatttcaccaatactatggttgagtgggaggtggaggtggcttctccagaagagtccagagtagacttgatctttccgtgtttgtgtaaagacctttcctcatcatgcaatta

SEQ ID NO: 116346 - DNA, 607 bp, Homo sapiens
gtaacagcccatgtctgcatttttgggctgaacttccctttccctacttcatctaaattcccccttttggtttctctacaaactgccgtagcctagcatcgtgctcttttgaacttctctaccaactagcatcagcctcctcatttctaccattgaggtataaaggagggaaagggctgctttcccttctgtcctgaatcagtgagttgtaggtacctcatgcccaccactccacctcattttgcttctgaaactcctgacctagtcaccccaaaataagacatggccatacatcaagggaaaagtactccaagaagttctgccctcagagggagccccctgatggacacatcacagtctttggccttactccctatgctcaggtacctttcaagagcttttatcttcaaacctccatagggacagtctccatacccctcaactggccaggacagtaattactaatgatgcattttcccaaatagaagtaatttcrtttcaccaatactatggttgagtgggaggtggaggtggcttctccagaagagtccagagtagacttgatctttccgtgtttgtgtaaagacctttcctcatcatgcaatta

SEQ ID NO: 116347 - DNA, 623 bp, Homo sapiens
ttaaagttttttaaaaatctatttttttaagatcagatttttttggaggaaacaaaaaactcacaacccaaaggatgggattttacatctcaggacatctcccacataataagtctatagattataaatcattttcaaattttacatgtatttaggagagggacattaatcaatccccatttctattttaacaggggggcaaggtaggggagagggaaaaacagtttggtatctatttggagggagagtagacatgaagagggcaaaccctagcttctcattatctacaatcaatgttttttttttcttaaaaaaaagctttcaatctctctttaaaagcctacttcttagctactagccagtccaccctaattatttaaattcatttggtacacacttttgttcactgggcaaattatattcattatgcccactgctgcagcacgcataaaccaacacccctgcatggctgagcagggcctaatctaggactgacaggagaagtgcttgcaaaccaagatcaaggtgtcatttctctgctaatactgtctaccaagctgatccctacaaaaatgcacataaaagcaggcaagtttwgctactgtgttgcaagagaaaccagg

SEQ ID NO: 116348 - DNA, 585 bp, Homo sapiens
atttctttttgttcatttggggttaacattaactacggaaattctgaaacttgaacacattagggtcacctgggctgccggttaaatacacgcttcccacccaccccacattcactgaacctgaatctctaaaacagagctgggaaggtgcctggttaacctgctctccaggtgattcagatgcaggtcagacctacttctaaggataatggaatctaaaggagaaagaagcatccttaagggccagatcgatggtgatgctgacctctgaagtcaaagtggggaaaaccctcaaggaaaagtgacacccaaaagagaaatgactaatatcacacagttgcccttctgagcactccttggtaaaattaatcctargaaaacatggtattttgttttcataagggccatgagccaagcatgtctcctgtccccctccttccttccttgtgtgcgccattctttttctgtttcatttttcctttttggatccctgcttgggcactctaattgcatggcctcagcctcagcctccttgcctctcctctggcccgaatgcttctccaaatctagcgacatgaaagcgga

SEQ ID NO: 116349 - DNA, 561 bp, Homo sapiens
ttcattgtaagtttccacagtgcctggttctaccactgtcccagtacttactacactgtgtcataatttattaacctatttttataacggtctgatagtttggttgtgtccccgcccaaatctcatgtcaaattgtaatccccagtgttggaggtgggggctggtgggaggtgattggatcagggggatggatccttcatgaatggtttagcaccatcactttggtgctgttctcatgatggtgagtgagttctcaggagatctggttgtttaaaagtgtgtggcacttcccccccsctcttcttcctactcctgccatgtaagatgtgcctgcttccccttcaccttctgccatgattgtaagtatcctgaggtctccccagaacccaagtagatgtcagcatcatgcttcccgtacagcctgtggaactgtgagccaattaaacctcttttctttataaagtacccagtctcaggtgtttctttatagcagtgaaagaagagattaacactgtcttttcatagaactatgtgtctgagatggggatgcaaaaattggtg

SEQ ID NO: 116350 - DNA, 442 bp, Homo sapiens
ctgtaacctccaggtatgaggttgaaaacacttgtcttcaactgggagtgggagggatagaaaggatagagaaggagagcttgactcaatgagtctgacatgaggctagcttttgaagaaaaaacaaaacactatatataaacacctccccgggtgattcagatgcccctcccttctatattccaaattatggcctctgttctacagtcagcctgggtctcacacatgctgccctgaaatcctgtggggagaaggctcttctstaaagggtttccagattcctcttctaggcttacagaccctttgcactgactttaaagcaaattcctttctttctcttgaagggattcccctatgggtttaagttcctgacaaaaataacttacgagcaggaatcacttctttcagagagtgtttggccaaagcacatttaccaccagtc

SEQ ID NO: 116351 - DNA, 594 bp, Homo sapiens
ttggtagttggtgatctctttctgtttaatttgagttttatcagttttgttaacctttttcaagagtctacttttggcttctgtgttttatctattctgtcaatctctatattttaataggaaaatttggtccacggtcatttaatgtaaattgtatatggtagaatttgtctgacattttatttgcttcctgtatgttccttcttatttttccacttgtttattcttgcctgaatttttttaaaacttaatttaaatgcctcaattggcttttaaagactttttaaagagaagttatacttctctttaaaattgagaggaagatacagagattttccatatacccactgcccttacacatgtatagcctcaccaattataaacatcttccaccaaagtggtatttttcttacaattaataaacatgcactgacacagcattatcacccaaagttcacagtttatattaggatccattttgttgttgtatttctatgggtttgaaaaatgtataatgatatatatccccattatattgtcatattgagtatgtacatsgcctacaaaatattgtcctcctcctatttattcatc

SEQ ID NO: 116352 - DNA, 436 bp, Homo sapiens
ccatgactgcaatctagcggacctagagtccactaaattattcactcccatttctggttaaaacatcacttccatgtgctttgtaaactccccaatataactgcccgtgtgtattacacttcactggccttcaaagtcagctttttccagaaatttgaaggcatctcttttagtatctgagtcayatctaatggccttcttttctgcaaacaaactgtgtctgtgtagttagggtaagctctgcattagagacattattcagacaccttgatagagacttaaaaaatggataagctggattttccaagctgtggaagatctttcaaatgcattttattttgattttcagatattcatcagccatgtttctgatttccaatactttattgatcgctaggtatctgttaagtagcaccctataggttttctgattaga

SEQ ID NO: 116353 - DNA, 669 bp, Homo sapiens
tgtggtgaataaactcttattcgtgctactggactcccaagcatacaagtgagtaaaaaataaataaatgactgactaaaaaataaataaatraccaggtaacttccattgaagttgcccaaaatgcatattagtggttttggggaaaaaaagtccttgaactgattgattgactgattgactggagagagaaggtttccgttagaaaaaggaaggggttatttgtctggcagtaacaggaaaaagtcaagtgaattcatccaggctcaaggaggtccatagtttgactttggctccacagttggctttcacaatgacacttagccattcccagactcagtttccatatctatagactgcatataatgttagatcttatagggtgtctgaggatcagacaaaataatgtaattaaaaaacataacaaaagtctctggcatagtcacctctcaataagtaccagcaataattattgtgagaaatgggaaaacagatagctgtagagggtgaaaaggaattgcgtctccctccagtggaaaatcagggtgtattcagttgcatggatcatttattggtttattgatttcaagactgtctgcctaactaaactgttaacaccagaggagtggggccagatctcaataattaactacttacacccagcctcta

SEQ ID NO: 116354 - DNA, 669 bp, Homo sapiens
tgtggtgaataaactcttattcgtgctactggactcccaagcatacaagtgagtaaaaaataaataaatgactgactaaaaaataaataaatgaccaggtaacttccattgaagttgcccaaaatgcatattagtggttttggggaaaaaaagtccttgaactgattgattgactgattgactggagagagaaggtttccgttagaaaaaggaaggggttatttktctggcagtaacaggaaaaagtcaagtgaattcatccaggctcaaggaggtccatagtttgactttggctccacagttggctttcacaatgacacttagccattcccagactcagtttccatatctatagactgcatataatgttagatcttatagggtgtctgaggatcagacaaaataatgtaattaaaaaacataacaaaagtctctggcatagtcacctctcaataagtaccagcaataattattgtgagaaatgggaaaacagatagctgtagagggtgaaaaggaattgcgtctccctccagtggaaaatcagggtgtattcagttgcatggatcatttattggtttattgatttcaagactgtctgcctaactaaactgttaacaccagaggagtggggccagatctcaataattaactacttacacccagcctcta

SEQ ID NO: 116355 - DNA, 669 bp, Homo sapiens
tgtggtgaataaactcttattcgtgctactggactcccaagcatacaagtgagtaaaaaataaataaatgactgactaaaaaataaataaatgaccaggtaacttccattgaagttgcccaaaatgcatattagtggttttggggaaaaaaagtccttgaactgattgattgactgattgactggagagagaaggtttccgttagaaaaaggaaggggttatttgtctggcagtaacaggaaaaagtcaagtgaattcatccaggctcaaggaggtccatagtttgactttggctccacagttggctttcacaatgacacttagccattcccagactcagtttccatatctatagactgcatataatgttagatcttatagggtgtctgaggatcagacaaaataatgtaawtaaaaaacataacaaaagtctctggcatagtcacctctcaataagtaccagcaataattattgtgagaaatgggaaaacagatagctgtagagggtgaaaaggaattgcgtctccctccagtggaaaatcagggtgtattcagttgcatggatcatttattggtttattgatttcaagactgtctgcctaactaaactgttaacaccagaggagtggggccagatctcaataattaactacttacacccagcctcta

SEQ ID NO: 116356 - DNA, 728 bp, Homo sapiens
tatgtgggcactttcactagtgtttcccagagcatatcacatagtaggtgcttaatcagtatagatggtactacttgaattatgactgacttacatccagataaatccactgtgaatgcaaatattgtaagtaaaatgtgagattttgctatatttccaggttaaaatgggtttctccacacgtagccccattgtaaaccaaggagtatactgaatgccctgtcgcttttacaccagtgtaaagttgaaaatcacaagttgaaccatcataagtagggaacccatgtatatgataaactctctgaggttcaaattagggcccctcattgaataggagacaaactgaggtacagatgatttaagaaattatgcgactcagatccagcacttcagtggttaagtccaatgctctcttcaccacgtaacagggagatggtttgataaacaaagggtttaacacgacagcactgcaagctttgagtaagtctcataactgcaatggtttatattgtttttcatgcctacatagcatgagaaatttattacaagctaacagyatcttatattttcttagtacttattgtctcttgactagacttcataggaattaattttaaaagagctttctttgagaaagatgtcaagtgatttattcaaattccctgtccatgtgctctatactaccttaaatttacaaaagtttcaaatgtagagaaaaccacatttaa

SEQ ID NO: 116357 - DNA, 673 bp, Homo sapiens
atatttgtttttcttttgggctaaaggattaagcaatatctaccacaaaatataatctacattttcaacagtgggtaattagattattgttattatttaataataaattatattctttccctctctctctctttacccactgtttctctttcttcctcccttcctcacctttccctcttctcctcctctctcatttygtaataacacttgtaattatagggcacaagaacatccaattaacctcaactgagatgaagcatctctctttgtaacacacagatcccatgtacaatgtaggaatatggattagggattatggaatcaacccaattagtttctatcccagctgtgatgcctgtatgctgcatgcacatagaaaatcttagttgctgacttcatgaggtatttataaacattaaaacaaacaacatagatgagactctcagaagaaaacctgatggctaataagaacccatttaagaagtactctgttttttgtttgtttgtttgtttttagagacaaggtcttgctatgttgcccaggttgcagtgcagtggctattcacaggcatcatccttggagtgcactgcatcccccaactcctggcctcgtgatccttccgtctcagcctcctaggtagctgggattatgggtatgcaccaacatgcctgg

SEQ ID NO: 116358 - DNA, 285 bp, Homo sapiens
attagttttgtttttacttgtttgtttatgcaaataatattaagttgttatcagattaaaataatgggttataagatartatttgcaagtctcatggtaacctaaagccaaaaaacatacaatggatacaggaaaaagaaagaggaagaaactaaatcatgttaccagagaaaattaccttcactaaacgaagacacgaaggaaagacagaaggaagagaagaccacacaacaaccagaaaacaaataacaaaatggcaggagtacttcttatcaataataactg

SEQ ID NO: 116359 - DNA, 523 bp, Homo sapiens
agtaatcctccttactctcctgtttgacctacccaaactgttatcaacatgtatgtctatactaacttttcttctaattgcagaagagtaggtgtgccctcctcatgtctcctgcttcttattccatccttargttccaggctcttgctctgttggtcatacatagtattcctctcctatgtcttcaactattttttcttttttttttttgtttttttcttgcccatatcaaaaatgtagactttgctctcccatcaaataaagccatctcttttttctactccctgtagccaccatctagtctcttacttccccttttcctgctgagcttcctaaaagcatagcttgttatatatttctgttatctcccatttatttctcaactacccttgatctagattcatttcttaatacttctaaaggtagttctggcttaaacaatggcatgtgtattttcatattttgtggacacgattccatcttgattgaccctctgctccctgacatcattctctctggtttc

SEQ ID NO: 116360 - DNA, 523 bp, Homo sapiens
agtaatcctccttactctcctgtttgacctacccaaactgttatcaacatgtatgtctatactaacttttcttctaattgcagaagagtaggtgtgccctcctcatgtctcctgcttcttattccatccttaggttccaggctcttgctctgttggtcatacatagtattcctctcctatgtcttcaactattttttcttttttttttttgtttttttcttgcccatatcaaaaatgtagactttgctctcccatcaaataaagccatctcttttttctactccctgtagccaccatctagtctcttacttccccttttcctgctgagcttcctaaaagcatagcttgttatatatttctgttatctcccatttatttctcaactacmcttgatctagattcatttcttaatacttctaaaggtagttctggcttaaacaatggcatgtgtattttcatattttgtggacacgattccatcttgattgaccctctgctccctgacatcattctctctggtttc

SEQ ID NO: 116361 - DNA, 582 bp, Homo sapiens
ttgtatgttttgtattagacaaatacaatcttgaaattaagaataaactgaactttctatcatgttctatattcaagaaaaggttcaagtgtgtgtgttttcacctggcagaccaactccctcttttctgtgctgtttgaattttcataaatcattttcacaatcaggaaatatattgagtgctttgtttagttgtgttgtgttttttgagacagagtctcactcactctgtcgctcatgctagagtgcagtggcacgatctcagcttgctgcaacctccgcctcccaggctcaatgaattatcttgcctcaccctccccagctgggactacaggcgcatgccaccacacttggctaaattttttttgtagttttagtagagatggagtttcascatgttgcccagactggtctcaaattcctgacttcaagtgatctgccctcctcggtctcccaaaatgctgggattacaggtgtgaaccattatgcccagctaggaaaaatattgatattttcattgtgaccataacaaggtcaatggattaggttaggaaacagctgactaaattcaatgaatgggaa

SEQ ID NO: 116362 - DNA, 582 bp, Homo sapiens
ttgtatgttttgtattagacaaatacaatcttgaaattaagaataaactgaactttctatcatgttctatattcaagaaaaggttcaagtgtgtgtgttttcacctggcagaccaactccctcttttctgtgctgtttgaattttcataaatcattttcacaatcaggaaatatattgagtgctttgtttagttgtgttgtgttttttgagacagagtctcactcactctgtcgctcatgctagagtgcagtggcacgatctcagcttgctgcaacctccgcctcccaggctcaatgaattatcttgcctcaccctccccagctgggactacaggcgcatgccaccacacttggctaaattttttttgtagttttagtagagatggagtttcagcatgttgcccagactggtctcaaattcctgacttcaagtgatctgccctcctcggtctcccaaaatgctgggattacaggtgtgaaccattatgcccagctaggaaaaatattgatattttcattgtgaccataacaaggtcaatggrttaggttaggaaacagctgactaaattcaatgaatgggaa

SEQ ID NO: 116363 - DNA, 554 bp, Homo sapiens
ctgggcttcactgctcatatcaccatcagcattttagtcacaacaatttaacaagtctctaggaagttcccatttttttctcatctttctgtcttcttctgagaactccacactctgtcaatctctgcctgttactgaatcccaaagtcacttccagatgttcaggtatctttatagcaatatcccactcctggtaccaattttctcttttagtcyattctcacactgctataaagaagtacctgaggctgagtaatttttaaagaaaagaagtttaattagctcatggttctacaggctatacaggaagcataacagcttctggggaaggctcagaacactttcaatcatggtggaaggcaaagggcaagcaggcatatcttacatggccagagcaggaggaagagagggaaaagggagatgctatacacttttaaacaaccagatctcatgataattcactcactcacaattgccatgacaacaccaagcgggatggtgttaaaccatgagaaactgccttcatgacccaatcacctcccaccaggccccgt

SEQ ID NO: 116364 - DNA, 554 bp, Homo sapiens
ctgggcttcactgctcatatcaccatcagcattttagtcacaacaatttaacaagtctctaggaagttcccatttttttctcatctttctgtcttcttctgagaactccacactctgtcaatctctgcctgttactgaatcccaaagtcacttccagatgttcaggtatctttatagcaatatcccactcctggtaccaattttctcttttagtctattctcacactgctataaagaagtacctgaggctgagtaatttttaaagaaaagaagtttaattagctcatggttctacaggctatacaggaagcataacagcttctggggaaggctcagaacactttcaatcatggtggaaggcaaagggcaagcaggcatatcytacatggccagagcaggaggaagagagggaaaagggagatgctatacacttttaaacaaccagatctcatgataattcactcactcacaattgccatgacaacaccaagcgggatggtgttaaaccatgagaaactgccttcatgacccaatcacctcccaccaggccccgt

SEQ ID NO: 116365 - DNA, 564 bp, Homo sapiens
agcaactgttttcttacatttattcacacataagtgtgaattttaaggtaaaaaacatgacaaaccgttaatgcagtgaaaaaatagagtgttcagggtaaccaagcagcacagtagcatgcccagaatacctgcatcagctgtgaaacaacagcaagagataacagcaggcgttcagtctccacctgtgatgctgtgttttgattaaaagattactgtacactgtattctattttttaggtgaggagaaacactggaagcagttgagggaccaggatgtgggtcctccaaggatgaagaggcatgctagtggatagcttttttcaaatgtttcctccagtgtcactggccttagtaacagtggtttttgtcttagggggtctctctttgattttataagctgacatgatttcttgttctgttatgaaggcacacacagctctagtccttcaacaaacccatcatacatttttaccatattataacttaggcygtttttctgcagtgttaacatcatcttcaccattgtgcacctgtgttttgactgcaactcataacatgagg

SEQ ID NO: 116366 - DNA, 568 bp, Homo sapiens
atccattaaggttttatttctcaggggagaagtgttactcagcaatggctaaccggaacatcttccattattattgattatatgagtttgaaattatgaaaattgttggagagtttccttatcaaatctttcctatgtagtaatatagttggagccatcacaaagctgaattttgaagcaggtaaaacttgtcttttatgccctctattttaaatctctctctctctctctttctctctgtatgtatgcatatatatacatacatatatgtacattctccacttatggcatttcctaccaactgagcagtttaacagagacccaaagctccccatggactgcttctcactgctttttccaaataaaccctattagaaagtataattttaaatgtatctaatttcatccatttttagttgtgactggtcattcctacttggttatttattttaggattacttcttgcttctgcaaatatcattttctgttctcactmtctctacatcagttctgaaatagataattactagatcacatctgtttatcctaaattcacccaggccattct

SEQ ID NO: 116367 - DNA, 513 bp, Homo sapiens
cacttggcccctgccacctcaggatccaattattcccattgtatttcaattttgtagttgagtgactgcagttcccactgttagatctgatatacagagaagagcaattacagcactcttcaaagatgcaggtgctgcctcacaagtctatttcacaaaacattggtcaagggtatatcttctggacccactcagctcggataagtaagtgtaaaatgactaatctcctccatcatcccaatctttctaagccttttgattctttcctctacattaacccaagggaggaaattaggcatttccagctcgctcacagtagcctatcttttaatccatatttcagccaaccaagcaaataaactatcagaacctttttttaactycccaagctgtaacattaaatgcagagtccctacctagtgggcttaaatcgatacattcagcctgatccaactgtatgttccttccactattatcccatacccttaatatccattcccattcctgttctcc

SEQ ID NO: 116368 - DNA, 430 bp, Homo sapiens
agttcttttgagtgtagtgcacctcctcataggtcacactctcaatctccccttaggggtccactgggactttagtctagttataggcctagaagcaaacaggagtgttgggggtggctcctgaggagaatcaacattatcttgcctgacgactgcctcaggggaggtcatcactgttgcctcaggcagcgcagggtttatctcctcagacaaaggtggaaaggctgatggcagcatggactggggaggggatgttgccactattgggcatggagaagctgtttcttctggcaaaaagkgttcatcagagttgacaagctcagtgtgcccaccttcatcagagtcctcccacaccttccccttccaagttgcagggtcttattcttttccaattaatgccctcactttaacagtagacacctggtgaggc

SEQ ID NO: 116369 - DNA, 225 bp, Homo sapiens
gaaatcccacagtagttgttttgtsctttgctttgagaaggctggtgataattaaactgcttttccagcagagtctttgttcctaacccaagtatcgtatttaaagaagagccaagtagtacaggcattttttgatgatgacactaagctgactctgacctatcttcttccatgtttatttcccaaaacatacacattggtagttgaagttatttcctatgaagt

SEQ ID NO: 116370 - DNA, 225 bp, Homo sapiens
gaaatcccacagtagttgttttgtgctttgctttgagaaggctrgtgataattaaactgcttttccagcagagtctttgttcctaacccaagtatcgtatttaaagaagagccaagtagtacaggcattttttgatgatgacactaagctgactctgacctatcttcttccatgtttatttcccaaaacatacacattggtagttgaagttatttcctatgaagt

SEQ ID NO: 116371 - DNA, 225 bp, Homo sapiens
gaaatcccacagtagttgttttgtgctttgctttgagaaggctggtgataattaaactgcttttccagcagagtctttgttcctaacccaagtatcgtatttaaagaagagccaagtagtacaggcattttttgatgatgacactaakctgactctgacctatcttcttccatgtttatttcccaaaacatacacattggtagttgaagttatttcctatgaagt

SEQ ID NO: 116372 - DNA, 531 bp, Homo sapiens
ctaatgctcaattaacaaataatttaaatattatttccawtttattacttgattccccaagtctttcagtggctgccttggataataggtatgctttggaatgtacatgtgagctttcaaaagcaaaacaaaatgaattatgacattcttttatgaagtagaatttctgagagtaattcagtgtaagtaaaatcaatataaacatctatattatccctgattgatgggaaaaggataatatactatcaaaactaccttgaaagtaatcgtaaagtggattttccactcaggataccttttcacagttttattccctaggagagaatgttaggtgctattaaacctcatgaacccttgaccttggttcatataaagacagtgagaactggccccagttattaaagaaattaggcatagacacattcttgcttttatagtaagaaataataaggttttctttcactctggggacaggctattaaagctaaatattacaatgtttttaagggagagagttcgttttgacaatcc

SEQ ID NO: 116373 - DNA, 629 bp, Homo sapiens
accaaggatcaaatgagttaggtgtaggaagtaggtgtgaatataaagcaatgcgacctgaaagtccatgatcacatcaaatgtgaaagctctttaaagttctccatatgctcccggtggccctggccactgcttcttggactctgaccttctcagtcacttctctgctgtccagtaattcctgactccattgtcttctaatcctgccaactctccccacaactatgagtgattacagggcagtacttagcacatagtaggtgctcaacaaatgttggttggatatatgaagctttggatgggagggttaggccccaaggagcaggcacagagaaacactcatgagaaagccttgggtgagggcagtggtggggaatttattccctgttctcctcagccttgcctctcactccactgtacttcttcaaggcaagagatggcctgatttgtcttatttgtatctgtgatgtttcacgcagagccagtcacaaaawggttggtaactgctttttgattggctgagtgaatgagacagggtgatgtggtagagacagcatggaattaagtggtgggtagaacttgggagcctggccctaccatttgctttgggtacatacttactgcatgct

SEQ ID NO: 116374 - DNA, 511 bp, Homo sapiens
cgctaggcagttggtggttcaggtggcattgctgatgatcttgaggctgttgtcrtacttctcatggttcacacccatcgtgaacatggggggatcagcagagggggcagagatgatgacccttttggctccccactgcaagtgagccccagcattctccatggtggtgaagatgccagtggactccatgacatactcagtgccagcatcaccccacttgattttggagggatctggctcctggaagatagtgatgggatttccattgatgacaagcttcccgttctcagccttgacggtgccatggaatttaccatgggtgggatcatactggaacatgtagaccatgtagctgaggtcaatgaatgggtcattgatggcgataatatctactttaccagaattacaagcagtcctgatgaccaggcgcccaatacaaccaaatccattgactccaaccttcactttccccatggtgtctcagggatgtggttggcaatgcaagagaaga

SEQ ID NO: 116375 - DNA, 511 bp, Homo sapiens
cgctaggcagttggtggttcaggtggcattgctgatgatcttgaggctgttgtcgtacttctcatggttcacacccatcgtgaacatggggggatcagcagagggggcagagatgatgacccttttggctccccactgcaagtgagccccagcattctccatggtggtgaagatgccagtggactccatgacatactcagtgccagcatcaccccacttgattttggagggatctggctcctggaagatagtgatgggatttccattgatgacaagcttcccgttctcagccttgayggtgccatggaatttaccatgggtgggatcatactggaacatgtagaccatgtagctgaggtcaatgaatgggtcattgatggcgataatatctactttaccagaattacaagcagtcctgatgaccaggcgcccaatacaaccaaatccattgactccaaccttcactttccccatggtgtctcagggatgtggttggcaatgcaagagaaga

SEQ ID NO: 116376 - DNA, 511 bp, Homo sapiens
cgctaggcagttggtggttcaggtggcattgctgatgatcttgaggctgttgtcgtacttctcatggttcacacccatcgtgaacatggggggatcagcagagggggcagagatgatgacccttttggctccccactgcaagtgagccccagcattctccatggtggtgaagatgccagtggactccatgacatactcagtgccagcatcaccccacttgattttggagggatctggctcctggaagatagtgatgggatttccattgatgacaagcttcccgttctcagccttgacggtgccatggaatttaccatgggtgggatcatactggaacatgtagaccatgtagctgaggtcaatgaatgggtcattgatggcgataatatctactttaccagaattacaagcagycctgatgaccaggcgcccaatacaaccaaatccattgactccaaccttcactttccccatggtgtctcagggatgtggttggcaatgcaagagaaga

SEQ ID NO: 116377 - DNA, 579 bp, Homo sapiens
gccatcactactactcccatgaatgttaaaagaatactatatgaatgctctgaacaaatttatgcccaccaatataataaagtaggtaaaatgggctaatttcctaaaatatacttattaccaaaattcatacaaggaagattagaaaatatgaatagaattatatctattaaagaaactgaatccataattcattaacttctaaaatgtaatgcaccttgtccagatggtttcatctgtgaattctaccaatatttaaggaagaaaggatacaaattctcacaatctcttccagaaaatagaagtacagagaacactttctaactcatttcatgaggccactattactccaataccaaaatcagataaagatattataagaaaggaaaactacacactaaaatctctcataaaataaatgttaaaatcctcaataaaatataccaaattgaattcaataatgtataaaaataattaaacmtcaagaccaagtgggatttattctagttatgcaaggctggttcaaaaatcattccaaataattcaaaaaaccacatttaaaagtcagtcagtataatc

SEQ ID NO: 116378 - DNA, 620 bp, Homo sapiens
ctaacctccctggtcagaatgtgactttatttggagattgggcctttacagaggtaatcaatgtaaaatgagttgatgagattgggacctaatccagtaagcctggtttccttataaaaagagaaaaattgtacacagaaacaaacatgcataaagtgaagatgatatgaagagacacagggagattaacatagtcatctacaagccaagtagagagaccccagatcagattttatcctcagagcctccagaactgtgagatgctaaacttgtgttgcttaagccactctrtttgtggtccttcattacactagccctagtcagctattacaggcagtaaacttaatcatctagctttccattcttctagttcacatatgtatgtagattattatgacaagaacaatgtgtgtctatatgagttctaagtctcaatagttatgaatgttcattaagtggcgatcatagaactgtaggagtattaaaatctagcaatggacatagacattgcaatctgctctattaaaattaatttcaacacttattctcctttctcactgataaatatgcaccccactttcttaaacttgtcctttagctttgtatgccagtttcacatg

SEQ ID NO: 116379 - DNA, 586 bp, Homo sapiens
ccacaaccttcaaaatagatcaataacattactcagcaactgatatgtaggaggcacttgcaataagaatttctgagtctttatactaactctgtgaggtacatcatattatttagaccatccctacgaggaaactgagactcataattgttcaacrgaatgttcaaaatcagaaagctactatattgcaaagtctgaccaggttttctgatctcaagactgatgtaatttctacttgagcaagatgcagcagaaagtgaatgggtttttggagtttggggtcagatgcacctgcttgaaaggctgtctcacttatcacctgtggatctaaggattattctcttaatccctctgaccccatcttcctcttacgtaatttaaattgagtaggtaaaaagttaattttttataaaagcttaaaaattacaccacctgtactatgtaaaaaccctattgaattcccttcctagtatattgaacatctattatagtacagtaattaaacccatattgtcttctttagtctttttaaaaacttttgatctggaggattctaagtctttcatgaaacaacaacgtaggagcc

SEQ ID NO: 116380 - DNA, 632 bp, Homo sapiens
ttccattcaacggacagcattttaattgtggctaataaagagtacttcattgtccccaatatgatcagaaaacacaaaattagtaactagtctgttattgttctctctcaagtattctgtctcatgcacccctyggtaatccctacggctgtcaactcagcactgctgtcctatccccttccatacttctatccctccttcctctccactgctcaaattaaatagcccattcccaattcatcagacaaatcagtctgcaataacagatgacagtggcttaaagtgtaaatttacatggacacaagagatcaggtcccccactaaacacctcacccctaccctgggtaatattttaaaccagaaagttaatgagaatttatcagacttcattttctcttacctcacattaaatctggtattgttaaccacattaacttgacattataatttcctcagcttccctaactatgctggctatgttctctgacctccacctctccatttctccttctaactctctatgggctgcctctaagcctaatttttggccttatagcacaaagggcttactcattctcatgactgctgtcacctttaggttggagaagtctgaacctgtatctcctccctag

SEQ ID NO: 116381 - DNA, 407 bp, Homo sapiens
aacaatacaaattttgtacctaaattattaaatattctattttaaaatattatttccaatatgcaagcacaaaaactgagaatttaaatgcaattagtagaaaaaaacattaaggcagtgcaactaaayagtatgaactttttggtatcatctcaatgtgttagggtgtgacaatggcaaatatgtagaatctttatatttacaaattctgtatttgcaaactcagaaatagttcttgagtaacgcattcattaattttatgtgtcaacttgaagggtgggtaaagcaaattgcctccataatatttgtgggtgttatgcaatccattgaaggcctaaatggtacaaaaaggcactgcttccccaggcaaaagggaattccccagcagacttcagctgcatcatcag

SEQ ID NO: 116382 - DNA, 407 bp, Homo sapiens
aacaatacaaattttgtacctaaattattaaatattctattttaaaatattatttccaatatgcaagcacaaaaactgagaatttaaatgcaattagtagaaaaaaacattaaggcagtgcaactaaacagtatgaactttttkgtatcatctcaatgtgttagggtgtgacaatggcaaatatgtagaatctttatatttacaaattctgtatttgcaaactcagaaatagttcttgagtaacgcattcattaattttatgtgtcaacttgaagggtgggtaaagcaaattgcctccataatatttgtgggtgttatgcaatccattgaaggcctaaatggtacaaaaaggcactgcttccccaggcaaaagggaattccccagcagacttcagctgcatcatcag

SEQ ID NO: 116383 - DNA, 407 bp, Homo sapiens
aacaatacaaattttgtacctaaattattaaatattctattttaaaatattatttccaatatgcaagcacaaaaactgagaatttaaatgcaattagtagaaaaaaacattaaggcagtgcaactaaacagtatgaactttttggtatcatctcaatgtgttagggtgtgacaatggcaaatatgtagaatctttatatttacaaattctgtatttgcaaactcagaaatagttcttgagtaaygcattcattaattttatgtgtcaacttgaagggtgggtaaagcaaattgcctccataatatttgtgggtgttatgcaatccattgaaggcctaaatggtacaaaaaggcactgcttccccaggcaaaagggaattccccagcagacttcagctgcatcatcag

SEQ ID NO: 116384 - DNA, 590 bp, Homo sapiens
acctcccactccccacccttgcttcactgcataaacttggacatgccatttcatcttcccctgccctcagactgatttgacatcatcggctcctctggttctcaggactagattacaacactagctttcctgagtctctagcaacttacagactgaaaactgaagatcttctcaacctccataatccatgagccaatttctcatatttatatatttcactggttctgtttatctggagaacctttactaataaatattttggtagcaaaaatggatcttgagaaacagactttaargatatgttttctgaattggttcttgggtttctggaactggctttctaatatgattagatttaaagacactaatgaccctaattctagtagtaagagagcgttgatagtccatggtattatgaactgtttacagagatatacaaaatatctgtattgcttgcccctcctaatcaacttcttataagaatgacttataagaagaaaggagctaggtgactctgcatatgcctttaaacatttttgggacactaacaaatataatggaattggttggttgctcctaatgtccctggg

SEQ ID NO: 116385 - DNA, 506 bp, Homo sapiens
tgagacatgaagtcaaaggagatcattttggagttttaagatctgactgccctgctggattttagacttgcatggggcctatagcccctttgttttggccaatttctcccattaggaatggctgtatttagccaatgcctgtacccccattgtatccagggggtaattaacttgcttttaattttacacactttggacacaaggcagaagggacttgccttgtctaagatgagactttggactgtggacttttgagttaatgatgaaatgagttgagactttgggggactgtttggaaggcgtgattggttttgaaatgtgaaaatatgagatttgggaaragccaggggaagaatgatatggtttgtctctgtatccctacccaaatctcatcttgtagctcccataattctcacatgttgtagtagggacctggtggaggatgattgaatcatgggggtgggtctttcccattctgttttcatgatagtgaatgtgtctcatga

SEQ ID NO: 116386 - DNA, 600 bp, Homo sapiens
tcttcagaatactaattgtttactgcaaacccagagggaaggatagagaagggataaaaatgatcccatcaccctggtagtcagcatagctcccaataggtggtttttcagacctgtccccytctctccttcccctgactagtaggccccagtgtctattgttcccatctttgtgtctatgtgcattcaatatttgtctcccacttgtaagtgagaacatgcagtatttggttttctgttcttgcattaattcacttaggataatggcctccagctccatccatgttgctgcaaaggacatgatttaattcttatggcagcatcgtattctgtggtgtacatgtaccctgttttctttatccggtctaccattgataggcattgaatttgattccataacttagttattgtgtatagtgctgcaattaacatgcacgtgcatatgtctctatggtggaacattttatattcctttgggtatatacccagtaaaggagttggtaggtcaaatggtagctctgacttaagtttttttgagaaataagcaaactgctttctacagtggctgaactcgtctgcattctcaccaacagtgtattg

SEQ ID NO: 116387 - DNA, 469 bp, Homo sapiens
tttgtatgttaatcttgaaccatgcaaattttctcaatttgactattagctctagtagtttttgtgtattctattagttatgccatctataattagagataattttttctctttgtttccaatctgggtgacttttatttatttctcttgtctaatttctctgctggtacttcarttacaatgttgaatagcgtaagtaaaatgtgcctaattttaaaggaaaagtttcaaattattatggttaactacaatgttaactgtgaattttttataatttttaaaatttttttatcatgttaaagaagtttccatccattactagtttgcagactattttattaagtggagttgaattttgtcaaattctttttctacattgactgggattatcacttgtttaatttttcttctttctattaataaaggtgtattagtctgttttcatgctgctgataaggacatactcaag

SEQ ID NO: 116388 - DNA, 597 bp, Homo sapiens
attagagataattttttctctttgtttccaatctgggtgacttttatttatttctcttgtctaatttctctgctggtacttcagttacaatgttgaatagcgtaagtaaaatgtgcctaattttaaaggaaaagtttcaaattattatggttaactacaatgttaactgtgaattttttataatttttaaaatttttttatcatgttaaagaagtttccatccattactagtttgcagactattttattaagtggagttgaattttgtcaaattctttttctacattgactgggattatcacttgtttaatttttcttctttctattaataaaggtgtattagtctgttttcatgctgctgataaggacatacycaagactaggcagtttataaaaaaagagatttattggacttacagttccacatggctagggaggcctcacaatcatggcagaaggcaaaaggcacatctcacatggcagcagacgcaagaagatagcttgtgcagggaagctcccctttttaaaaccatcagatttaatgagatttattcactatcacaagaaatgtgtgggagaaactgcccccatgattct

SEQ ID NO: 116389 - DNA, 597 bp, Homo sapiens
attagagataattttttctctttgtttccaatctgggtgacttttatttatttctcttgtctaatttctctgctggtacttcagttacaatgttgaatagcgtaagtaaaatgtgcctaattttaaaggaaaagtttcaaattattatggttaactacaatgttaactgtgaattttttataatttttaaaatttttttatcatgttaaagaagtttccatccattactagtttgcagactattttattaagtggagttgaattttgtcaaattctttttctacattgactgggattatcacttgtttaatttttcttctttctattaataaaggtgtattagtctgttttcatgctgctgataaggacatactcaagactaggcagtttataaaaaaagagatttattggacttacagttccacatggctagggaggcctcacaatcatggcagaaggcaaaaggcacatctcacatggcagcagacrcaagaagatagcttgtgcagggaagctcccctttttaaaaccatcagatttaatgagatttattcactatcacaagaaatgtgtgggagaaactgcccccatgattct

SEQ ID NO: 116390 - DNA, 620 bp, Homo sapiens
acaagtaaaatgagctatgaaaccaggagaagacatagagataacttaaatgtgtatttctaagtaaaagatgccaatctgaaaaggctatatactatttgaatccaactatatggcttcttgaaaagataaaacaatgtagacagtaaaaagatcagtggttaccagggctcaggatgggggtgcaggagagggaggaatgaataggtgggatacagggaattttggggacagtgaaactattccttattctaccaggacactgtaatggcagacacaagtaactgtacattagtcaaaacccaaacagaatatatagcacaaagagtgaactctgatgtaaactatagacattggtgaggctcatcaataaaatgagtcaatgggaacatatgttgtggagcatatttttgttttaattgtggagcatatttttaaatacttatttgtcatctgcatatcatctttggtgaggtgtctgctcagatcttttactcattattaattacttgttgttttatgtattagatttgtatgctgtttaacaagttaccaaaamcttagcagcttaatacaccacatatttattatttcacagtttccattttattgatgtagta

SEQ ID NO: 116391 - DNA, 591 bp, Homo sapiens
caacctctttacctgtcactgcttaagaaaaggattttttggtcttatttagaaataactttatctatttttctccataattccactgagaccaatgtgtgcctctatctcaagcaccagcaagcaaaactgcctgccagtatgttcagtttttgtatctttccaaatgtagggcacagctatcttttgatatcataattttttgaaaactgatgcacaaacttcttcttgaaagttcagccaggtgcggtagctcacacctgtaatcccagcactttgggaggctgaggcaggcwgatcacgaggtcaggaattcaagaccagcctggccaacatggtgaaacctgtctctactaaagctacaaaaattagccaggtgcggtggcaggtgcctgtaatcccagctactcaggaggctgaggcaggagaattgcttgaacctgggcagcagaggttccagtgagccaagattgcaccactgtactccagcttgggtgatagagtgagactccatctcaaaataaaaaataaaaaaaagaatttcagatatacagcagctgtaattcttctgaaggctgcttatgggacaca

SEQ ID NO: 116392 - DNA, 526 bp, Homo sapiens
catagccagtccctctttgatgtccttggtaccagaaccttcccattttaccccacaggactcccaggattcctttctagggaagagtttratgatgatgatggtgaagatggtaaagaagagcagttacccctgattgagtgccttctgtgtgccaggcattgtgccagagcctctaaacaaaccatctctaatcttttcaaccttacgaagcatattttttgtgattcccattttatagaggagtaaacggaggcccacagagattatagtaacttgcctgtgtccacaagaaatagcagaactggaatttgaactctgggtttctctgattccaaagtccactgtatccaccaccctgtttctgtagctttccaaaagctcccactgttattttctcttttgacccaaacagtcttacgggggtgataggaagctgagatgagcagaactctgcccgttgccgaggcaaagtgcagtcagtaggctcacaggctcactggggtggaactggacctggtaccag

SEQ ID NO: 116393 - DNA, 622 bp, Homo sapiens
actagttgtgaataagcagagtggcttagggggctggagaatgagcgactggttaggaccctcatgtctggtctgggtcgttgcttttctggggcagtccaccatgcaggtttagaagyagacccggtatcagacaggtctggggttgaatcccggctctgctcgtctctggctgtgtaaccggactgcttgtttaacccctgctgggtgccaagcatggggccaggagttgtgagcaacccagtggacacaatggacatgaggctcgtagtgtagcagggaaaagacatgaaacaaaacatcacacatgttgttttgtaagttaccatcgtagtaagtgccacagaggaaacatctactgtgcaaaggagcgtgcaatgggaagacctttccttgtctaaagagtcaaaagacatcccagggaaagcttagacttaagagtgagttgcagatgaggttgttcagcaggcagaggaaacagtagttgcaaaggccctggggcgggaagggttggtctgctcaagtgatgcaaagaaggctcctgggagtggtggctctcaattgtttgtgggcttaagaatattggttaaaatgtactttcttgaatcctacctccagaaat

SEQ ID NO: 116394 - DNA, 441 bp, Homo sapiens
ggggtgacatcagcaggtgatacagggcagaatcagggccttcctccatcacctactgttcagagaggagcagccaagggtcttcaagccaaaggggctgcctgaacaaacagacakgtagaactcaaagcaggtggaaggttaaaaggtgttgctgctttctgcaaagcccactgttaacatctcctccaaggccaagagcaattctgtagcaggaaggtgcagaggcctcccaagacagtctcctggaaagtaaccactcacgtggcatctcatgggaggaaaagttaacagaaaaggaatctcacaggaggtgaagggcacaggctttgcttcttcagaccccagggacagggtgccccttttgctatgagtcgagcagcagaaacatctttgctgcagccctgacaagctgctctgtttatgagtcactagggagtc

SEQ ID NO: 116395 - DNA, 441 bp, Homo sapiens
ggggtgacatcagcaggtgatacagggcagaatcagggccttcctccatcacctactgttcagagaggagcagccaagggtcttcaagccaaaggggctgcctgaacaaacagacatgtagaactcaaagcaggtggaaggttaaaaggtgttgctgctttctgcaaagcccactgttaacatctcctccaaggccaagagcaattctgtagcaggaaggtgcagaggcctcccargacagtctcctggaaagtaaccactcacgtggcatctcatgggaggaaaagttaacagaaaaggaatctcacaggaggtgaagggcacaggctttgcttcttcagaccccagggacagggtgccccttttgctatgagtcgagcagcagaaacatctttgctgcagccctgacaagctgctctgtttatgagtcactagggagtc

SEQ ID NO: 116396 - DNA, 598 bp, Homo sapiens
tgggggtggtttctcttatgctgctgtcataatagtaagttctcacaagatctgatagttttataagtgtctggcatttcctcggccagcacttctctttactgctgcaatgtgaagaagcgcatgttttctcaccygtctgccatggttgtaagtatcctgaggccttcccagccctccagaactgtgagtcaattaaacttctttcctttataaattacccagtcttgggcagttctttatagcacatgagaacgaactaatacatatggtacagtggaaaatcctagaaattgggtatcaggagtgctgaatttgaatctcagctgtgtccttactttgaggaagttgctcaaactctctttgtttcaaaatccttatcagaataatatatattattctatttgtcctgatgaccaattgtattattttaggaatgaggtggatgtctatgtggacagtataaactataatattctatcaaaagcgagtgaatattttgcattctgtgtggcaaaacacatttgagaattattttaaaagtgtactgatgatagctataggtttgttataaggatatgatattgaagtctatttt

SEQ ID NO: 116397 - DNA, 629 bp, Homo sapiens
gatattttttaaagttattattccatttctattattttataattattattaaaaatagaggtaagccacctactcctctcaaaaggtagtttgtactcggagataatgaacagactggttaaaagtacttacaatgcagattaatgcacactgcatactataaaattgtttgataaaataagtaaagaattgactaaaaaactacaggatgatatattaaagagctaaaggttggtgagtggggagctgtatcgttaacattacttagtctacaaaattgttcttcaaagctaaagattcaataaactgaaagctcactgctaactatccttcaatcgtgaaacttctgagtgtacttttggaagatagaaaagaatcttagaagaagactgagaaataaataatagaaaatatataaattggaaaacaagtgaatamgttcaagaaaccattgtttatataaaaacaatgttcttctttcaatttgtaaggttaaaaaaattaaaatgctagacaataatagtgcataatttagaaagaggttaaccataattgcattgtgtgaaagcaattacattattcaacacagggggctgaaggcccatgggatgtgaccaactcagcattcc

SEQ ID NO: 116398 - DNA, 646 bp, Homo sapiens
tactacttatcaattttgaaatgtaaaggcaaagaatattattggaatctacagtgtcattaggatagaaggcagggagtggacttgttcataagatcaaatccaatagataaaatagatattccttgtagcttgaaaagttgtaattatagaaaaataattacagtaataaatattaaaaattaaagtatatttgattttaaatattaaaggaaacatttatttttatatggagacaataaattttccccaagagttgattaaaaattagatgattatatctaatttaatataattgtgtatcaatagctatatcattttataataattcataaatcttggcataaaatatagcaattatgaagaagaaaaggctaaatgtttcttgtctttcatgttattagtaattcaacagatgacatttatagccctgatagrctatgtatatttatacaatagttctgaagggttactttttaactgtccatcaggtttaagtcattatttttttttaaactgtgtaatatgccatggttggtatgataaattcttagaacatttattctaatgtagttagatgaaacgattcaaatgaatacaaaaatacccaccagttaggacctgatggcaaccatgaaatctcatg

SEQ ID NO: 116399 - DNA, 576 bp, Homo sapiens
agtggaaatgtgaatgacaaaaatatataaaaacaatgctcaacatcgttagacatcagctaaatgtggattaaaatcatgatacccaatatatttggaaaaataaataaattaggatgagaacacaggctgtccaagttgtaggacagcaggaaccctcacatactaccacatactgaggtaatatatattaatactatctctcaaggaaataatttgaaattgcctagtacagttgtctctccttatctgcaatatcgttttccatggttatctgtggtcaaccattgtttgaaaatatcaagtgggaaattctagtaataaataattcataagttttgaattgcacagcatgacacgcatcatcctgttgtccagcatatccatgccacatactctacctgcccattagtcactcagtagccatctcaagtgtcagatcagctcttcccatatcacagtgcttgtgttyaagtaactctcactttacttaataatggacccaaagcacaagaatagtaatgctgtcagattgttataattattttattttattgttagttatttttaattttc

SEQ ID NO: 116400 - DNA, 571 bp, Homo sapiens
tgcattaaattgcaagatcctctaccgtctgcaaggtcagatattttacaagatatttaaagagctcaaaaactgactacatgtacatcatgtttcttgcccctctaaccttgcygtccttcattttgtcctgctccagccgtatgggtcactgaaatgtggtcaagtgatttacccactttcctataaatgatcagcaggtagaatgggaagaaaacccagaccccatgtgaaactaagttgaaggtcagtacttttttttctgaattgcaggttgtaagggatatcatagtgaaagtgacatgtagggcttgtggatttggcattatcaaaagtggattgttcagctgatggtcaagaaatgggtatcatgggccaggcacagtggctcatgcttataatcccagcactttgggaggccaaggtgggtggatcacctgacgtcaggagttcgagaccagcctggccacatggtgaaaccctgtctttactgaaaatacaaaaattagctcggcatggtggcagaatcccagctacttgggaggctgaggcaggagaattgcttgaaccc

SEQ ID NO: 116401 - DNA, 526 bp, Homo sapiens
gtgttattaccagcaagagtgttgacagtgtcacatccctgttaatagcattccaaaaattggggttttattttggacattgaaattcttttcagcactataaaaaaagtcacatggaaaagcaacataggccgggcatggaggctcacacctgtaatgcccacactttgagagggtgaggcaggaatattgcttgaggccagtagttcaagatcagcctggccaacacagcgagaccctgtctctgtttaaaaaagaaagaaagaaaagcaaggtagatgtttgacaaagagcaattaggttttayggtcaggtaagggagaaggattccagcatgctggaaaaaggcagggcaggaggcagagagggtaagaaagcctgcaaaggtccatccttattcatccgtgtaatgcaaacaaaagttgtctggggctgactggagaggggactgtgtgtgatgggatctaattgaaaaccctgacaaatgaagctcatgactggcaggactaaatgaacaaacatcttc

SEQ ID NO: 116402 - DNA, 607 bp, Homo sapiens
aagcgagtgaccctacccaacccagaaatcctgaaatattcagaagccctaatgtttgtgtgaggagagagccgagcctctttccgatgggaaattcaattattcagtaaggctagagctctctgggtgtccagaagtgctggagcacaccgggaggctgaggtctctgtcccactgattggaggccgctttgctgccagtggggatgagaactggaggtcctgccccagagacccaccagccacctgccctctgttctgctccacgggtgctgtggggcttcttcccagagtacttaagctctggggcgctacccaccccctcaacaaaacacgcaattaaagtgtgacaacaacctatttcttgctacagaatgtatttctgattcagactaggctttggtttgaggcaggtgactattgcaaacacccacttcagctgctgtcagggtctggcaccaagagttgtgtgaatttaaggtgactttgttccaacagagcttgtcattatctgtataacataaacaaaggtgtacacaggtatacagtagttagatctttctccttttccgggaagtgttsttcccagcagcatcaagctggggaga

SEQ ID NO: 116403 - DNA, 566 bp, Homo sapiens
ccccttaatttgcatataattaaaggtcaatgtaaatatgactgcagaactgccctgagctgctactctggtcacactacctacagggtagccctgctctgcaaggagcagtccctctgctgttgctataggccactgcttcaataaaagttggcatctaggccaggtgcagtgggtaatgcctgtaatcccagcactctaggaggctgaggcgggtggatcatttgaggccaggagtttgagaccagcctggtcaacatggtgaaaccccatctctactaaaaatacaaaaaaattagttgggtgttttggcgcacacctgcactcccagctactcaggaggttgaggcgggagaatcacttgaacccaggaggcagagtctgcagtgagccactgcactccagcctgggtgacagagtgagaccctgtcccgaaamaaaaaaaagttggcctctaacaccttcggtttgcccttgaattatttcctgggtgaagccaagaaccctctcagtctaagccccagttttgtggcttacctgccctgcatcaacaccagaaacttaac

SEQ ID NO: 116404 - DNA, 563 bp, Homo sapiens
gttgtccaaaaaggaagatattatatttttacctcgttttatcatgagaggatcaagtatagaattttctaagtagtctgattaatgacagttttgttccttatttgggacaggcagactggatggcatcttcctcgccacacctggtcaccaaccttggccaragcagtaaatacaactgcacccatcacaaggcttcatttctggagtgtgccaaggaggggcccatatggctcctgattactcacggaatccactcaatagagatgcattctttccttagcttttaaatgttcactcccaggtgtgtccccataaaaaggctccttggaaagtggagccttacatttttatgggctaaggtattggcccagagtctttcaaaagacttcagaaataaatgtcaggtccctggttgagggatctgaggaagaggcaccaagagagaggagagggctgaccgaggggaagggaggccacattgctccccgggtttgccgcgttctcaaacctggtcaagagaaaatgctacactaactactcacaaggctggtgggttcaca

SEQ ID NO: 116405 - DNA, 568 bp, Homo sapiens
cttggagaggatgagtgtcttgttgagggttgcacagcaagttggggacacagctgcaggaaatccaagtctcctgattcctagcccatgatattttctctcccaccaagttgaaaggctgaggtgatgggaggcctggcataccacagatggaaacttgcatcgttgcccccggggctcagatgattctctaaaaatgtgtctgaggaagtgagagtgcagggcctctcctcacacgttggagctgtaagtagggcacgtgctttcagctccaggcaggactggagaaggttatggaagggcagccaaccaagaagcacttatttaagcatttttatgtgcctagccctgagctaggcatagtagggcataaaggagctttgaaggaccctcccaacacagcaatttcactgcagctggtgagcaaatttaactcacaaatcaattacaaaaacaacctcrtgcaagctactgtttgtgtaataaaatgtaagaacatatatttgtatttgcgtaaaggaaatctggaaggatataaaaagataataaaagtgttaactaaacagtt

SEQ ID NO: 116406 - DNA, 498 bp, Homo sapiens
tcagcatctactatggggtaggcattgtgtgaagactggggaaatcaagttgaaggggaaaatcttgaccattagacctatacgttagcagagggactgacactaacacaagctcattaccatgtgctatgtgggaggtaaagggtgctctgggaaaacggaaggcagagactggagatgtgatctgaatttgccaggcaaaggaggaagtatatgaacaaaattattctaggcagatggaacaaaaaagaggaaggtgcaaatcagtgtggtgtgttgggaaaattgcaaatggttgactacygtaatgacaaggcagaggtacagaaggtaaagagaaaatgatgcaagatgaggctggatcatggagggcttcataaattatgctgagaaatctgcactctatctaatgaggaggtgggaaacaaccaaaagataaaatattctggtagtgaaagtgaagatagatttaagagtcaaaagccagggcaaattatg

SEQ ID NO: 116407 - DNA, 607 bp, Homo sapiens
cactcagaatttactgtctagtctgattaaattatagagtgttgaaaacattcttcaaacaagcatataatttgcctatgaaaaaaatacttaaaagtaggggggctgtccatgggactgwcaataatgtttttactagctaaactaaaagtagattttacactttagttaatctttctctatctctctctcctaccagataattttcaggatcagatgaaaagggagctagcctaccgagaagaaatggtgcaacagttacaaattgtaagctgcatttctacttaaaaataaatgcaacttaattggtttgttttcagactacccaatatgtatgaaactgttcacgtttttgcatgaaatcctttggtccacttacctctcagctggcttagatgctaattaccaagagatttacttagacacaggataaacagatgtggcagtatgtttcctctaaatgtaactacctaccatgtgttaatagacagatgtgtaaattatctctgtgggtaaaccaaaggtacctgcattttcttccattatgcaaacttcccaaacacagtgctgggctatgctacgagctcagtgaagggcaactgtcttc

SEQ ID NO: 116408 - DNA, 584 bp, Homo sapiens
gctcatttaactataagagccaaacgaatggtcaggtgacctgttccgttggtggacatgagagaggagaagctgattaaacagttatcactcttctcaagctgaactctgaattcaataaataagagcatttaaatattgtgtcctgtacacatgtagggtataccatgtatatggggtacaatatgaaacttttgccatttgaataaagakcaaaaaatgtggcattcacccatcccttctatggaaatacattctttctcctccccaccattttcttttctttttcttttttttttttttttgagacagggtcttgctctgttgcccaggctggagtgcagtggtgtgaacatggcttactgcagcctgtccttctgggctcatgcgatcctcccacttcagcctccaaagtagctgtgccactatgccaggctaatttttaaaaatattttgtaggtctacctatgttgcccagtctggtctcgaactcctgggctcagggaatcctcctgtttcattcttccaaagtactgggattataagcatgagccactgtaccaggctgcccccagtcatttcat

SEQ ID NO: 116409 - DNA, 651 bp, Homo sapiens
ttgtataatcacatgtctggccatttctcccttcaagcaaagttccaaaccaggtgccctgccctaagtcctacccatgggaagatttgccttccttcctatctttgaggaatgtccagacagggactatagttctacagtggtccagttttcagtggttatctgcatattgggtagaaccatccataaaccaagcccaagttttctctttttttgtcaactgaacatagggtattccccatgaggccacagatgcaggctgggagagagaatgcagggtagcaggattgaagattatggtcacttgggccaattattcatgtaacttatttgtaccttcaggcctgctcaagttcaataacatgtataccacttgcatttgataatatagtgttactatgcaagcccaacattgtggcttgctgggtcatattatattcagtatacgattgacagctcaggggtcatagtaacttggtggcctatggtcaagcattcagtaacgcccaatagcaagccaagagttgctcctcaaaaggrgcttatttaattgcagatgatggcaggctcttgctccagaaccctaaagacttcctctgtgattcatgcatgggcacctgccaaaggcttcaaacaccatgcctatttgca

SEQ ID NO: 116410 - DNA, 552 bp, Homo sapiens
cttaatttttaatttaaattatctcaaatgcagtgtttcttttataccagatttatagcagatttttattcaagaatagctcagacactaacaatccatgaaagacttggctgattccractttttggtttccaccttggtgctcagataggtataatttgcattttcatggcttaacgtttatggagtcattcaaaatacatatttgtggttttcccacagagatacttaagttcactggtatactatcataatacagtattgcagaatgatgagattaataacaattatgggtaattcagtgcacttattgatggtattataattttctcctcaagaaatatatatggagtagataaagagtatagcaacctgtataatgaggagaggtcagctaatgaaaccagcaagacctggctcagtggaaagtttttggaattatgtggaccagagaaatgagaaatatccttcaaattagaaaaataaattattttttactgatatttcactaaaaaggaagcctagaaactcatgatactcattcattttgat

SEQ ID NO: 116411 - DNA, 518 bp, Homo sapiens
aataagcacatcaaactatattcaacacaataaacccctcaaggaaatgcagagaaaaatcaaggggagtgatgtggtttggctctgtgtcctcatccaaatctcatctcaaattgtaatccccatgtgtcaagggagggacttagtgggaggtgattggatcatgggggtggtttcccccatgctatttccatgatagtgaggaagttctcatgagatctgatggtttaaaagtgatagtttctcctgtgctctctctctcctgccacaatgtaagacatgcctttcttccccttcaccttccaccatgattgtaggtttcctgaggcctcttcagcaatgcatactgtgagtcaattaaaccttttttatttataaatyactcagtctcaggttatctttatattagtgtgaaaacagactaatacagagaattgggaccagaggtggggcactgctatgaagataaactgaaaatgtagaagtaactttggaattgggtaacaggaagaggttgg

SEQ ID NO: 116412 - DNA, 472 bp, Homo sapiens
gaaaacataatggcaagttatttaagatttaaaatgttatgcagcaaataaataggacgctgttgaaccccaagctcaggtgtgaattcaatggatgcattttggcttttctttcaattccrtgagctgaacaaatcatgcttggaaagaatgagaagaatctgccaataacacattcaatcatcatgataaaaacatgcaaaccaaaaagatagtcttcatttgggtctagatagcaattagagttataggaggactcctctccatcagaagcgtagatcgcctcactcaggggaaagtcccaggtcagatattttaactttttatttcatcttggccatcttcacacccagtaaacccctctgtctgatgtgaggcaagcccaaagccatgccatgtaaataccgctctctacctggaactctcctagtgtcctacctttctagcttgttctgaaagtcttctatttgta

SEQ ID NO: 116413 - DNA, 606 bp, Homo sapiens
tcagcccagaacctgatttcagaagaaacacttcttgaagtagcccaacaatctgtgtgacctgacagcaacagggcagtcgttctttgaataaatataaggttttgagccctcagctcatggcagtcatttcccaagacctcttgggctgtccagataattcctgagaagccagtgatttgtatcttgctctatttgccattttcgggggtggtgtgatgtgagcactctgctctgtcttgcctgttggcgaacaaaccttggtcctcccttcatgtgaagaacctgaatggccttcagtcttttgccccctgagttctctgtcatkgttaaaaccgcagccctcttccccaactgctgccccgatgcaaggcctcaggaaccatataacaataaactcaagcccaaaccatgaagccctcccaggtgcttaacaccgtgctgatttttaaccttgcccgacaatgctctcgcctttatccacagtcatgtggcctggttccgataacggggttgttttctaagagaaacagtaatgtcgaacaccaagttgacaaaataaagaagaataaaatagacattatgaataaaatatgtgggcacaaa

SEQ ID NO: 116414 - DNA, 644 bp, Homo sapiens
actgttgagatgcaactctaacacgtcctagccttatgatttcagcatttaccctcttggggctctgcttttcctctgtaaaatggggataatgagccctaggacctgtctaacctccaggactgctgtaaggataaaacaaccttcactattccctttatcacttatttagccaatctttgtcatcgcactgaacacagggcatcarttctttctaaagaccacaaaatggcaaagctaatgacaaatgaaaacaattgtaacatttcacagagatggttcatatccataacacaggaagagtgcttacatacaaatttaaatatatatgggccattaaaagttggcaaaagtcaagaatatgcattgacttttgccaataaatgtagaaacaaagaaaatgattttgtgtgggagaagcagcacaaaggccaataaacatatttttatgttgatgctcattttgaaattttgaaattgcttggttattagacctgctactggatggtgtgatttagtgtgttaatgataatgcccacgttttactatgtcgcattctgagacagagtcctcaggctttatcagagtgccagaggtctatggcaaagaatccctgatctataggaatctgataaaatgaagta

SEQ ID NO: 116415 - DNA, 528 bp, Homo sapiens
caaatcttttcttaaagccccaaattgtcaaggtgaagaagctgtgagagttgaatgggctaaagcacaatgaatagttctggaggaagctgaggctggggagagactgagagggaaggaggctccaagcccaggatgaggggcaagaagggaaaaatcagatgcttcaactagtaaatctgggcttaacaattcactggggaaatgcttgctatggaaaaggaatagtacattccttttccacatactaagctattccacagtatagctcaaaatggaagcaaagccaccacctgtaataaattgcragcaaagaaagacacctgggctgtcaagatctaacatcaccaaggctagcccaccactcccagtctaaaacctatctccctgtcccctagtctaatacctactatggccagcaagcctcttcattctctcagctctttccaaagcccctagcttttgttcacaacagtccatccatctttcctagaatggcccccccttggtatatcccactcaaagcca

SEQ ID NO: 116416 - DNA, 528 bp, Homo sapiens
caaatcttttcttaaagccccaaattgtcaaggtgaagaagctgtgagagttgaatgggctaaagcacaatgaatagttctggaggaagctgaggctggggagagactgagagggaaggaggctccaagcccaggatgaggggcaagaagggaaaaatcagatgcttcaactagtaaatctgggcttaacaattcactggggaaatgcttgctatggaaaaggaatagtacattccttttccacatactaagctattccacagtatagctcaaaatggaagcaaagccaccacctgtaataaattgcaagcaaagaaagacacctgggctgtcaagatctaacatcaccaargctagcccaccactcccagtctaaaacctatctccctgtcccctagtctaatacctactatggccagcaagcctcttcattctctcagctctttccaaagcccctagcttttgttcacaacagtccatccatctttcctagaatggcccccccttggtatatcccactcaaagcca

SEQ ID NO: 116417 - DNA, 700 bp, Homo sapiens
catttatcaacagacttttatttccagacgagctcccttaccttttccaggactgagtctggactacaaagacctttagttgtccattagcttcaattaggagacctgcagaaagtaacaacaacaatattaaatgcaatatataaaagacctacaaagctacagttrttaaaaactatcattatcaaagattctgtaaaataacatcacaaaaagacaaatcactgttatgaaacaactctggcaacaaccaggaggatacccagtcttaggagaaggattgaagctgtggttactcctagtgtgcaaatggtataggttacttggaaatggtgtgactatattattatagagtcagtgtgatcatttaaaatcaagatattaataaaagaaaaaattcttacaatagaatgttgaataaaatgtagcatatatttaacacagagagtattaggcaaacattaagaagaaatcttatcagaattgtcagtctcaccctgctaccacatgaaagccagtgaaaaccttttgttctcttcctattctcagtaaaatgtcagtttccaggagcaggggactgactgtcccattccaaaaggaagtcccagaggctgtctggaagtgcgtgtttagggcacacacatgacagcttgaagttcaagagtgtgcatatgtgcaacacactcaaacacccaaagtc

SEQ ID NO: 116418 - DNA, 587 bp, Homo sapiens
atcagtggatgccttcaaaggggagtaagcataggcaggggtatgcattacataatcagatttgactgtattgtagagaacagtttagagagggaggagtgaattaatgcactgaraaacagtagtgtgctgttgcattggtctagtagagagataatggtaacccgaatgatagtggtcagactggagatggtgagaagtggaagattcaaaaaatatttaggaggtaaaaatcaaggagatttcctgatggattggatatgaaaaacaagggagaaggagaaaaattccttcttccttatgtatcaaactagttcttatcttttaagaccgttcacatatcacccatgcagtttagcattttcttactatcccagcagcaataagaagggagctcatgtctttcaggttcctttggcccaatattcagatctctgcacttaaagtaacttccctgctaaaataactgtccgctcaatggataacgggtttcatgaaagcaatgatcatgtttcattctttttttttaatattccaacatctgatatcataccagtcatataatagacgttcaatgaaattgttta

SEQ ID NO: 116419 - DNA, 674 bp, Homo sapiens
ccagatgctttagttttttctctgtggtagtttgtttctctaaaattctagcttaaatgcttttaatacttagactactaatmgtatattatgagcttggcttctctatgactcatgtcaattttatgggtatagttttaagcctgaattttatgattgttgttagtctatggcactgtgaaaatgttcagcacaattaccattagcaaatcaggtttttctaaatagatcttagaactttctctctacatgccttccataaggtttatttattgtgagtaaaactaattttaattatagtcgctgaaatatgagaaaatgagattatgacatttgaaaatatatacatgttttgattctcttattttactttctgaaagaaggctgttttgttttttgccattgaaagaatttaaaagaaccacttaaaagaattatattgtgacccttgggttagcaagcacttcatggttctcaaaaccatgattcctagaggaaatagagtttgaaaaggatgccaagtgcatcccttatctccttcatctcaagaaaagcttaccggttttctttaatttgtttagaaagcacaaacacaactgcttctgtattcaggaggttgtgagtgggctgcggcagcccgttggtgccctgcatagtggggatggctcgcaacg

SEQ ID NO: 116420 - DNA, 674 bp, Homo sapiens
ccagatgctttagttttttctctgtggtagtttgtttctctaaaattctagcttaaatgcttttaatacttagactactaatcgtatattatgagcttggcttctctatgactcatgtcaattttatgggtatagttttaagcctgaattttatgattgttgttagtctatggcactgtgaaaatgttcagcacaattaccattagcaaatcaggtttttctaaatagatcttagaactttctctctacatgccttccataaggtttatttattgtgagtaaaactaattttaattatagtcgctgaaatatgagaaaatgagattatgacatttgaaaatatatacatgttttgattctcttattttactttctgamagaaggctgttttgttttttgccattgaaagaatttaaaagaaccacttaaaagaattatattgtgacccttgggttagcaagcacttcatggttctcaaaaccatgattcctagaggaaatagagtttgaaaaggatgccaagtgcatcccttatctccttcatctcaagaaaagcttaccggttttctttaatttgtttagaaagcacaaacacaactgcttctgtattcaggaggttgtgagtgggctgcggcagcccgttggtgccctgcatagtggggatggctcgcaacg

SEQ ID NO: 116421 - DNA, 538 bp, Homo sapiens
tctgtttctacacccaggggaacctctccccagggactgcgcgcgcgtgcgtgcaggtgtgtgtgtgtgtgtgtgtgtgtgtgtgtgtgtttgtgtgtgttaaaacgaacactaattccgcgcccagcttctctctccgtccacctgcggcccaagaacttgtgttcccagatggtaccagcggggcccggcttattcccgaacacatgtggggacctgaaaggggcgtcggggactaacccgcccaaaccgtggcaaacactctgggaggccgactygggcttggcctgtggcccgacacaccgccccactccgcgcacacgcgtctgtgccacttcagtggcttgcaggacctccggcgaggatgagtctccaaaccatctcagcctactcaacggcatctgggatgtccccctgcctctaagtcagaccccaagaaagatctttgaggacttgagcttcacgttgaaaatcagtgtggaaaatgggggtgtcagtgcggctgggggagacaaaggggcccaaaagctccctcccg

SEQ ID NO: 116422 - DNA, 552 bp, Homo sapiens
tgctcagcattcattacctttatttctaaaggtttactttcttagataatacaattgttgttgtgggaagtcagggactctgaatggagggaccggctgaagccatggcagaagaacataaattgtgaagatttcatggacatttattagttctccaaattaatatttttataatttcttatgcctgtctttactgcaatctctgaacataaattgtgaagatttcatggacacttatcacttccccagtcaatacccttgtgatttcctatgcctgtctttaccttaatctcttaatcccgtcattttcataagatgaggaggatgtatgtcacctcaggaccctgtgataattgcgttaactgcacaaattgtttgtagagcatgtgtgttggaaaatatgaaatctgggcaccttgaaaaaagaacaggayaacagcaatgttcagggaacaagagagataaccttaaactctgatcaccggtgagctgggcggaacagagccatatttctcttctttcaaaagcaaatgggagaaatatcgctgaatt

SEQ ID NO: 116423 - DNA, 298 bp, Homo sapiens
gtgtacacttttttgcctttttwtttctcccagtgttttctttacctggttgaataattcagatttcaggccagtagggtaggtgtccctgaatgaaaaccagcagattggtaaatgcaatacccaatggtgggaagaagtccaagccttgactgaggcatctgtgggagctcttagtgaaatgcactgaggtcttttcacggggaagggagggagccacttcagctcccttgccaggcccccaggaaagcaggtcacacccctaaatacagttctagctattcagattagcaggccc

SEQ ID NO: 116424 - DNA, 351 bp, Homo sapiens
tggaaacactggttgtctctgaagaagagacagggctttggcaatattcaaattaggctttaactgtttctgaaagtctcagttctctataagaagaaggtattacttatgtaatttttaaaaattacatatwaagtactaaatgactgaagcttcttagaattgatgggggcaggcatcacatgggcagcaaggcattcacataatggagaatcatggtctcctgtagatgtctaggagtgataaaattaactaccttttaggtggtgtagtttcctggctgagctgataattattaagttaatgattagtaggttatttctcaacacagaagagattattagtgtttca

SEQ ID NO: 116425 - DNA, 259 bp, Homo sapiens
tattattccagccagtttacaatgcaggcttcccattttgatactaattttaacctgacttttatatatcaatattaaggagatgaaaaataaatgtgattgattgtctccagctctatatccctccaaggagagctttggaactgaaatcctaatcaggggttacatttttaatatttttgtctcaaatgaatttgragtcctccatattatttccaaagttgcagagcagaaaagaggttaccaataaaattgggta

SEQ ID NO: 116426 - DNA, 259 bp, Homo sapiens
tattattccagccagtttacaatgcaggcttcccattttgatactaattttaacctgacttttatatatcaatattaaggagatgaaaaataaatgtgattgattgtctccagctctatatccctccaaggagagctttggaactgaaatcctaatcaggggttacatttttaatatttttgtctcaaatgaatttgaagtcctccataktatttccaaagttgcagagcagaaaagaggttaccaataaaattgggta

SEQ ID NO: 116427 - DNA, 294 bp, Homo sapiens
gatgtaaactgtgactctgagcacaaatcccaatgctattgccaatttaattccaatttttgtgttyatacatgaaatgtagtttttcttttattgagttttaaaaatctgtaagatttacctatctgaatatacactcaggtctagcttcatgttcctgtgacctgtgtggtcacacgaggacccatgtacataatgacctcatacttggcctaatgctctgctgttgccatcttgaaacgcttaacactttgaacgaggtacaacatccatttcattttgcactgggccctg

SEQ ID NO: 116428 - DNA, 294 bp, Homo sapiens
gatgtaaactgtgactctgagcacaaatcccaatgctattgccaatttaattccaatttttgtgtttayacatgaaatgtagtttttcttttattgagttttaaaaatctgtaagatttacctatctgaatatacactcaggtctagcttcatgttcctgtgacctgtgtggtcacacgaggacccatgtacataatgacctcatacttggcctaatgctctgctgttgccatcttgaaacgcttaacactttgaacgaggtacaacatccatttcattttgcactgggccctg

SEQ ID NO: 116429 - DNA, 294 bp, Homo sapiens
gatgtaaactgtgactctgagcacaaatcccaatgctattgccaatttaattccaatttttgtgtttatacatgaaatgtagtttttcttttattgagttttaaaaatctgtaagatttacctatctgaatatacactcaggtctagcttcatgttcctgtgacctgtgtggtcacacraggacccatgtacataatgacctcatacttggcctaatgctctgctgttgccatcttgaaacgcttaacactttgaacgaggtacaacatccatttcattttgcactgggccctg

SEQ ID NO: 116430 - DNA, 294 bp, Homo sapiens
gatgtaaactgtgactctgagcacaaatcccaatgctattgccaatttaattccaatttttgtgtttatacatgaaatgtagtttttcttttattgagttttaaaaatctgtaagatttacctatctgaatatacactcaggtctagcttcatgttcctgtgacctgtgtggtcacacgaggacccatgtacataatgacctcatacttggcctaatgctctgctgttgccatcttgaaacgcttaacactttgaacgaggtacaacatccayttcattttgcactgggccctg

SEQ ID NO: 116431 - DNA, 651 bp, Homo sapiens
caccacctgacttcacacccacagggatctgagagtgctctgttctgggggcaggcactctcagtgctctctgactgaagctctgctcccctccacagaaggccattcccagacttttttccttctgcaagtgctgatggaatatcacatttaaaagattctacagtagttcagggaaaaaaaaaggtgatacttagtaagcattacagaaacatgttcgggctaaatacaatctaaaatatcagtattatctaatttacttattagtaggttttgctaaacttctctttttgaagtatcatttcmatatcaaaacattaaaaatgttaatgatctctaatgtcatcaccttgacatagtttattttttctatgtttctttctagtctaactatatcaattcatgttttttacatagaggtaataatggtatgcatacaattttatgttgtttttattatttttatagtgctatatttatttttttcataagtatactattagtgcttataatatatcttagagttacttaatcgtatatttatagccattctctaattgctggatgcttacttctaaagctttatttataaataatgagatgatgtacatcttcaggccttgaagcatctcaacttattttaattatttc

SEQ ID NO: 116432 - DNA, 389 bp, Homo sapiens
taaaaattttatttattgtgtatgttatggaaaatattaagcctgtaaaggttctttgtctaaggcttgagacaatcatcattattcatatgtaattttttaaactctataaaaaatgtgtgaataatttctagaygactgttaggtgaaaaatacttcatggaaccatagtatgagcaaatatctgaagccaggtatatctagaaccacgggagttgggatatagcgtgagcaaagaaggagagggggtaggttttttccagtcaggggtacagatagctgtagcaactttgtttgtttgcttttattttttatttttttaaattttactttaatttctaggatacacgtgcagaatgtgcaggtttgttacataggtatacatgtgc

SEQ ID NO: 116433 - DNA, 594 bp, Homo sapiens
acagtgcactaggaagcaatgctgcaagcgagggtccgcttaaaatactaaaggaagtgctagacatgccatctggaaaatccaaagggcaaaaagaaaagagagaacgacaaaggaatgggaagtgggtagtagacctgcagtacggagatgggacaggtggccaggggaatatgggatgataaacaccttcaatcattgaacttctcataaagaaagacactgtgctaataatacatgcaaaaggaagtcagacaaaagagaactttttctctctctctctctctccgtctctgtctttctctctctctctcacacacacacataacaatactgtatgtggcttgactttatgtaggaagtaggtactcactggcaaagaaattctcattactgccataacgaaattttcatgcttctgggatgtatrtgattcagactagtctgcaaattacttaaataattttacctatcaacgttgggtctgtcactcatataaagggaaagcaaaaccatatcatctggtgcactttacagctcaatgtcacctgccatattttcaatcatcttgcatgcacaattggcagtaggcta

SEQ ID NO: 116434 - DNA, 567 bp, Homo sapiens
gggaatgaaaataagcctgttgcagaaagctgggcaagatgtgatggggaatgaaccactgtgatggcagtgaaagcgtcaagatatattattttaaaggagaatccatgttaagtgctatttgacacctatgcaggtgagacacaggcttctggtctgaacagctgggtggacagtggtgctgagaagaagccagggaagaagcagccttgcagagcacattgagaatactgttctgagcatgtttaaattcagacatagaaggaagttaccrgtgaaatgtcaggtaagcagctggatgtatataaatgtgattctccgaggagatgtctgagtgggcaatataaatgtgaaagtcatcagcataaaaatgacatgaaaagcatattagatggatgacaatatctaggagaagagtgcatggagaggtaaacagagtccaagttcgaatcctcagtgattttaggaggtaggtttgggtggaaaggaagagccagcaaagaaaaatagaaattagtcaactgagcagaaagacatccaagagagctggtgtcaggaaaaaaaaaa

SEQ ID NO: 116435 - DNA, 619 bp, Homo sapiens
ctccagaatatgtttggaatgcagcatcctgagataaggaggggctgaccagaagakcatgggctctgctaagtaagctcttagaaacaggatgtccttcaaaacattaaccgagtttgtcatgttaccccaggggtataaaatacagagcaggctgcttttcggggtttcttagacacagtgcaagtgagaatgcacagacaagattccatctacttaggccactttcctgagccttgggggtgccacttatcatgaattctaggcttctgctgaacctcacttcctatgcataataaatctgcttcatgtgacttgttgtgtggaacagtggtctgtctcactggactcaggcaagttggcaaccaatgagcagtgaagctaaatcacagtaggatttctgagtcatatcatagttatattttcaattttttgaataacttccatactgttttccatagtggatgtaataattcacatgcccaccaaaagagtacaagggatccattttccccatgtccttactaatacttgctatcatttgtcttttttgtaatagccatgctaacaggtgtgaagtgatatctccttgtggttttgatttgcatttccctgatgg

SEQ ID NO: 116436 - DNA, 619 bp, Homo sapiens
ctccagaatatgtttggaatgcagcatcctgagataaggaggggctgaccagaagatcatgggctctgctaagtaagctcttagaaacaggatgtccttcaaaacattaaccgagtttgtcatgttaccccaggggtataaaatacagagcaggctgcttttcggggtttcttagacacagtgcaagtgagaatgcacagacaagattccatctacttaggccactttcctgagccttgggggtgccacttatcatgaattctaggcttctgctgaacctcacttcctatgcataataaatctgcttcatgtgacttgttgtgtggaacagtggtctgtctcactggactcaggcaagttggcaaccaatgagcagtgaagctaaatcacagtaggatttctgagtcatatcatagttatattttcaattttttgaataacttccatactgttttccatagtggatgtaataattcacatgcccaccaaaagagtacaagggatccattttccccatrtccttactaatacttgctatcatttgtcttttttgtaatagccatgctaacaggtgtgaagtgatatctccttgtggttttgatttgcatttccctgatgg

SEQ ID NO: 116437 - DNA, 627 bp, Homo sapiens
agcaacgaaacaaacaggtacattctgattcacagtgttagtaatacaaaaatagcagtcaatactaaaacctatgcagatgagttgaaggacactgattagaagaggtattaataaggtaattttctattcaatagtcattttcttcttcagctttttatggacaaattattatttttttaaagaaatgcagtatttaaactctgcctgggaaatcatgaaactctgaatctttaactcaacctttattagaaaaaagacaaacaaaaaacaagtgtgctagcgctggaattcttttacaagaaaagcttcagagccaacatggttatagatgccccatcagtagcatcctatcctatctagatctcttcctgttcacaatgcttgataaccatagcatacacatttatcattaacrtaagtgtaagatacagtttagaataagaaggaggtttacattttagagacagttctatcaaaatgaaattctttaagaccaggaatgtaaaggattaaacatcaactaactggtgtaggttgtccttaatgttttacttttaagatcacagaagtaaaagtacaactgcatctttattgttagaacaaggttgagtgttttatagtgga

SEQ ID NO: 116438 - DNA, 632 bp, Homo sapiens
atgtgaatgttgtttctgctttgttcaatccccatgaccaaagcttgtttggggctcctttgctgagtcagtttgcatgaataaaccataaagaatgttttgcttattctaccagtaatttccgcatttcccaaagcatgttgagaaatttccagtataatttcagaaaaaagctatatggtgcgtggttgatttaaaaaaaaaaaacttaagactagaattgatgyagaagggaagagaataagattggcacaaagaaaaaggttacttaagaaaagacttcaaagggaagagtcaaatattttcgggattgattcctacttgttccacatcaagaaccaattcttcccactgggctgcagaaaagctttgctgcgagatcagtgcttaatgacctcagagctgggagctcagcaagataggagctagaacagttactgtaccatagcaaaagaattccttcctttcagaaaggcagctgagttactgaagtatattcacgatatatttttaagtaatagaaatatttcgatatataacaattatatctatttaaggacatgatgaacacattctgctttatagaaattacaaagaattgtcaatactttggccaaaaatataaacgtata

SEQ ID NO: 116439 - DNA, 659 bp, Homo sapiens
gaattgtgagtatactgagagtaaaggcagagatcacgacagagagatatttgctgactttgtccttttggcaaagctgtccaataaaaatataacattatgtccatttaaatttgatagtagctatattaaggtaaagtaaaaagagataggtgacattaattaaaataatacattttatttatcttaatatatgcaaaaatattttagcacataaatggtgttaaaattattaataaggaattttatgttcattatactaagttttcaaaatctgatgtttattttacactttcagcacatctcaatctggacactaaaatttgaattgttaaagtgtgttttgagtcatgttaaagaaaacaatattgtgcaccatttcagcttctaaattcaagttcaaataaattacaaatttagatcttgaactgcagtagccacatggcagrcgcttaacacacaatgagtggctgtcagttgactctagacttagttctcctgggtttacctacatttgtttacacaacttttattggaaaattcctgtttggggagcatttttcaggtcatgcaagccataagtatctgattttgtacattattgttgtttatattttgtcaaaatcgaggaagaaacaaggagttggagtcagataaat

SEQ ID NO: 116440 - DNA, 646 bp, Homo sapiens
tcccccttgactttttttttttttttgaaagggagaatgtatttctttttgaagaagtttacattgaacctaggaaaaacacaggttttcaatgtttttttttttaaattggatttcttcctcaaagactgttctagttcccccttcactgtcactgaagtaatgctgagcataaatctttcttgaataatgacaaatttttgtgtagttctatatttaggaggtatattacacttgcctttgtgattttatggatattaggttgggattgtggttaagctaatgaactgaagaactcaatctgatggtctcatcattcaatccagcagcctgtcttaaatttcaggctaatatctatgtttatacatgattgcttagctagaattctttaggtgtgataacattgttcgtattcaacccaagctgaattttaataccatgactttttaaagttcatttaaatatacctttaaastttttaatcttttatgattttcacttaaattatggcattgttgatttaacattatgattgtatttatataatatgacatagaccgatagagcaattatcgtatgccaaaagtatatgtataatatttgggttgctatattggctcaagcaattgcattcgttgaaaccacc

SEQ ID NO: 116441 - DNA, 600 bp, Homo sapiens
tgatttctctatcagcccttctccctacagcaagttagaaaattaaaaacctatatttccattggttatttaagaataatattccagaattccctcatttttcaaccacacattaatctayctactttttcaatatcctgagtttaggatactgaggaaacacatggtgtttccacataaccagccaaggcttaagaacagaatggggggactgcattttaagaatgtcactcttgaggcagtaataccacctacaatatctagggtcaccttgtaggtaggcatttatcacccttttatgactgatgaaacctagactctgagtttatcactgtgagtcaatttatttgctcttttattcactcatttactcaaaaagcatttgctgattgatcacttgccaactgtcctgggaagatgctggagatgcaaattgaacaagatgctgccctcgccctgctctcaagtggctcacatctcttccaaggctgttactaagccatgaggcctggggtctgtagagggctctttccaggatcccactgctgacaaaggtcaatggtagggcatctgctgaaaggtgaagtaatagatggtcct

SEQ ID NO: 116442 - DNA, 621 bp, Homo sapiens
tcatttatttatttttcttgtctaattgctctggctaggacttacagtgaaaggacttttttttcctctctcttttatatttcaaagcttttatagacgttgtatctgagtttaaatcacaagtctatatcaattagttcattatgcattttaagttgtaattatgcagctcatctctaatatgccaaattctcttaaacattactaatgttttataattaccaaatatgaacatagcacttgaccaaaagcatcaataagattgttttaattcttttagacatttctgtacttaattctaaatttttctrgggttaatgtttagctactaaaggaattatgtcatctccatcattttagagttgcctactcatcctgctggaggttgtggttgtatatcatctaaagatttaagtcaagccattcattgaattctgacagagcatactgagccttacttaagaacttaaaacagtggtcctttcatcctcttaccctgggaagctaaagtccatggtgcttggaatagctctgtgtctcccttccaggctgatcgtctgccaggtttaacttttcttttaggacagagattgtcttacccatctacctccaaaggctgta

SEQ ID NO: 116443 - DNA, 620 bp, Homo sapiens
ttgggttccttctgagactatggaggagaatctgccccctgcttgtctcctcgcttctggtgttctgtggcaatctttagccttctgggcttctgctgcatcactctaatctctgccttcatctttacatgacattctcgctccgtgggtatctgtgtcccaatttcccctttgtataaagattccagttatattacattaggggccactctattccagtatgacctcattgtaactaattatatctgcgatgactttatttccaaacaaggtcacatttgatatattaggtgttaggatttcaatctatgaattggggcaggagtcagggtgggagaagataattcagcccataacaactggtaacagaccaagtgattcyaattctttcccattatagctggattaaagctggtggatgttaacaatgtaccatttaattttgatcattgacttctgtatttatttatcaacatctatgagacatgtaaacttacaaagtagatgattgcgaaagaactgaaataaatactaaacaaatgtttaactaaataggaatttctcgtaatgagaaaatttctagacatgcgcagatggaggccacatcccaagcaggtaaa

SEQ ID NO: 116444 - DNA, 558 bp, Homo sapiens
ctttcctgtcacctgaaagaatgaaaattattcaaagtttctcttgatccatgtctaaaagacaactaagaggttcctttgaatttgcaggatattgtaggtcttaggtcccaaatctttccttgttggcatctcrcttgtatgaacttgcacaaaactctgacccagagcctttagcgtgggaggataatcatgaacaggcttcagccaaccaaaactggccctaccacaacctccagccttaggactctgaaattatagcaaacctgtatcactttcacttcattcattcatgaacataacaacgaggctttagaaattcttacttaagaacacagaggaaaacataggcccatcacttaataggctgcaattagacccagtagctaaggtggatcccaattgtttaaaggtagtagcagaagcatccagattggttgaggtctcatctgagctgattttaggaaatgaattttattcgcaagctccacacgctttggaaagtctattaaattccagtcaaactcaacatttctcagcaagtagactaacatcttt

SEQ ID NO: 116445 - DNA, 595 bp, Homo sapiens
tttccaggtttttggtcatcttatattctcctgtccccattaccttaggcctccacaccttcctgtcttcccaccacaactactgctagtcttcaagtttagcctggctttgtctgccttttcactcctgcaggcaggttgttgtgggcccagttggaggaagtcatgcagctgagtagattgatgccaatctatgtgtgtggtctgccaccctggctgagtcttcagccccaccagcagtccttccatgggaacgtcagctcctctgctactcccctcaactgttctttcagattctgtttgagacatctacccaacctgtccattctgccctttccttttccctagcagaaaaaaatagaagcctagcatgaattyagtagcattgaattcagtctgttgaatagtctatcccacaatcgacaaatttatgtgcagtcatttttaacctcttcattcagcaaaggatcagtcgaaggcagaccttataccccaggttctctctgccacctcagtaaacttgtgtcactcttataattttaccctgtgttcgtcaaccagtcctatcccttcagcatgtgcacatagacaggtc

SEQ ID NO: 116446 - DNA, 629 bp, Homo sapiens
tggtggttatttgaaaggagatggctagggtactatggcracaggtgtaaaggaaattaacttagtctatggacatgattctccaactttatagctcataagaatcaccagagatgttcaatcaaaatgtagacacctggcccctacttcctagttcaacatgagaaaagctctgaaattcaacttgtaatacatactcccaaataatactcatacagggaacccgaaaagcaacactaacatgggaatcaagatttttctctctgaggaaggtaattttaattttaatttgagacttaaatagggagtgtgatttagctaagctagaagggatgtgggaaaaaagctagcggttttggtccgatgaaaactacgtgacccaaaggaaagacagaaaaataaaatcatgtccctaatagggagcatgagtgatacatgaaagactagaagagaatgaagaggtcattgggaaggtctgagtcgccctgttaagaatataggccattaacttaagggcaatggaaaaccatagaaaggttttagaccttacaacctctctgtgcctcggctacttcatctataattacacctacatcacagactcttcgtaagaattaactgagaacagt

SEQ ID NO: 116447 - DNA, 629 bp, Homo sapiens
tggtggttatttgaaaggagatggctagggtactatggcgacaggtgtaaaggaaattaacttagtctatggacatgattctccaactttatagctcataagaatcaccagagatgttcaatcaaaatgtagacacctggcccctacttcctagttcaacatgagaaaagctctgaaattcaacttgtaatacatactcccaaataatactcatacagggaacccgaaaagcaacactaacatgggaatcaagatttttctctctgaggaaggtaattttaattttaatttgagacttaaatagggagtgtgatttagctaagctagaagggatgtgggaaaaaagctagcggttttggtccgatgaaaactacgtgaccyaaaggaaagacagaaaaataaaatcatgtccctaatagggagcatgagtgatacatgaaagactagaagagaatgaagaggtcattgggaaggtctgagtcgccctgttaagaatataggccattaacttaagggcaatggaaaaccatagaaaggttttagaccttacaacctctctgtgcctcggctacttcatctataattacacctacatcacagactcttcgtaagaattaactgagaacagt

SEQ ID NO: 116448 - DNA, 638 bp, Homo sapiens
tgggaaactgtctcatggattttttttattgatattcaaattagtgcaaccattttggaggacaacaatatctttcactacctttgaagtgtgtacccttcaatcttgcaaatatatttctaggaatttattctacaataatacctgtgcacatgaacaaacatttgtaaagaatgttttttgcagctctgctaataagagtaaaatgttggaaaaatataaacactcaagatgtattaaaaagttaaaaattaggtagatttacatgcacttttatgaaaaaatgttttmgttgtcaaaataaaaagttgaagactgctatatgcaatgatgttcttctattacaaaataaaaattctataggcatatgtacccatatatatgtatatttataaacatatctaatgggggacctgcagttatagtctaaaacagttaatagtgcgtccatgacagagtggaactggttacaagaatgctcagggatccttttgtatttcagtttacatatttctaatttttttacaatgcacatatatttcttgcataaaaaataaattaatgtcgttcatatctaaataataaaagagctcttttaaaataaattctctttgcctcaccagtcttgacctatataa

SEQ ID NO: 116449 - DNA, 588 bp, Homo sapiens
cttcccttctgtcagccaactctagatcatttttattttctcaactttccaaatttatcmctaggtaggctgttttcctctgctgtctcctctatatttgtactgtccaatatagtagtgactaataatgtggctattgagtccttgaaatgcagtttccctgaattgaaatgtgctataaatttaaaatattcattagattttaaagattttgcacaaaagagaccacaaataatgtgctaatattgttacattaataaataatattttgtaaatattgggctctataaaatacattattaaaattaattttaccttttttttagtgtgactactaaaaagtttaaaattatatagtgtttcgtatttgattttaatgacagatctggtctagaaaattccaacctattcatgcttgtgtcttcgcattccagtgtcagtttattgtcctctcttcaaagaagctttttctgaccaccattctaaagaagacacatcagcttcacccacctagtcactctcatattaccctttattgtgcatttgttaaaaaataataacatgaaatatacctgagaaaaaatttta

SEQ ID NO: 116450 - DNA, 539 bp, Homo sapiens
ctgctctcttgaagaatgcctcagccaaggtgaagaggggagttttcgcagctgtattctttttccttctaaagtctacagaaaagcatccaacaaaccacaaaaatctggcactaatttgaatatggcagacattatcctccatatgttcttgtttcaatggactctttttacagtaactatctcatttgatgccatttctttcctctcttcacgatgtgaagtgtcaatttttctcactctataaacttcctaatatcctttccatcctatgcagtttacaggtatttgtccatctctattttaatgaaaagcatgttttactattgataaaacttaagagttcaactaaattttatcaagttaaattatttgttttatgtttaaggaaaccaaggtgaagtaaggtaaattratcattgtaaagtcacatagccagtcagtagaataattagaatttgaccacttgtctcccaatgccccacccagcatttactaccctatttaagagaaacttcagtgtctctgctgttctcact

SEQ ID NO: 116451 - DNA, 455 bp, Homo sapiens
ctgttgcttcatacacccagttttggatactttgtaacagcaaccctagaaaaccaagacaccmcaaattcctacatgcttagggcagatcttttttttttttttttttttttttaagatggaatctcactctgttgctcaggctggagcgcagtggtacaatctcacctcatggcaacttctgcctcccaggttcaagcaattctcctgcctcagtcttcccagtagctgggactacaggcatgtgctaccatgcccagctaatttttgtatttttagtacagaaagggtttcaccatgttgaccagattggtcttgaactcctcacctcaggtgatctgtccgcctcggcctcccaaagtgctgggattacaggtgtaagccactacgttcgaccagattatttttttattaactaagtacttttctgactgatcctgtatggaaccttggaa

SEQ ID NO: 116452 - DNA, 548 bp, Homo sapiens
tcagagtggctttgggcagtatgatgcatgccagtcaccagcttgggtcagcctgctgtttaacaagtgtgagatcttgaatgagacggcattcctctctaagcctcagctttttcatctctgtgcgatggaacaaagagaatactttaactgccagtcctggtcaaaattcttagtattttagtgctaagaaggggcagaggagaagttgggaggcggggaggacatagcttggttgttttactcctctgctaccagccttccaccgcctgacattgcgctaagaataatgcttgaattcactccacaccacagcctggccacaatgcctcatttaccttcactcccttattcacagtaggacaacccagtagcacattcacagtttagggaagctgagatgcctcctctgattctaccaggcagaggtagtagttctgtctatggagttccccatcttgacgatggccttatccattacattgrtgatacctgcgtacatgaagatcttctcagttggacgatgaatgctccaaaaccaccaatta

SEQ ID NO: 116453 - DNA, 567 bp, Homo sapiens
ttgaaaaattcaaaccctccctctggtcctgggaggaaagggctgtctgaggtccgcagggggtggaggtgtgtgtgtgtgcgtgtgtgtgtgtgtatacacacgccctcccyggtgtgccttttccggagcactggaaagccgtccacggcggaccacctcaagggcggccgcggcactgtcctgccccgtgccccctgccctgaacttcttcctcctgcgcccctgcccctatttgcagcctaaactcctgtacggctgccacatttcttaacatcttggagggggaggcggagtggagagaggcggagagaggaaggggggagggagccgaaataaaggtggtttccttttttggcagccagttttggttttgttgagcatgaaatctctgctcccttaaaaaattattctcggaaaaagatatcccccccgttttccaggttttgagccgcctctccttagggcctggtcgggggaggaaaagttgtaaacaaattgccaccttaaattcgcggtgcgagtctgcggagctgccgggttcattgtgtttacgaggctcgctga

SEQ ID NO: 116454 - DNA, 567 bp, Homo sapiens
ttgaaaaattcaaaccctccctctggtcctgggaggaaagggctgtctgaggtccgcagggggtggaggtgtgtgtgtgtgcgtgtgtgtgtgtgtatacacacgccctccctggygtgccttttccggagcactggaaagccgtccacggcggaccacctcaagggcggccgcggcactgtcctgccccgtgccccctgccctgaacttcttcctcctgcgcccctgcccctatttgcagcctaaactcctgtacggctgccacatttcttaacatcttggagggggaggcggagtggagagaggcggagagaggaaggggggagggagccgaaataaaggtggtttccttttttggcagccagttttggttttgttgagcatgaaatctctgctcccttaaaaaattattctcggaaaaagatatcccccccgttttccaggttttgagccgcctctccttagggcctggtcgggggaggaaaagttgtaaacaaattgccaccttaaattcgcggtgcgagtctgcggagctgccgggttcattgtgtttacgaggctcgctga

SEQ ID NO: 116455 - DNA, 612 bp, Homo sapiens
taaaggtacatctccaaagaattctgatgttagaattttcagatagataatagaaaataattctatacaaaatacatgaagacataaaagagttagaaaaatgagcatgtaaaaagaaataaccaaaaataatacctaggagatttgaaagatacaagatagaactttcctcataaaatatgattgataaataaaaactgaataaatgggttagttagatcatatataactgaagagaaagttaacaaactgaaaaatggatgtacagaaatagcacaaaatataatacagagacaagatgaaaactatgaaaaagaaaataagatttatgaatgayagaatagcagttctaactatgtttaattgtattcccagaaggaggatacagagataatagaagagagacaatatattgagatatattgtatattagttagtttagcctgtgctgttgtaaaacaaactctatccatctccatggcataaaagtttgccattagtcaagtggatgctctcagttctcttcttctgttcttcatgtagtgagttcagtaatctaaactgctttgatcttgacactctctgccacctctatccaaagtcttcatgttt

SEQ ID NO: 116456 - DNA, 520 bp, Homo sapiens
cctgttacaaaagcagtatgtatatatattcattgcattctttctaagcgtgtactactgatgcatccatataaaatataatgctgaataaagacatctgatgaaaagcctttcttttttactttagagtctcattctctaaccagagaatgcaattactttccaaatactaggcatgytgaaacaaagtgaatgatgttattatgcatatgtgttattcccttgacttttttcttactcttcatttctctgaaatgctaaaagtagaaaataaaaatcataaaaggaatattcaatatgttttactttgtataacttttatgtgcaaataggaaaaaaaagaaaaaatgattaaattgtggcaatatactgaattatcttcaatatcctacatatttgaggaagatgggtaaattcaaatatcatgtcccaaaacttttggcattaatgctctacttctaacatggtcttgtaaaacaaattagttggagataaggatttatcaatagtatttaatgtt

SEQ ID NO: 116457 - DNA, 593 bp, Homo sapiens
gggaattgcaatttttgtacattcacaatccaccacaattcattgcaccaaattcctttcattttttgtcactgatcacattcttatgaagcaacttctagtatgttgggtctataaaaaccatttatatttgggaggccggagtagacagatcacttgaggccatgggtttgagaccaccctggccaacatggtgaaaccctgtctctactaaaaatacaaaaaattagctgggtgttgtggcacacacctgtagtcccagctacttgggaggctgaggcaggagaatctcttgaatcgaggaggcagaggatgcagtgagctgagatcatgccactgcactccagcctgggcaacagaaagagacacagaatctctttytaaaaaaaaaaaaaaaaacaaaacaaaaaacaaaaaacaacctattatcaccattttggaatagcttacttatctagaaaagtcatatagtatacaatgggataaattagtactttttcctgactgttctttcatgataccatacaatctaatacatgagatttatttttaaaaaaaatttttagagactgttttgctacattgtccaagtt

SEQ ID NO: 116458 - DNA, 192 bp, Homo sapiens
taaacgtgatcatctcagaatatgcctggcaaacagtaggagctcagaacttgatgtttttttcctacagcaastgctgtaggggatagcagctaatgcaagaggttggtaaatccttatatatatcaaatattgtagaaacataactacatgctactattttttcaaaccctccccccacccctttttttt

SEQ ID NO: 116459 - DNA, 514 bp, Homo sapiens
gtgcagtggtgtgatctcagctyactggaacctctacttcccaggctcaagcaatcctcttgcctcagcctcccaagtagggaggcactacaggcatgccaccatgcctggctaatatttgggtttgtttgtttgtttgtttgtagggcaggctttcaccatgttgcccaggctggtctcaaactcctaggctcaagagatccacccaatgccttggcctcccacagtgctgggattacaggtagcatgagcaacacacaaggccccagtatttttcactagtgaagttcatgtgaggtgaaaggaaagaggaaacaggaagattgctccctggtgtttggattggcataagacttacctgatgtcaatttaatttccacattcactatatatgcctaatggtaggggtgaggtataactcttccttgatttgcttttcagtggcagctatctccccctttccttttgaacttatgtcttttgataacttaagtgttttctttcctcagaattc

SEQ ID NO: 116460 - DNA, 581 bp, Homo sapiens
ttatttttaactgggttgtttctttcttgctgttgagttatttgaggttcttatatatattggatattaacctttaatcagttgtatagtttgcaaatattttctcccattctgtggttgtctcttcactttgttaatggttttctttgctgtgcacaagttttttagtttgctgctgtttgatttgtctgtttttgctttgttgtttatgctttatgtgtcatatcccaaaaattgttgcccagaccagtggcattgagatttcctctrtattttctaccagtagttttacctcttcaggtcttatatttgtctttaatccattttgagttggttgttgtatatgcaataagacaaggatctagtttcattcttctgcaaatggatatctaatcttctcagcatcatttatttgaggctatccttttctcattgtgtattcatagcactattgtcaaaaatcaattgaccagaaattcatgagttcatttctggatttcctaatagtaccatgctgttttaattaccatagctttacaaatatgctttaaaattagggagtttgatgcctccagcgttgt

SEQ ID NO: 116461 - DNA, 572 bp, Homo sapiens
gtacatagttttcatattcaccattctcttggaacctaacactttgtctgaaatgaataaataaatgatgtctaattcaccacctgatgattagtttcttggagctgctgttctggttaatatcatcataaaataatactaaaatttgttcataaaatataattttatggatttgcatttttaaaatatctggagcacaaatatttaacatgaatgttaacaaaacatctttgagacttttacattgcttttcttgcagtgtgtgagtgtggtttggyaagcagtttttaaaaatcacctttaataatttgtggttcatagcaaaaacattgagtgagatactgaaatgttcatataacatcagtaaaaaattattgtgtcaactgttagcaattctattataaattaagaaaatatatcttctgtttagctattccaaatccatgtttaaccacatactcacctaaatcttgcacgaagacttaaactctctaaagttctgcttcctcatccataaagtgaggatgaaaatacatctgttatcttaggaatagtcactatttgggaagatt

SEQ ID NO: 116462 - DNA, 578 bp, Homo sapiens
caaaacatctttgagacttttacattgcttttcttgcagtgtgtgagtgtggtttggtaagcagtttttaaaaatcacctttaataatttgtggttcatagcaaaaacattgagtgagatactgaaatgttcatataacatcagtaaaaaattattgtgtcaactgttagcaattctattataaattaagaaaatatatcttctgtttagctattccaaatccatgtttaaccacatactcacctaaatcttgcacgaagacttaaactctctaaagttctgcttcctcatccataaagtgaggatgaaaatacatctgttatcttaggaatagtcactatttgggaagattcaatatgataatgtatgtaaagcacttagtatggggcctggaacatactgagttttatagagaatgctctagtttattgtgactgtggagtatacttctggaagtgggaaatttctggaytagagcaacacagtgtagcaatgataaatggggtagactttgcatagggattcatctccaattataggcatggcttactgcatgaatgcatttgtgtgtgtgtgtg

SEQ ID NO: 116463 - DNA, 271 bp, Homo sapiens
tgggagtttactcagatcttttgtttacaattatcctaaactacctgatcaagaaactttgtaaatattgttgtttggggttgttttccctttatagactaatcttttgtaaaatgaaaactgctattagccaatttgctaattagggtcatgtttagtggaacaacaaaacatccacttgatcatttattatttcccataataagagttcaagcacttgaatttcaaaaccaggcaaattagcrgctaggtctcagtcagcattctattc

SEQ ID NO: 116464 - DNA, 605 bp, Homo sapiens
ccagcatggctgaggatactgaagaactgcaattcaggtagatcaggtaccaagcccttctgcccttcagatgaaaagtctcttccatttaccaaatttgcccacaaaaatatttcaattttctgtgtctaatgwcatgaaaaactttggaaaaaactatgagagtttgagaaacacaggcctaggtttaatctggaaaataaagtatgattcggcaaagtgaaccttctagcaccaggttatcagcaatctagaaagtggctgtgccaggacttgaattcacatgtgtctgaatcggaaaccactgtgcaagcctgtgctaccaatggtataaagactgactgttttgagtatcctgataatttgcaaaaatattgtaccatcatcatcaaagaaaacgccacattttttaactttgaaaaatgtgtgcttcatttcaaatgtaagatagtgctaagatagttacctctctataaaaaatgaatttcaataacccagcaatcccactcctatgtctatatctaagagaaagaaaatatctgttcacataaaacttgtacatgaacattcatagcagcactattgataatagtctaaaaagtaga

SEQ ID NO: 116465 - DNA, 585 bp, Homo sapiens
tgataccgaatcctacagtgcaggaaagcagctacattggtttcggtcttggtgctatttgaatacctcaccttccttttctgttctcttctacayctcatagataaccattaataagaaacggactttagaaggatctcacagtctttcctgtctttggtacactgtaagtgatgttcaattacactggaaaacagtgaagactatttgagaaagcagtaaaatgaatggccccagctggacaatatggggacagtctataatggctacagcaaatataattatttaattattgtaaaattatgcaataaacttcttaaactaaatatagcacaatcagaaggctagagcagtacatttaatcacactcttaaggaccattagagaagttatattttacaaaatttccatctgaatcacttcattaaataacatatacgtattcagtgcttattatgtgccagagtgttaagtattgggaagacggatgcaataatcaagccaaggacttcacagtgtgaaaaggaaggactatatgtatttacaaaatactacaatgaatcctactttaaattgccattgcag

SEQ ID NO: 116466 - DNA, 594 bp, Homo sapiens
aggcattatagttgaattttcctcttcttttatatattttcagtaatgagcattcactacattaatgcactttaaaaatttttttaattgtaaaaataataatactcctgaaaatcttactgaccacatggatgataaastgcaaacacctgtactccagagataatctctgtttagagtatggtatatattaatatatattctaggagactttataatacacatgaacttgtgcatagagattgtgtgtgtgagtctgtgtttatttttaagaggaatgggattatattaaatatattattctgcaatttgctttctcagttaataaggaatcaaggatagttttccattacttttatggtcagaatttcattttttatatcattgctattaaggtgaagcacactttgccatggcacatggaataagtacctaggggccagtgctccttgacaaaggcatgtctccaaaacttctgctatattatcaggctcttgagtttgctgcaattatagatttctaagaatgaacgaatgaatgagtacaatagttccttgcttaaattgcttaaagaaacacaaattaattggtctt

SEQ ID NO: 116467 - DNA, 621 bp, Homo sapiens
ctctcccttttttccctcccgccccggcatctgttctcgcccgaagaagctggtccttagcctgcgctgcggagcaacctttcagtggccagctggagcctgggcaccgttcttcaaataatggcttttaattctcagacgagaacgtttaggattacaaaagaaaccggttctcttcacatccttatccttgtcatgtagcattccgcttgaaattggaagccgttcaatgtcagagagaaaccatatttatgaaatgaaagaggcttctcagatgactgcaaaccagccttccttactggttttatcactggtaatgttataaagacagttgtccagtttcatgaatcttgtaggtttttgtttgtttatttgtttgcttttgatgttgttgttgttgctgttgttttccaamttcagtattgtagaaaaatatgctgccccagaagagatgattggacactctccagcgtggtgttggactttgtcatctcttgcacagccatctccagaccttagtgtttacctcacgttagttttttatattctgcaaagacaaaaccaaaataatccaaatttgacacaaatacctgggatacatcttatttgagatgtttaaca

SEQ ID NO: 116468 - DNA, 648 bp, Homo sapiens
cagatttcattatatttacactttcctgtgtttgggactttatatagtggactattgtgttcgttttgtgacaagtagagaagagattgcattctagggatgatttttgggggaacataatattagtcctgtttatggctctccttgaattggttcatctgtgctggtgactggtatttgctaccaaaccttgtctggtgagcacaagaaaaggaattttaaaaaatctgctattaaaattgagktgatacattttcatataataatatgtggagttaagtaatgaaccatctttattttttatttattcatttatttattttgagatggagtttttgctctgttcctcaggatggaatacaatggcgcgatctcagctcactgcaacctccacctcctgggttcaagtgattctcctgcctcagcctcttgagtagctgggattacaggcacctgccaccacaccggggtaatttttgtatttttgtagagacaaggtttctccaattggccaatttggtctctaactctagacctcaagtgatccacttgccttggcctcccaaagtgctaggattacagacatgagccatggcttgaactgaaccatttttattctttcagaaatgtgattgataacagtaaagc

SEQ ID NO: 116469 - DNA, 639 bp, Homo sapiens
tcacctagcattattagctagtattctccttttgtttcccaataacatcccctccttcttcccacagatccactctccactcatttccatcctgtcttatgycactcagggcttacccttctaaaatgcatccctggctcccctgcatgcacacttctagttaggtttagcaatgaggggcacctgatggagcctggaagtgagaggcaggtgaggtctgtatttctttcctctccctccctgctctggcactgagtatctgacaatagcttcatctgtcttacttcagtggccacttttccacagccccaattttcagtggatcccatagcattatttacctttgttcctttagctcccactaatgaagatccagggacattctcctcgccaaggcattaagaaatgcacaggtgaggggaacagtggcatgcgtgtaaaggtcctgtggcacctctcctctgcaggctggaggtcatggcgggagatgctgcatggatttgccctccctgctgtcagggagaacaatagggttctggaagagtagaggacaggcagtggtacgcggccatctagaaacaaggtgggaggaatttccttgagaggcagggatctgtggtgattactaatcatcgtgag

SEQ ID NO: 116470 - DNA, 600 bp, Homo sapiens
caaatattaaatgatccaaaataaactgatataaaataatctaatataatatagttaataaaaaatagaagcttcttcaatgacattaaacaatgcacataatatgttgtgaaagaataaatttagaaaacataaatacatatttcaactttgttaaacaaaacctatataggaaaaaargattaatattagtcatgtctaagtgacagatttgactgcccattcaaatggtagtattttgatctttttttcttatgtatataccaggttatctaggatgaatattatttttataataagagtttttaatttactacatggagaagataacacatcaagaacaagcattaatatattaagagcaacatggtgaagtttattcatgcattaattcagctaggatttactgattgcttactctatgcctggcactggggatgggtgggaggattaggaggaaaagttattatttctttttatgtaaatgtttatgtatttacatatctgtgacttaagtttgtcaatttgtgactaagaatgcaactaaaactttgtgattttaaaataatgtttccagggcaaattctatcatacacctaa

SEQ ID NO: 116471 - DNA, 600 bp, Homo sapiens
caaatattaaatgatccaaaataaactgatataaaataatctaatataatatagttaataaaaaatagaagcttcttcaatgacattaaacaatgcacataatatgttgtgaaagaataaatttagaaaacataaatacatatttcaactttgttaaacaaaacctatataggaaaaaaagattaatattagtcatgtctaagtgacagatttgactgcccattcaaatggtagtattttgatctttttttcttatgtatataccaggttatctaggatgaatattatttttataataagagtttttaatttactacatggagaagataacacatcaagaacaagcattaatatattaagagcaacatggtgaagtttattcatgcattaattcagctaggatttactgattgcttactctatgcctggcactggggatgggtgggaggattaggaggaaaagttmttatttctttttatgtaaatgtttatgtatttacatatctgtgacttaagtttgtcaatttgtgactaagaatgcaactaaaactttgtgattttaaaataatgtttccagggcaaattctatcatacacctaa

SEQ ID NO: 116472 - DNA, 548 bp, Homo sapiens
aattttctgtataaaggtattggctaaaacaacagcactgtctcagattttgagggtatcactgccttatcttcacgtatctggtgttattaatgagtcgtgtgatttagtctgatatttttatgacaggtactttgcattttatttcttgtggctcttgctattttctttatctttggcgttcggacatgtcaccatgctgtttataggcatagatgtgctgtccccacgccccaccaccctgaatccttctacccaccagtctgaggatctcttcaatctaaagactagagtcattattctatttcctcaattatttgttcatcttccccacgctgttctttctcaatacctccacaaaaccatacatttctctagatctacctccatgacacttatctttgctctcatgtgtttgccttggatttttgcattcagctctggatgtagcactctgaaccatcacccagtccagtaaygcggtcttcagtaatgtccactctgctatttagttcagtcatttctttctcttttttatcaaaaagttt

SEQ ID NO: 116473 - DNA, 651 bp, Homo sapiens
atacaaagagattttaaaaagccttttatgttttcatcattgttgtaacaaattatcacaaatttagtggcttacaacaccacaaatttactatctgattctccagcagtctaaaatgggtctcactgggctaaaagcaaggtgtcctcagggctgtattcattttcagaggctctgagagaaagtaacaatgatggtatattgttgacagtattttcaatagtgctgtttccttgcccttcccagcttctagcrgcctcccacatttcttgacttatggcccactttttccatcatctacttttcagagcctttgtgattacactgggactatccagataatccaggataatctcctttttttttttttttgagacagagtcttgctctgttgcctagactggagtgcagtggcagtgatcgtagcttactgcagccttgacttcccgggctcaagcaatcctctcatcgcagccacctgagtagctgggagtacaggtatgcaccaccacacctggctaatttttttattttttgtagagacagagtctcgttaagttgtcctggttggtctggaactcctgggctcaagcgatcacccacctcagcctcccaaagtgctgggataacaggtgtgagcccggccaatct

SEQ ID NO: 116474 - DNA, 545 bp, Homo sapiens
tggttttctactataatgagccagatttcactactcagaaacgtgcagaatgtccttgactttcttccataaactcggatcctctgttttctttcctaggggttccaacgcagtcctattgagccctccgaggcaaatttcacaccctgttccaacagcctagcatgctcttctccttcaggccaaatgcctgacacttgttctctcatttcattcaggtctctgctcaagtgtgacctcattagagatactatccctgatcaccttgcctaaaataacaccccttcactctcygtgtccaatcagtcctccaataacaccttactctattcattcctctgtgtttttccttatatagcatgtatcaccacctgacatcctattgtattatgttatgacatgtgtgtgcatgtgtatgtgtgtatgtgtatatatgtatgtttttggtctactaactagtaattacatccatgaagatagaaactttattttattcttattatatccccaacagttctaagcacatagcagacacaaaataaata

SEQ ID NO: 116475 - DNA, 545 bp, Homo sapiens
tggttttctactataatgagccagatttcactactcagaaacgtgcagaatgtccttgactttcttccataaactcggatcctctgttttctttcctaggggttccaacgcagtcctattgagccctccgaggcaaatttcacaccctgttccaacagcctagcatgctcttctccttcaggccaaatgcctgacacttgttctctcatttcattcaggtctctgctcaagtgtgacctcattagagatactatccctgatcaccttgcctaaaataacaccccttcactctccgtgtccaatcagycctccaataacaccttactctattcattcctctgtgtttttccttatatagcatgtatcaccacctgacatcctattgtattatgttatgacatgtgtgtgcatgtgtatgtgtgtatgtgtatatatgtatgtttttggtctactaactagtaattacatccatgaagatagaaactttattttattcttattatatccccaacagttctaagcacatagcagacacaaaataaata

SEQ ID NO: 116476 - DNA, 610 bp, Homo sapiens
acatctacagtggacttatttcttacaaaagtgccaagaacaaacactggggaaaagatagtctcttcaataaataatgctgggaaaactggatatccatatgcagaagaatgaaactagaccccttcctctctcaccatgtacagaaatgaaatcaaaataagactaaagacttatacctaagaccttaaactaggaaactactaaaagaaaacattggtggaaatctccaggacactggactgggcaaaaatttctttagtaataccccacatgcacaagcaaccaaagcaaaaatggattaatgagatcacatcaagttaaaaggcttctgcacagcaaaggaaacaataaacaaactaaagagacaacccacacaatgggaaaaaatatttgcatctgacaaaggattaataactagaatatataaggagatcaaacaactctattgaaaaaaaatctaataatgtgatcaaataaaagggcaaaagatttgaatagatatttctcaaaagaagaatataaaaggcaaacaggcctatgaaaaggtgctcarcatcatttatcattagagaaatgaaaatcaaaactacaatgagatatcgtttca

SEQ ID NO: 116477 - DNA, 621 bp, Homo sapiens
gaagagtatggtatgaattctttccttcacaaccagttacatgaagggtgatctgtggaatacaaaatttcaaatagtgcaagaggatttggacaaggaatcaatgcctactctaaaaagaaataattatgtgacactaggcacagaaaatcctggtgcttttttttctttttttctttctttctcttttttttttttttttttgagacagagtctcgctctgttgtccaggctgaagtgcagtgatgcgatctcagctcaccacaacctyttcctcctgggttcaagtgatactcctgcctcagcctcctgagtagctgggactacagtcatgcaccaccattctcggctaatttttttttcttgtattttttgtagagacagggtttcactatgttagccaggctggtctcaaactcctgacctcctgatccacctacctcggccttccaaagtgctgggattacaggcatgagccactgcgcccagccagtcctgatgctttttaaggggctttttatgttttaacctccaatctttctacataacatggacaaaattttattgaaatgcctcttttccactgagtgcaagaaagccgtgtaaactaacaattgtgat

SEQ ID NO: 116478 - DNA, 576 bp, Homo sapiens
tgcacctacgttcatcagagatattggtctgtagttttctttttttgttatatcctttcctggttttggtattatggtgatactggcttcatagaatgatttaaagaagatgccctctttatcttgtagaatagtgtcagtagggttgctaccaattcttctatgaatgtctgatagaattcagctgtgaatctgtcttgtcctagacttttctgttgrcaattttttaaattgctatttcaattttgctgcttgctgttggtctgttcagagtatctatttcttcctggtttaatctaggagggttgtatgcttccaggaatttatccatcttctctatgttttctagtttgtgtgtgtaaaggtgttcatagcagccttgaatgatcttttgtatttctgtggtatcagttgtaatacctcctgtttcatttctaattgagcttatttggatctcccctcttcttttcttggttaatacgtgctagatggcttatcaattttgtttatcttttcaaagaaccagctttttgcttactttatcttttgtattgtttttctttgttgttttaattt

SEQ ID NO: 116479 - DNA, 581 bp, Homo sapiens
aatatatatatatatgctaatatgttgattagcatatatctctttataaacaacatatatcaaccaaagtccatagtttacattaggttcactcttggcattgtatattcaatggagttggacaaatgtgtaatgacatyctcaccattatagtgtcacacagagcagtttcactgccctaacaattttccgtgcttcatctcttcatcctgctgtcctccttaaactctggcaaccatggatcaatttactgtatagtgttgctttttccagaatgtcttacacttgcaattttgcagtatgtatccttttcatattgtcttctttcacttagtttatttatcctctcacctactgaaagataccatgattgtttctaagttttggcaaatataaataattaaagcttctataaacatccatgtgcaggttttgtatggctgtaagttttcaattcctttgggtaaataccaaggagtgggattgctgggttgtacggtagaagtaggtttagttttgtaagaaaccactaatctgtcttctaaattgaccataccattctgcattatgaccagaaataa

SEQ ID NO: 116480 - DNA, 603 bp, Homo sapiens
catgcaccataatatagggaaaggagtccccarcacccagttttccccagtgtagaggaagatctggatctcacatatagggccctgaccccaaatttcctcacagtttgactattaattcaccaactgttagggcagaaggaattaaacacagccatgttcctttagaccctaggaaataaagcagcagttttatatgggcacacaggctttttaagggattctgtccccttgcaagcagtgccaaaaaagagccttaaaaacatagctccctgtctccttccagaagggatttttaaaacagccatccagtggctaactgaagatctgaacttctcactaatttatattgttgagtcgaagagacaatcatcaacccaccaccagcatgggaggaaattgtactcacactgagagcactagattttacaacatccacctaagttactgcaccataaatcctctagctctgggagcagaagggactggcatatataggtatcttcttagtggcacgcaagtacctccagggactttatcctcctggagctatgcagaaagggcctaaaaaaaaaagaaaaaacaaaaagaaggaaacgtaac

SEQ ID NO: 116481 - DNA, 561 bp, Homo sapiens
ttcttctgtagggagtgagaagtgtttaggtttctgagcgggagaatgatacattgacagttatatttacagcaaagtaatctaacaaggttttgtggactggcctaactggagaaaataatggaaaagagaaataaattaagagcctattgaaatagtacagctgagaacagagaacttgaactacagtggtgggaatagggatataaagaagggtatggtgggggcaggtagacccaatcaataaagttgrggtctctttttttttttgagatggagtttgcttttgttgcccaggctggagtgcaatggcgtgatctcggctcaccgcaacctccacctccggggttcaagagattctcctgcctcagcctcccaagtagatgggattacaggcatatgccaccatgccaggctaattttgtatttttagtagagatagggtttctccacattggtcaggcttgtctcgaactctcaaactcaggtgatctgccttccttggcctcccaaagtgctgggattacaggcatgagccaccgtgcccggcctaagttgggg

SEQ ID NO: 116482 - DNA, 561 bp, Homo sapiens
ttcttctgtagggagtgagaagtgtttaggtttctgagcgggagaatgatacattgacagttatatttacagcaaagtaatctaacaaggttttgtggactggcctaactggagaaaataatggaaaagagaaataaattaagagcctattgaaatagtacagctgagaacagagaacttgaactacagtggtgggaatagggatataaagaagggtatggtgggggcaggtagacccaatcaataaagttgaggtctctttttttttttgagatggagtttgcttttgttgcccaggctggagtgcaatggcgtgatctcggctcaccgcaacctccacctcckgggttcaagagattctcctgcctcagcctcccaagtagatgggattacaggcatatgccaccatgccaggctaattttgtatttttagtagagatagggtttctccacattggtcaggcttgtctcgaactctcaaactcaggtgatctgccttccttggcctcccaaagtgctgggattacaggcatgagccaccgtgcccggcctaagttgggg

SEQ ID NO: 116483 - DNA, 561 bp, Homo sapiens
ttcttctgtagggagtgagaagtgtttaggtttctgagcgggagaatgatacattgacagttatatttacagcaaagtaatctaacaaggttttgtggactggcctaactggagaaaataatggaaaagagaaataaattaagagcctattgaaatagtacagctgagaacagagaacttgaactacagtggtgggaatagggatataaagaagggtatggtgggggcaggtagacccaatcaataaagttgaggtctctttttttttttgagatggagtttgcttttgttgcccaggctggagtgcaatggcgtgatctcggctcaccgcaacctccacctccggggttcaagagattctcctgcctcagcctcccaagtagatgggattacaggcrtatgccaccatgccaggctaattttgtatttttagtagagatagggtttctccacattggtcaggcttgtctcgaactctcaaactcaggtgatctgccttccttggcctcccaaagtgctgggattacaggcatgagccaccgtgcccggcctaagttgggg

SEQ ID NO: 116484 - DNA, 561 bp, Homo sapiens
ttcttctgtagggagtgagaagtgtttaggtttctgagcgggagaatgatacattgacagttatatttacagcaaagtaatctaacaaggttttgtggactggcctaactggagaaaataatggaaaagagaaataaattaagagcctattgaaatagtacagctgagaacagagaacttgaactacagtggtgggaatagggatataaagaagggtatggtgggggcaggtagacccaatcaataaagttgaggtctctttttttttttgagatggagtttgcttttgttgcccaggctggagtgcaatggcgtgatctcggctcaccgcaacctccacctccggggttcaagagattctcctgcctcagcctcccaagtagatgggattacaggcatatgccaccatgccaggctaattttgtatttttagtagagatagggtttctccacattggtcaggcttgtctcgaactctcaaactcaggtgatctgcctkccttggcctcccaaagtgctgggattacaggcatgagccaccgtgcccggcctaagttgggg

SEQ ID NO: 116485 - DNA, 512 bp, Homo sapiens
gatatgtcattgaaggataaacacgtggcatttctgtcttctcagtggtaaagaatagtatttgttttggcttttccaattgaaattacataatctgtaggtaaaaattcacaggtgaagtattattgcatttgcctttaaacctttaatgttactattcaattaaatgctagtcacattaaagtacagtcctgtaatgtgtcataaatgcaatgagtctgttaggacattcactcacacattcaccaaatatatatgatcacctcccatgtgcaaagcacrgagccattttctgtctagattctctatgtagttgggcactttatctgtgttcccctctgaaatctatcactgataataaattaacaagtttgtctaacattacctttgccatgggaacattagagctacctagggacacttccattggaaaaaagatacctgagtacactaaagtttttatgtttataaagatgatttctctacctagtagacaaatcacagtgaaactg

SEQ ID NO: 116486 - DNA, 531 bp, Homo sapiens
ttttattttattttattttaagtcctgggatacatgtgcagaacgtgcaggtttgttatatgggtrtacatgtgccatggtggtttgctgcacctatcaacccatcatctaggttttaagccccacatgcattaggtatttgtcctaatgctctccctcctcttgcccctgaccccacgacaggccccagtgtgtgatgttcccctccctgtgtccacgtattctcactgttcaactctcacttatgagtgagaacacgcagtgtttggttttctgttcctgtgtaagtttcctgagactgataaaccatggtctttgctgtgtcttttctgccttatatattgtaggtgaccgatacacctgctcaaaagttacttgttgatttgaattgaacttgtacctctcacctctcctactggaccacaagctctttttttcatctcctagcagaacatctttcccatggtgataatcaacagatactaatttgttttaatgaacaaaatatgatggaatccactaccaaaataa

SEQ ID NO: 116487 - DNA, 511 bp, Homo sapiens
tggggaaaagtcagtatcacctccaaatttggcaacacaagcaggatcttaagcaagcatcatttctcatctacaaggtctgcattttgtcgggagggagagactcttaagtgactttgaaagcctttcctttaggtttttaatggtttccacactctgtgagagaatagggataaagaaacacwcatgatttggatctactgaaacgttttacgtagagtgtatggagatcatgtaaataaaagcagggaatcagagttgctgaagataaatgtggctcttttattaatgcataaaaagaaggtgttttgaaatgtgagttgcagtcaggctggaaagaaaggaacagggatgtcccaatacctgaacaggagaggcagcccagagtgtcgatataaacaccctttttgaatgaatattaaattcatcctgctaagtgttaataggagaatttgctttggctaaaaactgggtgtttttctaccagagacttgctggctggtcactgtgg

SEQ ID NO: 116488 - DNA, 511 bp, Homo sapiens
tggggaaaagtcagtatcacctccaaatttggcaacacaagcaggatcttaagcaagcatcatttctcatctacaaggtctgcattttgtcgggagggagagactcttaagtgactttgaaagcctttcctttaggtttttaatggtttccacactctgtgagagaatagggataaagaaacacacatgatttggatctactgaaaygttttacgtagagtgtatggagatcatgtaaataaaagcagggaatcagagttgctgaagataaatgtggctcttttattaatgcataaaaagaaggtgttttgaaatgtgagttgcagtcaggctggaaagaaaggaacagggatgtcccaatacctgaacaggagaggcagcccagagtgtcgatataaacaccctttttgaatgaatattaaattcatcctgctaagtgttaataggagaatttgctttggctaaaaactgggtgtttttctaccagagacttgctggctggtcactgtgg

SEQ ID NO: 116489 - DNA, 511 bp, Homo sapiens
tggggaaaagtcagtatcacctccaaatttggcaacacaagcaggatcttaagcaagcatcatttctcatctacaaggtctgcattttgtcgggagggagagactcttaagtgactttgaaagcctttcctttaggtttttaatggtttccacactctgtgagagaatagggataaagaaacacacatgatttggatctactgaaacgttttacgtagagtgtatggagatcatgtaaataaaagcagggaatcagagttgctgaagataaatgtggctcttttattaatgcataaaaagaagrtgttttgaaatgtgagttgcagtcaggctggaaagaaaggaacagggatgtcccaatacctgaacaggagaggcagcccagagtgtcgatataaacaccctttttgaatgaatattaaattcatcctgctaagtgttaataggagaatttgctttggctaaaaactgggtgtttttctaccagagacttgctggctggtcactgtgg

SEQ ID NO: 116490 - DNA, 511 bp, Homo sapiens
tggggaaaagtcagtatcacctccaaatttggcaacacaagcaggatcttaagcaagcatcatttctcatctacaaggtctgcattttgtcgggagggagagactcttaagtgactttgaaagcctttcctttaggtttttaatggtttccacactctgtgagagaatagggataaagaaacacacatgatttggatctactgaaacgttttacgtagagtgtatggagatcatgtaaataaaagcagggaatcagagttgctgaagataaatgtggctcttttattaatgcataaaaagaaggtgttttgaaatgtgagttgcagtcaggctggaaagaaaggaacagggatgtcccaatacctgaayaggagaggcagcccagagtgtcgatataaacaccctttttgaatgaatattaaattcatcctgctaagtgttaataggagaatttgctttggctaaaaactgggtgtttttctaccagagacttgctggctggtcactgtgg

SEQ ID NO: 116491 - DNA, 643 bp, Homo sapiens
aaatgcctagaacccactcttctggtgaaggcaatgcatctagattaaggtaaagccactggcacagtgcccattgctttgcccaatgtatttgtgtctgatttatttccttataggcccacgtttccctgtaaattgacaggcaccccctcctgctgacactggacatrctagagcaaaccctagatgagggcccatggctattttgaaggctcagctgcttagctgtgtgtgcaggaaggccatgcactttaccctgatagcagcaaatccctgggggcgaatggtgccacagtcaggagagatggtgaattcttttggtttcattgaggatatttcttccttggtccaagacggtcttttgtagtccacatgctgctcacaatatgaaatgcttttatggccaaggccatccccagggatacgcagtttgtaagtcatggggatcaaagaggtattattgagggaacatatcaaggtatgaggaaaccctggaaaacaaaacatgatgtgagaaataaaagcccccccaacacctcccttgaccctcaatctcccctagaaactgctaagcttcttgaatgaactgtctgtgctattcattactacttaactccaacttgccctaaatattattgtttta

SEQ ID NO: 116492 - DNA, 600 bp, Homo sapiens
taaaacacctatataacaactcatcaaagattcctgtataacacaaggcatttaaaatattcaaattacctctataatgcttaaataagtaagtatataaatgggtgtattggtttgtagcacgtaaagatactgtacaattttagacatgaattacattttctttctgcactgctgtaaacatgaactgtaatacaaacaataaaataagtattaaagattctaaaagtctaggatctaaagattttgtctaaattattccctggttggtagttgccctcagtacctggcagaaacaaattctaggacccatgaaagactaaaccatcagggaaattgtgggaagatgagctgataatgcataacacattttaaacgaggaaagcacraaacaaatctgtcttgtcagaacagctgaaggtcgggctgtaacacacaatacattttactgctgaaactcaagcaaacataaatgtttttgctggcacatgcatacattcatatcatacttataatattgttttcatttagataatgaatttaggtaaaacaacttacatcatattattattaaatgtgaaaattctgataatgagcttt

SEQ ID NO: 116493 - DNA, 522 bp, Homo sapiens
tgatatctattcattttcttttgtcattcaagcwgaagttttcctggttgttactatgatgaaggatttttagttaaaacctgggcgtttttggtattatgttatgagactctggaccttatttaaattttgttttaactggccttttctgaaatgacttgggcaaggagaagggggcactgccttcttactgccagatgcagataatagtctaggttccctccttggccttctttgacaaacagtaggaggagctcttcactactgctgggcaggagtggtatttctggctctccgcaaggcctccattgataccttcctggctgggaggggcaggagtgccttgttactactctccacacagactccactgactctgcatggaaaaatagaggggtagccgtactacccaggaccactgggtaatgacaaaagttctgactcccactagacctcagctgacaccaccccagcagaggggaggaggggcatttctttaccaccagatggacgtggaagtcc

SEQ ID NO: 116494 - DNA, 522 bp, Homo sapiens
tgatatctattcattttcttttgtcattcaagcagaagttttcctggttgttactatgatgaaggatttttagttaaaacctgggcgtttttggtattatgttatgagactctggaccttatttmaattttgttttaactggccttttctgaaatgacttgggcaaggagaagggggcactgccttcttactgccagatgcagataatagtctaggttccctccttggccttctttgacaaacagtaggaggagctcttcactactgctgggcaggagtggtatttctggctctccgcaaggcctccattgataccttcctggctgggaggggcaggagtgccttgttactactctccacacagactccactgactctgcatggaaaaatagaggggtagccgtactacccaggaccactgggtaatgacaaaagttctgactcccactagacctcagctgacaccaccccagcagaggggaggaggggcatttctttaccaccagatggacgtggaagtcc

SEQ ID NO: 116495 - DNA, 522 bp, Homo sapiens
tgatatctattcattttcttttgtcattcaagcagaagttttcctggttgttactatgatgaaggatttttagttaaaacctgggcgtttttggtattatgttatgagactctggaccttatttaaattttgttttaactggccttttctgaaatgacttgggcaaggagaagggggcactgccttcttactgccagatgcagrtaatagtctaggttccctccttggccttctttgacaaacagtaggaggagctcttcactactgctgggcaggagtggtatttctggctctccgcaaggcctccattgataccttcctggctgggaggggcaggagtgccttgttactactctccacacagactccactgactctgcatggaaaaatagaggggtagccgtactacccaggaccactgggtaatgacaaaagttctgactcccactagacctcagctgacaccaccccagcagaggggaggaggggcatttctttaccaccagatggacgtggaagtcc

SEQ ID NO: 116496 - DNA, 522 bp, Homo sapiens
tgatatctattcattttcttttgtcattcaagcagaagttttcctggttgttactatgatgaaggatttttagttaaaacctgggcgtttttggtattatgttatgagactctggaccttatttaaattttgttttaactggccttttctgaaatgacttgggcaaggagaagggggcactgccttcttactgccagatgcagataatagtctaggttccctccttggccttctttgacaaacagtaggaggagctcttcactactgctgggcaggagtggtatttctggctctccgcaaggcctccattgataccttcctggctgggaggggcaggagtgccttgttactactctccacacrgactccactgactctgcatggaaaaatagaggggtagccgtactacccaggaccactgggtaatgacaaaagttctgactcccactagacctcagctgacaccaccccagcagaggggaggaggggcatttctttaccaccagatggacgtggaagtcc

SEQ ID NO: 116497 - DNA, 560 bp, Homo sapiens
caatattcttggcttacattttcttcacttgactattttaaatatgttgctccattgtttcctcataaggtattcttgtccatgaagcccaacgctatatttgttatcttttgctgcataacaaattagccccaaacttaccaacttaaaacaataaacatttgtcatctcgtgytttctgtgggtcagaaatttgaaggtggctcagctgagtgggggttctgcttcctctggaccctcccccactcagcctttgaatcttctgtcttctttacttccagtgttgatagcctgcttagtttgcagtctgctcccagaagtttttctcagaatgggaatctgcccctttggggagagtcttttcattaggaatttatgagatccttagtggcttctgttggcacagcaccttctatcaagagtcaggctctgtggaaagcacaatctaagacttgagatttgcatgtgggaggtttcttgggggcactctcaggaacatctgtgaagaataggacagcagagttgggcagagggagatgaactgtgatgagatggcaatg

SEQ ID NO: 116498 - DNA, 624 bp, Homo sapiens
catgaagagagtgtgaggagagacacaccatcagagagactgcccagcagcccaaggcagggcagcaagggctgcaatgtacaaaggacctcccaaaggcagagaaggccttggtgctccccttgtcstcacacaccatgattgtgggctcccttacccatctggcccaatggaaggtgatctaagccaggatcagtgggtgcagagggaacccagaaaggcacacgccctgcttctcaccagtgcctctctgatgagctttgtctactcgctctgctctcacgctatagatcatccttctctgcttcccttccttccagggaaggcccacagccccaagtcacaggaccaccattcatgagagagctgcaacccctcaggctcaatttctaccttgtgtgacaaagggaatgtcttgccctgtagtagagggggatcacctcatacagtcacagcccactgcacccctgaaatgctatagaacaatgggcaatcaatgaggaaggtgttgggccaacgaaaggatagctgtccctaacaatgacacaggaaatggtcatgataaattaaaagggaaagcaggctacacatcagtatgtacaatataacccaagcttagtttca

SEQ ID NO: 116499 - DNA, 624 bp, Homo sapiens
catgaagagagtgtgaggagagacacaccatcagagagactgcccagcagcccaaggcagggcagcaagggctgcaatgtacaaaggacctcccaaaggcagagaaggccttggtgctccccttgtcctcacacaccatgwttgtgggctcccttacccatctggcccaatggaaggtgatctaagccaggatcagtgggtgcagagggaacccagaaaggcacacgccctgcttctcaccagtgcctctctgatgagctttgtctactcgctctgctctcacgctatagatcatccttctctgcttcccttccttccagggaaggcccacagccccaagtcacaggaccaccattcatgagagagctgcaacccctcaggctcaatttctaccttgtgtgacaaagggaatgtcttgccctgtagtagagggggatcacctcatacagtcacagcccactgcacccctgaaatgctatagaacaatgggcaatcaatgaggaaggtgttgggccaacgaaaggatagctgtccctaacaatgacacaggaaatggtcatgataaattaaaagggaaagcaggctacacatcagtatgtacaatataacccaagcttagtttca

SEQ ID NO: 116500 - DNA, 637 bp, Homo sapiens
ctctagggcacctgggaaccaaccagtggtgcctttggaaatcttggtttatgcttcctctctgacagtaggaaaaagctattgtgggagtttctcctgccatgtagagtgatggaagagcagaattgtggaggagcagrgttgctttgttttgtctttgttgtactcagctggaaagctgtttaaggaaagaatctggtcatatgacctcctttctgcaattggaaatgaacgccacagggaaaagaagatataagacacagaatgctccttgcctggctaaaatggaagaggacaaaggaagcagaatactttctgggcttttggcttttgctaccctcctctggcagacccctgtccaagacgctggctgtgttgtgtgccaggctagagcttgtacctactgtaaaatctgtgtgtgatgtctgttgagttttttggaaaacaaaaaacttatattttaaaatacaaggtattagataataccaagggcagataattccacccttggaaataaaaaagattttcttttcttcagcttgaatgtactgtacagctgtgtttctgcagtaggtctcagctcttaggaacgagaaaaaggaaaacattacccactttgcatttcacttctgttctt

SEQ ID NO: 116501 - DNA, 630 bp, Homo sapiens
actctgaataccagtgtcactgtctgactttgtattatctgagttttttgggtcaggaatttctatattattaggcaatgctgctaaaattatctagttaccatccccagtcctctaagaggcttataatgatgtatctggactgtgtgaggaatatgggaatgatacggtctcyggggaatagactaatgtgtggccaatatggactaacatacacataatatgccagtggtactaaatgcattccagagaaagtgtgaccagagactggttagagaacattctgatttcaccgtatgccctcactatgtcctctctttgcatttattgccagattcagggtaaacacatgcttcccaaggatgtataggtagaataagaaaaaaaaataagactagttataatattaataaaaggccttttgaaattttttgggaaaaagacattgaatattatgacttaagtttaagaaaataagaaaacatacaatagctttacatcactttcacttagaaatgtctatttccaaaaaagactgtggacaggaatgagtataaatgaaagttttggcagatgtgtggagcttaaagtgataaaaattggattttaatgtccaaaagaaaaggattt

SEQ ID NO: 116502 - DNA, 630 bp, Homo sapiens
actctgaataccagtgtcactgtctgactttgtattatctgagttttttgggtcaggaatttctatattattaggcaatgctgctaaaattatctagttaccatccccagtcctctaagaggcttataatgatgtatctggactgtgtgaggaatatgggaatgatacggtctctggggaatagactaatgtgtggccaatatggactaacatacacataatatgccagtggtactaaatgcattccagagaaagtgtgaccagagactggttagagaacattctgatttcaccgtatgccctcactatgtcctctctttgcatttattgccagattcagggtaaacacatgcttcccaaggatgtataggtagaataagaaaaaaaaataagactagttataatattaataaaaggccttttgaaattttttgggaaaaagacattgaatattatgacttaagtttaagaaaataagaaaacatacaatagctttacatcactttcacttagaaatgtctatttccaaaaaagactgtggacaggaatgagtataaatgaaagttttggcagaygtgtggagcttaaagtgataaaaattggattttaatgtccaaaagaaaaggattt

SEQ ID NO: 116503 - DNA, 444 bp, Homo sapiens
tttttctactaaagttttggctttctcaaaacactctgataataaacagatattatcactctttgggccttcaggaagtcaaaagacaaasttgggcatccaaaaaaaactattgccatgacttttgctcttgaccagtctacttctgttttgaatgggccacttccacctctttgtaaatttttcttgaaagacgttcattttaacatgcacgtaagaaggatcactttgaagaatgtttgggttaatattttctcctttttattttcaataatgcttatttttatcaaagtcttatacagcgctagatgtgtttactgaatgggacatacatcaagcactaacaccagaaacgtttcttctacttaccatatacaaactctacagttactagatacaaactctatagttagttttgaacatagacaaaagttccaacataat

SEQ ID NO: 116504 - DNA, 603 bp, Homo sapiens
cttaatgtccgctttgtatggatgattatataatctagattactgggaaaattatataacttgtcataattagtgagaaattaattgtgaactagtgttccagagagatgaagaggagaaatcaaggaagcagaattgcttttaaattagtatttactaataaagcaaagtctattttcaggttggattcaataaaacaaaggcagtaaatgtaaatgtaacttttttctgagacaacctgttttaaagatctatgtgcttgactagtaccttaccaagatagaaagtttattgtaataatctctaatcacatatactttgaccrtcctcttaccttatgagggtgaaattactgacctgtttgggtttctatgaaaggtaaaacatgaatgaaaataaacagcacattgctctaagccactgttaactatcatggggatattagtaagtgaggttacatctaatgaaaccagtgagataacacatcattcattttttaaactgaaactctgaataattagatgtgtatctgagattgctttatggtacgatttaccaagaattgctcttagctcttaaaagaagaaattatttttaaaagta

SEQ ID NO: 116505 - DNA, 583 bp, Homo sapiens
tgtacaaatttcataatggaattctgcaacctttggagaaattttttatcagactgatccaatagctgggtctttcccatatgcgagtatgctgctttattgttcatttccaacttaattttttgtcaaattatccctttccatggcatgtctttatcagaagttaccttataaggtgtctttatttctttacctctgcatttagttaaaactgtaatttttatgttgaatattaaaagataaaagggaattcaaaattattcaaagtataacctatttaacctaatataaaattccagtttgaacaaaaagtgtattatttttacatgaagaacatggcttcagaaaatcttagctgatctgatctatcttatcagacctagaatctgatcatcaagactgctatggactgttgcagacrgtgtatacttaataaccactaaaggacaagataaacctggcatataaaccagatgcctggcctctagagccaagcatcataggatttttgtgaatgttgaaattatgcccatcaagttcccaacccaaaggttggcatataagacgtgtatttttattcgtt

SEQ ID NO: 116506 - DNA, 620 bp, Homo sapiens
agtaaaatgcaaaatattagaaatgtgttcagtaagacaaaattttttattgatatatgactaaaaattcttgaaggtgacattccaccaaatcgtttagccagcacattgtgtcaattccaaaattatattgtaaattacaaataaatatggtaaattataaaacacaaattatrttttgcataatataattacaaaataatatttgaaaacataatttacaaacagcaccacacgttttcacaaaggaacctcccttcttccatgctatgatttcatgctgcaaagcatttcaaaatgggtcctgttaaatagctgatctttcccttcagcaaggattagatgatcagaaaaaccttaattatcccatcccctgaatctctccatcctgtttttagatatatttcccatttcaactcacactggggaagacatcacctatagagaaggatatgcaaacgtttgggcagcttgacagcttgtcagaaatatagcttgcattgcaagacagaatgagaacaacaaagtttgtctggcattcaccatcccaggagctaaaggaagatgtaactttttctgttgtggttgttatttctcaggagacagaaagcctcttctga

SEQ ID NO: 116507 - DNA, 620 bp, Homo sapiens
agtaaaatgcaaaatattagaaatgtgttcagtaagacaaaattttttattgatatatgactaaaaattcttgaaggtgacattccaccaaatcgtttagccagcacattgtgtcaattccaaaattatattgtaaattacaaataaatatggtaaattataaaacacaaattatattttgcataatataattacaaaataatatttgaaaacataatttacaaacagcaccacacgttttcacaaaggaacctcccttcttccatgctatgatttcatgctgcaaagcatttcaaaatgggtcctgttaaatagctgatctttcccttcagcaaggattagatgatcagaaaaaccttaattatcccatcccctgaatctctccatcctgtttttagatatatttcccatttcaactcacactggggaagacatcacctatagagaaggatatgcaaacgtttgggcagcttgayagcttgtcagaaatatagcttgcattgcaagacagaatgagaacaacaaagtttgtctggcattcaccatcccaggagctaaaggaagatgtaactttttctgttgtggttgttatttctcaggagacagaaagcctcttctga

SEQ ID NO: 116508 - DNA, 586 bp, Homo sapiens
ttttccatctttgagtgctgttagttcttttctaagcagaacctgtacttctcagggagtttcctcattctttccttctgatagacaacttgagtggtagttcttctctaagtgggtacatacttgccttcaatatcctataacttatatattgagatttagggttactgtaatcaattcatttttttttagataagaggatagtgcaagaataaatgaaatgcttaagggcctgtattacaccattttcatgctgctaataaggacatacccaagactgggtaatttatacaggaaagaggtttaatggactcacagttccatatggctggggaggcctcacaatcatggcagaaggcaggaggagcaagtcatgtctcacatggatggcagcaggcaaagagagagcctgtccagggaaacttccccttataaaactatcatatcttgtgagacttattcactatcacgagaatagcacaggaaagacctgmccccctgattcaattacctcccattgagtcccttctacaacacgtgggaattgtgggagctacagttcaagatgagatttgggtagggacac

SEQ ID NO: 116509 - DNA, 573 bp, Homo sapiens
ttagggatcagttttctgaattgattcttgggtttctggttttctggaattgactctctaatctgattagatttaaagatgctaatgactttccagttgtaaagaaagcaccaatattccaatatctttataatagagatatgtaaaatgctccattggaaacctcctaatcaattgcttgcaagaagcagggagatgagcgtgtatgtaatactttcacatatttttggaaatataattcaatataactaagtaggtagaatagttgctcctattatcactggacaaagtagtgaaagaatgagctcagggatttgrtttcccagctcaagggctgcataattgccctgaaaacttccatatgtaccttgaaggagatccctatctcttccagccccagaactgagattactgaaaattaaaccccaaatcctatcctgttgctgctgatcacagtgcaaattgaacttttagtttcatggggcatccattttttaaatgagagtgttgtttgggagagaatgggatcctataagttgaaatggggcttgcggaaagaccttgatgcaactg

SEQ ID NO: 116510 - DNA, 603 bp, Homo sapiens
tgtgattctaaaagcagcatttcttctattatattaacatgcttcccataagttctacttcatctcataaaataacaagggaagagtaaatatggtatttttaatgagacctaaaaaactaaagtattgctgggatagtaaatatcagttcaacttgtcaaaagttgttctcagatggattttaatatgcyctagactgtgaattccttgaaaagtaagactgtatcttactcactttgacatccccagctgctgtcacagtttttgttgtattgtaattactaaaaacaaatttggctaaacttttgaactgatcagtaaagtactgtttgatttctaatatttcatatcaagtgagttttgaatgctctactggtagttttttccttgtcattttttttgcaagagctaaagctacaatttaatagaagtccaaatggaaacatcagtattaacaaggtacatttcacaggttcagtgattttgatgtggttccctccacctcctgctcccatgactacctggcaatttacgatggtgccaataccagcgatccccttcttggcaaattctgcggttccaagcgcccaccaaatgtgaaga

SEQ ID NO: 116511 - DNA, 177 bp, Homo sapiens
ggccagtctgggaagcctctttgtccccacaggccagacatgctcctcttccacccagagacattgaggtacccgggggtattggtaggggaaaattastataccctttgctttcaactgagaaacacacagagtccctcaggtagcaccagcaagaaccagtgagagccccggtag

SEQ ID NO: 116512 - DNA, 177 bp, Homo sapiens
ggccagtctgggaagcctctttgtccccacaggccagacatgctcctcttccacccagagacattgaggtacccgggggtattggtaggggaaaattagtataccctttgcyttcaactgagaaacacacagagtccctcaggtagcaccagcaagaaccagtgagagccccggtag

SEQ ID NO: 116513 - DNA, 577 bp, Homo sapiens
acaataaagaactaaatagaaattatagaactgaaaaatacactaacataaataaagaacatgctgaataggctcaatrgtagcatggagatgacagagaatagaatcagtgaacttgaagatagaacaatagaattcacccagtctgcacaataaagagaaaatagactgaaaaaacaaacaaactagatcaacacagacttagggactcatggacagtaacaaaagattcaacattctctcaaagggagaggagagagtgcagctgaaagaacaatcaaagaactagtggctgtaaactttcccaaatttggcaaaagagacacacctataggttcaagaagctgagtgaacctaaaccaagataaacacaaagaaatgtaagttcagacatatcttaattaaacttctgaacactgaaggcaaacaaaaagtcttgaaagcagtcagagagaattgggacattacctagagaggaagaccagttagaataaaagcagatttctcatctgaaaccatggaggccctaatgaattgacaatatattcttcaagtgctgaaacaaaggaattgtcaa

SEQ ID NO: 116514 - DNA, 612 bp, Homo sapiens
agaatataaacgcccaagatttggtgttttatcaattacagcctttgtcttctgaattctgtacaaaatacacagacatttcgttcctaacatcctccctcaaaataaagcacatgcttaaaagaaaaaatcacctaagcagactttttccaagaagcacatatagtactttttattcaaggcaacatgcagacctgttaaacattttttttttaatttttttaagtttgcagtcttctctgaagacttcaataaagcaaagggagctcatatgcctcacccagtctgcctgacttaaagtagtgtgaggcaagaatcatccacatgtagagttaaacaatgaaattttccaagtatatacatgctgtgagaatcaataacctcttctcaaaccagcaaattggtttcaagtattcggttcactggttacatccaacagccacaataaraggccacctttggagtgaaagggaaggtgaagatgaattcttgaaaaatgcgttctcatcagaattcctgtgcttcttactgcatggagggtatttgtaaaactcttcagaaagaacactgagtttaatttcaggcaatcttttttgttgattttttttcact

SEQ ID NO: 116515 - DNA, 522 bp, Homo sapiens
tgggggaggggtgacacaatcatccttatgacgaccactaggactgtactgaggcagacctgaagccagcacagcactagtctcacccaaggctcactataaccactacatggctactgcctmtgttcactcaagaccttagggctctacgatcagcaggtggcaaagccagccaggcttttgttcttcccttcagggtgatgagttccccttggtcctaggtaggtccagaggtgccatttgggagcagggcctggaatcagaaaccttaggaatctacctggtgctctgttctactgcagctaagctgtcacccaagcaacaagaaaaagtccttcccacttttatctcccctttccacaaacagaggagtctgtccccatggccaccactgctccagacacatgggaagcactgcctggctactgtcaatgtttactcaaggctcaggagcccttcagttggcttgtggtgaatgctgccactcctgggactcttccttcagggaagggggcttccctt

SEQ ID NO: 116516 - DNA, 522 bp, Homo sapiens
tgggggaggggtgacacaatcatccttatgacgaccactaggactgtactgaggcagacctgaagccagcacagcactagtctcacccaaggctcactataaccactacatggctactgcctctgttcactcaagaccttagggctctacgatcagcaggtggcaaagccagccaggcttttgttcttcccttcagggtgatgagttccccttggtcctaggtaggtccagaggtgccatttgggagcagggcctggaatcagaaaccttaggaatctasctggtgctctgttctactgcagctaagctgtcacccaagcaacaagaaaaagtccttcccacttttatctcccctttccacaaacagaggagtctgtccccatggccaccactgctccagacacatgggaagcactgcctggctactgtcaatgtttactcaaggctcaggagcccttcagttggcttgtggtgaatgctgccactcctgggactcttccttcagggaagggggcttccctt

SEQ ID NO: 116517 - DNA, 522 bp, Homo sapiens
tgggggaggggtgacacaatcatccttatgacgaccactaggactgtactgaggcagacctgaagccagcacagcactagtctcacccaaggctcactataaccactacatggctactgcctctgttcactcaagaccttagggctctacgatcagcaggtggcaaagccagccaggcttttgttcttcccttcagggtgatgagttccccttggtcctaggtaggtccagaggtgccatttgggagcagggcctggaatcagaaaccttaggaatctacctggtgctctgttctactgcagctaagctgtcacccaagcaacaagaaaaagtccttcccacttttatctmccctttccacaaacagaggagtctgtccccatggccaccactgctccagacacatgggaagcactgcctggctactgtcaatgtttactcaaggctcaggagcccttcagttggcttgtggtgaatgctgccactcctgggactcttccttcagggaagggggcttccctt

SEQ ID NO: 116518 - DNA, 594 bp, Homo sapiens
gaactgcgaaatgcctccctcagaaatgtccaattgctcaaggggagaagcagggagtggggtcaggtagcagccaggaaggttgcaggggccacgggcacatcctctccctgagtggtaaggtggcaagtgggtttggggaccattgctttgacaacttgtcaagggtgcggagagggctgtcccagcaaggtgaagaggtctgtaggaaaggagtctccccagagacctcctwaggaccagaagagcgcgcaccccgccaagtgacagaacgtgccccctctgtgtccgctcccttcccccgcggccaatcaccgggcagaggcgtctcacgccagcaggtcctccctggctcctctccttactcgtccgggcggaccaagcctcagcaggagccccgcctgtctccaggcagtttgagcccccgagcgctcgcccagcctgtcagtaaccgccgtttgcgttttcttccttcctttctttcttttttttcctcctcttttcttttccccttctgcctttgtcccgcttagtaactgggctctgaccaatcgccgccttaccggccggcgccgctgtctcctgattggcccg

SEQ ID NO: 116519 - DNA, 594 bp, Homo sapiens
gaactgcgaaatgcctccctcagaaatgtccaattgctcaaggggagaagcagggagtggggtcaggtagcagccaggaaggttgcaggggccacgggcacatcctctccctgagtggtaaggtggcaagtgggtttggggaccattgctttgacaacttgtcaagggtgcggagagggctgtcccagcaaggtgaagaggtctgtaggaaaggagtctccccagagacctcctaaggaccagaagagcgcgcaccccgccaagtgacagaacgtgccccctctgtgtccgctcccttcccccgcggccaatcaccgggcagaggcgtctcacgccagcaggtcctccctggctcctctccttactcgtccgggcggaccaagcctcagcaggagccccgcctgtctccaggcagtttgagcccccgagcgctcgcccagcctgtcagtaaccgccgtttgcgttttcttccttyctttctttcttttttttcctcctcttttcttttccccttctgcctttgtcccgcttagtaactgggctctgaccaatcgccgccttaccggccggcgccgctgtctcctgattggcccg

SEQ ID NO: 116520 - DNA, 593 bp, Homo sapiens
tctgtgtgtccatgccttttcagtttctccaggccttttatatgcaaatgagtcctggcctcctctgccctttgttgatgggagccagggagagagaacctcaaggtctcagagctctgggggtgtaccagaatcttggataggggaggtgtcatcctttctgactttgtgactgcccttcccccaccctgtccccagccttccaccatttggtcacaaggatgcctgcctgaggtcgggacacaaggaatctccttgtctaggctgcagcgtgggggcgtggcagggaaagacagaagctctttggtcccggggccccatcctggaaaaggagagggagcaagggaaaggcctgtttacttcctcccttagagcaagccctgactccyggaaactgaggagagagcagagcctgggtctctgagcctgggtcccagagccctgccgaattacaaattatatcatagaaggaattcagggaagctgccaacctggggctcagaggggacggtcccagagatggggacaagagctgtggctggtgtcagagaatgaattcttagagattaaccctttgaactctggggtaactg

SEQ ID NO: 116521 - DNA, 578 bp, Homo sapiens
tgatcttaaggcagtttttcatattctttgagctctcttccaaatcattcctgacacataattctaccaactgctaaacctaatcttccataataatttgtgtttacatgttctaatcttactgtcaatttaagaggtattaatgrgtaatactgaatatattctcagaaaaaaatggttgttttatttacctaaataaaacacttaggttttaataagactgttagaatgcttatgcatagttctatgatatatgaagttgaagatttttccttttaatttaaaaaagttctcttgcatttaaggaatgaaagccattctaacttgagttcatggtttattatattaaggaggcttaagctacagactttggtgtcataccaattgtaatggttactgcttattcctgtttttaacaggaagcttttaatggaaacagaacacacaaacaagtgcacagaacaaaaatatctgcttcttttcactaattagcatagtcatatacagtcatggactacatttataaatgtaaggtgaaatcaccttttcaaaaacctgaaagttttaagttttggatt

SEQ ID NO: 116522 - DNA, 593 bp, Homo sapiens
ataactggaaattgcaattaagtagaagataatactgcttgcagtattctcagagaatatcaagtacatagataaagctaacatacagtgtgaaggacctctgcaaagaaaattttaaaactttattagtagatatgaaagaacacaaataatgtgaagattacgttcaattttccccaaataagttattaattaaaagcaattttaatcaaaawctcagagttttccatgaaatttgataaaatgtatgtgttagagtaaatgttcaagatcagctattagatatcttaggaggaatatgaaatgggaattgccatatccactgtcagaacttagtatgaatctacagtaaattagacaaggtggcactagttcaaagaaagaaaaaaaaatgaccaatggaattctaaagagggagcccagaagagtggctgtgtggctgtgtcactttatctaagttggaacagtgattcccagaattgtcataattttgcgttggatgacatttccaaaaccttcattcattttagtagttcaagggctgattcacattgttttcagtgaatttttcctggttaccttagccacaagta

SEQ ID NO: 116523 - DNA, 593 bp, Homo sapiens
ataactggaaattgcaattaagtagaagataatactgcttgcagtattctcagagaatatcaagtacatagataaagctaacatacagtgtgaaggacctctgcaaagaaaattttaaaactttattagtagatatgaaagaacacaaataatgtgaagattacgttcaattttccccaaataagttattaattaaaagcaattttaatcaaaatctcagagttttccatgaaatttgataaaatgtatgtgttagagtaaatgttcaagatcagctattagatatcttaggaggaatatgaaatgggaattgccatatccactgtcagaacttagtatgaatctacagtaaattagacaaggtggcactagttcaaagaaagaaaaaaaaatgaccaatggaattctaaagagggagcccagaagagtggctgtgtggctgtgtcactttatctaagttggaacagtgattcccagaattgtcataattttgcgtwggatgacatttccaaaaccttcattcattttagtagttcaagggctgattcacattgttttcagtgaatttttcctggttaccttagccacaagta

SEQ ID NO: 116524 - DNA, 615 bp, Homo sapiens
tttcaatttatttacctagtggagatgatgacccacaactcttactgttttcatatttcagttcacctaacaactttgaataaataccatccatttgcctatatgatttttatttgtttttattatttttaatttgttctctatatgtctatctctttatccaaaaataaagttcttaacaatatataattatctctttctctctcttttcctcgtttctcttgctttatctcaatttccagtatgatgaaagtcacaaaacatatattattagttactcccttaatttaacagaaagtgatgacctatgagacttggaagattttagcttctaaaactaatatagtttccaaatctagtaaagagcatttaaaaacattctcttttattttcaaattcctattgtatatatttcaaatcacacyatgcattattgcaaagatctcctgtgttctccttatggtacgtattttctcctcttggtgcttagtctagccctagatacccaagagacaatgatcagtgagaaagatgttggatcttccttcatggaggtccagccacttagaaatgatagactaaaaaacagtcaaatatgtagaagagttaacaatt

SEQ ID NO: 116525 - DNA, 598 bp, Homo sapiens
ttgtgcatgtcattgaaaaaaaatgaataaatgtccaacattcatctttattgttttactctcatmttactcattaatgtaagccaaactatcaaccaatattcatgttggaactataatgagttgttaattgcaactatagtttggctttggatacaagagtgcatcaatatcaatgaaagtactctgtgagaattatttgactacgtggaaattataataaaaagtactgtattttatcatcatttataaaattgtgagttacacatcctttacaccaataacataaattaatgtacatgaatctgtgtgtatatatacattttatgagagctggtgttaagtacatatcagcagaccatgggaaatagctctattttcagcttctttccctcatttacaggcgttcaaatgaaagtgaatatgtgctcttccatgagcacacctttcattttcccaactccctgtgcctgggttgctccttccacatggaatgacttcgcaaactaattctgttattattgctttatacacatttcaagacttagttcatatggcgccttcattaagagtaccattacctctcaggttacatatg

SEQ ID NO: 116526 - DNA, 614 bp, Homo sapiens
tacttgggaagatttcttatataagatgattattattgcattaatattatatttcttcagtgtgataatgttattgtgattatgtaggagaatattgtgtcattatgagacaatatagaaagtattatgatgcttaagtaataaggagtatagtatcatcgtatctgcaatttactctcaatatttttctggaaaagaagacaaatctgtatctatatttatgcctacctctatttctatgactatatctatgtgaatactcaatatctatagttatatctcatatgcaactatatttatcaatgaagcaaatgattaacaactgatgaatctaaattaaagccatgtaggagttctttcaaatttcttataggtctgataattttcaaacaaaagaaattagggtaaaaatggtctcatttactacataacatatttttttcttaattttccccatatttttgacatataacaagctatagaaaatatgctgataattaagaccaacattcaaaatactacttacccaaactcacaaagttaaaatctgatagggctgagrtacacatccaggctggattggaagttcttgtccttgtcacattgttacctat

SEQ ID NO: 116527 - DNA, 614 bp, Homo sapiens
tacttgggaagatttcttatataagatgattattattgcattaatattatatttcttcagtgtgataatgttattgtgattatgtaggagaatattgtgtcattatgagacaatatagaaagtattatgatgcttaagtaataaggagtatagtatcatcgtatctgcaatttactctcaatatttttctggaaaagaagacaaatctgtatctatatttatgcctacctctatttctatgactatatctatgtgaatactcaatatctatagttatatctcatatgcaactatatttatcaatgaagcaaatgattaacaactgatgaatctaaattaaagccatgtaggagttctttcaaatttcttataggtctgataattttcaaacaaaagaaattagggtaaaaatggtctcatttactacataacatatttttttcttaattttccccatatttttgacatataacaagctatagaaaatatgctgataattaagaccaacattcaaaatactacttacccaaactcacaaagttaaaatctgatagggctgagatacacatccaggctggaytggaagttcttgtccttgtcacattgttacctat

SEQ ID NO: 116528 - DNA, 582 bp, Homo sapiens
tctggtactttggtattcgtgaaattgagatggagatgggcagaaagttagacaatattcttataatcgctttagtcttctcatggaatgatcctaacactataaaacaacttaaacacataacaaatattctctttctaaacagtagttgaaataaatccaaccagaataccaagaaaaccttctctataaatcctttcatcacaaaactgctctatttcttttccaaaccagaaaaaaaagttttcagaagttaaaagggcagtttttatgccaaaaccacawtttttttgacctaatattaaattcttaagattttttcctttctttctttctttctttttctctttctttctttttctttcttcttttcttttctttctttccttctttccttctttctttttctttatttttttcttttttctctttttcttgctttctttcttctctcatcttcctcctcttcctgtcattgtcttccttctccttcttttctttatttttctttttcttttaaccttcagaggcagagatctgtggttactaccaactcctttttacacagggagtgcagatcat

SEQ ID NO: 116529 - DNA, 385 bp, Homo sapiens
ggcccatttactcctggaataatactatattccccccaactcacagatgaatagatctataatgaagtgcaattttcctcagaaaataaacaccagtgagtggaaaattgaggttacagcatgtgcattgcaaagtaatagtcacttaagcattgaatccagccaaaggacaattggaaaagatgaaggacattcaaataagaagtagaaacctggcaaaggttaaagggsgtccagtggaagctttagaaaacagggattgcaagtgtaacaatgaaatgattcagttctgcaagacagaaggggttgagagggcaagatacatcttggttcgcggtctagacaacagttatgtacatgctatggtccaatgggtgacctcaca

SEQ ID NO: 116530 - DNA, 555 bp, Homo sapiens
ccacatctgaagggtgaaaccaggtggtgataattgaatcatgggcrcagttttgcccatactgtgctcgtggtagtgaataagtctcacaagatctgatggttttataaatgtgagttcccctgcacaagcactcttgcctgctgccatgtaagatgttcctttgctcttcctttatcttttgccatgattgtaaggcttccccagccatatggaactgtgagtccattaaacctcttccctttaaattacccagtcccaggtatgtctctattagcagcatgagaacagcctaatacagttcatgtatggatggagtgtaatagacagttatctatggttggtctcttaaagatactaggctagtgtgtgaggcaacttataaaaagaataactctcaataaggtttgtaaaactggacaaagagaagaaaactgggatctggtaatacctggtggatttgagagtttggtttgactctgagcttcctagcagctaaagcgagagagagaaaaaatagctcttttattagaaaaaaatcatttaaagaataag

SEQ ID NO: 116531 - DNA, 640 bp, Homo sapiens
ttgcttaatcctttactgtctccttgtttttttcatgtataaaatacaaattatgatatctggcttgctgggatgtggtaaagactacatcataaaataatgtctgtaaggcatacctggcacataatatatgttcaataaatgataactaattttaatgttgttttgctattattgctttmaaagtgacagttgatacccaggaaatcaaaatgcgttttttaaaagctttcagttactccccaagtggtaactccttgcagattttcaggcagaagaatatagcagagatcatggaacaatatttctgaaagcaaactgaccctcacaaacatattggcttgatctgacagacctagccatagtgcaaatgaagagaattgaagccggaatgagctatctggggtcctctgaggcatcaagtccacaggagataatgaaaacatacatcactcgtaaccttttaggccaactgggctattgaacttaacaggagcataatggctttcctggtgtcagaaattctccacccctgcctacaggtagttcatcaaattgctccgtgcttattgcttcaatctgcattgagctttaatacgccctaaaagcctgaatcccttccctcagaactttcaagcct

SEQ ID NO: 116532 - DNA, 601 bp, Homo sapiens
tatatcaggcactttactagtgctgggggtatatctgcaaacaaagcaataaaaacaaacccaaaaatttttgccctcatgtagctcacattacattgaggaaacacaggcaaaaaataatgtacctaagtgtgttggaggccgaaagattgagggtagtgatcaactcagtataccactggaggctatatgagtaaacagcaaactgttctcataaacgcagaatgttggcaaactgacaaacggcgtctgcaccagaaggaatgctgagggcagtcacgccccaagcgcagtgtttcttgtgattaggtacwtctgaagcctgttagtaataatatgaatctgtgatcaattaagcagctgaccaatcgttacctcctcctccctgctctttctacccaataaataagaaaggctgtggaaactcgggggctgcctttgctcactagaagcggggagttctcttcttctttcctgattccccttcctttaaaatagtttcttttgtcttaagtttacatttctgcgtccgtcccttccttcagtcttgtaatgacggtctcaagcagtagcagtggcagtcagtcacataagtgaaaaa

SEQ ID NO: 116533 - DNA, 601 bp, Homo sapiens
tatatcaggcactttactagtgctgggggtatatctgcaaacaaagcaataaaaacaaacccaaaaatttttgccctcatgtagctcacattacattgaggaaacacaggcaaaaaataatgtacctaagtgtgttggaggccgaaagattgagggtagtgatcaactcagtataccactggaggctatatgagtaaacagcaaactgttctcataaacgcagaatgttggcaaactgacaaacggcgtctgcaccagaaggaatgctgagggcagtcacgccccaagcgcagtgtttcttgtgattaggtacatctgaagcctgttagtartaatatgaatctgtgatcaattaagcagctgaccaatcgttacctcctcctccctgctctttctacccaataaataagaaaggctgtggaaactcgggggctgcctttgctcactagaagcggggagttctcttcttctttcctgattccccttcctttaaaatagtttcttttgtcttaagtttacatttctgcgtccgtcccttccttcagtcttgtaatgacggtctcaagcagtagcagtggcagtcagtcacataagtgaaaaa

SEQ ID NO: 116534 - DNA, 601 bp, Homo sapiens
tatatcaggcactttactagtgctgggggtatatctgcaaacaaagcaataaaaacaaacccaaaaatttttgccctcatgtagctcacattacattgaggaaacacaggcaaaaaataatgtacctaagtgtgttggaggccgaaagattgagggtagtgatcaactcagtataccactggaggctatatgagtaaacagcaaactgttctcataaacgcagaatgttggcaaactgacaaacggcgtctgcaccagaaggaatgctgagggcagtcacgccccaagcgcagtgtttcttgtgattaggtacatctgaagcctgttagtaataatatgaayctgtgatcaattaagcagctgaccaatcgttacctcctcctccctgctctttctacccaataaataagaaaggctgtggaaactcgggggctgcctttgctcactagaagcggggagttctcttcttctttcctgattccccttcctttaaaatagtttcttttgtcttaagtttacatttctgcgtccgtcccttccttcagtcttgtaatgacggtctcaagcagtagcagtggcagtcagtcacataagtgaaaaa

SEQ ID NO: 116535 - DNA, 601 bp, Homo sapiens
tatatcaggcactttactagtgctgggggtatatctgcaaacaaagcaataaaaacaaacccaaaaatttttgccctcatgtagctcacattacattgaggaaacacaggcaaaaaataatgtacctaagtgtgttggaggccgaaagattgagggtagtgatcaactcagtataccactggaggctatatgagtaaacagcaaactgttctcataaacgcagaatgttggcaaactgacaaacggcgtctgcaccagaaggaatgctgagggcagtcacgccccaagcgcagtgtttcttgtgattaggtacatctgaagcctgttagtaataatatgaatctgtgatcrattaagcagctgaccaatcgttacctcctcctccctgctctttctacccaataaataagaaaggctgtggaaactcgggggctgcctttgctcactagaagcggggagttctcttcttctttcctgattccccttcctttaaaatagtttcttttgtcttaagtttacatttctgcgtccgtcccttccttcagtcttgtaatgacggtctcaagcagtagcagtggcagtcagtcacataagtgaaaaa

SEQ ID NO: 116536 - DNA, 566 bp, Homo sapiens
atcattatcattgtgccttggcttctgccgtccatcctatcttattcaaagccatgttaggacttaaggaaaagggagagatgctttaaatgatatgtgagagcactcagtattaataaagttaaatttagaagttaaattcgggaaaagaaaagaaaggctgaaaaggctacaaatcttttctattcccagtagctttgtttttttgagatattctagctaagatttcaaagttaactccctagataattagacaaaagctaggccagatgtctaagctaagttttggtttcaaaataattatttttgttaattatcagtaattagtgtcagcatccaaaactttccttagaaccctgggagagagaaggagaacaggagagagaaaaaaaagaggtagcggggaaggagagagagagaaacacargcattatgcagtacaattatattttaggtttaacaaaacctgattcaaattttataattttgaacacagggttttatggaaaactgggtattttgtttcatttaatgcagatgtcttttgcttttacttaaacttaatt

SEQ ID NO: 116537 - DNA, 605 bp, Homo sapiens
taaaatgtaaacagaaaagtacagaatttcaataagtccaaacaatgttagaggggaaaaaaaagaacaaagttgggaggacttaaactacctgatttaaagatttattataaatctatagtagtcaaaactgttataatggcataagatagacaaataaatcaccagaacagaatattccattccgaaattgactcacacagatatggttaattgatttttgataatcatgtcaaggttattcaatagagaaagaatagtctttacaatgagtrgtgccgggaaaattgcagatttataagcaaaataaaatgtctttatctttacctcacaccataaacaaattcaactccaatagtttataactgttaaaactatcaaactttttgaagaaaatatgaaagaaattctttgtcaccttggattaagcaaagttttcttaaatagtatattttaaaggtataaactataaaagaaaaacagtcgataagttggacatcatcaaaaatcttctgctcttcaaaagaaactattgagaatattaaaagacaagccacagactcagagaaaaatatgtgcagtatatgtatcttacaaagaatttg

SEQ ID NO: 116538 - DNA, 612 bp, Homo sapiens
ggagtcattgaagcagtttaagggaatatggtatagtctacattatatgttagaaaaatcaccctgcagataattgatgggaatggtaggtagaggtatgtttrccaagcctggaagcaagaagacttgctaggaagctgtattgtagtccaagttgtattgtagtcccaggaaattacaagggtatgaaatcaagttgtaatggcaatgagaatggagagaaggctatgaatttgttattgaaagaagcaaagaaagatgagcccatgaaacagaacgaaaagaagcagcaggagcggtgaaaagaaaatcagaaaatagtagcagcatggaagtgaatgaaaagtccatttccagtgaaaaggagaagttccacagttttaaatactacagaggtcaagtagcaaatttcaccactggaaaagagacattatatatggcagcaaaaacacccttgttgtcttctttgactctcccaaagtaggtcatgtattcttcctttatttttacttgatgattatttgtctgtttcctccattagaatgtaacccccaagaggaccaagactgtttttttgttttgttttattgtggtgaaatatacgtaacataa

SEQ ID NO: 116539 - DNA, 622 bp, Homo sapiens
attagtatttattattaaagtttattataaaaagtgtttaaaaaatgatttaaaacaccaagtttgtttaagtgggctgacaaaggtcaatgtatttggcttttcatcttcctttttttttaaaatagtgttttagagcagttttacattcacagcaaaattaagaaaatggtacaaagttttcccatatatgaatacttcctctaaccatagttacatagctttcccccattaccaaccctcccttttacccagcagagtgatacattgatgagcctacattaacacatcatcaccaaaattttgtagtttacattagaattcactcttaatgttgtacattccatgtgattagayggacctatatccatggttacactagtatatagggtacaacagcctccccttatccaaaggggatatgctacaagaccctcaatggatgcctaaaagaggatagtactgaaatttatgtatcacgtgttttctcttataccttttaggatacatacatacctatgataaaatttagtttataaattaggtacaataaaagattaacagcaataactaatatttaaatagaacaatcataacaacataactgtactataataaaagt

SEQ ID NO: 116540 - DNA, 622 bp, Homo sapiens
attagtatttattattaaagtttattataaaaagtgtttaaaaaatgatttaaaacaccaagtttgtttaagtgggctgacaaaggtcaatgtatttggcttttcatcttcctttttttttaaaatagtgttttagagcagttttacattcacagcaaaattaagaaaatggtacaaagttttcccatatatgaatacttcctctaaccatagttacatagctttcccccattaccaaccctcccttttacccagcagagtgatacattgatgagcctacattaacacatcatcaccaaaattttgtagtttacattagaattcactcttaatgttgtacattccatgtgattagacggacctatatccatggttacactagtatatagggtacaacagcctccccttatccaaaggggatatgctacaagaccctcaatggatgcctaaaagaggatagtactgaaatttatgtatcacgtgytttctcttataccttttaggatacatacatacctatgataaaatttagtttataaattaggtacaataaaagattaacagcaataactaatatttaaatagaacaatcataacaacataactgtactataataaaagt

SEQ ID NO: 116541 - DNA, 635 bp, Homo sapiens
tttttttattcaatagcccatttttttcccaagcaaatcttatgctgtttaaaaaaattaattttggggaagaagaaaaaattttagttgtttttctatatcaattttgtcatggagtaagtacctttagttacccctttttccctgtaacttaccattttgcacactcaggtatacttgaagaagtcatttaccagatgtgttttcaataaacttttcattaaataaataattttaaattagagatatatgtctttatcatttataaattgtaccaattgattcaacactttctcactcccagtaattcctaacatactacaactcttttacatttttatcctctgtttttaagtcacctactattttatatatcatccaattattatcagaaaaagaatagaaaaatcaattgtccygcagcaacaaccaaaccaaatttgctcatttttctaagtatagactaacttagttgtataaaaatatctctaggaataccatatattttttcagtttatcatttgggtaacagacactttcaaggcgacttaagtttttcagtgattgagatggacagtgatggttcctcttctctctttggtttgtttttctatctctatgctagttaagtcctc

SEQ ID NO: 116542 - DNA, 635 bp, Homo sapiens
tttttttattcaatagcccatttttttcccaagcaaatcttatgctgtttaaaaaaattaattttggggaagaagaaaaaattttagttgtttttctatatcaattttgtcatggagtaagtacctttagttacccctttttccctgtaacttaccattttgcacactcaggtatacttgaagaagtcatttaccagatgtgttttcaataaacttttcattaaataaataattttaaattagagatatatgtctttatcatttataaattgtaccaattgattcaacactttctcactcccagtaattcctaacatactacaactcttttacatttttatcctctgtttttaagtcacctactattttatatatcatccaattattatcagaaaaagaatagaaaaatcaattgtcctgcagcaacaaccaaaccaaatttgctcatttttctragtatagactaacttagttgtataaaaatatctctaggaataccatatattttttcagtttatcatttgggtaacagacactttcaaggcgacttaagtttttcagtgattgagatggacagtgatggttcctcttctctctttggtttgtttttctatctctatgctagttaagtcctc

SEQ ID NO: 116543 - DNA, 590 bp, Homo sapiens
gaaacagatctttggtggcttgagtctgagatgtggaggactgactccaaagtaaatgttttgtcacagtgaaaacatcctatatcttcattgttatggtgattaaatgttatttatcaaaagcatttgtcaaaacaaatggtactccacaattaagatgagtacatcttatgtatgttgtatttcaataatgataatttacaaagaaaaaaataaaaaagtaaaaatagcaaaaattctatctatattgctcatggatttactcagtgagaaaatgaaaatgatagttattggatacattaccatgtcaacaatatctaatcactatgattagaaattccactgatagagataaaattaaagaccatgcaatttggtgtgaggaagtgaatatgaacataggaattaagaacacttacacaaacactaaaaatataattattgaactttgagtgagtaaaggagtcataggatgactaayatgttacagactttttttttttttttttttttttttttttgagacagatgctcgttctgtggcccaggctggagtgcagtggcatgatctcggctcactgcaacctcca

SEQ ID NO: 116544 - DNA, 627 bp, Homo sapiens
cagtcacataaagttcaaaagaatgaaaatgaatccataaaagtatacttaaatattatagttattttgggaaaatgtgattaaatatttatagtcttactattgttatttttctaaatttatgtggtggttgcatagttacatcaagtttttgataattcattgagcytctcacgtaagatttgtgccctttttttatgtttgctatacctcaatttaaaaaattgataaagtaactgtacacaaatttatgctctgttattaaattttatttatagttatatgtctaaagtgcatatttttaaaacttccgtgaatttaatcatttgttggtgaaatttttaaatgaagacagcatctgtctaatttatagaaataacatttttattattttgggtaaattggttcagcagctaatttgcaaaaatatcttggtgcctttttcaaagcattctaaaatatttcattatgtaaaagctagccatattaaatttttccagaaaaccaatgctattaccttaaatatgtctttttaggtaaataaatctcatacttaaaggaagttcttgaaaacaaaaataacaatgaaagtaatttttgtagcaaacagtattaaaaagaagtgaa

SEQ ID NO: 116545 - DNA, 502 bp, Homo sapiens
taagcccgcgcacgatggattatgcctgggcatgatggataatgcccccactttgggaggccaaggcaggtggatcactttaggtaacaaattcaagatcagcccagccaacatggygaaaccctgtctctactaaaaacacaaaaattagccagacatggtggcgtgcacctgtaatttcagctacttgagaggctgaagcataagaatcacttgaacttgggaggcaaaggttgcagtgagctgaaattgtgtcattgcactccagtctggttggttgatggagtaagactctgtcaacaacaacaaaaaaaagcaaagatattttcctttccttcatcttgactctagataacctgatgactatgtacctaggcaatgacctttttgtgatgaacttcctttcaaaggtgttccttgaaacttcttgtatttggatgtctaaatctctagcaaggccagggaagttttccttgattatcccctcaaaaatgttttcaaa

SEQ ID NO: 116546 - DNA, 625 bp, Homo sapiens
cattaaatgttagaaaccataatttgctggtactctaatgtcacttactaatctgtaattaaatgagagctgaaaaatgtatgttcccttcaatatattaattttgctatgtgacataaataatgtgaatttgtattataatatatttgcatgatttaaaaagttcttcatttcagtgtacatttgacaaaccattagaagaatacaaatccaccttcttaccacaatacgcttactctttcacacacggacacaaacatcacayattagagggctttgtgtgcgtgttttggattacctagggttgtttgctttagaaaataggctttgaaatcagccaaaatgtatcatagactcaaaactgtgtggcacgctctaatttaaaatgaagacctgatcctacagtcatacatttactatgcttaatcgcaaatctattgacctctcctcaaccctaagccattttggcctgattcacaatttagctattcttcttaccttctccctgctgtaggagcaactgaatagaagctctcagtttgatcaataaatatatgcaggcaaatcccatttgaagatacatcttgatttttgcagtaactggaatattgagatagacacaaaa

SEQ ID NO: 116547 - DNA, 625 bp, Homo sapiens
cattaaatgttagaaaccataatttgctggtactctaatgtcacttactaatctgtaattaaatgagagctgaaaaatgtatgttcccttcaatatattaattttgctatgtgacataaataatgtgaatttgtattataatatatttgcatgatttaaaaagttcttcatttcagtgtacatttgacaaaccattagaagaatacaaatccaccttcttaccacaatacgcttactctttcacacacggacacaaacatcacatattagagggctttgtgtgygtgttttggattacctagggttgtttgctttagaaaataggctttgaaatcagccaaaatgtatcatagactcaaaactgtgtggcacgctctaatttaaaatgaagacctgatcctacagtcatacatttactatgcttaatcgcaaatctattgacctctcctcaaccctaagccattttggcctgattcacaatttagctattcttcttaccttctccctgctgtaggagcaactgaatagaagctctcagtttgatcaataaatatatgcaggcaaatcccatttgaagatacatcttgatttttgcagtaactggaatattgagatagacacaaaa

SEQ ID NO: 116548 - DNA, 506 bp, Homo sapiens
atactatcctattaggtattaaagcttcaacatrtgaatggtggggtgggagggtgggggaggcaaacattcagtccataacacataaaaatcttttattgtgatcaccaaattgattttatgacaaggttgaaagcttggctaatacaacagtatagaccatacaaataatcatttcaatctgaatgcaattacattttgacccatttaagcaattgtggattataatctttcatcgaaaatcctttaaaacttatttgagaatgcagatgtgataacaatgcttgttttctgcactgcgaggggacttttcttccttttaaatttaatcattgggcatttgtaagtcaaaaaagtgaggacggagtttgtggctttttggcacatattatttttgtcttgtgctataggttctttacccagacaaatgtcagaattctgattttttttacactataaaattcagataaaatgacttaaagtctatgattgatggcacagaaaat

SEQ ID NO: 116549 - DNA, 488 bp, Homo sapiens
acaataggttcccaatgttctgctgaaataggctctttctttgtcaataatatgttaaatatgcctcaaattgatcatggtgttacacaagtcatcttcttagtggcctcgctcatcaaggtctttcgttgatatgaaactggacaagtttcaattcgtttttattatagtcagtgtcattattattgcatgagrttttttcagattttgacccagcttcctctactatgttttaaagctgtataatccctcttaactttgtttccttcccatgaaaattcatttcttatatataaaatttattacttcactggcaaatactgttaattctcttccccttccacttcttcgtagtatctgaaatgccaggttaagatatttttagacttaattcagcatgaatggagaatttaggaaatactttgaatagaagatggttgatgcagaatgtgtgcttttgagagagtaatctgacatctgctatgcaa

SEQ ID NO: 116550 - DNA, 563 bp, Homo sapiens
tctagaagcattttttggttttcacaaataggggaagaattactactggacatctagggacagagaatggcatgacttgaaaaaacccacaatattttaccccccartatgcctctttgaaagacatattaagatagagacacagaggaaacagtggttacaggaaagggctgtctgaacgacctttctttcctatgggagtccaaaaatttcctcgtgaaaaaggagcacgggggcctgtttccccactttccgcctgaaagctaggggaatctgggagaaaacggtactactctccctttatttgtctaccttttggaaaccatgaagctgtgttttcttttgtgttgctacttctgaatttattctttgttagattgctatagaagccaggaccctaagccaccatctcaagagatatttttgaactgaggcttcttccaggtaatgtgcatagcatgattaaaaataaaaatgttatttttctcttgttaatccatcttttgtcacagaggtgtcccagatctgaactttttagggttgcaaaaaatatatttttctcc

SEQ ID NO: 116551 - DNA, 543 bp, Homo sapiens
gtctctggaaatcaacctttgatcattcacatgtaggagtgctctgtactcgggggtcgacaaygttaatcacccacaaactgtgtttgctctaggcctttgtcattaaatccgtactcaataaatacaaacagctctggtttattgcggctggactcttgttggtggtgctaagccatgcagtcccctagccgcggtctcaggcaaaatacttgtgtctgcctactccttttatccattgctcagtcagggtctgagggacggacctggcaggtggtgctctgtgtgaggaatgctgccatggattgtgacggaacccccgaaaacaaaggtaaagagactgtgcagtcagtaggtcagtggtacccgctcaggatttccaagatcaagggaattgttaaggctagagtttcatcatggaacaacagttataagctcaacagaaacagtatataaaagtattggaacagctacttaaagctactggagctttggtttcacaggctcaattaaaggacctaatgcaaactgttgtttccctta

SEQ ID NO: 116552 - DNA, 573 bp, Homo sapiens
ttggtgtatcatgcaagtattagactatgctctttrtaatcttctatcacttttattcatagagactaatacaattgccttagaataactactattactattaccctgtttttaccagtactgttgtaggagatcagtcagagtggtgggagaaactataggtgaaggagcaggccttctaaaaggtctgaaggctctgcatagcttcgtggaagaataagctgaaggcagctgttctctgacagtgaagcagagggcaaggagtaagtacaaggaagtgtaggggaatttatcttaaattggcatgtctacttatgttgtccaaaaactgacctttcatcatccacgtgcacaactgctccctgaaagggggagcaatgttaattacctgcagattgtttttgctccaagcttttggcattatgtctgtactgaatgaaagctagcagctccaggtgtttgagactgttcactctttgcccactagtgccaggcaggcccctagctgctcttacaccacatacctgtgtctgagtactcctttcatccattgctctgccagggtctggggga

SEQ ID NO: 116553 - DNA, 573 bp, Homo sapiens
ttggtgtatcatgcaagtattagactatgctctttataatcttctatcacttttattcatagagactaatacaattgccttagaataactactattactattaccctgtttttaccagtactgttgtaggagatcagtcagagtggtgggagaaactataggtgaaggagcaggccttctaaaaggtctgaaggctctgcatagcttcgtggaagaataagctgaaggcagctgttctctgacagtgaagcagagggcaaggagtaagtacaaggaagtgtaggggaatttatcttaaattggcatgtctacttatgttgtccaaaaactgacctttcatcatccacgtgcacaactgctccctgaaagggggarcaatgttaattacctgcagattgtttttgctccaagcttttggcattatgtctgtactgaatgaaagctagcagctccaggtgtttgagactgttcactctttgcccactagtgccaggcaggcccctagctgctcttacaccacatacctgtgtctgagtactcctttcatccattgctctgccagggtctggggga

SEQ ID NO: 116554 - DNA, 510 bp, Homo sapiens
gcccttggaattcgcccattttcgtcattcccaaaaagtctggtaaatggagaatttgcatggcttacatgctatcartgctaatttgcaacctatggggcccctttaacagggactcccttcccctgcggcaattccttgagattggccaacagtcatgattgacttgaaagactgcttttatattattccccttgcaaaacaggacagagaaaaatttgcatttacaataccaactattaataatgaaaggccaccttgccaatttcattgggaagtacttcctcaaggaatgctgaacagtcctaccatgtgtcagtatcatgtaaatcagcttccatccccagtagaaaatttcctaattgaaagatgatccattaaatggatgacatcttacttgcagccccaatggagctgatacttttgaatttatatgcctctatcaaaaggaatacacacttaagaggtttaatcatagcacctgaaaaagtacagctgtcctctccttgg

SEQ ID NO: 116555 - DNA, 510 bp, Homo sapiens
gcccttggaattcgcccattttcgtcattcccaaaaagtctggtaaatggagaatttgcatggcttacatgctatcagtgctaatttgcaacctatggggccccttyaacagggactcccttcccctgcggcaattccttgagattggccaacagtcatgattgacttgaaagactgcttttatattattccccttgcaaaacaggacagagaaaaatttgcatttacaataccaactattaataatgaaaggccaccttgccaatttcattgggaagtacttcctcaaggaatgctgaacagtcctaccatgtgtcagtatcatgtaaatcagcttccatccccagtagaaaatttcctaattgaaagatgatccattaaatggatgacatcttacttgcagccccaatggagctgatacttttgaatttatatgcctctatcaaaaggaatacacacttaagaggtttaatcatagcacctgaaaaagtacagctgtcctctccttgg

SEQ ID NO: 116556 - DNA, 610 bp, Homo sapiens
ctatacaatagcattttatcctcatactaaacaccttctcagaaggaaaatattttgattttacaggaaactaagattcagtgcagtgttgtgatatgagtgacatgagtaacgtggtttgtatttaaaattcaaatgtacacatgtggctttgttcatcatttagaactagtttcaccttactctatataratttgtggtgccatttaaaatgatccttatcagactaactcagcttcttttgagaaatgctcattctgtcaacgtgctgtctttcattgtctgcctgaacaagttcatgtgtaaatgtagatgacggcatgagacagggtaaaagtaaactcatgggcactccccagatgggtgagtgggggtttctgagtctaacggctctcagtgtgctcacctctcatatcgagcatgctgagagaatttaatttatttgcaccttcttgggttacacttactgtacctgcagtttctcttggtgtcttcaggctccctcccctctgctcctctccttgccagggccagaagggcatccatgctccatctttgctcagggacccatcacttccctttatcctttctggggtattatttgaaaact

SEQ ID NO: 116557 - DNA, 610 bp, Homo sapiens
ctatacaatagcattttatcctcatactaaacaccttctcagaaggaaaatattttgattttacaggaaactaagattcagtgcagtgttgtgatatgagtgacatgagtaacgtggtttgtatttaaaattcaaatgtacacatgtggctttgttcatcatttagaactagtttcaccttactctatataaatttgtggtgscatttaaaatgatccttatcagactaactcagcttcttttgagaaatgctcattctgtcaacgtgctgtctttcattgtctgcctgaacaagttcatgtgtaaatgtagatgacggcatgagacagggtaaaagtaaactcatgggcactccccagatgggtgagtgggggtttctgagtctaacggctctcagtgtgctcacctctcatatcgagcatgctgagagaatttaatttatttgcaccttcttgggttacacttactgtacctgcagtttctcttggtgtcttcaggctccctcccctctgctcctctccttgccagggccagaagggcatccatgctccatctttgctcagggacccatcacttccctttatcctttctggggtattatttgaaaact

SEQ ID NO: 116558 - DNA, 610 bp, Homo sapiens
ctatacaatagcattttatcctcatactaaacaccttctcagaaggaaaatattttgattttacaggaaactaagattcagtgcagtgttgtgatatgagtgacatgagtaacgtggtttgtatttaaaattcaaatgtacacatgtggctttgttcatcatttagaactagtttcaccttactctatataaatttgtggtgccatttaaaatgatccttatcagaytaactcagcttcttttgagaaatgctcattctgtcaacgtgctgtctttcattgtctgcctgaacaagttcatgtgtaaatgtagatgacggcatgagacagggtaaaagtaaactcatgggcactccccagatgggtgagtgggggtttctgagtctaacggctctcagtgtgctcacctctcatatcgagcatgctgagagaatttaatttatttgcaccttcttgggttacacttactgtacctgcagtttctcttggtgtcttcaggctccctcccctctgctcctctccttgccagggccagaagggcatccatgctccatctttgctcagggacccatcacttccctttatcctttctggggtattatttgaaaact

SEQ ID NO: 116559 - DNA, 614 bp, Homo sapiens
actattgaaatccactggaagattctatcacagagtgccaaaagcaaagaataaagaaggataaatgataataccaccataggascaaaatctgtagaattgttttaaaaatacttgtaaacaggactagaagacatatttagtgaacacatctaggaagttatgccagcgtgttaggatgtgggtgtaatgaggtttaactccctcgattccatcacatctggtctgctatagataacttgttcattcactcttcctatcctatatttttaagtttttattttactgactcctttacaccagcatttaaataaggtcaacactatttgatcctaaaatcaacaacagccagaattttgaactgtacaattacttctaacttctatcttagatctccaacccattcatagcaaatcttttgagaaagttgtttgcacttatttcaccattattattattttttcaacctcccattcatgtcttttcccattataacctaaattttctccaacactgtactggtttctgccatcacacacagtgatatcgaatgcagtgagaaatgtttcagcaattatatttcttgatgttgaattatgtttttctcctgcatt

SEQ ID NO: 116560 - DNA, 611 bp, Homo sapiens
tgtagcatgtttgatggcattctacacacagtaacatgtcttcaaaaactagacttaaccctctcaaaccctgccaccacttyatcaactaaattcatgtcatattctacgttctctgttgtcatttcaacaatgttcacagcatcttccccgggagtagtttccatatcaagaaaccactttctttgctcttccataggaagcaactcctcatttattcaacttttatcatgaaattgtagcaattcaatcacatcttcgagctccacttctgattctacttctcttgctatttctaccacatttccactacagttatttcctccacagacatcttggacccttcaaagttatccacgatggaatcaatttcttccaaactccttgcattaatccattttcacactgctacaaagaactacccgagactgggtaatttacaaggaaagaagtttaactgactcagttccacatggctggggaggcctcaggaaacttataattatggcagaaggcaaaggggaagcaagcacatcttaccacagcaaagcaggagagacagcaaagtgggaagtgcaacattttttttttttttttgagatagagtctcc

SEQ ID NO: 116561 - DNA, 611 bp, Homo sapiens
tgtagcatgtttgatggcattctacacacagtaacatgtcttcaaaaactagacttaaccctctcaaaccctgccaccacttcatcaactaaattcatgtcatattctacrttctctgttgtcatttcaacaatgttcacagcatcttccccgggagtagtttccatatcaagaaaccactttctttgctcttccataggaagcaactcctcatttattcaacttttatcatgaaattgtagcaattcaatcacatcttcgagctccacttctgattctacttctcttgctatttctaccacatttccactacagttatttcctccacagacatcttggacccttcaaagttatccacgatggaatcaatttcttccaaactccttgcattaatccattttcacactgctacaaagaactacccgagactgggtaatttacaaggaaagaagtttaactgactcagttccacatggctggggaggcctcaggaaacttataattatggcagaaggcaaaggggaagcaagcacatcttaccacagcaaagcaggagagacagcaaagtgggaagtgcaacattttttttttttttttgagatagagtctcc

SEQ ID NO: 116562 - DNA, 606 bp, Homo sapiens
cctaggattttcagaatggtaaatgagcattggcttcaacttaaagatgccagcttcataacttcctaacaagacagtcagcctgtgctttgaagttttgaagcctagcattgacttctcctctctagtagtgaaagccctggatgtcatcttcttccaacagaagtctttttcatctgcattgaagatctgttgtttagtgtagccaccttcattagttatcttaactagatcttctggataacttggtgcagtttctccatcagcactttctacctcaccttgtacttttatgttattgagacagcttctttccttaaacttcatgaaccaacctctgctagcttccaacttttcttctgcagcttcctcayctctctgggacttcatagaatcgaagagatttaggatcttgctctggattaggcactggcttaagggaatgttgtgctggttttatcttgtatccagaccactcaaacattctccacatcagcagtaagactgttttgcttcctatcatttatattcactggagtagcacttacaatttaattcaaaaactttccctttgcattcaccagttggctaactttttggtacaat

SEQ ID NO: 116563 - DNA, 633 bp, Homo sapiens
tcattcttctgagtacatatatccctcttaattgttagacaatcaatatgtatactcctgcttttccctttctaaacataagtgatagtgcaccatacactgttctattcatcttactttttctctctcacacacaaacatacatgcaaactttagctttgagttcatttcatattcacacatagagagcttgcttactctttttttacagttgcattttattactttgaatggatatgcgtaactattttaattaaccagtttcctattgatgaccatttaggttatttccattcttttgcacttacaaacaaatgtcattattacattatggataagtgatttcacacgtgggtataaatatagccctaactaaattcctagaaaaataattactgggttatagattatatacatttgtagtattcgtagatatcagaaaaactgctctaaattcatagatatcagagaaactgctttaaaattgctccaaattacactttcaccaatagatagttctgtttgctccagcaccatcaacaaaatgttatcaaaattttaatttttgcccatatcattgctgaaaactggtatataagaacattttaatttytgtttcactttattagaagt

SEQ ID NO: 116564 - DNA, 646 bp, Homo sapiens
tatattttcatttatcttgggtgtatacctaggagtagaattgctgggtcatatggtaactctacgtttaatctttacaggaactgccaaactgttttccaaagcatctgtaccattttatattcccgccagccattgtaaaagttccagtttctccacattcttgccagtacttgtcacttacccatctttcttattatagccatcctagtgtgtgtaaagtgttctctcattgtagattkgatttgcatttctctggtggctaatgttgttgaacatctttccatgtgcttatattggccatatatcttcttaggataaatattgattccaatcctttggcaatttttaaaattgggttatttgtctttctattattgagttgtaagttctttacatattcttgggtggaaacagtagacactggggactttgggactcaaaagttggaaaaactacatattgagtactatgttcactatctgagtgatgggttcactagaagcccaagccctaacattatacaatacatctatgtaacacacctgcatatgtaccccctgaatctatctatatatatattttaaaaattcttgatacaagtcaagagttcttgatacaaatcccttgatacaaatctcctatc

SEQ ID NO: 116565 - DNA, 627 bp, Homo sapiens
tagttactctataaatcacaacacaaatccttgatttattacatttagtatgatttcatatatttacgatctcctggacaatgcagtaactttagaacctgctaactccatttatctccacctgttgtgaatatatttaatgttggagatattttaagccctatatttttattattgttttatagagatgctattcacttagatttaccccaaaactaattctttccattgctgttctttcttctatcttcttgctcctaaatgtgatcattttccttcactgaagaatacttattagtgcaaatctactgcacagtactcattagtacaaagatgctgctgacaaattctctagtttttgtttgtctgcaaatttttatattttatttcaacttcatttttgaagaatactttggctgggattagaattgtacatgtggtaagcgcttttattttccccatggcacttcaaatacctgttaccactgtctttggcttttattgttaataagctgttagtgttactgttggtctcccakaagttaggtgaattttttcctctgatagttttcaacttttctctttgtcattggtttttagcagtttcactaagatatatgcaggcgt

SEQ ID NO: 116566 - DNA, 620 bp, Homo sapiens
atatagtaagcaggtaactggaatggcaaattaaatagtatatatgaaagcaccttaaaagagtatgtggcaatgagctgtgtattgttattctktgcttcaacactttgactttgcagatgaaaaatctgaagcctagaaagttcatgtgatttggatagtgggatttaacttactttatggagattttatgaaggctaagataatacacattcaacaaatgttaccaattattattattgttgtaattctgcttctgctgttgatgctgctggtggtggttgaagactatgtgggaaggctctctctactacgccttccttttccaattgccatgtaattttcacttgaagagcagttgttgacctcattttatcacaagttctggaaaggtaaatttgatagaatacagtatggaaaaataggtctgaaggaagatgatgcaatttttaaaaagaggaaagaaacactttgatttaatgaaagttattatctcaacaacagtgagaattgtcatttagaattttcaaatgagatattcatttgaatattcatcaaactctgttacttttacggtcccaactattccaggccctaaattaggcatacagttagaattt

SEQ ID NO: 116567 - DNA, 471 bp, Homo sapiens
tacaaggtctattgtaaaacattatacaaatgtaaggtggtggtggtgatattatggaaaactctggagggaaggctatagagttataatttcctatgtaatttattagttagattttcctaagtaattgcattatttcctgcttctttaccatttaaggtatagctgaagttaatggcaaagttagagaaaagtcacagttttgaatgccaactagtagaggaatttgactgaaatatctgcacacatgttctgtgcttaaaattgttacaacgtcttcttaatgctttcagtgtatgaactgagtttgcacatgatctgttctgcgatccgtactttttcgggcagatgctacaatagcctcatgttttctgtgctgagacaccacagctgcagagtcatcagcagaacagagcatgacacatgaactacttstacaggatcaggggtgaattctcaccgagccaattt

SEQ ID NO: 116568 - DNA, 450 bp, Homo sapiens
agcattttttagctaatttttgcattcattttatttgccagaattttgtcccattgctgtcctcagacaaaagggaatttttaaaagtgagttttagatttttaacctttaggagaacaaaacaagagaaagcgggaacagggttgtaaatgatgcagtgaaggctcttcatgatatagattaaggttcagtgacattttttgttggtttactatatttctcagctgtgacttcaaactgcaaagacactcaagagtcacatatgccaaaaagctttagtgaatttctaccctaaaattgctggtgccacatctggataggtggattaaaattgattcgttgttcacattacccctgccyggtctcagagtggctctggatttgataattacacaatctctgatgatatatttctaattcaagattcaaactgtggcttcccccacataa

SEQ ID NO: 116569 - DNA, 542 bp, Homo sapiens
cttattctcaatttctgtactaactttgtgatatactgataatgccacactctgagtaataccggtctagagagtggggaggttgaaggactcacaagaacaaggatatctaatattcaaatgtaagttgttattgctaatctatatgaayccttatgttactaaatttttaaagtttgtttgacatgcaaatgctttgtgagactggactttgttgtggttgttgctggggattagggagtttaaaaaacaagaaagggagttagttttatgtcttggtcaacacagaacagagacaagagaagggagtagatgacaatacacaaaaactcagtaagatcaagggactgaagccagagcgactttgagaatgtaatctctgtagattgctgactccccaaaaattccaccaaaagacacagattaagcaaatcaagtgtattacctttgtaataagggagataactaacttgacagaaccatagtagcaacttgaatgatagagtacaaaagaaaaatacttataagagtatggtttaagg

SEQ ID NO: 116570 - DNA, 468 bp, Homo sapiens
ttactcatgaacctaaaagcatgactaccccgtttagcaagatggagccaagaaagagatgaggatcttttcgtagatgataataggggagttttaggtgacattaagcacaatatgagtcaaaggtggttaaaagcaacttgctccaactcctcagcatcaacaaaccaaatgtcaacttagggcagtgatagaacccttctgcctccctgactgagactaatyggaagaaatctggagtgctgcattttggtcaaagcatagaagtgtagcatgctaggaagatgaaaggacttaaaaccatgttaccgaagagtggttgaagaaactgaggatatttagccaagaggagaaaagacatagagggagagctaatagctcctgtcatgtgtctgaaggacctcagaaaaaaacaaaaacaaacaaacaaacaaaaaagattatttgattatctttctccccttgggg

SEQ ID NO: 116571 - DNA, 659 bp, Homo sapiens
attagagttaagaaaaaggcacagatatttcttgttagcactattacttaatatggttctggaagttctaccttattagctaaggtaaacaacaccaaagagtactgaagtacaagtattgaaaaagtagagacaaatatatttttaaaayatatttttgtaatagtctcgcaagttctgaggggtttatcaggggtttccacctttgcttcttcctcatttctttcttgctgccaccatgtaagaagtgccttttgccctctgccatgattatgagagacttccccagccatgtggaactgtgcatcaaattaaacctccttttctttccagtcttgggtatgtctatcagcagcgtaaaaacagactaatacgtgggtggatccttcacgaacagattactgccttccctggatgaattcttgctctattagttcccataagagtaggttgttaaaaggagcctgacacctcctcccctctctctcttgcttcctctcttgccatgtggtctctgcacatgccatctcgccttcactttctgccaccagtggaagcagcctgagctccttaccagatgcacatgctcatgccatgcttcttgcacagcttgaagaagtgtgagccaaataaacctctctctaaaataaatcacacaa

SEQ ID NO: 116572 - DNA, 520 bp, Homo sapiens
attcccatttgataggtgaataaacccaggcttaagtaacctctccagggccacacagatgctaagtgggaatactgggatatgtgctcaggcagtttggttctagaatatgtactctcttgaactttgtatttatttaacctttaggaacattaccaaaattaaccaccctgatggtgtagttatatggcttagtggaatgttggctgggacacctggagttcaaagataagtcctggatttataggcttagcaactaattcaaatcagccaacctcaaaagagctgagcttatcacacagaaagaccatttaatagtttccagtgggtggtcttttcctttcctgtgactggaatgakcagtggttaatagtatgggcattagcctgtattattttagccctagatttgaattaagatctaccacttactagctctgtaaccttggccaatatatttatcctcagtttccccatgtataaaatgaaggtaatagtcccatttcattaaattgtcatga

SEQ ID NO: 116573 - DNA, 535 bp, Homo sapiens
agaccagactgggcaacatggcaaaaccccatctgtgcaaacattacaaatattagcccggcatggtgccatatgcctataatccagctacttgggaggctgaggagggaggatcccttcagccccagaggtcaagactgccgtatgccctgatcctgccactgcacttttggaggctgaagcaggtggatcacctgagatcaggagttcgtgaccagcctggccaatatagtgaaaccctgtctctactaaaaatacaaaacttggtcgggtgtggtggcgggcacctgtaatcccagctactcagcaggctgagacagaagaatcacttgaacccgggaggcggaggctgcagtgagccgagatcacaccactgcagttcaaccttggcaaggcagagtgagactctgtcaaaaaaaaaagaaaggaagaaagaaagaaagaaagaaagaaagaaagaaagaaagaaagaaagaaagaaagaaagaragagagagagagagaaagaaagaaagaaagaaagagaaaatcagtg

SEQ ID NO: 116574 - DNA, 509 bp, Homo sapiens
ggaattctacttaaggcctcttaacggacaactccctggaggcccagagacacacagatcatatgggctgtctgaatgattactttattatagtaaagtaatttattatatagtatataatttatagtcagcttacagtcatgtagcattttcaatttgtcaaactctttcccacaaatgtaatccttaaatagcaccaaaagctaggaatttttatgctcatgttacacacagttttacagaagctcagaaaggatgggtgaatttcccaaagtcacacagccagttagtatcagagacaggctttgagttcaggtctctgactgcaggttagtttggtgtttgctgtgtacataagaygggcgacagagcgagactccgtctcaaaaaaaaaaaaaaaaaaaaaaagactgttctctccttccatagttctgtcctcgcctcctttttttagggtctttggtttggggcccactttttttgtttgtgttgtttaaccaccctcccct

SEQ ID NO: 116575 - DNA, 599 bp, Homo sapiens
tttgataaaatacaacatctatcatgataaaaactattaaaaattataaatagaagctttccttgaaaggaatcctggtaaagggcaactatgaaaaacttacagctaagatcatacttaatgatgaaaaactgaatgtttcctccctaagactgggaacaaggtaagaatgtctgcttttgtcactctattcaagattgaactgttagtgctagttcaataaaggggaaaaagaagaaagaaagaagacacattgaaaaggaagaagtaaaattatctctattcacagataacatgattgtatagaaaatcctaaacaaaaaaaatgttttaaagctactagaacaaataaatgagttaagcaagttcacaggtcaatataataaaaccaactgacctatgatacaagaaacaaggaagcgggcactgaaattaaaaacaataccaatataatagcaayaaaaatataaaatatttagagaggaattttatgtgtacaaaacgtgtacactgaaaaccactaaaatggttgagagaaaataaaaaagacctaaacaagtggagagatatcaaactatgttcatagactaagacttgat

SEQ ID NO: 116576 - DNA, 557 bp, Homo sapiens
caggatgattcaatgcgtgactttggaagttcctcctttgacaccagaaacataactacgtggcactgatggctcaacttctccatgctcaccttcttccaaactcagtcttcccttttctcacttgggtggagggtggaagaaacagtgtgtgttttcaacttcttatagsttgaggagggagacaaattatcttggcgctggagaactggtcccgagtttcaggcttcctaagcctgagaccaaactatttgtcaactgtgcaagactatattcacactttagctctaaaaacttagcaacaagaatagttctagagttgcagtttttaaacattttggtctcagagcccttttactgtcttcaaaaatattgaagatcctaaagtttgtgtatgtagtacttatttattgatattttccatattaaaaataaaactaagaatgaaacacctgatctatttaactgtaaaccatttacatgtatgtataaatatttcaataaaatgtaactatattatgtcaaccaaaataatatacaaaacaatatatatatga

SEQ ID NO: 116577 - DNA, 557 bp, Homo sapiens
caggatgattcaatgcgtgactttggaagttcctcctttgacaccagaaacataactacgtggcactgatggctcaacttctccatgctcaccttcttccaaactcagtcttcccttttctcacttgggtggagggtggaagaaacagtgtgtgttttcaacttcttataggttgaggagggagacaaattatcttggcgctggagaactggtcccgagtttcaggcttcctaagcctgagaccaaactatttgtcaactgtgcaagactatattcacactttagctctaaaaacttagcaacaagaatagttctagagttgcagtttttaaacattttggtctcagagcccttttactgtcttcaaaaatattgaagatcctaaagtttgtgtatgtagtacttayttattgatattttccatattaaaaataaaactaagaatgaaacacctgatctatttaactgtaaaccatttacatgtatgtataaatatttcaataaaatgtaactatattatgtcaaccaaaataatatacaaaacaatatatatatga

SEQ ID NO: 116578 - DNA, 557 bp, Homo sapiens
caggatgattcaatgcgtgactttggaagttcctcctttgacaccagaaacataactacgtggcactgatggctcaacttctccatgctcaccttcttccaaactcagtcttcccttttctcacttgggtggagggtggaagaaacagtgtgtgttttcaacttcttataggttgaggagggagacaaattatcttggcgctggagaactggtcccgagtttcaggcttcctaagcctgagaccaaactatttgtcaactgtgcaagactatattcacactttagctctaaaaacttagcaacaagaatagttctagagttgcagtttttaaacattttggtctcagagcccttttactgtcttcaaaaatattgaagatcctaaagtttgtgtatgtagtacttatttattgatattttccatattaaaaataaaactaagaatgaaacacctgatctatttaacygtaaaccatttacatgtatgtataaatatttcaataaaatgtaactatattatgtcaaccaaaataatatacaaaacaatatatatatga

SEQ ID NO: 116579 - DNA, 557 bp, Homo sapiens
caggatgattcaatgcgtgactttggaagttcctcctttgacaccagaaacataactacgtggcactgatggctcaacttctccatgctcaccttcttccaaactcagtcttcccttttctcacttgggtggagggtggaagaaacagtgtgtgttttcaacttcttataggttgaggagggagacaaattatcttggcgctggagaactggtcccgagtttcaggcttcctaagcctgagaccaaactatttgtcaactgtgcaagactatattcacactttagctctaaaaacttagcaacaagaatagttctagagttgcagtttttaaacattttggtctcagagcccttttactgtcttcaaaaatattgaagatcctaaagtttgtgtatgtagtacttatttattgatattttccatattaaaaataaaactaagaatgaaacacctgatctatttaactrtaaaccatttacatgtatgtataaatatttcaataaaatgtaactatattatgtcaaccaaaataatatacaaaacaatatatatatga

SEQ ID NO: 116580 - DNA, 606 bp, Homo sapiens
tgattcttctaatctgtgaacacacaatgtttttctacttgtttgtattatctatgatttcttttagcagtgttttttagttctccatgtagaaatcattcagttatttgattaggtgtattcctaggtattagagtaggaaggggagaaggaacagaatagaggatgctctatggcaacaaggtttattgagcaaagacttgcagaaggggacaccagctagcaccagagcttgcccctgcttaccaacgggatagttataggcatgggcaggagagtcctgggattgttacacaaagggatggggyagtgtggttatctgctgataagtgaggaattttctgtggacaggcagctaggcctgggacttctccaacaggacgtttctcatggcccgagccctagtggaattgtttactctgaccagggtttgcaaaatgatgagaatttacaaaatagtgcagcttagggtaacactagttatgtttttgtttgtgtggctattgtgaatgggattgcattcttgatttggttctcagcttggacatcattggtgtatagaaatgttactaatttgtgtacaatgatttggatgatttggtatct

SEQ ID NO: 116581 - DNA, 606 bp, Homo sapiens
tgattcttctaatctgtgaacacacaatgtttttctacttgtttgtattatctatgatttcttttagcagtgttttttagttctccatgtagaaatcattcagttatttgattaggtgtattcctaggtattagagtaggaaggggagaaggaacagaatagaggatgctctatggcaacaaggtttattgagcaaagacttgcagaaggggacaccagctagcaccagagcttgcccctgcttaccaacgggatagttataggcatgggcaggagagtcctgggattgttacacaaagggatggggcagtgtggttakctgctgataagtgaggaattttctgtggacaggcagctaggcctgggacttctccaacaggacgtttctcatggcccgagccctagtggaattgtttactctgaccagggtttgcaaaatgatgagaatttacaaaatagtgcagcttagggtaacactagttatgtttttgtttgtgtggctattgtgaatgggattgcattcttgatttggttctcagcttggacatcattggtgtatagaaatgttactaatttgtgtacaatgatttggatgatttggtatct

SEQ ID NO: 116582 - DNA, 558 bp, Homo sapiens
gtagataaaaataaaacactrgtagggatgctacgttttctagcctttccaaaatactacataaaatattcataccatttcacataatgtatcattttgtggaatctatcttaaggggatattcataaactgacaataatatttatgcactataatgtttgttgcataattttatataaataaaaaatgttggaaataatgtgacagttcaaaattagaattattgaataaatcatatcaaataaatatggcttattgtccaggaattaaaaatgtaagacacaaatgattttaagtgaaaaaagagaaaatggagacagggcagagcaagatgactgaaaaatcctccagtgagtgcccacccaccccccacaggaacaccaaattgaataaaaattcacacaaaaagcgtcttcataagaaccaaaactcagcttgactatcagttcagccacagtggggtagagcaccaagcacgctcttggagtcctcaattccaggctttggttcctgcatgaaattttgtgacctgcccttggccagaagagagtctactac

SEQ ID NO: 116583 - DNA, 558 bp, Homo sapiens
gtagataaaaataaaacactggtagggatgctacgttttctagcctttccaaaatactacataaaatattcataccatttcacataatgtatcattttgtggaatctatcttaaggggatattcataaactsacaataatatttatgcactataatgtttgttgcataattttatataaataaaaaatgttggaaataatgtgacagttcaaaattagaattattgaataaatcatatcaaataaatatggcttattgtccaggaattaaaaatgtaagacacaaatgattttaagtgaaaaaagagaaaatggagacagggcagagcaagatgactgaaaaatcctccagtgagtgcccacccaccccccacaggaacaccaaattgaataaaaattcacacaaaaagcgtcttcataagaaccaaaactcagcttgactatcagttcagccacagtggggtagagcaccaagcacgctcttggagtcctcaattccaggctttggttcctgcatgaaattttgtgacctgcccttggccagaagagagtctactac

SEQ ID NO: 116584 - DNA, 558 bp, Homo sapiens
gtagataaaaataaaacactggtagggatgctacgttttctagcctttccaaaatactacataaaatattcataccatttcacataatgtatcattttgtggaatctatcttaaggggatattcataaactgacaataatatttatgcactataatgtttgttgcataattttatataaataaaaaatgttggaaataatgtgacagttcaaaattagaattattgaataaatcataycaaataaatatggcttattgtccaggaattaaaaatgtaagacacaaatgattttaagtgaaaaaagagaaaatggagacagggcagagcaagatgactgaaaaatcctccagtgagtgcccacccaccccccacaggaacaccaaattgaataaaaattcacacaaaaagcgtcttcataagaaccaaaactcagcttgactatcagttcagccacagtggggtagagcaccaagcacgctcttggagtcctcaattccaggctttggttcctgcatgaaattttgtgacctgcccttggccagaagagagtctactac

SEQ ID NO: 116585 - DNA, 558 bp, Homo sapiens
gtagataaaaataaaacactggtagggatgctacgttttctagcctttccaaaatactacataaaatattcataccatttcacataatgtatcattttgtggaatctatcttaaggggatattcataaactgacaataatatttatgcactataatgtttgttgcataattttatataaataaaaaatgttggaaataatgtgacagttcaaaattagaattattgaataaatcatatcaaataaatatggcttattgtccaggaattaaaaatgtaagayacaaatgattttaagtgaaaaaagagaaaatggagacagggcagagcaagatgactgaaaaatcctccagtgagtgcccacccaccccccacaggaacaccaaattgaataaaaattcacacaaaaagcgtcttcataagaaccaaaactcagcttgactatcagttcagccacagtggggtagagcaccaagcacgctcttggagtcctcaattccaggctttggttcctgcatgaaattttgtgacctgcccttggccagaagagagtctactac

SEQ ID NO: 116586 - DNA, 560 bp, Homo sapiens
aaataaatcacaaattgacctctttgagcacactgcaggaaatactttgtgtgacattatatggcactaattgtaaaagccaaatctgacttctttccaattatatgtccaaaaatcataactgagaattctctctctttggattttctgacattctttccttagtattaaggtaatgaatggcttcaaagctaaagttatgggaaatgcaagagcttatccaatagttaatatctgaatcttagggtttatcaactgtagcatatctaaagacacaaaacccaccttygctgatttcctggatgctctagatgtgcaaatacaaacctcactgcacatggaagtgccctgtcaggcacaattttcataaagggaatttaaatagctattttaatctctagaccagactgtgcattccaggaatctaagactaatgagccactttctcagataatcacttctaaataaacaagatcttttgcactgacccaggaatctgcattgtagctgaaaaattaattataccaatattatactaggcatatctacaacaatacaaa

SEQ ID NO: 116587 - DNA, 560 bp, Homo sapiens
aaataaatcacaaattgacctctttgagcacactgcaggaaatactttgtgtgacattatatggcactaattgtaaaagccaaatctgacttctttccaattatatgtccaaaaatcataactgagaattctctctctttggattttctgacattctttccttagtattaaggtaatgaatggcttcaaagctaaagttatgggaaatgcaagagcttatccaatagttaatatctgaatcttagggtttatcaactgtagcatatctaaagacacaaaacccaccttcgctgatttcctggatgctctagatgtgcaaatacaaacctcactgcacatggaagtgccctgtcaggcacaattttcataaagggaatttaaatagctattttaatctctagaccagactgtgcattccargaatctaagactaatgagccactttctcagataatcacttctaaataaacaagatcttttgcactgacccaggaatctgcattgtagctgaaaaattaattataccaatattatactaggcatatctacaacaatacaaa

SEQ ID NO: 116588 - DNA, 561 bp, Homo sapiens
aaacaagatcttttgcactgacccaggaatctgcattgtagctgaaaaattaattataccaatattatactaggcatatctacaacaatacaaaagaatgttctctccatctccaaagttagatgttcattcagatgaaatgcaatttattcatctggaaagttctaaatgttttcctttgcacctctaaatgagcagaaagatatttccttttaagaagaaaagagaaaatccatkatttttactttttctttaatatatatatataaatcaataaattcccaaactaaatttctcccctactaatttaatttggaataaaattagaaccaatcgttatgagcaaaatgttatcaattaagacataattaattaaatgtgcaaatgcagaatacatttagatgggctatcagatgactgattatactggaaatctaattttacacttaaattgccagccacacacttcatcttgagctgttgatccatagcaagttaccgtaagttaaaccttacctctggaggaagcagcctcagtggacaaatttttcccgcagtaat

SEQ ID NO: 116589 - DNA, 561 bp, Homo sapiens
aaacaagatcttttgcactgacccaggaatctgcattgtagctgaaaaattaattataccaatattatactaggcatatctacaacaatacaaaagaatgttctctccatctccaaagttagatgttcattcagatgaaatgcaatttattcatctggaaagttctaaatgttttcctttgcacctctaaatgagcagaaagatatttccttttaagaagaaaagagaaaatccatgatttttactttttctttaatatatatatataaatcaataaattcccaaactaaatttctcccctactaatttaatttggaataaaattagaaccaatcrttatgagcaaaatgttatcaattaagacataattaattaaatgtgcaaatgcagaatacatttagatgggctatcagatgactgattatactggaaatctaattttacacttaaattgccagccacacacttcatcttgagctgttgatccatagcaagttaccgtaagttaaaccttacctctggaggaagcagcctcagtggacaaatttttcccgcagtaat

SEQ ID NO: 116590 - DNA, 561 bp, Homo sapiens
aaacaagatcttttgcactgacccaggaatctgcattgtagctgaaaaattaattataccaatattatactaggcatatctacaacaatacaaaagaatgttctctccatctccaaagttagatgttcattcagatgaaatgcaatttattcatctggaaagttctaaatgttttcctttgcacctctaaatgagcagaaagatatttccttttaagaagaaaagagaaaatccatgatttttactttttctttaatatatatatataaatcaataaattcccaaactaaatttctcccctactaatttaatttggaataaaattagaaccaatcgttatgagcaaaatgttwtcaattaagacataattaattaaatgtgcaaatgcagaatacatttagatgggctatcagatgactgattatactggaaatctaattttacacttaaattgccagccacacacttcatcttgagctgttgatccatagcaagttaccgtaagttaaaccttacctctggaggaagcagcctcagtggacaaatttttcccgcagtaat

SEQ ID NO: 116591 - DNA, 561 bp, Homo sapiens
aaacaagatcttttgcactgacccaggaatctgcattgtagctgaaaaattaattataccaatattatactaggcatatctacaacaatacaaaagaatgttctctccatctccaaagttagatgttcattcagatgaaatgcaatttattcatctggaaagttctaaatgttttcctttgcacctctaaatgagcagaaagatatttccttttaagaagaaaagagaaaatccatgatttttactttttctttaatatatatatataaatcaataaattcccaaactaaatttctcccctactaatttaatttggaataaaattagaaccaatcgttatgagcaaaatgttatcaattaagacataattaattaaatgtgcaaatgcagaatacatttagatgggctatcagatgactgattatactggaaatctaattttacacttaaattgccagccacacacttcatcttgagctgttgatccatagcaagttaccrtaagttaaaccttacctctggaggaagcagcctcagtggacaaatttttcccgcagtaat

SEQ ID NO: 116592 - DNA, 571 bp, Homo sapiens
caaaggcaatgctgggcagggactgacaaagggttgaggagtgtccattaacctgggtattggtgatggaaagcatatcctgaaattggagatagcaagactcttggtgaactgttgagtagactgggttgaattcagtgaaggatctaaaggaaaaataaaaatattaatgcttctatgtagtwttaaaagttgtgaccataagatagcaagtataatcacacaccaaaaaatgacttttctgtcccaagtgagtggtaggcttcaatgtagtcacccagaaaacattaaatatttgtcatatgttcaagatacattttgaaacatctaaggaaatagaaattatcactttgttacatgtgcatgtaggtgcacacacagagtattactcagcgaattttttcagctttattctatataattatatattttttccagccttattctgcctgactatccagattttacactgtttagatctggctgtttccaaattgcacaaactgtcttgaactgaaatggacagaaggcaggcaaatactggtagaagagggcaggatctttggcaagg

SEQ ID NO: 116593 - DNA, 571 bp, Homo sapiens
caaaggcaatgctgggcagggactgacaaagggttgaggagtgtccattaacctgggtattggtgatggaaagcatatcctgaaattggagatagcaagactcttggtgaactgttgagtagactgggttgaattcagtgaaggatctaaaggaaaaataaaaatattaatgcttctatgtagttttaaaagttgtgaccataagatagcaagtataatcacacaccaaaaaatgacttttctgtcccaagtgagtggtrggcttcaatgtagtcacccagaaaacattaaatatttgtcatatgttcaagatacattttgaaacatctaaggaaatagaaattatcactttgttacatgtgcatgtaggtgcacacacagagtattactcagcgaattttttcagctttattctatataattatatattttttccagccttattctgcctgactatccagattttacactgtttagatctggctgtttccaaattgcacaaactgtcttgaactgaaatggacagaaggcaggcaaatactggtagaagagggcaggatctttggcaagg

SEQ ID NO: 116594 - DNA, 459 bp, Homo sapiens
gtgagacatgcaaagttgcaaagcccagatccacagattagaaaggattttgacatgtataattgtcttagtcagtttgggctgctataacaagatatcatagactgagtgatttaaacaacagagattgatttctggagttctggagcctaggatagtccagggtcagggtgtcagcagactgtgactggtgaagacccccttcctggtttgcagatgctgtcttcttgtatccttagatggtggagagagagatcatcttttcttataagggcaggaatcacacctatgagggctccacaytcatgacctaatcacctccccaaggccccacctccaaatatcatcaacttgggggttaggcttcaatatatgaattctggggggacacagatattcattcacagtaatagtgagcactgttgacagcacacacagataccccacattcttttgctc

SEQ ID NO: 116595 - DNA, 459 bp, Homo sapiens
gtgagacatgcaaagttgcaaagcccagatccacagattagaaaggattttgacatgtataattgtcttagtcagtttgggctgctataacaagatatcatagactgagtgatttaaacaacagagattgatttctggagttctggagcctaggatagtccagggtcagggtgtcagcagactgtgactggtgaagacccccttcctggtttgcagatgctgtcttcttgtatccttagatggtggagagagagatcatcttttcttataagggcaggaatcacacctatgagggctccacattcatgacctaatcacctccccaaggccccacctccaaatatcatcaacttgggggttaggcttcaatatatgaattytggggggacacagatattcattcacagtaatagtgagcactgttgacagcacacacagataccccacattcttttgctc

SEQ ID NO: 116596 - DNA, 526 bp, Homo sapiens
aattactcccacatgactcctcatctcaggggctgcttgaggagaatatgacatcagacaatatatgcacaaagagctttacaaatttataaaattttttaattaatttttttttrtagaaatgggatctcgctatgttacctaggctggtctcaaactcttgggctcaagcagttctcctacctctgcctcccaaagtgctgggattataagtatgagccatcgcaccctgccaaaataagataaacttttgtaaccaaaatataggcagagcccttcatggcacagactctgcacagatttcatctgaaaccaacagcaatccagtattctttagttacccctcagaaatatttaattaaggttggggagaaatggctgttatgagacaagggacataaattgatgcaagtagatttattacaatgatcccatttctactcacatgttactgaggctcaaagaagtgagtactgcacattgagtatatgacatgggaccagcccaacaggtgaaataagttgga

SEQ ID NO: 116597 - DNA, 579 bp, Homo sapiens
catggtgactttgtttgaggccctttgtttaattatatctaaaggcagttatgctttttaacatttcagtaatatgctttttaatatcctattttggaagagtggaaaaagttaataaggaaatgtgaagcacccagaggttagcaacaacagaaagtctctatgatatcagaaatggagcacaaagggaggcaatggcactacgggattctctgagttggggcctcagtaggacctggaatcatggagaaggaactgcttaggaaatgccaaggctgccaagctggaagcatggcaaagactgcacaacaggaaccgaaaccagagaagagatgctacctcaagtacagagagtgagaagaaatagtctggcttctccttcccttccaccctttggatgcctgctcctctgccttcacttagctaaacctaattgtgagactaacattcagagctgagcagaaaaaggggcagggtatggctttcagagcaaatgagtaatacacgtggtcaggacatattcattctgytttcctctttccttccaaaatgcattccaaactttagtgaaggatacac

SEQ ID NO: 116598 - DNA, 389 bp, Homo sapiens
agggggccatagggagtgccaacatcgagtatcagaacaaactagatgaatgccaaaatctcttacattctaaggttatatgagaaagtgattttgatgccaaagagtaartattccacaaattccaaacctccttccaggcatatatattcgggtggcacctgctttaagaagtctcccttaatctgagaacacagtttgcttgtgcttctaatactttgaccatatattgtcttttgtcatcttttgaccatattgtacatttatgtattatttagctttgtgttgttatgtcttatctaaaaccaaggttcttcttttaggaatacatgttattttatcctctatgacacctagcacaatacaatgaagttagtagatactcagat

SEQ ID NO: 116599 - DNA, 389 bp, Homo sapiens
agggggccatagggagtgccaacatcgagtatcagaacaaactagatgaatgccaaaatctcttacattctaaggttatatgagaaagtgattttgatgccaaagagtaaatattccacaaattccaaacctccttccaggcatatatattcgggtggcacctgctttaagaagtctcccttaatctgagaacacagtttgcttgtgcttctaatactttgaccatatattgtcttttgtcatcttttgaccatattgtacatttatgtattatttagctttgtgttgttatgtcttatctaaaaccaagrttcttcttttaggaatacatgttattttatcctctatgacacctagcacaatacaatgaagttagtagatactcagat

SEQ ID NO: 116600 - DNA, 552 bp, Homo sapiens
taggacaagaattatatttttataataactcctccattacttttgatatatctaattatttctttaataactggatcaaacactttaatattaatgaaggtagagccaataggatatcctggtagattggaagagacagtgagagaaacagaggcataaaggatgatgctgaagtttttggcttgagcaagaagaagcagggctggtactagggtgagccaagtgagatgttgagggcatacaatttaaggaggcccttgcatagccatgcaaaagcaaggtcagcacttccttgrtgctctgaatgccttaaagtttgtgcctaagtggttggcttacttcactcttgtcctagtcctgactggatcaatggtatcaccatccactgagttgcggcaggctgagcagaagcaaatttggggaggctggattgaatatagaagcttggttctggacatgttgactttgagatggccattgaacattcaagtggagacatcaggtagtcagctggatctctgagtctatatctcaggaaagaggctgagacta

SEQ ID NO: 116601 - DNA, 552 bp, Homo sapiens
taggacaagaattatatttttataataactcctccattacttttgatatatctaattatttctttaataactggatcaaacactttaatattaatgaaggtagagccaataggatatcctggtagattggaagagacagtgagagaaacagaggcataaaggatgatgctgaagtttttggcttgagcaagaagaagcagggctggtactagggtgagccaagtgagatgttgagggcatacaatttaaggaggcccttgcatagccatgcaaaagcaaggtcagcacttccttggtgctctgaatgccttaaagtttgtgcctaagtggttggcttacttcactcttgtcctagtcctgactggatcaatggtatcaccatccactgagttgcggcaggctgagcagaagcaaatttggggaggctggattgaatatagaagcttggttcyggacatgttgactttgagatggccattgaacattcaagtggagacatcaggtagtcagctggatctctgagtctatatctcaggaaagaggctgagacta

SEQ ID NO: 116602 - DNA, 589 bp, Homo sapiens
aagttatgtctagtcactaaaaatactaaaggccacattttgtaaatgatacattattttcatgataatgtttcttgtttaacttaaacattattattatttttacttattttagatggagctggactgtgtrgaacaaataattagagaaacaaagagaagtatgttgccaaaatttattaattaaatttaggtttattttagaaataaagtgtaaatagcaaatggcattccttttcattcttgggttagtagatactacgtcaagtattttttttcttacacacatctaatgaaagatgtgaaaacaaaaactttcacagagaagactgtacttatgcaccataaattcatcatgttctgtagcttaaaaaattcccaagaagtctgtgcatctctttttcactggctctacactttcttaagttttgccatcctcatggaactgtcagccagcacaccgaaacgattctcagaaaacacaggcatcatcaagttctcagggttttggtagaaattgaaggtcaacagacctcagactcattcagaaatgcttagttgagccataacccttcataagcagtcactt

SEQ ID NO: 116603 - DNA, 589 bp, Homo sapiens
aagttatgtctagtcactaaaaatactaaaggccacattttgtaaatgatacattattttcatgataatgtttcttgtttaacttaaacattattattatttttacttattttagatggagctggactgtgtagaacaaataattagagaaacaaagagaagtatgttgccaaaatttattaattaaatttaggtttattttagaaataaagtgtaaatagcaaatggcattccttttcattcttgggttagtagatactacgtcaagtattttttttcttacacacatctaatgaaagatgtgaaaacaaaaactttcacagagaagactgtacttatgcaccataaattcatcatgttctgtagcttaaaaaattcccaagaagtctgtgcatctctttttcactggctctacactttcttaagttttgccatcctcatggaactgtcagccagcacacygaaacgattctcagaaaacacaggcatcatcaagttctcagggttttggtagaaattgaaggtcaacagacctcagactcattcagaaatgcttagttgagccataacccttcataagcagtcactt

SEQ ID NO: 116604 - DNA, 567 bp, Homo sapiens
tcaccatcaagacaatctaaatcaatattgttcccttcatatcaaatgttgctgaggctttcatatgcccacctacaaaaggaattttattgacttttttagtgcatcatttgaagaaagtttggtcttggtctcatgacagagtgaagaggtagctatggaacgtgaggcataggttttacatttccctgagttgccacaaggatctgctaatacaatttggcatcattcatagtgccagtaatcactgtgtgcatttcagagataaaacatttagcctctttcaaaggaatgtagtaattgtaaaaaggaagatgttgtgtaaggtcactatgcatggagatcttctgcttctccaatgagttcttatcagaaagtgccttctcttacctcctgggcccrtgacagatagcaggcccagagctacaccaaggctttctaccaacctcacagtgtgaactcccaggaaaacatgtcttatcaacctgaattatgaattaatttgatatagcattgtttgatattttcatcgaattgcttgaaagggttatgtcttctttggttgaa

SEQ ID NO: 116605 - DNA, 597 bp, Homo sapiens
gggataaataacctgaatatataaggagcttaaacaactcaataagaaaaaatctaataatctgatttaaaatgggcaaaagatttaaatacacattcctcaaaagcaaagaagacatacaaatagcaaacaggcatatgaaaaggtgctcaatatcattgatcatcagagaaatgcaaaacaaaactacaatggggtattatctcaccctaaagtgacctttatccaaaagacaggcaacaatgaatgctagtgaggttgtagagaaaggggaaacctcgtacaccattggtgggaatgtaaattagtacagccactatggagaatagtatggaggttccccaataaactaaaaatagatctaccatatgagccagaaattccactcagcatatccaagagataactgcacttacgtttttattgcagcgttgtttacgatagctaagatttggaagcaatctaagtgtccattaacagatgaatggataaaaaraaatgtggtacatatacacagtggagaacttttcagccattaaaagaatgaaattcagtcatttacaataacatggatggaactggagatcattatgtaag

SEQ ID NO: 116606 - DNA, 606 bp, Homo sapiens
atctgtgtttcttcttcttcttcttccatggggaatattgaactcacagaagactaataagggtgataagagggaagctgacatgactccacacatttaggaatcttatatacctcaaaaatgtagacgtcaactgagaggaagccagtcaaaatcaacataaggtgactttacgtattgaattggatgtttacaaaatgatgtagaaagaaaggaaagaggaaagaaaggaaatgaagattcagtttttacatttcaattattctctcccacacttttaacatytcgatattgatgaagctgattattgctggggtagggaggtagaaggtatagggcaaacaatgctatatagagaactataaggatatcgtttcctaaataatctcatactcataatgatgtcccaaggccattgaggccacactgaggcaacctgcaaggccatgtattaaaaagttctcatcatttctatattttagagactaggcagacattccaacttcatccctgtcatctatatcttttgtccacagaggtcacttcaggggtctactctcccacaaagcacaaaacaatggatacctagagtacatagtagcacag

SEQ ID NO: 116607 - DNA, 560 bp, Homo sapiens
taatccaaggtaatgaaatggcaaaatatttcaagatataggaaaagtggatcaccaagtttccataatktatctttcatttataaaagggcccaaatgacaacagggcaacagaaagatgaaatgagttttagtatttaaaaaatgtaattctctttgttaattgggaagtgttttaaaaagaatgtcatgaaatatcaatccttacaaatagataatactttctaaaaataaaccccaaaagtttgagttcaaaggagcccaaaagtattcccagggatacatttaaataattcataataaaagttgaatgtattctttataggtactctttagggcagtaataggcatgcttattaaaaagtgtgtcatccaaatcagcttccataagcttgcaacagatattcgaaaccctgaacttaatgccagtttttaaattattgcattcttggtttgtgacctttactttcttagccttttctaattaaataggtttatggaaatatttttgttaatatatctggctaaaatcacatgattttaaaaatatagttagaata

SEQ ID NO: 116608 - DNA, 421 bp, Homo sapiens
actaaaatctatcgctctcacaaaatctttaatctttgttgaagtttttctttcttgttttttcttaatttttagctgaacacgaataagtacgtggaaccatctgttgcttgaatgaccaactcttgtctcyggtacaatcctttgtaaaattctcaattgtgtaatttagtgtggaagcaaaatatcactagctaggcttacaatcgttgtgctagttttcaacttaatttcatgccacaccaaaggacttgagtaaaaagttcatgtaatagtctaactatgttttaggatgtctttttgcaaatgccctgcaaaaagtaaaaacagaaattttaaaaaaggccgggcacggtggctcacacctctaatcccaacactttgggaggccaaggcgggcaggtcacttgaggccaggaat

SEQ ID NO: 116609 - DNA, 369 bp, Homo sapiens
aataaatgtataatatatcgggtataagcctgtatacaaaaagcagactaagaaagatagaagagttagtcctatttaatataggtggtcaaggaagatttctgtgacaaggtgatttggcaagaacctaactaaagtcgggggtgggagcagaatgcttcaggcagaggaaacyttcagtgcaaatgttggtggaaggatacatagaagagcaaaacaagaagagcctacaagaagtcgtttataaagatgtgttaaactataagttagggctattattagactttgagtcacctgtgaatcttttctgttttactcttttaaaatctacattcaacatttaaagcccatctaatgcacaatcattca

SEQ ID NO: 116610 - DNA, 369 bp, Homo sapiens
aataaatgtataatatatcgggtataagcctgtatacaaaaagcagactaagaaagatagaagagttagtcctatttaatataggtggtcaaggaagatttctgtgacaaggtgatttggcaagaacctaactaaagtcgggggtgggagcagaatgcttcaggcagaggaaaccttcagtgcaaatgttggtggaaggatacatagaagagcaaaacaagaagagcytacaagaagtcgtttataaagatgtgttaaactataagttagggctattattagactttgagtcacctgtgaatcttttctgttttactcttttaaaatctacattcaacatttaaagcccatctaatgcacaatcattca

SEQ ID NO: 116611 - DNA, 660 bp, Homo sapiens
atccatcaccgtccatagttatatttttatgtgattggcaagagcacctaaaaaatatacttttagaaaattttcagtacagaatacaatattattaactattggtaacatactatactttagatacaacttactcatcctacatgactgccagtttgtaccctttgatctgctttttttcatttcctcttaatccttatccctgatggccaccattctactgtttctatatacttggcttgttttagatagyacatagatagcacatagaatagccaccattctactgtttctatatacttggcttgtttttagatagcacatagatagcacatagaatagccaccattctactgtttctatatacttggcttgttttagatagtacatagatagcacatagaatagccaccattctactgtttctatatacttggcttgtttttagatagcacatacaagcgagatcatgaagtatttttctttccatgtctggtttatttcacttagcataatgccatccaggttcatccatatcatcaaaaatggcaattttaatcttttttttaagactgaatactatatatataatatttatattattattacagagtttataagattataatatgatatataatatattataactatacatca

SEQ ID NO: 116612 - DNA, 543 bp, Homo sapiens
ctgggctcaagcagttctcccacctcagcctcctgggtaattgggactacaggcatttgccaccatgcccacaccaggctaattgtttatatttttagtagaaatcatgtttcaccwtgttgtccaggctggtcttgaactcttgagctcaagcaatctggtctccctagcctcccaaagtgatgagattacaggcatgaacaaccatgcctgtcctgaaaattatcttattttatatatcttactcttaataatttagaaaggtttaaaataatagattgacggatattttctcttagcactttgaagagtttaaaatcatagattgatggaaattttctcttagcactattgtcttttataatttgaagatactttcagtttaaattatgagtggaagacagaaattacctaaaagggcacaattactagactaacagtgttatgggttgaattgtgtcccttcagcaaataatgaggcggtaattccagtagctgtgaatgtgaccttgtatggaaatacagcctttgcagatgaccaag

SEQ ID NO: 116613 - DNA, 407 bp, Homo sapiens
taaattccagtctaacacttcctttacaaagttgcgtaaagcccccttatatgctagttgtaggaaatatagttattaaaccagactcccagactataacctgtgaaaattgtagattgcttacttgcattgattcaacttttaattggcaacaccgtattctgctggtgagagcaagagagggcgtgtggatccctgtgtccatggaccgaccrtgggaggcctcaccatccatccatattttgactgaagtattaaaaggtgttttaaatagatccaaaagattcatttttactttaattgcagtgattatgggattaattgcagtcacagctacggctgctgtagcaggagttgcattgcactcttctgttcagtcagtaaactttgttaatgatgggcaaaaa

SEQ ID NO: 116614 - DNA, 620 bp, Homo sapiens
cttgaaaaatccttagtttgggattattccatattagatggcagttgagactctagaatataccactgtagcataaatattattttgagctccagatatttgagaataggtgtttttttgtttgtttgtttttgtttttccttaagtcccaaatctgctrtaaagcaaagcctccccaaagacctcaattatcataaatcccctctctaggagtttcacaaccagggaagattgacttatcactagagacttggaagctgacaccatacctaaatagacactgtcacaaaactgtcatatgtcccatatctccttctaagggcccatttatcttttctaaaagtcatttgttttcctatgtgtcttttctccctgtgaccatcccctattaagaagttgtttttttgtaagtgcctgctccgccttcccttgttctgttaagatggtgtataaccccccaaatctagccccctcgttgagtcacatttttctgtgaattcctatatatgtatgtgaatttttttaatttgtcttttcttttgtgaatctctcttttgtcagtttaatttgcaggcccccaattactaaacataagagggtaaaggaaaagactttcctcc

SEQ ID NO: 116615 - DNA, 607 bp, Homo sapiens
aatgtcccacttttcatctctaccaccaccactaccaccacccttgtgcaaattatcaccatctctggcttagacacctgcaacggcctcctttctggcctgtaggtctccattctggtcctctccaattcatcctttgtgctatagctccagtgatccttacggaatgctgttctgatcagatcagaactctgcctaagacccttcaaaggcttcgtattgctcttaggatgaagaaaaactgtcctggttcctctaggatcatctctgtctttctcaggctttctcagtctctctctttctcagtgttaatctctctctctctctcatctttytctttcattttctcccatactttagccttcatttcttacttacccttctaggtcctcaccctccccagccccagctgcacacatggctttctgcaggaagactttccttccctcctttgcctggttatctcctactcattcatcaggtctcagctcttacatcacttcctcagggaagccctccctgaccactccccaaatcaccaaatcttctttctagttcttgtttcaccgtatccccttctttgtagcactacagttatatatttagg

SEQ ID NO: 116616 - DNA, 620 bp, Homo sapiens
gaaaaatagtaattttatgaacaattgttttcatttgccgtgttcagtttcacatgatagcatcacttaaatatctgaaaaatgtctaagatcaaacgcttctatcacctgctctagggagacggagctagaactcagggtcagagaatctgcccagtggtacaaccacaggcttctgtgtggagggccgcaaatacacccatgatcttaacagcattttgagcattttgagcaagagcagcccagcgaactctgtgcctttatcatttatttctaagacttggtcagttatattaaacccactcttttctgtaatccaaactacagtctgttgagttgagatgggaaaggatgctatatgcaactaattggtgacttaaaaatccattatgtctgatttcccaactgatttttcttacgttatacctycctaaggtaagctgttatttcaggtaaataaggctactaccagagtattacatttaggattgccagatacaaatgaagtgaacttttaaagccctctggagttagaagaagaaagtatagtgtatttacataaatagcaatattaatatatttaaaagtaagcatctttttgggtgttatttgctcagaaa

SEQ ID NO: 116617 - DNA, 493 bp, Homo sapiens
tcccacacataagtgaggacatgcggtatttggtttcctattcctgcgttaatttgctgaggataatgctccatccatgtccctgcaaaggacatgtccagcttcatccatgtccctgcaaaggacatgatcttgtccttttttatgcctgtatagtattatatggtacatatayaccacattttctttagtctattattgatgggcatttaggtttattctatgtctttgctattgtgaagagtgctgcaatgaacatatgtgagtatgtgtctttataatagaatgatttatagtccttttggtatatacccagtaatgagattgctgagtcgaatagtatttttgtcatcaggtttttgaggaatcaccacactgtcttcctcaatggtcgaactaatttatactctcaccaatagtgtataaacattcctttttctctgtaacttcgccagcatctgttattcttttaatttttaataatagccattct

SEQ ID NO: 116618 - DNA, 574 bp, Homo sapiens
taaaaataataagaaaatggaatttttaacatttttagtcttcccaaaggaaaaaaaaataacagatgtaagaataagagtgtcattatttaagttatatatgatgtcatgacatctaagcaaaaataaatgaaaactgtatagactatcaagactatcaacactaaagaaaaccttgaatttgcacgaaagacaagacctgaatgtaagagacaggttcagtagaaaaagaagtgtytaatatcaagtcagaatgacaggaggggccctatcctgtatttaaatgctgaaaggtgtaacaatgtacataatgatctacatgaatcacacaggtcaaaggatgcagtgccacagaaagactgctgaagaatgctgatagagacgtggttagggcagggagaaagtagcaaactaagataaggcaagtgccaaccctattgtgtaacacaaagcagccctttaattttaactaaaaataatttaagatttgtcaccttaatttggatgatatatttattgtgataacaatcatcttgtcacggaatggttaaatttacctagattttcaatttaa

SEQ ID NO: 116619 - DNA, 574 bp, Homo sapiens
taaaaataataagaaaatggaatttttaacatttttagtcttcccaaaggaaaaaaaaataacagatgtaagaataagagtgtcattatttaagttatatatgatgtcatgacatctaagcaaaaataaatgaaaactgtatagactatcaagactatcaacactaaagaaaaccttgaatttgcacgaaagacaagacctgaatgtaagagacaggttcagtagaaaaagaagtgtctaatatcaagtcagaatgacaggaggggccctatcctgtatttaaatgctgaaaggtgtaacaatgtacataatgatctacatgaatcacacaggtcaaaggatgcagtgccacagaaagactgctgaagaatgctgatagagacgtggttagggcagggagaaagtagcaaactaagataaggcaagtgccaaccctattgtgtaacacaaagcagccctttaattttaactaaaaataatttaagatttgtcaccttaatttggatgatatatttattgtgataacaatcatcttgtcacrgaatggttaaatttacctagattttcaatttaa

SEQ ID NO: 116620 - DNA, 589 bp, Homo sapiens
ggctgtctgcaattttgagaaatcaaattagtggaatggttctgtctgaaaaccttaaaggcttattattgtcatgtattcctcttttgattttttttgatccatttatttcrattttatttttgattctttttttgattcatttattcattaaacaaatatttgcataagcaatttttactcagaattaccccaggcactagaaatacaacattgaactgaacagatgtcatgtcatgagacaattgacataaaaggagatgagatttttaacaagtgtacaaatatataatgttagtgataaatgctacgaagcaaaataagagacaaggaagtgaggaagactccatgtatatatatggatggtgttttagtttggactgctgttaaaaaatgccaaagactgggtagcttataaaaaacaaaagttaattcatcacacttatggagactgggaaggtcaaggtcaaggtgcaggtagatttggtgcctggtcaggggtccatttcctgcttcactgatgacaccatgtcactgtgtgctcacatggtagaaggaagaaggcagctctctgaggcctctttcaaaa

SEQ ID NO: 116621 - DNA, 589 bp, Homo sapiens
ggctgtctgcaattttgagaaatcaaattagtggaatggttctgtctgaaaaccttaaaggcttattattgtcatgtattcctcttttgattttttttgatccatttatttcgattttatttttgattctttwtttgattcatttattcattaaacaaatatttgcataagcaatttttactcagaattaccccaggcactagaaatacaacattgaactgaacagatgtcatgtcatgagacaattgacataaaaggagatgagatttttaacaagtgtacaaatatataatgttagtgataaatgctacgaagcaaaataagagacaaggaagtgaggaagactccatgtatatatatggatggtgttttagtttggactgctgttaaaaaatgccaaagactgggtagcttataaaaaacaaaagttaattcatcacacttatggagactgggaaggtcaaggtcaaggtgcaggtagatttggtgcctggtcaggggtccatttcctgcttcactgatgacaccatgtcactgtgtgctcacatggtagaaggaagaaggcagctctctgaggcctctttcaaaa

SEQ ID NO: 116622 - DNA, 607 bp, Homo sapiens
aattcacaggttgaatttaagaagaaaggtgacaactttcttctctgtattcttaatcatttgtcaagacagcatagtgattaaaagtgagccacaagagtcaaatagtcttggacttagatctctgggtttgcacttacaagttgtgtgtagcaaactaattgttcttgtatcatgcttttagctgcaagtaacaaaactayggattcaaaaagtgttattattttaaaaacctattatcttacgtaactagaattccagtgctaggttaatctccagacacagagatgcccctattccctggttctgatgtctcttcaactatactgttaaattttcctaacaaatccctgcagtctgttgagtagttcagtgatttccctaagatccaatagtctgcctgtcccttaggataagaaaacatagagctccacttatggctggcagcctcttataccacaaaggaacaggattatcatcaggccacactgaagtctgtgtagacaagtgacaggaagccttggcttctcgaggacaccattgagatgttcattaagtgcgcctagagaattttctgtctccatacgtctggttatatgagatagtt

SEQ ID NO: 116623 - DNA, 607 bp, Homo sapiens
aattcacaggttgaatttaagaagaaaggtgacaactttcttctctgtattcttaatcatttgtcaagacagcatagtgattaaaagtgagccacaagagtcaaatagtcttggacttagatctctgggtttgcacttacaagttgtgtgtagcaaactaattgttcttgtatcatgcttttagctgcaagtaacaaaactacggattcaaaaagtgttattattttaaaaacctattatcttacgtaactagaattccagtgctaggttaatctccagacacagagatgcccctattccctggttctgatgtctcttcaactatactgttaaattttcctaacaaatccctgcagtctgttgagtagttcagtgatttccctaagatccaatagtctgcctgtcccttaggataaraaaacatagagctccacttatggctggcagcctcttataccacaaaggaacaggattatcatcaggccacactgaagtctgtgtagacaagtgacaggaagccttggcttctcgaggacaccattgagatgttcattaagtgcgcctagagaattttctgtctccatacgtctggttatatgagatagtt

SEQ ID NO: 116624 - DNA, 623 bp, Homo sapiens
atggcagtacgactcagtaaatttgctaaaaatcagtgagttgtgcacttaatatargtaattttttttttctcactctgtcacccaggctagcatgcaatggcaccatcttggttcactgcaacctctgcctcccaggctcaagtgatccttccacctcagcctcctgagtagctgggactatagactagtgccaccacactaagctgattttttatattttgatagagatgggttttcaccatgtggccaaggctggtcttgaacccctcaagcaatccacctgcctcagcctcctaaagtgctggaattacaggtgtgagccattgcatccagccctgaaatgagtaaattttatgatatataaaatatgcctcaataaactagtaaaaaaaaagttaggtactcaattcacattttgtatatgtgccagaaattaacatagtattcctattttcaagtactttagcgcatagcaatctaaaatttggctaagcataaaaggtatattctcagacagaaaccagttgaactgcaaaagcacctacctactagttagttgtaatacactataaatacttagaaaatcagaatgtcttcaatgcctcattcccttcattagg

SEQ ID NO: 116625 - DNA, 623 bp, Homo sapiens
atggcagtacgactcagtaaatttgctaaaaatcagtgagttgtgcacttaatataggtaattttttttttctcactctgtcacccargctagcatgcaatggcaccatcttggttcactgcaacctctgcctcccaggctcaagtgatccttccacctcagcctcctgagtagctgggactatagactagtgccaccacactaagctgattttttatattttgatagagatgggttttcaccatgtggccaaggctggtcttgaacccctcaagcaatccacctgcctcagcctcctaaagtgctggaattacaggtgtgagccattgcatccagccctgaaatgagtaaattttatgatatataaaatatgcctcaataaactagtaaaaaaaaagttaggtactcaattcacattttgtatatgtgccagaaattaacatagtattcctattttcaagtactttagcgcatagcaatctaaaatttggctaagcataaaaggtatattctcagacagaaaccagttgaactgcaaaagcacctacctactagttagttgtaatacactataaatacttagaaaatcagaatgtcttcaatgcctcattcccttcattagg

SEQ ID NO: 116626 - DNA, 623 bp, Homo sapiens
atggcagtacgactcagtaaatttgctaaaaatcagtgagttgtgcacttaatataggtaattttttttttctcactctgtcacccaggctagcatgcaatggcaccatcttggttcactgcaacctctgcctcccaggctcaagtgatccttccacctcagcctcctgagtagctgggactatagactagtgccaccacactaagctgattttttatattttgatagagatgggttttcaccatgtggccaaggctggtcttgaacccctcaagcaatccacctgcctcagcctcctaaagtgctggaattacaggtgtgagccattgcatccagccctgaaatragtaaattttatgatatataaaatatgcctcaataaactagtaaaaaaaaagttaggtactcaattcacattttgtatatgtgccagaaattaacatagtattcctattttcaagtactttagcgcatagcaatctaaaatttggctaagcataaaaggtatattctcagacagaaaccagttgaactgcaaaagcacctacctactagttagttgtaatacactataaatacttagaaaatcagaatgtcttcaatgcctcattcccttcattagg

SEQ ID NO: 116627 - DNA, 605 bp, Homo sapiens
attgagcaattcaagacatcaaacactcagatgctcttatgcagtaaaatatgtacaatctaatgatgyggctttagtgatgagaaagggtcaggtgaagtactgatcctgtattgattgattcccagttgtagaaatcttgtaataccctaatttcacagatctgcaatctagcttcagcataataatgtctgtgacaatagggtgccactggtacagtgtcatagaaactgctcacctggaaagaattcacaaaaacatttaggtatacatatataggaatcagatcaatttctatttttgagagctccttggttaaacttaaatcaggtagttgagaccactatttgcttcaactttacatatggctttaaagtgtgttttttttttctacatattattggataacagactttagctttgactattgagaaagttggactttttttctccctttcaggaaccagatggtgtatattatttggggctaaattgttatgccatgacaaaatgattttttctttttaaaatatttatttaaattttgtaataaaaagagaaatcaaataaatcttgatcttggtcatttcctgtggtccttcatc

SEQ ID NO: 116628 - DNA, 605 bp, Homo sapiens
attgagcaattcaagacatcaaacactcagatgctcttatgcagtaaaatatgtacaatctaatgatgcggctttagtgatgagaaagggtcaggtgaagtactgatcctgtattgattgattcccagttgtagaaatcttgtaataccctaatttcacagatctgcaatctagcttcagcataataatgtctgtgacaatagggtgccactggtacagtgtcatagaaactgctcacctggaaagaattcacaaaaacatttaggtatacatatataggaatcagatcaatttctatttttgagagctccttggttaaacttaaatcaggyagttgagaccactatttgcttcaactttacatatggctttaaagtgtgttttttttttctacatattattggataacagactttagctttgactattgagaaagttggactttttttctccctttcaggaaccagatggtgtatattatttggggctaaattgttatgccatgacaaaatgattttttctttttaaaatatttatttaaattttgtaataaaaagagaaatcaaataaatcttgatcttggtcatttcctgtggtccttcatc

SEQ ID NO: 116629 - DNA, 712 bp, Homo sapiens
tgtggcagtcagtatgatattcaaatttcaaacagattaagattcagcatgtcaagatgattcatcatattaaattaaaaacattaattttaattttattggagtaatagtttggtttataatttgcagatttgtttcttacagccaagtcctgtgagcataagatgtttatacctgtttttatatttataagcatttaagagtatagtgaaagtaatacaagtcaacactgagtatatgagttaatatttttttctttaaaaagattctgttcaaattttagcaacattgtattagagagcccttcaagttagtcatggaagacsctaaaattacccttgcctgcccccatgtcaagagtaattacaaacgtctatttctgccctactctgtcttttgctagtccacattttaaaaagcaatgaatatactcttcctgtgtgtcttttaggctttgcccagggatttcatactccagctcaagaaacagatcaaaagacactgaagtttctgagtagtgtctgctggagtcttttattcagtgtatacaatgaagtgtttacattagagttttaaagctggtagtatttattaataatttgctgaggaaaagtattggtctttatgcaggaagagttgtaaatgaaacttgattaatctctaatagaaatctaatggatttgttcaaacagaactttgctttttcctcaca

SEQ ID NO: 116630 - DNA, 712 bp, Homo sapiens
tgtggcagtcagtatgatattcaaatttcaaacagattaagattcagcatgtcaagatgattcatcatattaaattaaaaacattaattttaattttattggagtaatagtttggtttataatttgcagatttgtttcttacagccaagtcctgtgagcataagatgtttatacctgtttttatatttataagcatttaagagtatagtgaaagtaatacaagtcaacactgagtatatgagttaatatttttttctttaaaaagattctgttcaaattttagcaacattgtattagagagcccttcaagttagtcatggaagaccctaaaattacccttgcctgcccccatgtcaagagtaattacaaacgtctatttctgccctactctgtcttttgctagtccacattttaaaaagcaatgaatatactcttcctrtgtgtcttttaggctttgcccagggatttcatactccagctcaagaaacagatcaaaagacactgaagtttctgagtagtgtctgctggagtcttttattcagtgtatacaatgaagtgtttacattagagttttaaagctggtagtatttattaataatttgctgaggaaaagtattggtctttatgcaggaagagttgtaaatgaaacttgattaatctctaatagaaatctaatggatttgttcaaacagaactttgctttttcctcaca

SEQ ID NO: 116631 - DNA, 577 bp, Homo sapiens
atttcttgctctgagtatcattatattgcatggatgtattatggtttattcacttattgatggatatttgacttgtttccagtttttgaatgttaaaatgaagctgctacacatattcatgcatactttttaacaaatggacatatacttttatttatcttggaaagacatctaaggatgaaatgactaaattgcatatatgtgcaatttttaaagaaactgccaaactatttgtcaaagtagtcatacaatttagcattcccaccatcagtgtatgagaaytccaggtcctctgtactctcactgacgcctgatatggtcaacgtttaattttagctattgtaatatgcatgtgctggtattccatcatacttttaattgtgttcccctaatgactacaatgttgaacatctttttctgtgcttatttgcttccatatttctagctgttaatatctgtttatttaaaaaattaggttatttgttttctgagttttgagatttctttttatattctgggcactggtgtttatagaatatatgatttgcaaatattttcttctaggctgtggcttgtg

SEQ ID NO: 116632 - DNA, 577 bp, Homo sapiens
atttcttgctctgagtatcattatattgcatggatgtattatggtttattcacttattgatggatatttgacttgtttccagtttttgaatgttaaaatgaagctgctacacatattcatgcatactttttaacaaatggacatatacttttatttatcttggaaagacatctaaggatgaaatgactaaattgcatatatgtgcaatttttaaagaaactgccaaactatttgtcaaagtagtcatacaatttagcattcccaccatcagtgtatgagaattccaggtcctctgtactctcactgaygcctgatatggtcaacgtttaattttagctattgtaatatgcatgtgctggtattccatcatacttttaattgtgttcccctaatgactacaatgttgaacatctttttctgtgcttatttgcttccatatttctagctgttaatatctgtttatttaaaaaattaggttatttgttttctgagttttgagatttctttttatattctgggcactggtgtttatagaatatatgatttgcaaatattttcttctaggctgtggcttgtg

SEQ ID NO: 116633 - DNA, 577 bp, Homo sapiens
atttcttgctctgagtatcattatattgcatggatgtattatggtttattcacttattgatggatatttgacttgtttccagtttttgaatgttaaaatgaagctgctacacatattcatgcatactttttaacaaatggacatatacttttatttatcttggaaagacatctaaggatgaaatgactaaattgcatatatgtgcaatttttaaagaaactgccaaactatttgtcaaagtagtcatacaatttagcattcccaccatcagtgtatgagaattccaggtcctctgtactctcactgacgcctgatatggtcaaygtttaattttagctattgtaatatgcatgtgctggtattccatcatacttttaattgtgttcccctaatgactacaatgttgaacatctttttctgtgcttatttgcttccatatttctagctgttaatatctgtttatttaaaaaattaggttatttgttttctgagttttgagatttctttttatattctgggcactggtgtttatagaatatatgatttgcaaatattttcttctaggctgtggcttgtg

SEQ ID NO: 116634 - DNA, 572 bp, Homo sapiens
tcctgctaaacacccccttggactcatcctgctacttggacatttttccaggtaccatgccattctcttttaagcctaagaattaatacttgcctagaacctgtccttttccctactccttgcccttgaaaattaccaccaatatagtgggcatgaatctgggtctacaaatcaaaaaaacaagaaatgcaattttatttttctgtaactcaacctaagcttttttgctagatgtcatttcacctaaatggtagaaactcaatctcagcccttttctgattcatctaacctacttctggtttcctagggtttcctctacgttttaaggagactttctcaacatgaagagtaaggcccctrtctgccttgatgtcatctgtgcacattgtcatctgctaaaatgtccattatctctttggttctcataagtattcccaggacagttaccaccatgttgttccctgttgctattcatgcagccccttcatttccagcagttgctttctccttttctctctctcttcctctttttcagttgtatccaaaccactgttagatgcccaagaatcatc

SEQ ID NO: 116635 - DNA, 542 bp, Homo sapiens
gttgctctccatctgttcatgactgggtacaacaggagaactcaagtcaaagtctttggcctcaatgtgttcacactttactgcaaatcatttctagtgaatatgatatatattggatacatattgggaaaattgctaggaagtctcagaggaaagagcccctggcatttggaggattgaacctgaaagtgttggggcaagcacatttgaggcatagagaacagaactgcaggtagattgtctgcctgggacacaggtccggatgagaatgtgacaggagatgaggatggagaaatacacagtagatagattaggaagcatcttacgtcaaaagggtagctacttgcrggttttatcatattttcagtgctcagatattccagtgaaatctggaaaaaatctactgaactaggagattttagagttaggaagccttgctaaggaacaactgcaaaggtctgaaccaaagaggaagagagtttgagctacatcaatatcagcgagctccaagagtctgtcttcatgcctcttccacactgcga

SEQ ID NO: 116636 - DNA, 542 bp, Homo sapiens
gttgctctccatctgttcatgactgggtacaacaggagaactcaagtcaaagtctttggcctcaatgtgttcacactttactgcaaatcatttctagtgaatatgatatatattggatacatattgggaaaattgctaggaagtctcagaggaaagagcccctggcatttggaggattgaacctgaaagtgttggggcaagcacatttgaggcatagagaacagaactgcaggtagattgtctgcctgggacacaggtccggatgagaatgtgacaggagatgaggatggagaaatacacagtagatagattaggaagcatcttacgtcaaaagggtagctacttgcaggttttatcatattttcagtgctcagatattccagtgaaatctggaaaaaatctaytgaactaggagattttagagttaggaagccttgctaaggaacaactgcaaaggtctgaaccaaagaggaagagagtttgagctacatcaatatcagcgagctccaagagtctgtcttcatgcctcttccacactgcga

SEQ ID NO: 116637 - DNA, 555 bp, Homo sapiens
taaattaatttacaatttctctagcaaaaaccaacccatctatttacatactaggcatcatcttttaattaattcagacatggatccataaattcctttctttctctctcttgaatcatattttcactttttcttgatgtttcctaatgaaacatacatgttatgcttaatcccatgtttaaatacaaaaaccccagtcataaattcataaccctctcaagttatcatcccatttctctacttttaggtacagtgaatacatttattgcctatcctgactctttaatttctctcctagtgttttctgtagaaaatactgaaatcagaataacaccctcactccttattatggtggcattgtttcttattaactagctaaactagaattatgttttccagaacctccttccctatgtcgtcctgggctaaggttggtcatgagtgaaatttgtgcaatatttcaaaagtacaataaacatttatttttatgctctgaattttggtataggaggtggtgctgtggyacctcctgcacgtggtaaccgatattttaac

SEQ ID NO: 116638 - DNA, 652 bp, Homo sapiens
tgataaaactagctgtggaggagaaaccaagtgtggctgttaaacctttctatggcctatcatgcaaccagcatggagttacttagtgccatgtgagagacaaatttcagagtaggcacaatgtggaagaaataattttcattccacacagcagtacccaactcctacccccagcaagaacgaaaactagagaagaagatacaaatatctattggctgatgaagagtctactccactcaggaaagaacatgtggaaaccatgagaaatgaaagtaccccgycaaacccagccaaatccaacctcacctctcctagacacttccccctacagtttctggagtttcccaggtatgttctttgcataagtcactgtttcatgtctatcattacctaaatattttacatcagggaagaataagtgtcttgaggcaaggaatctccaaaattgttttgaggttaattaactgcatagcacatgtggccatgaatttcaggttcctggattagaaagacagagatgactattaattctgttcaatctgaccgatatttgctaagcagctactgtgtccaagaagaatatgatagaacccttgccactcagtaagcaaactttatataccaagaacaagaaagaatttcacagctccta

SEQ ID NO: 116639 - DNA, 506 bp, Homo sapiens
cccttctctgactgatgaaacacagtgatgtttgaagtgtcctggaattagtgtcagttcagagccagtgtccagtagtccctgaaaggtctgatttccccctcccctcagtacatacttacctttgtaaaagactatagatctctttgggagaaagattaacagtctaaatatttggcagtgtgctatgtccttcctcaaggggaaccagcttcccctttattcaaggggkccttgatctgtaaattggctcatcagaaggttaattgagggcctgtgcctcctttgtttttttgattcactttagaattcggttcacttgacctagatcttttctgcttacatagatgaagtaagaatttagtaggcttcttatctctttagcttgtaggaacaccatgatcatttagtcaatcacacaggatgatgactgctttgactctgctcttcatcatggtgaccacactcaccttgcctttggtggttactgagggctgccgcttggc

SEQ ID NO: 116640 - DNA, 506 bp, Homo sapiens
cccttctctgactgatgaaacacagtgatgtttgaagtgtcctggaattagtgtcagttcagagccagtgtccagtagtccctgaaaggtctgatttccccctcccctcagtacatacttacctttgtaaaagactatagatctctttgggagaaagattaacagtctaaatatttggcagtgtgctatgtccttcctcaaggggaaccagcttcccctttattcaagggggccttgatctgtaaattggctcatcagaaggttaattgagggcctgtgcctcctttgtttttttgattcactttagaattcggttcacttgacctagatcttttctgcttacatagatgaagtaagaatttagtaggcttcttatctctttagcttgtaggaacaccatgatcatttagtcaatcacacaggatgatkactgctttgactctgctcttcatcatggtgaccacactcaccttgcctttggtggttactgagggctgccgcttggc

SEQ ID NO: 116641 - DNA, 599 bp, Homo sapiens
ttgctttttctcataaatattataacagaagtgtgttgaataaaaacatgattcgagaacctggtatygtactcatttacaataccagtatgttccagctctggggagtataatatcaaaaggcctggcagaaaacttcctctctgccttataatgcttgctctccccataacattaaaaatctttggttgtttgtagggcccagggtaaaaaagctttatttattattttcactgttacctctttccttttcggagacacagagagaatgaaaataaaaaggcttttccatgcttacatgaacatttccatttctgttgactaagaataaacagggactatttggttgttttggctaattgcaatgtaactacttacacactcctcttttgtcatctgtaatcttgcactaaccttgaaactactcttccttcctttattgctctccaatcttgtctacttctaacatgttattactgaatgttcttttctaaaatatacatgtgatcatatcactcttaaaaaactttaaagattaaaaaatatattttataggactaattcaaactctttgctttagatcatgagatctttcatga

SEQ ID NO: 116642 - DNA, 599 bp, Homo sapiens
ttgctttttctcataaatattataacagaagtgtgttgaataaaaacatgattcgagaacctggtattgtactcatttacrataccagtatgttccagctctggggagtataatatcaaaaggcctggcagaaaacttcctctctgccttataatgcttgctctccccataacattaaaaatctttggttgtttgtagggcccagggtaaaaaagctttatttattattttcactgttacctctttccttttcggagacacagagagaatgaaaataaaaaggcttttccatgcttacatgaacatttccatttctgttgactaagaataaacagggactatttggttgttttggctaattgcaatgtaactacttacacactcctcttttgtcatctgtaatcttgcactaaccttgaaactactcttccttcctttattgctctccaatcttgtctacttctaacatgttattactgaatgttcttttctaaaatatacatgtgatcatatcactcttaaaaaactttaaagattaaaaaatatattttataggactaattcaaactctttgctttagatcatgagatctttcatga

SEQ ID NO: 116643 - DNA, 634 bp, Homo sapiens
ctgcctctagttaaacaaactctttatagttgaaggttctgagtctccaattttagagattatgactgctcgacaggcaaaatacaggttaaaaataaagataattagtgatttggtaacaaattataaactccaactggccacaagcacttgaaagtaaccattagttagttagtggggtctgtgatcatgtgatcacagagttatagagaagtgccgccttgtgttcttaaagtatgcacagctttattcttatcaataaagaaaaaagagaaattgtaccactgaacaggcaaagcaaacctgaaaaaaaacattgctaatgagttattttctttaatttcgtttatttttccaaagcacatccaaatcagcatttcttacaacacaataggtccgctaactttaggtattgttttcttattctaacaacatcactaaaaaataagtaggtataatttctgtttctttgcaaactgagataagtaacttcaagtataatcttacttaactttaaagacgtacacaaaacataagcagttttccacggcctcacacattaatttggatkagatttcacctcaatctctttgcttgtcaggtggcctatcaacggaaaaatattttgacataa

SEQ ID NO: 116644 - DNA, 588 bp, Homo sapiens
aaatctgtcattggacttaccagttaattataattatctgtgtttattttacacttatctgcctgacccaggccatgagttccttcagggaaagaacattctcttattcacctttatctttagaaggactgcccagagcctggagcaaagcagtgttcaaatgtatttgagctgggaggcatttcattttatatattggacatctgatgctcagattcctcaaatgatttgctcattaattttagggcaagatttgtccagcatccagtaatctgggacctaagcaattccttctatattcaagattataatgattattaataaacactgactatatctcaggtacttttctaagtgccttagaaatattaactcatttatcattacagtcgtatggaatacgttttactattttttccagagaggttacaaactaacaattacacagttagaaattagcaaagtcaggatttgaatttggaatctgtgttcttaacccttttgaaaatctagagaagtagagtttytgccccaaaaccacacatacccacatactgtttcacacagttttagggatttcacagattc

SEQ ID NO: 116645 - DNA, 507 bp, Homo sapiens
tggatgttggaagatttgtttataaagtggtgatgggaaaggtagtcttggtctaaactaatctgtctggatttcgaaagtgctttattataaaaggaaaatatagtgagtcctcaaatagtagtgtgtgtttcattaacataacaaaaaatgggcttcagattgcctcagaaatatgccataaaacctaagctttttaaatttcactccagaaacttgaaagaaagtctgctctcacctctattattgttctgaattagaaattctttttgaacggttgatattttactatgaatatttcaaagacatggttactaaagagttttcctaacctggagaggtatttggagggtcaaacagggtgattatttttaacagaaaggaaggcctgaattagtcaaataattttttttataatttcaagaagaccagaggagagctgtgcatttgagtggtttgcttcagtaaaagagaacarattttcttttgctatgattttgtaggttt

SEQ ID NO: 116646 - DNA, 584 bp, Homo sapiens
tcaacctctctctgggcacaataccacttactttgggaattatggtaaaatactatatgcatcaattgctttccatagggcttgacacagaataagagttgcatttactaaatagtgagtgattttttttgttttggtctgagaatgatcatgctaatctgagtaaacttttaaggcttttaaatcttgaatgcatcttcatttcaaagaagtataatgactggaaatgtatgattttactttatccttggtcagttggacctaagtatttttaaataaaacaaatttatcaactctacatgtggaggtagaacagaaattctagtgtgtaacaaayaatggattcaagtctgaatagttaagagacttaaaaagaggaaatacatgaaaacacacatgtgactattaagaatagacttttcaagtaaaataacaggaagataatttgacttgttcactagttatgtcagagaataaaacacagaattgtactgattgggctgagttgtcaatttcctttccttctgattcaccccacaaattccatatcaaccatcacttattgagtaactgcactgtgttca

SEQ ID NO: 116647 - DNA, 594 bp, Homo sapiens
cattttctaatctccataaattaaaaaaaaattaaaataacacatttcttttttaccttgaaaaaacaatttccatcaacacaacaatttccattcaatttcctggatacaaactgttaatagaagtagggaaggaaaggaaagtgataattatttaaacatgttaaagygaacaattcatggtttaataattgctgtgttttcacaagaaagttattctttgaaattggctttcacatgtgaaataaaccacctttagatgctctatcttcatgcacggttttcttacatttaatcatttcatctttaaaacaaaaatgacatcagaaataaaacacagtctcagtactgttcttcagttatacttaatgaacatacaaaatatagacaggggcagaagagaggcataaaaatgatgataatatgatacttttatgtaccatttctagtaataagtttgttagctcaggtaatttggatctaacagaagaaatagtagcagctgccatagccccatctcaacgtctcctggaagggttgacataaaagactcttggccatggtggttagttatgggacagaatgagccaagtt

SEQ ID NO: 116648 - DNA, 610 bp, Homo sapiens
aaatcaactaaatgtattacctcctacattaggaatacagtgacacagaagaagaaaaacaactcttggataatgactctgggcagaaaagggagatgagattgcaaacaaaatatcccaaaataggtttgkagagaaaatgagaaagaaagagtcttggtgattgaagggaattagaaatgatagaagaaggggagatacatagctctctcttggttgattatcttgcactgaggaatttctatgagaacggatctagggaagtacaacttagtccaggttagatgactttcagaggcaatttctgcatagaactagattcctcagtattcagaagaagtatggtagaagtttgcccggatggcacaaactggaatgcctgtatgagctgatttaccctgactgacgttcagattgactgatcggtaggattttgctgttattcacccacatctccagtttgtactagcctagaaaccttctatttgatgacttatttgtcccattttgtctcaaatacatagaaggggcgaaaaacattattctagtgggaggtttctgtcacttttgttcattctgaatttgtacagaaggtaacacacacaacact

SEQ ID NO: 116649 - DNA, 610 bp, Homo sapiens
aaatcaactaaatgtattacctcctacattaggaatacagtgacacagaagaagaaaaacaactcttggataatgactctgggcagaaaagggagatgagattgcaaacaaaatatcccaaaataggtttggagagaaaatgagaaagaaagagtcttggtgattgaagggaattagaaatgatagaagaaggggagatacatagctctctcttggttgattatcttgcactgaggaatttctatgagaacggatctagggaagtacaacttagtccaggttagatgactttcagaggcaatttctgcatagaactagattcctcagtattcagaagaagtatggtagaagtttgcccggatggcacaaactggaatgcctgtatgagctgatttaccctgactgacgttcagattgactgatcrgtaggattttgctgttattcacccacatctccagtttgtactagcctagaaaccttctatttgatgacttatttgtcccattttgtctcaaatacatagaaggggcgaaaaacattattctagtgggaggtttctgtcacttttgttcattctgaatttgtacagaaggtaacacacacaacact

SEQ ID NO: 116650 - DNA, 578 bp, Homo sapiens
atatttattcttccaatccatgagcatgggttatcttcctgtgtgtgtgttctcttcagtttctttcatcagtgttttatagctttcaatgtagaaatctttcaactccatggttacatttatttttagggttttttaaaatttataactattataaataagattgttttcttgatttctttcttagttcattcattagaattttgacatactgatttcctttcctggtacaaagatgtgctactgttgttgtatgttgattttgtatctcacaactttactgaatttatcagttctaagaattttttggtggagtgtctatgtttttctataaataagtttatgtaatctgcaaacagagacaaactgactttctcttttccaatttagatgccctttatttctttctctggcctaattgttcttcctaggacttccagtactatgttgagtaagagtagtgagaatgagtatccatgttttcttccagttcttagaggaaragcttttaatttttcctcattcattatgagattagccatggatttgtcaaatatagcctgtattttgttgaggtg

SEQ ID NO: 116651 - DNA, 584 bp, Homo sapiens
cagatagaacaaaaaggaagtttaacatgagaaaacagacatacacgttttaaggaaggataatgtcacagtgttcagaatgttatgccctggctgtgaaatgtattcaaagaaaaatatctgaatttatttaaactcagagtgcatagcttatcttatgaaatgccagtttgctggatgaggagagtagatataatttcctttaaaacagcatgcaccatatgagagctagattacaaactgtgagtctaaagctgtcatttttttggtttgtaaggttaaccttatatggataaggcactgcattaacccctgaaggtacagraacatacaagtgtcaagttttcagtcaggtgttggtttctcaaattgaattacagagaattatgaaacattgctttcctataaaatgctgataggcatttgatcagaaaaggtattttatggcccagcacagcataccctatggaatttatttgactaaatgatgtaatttgctgcagaatttttcaaagcctttactatgacattggtcatggtgaatcataaataggaggatttccttcttaatatacctatacatt

SEQ ID NO: 116652 - DNA, 507 bp, Homo sapiens
  misc_feature (1)...(507): n = A,T,C or G
tttttgctttcctaagaatttacaagttcatgaagatacaggaatgggaaggataaatgtggaaagcaaaaaaatgaaancaaaacacatatagacaggaaataaagaagagatttttttattgtgacaacaggaagagacaactggaaaaagctgcagctgcagccagaagaacaagtcaacrtaactattataaaaatagagagctttgggaggctgaggcggatggatcgcctgaggtcaggagtttgagaccagcctggccaacaaaatggaaccctgtctctattaaaaatacaaaaattagctgggtgcgacggtatgtgcctgtagtcctagctacttagggggctgaggcaggagaatcacttgaactcaggaggcagaggttgcagtaagctgagatcgtgccacttcactcagcctgggtgacagagcaacactcttatcttaaaaaaaaaaaaaagaaagaaagagagaggaatggattacagaagaggacaaaga

SEQ ID NO: 116653 - DNA, 507 bp, Homo sapiens
  misc_feature (1)...(507): n = A,T,C or G
tttttgctttcctaagaatttacaagttcatgaagatacaggaatgggaaggataaatgtggaaagcaaaaaaatgaaancaaaacacatatagacaggaaataaagaagagatttttttattgtgacaacaggaagagacaactggaaaaagctgcagctgcagccagaagaacaagtcaacataactattataaaaatagagagctttgggaggctgaggcggatggatcgcctgaggtcaggagtttgagaccagcctggccaacaaaatggaaccctgtctctattaaaaatacaaaaattagctgggtgcgacggtatgtgcctgtagtcctagctacttagggggctgaggcaggagaatcacttgaactcaggaggcagaggttgcagtragctgagatcgtgccacttcactcagcctgggtgacagagcaacactcttatcttaaaaaaaaaaaaaagaaagaaagagagaggaatggattacagaagaggacaaaga

SEQ ID NO: 116654 - DNA, 507 bp, Homo sapiens
  misc_feature (1)...(507): n = A,T,C or G
tttttgctttcctaagaatttacaagttcatgaagatacaggaatgggaaggataaatgtggaaagcaaaaaaatgaaancaaaacacatatagacaggaaataaagaagagatttttttattgtgacaacaggaagagacaactggaaaaagctgcagctgcagccagaagaacaagtcaacataactattataaaaatagagagctttgggaggctgaggcggatggatcgcctgaggtcaggagtttgagaccagcctggccaacaaaatggaaccctgtctctattaaaaatacaaaaattagctgggtgcgacggtatgtgcctgtagtcctagctacttagggggctgaggcaggagaatcacttgaactcaggaggcagaggttgcagtaagctgagatcgtgccacttcactcagcctgggtgacagagcaacactcttrtcttaaaaaaaaaaaaaagaaagaaagagagaggaatggattacagaagaggacaaaga

SEQ ID NO: 116655 - DNA, 590 bp, Homo sapiens
aatatctgctgagtcctgttcctaagggcatgttgccctatctgtggttgatgaagactggggtatgggcctgtgattaagtgaatggctggctgtatgtatttttgcaaaatgatgagatgagggaaaatgaatatttatgccatctttgattcttctaaattttccaccaaactgtctgcctgtgctttaatattgtcattaataatacaaattagaataatgtaattaaatgcccttgggtatcacctgagcatttctgtacaactatgataccctggggctccctgatcctaatggtctcrtggctggctagcactttatgaacatacccaggttggctcttttatttcttgcctgaaaccacctctgtgctacagtttgttttttttgttgttgttgtttgtttgttttttttttggctctggctgcaattagattcacactttactgtactgtaaaaatctcatttgatgatccatatccatattctataaaacttggtttcagctgaggcaagagaagcccttcacccaaggcatacaaggcaacatccagggcagaggattttgacttttctgtgcctgatg

SEQ ID NO: 116656 - DNA, 522 bp, Homo sapiens
ttgtaaggtccttggtaggtgctcccaaaatatgtatactaaaaattgatatttcacaagtttctgcctgttcataatsaaattgtgtccttcagttacataatagcccaccctcaaaacagtttttaggtatgttccctgaagaaataaattggaaaataaaatactagctgaattttcactccctgctgatttggaggaagcttaattaaaatgtgttacttctagaatctctcatcagagtttcagtgaaagtctttcctcttctcatctttcctgccctttccccaacctgaggatctaatcagagcaccgtactaagctgctgctttcattagtatctctgctgccattgcctggcagaagcatgcatcaatgctgagtgttccaggcctaaaatgtgaggatttccaatcattttcaagattagggaaccctcaaagtgttttgaccctaccaggtgagaggcatttgccatatagaccatagaggtcataattagtaagagatatttccaaaaac

SEQ ID NO: 116657 - DNA, 522 bp, Homo sapiens
ttgtaaggtccttggtaggtgctcccaaaatatgtatactaaaaattgatatttcacaagtttctgcctgttcataatgaaattgtgtccttcagttacataatagcccaccctcaaaacagtttttaggtatgttccctgaagaaataaattggaaaataaaatactagctgaattttcactccctgctgatttggaggaagcttaattaaaatgtgttacttctagaatctctcatcagagtttcagtgaaagtctttcctcttctcatctttcctgccctttccccaacctgaggatctaatcagagcmccgtactaagctgctgctttcattagtatctctgctgccattgcctggcagaagcatgcatcaatgctgagtgttccaggcctaaaatgtgaggatttccaatcattttcaagattagggaaccctcaaagtgttttgaccctaccaggtgagaggcatttgccatatagaccatagaggtcataattagtaagagatatttccaaaaac

SEQ ID NO: 116658 - DNA, 582 bp, Homo sapiens
catatttttagttgagacggggtttcaaggataaaattaattctctttggaagcaatcatggaaaagaaaaaaatgcttatatgcaaaagacacttacactttcttcctgcctactccgtatttctaaagactgaggtttagccagttaactaaagttaccactgaatcatcttttaaaaattgaagacttgaggttgttaaaactggctttactttgaacttcacacactgtctgttgaattttggaagggcaagagcatagttattgaaggaacttggagagtttctgctaattaagacctgttcacttgaaccaagcaaatggctacacatcttataagaataaatggtsttcctgatcctacctgtctttctatgcattagttaaggtgagtagatgacgtttgactggcagcttattctgggactattttatgctccacaaggaaaagacactaaaaatagagaagataaaatatttaaattattttgcttgctccagtcttttcagctccttttttcatgtagaaatatataatatctttaagatatgtaaaagttttgaattgatgacctcattt

SEQ ID NO: 116659 - DNA, 682 bp, Homo sapiens
tagtgcgatcatggttcactacacccttgaactcctgggctcaagtgatcctcctccctcagcccttgccaccagtagctgggactataggcacacgccaccaagcccagctaatttttaatattttcctgtacagatagggtcttgctgtgcttcccaggctggtctcaagctcctgggatcatgcaaccctccaaccttggcctcctgaggtgccgggattayagtcatgaaccactgcaccaggctgggttgtcatatttattttctcttttggtaatatgaatttgtttctttcatgatggcaaaatttactttttatttaaaatgtttttcctgtgatcaccacacaactgataaaaataagccacagaccctcttttgcaagcagtgcttgttttgaggcaggaccaaagctgtccacagccattttgggagttgatgcatggtgactgagcatgacatactcccaaactttcccattattcaccatcaaatgtaaagtattaaatatgtgcagatgtaaagccaggtcacatttttctttatgtcttccttgctacttgaattataatagacattttaagcacaagcaaaattaatattgtacctttaaatatgataatgaactgaagctctatatgccaattgtatgatatatcagcattcccattaagcacat

SEQ ID NO: 116660 - DNA, 487 bp, Homo sapiens
ctggtccttatacaaaaataattaagccactatcttgaatattctcattccatcaattaaaaaaaaaaaaaagacaggcacactgactgatggccaagggctaggtttgctctggtttgtatggaataccttttagacatcagttttcaacagtgtaaccaaaggcaattttgctggatcacacagaatatgcttcctgttctaaggcttttggttccaagagagacgcayagttctaggattctccttaatgcaaactatcttcaaagccaacttgttttatttcatttgcccaatttcctcaacctccttacacttctagtatgcagcttattggacatataaaagttcagaagaaattaaagttctgatacatccatctgagggcttgaggactgtgctgaactcgaatcaatattgaacaagggtctttggtaaagcttaactgaattctgataagaattaaattacattttagagtcaccac

SEQ ID NO: 116661 - DNA, 408 bp, Homo sapiens
acataaagaaaggcatgttggctaaatcaaatattcactaaatatcagtgaagtcaccactggaatctcaatagcacattttcctgctttcttttctcccttctgctaaccattgaagaccagggtcatccgtgggagcagatgagtaggacacgcgtctgcacgctggaggccctgggggttgacatgggagcaggaagtggacccccccmccctgcacatcccttctgtttttcttgatttcagtctcactggcccaggccaaatcttcaagggtgtctagttctgcagccagggagaaagtgatgccaagagaacctcgtctcctccctcctcagtctgctttgaaggggaaataaatacacaggcctagtgtgtctgtgtggcacagggaggtggttttgccag

SEQ ID NO: 116662 - DNA, 589 bp, Homo sapiens
cactgctgggggtgagggaccctcagcaccaccccaccgatgcagacctgccatggaattagaggcttgggtccgtggggcctagggcaggcttgacgctggcacctgagcctcggggtcagagagtgagctcctccatctggagccaagaccacagccagcccctttggaaagttctatccccctctcctacagaaaaggaggcaggagatgttgacaccaggagaccaagtctccatcttcccattgtcatgggcccccgctgaggcaagtggtgtcttatgcagggctatcaggttggacacacagctgtgggttcaggaggcaggttatgaaataagccaggagtctgcagatccaagagttggggagaatgactcacatcatggggaaacccgtctggaagtgagaaccggtgaaagcaggtcctgggtcctggtggctcctatttcagggaaraggaacaggggcagcgtggagcaagggtgggggctgcatgttttaacagggggccaaggagaaggctcagaggaaccagcagcccttccaggaagagagaaccttctggaaatggatgtgggctgggagg

SEQ ID NO: 116663 - DNA, 504 bp, Homo sapiens
tttcaataacctattatacaagacatatttcttagtttattctgagtggattttataacagtccctaaagtacaaattcttacttttacttgaatttagaaatgaagtcaggatttttctgatgaaaagcaactcatgtctctgatttgaatatgaaaattggyttttccaatgaagctagagggcagatattttctatataaattgaatgaggtaaatctgcagctccagagtttcaaaaatgtgccagtgtgtgtattcgtgtacaaaaacatgaggcagaatcacattattttttaaggataaagaattggcataggtgtattgagtactaacaatgttttatgtttccagttctttctgatccattggattaaacgtggtgctcctaaaggacagaataagttgtataagcatggccatttgatcagtcttggtaaagccttattgaaaaattttccagaaatttggaagataatgactttactgactaggaaacaagtt

SEQ ID NO: 116664 - DNA, 530 bp, Homo sapiens
gtccatctttctggttatttaattaaactctcctcctcttccaggaagccttccttgcttagcctctctattccagtcccttactagcattgctgccttaggctgcccttccctgatttacatgagtgtgtatctgtctcttccagcagcctgagattgcctccagagcagcctcatctgagttggcctgcagcttcccagcaagagtcctgcacgcttgctggggagaaatggagggtggcacatcatcactagagggtggaacatttggaaagattaacagactgacagaagcatacctctgacamcactcaaggacaacttaatgaatatacagcagaaattcagagtctttaattcaaacaaaagaggaaatagatgctgccattcttaggaatatttacaccctgagccacgacatctggactaggcagtagcactcagcgacagaaaagccagctccactcactgagctcagctcatggcaccaaaaattgagagtcagaagctatgtaggacacagccccaga

SEQ ID NO: 116665 - DNA, 530 bp, Homo sapiens
gtccatctttctggttatttaattaaactctcctcctcttccaggaagccttccttgcttagcctctctattccagtcccttactagcattgctgccttaggctgcccttccctgatttacatgagtgtgtatctgtctcttccagcagcctgagattgcctccagagcagcctcatctgagttggcctgcagcttcccagcaagagtcctgcacgcttgctggggagaaatggagggtggcacatcatcactagagggtggaacatttggaaagattaacagactgacagaagcatacctctgacaacactcaaggacaacttaatgaatatacagcagaaattcagagtctttaattcaaacaaaagaggaaatagatgctgccattcttaggaatatttacaccctgagccacgacatctggactaggcagtascactcagcgacagaaaagccagctccactcactgagctcagctcatggcaccaaaaattgagagtcagaagctatgtaggacacagccccaga

SEQ ID NO: 116666 - DNA, 627 bp, Homo sapiens
ttgcctctgttccacatataattctaaactttcctaaggttaaaaaatacttccacgacaaggagacaacagtaagccccaaaatgaagttggagttgtcttttcatcagaggttgaagtcatgatctttggagctgcagatattccgggaggccttttccacgcctgggagagacgagtagagactccgtgcaaccggctgccaatgaggacccagggccgtgccctccaaggggcatcttgcaccctcttcccgtgactcaggtctctgcgttacccagttctggccaaggtggggagggtagtggaccggcttcttccctagattaacacaaccgattcactcactgcttcattgwcctcggattttttttcttttgcatcttcctgcctggctgggccaggatgcttaggggtccttaatgaaagcagaatgaatcctgcatgtccccagtagctttgaccagcccgatagcggcagcttccgggtgctgcccatgacaggtgagtgggggtgactccggaagctcagcttacaggagggaaaagaaaatcgtccggggcaccgtttccctcctctctcttccacctctctctgcaatgccaagcccccacttgccaaaagag

SEQ ID NO: 116667 - DNA, 576 bp, Homo sapiens
ttttggtgtgtctcctctattgaaggacctaccttaagctactygggctcaaaccccaaatctcttttaagtatctattctcgaccttcctttcctgaaatcctactgagattctcagtgattgctttacgttactgtaattaagctttgcttaatgaaggagttatagtatggtgatcgggaggtggacagctgccaccttcactttctctgtcctattctgtgctgtgggttcactgactcctgcaagttacatcccaaggctccatgtcgctggttttaggctgggatggaccaatgacagctactggcaggagactagaggatggaaaagagagcccagggctgtcccccttgccctaggcctggggtgtcaccccaagtgtctgctgcagattgcttttttttttttttaaagacacagtctcgctttgtgcccaggctggagtgcagtggcatgacctcagctcattgcaacctccacctcccgggttcaaacgattttcctgcctcagcttccccagtagctgggattacaggcacctgcccagctaatttttgtatttttagtacaga

SEQ ID NO: 116668 - DNA, 564 bp, Homo sapiens
ctgcttctctggaggtaggagcagcactagcctgggattgccacgtgtgagtaattcactccagctgrgcagctgcctccacggtagacagggaggggcgggcggtctgcacaggctcctctcctcctgccagtgctgtttttatgttttccccctggttactgatcactgggttttaactcatgtgtttcttagagtggagaaatagttctctatactcagatctctttcaaaagtagggatatgaaatacaagagtgtattagtctgttctcacactgctatgaggacgtacccgagactgggtaatttataaaggaaagaggtttaattgactcacagttcagcatggctggggaggcctcaggaaacttacaatcatggtggaaggagaagtaaacatgttcttcgtatggcagcagcaaggagaagtgcccagcaaaagggggaaaagcctctataaaaccatcagatcttgtgaggactcactatcaggagaacagcagcatgggggtaaccaccctcatgattcaggtacctcccaccgggtcccttccacgacacg

SEQ ID NO: 116669 - DNA, 564 bp, Homo sapiens
ctgcttctctggaggtaggagcagcactagcctgggattgccacgtgtgagtaattcactccagctgagcagctgcctccacggtagacagggaggggcgggcggtctgcacaggctcctctcctcctgccagtgctgtttttatgttttccccctggttactgatcactgggttttaactcatgtgtttcttagagtggagaaatagttctctatactcagatctctttcaaaagtagggatatgaaatacaagagtgtattagtctgttctcacactgctatgaggacgtacccgagactgggtaatttataaaggaaagaggtttaattgactcacagttcagcatggctggggaggcctcaggaaacttacaatcatggtggaaggmgaagtaaacatgttcttcgtatggcagcagcaaggagaagtgcccagcaaaagggggaaaagcctctataaaaccatcagatcttgtgaggactcactatcaggagaacagcagcatgggggtaaccaccctcatgattcaggtacctcccaccgggtcccttccacgacacg

SEQ ID NO: 116670 - DNA, 564 bp, Homo sapiens
ctgcttctctggaggtaggagcagcactagcctgggattgccacgtgtgagtaattcactccagctgagcagctgcctccacggtagacagggaggggcgggcggtctgcacaggctcctctcctcctgccagtgctgtttttatgttttccccctggttactgatcactgggttttaactcatgtgtttcttagagtggagaaatagttctctatactcagatctctttcaaaagtagggatatgaaatacaagagtgtattagtctgttctcacactgctatgaggacgtacccgagactgggtaatttataaaggaaagaggtttaattgactcacagttcagcatggctggggaggcctcaggaaacttacaatcatggtggaaggagaagyaaacatgttcttcgtatggcagcagcaaggagaagtgcccagcaaaagggggaaaagcctctataaaaccatcagatcttgtgaggactcactatcaggagaacagcagcatgggggtaaccaccctcatgattcaggtacctcccaccgggtcccttccacgacacg

SEQ ID NO: 116671 - DNA, 578 bp, Homo sapiens
ggcaatgcaatggaattatgagcccaatgtgcttaggatcttgtaaatgttaaccaacattatcccctcacccaacatggcagcccataccctctcctcacctaacaagttgtccataccctctcctcagccagcatgactgtccatactctcccttcacccaacatggccactcatgtcttctcctcagctaacatggttgtccataccctttcctcacctaacatggctrcccataccctcttcctcacccagcatggccacccatgccctctcctcactcaacatggcatttttttttgccctcccccaaacctgggatgaggtggagcctcagtgtcttgactttatgtgtgtttgaatgaagagggtttaccacctctacctgctgataaaaaaccttcactagaggagaattggggtgtgcgtgtgtgtgtgtgcgtgcgtgcgtgtgcatgtgtttagggtagtggagaatgaaattgatttcttacctcttcttgttttgtgtaattctttacccaaataatatgattttagctgcagcacttaaggcactcaagggcacctcagtggta

SEQ ID NO: 116672 - DNA, 561 bp, Homo sapiens
tgtaccttatttacatgttgccaataaggttatatacctatcatagaggtgatatcactttacaaatgaagacaaagaaaacagtaagtaggctgtgttttctcttattggactatataaaattcagaagagcaggcttttttaggaaaatcatattcttttcatcagaaagagaaagctgctaagaccaaagaaagaaaaagaaaagcaagggcattaattctgacctcctaatttaatccagatctatagtcatctggagggcaaaatattttttaaattagttacaaggtgtgaaatgagataatttcatttcacaaagctttacctagaacacartgaaaggggaaccccaaaacggggggaggtggaaatctttaccaacattacttaatgatgtgctatactttagagacagaaaaggcataaataagtaaatgattgtttcttgaatcaatgtactagttattgtgtacatgaaaattctatcttttggcctggtctaaattatccacccaggtttttgcaagcaaattagaaacagataagccataaaaaatc

SEQ ID NO: 116673 - DNA, 639 bp, Homo sapiens
aacattttctacctttaaggaacttaaattctatttggagagacagaaagagattttgaaaacagggacaacagaatttgttgaccaattttatgtgtgggagaaaaacaggaattaaaagtgatttcgaaattattgacctaagcaactggaagtatgagttgtcatcaattgatagagggaaagctgggaaggagcaggctttggtagaaaaaacagagttaagttttggatttaagattgagacgcctattgcaaattcaaattcagatgtcaagkaggcagttggatatacgagtccaaagttaaaaaaaaaaaaagtcttctctggagataagatgttttaatcattgacatataagtcagggttcagtgcagaacagaaaaaccactcaaagtattgaggcaaagctaacaaatttgttggaagtgctgaaagaacaaaattcagggaacaccactggattttctattctgaagtccctccattatatctgtaatccagaaggcaagaaactgctaacccttacatgcctcacatccatgaattggcaaagagacatgaaatgtgcagccagctgctggaaatgctcatgtctgttggaacttgtatgtcaggtagagctgccatagaaaaat

SEQ ID NO: 116674 - DNA, 576 bp, Homo sapiens
acaaccattctaagtgctctcctgtattttctaatcctcttgcacataaggcagagttatgtgagtttttctgggcaaaaaatggtcagaatggagagaagaaatggcacgaggcaatctcataagcagtgaaaactcatgtttgatttttttctatctcctttctgcttcgtggtgataagtagcattccagacagtagaatctccttcagtctgagctactatctgaccatgtggagtacagagcaccagttgaatatggagcaaagatgagaaagtaatctttgttgtgatgagttttggtggttactttgttattacagcatatgctaaattatcctgactaacagatatatttcctcttaggtgctctcattgcaasagtggtcctcactgtcactggttcatggtgtgatgagaaaaataaagataatgtaatgaggtttccctaaaactaaatttcttcaaattaaataactgttatttattctactattatgtcttcttattttagggggttaaaatttactgttgtttttgaaatgttggtgggtaacacaagtctataaatatgac

SEQ ID NO: 116675 - DNA, 511 bp, Homo sapiens
aattatttagcaaaacaaaggaaaaaggaaaaagacaggctcatttctttcctaaatctaacataccactactctcacagcagaaataatcaagcaatgctggaaacttgaaatgggaaattttcagattcacatttctattgggccataagawttccttattgactcatcagccttcaaaaatggaaaggtcataataaaaagcatagaaaaagtatcaacttaaagtaaatgtgtggcaaatttccctccagggttacattttttaaagggctccaaaacgagtatacaaaatgtgggtgaatatgctagtgcacatacacagtcattttggtgtgagaaaaacagcaacgtaggtatctcacgaggcagactgtctattcagtacgcaaagctttgcatgaacaaggtgtaaaaggttgtgaatagggagaatccagagcaaggagctcccctgggcagtatctaagcctgcagcaaacatgctgagtttggcagaaggctgggcaga

SEQ ID NO: 116676 - DNA, 511 bp, Homo sapiens
aattatttagcaaaacaaaggaaaaaggaaaaagacaggctcatttctttcctaaatctaacataccactactctcacagcagaaataatcaagcaatgctggaaacttgaaatgggaaattttcagattcacatttctattgggccataagaattccttattgactcatcagccttcaaaaatggaaaggtcataataaaaagcatagaaaaagwatcaacttaaagtaaatgtgtggcaaatttccctccagggttacattttttaaagggctccaaaacgagtatacaaaatgtgggtgaatatgctagtgcacatacacagtcattttggtgtgagaaaaacagcaacgtaggtatctcacgaggcagactgtctattcagtacgcaaagctttgcatgaacaaggtgtaaaaggttgtgaatagggagaatccagagcaaggagctcccctgggcagtatctaagcctgcagcaaacatgctgagtttggcagaaggctgggcaga

SEQ ID NO: 116677 - DNA, 511 bp, Homo sapiens
aattatttagcaaaacaaaggaaaaaggaaaaagacaggctcatttctttcctaaatctaacataccactactctcacagcagaaataatcaagcaatgctggaaacttgaaatgggaaattttcagattcacatttctattgggccataagaattccttattgactcatcagccttcaaaaatggaaaggtcataataaaaagcatagaaaaagtatcaacttaaagtaaatgtgtggsaaatttccctccagggttacattttttaaagggctccaaaacgagtatacaaaatgtgggtgaatatgctagtgcacatacacagtcattttggtgtgagaaaaacagcaacgtaggtatctcacgaggcagactgtctattcagtacgcaaagctttgcatgaacaaggtgtaaaaggttgtgaatagggagaatccagagcaaggagctcccctgggcagtatctaagcctgcagcaaacatgctgagtttggcagaaggctgggcaga

SEQ ID NO: 116678 - DNA, 588 bp, Homo sapiens
gggtgaatatgctagtgcacatacacagtcattttggtgtgagaaaaacagcaacgtaggtatctcacgaggcagactgtctattcagtacgcaaagctttgcatgaacaaggtgtaaaaggttgtgaatagggagaatccagagcaaggagctccmctgggcagtatctaagcctgcagcaaacatgctgagtttggcagaaggctgggcagagatatctaagtaagcagtgtgtggtgaaagttattttagaataaatcagatgcattggttagctgatcagagcacaaaagcaaaagtggagctgcaagagacccccaaaacatttattcaaacattggctgaatcagtagctttcttataaacatgatcagtgagtttagaaggcatagggtgaaaaggaggggaagaagacaaggaaagaaatgaatatgaaggaagaaacagatccaaatatagatagtacatggttaagaattaagactacacgggtgaaaaggtgaatatctgagtaacagaataaagaagttaactggaacagtccctgattaatgaatgagttaagtgcccaaactaagtctgcaagt

SEQ ID NO: 116679 - DNA, 554 bp, Homo sapiens
tgtgtggttcactattacacttagggcctgccacactaccacacagtaggcccttagcggacatgtgctgaatgactgaatgttgaacaggggcaggaatttctctgtccccaggagcaaaccaaagaacatatgctcttccctgtgaggtgtttcctatgatagagaatctataaagaactgggtagatggggtggatttagggggcagctgaggtcactagtggttcagaaacaaaggatttagggagaatcctgcactcaaggctgaggcgagaaggaggaaggttttggagtccaactgccttgacttggaattgtggctctttcatttagcagctgggtgatctagttaccttttgtgttgtgtgctacatccccttggtccctkgcagcctccgatttcagctgctgctatgaagggcagttctgtgcaagctcaagttcatcttccactgacagcttcccactccaaggtttagtctttctgctccaggcaactagaacaacaacccacaggtaccccagaagtgcacaaatgctcttacctatgac

SEQ ID NO: 116680 - DNA, 538 bp, Homo sapiens
tgagtgaatcacctgtggtatatttataaataaaaatattaaatagaaggtaaaacaaatcagacatacacacattagatagataaatttagaggacaaaataaggaacatgaaaagcaaatagtagatggcaaatgtaatataatatactatgcataaattttaacaacacacaatattatattgcatattgcccaataagcagaagccataaggtctcacacttttcttataatkcaatagaataaaaatgacaacaaagtaaaagggtatcccaaaaataaaactatccttttggaaaaaaaaagatttaaaataattcctggtttgaagaaataacaaattaaaagctatatataaacggttaacaatattaggtggacatatttgtttgaagagataggtgaaagatagttgaaaagcctgggggtatattcaaggttatatgtcttagaaaacaaaaatacttgtttgggttcagttttggatctgggcttgttcttgtggcttctgatgatttctgacttggggaaaaatg

SEQ ID NO: 116681 - DNA, 582 bp, Homo sapiens
atcatgctgacaggaggtcatggctcctgatacagtaaacctcaggatggtctttgcccatgcaagaggtttggctggcaattcacgttaatttcttctccyttctgacttgaaaaactcaagttgtctgtgaaaatgaaaaaactttagtgtacatatctcacccaacaaggctttataaagctgcttcttaaggcagctctatattcttttttttttttctttttgacagagtcttgctctgttactcaggctggagtgcagtggcacaatctcggctcactgcaacaacctctgcctcccaggctcaagcaattctcatgcctcagctcccgaggagctgggattatgggtgtgtgccaccacacccagcgaattttttgtatttttagtagagacagggattcaccatgttagccaggttcgccttgaactcctggcctcaagttaatcctcccgcctcagcctcccaaagtgctgggattataggtgtgagccacaatgcctggccagacagctgtatattctaaacattaaagccaccattaggatagaactaatttagaacaatgttatatagtg

SEQ ID NO: 116682 - DNA, 582 bp, Homo sapiens
atcatgctgacaggaggtcatggctcctgatacagtaaacctcaggatggtctttgcccatgcaagaggtttggctggcaattcacgttaatttcttctcccttctgacttgaaaaactcaagttgtctgtgaaaatgaaaaaactttagtgtacatatctcacccaacaaggctttataaagctgcttcttaaggcagctctatattcttttttttttttctttttgacagagtcttgctctgttactcaggctggagtgcagtggcacaatctcggctcactgcaacaacctctgcctcccaggctcaagcaattctcatgcctcagctcccgaggagctgggattatgggtgtgtgccaccacacccagcgaattttttgtatttttagtagagacagggattcaccatgttagccaggttcrccttgaactcctggcctcaagttaatcctcccgcctcagcctcccaaagtgctgggattataggtgtgagccacaatgcctggccagacagctgtatattctaaacattaaagccaccattaggatagaactaatttagaacaatgttatatagtg

SEQ ID NO: 116683 - DNA, 599 bp, Homo sapiens
ctcattaccaactgtttgctgtggtgttgcagtgtcctgtctcccaggaaagcatctccttcttataatgggatctgtgtctgaaaactagttcagaccagaaactgagtcatgaacttaccttctttgttcccttcagtctttacttccaatctttcagcaagtctgttggcttcatctccaaggtgttcatttagcctttctttctttttttttttagacagarttttgctcttgttgcccaggctggagtgcagtggcgcgatctcggctcactgcaacctctgctttctggtttcaagcaattctcctgcctcagcttccaaagtagctgggattacaggcgcccaccaccacacccagatcatttttgtatttttagtagagacggggtttcaccatgttggtcaggctggtctcgaactccttaccttatgatccacctgccttggcctccctaagtgctgggattacaagcgtgagccaccatgcctggcccacttagcctttctattctaggtgcttaggattacagaagtaaagagaaaaaccccaggctccatgttgcatatattttagtgagttatgcagaccacata

SEQ ID NO: 116684 - DNA, 584 bp, Homo sapiens
agctatttaaaatgccagatttctggaaaatcagaagagagtaaagctggagcaaattctccggtggtggtggtcagggggttgcagtcaggactccttcagggccattatcctgctgcttctggtgtccagtacctgcctctcagaagacagaacacaaaaccaagctctaccaaagccaataaccaagtatcaaatactgtgaatcagggttccttttggaagtgtccactgaggccctctcagccagaacacaaaattcrtttcccttaatatcctgcaggcatatggataaactgctcctttggcagtttcttaactgaatgggggctgatggagcccagccaggctccaggtaaatgagactgtaaagtggggctcaaagaaaatgtcctctgggttgcgcatgctctgttgacacagggctggttaaaatgtcctggagtgggaggtccaggtccaggtcacttccttactagtgcctcagggagactctcccttctcaccagggcttatggtcctttgtatttttctcacagaactgaggatcccagccctcccatctccatccatgctcagggatt

SEQ ID NO: 116685 - DNA, 584 bp, Homo sapiens
agctatttaaaatgccagatttctggaaaatcagaagagagtaaagctggagcaaattctccggtggtggtggtcagggggttgcagtcaggactccttcagggccattatcctgctgcttctggtgtccagtacctgcctctcagaagacagaacacaaaaccaagctctaccaaagccaataaccaagtatcaaatactgtgaatcagggttccttttggaagtgtccactgaggccctctcagccagaacacaaaattcatttcccttaatatcctgcaggcatatggataaactgctcctttggcagtttcttaactgaatgggggctgatggagcccagccaggctccaggtaaatgagactgtaaagtggggctcaaagaaaatgtcctctgggttgcrcatgctctgttgacacagggctggttaaaatgtcctggagtgggaggtccaggtccaggtcacttccttactagtgcctcagggagactctcccttctcaccagggcttatggtcctttgtatttttctcacagaactgaggatcccagccctcccatctccatccatgctcagggatt

SEQ ID NO: 116686 - DNA, 354 bp, Homo sapiens
taataattaccagatgttggcaagagtattacaggcagcaacaggtttcagtgagaatgtaaccatatcatactatgtatyatgtagtgcatatattatatataagtattcatctgtaatagcatatcaacttattttttcaaatgcactaattaaacctcaagcccccattttaggctttgcacttttgattaataaggacagttaaaaaaaaaaagaaagaaagagagaaagaaaagcttcctagttgctatgtggaaactggcattgccaaggagcttgcaaccatgcagccacaaggaggagctcaagcatcaaattaaaaattaacacaaactaataaattctggcgcg

SEQ ID NO: 116687 - DNA, 523 bp, Homo sapiens
tgattccttccatgtcaatactcgtcttcccttcagtacctatgtacatctggtgctggatatcataggccctgtcatattgtgatgcaatggttggccctgcagtttgatgttatgacactggctgagtcagcataggggccactagaattctccgaagccattctcccactggaacaytaactgtgctatctctatattgactgtgaatcacatgaatagatcccacttaatccaaaccaaatacatccccaattcaactcttctttggattccagaattgcctagagccactgccataccacctacattaggagaaatataatgggggaaggtcagagtaggaatatagcattaaaatattttatttcaaaaattttaaaaacacctgattagctgagcacattgtgagtacccagatgagggaagggaagggaattttcttgttggtgtggttgatagcatcaggagcaaattttgaagcataaactgatgtaccctactgtgggggcttgagggtgtt

SEQ ID NO: 116688 - DNA, 523 bp, Homo sapiens
tgattccttccatgtcaatactcgtcttcccttcagtacctatgtacatctggtgctggatatcataggccctgtcatattgtgatgcaatggttggccctgcagtttgatgttatgacactggctgagtcagcataggggccactagaattctccgaagccattctcccactggaacactaactgtgctrtctctatattgactgtgaatcacatgaatagatcccacttaatccaaaccaaatacatccccaattcaactcttctttggattccagaattgcctagagccactgccataccacctacattaggagaaatataatgggggaaggtcagagtaggaatatagcattaaaatattttatttcaaaaattttaaaaacacctgattagctgagcacattgtgagtacccagatgagggaagggaagggaattttcttgttggtgtggttgatagcatcaggagcaaattttgaagcataaactgatgtaccctactgtgggggcttgagggtgtt

SEQ ID NO: 116689 - DNA, 523 bp, Homo sapiens
tgattccttccatgtcaatactcgtcttcccttcagtacctatgtacatctggtgctggatatcataggccctgtcatattgtgatgcaatggttggccctgcagtttgatgttatgacactggctgagtcagcataggggccactagaattctccgaagccattctcccactggaacactaactgtgctatctctatattgactgtgaatcacatgaatagatcccacttaatccaaaccaaatacatccccaattcaactcttctttggattccagaattgcctagagccactgccataccacctacattaggagaaatataatgggggaaggtcagagtaggaatatagcattaaaatattttatttcraaaattttaaaaacacctgattagctgagcacattgtgagtacccagatgagggaagggaagggaattttcttgttggtgtggttgatagcatcaggagcaaattttgaagcataaactgatgtaccctactgtgggggcttgagggtgtt

SEQ ID NO: 116690 - DNA, 523 bp, Homo sapiens
tgattccttccatgtcaatactcgtcttcccttcagtacctatgtacatctggtgctggatatcataggccctgtcatattgtgatgcaatggttggccctgcagtttgatgttatgacactggctgagtcagcataggggccactagaattctccgaagccattctcccactggaacactaactgtgctatctctatattgactgtgaatcacatgaatagatcccacttaatccaaaccaaatacatccccaattcaactcttctttggattccagaattgcctagagccactgccataccacctacattaggagaaatataatgggggaaggtcagagtaggaatatagcattaaaatattttatttcaaaaattttaaaaacacctgattagctgagcacattgtgagtacccagatgagggaagggaagggaattttcttgttggtgtggttgatagcatcaggagcaaattttgamgcataaactgatgtaccctactgtgggggcttgagggtgtt

SEQ ID NO: 116691 - DNA, 562 bp, Homo sapiens
gcacatgttaaatcttgataaatactgcctaatctttctacaaatattttccccaatcagcatgcttactaagaatatccattaactcttcatatattaaaaaccatgggagatggaaagaatgaatgattattgctctcaatggagtttataatagaatgttgtaatataaggcaataaacataataccttaaaagcagctaaacttgtagaagtaatatcttttagtgtttggcaaagaggagaggtattatcttattcctgggatgtcatgataaatttctttccagcaaaatgagcaagctaataaatacaactacactacactgagtggattcactttttgggracagataaactcacagagcccaaagtacaaaaccaatttatgaatgtacaggagataaaacatgcccgtgggtccagacatgcccatccagtctcgccttctgtccatgtatacacaccaaaagctaatttaatatttgaatgccagcaaatctagttttattttattttattatttttttaaatatccacatggcagtccacttttcatgta

SEQ ID NO: 116692 - DNA, 551 bp, Homo sapiens
ccactactaggtatctacccagaggaaaaaagtcgttatatgaaaaagacacttgcacacgcatgtttatagcagcacaatttgcaatygcaaaaaatatggaaccagcccaaatgcccatcaattaataagtggataaagaaaatatggtgtgtgagaatatgtatatataatatatatcaattttatgtatataatggatatatatatgatttatattcatgaatattcttttcataatcttctcctggctgtatatagtatatatatatatatccatgacatatatactatatatatgatatttaaagaaaatatggcgtgtgtatatatatataaatcttcattttatatatatatatatacacacacatatatatatgtatgtatactactgagccataaaaaaaatgaaataatagcattcacagaaacctggatggagttggagaccattattctaagagaagtaacttaggaatggaaaacaaaacatcatgtgttcttacttataagtgggagctaagctatgaggacacaaaggcataaga

SEQ ID NO: 116693 - DNA, 551 bp, Homo sapiens
ccactactaggtatctacccagaggaaaaaagtcgttatatgaaaaagacacttgcacacgcatgtttatagcagcacaatttgcaatcgcaaaaaatatggaaccagcccaaatgcccatcaattaataagtggataaagaaaatatggtgtgtgagaataygtatatataatatatatcaattttatgtatataatggatatatatatgatttatattcatgaatattcttttcataatcttctcctggctgtatatagtatatatatatatatccatgacatatatactatatatatgatatttaaagaaaatatggcgtgtgtatatatatataaatcttcattttatatatatatatatacacacacatatatatatgtatgtatactactgagccataaaaaaaatgaaataatagcattcacagaaacctggatggagttggagaccattattctaagagaagtaacttaggaatggaaaacaaaacatcatgtgttcttacttataagtgggagctaagctatgaggacacaaaggcataaga

SEQ ID NO: 116694 - DNA, 592 bp, Homo sapiens
ctggaatccacatcaccgagcctcttgagttcaaaaaaattttaagtgctatcaggaaagataggtagaaacaaaaatttcagtgttgtctgtgcatattctttttatttccacacttttcatattcttctcctggctgtcaaagggtggctgtctcccttctttcaaatgtcayattaactatcaccacctgacagaggatttgctcaacccaccagctcatctaagtactgcctgcctccaccatattatttggtgtcacagcgtactcataccctgcttatctccttctgagcagttatcaccatctaattatttttatttacctatttacttgttaagtgtttccattttttctagattttaaatgctaggagagcagggagcatatctgtttcatttacaaatacctacacagagttctgcctagtgcctagcatgtaatatactcaataaacattgagtgaatgaatgattttgcaaagcagtcacttttaactctttggtgaatgcattttgagaatttttcctaggagagcacatatatatatatttttttctttaccaaaaaaaaccatgttatgcatattgt

SEQ ID NO: 116695 - DNA, 643 bp, Homo sapiens
ttaagtgttctccacaaaaaatatgaggtaatgaatatgttaagtagcttgatttggttattccacaatgtatgttaatatcaaaacatcatgttggaaaccacaaatatatgtaacttttttgttagttaaaaaaactgatgtacayatcaagagcattaagttttctaccttagaacatcctctcatcaaagacattaaaaaatgtttttgagccttaccacatctgaagaattatcttctctacagtcctctcaaacaatgttttgaaatcacataaacttacttgttacttgtatttttcatatttgttttaataattttattcctattcctttgagatcatcttccttcccattagttcatgctccatattcttttaaaaatttttttccttgaggattttgattcagttgtagatttatagagaatttgcagaaaggagttatacttttaaataacccccccaacacacacatctctaacacacacacacattactcaaattcacacacacaaacacacacacacacacacaccccggatgagcctgaatgtgctacaactggggaaggaaagaaggcaaataatacaccatctcaagaggcagtgaatgggagtaccttaaaccagccatagatat

SEQ ID NO: 116696 - DNA, 643 bp, Homo sapiens
ttaagtgttctccacaaaaaatatgaggtaatgaatatgttaagtagcttgatttggttattccacaatgtatgttaatatcaaaacatcatgttggaaaccacaaatatatgtaacttttttgttagttaaaaaaactgatgtacacatcaagagcattaagttttctaccttagaacatcctctcatcaaagacattaaaaaatgtttttgagccttaccacatctgaagaattatcttctctacagtcctctcaaacaatgttttgaaatcacataawcttacttgttacttgtatttttcatatttgttttaataattttattcctattcctttgagatcatcttccttcccattagttcatgctccatattcttttaaaaatttttttccttgaggattttgattcagttgtagatttatagagaatttgcagaaaggagttatacttttaaataacccccccaacacacacatctctaacacacacacacattactcaaattcacacacacaaacacacacacacacacacaccccggatgagcctgaatgtgctacaactggggaaggaaagaaggcaaataatacaccatctcaagaggcagtgaatgggagtaccttaaaccagccatagatat

SEQ ID NO: 116697 - DNA, 408 bp, Homo sapiens
gaacattctgtaggttggactttattctaatttacttggatacccttcctattggccttatttttcttgtgtctcagttataagccttccctaagaagttaggtactgctattctacgcctcactcagatgttgacataacttttwtcaccagcaattctacttgtcaaaagtaattaggcatgctatcaaatgtctggagccaggcagatcttctttatgatacacttcagcaagacgctcaatttgtaggtttattcatccatatccttctctgcttgtttgcccaacccgtgggaccacttctctttcttagaaacacatggttttgtgaaggccaggatcagtcagtgttttttgaatgagtacccattatgggccaaaactgtgtgtgagaaacaaaaaataa

SEQ ID NO: 116698 - DNA, 567 bp, Homo sapiens
ggtgtccagcaccctttggggaatcagaggagaaaacaggtgtttgcaaccctgtgtgatgggcacatgtgctgtaggagcccagggagaaacaaactggctaaaatgggcacctgaggggctcctcagaggcagctacacttgtgtccttgcaggaaccctgctgagcccgattctggaacagatcaggacaggaagagctttcaaagagtttctgtttcaataytcttttcattgctaggaaactgaggctgagaaaggggtaggaactggctcagggtctgtggtgggagtgggatttgaatgctgtccgaccttgaaacctgtgttagtatgaatcctcccagaagcagacaccaagttaggatgagatcagcagagatttattggggatgcacgtgtgcaggttaagagaggggccaggagtgatcagggagagccttcagactgccatgtgagaggggagagggggaaggaaggaaggtagggcaggaggagtccgagacacagcacagctctaggaacttttggccggatcagttgggagtctctggtggactattgact

SEQ ID NO: 116699 - DNA, 454 bp, Homo sapiens
ctataatagtccctctcttgaagatttaccatgcacattaggacaacacaggtttccagaagctctgaaggcaagaaacctgtttaagtttgtctaattcagtgtttcttacattttgttgaacatggcctgtttattttaatgtgttcctaatactggtctctcaggtgccagatactgtgctaggggcttcagccatgttaactgactacacctccttacagccttgtgatgttattcctgttttacaaaggaggtcgtaggagttgaracagttgaagcaacctgtacaaagcatatagttagaaaacggcagtgctagaattaaaacccaggcctgcctgacttctaagctcatgctattcccactgaattatgtggcctctcaataggtcattttggttttcacgtggttgaggtcaagatcatctgcttgataaggagagtcacaaga

SEQ ID NO: 116700 - DNA, 480 bp, Homo sapiens
ccttgtgatgttattcctgttttacaaaggaggtcgtaggagttgaaacagttgaagcaacctgtacaaagcatatagttagaaaacggcagtgctagaattaaaayccaggcctgcctgacttctaagctcatgctattcccactgaattatgtggcctctcaataggtcattttggttttcacgtggttgaggtcaagatcatctgcttgataaggagagtcacaagagccccccttttcagttgacatttccctcggatagagacattttaaaggttcttggagaagcaagtgatttgttcctttgaatgttggaaattgtatcctgtttgtgatgagtggtctttgtgtgtcactcctcaaaaacacagccatttactactcctaaagttggccctgttttgagggatacttggagagaaagaatgtctgcaaggaattcttaatttggataagatatgtcacctctaggtctctc

SEQ ID NO: 116701 - DNA, 523 bp, Homo sapiens
gaattcttaatttggataagatatgtcacctctaggtctctcctaagctttgggtttcttagccatgaaagcagaatttatgactcagttatctgggattcaacttccaaagcctctctcttgaagagatcacagattttgtaccttaccagtaagaaacaaatattaaagaacgggcaactctagaaggtcacttgcccagagctaattttttaagatgactrtttgggtcctttgtatctgaaagttggttgagagcttcccttcaggataggggacaggacaaggtgggctctttgaatcctggctgtgtccctcactctctgtgcctctgtggctcagtttctccacatatcaacaggaaatagtgtatcttatgtctttgggctgaactgagtaccagatgagatcctggatatttcattctcttattccaaagtattatgggtctataaaaccccacaaagacaactatgaagcagagctaggaaagcagatgacaagatttatgaagtatgtagag

SEQ ID NO: 116702 - DNA, 562 bp, Homo sapiens
ctatttgggtcctttgtatctgaaagttggttgagagcttcccttcaggataggggacaggacaaggtgggctctttgaatcctggctgtgtccctcactctctgtgcctctgtggctcagtttctccacatatcaacaggaaatagtgtatcttatgtctttgggctgaactgagtaccagatgagatcctggatatttcattctcttattccaaagtattatgggtctataaaaccccacaaagacaactatgaagcagagctaggaaagcagatgacaagatttatgaagtatgtagaggaaacttgagtgtctgccytatgttgtagaattcatttgtcctgccccctggcttcaattcttcaaattgtggacttacaaaagggggatgaaaaagtttgaggagataggaagaaagcttagactttggattagaaatcttattatgaaacattatgaaaataattgtatcttttcatcccaattgtatgtttggtttgaatttaggtgctagtgtaggctttttggcccctctcttccctttagggttcccaagttag

SEQ ID NO: 116703 - DNA, 562 bp, Homo sapiens
ctatttgggtcctttgtatctgaaagttggttgagagcttcccttcaggataggggacaggacaaggtgggctctttgaatcctggctgtgtccctcactctctgtgcctctgtggctcagtttctccacatatcaacaggaaatagtgtatcttatgtctttgggctgaactgagtaccagatgagatcctggatatttcattctcttattccaaagtattatgggtctataaaaccccacaaagacaactatgaagcagagctaggaaagcagatgacaagatttatgaagtatgtagaggaaacttgagtgtctgcccyatgttgtagaattcatttgtcctgccccctggcttcaattcttcaaattgtggacttacaaaagggggatgaaaaagtttgaggagataggaagaaagcttagactttggattagaaatcttattatgaaacattatgaaaataattgtatcttttcatcccaattgtatgtttggtttgaatttaggtgctagtgtaggctttttggcccctctcttccctttagggttcccaagttag

SEQ ID NO: 116704 - DNA, 562 bp, Homo sapiens
ctatttgggtcctttgtatctgaaagttggttgagagcttcccttcaggataggggacaggacaaggtgggctctttgaatcctggctgtgtccctcactctctgtgcctctgtggctcagtttctccacatatcaacaggaaatagtgtatcttatgtctttgggctgaactgagtaccagatgagatcctggatatttcattctcttattccaaagtattatgggtctataaaaccccacaaagacaactatgaagcagagctaggaaagcagatgacaagatttatgaagtatgtagaggaaacttgagtgtctgccctatgttgtagaattcatttgtcctgccccctggcttcaattcttcaaattgtggacttacaaaagggggatgaaaaagtttgaggagataggaagaaagcttagactttggattagaaatcttattatgraacattatgaaaataattgtatcttttcatcccaattgtatgtttggtttgaatttaggtgctagtgtaggctttttggcccctctcttccctttagggttcccaagttag

SEQ ID NO: 116705 - DNA, 601 bp, Homo sapiens
gaatctgcctgtaagctgctgtggccttgagagggtggtgaacttggaggaaggattttcgtaaaatggcatagaatgggagaatagtgaacaactgcgccagggacctgagagcaaggagcaaagctcttgagattccagggcaaatgggccatagatctacttgctttaggagttgaggagcgtggtagaaggaaaaatatactcctagagtgaagctcctccagaaaacccctctcggttttggaggaaatcatttaaacaccacaccctgtactcgatggggaaggagctcactctggtagagggttgaggtgaggtacactgttggtgtggaggggctgctgcgtgtgttagtgtgtggtggtcctcagctaggcttctagcctggcctcccctggactatctctcagctccaggaggagggaggctggaacaagtgattcagtttaacagaggggctgtgggttcagacaatttgagaagcaggtgtcaggcrtttcatcaatagcagggccccgtaatgagctgggagctgtttcttcactgtggatgatatggcctggctagatacccacaggcctgtggtgtaaatatcccc

SEQ ID NO: 116706 - DNA, 520 bp, Homo sapiens
ctgtgttgattactatagctttgtagtatattttgaagtcaggttgtgtggtaccttcatctttgttttttttgctgaagatccaatccaatgtcaaatagaagttgtgagactggacactcttgtcttgtttccaatcktagtagaaaagtattcagtttttcaccatttagtatgatgttttctttaggattttttgtagattctctttttcatgttttatgcctagcttattgcaagtttttgtcagaaatcagtgttggagttttgcaattttttttctactgaggtgacaatgtggttttgtcttttgttattttaataaggtatttacattcattggttttcagatgttaaataaatgccgtatcatttagtcatggtgtataatcctttttagatgttgctgaatttgatttgctgatatattgtagagttttctactcatgtccatgagggatatttttagttttctttttatgtgttgtctttgcctttggtattggggcaatagtgcttt

SEQ ID NO: 116707 - DNA, 520 bp, Homo sapiens
ctgtgttgattactatagctttgtagtatattttgaagtcaggttgtgtggtaccttcatctttgttttttttgctgaagatccaatccaatgtcaaatagaagttgtgagactggacactcttgtcttgtttccaatcgtagtagaaaagtattcagtttttcaccatttagtatgatgttttctttaggattttttgtagattctctttttcatgttttatgcctagcttattgcaagtttttgtcagaaatcagtgttggagttttgcaattttttttctaytgaggtgacaatgtggttttgtcttttgttattttaataaggtatttacattcattggttttcagatgttaaataaatgccgtatcatttagtcatggtgtataatcctttttagatgttgctgaatttgatttgctgatatattgtagagttttctactcatgtccatgagggatatttttagttttctttttatgtgttgtctttgcctttggtattggggcaatagtgcttt

SEQ ID NO: 116708 - DNA, 520 bp, Homo sapiens
ctgtgttgattactatagctttgtagtatattttgaagtcaggttgtgtggtaccttcatctttgttttttttgctgaagatccaatccaatgtcaaatagaagttgtgagactggacactcttgtcttgtttccaatcgtagtagaaaagtattcagtttttcaccatttagtatgatgttttctttaggattttttgtagattctctttttcatgttttatgcctagcttattgcaagtttttgtcagaaatcagtgttggagttttgcaattttttttctactgaggtgacaatgtggttttgtcttttgttattttaataaggtatttrcattcattggttttcagatgttaaataaatgccgtatcatttagtcatggtgtataatcctttttagatgttgctgaatttgatttgctgatatattgtagagttttctactcatgtccatgagggatatttttagttttctttttatgtgttgtctttgcctttggtattggggcaatagtgcttt

SEQ ID NO: 116709 - DNA, 520 bp, Homo sapiens
tgggttcaccttgcccgctgcctagacagagcagatttatcaagatatgggagttgcagtggagaaaaagtaattcatgcagaaccagttgtgcaggagaccagagttttattatgactcaaatcagtctccctgagcattcaggaatcagagtttttaaagatwatttggtgggtaggggcttgagaattggggagtgctgactggtctgattggagatgaaatcataaggggtcaaagtgaatttttcttgctgtcttctgttcctgtgtgtgatggcagaactggttgagtattcttgccaaaagaaaaaaaattgacctgaatttaatcaaactgttagatctagctaatatgtaaaggaaacagcaaggatagaagaagaagttaaaatacaccatgaataaacaattggtcagaagaagcaatgggaaaatctactggataaacaacaggatttccttaacaaaaaaaggcatgaaggaagagatcatgagaaatgttatatattaagagtgac

SEQ ID NO: 116710 - DNA, 598 bp, Homo sapiens
agagttttattatgactcaaatcagtctccctgagcattcaggaatcagagtttttaaagattatttggtgggtaggggcttgagaattggggagtgctgactggtctgattggagatgaaatcataaggggtcaaagtgaatttttcttgctgtcttctgttcctgtgtgygatggcagaactggttgagtattcttgccaaaagaaaaaaaattgacctgaatttaatcaaactgttagatctagctaatatgtaaaggaaacagcaaggatagaagaagaagttaaaatacaccatgaataaacaattggtcagaagaagcaatgggaaaatctactggataaacaacaggatttccttaacaaaaaaaggcatgaaggaagagatcatgagaaatgttatatattaagagtgacataagagacaaaccaaatgctatgtatggaacttgtctgcactctggttaaacaaatccagtgtaaaagacatttttttagataatcatggaaattcgaccacagactgggtattggatgatgttagggggttattgttaactttgtcagacatgagaatgaccctgtagttaagatttt

SEQ ID NO: 116711 - DNA, 520 bp, Homo sapiens
tgggttcaccttgcccgctgcctagacagagcagatttatcaagatatgggagttgcagtggagaaaaagtaattcatgcagaaccagttgtgcaggagaccagagttttattatgactcaaatcagtctccctgagcattcaggaatcagagtttttaaagattatttggtgggtaggggcttgagaattggggagtgctgactggtctgattggagatgaaatcataaggggtcaaagtgaatttttcttgctgtcttctgttcctgtgtgtgatggcagaactggttgagtattcttgccaaaagaaaaaaaattgacctgaatytaatcaaactgttagatctagctaatatgtaaaggaaacagcaaggatagaagaagaagttaaaatacaccatgaataaacaattggtcagaagaagcaatgggaaaatctactggataaacaacaggatttccttaacaaaaaaaggcatgaaggaagagatcatgagaaatgttatatattaagagtgac

SEQ ID NO: 116712 - DNA, 520 bp, Homo sapiens
tgggttcaccttgcccgctgcctagacagagcagatttatcaagatatgggagttgcagtggagaaaaagtaattcatgcagaaccagttgtgcaggagaccagagttttattatgactcaaatcagtctccctgagcattcaggaatcagagtttttaaagattatttggtgggtaggggcttgagaattggggagtgctgactggtctgattggagatgaaatcataaggggtcaaagtgaatttttcttgctgtcttctgttcctgtgtgtgatggcagaactggttgagtattcttgccaaaagaaaaaaaattgacctgaatttaatcaaactgttagatctagctaatatgtaaaggaaacagcaaggatagaagaagaagttaaaatacaccatgaataaacaattkgtcagaagaagcaatgggaaaatctactggataaacaacaggatttccttaacaaaaaaaggcatgaaggaagagatcatgagaaatgttatatattaagagtgac

SEQ ID NO: 116713 - DNA, 619 bp, Homo sapiens
ttattgtatttgagttaaactctaaagtaggagttaacttttgacaaatgggaatggctaagaagataaaggagacaaaaaaaggaggtggatattggggagaaatttcaggtggaagaaaagccttattggtaggggagcagaaaaacatttactgaaaatcccagagaagatgcagtaygtgagggaagtggacaaaggcgagatgacacctttaccaaggttactccggactttatatttgaattcctttcagtcatttgggaaatgtaagtaaaaatttgaattccttataaactgcttcttgaatgtgactctgttctgagactgaactgaaagggaccaggttttgtcatggcaaaacaggctgtctgtggatattgaatatagtccttatctgggaatagtgcacttatatttgtggcataaaccaaagaataatgggagaagaattttgggccagatgggagatgacttctgactacttctatagaccacactcaagggtttaagaatgtggcaaatgaaagtctgtcttcaagataagatatctagctgcacacaaaatgttaactctcattattttgaatcttaaagatttccaaattagattacatat

SEQ ID NO: 116714 - DNA, 619 bp, Homo sapiens
ttattgtatttgagttaaactctaaagtaggagttaacttttgacaaatgggaatggctaagaagataaaggagacaaaaaaaggaggtggatattggggagaaatttcaggtggaagaaaagccttattggtaggggagcagaaaaacatttactgaaaatcccagagaagatgcagtacgtgagggaagtggacaaaggcgagatgacacctttaccaaggttactscggactttatatttgaattcctttcagtcatttgggaaatgtaagtaaaaatttgaattccttataaactgcttcttgaatgtgactctgttctgagactgaactgaaagggaccaggttttgtcatggcaaaacaggctgtctgtggatattgaatatagtccttatctgggaatagtgcacttatatttgtggcataaaccaaagaataatgggagaagaattttgggccagatgggagatgacttctgactacttctatagaccacactcaagggtttaagaatgtggcaaatgaaagtctgtcttcaagataagatatctagctgcacacaaaatgttaactctcattattttgaatcttaaagatttccaaattagattacatat

SEQ ID NO: 116715 - DNA, 619 bp, Homo sapiens
ttattgtatttgagttaaactctaaagtaggagttaacttttgacaaatgggaatggctaagaagataaaggagacaaaaaaaggaggtggatattggggagaaatttcaggtggaagaaaagccttattggtaggggagcagaaaaacatttactgaaaatcccagagaagatgcagtacgtgagggaagtggacaaaggcgagatgacacctttaccaaggttactccggactttatatttgaattcctttcagtcatttgggaaatgtaagtaaaaatttgaattccttataaactgcttcttgaaygtgactctgttctgagactgaactgaaagggaccaggttttgtcatggcaaaacaggctgtctgtggatattgaatatagtccttatctgggaatagtgcacttatatttgtggcataaaccaaagaataatgggagaagaattttgggccagatgggagatgacttctgactacttctatagaccacactcaagggtttaagaatgtggcaaatgaaagtctgtcttcaagataagatatctagctgcacacaaaatgttaactctcattattttgaatcttaaagatttccaaattagattacatat

SEQ ID NO: 116716 - DNA, 619 bp, Homo sapiens
ttattgtatttgagttaaactctaaagtaggagttaacttttgacaaatgggaatggctaagaagataaaggagacaaaaaaaggaggtggatattggggagaaatttcaggtggaagaaaagccttattggtaggggagcagaaaaacatttactgaaaatcccagagaagatgcagtacgtgagggaagtggacaaaggcgagatgacacctttaccaaggttactccggactttatatttgaattcctttcagtcatttgggaaatgtaagtaaaaatttgaattccttataaactgcttcttgaatgtgactctgttctgagactgaactgaaagggaccaggttttgtcatggcaaaacaggctgkctgtggatattgaatatagtccttatctgggaatagtgcacttatatttgtggcataaaccaaagaataatgggagaagaattttgggccagatgggagatgacttctgactacttctatagaccacactcaagggtttaagaatgtggcaaatgaaagtctgtcttcaagataagatatctagctgcacacaaaatgttaactctcattattttgaatcttaaagatttccaaattagattacatat

SEQ ID NO: 116717 - DNA, 591 bp, Homo sapiens
gcaaaactttctggtttggggtgaatttgattaatgaaaagastcaaaaaatcatttggaataagtcttgggagtaagagacacaatccagtgggataaggacacttaggaaaacacaaggcatgatcaaaatattggaagtctgactttctcataattgtgtcctgaaggcaattccagaaatgatttgagcatccacagcggctctgaactaggcatgttaactccagaatgactgcttagaaagactatgttattttgaatgaaggaaaactgacatgctgattttctgtttctctaattaggctcatacattcatggtcaaggtttatatcatattttgtaaatgtgattagaagaaaagaccatttttcttatatgtaagatgaagggtaagactagatgatttctataaattttcccagtactaatattcagtaattctatatataaataaataatttaaacattgttcacattagtgagccattctcactaatatttcagaggttttatattgaagggactctcctttaaacaaccccaagacttcaagggaaatcatgctttaggctgtagaccacaagatat

SEQ ID NO: 116718 - DNA, 591 bp, Homo sapiens
gcaaaactttctggtttggggtgaatttgattaatgaaaagactcaaaaaatcatttggaataagtcttgggagtaagagacacaatccagtgggataaggacacktaggaaaacacaaggcatgatcaaaatattggaagtctgactttctcataattgtgtcctgaaggcaattccagaaatgatttgagcatccacagcggctctgaactaggcatgttaactccagaatgactgcttagaaagactatgttattttgaatgaaggaaaactgacatgctgattttctgtttctctaattaggctcatacattcatggtcaaggtttatatcatattttgtaaatgtgattagaagaaaagaccatttttcttatatgtaagatgaagggtaagactagatgatttctataaattttcccagtactaatattcagtaattctatatataaataaataatttaaacattgttcacattagtgagccattctcactaatatttcagaggttttatattgaagggactctcctttaaacaaccccaagacttcaagggaaatcatgctttaggctgtagaccacaagatat

SEQ ID NO: 116719 - DNA, 379 bp, Homo sapiens
actgtgcccacagtactaaatttcaaccatcagctaaagctaagacattgcctctgttaaacaaagcaggaactcctcagtttgtccaagctccataacacctaagttcactcattgtcactacctgcatggctacgcgtacctgagttttcaaaccctagcaggactatttcttctatgtgcctcaactaaccataactgagagttatatggaaaaagtttctcctagatttaatatgcctggttttgggtaaacccaaaacaatctgtttattaatagtacactataataatgtatatgctctactgtggcatgcaaaatgtaaaatgaatgctgctgatgtaytacaaagtatatgaaaattataaccaacttagt

SEQ ID NO: 116720 - DNA, 525 bp, Homo sapiens
gaattcttagtgaaacctcaatacccagacaggttctcattttcagaaaggtttgtttttagccaaagcattgccttttagatcagtgaaatatattgcctctatggagagcatggcaaaccaggagtctctaaggggtcatggtgggaaggggaagcttctggtttcttctgcacagctctgagattgtggattttgtgggatggggtgaggtagaggggagagtccrtatttgggagaaaaaggccccagcccttttcgtctctgggtaggaataagagaataggactatcctcagctccctgtgactccagatccctaagcaggccttcctggggcctggcctgaaagttaatcccaggggcagacttagcatttagctaactgagatttagcattagccccttttttactcccacttcaaaccttgggacctccccaccgaccccgggctggctacccagttctaattttgttcatacttactgaacagagtggacccataccatccttggttttgctttt

SEQ ID NO: 116721 - DNA, 447 bp, Homo sapiens
ggacagcccgacatttaatgcttatcttgtccaaagtcagcctgtggtctccacacaccaccaaccaccctgccccttctcccactcccactgcccccacttatgcatcccccactcacttatccagacagccgggtagcagcccagagttttcccttcctcacccccagggtcactagatggttttcagaagttgcatcaaacagtacaccaagaactttagcatattttagctcgtttaggttctgtcgactctgactcctgggcagccctcagacagtccctcctctccctcatctgccaccatcagatcctcatcacatggaacctggactgctgggacagattcccygccctatcttctcccctgtggactgactctaaccgactctatactccaacttgcccctgattaaaatccttcaggatgggacccaaacttccatg

SEQ ID NO: 116722 - DNA, 538 bp, Homo sapiens
gaggtgggagtttgaagcatcaggctgtggatttgcacattagtttggagggagggaggtgctgtgtcttgtgcagagatcctcctggagactgtgccctcccccacacagarctccacaggcagggctggagggcagaggccagggtctgggatgccttggagggtaagtgggagggatgatgatcctggctggaagtccacctgctgctgcctgcctgccacttagagccttctcattcctattccaggctgtctgtccccagaccccagagcacgtccggcaccaccatgactgggctgttgaagaggaaatttgaccagctggatgaggacaactcctcggtctcctcctcctcctcttcctctgggtgccagtctcgctcctgctccccaagctcttctgtctcccgtgcctgggactcagaggaggaaggcccctgggatcagatgcccctgcctgaccgtgacttctgcggccccagaagtttcacccgtgagtactccctcccctgggaactccatcacctgcctgcctt

SEQ ID NO: 116723 - DNA, 571 bp, Homo sapiens
acctaaggaatttctatcaagccaacctgaattccaagtataaaagagacagattaacagctgatcccaggagcctttctgagagaaaacaaaaaaagcaactggaagacaaactttagccaataaatagataactagggcaatgtaaaaygagtggcaataaaagaagctacttgattgtaaaacaaagacatttttgaaaatattaggagtagatggcaagatagaatataaataacataaatgctgatgatctagaaaaaaatacaattaatataaatgagaggaggaaggtggaaatgaagctagaagttagaataaagctggaagatggccagtagtaactgggaccaaaagataatatctaagggtcaagtaaagtaatagaataggcatattttacactacaaagataaatattaaggaagtaaattgtgttgactgaaattgggtgagaggagaaaccacacaaactttagcagatactttgtggggacttagagaactattaaaatttaagaactattaagaattggatcaaatcacactaaaatagaagagtttcatttac

SEQ ID NO: 116724 - DNA, 571 bp, Homo sapiens
acctaaggaatttctatcaagccaacctgaattccaagtataaaagagacagattaacagctgatcccaggagcctttctgagagaaaacaaaaaaagcaactggaagacaaactttagccaataaatagataactagggcaatgtaaaatgagtggcaataaaagaagctacttgattgtaaaacaaagacatttttgaaaatattaggagtagatggcaagatagaatataaataacataaatgctgatgatctagaaaaaaatacaattaatataaatgagaggaggaaggtggaaatgaagctagaagttagaataaagctggaagatggccagtagtaactgggaccaaaagataatatctaagggtcaagtaaagtaatagaatargcatattttacactacaaagataaatattaaggaagtaaattgtgttgactgaaattgggtgagaggagaaaccacacaaactttagcagatactttgtggggacttagagaactattaaaatttaagaactattaagaattggatcaaatcacactaaaatagaagagtttcatttac

SEQ ID NO: 116725 - DNA, 551 bp, Homo sapiens
gctactgcactccagcctgggcaacagagtgagacttcatctcaaaaaaaaaaaaaaatcaaaataatgcatatatacagaaaataagctagaggataaagtgagggaaaatacctttaagacagcagcaaaataaagataaaaattttttggaaaaactyaagtgtttacattttatataagagaagttttagaacactgctgaatgtctcaaaagaagaagtgaacaaattaaaagacgtcccttcttattgaatagaaaaaaatcaacactagaaggatgtaaatttccatcaagtttttaataatgtaaggcaatattaaaaaaataactaacatgcctttgtttttgaatttttgtgatgatggtttcttattttgttgtttgtatatttttgtttgtgcaatgaaactagaaaactaattttgaagttcataaataaaactaaaccagcaaggctaggcagaaaaatctcttaaaaagaaaagcaataaagtaaagagcctctttgctgacagatattaaaacatattacagatgctcctcaact

SEQ ID NO: 116726 - DNA, 551 bp, Homo sapiens
gctactgcactccagcctgggcaacagagtgagacttcatctcaaaaaaaaaaaaaaatcaaaataatgcatatatacagaaaataagctagaggataaagtgagggaaaatacctttaagacagcagcaaaataaagataaaaattttttggaaaaacttaagtgtttacattttatataagagaagttttagaacactgctgaatgtctcaaaagaagaastgaacaaattaaaagacgtcccttcttattgaatagaaaaaaatcaacactagaaggatgtaaatttccatcaagtttttaataatgtaaggcaatattaaaaaaataactaacatgcctttgtttttgaatttttgtgatgatggtttcttattttgttgtttgtatatttttgtttgtgcaatgaaactagaaaactaattttgaagttcataaataaaactaaaccagcaaggctaggcagaaaaatctcttaaaaagaaaagcaataaagtaaagagcctctttgctgacagatattaaaacatattacagatgctcctcaact

SEQ ID NO: 116727 - DNA, 594 bp, Homo sapiens
tccctgaggggttaaggtgggggcatcacacagtgttcatcagctctcccagacagatgcgttygattcatcttttcaaagacctggatggctgccatccctgcccagtagctgcaggagtggctggtgaagatttctaccagttgcttcccattagccttgtctacctctgtctgggggacggtctgtagctcctttcccagggagattgttctgatcagagacttgaacttgctcaactcatcctggctgagctgctccagaagagcctgcaggttgaagtccagctctgcagaagatgccatcttgtcctatgtgggagctctcccaacgcctggccctatgctctggttctcacattttttcatatactaataagtatatatttttatatctttttagaagaaatatcagttcagatttttgctcattataaaattgcgttattgtctttttattgctgagttgtaagagttctttatatagtctagggacaggtccttcattagatacgcgatacgcaaatttttgctcccattctgtgagttgtcttatcagtttaatgatggtgtcctttaaggtacaaatgttttt

SEQ ID NO: 116728 - DNA, 594 bp, Homo sapiens
tccctgaggggttaaggtgggggcatcacacagtgttcatcagctctcccagacagatgcgtttgattcatcttttcaaagacctggatggctgccatccctgcccagtagctgcaggagtggctggtgaagatttctaccagttgcttcccattagccttgtctacctctgtctgggggacggtctgtagctcctttcccagggagattgttctgatcagagacttgaacttgctcaactcatcctggctgagctgctccagaagagcctgcaggttgaagtccagctctgcagaagatgccatcttgtcctatgtgggagctctcccaaygcctggccctatgctctggttctcacattttttcatatactaataagtatatatttttatatctttttagaagaaatatcagttcagatttttgctcattataaaattgcgttattgtctttttattgctgagttgtaagagttctttatatagtctagggacaggtccttcattagatacgcgatacgcaaatttttgctcccattctgtgagttgtcttatcagtttaatgatggtgtcctttaaggtacaaatgttttt

SEQ ID NO: 116729 - DNA, 284 bp, Homo sapiens
gcaaatttttgctcccattctgtgagttgtcttatcagtttaatgatggtgtcctttaaggtacaaatgtttttcattttgatgaaatcaaatttatctatttttttcttattktttatgcttttgatgtcatgtctaagaatcttttgccaagtctcaggtcataaagatgtacccctatcatttactataagaatattacagctttaactcttacatttgggtatttgatatattttgagttaatttttgtatgtggcatgaaatagaggtccaactttatt

SEQ ID NO: 116730 - DNA, 542 bp, Homo sapiens
ggggaagggggattggagcatctgattctgggatggataagatggcccttctggtagctctcaaacctcataggacataggagagtctatgaggcagtgtaaattaataaggaacattaagcttgtgaaggtctcagaacaaaaytttcttcctctgtgacccaggcatggacaccatttggcaagatggtatgtgaaaggcaaaggactttgagatgagggaagcacaaaaagaactatttctgcccatttttagcccaggaaaacaataacctgtttctttgatgaatgatttgtatttgctggtttccagattagtcaattttttcatgtcttgctcttccttcatacctcctccgcctctaccagcccttagaccatatacttctattccatctcccctcaccattcaatttgtctcccatttccagtccacttgtaccagattagctatcaataatctattaatatatgaaaatatagctgtattttgcatccacactgggactgttagcacacacatgcattttcttaacagccaa

SEQ ID NO: 116731 - DNA, 596 bp, Homo sapiens
aaatgaaatagtagagtccatttattgaaggctcactaacataaacttagaagggaatgttayctttgttttactcttgtagatctgaggcccagggaggttgagtaacttgctcaaggttccacaatgagtaaaaggcaaagcctaagagttaaacccaaaatagtctgaggcccaatctcaactccaaactgcccgttgcccctttttatactacactttatgatgctggacctggaactttgcaagctgcattttggtttcccagctgttggactctaccagtggggacactggaggaagatagcaaggctggtggaaggagaaaggatgtgcttttgcctgtttgcctcttcttcctgttagtgtcacccagcaatgtctcttcaccccagcattagcagcttctttctatagcagcagcagaatccaatttgcagtctctctgacacttgagaaactacctcattgccccttcagagacaccagcaccagccagcctgggcctcctcgtcaggggtgtgggtctcaggccccaagaccagactctgagtttctaagttttaattattctaacttctccctctgttctcaac

SEQ ID NO: 116732 - DNA, 596 bp, Homo sapiens
aaatgaaatagtagagtccatttattgaaggctcactaacataaacttagaagggaatgttacctttgttttactcttgtagatctgaggcccagggaggttgagtaacttgctcaaggttccacaatgagtaaaaggcaaagcctaagagttaaacccaaaatagtctgaggcccaatctcaactccaaactgcccgttgcccctttttatactacactttatgatgctggacctggaactttgcaagctgcattttggtttcccagctgttggactctaccagtggggacactggaggaagatagcaaggctggtggaaggagaaaggatgtgcttttgcctgtttgcctcttcttcctgttagtgtcacccagcaatgtctcttcaccccagcattagcagcttctttctatagcagcagcagaatccaatttgcagtctctctgacacttgagaaactacctcattgccccttcagagacaccagcaccagccagcctgggcctcctcgtcaggggygtgggtctcaggccccaagaccagactctgagtttctaagttttaattattctaacttctccctctgttctcaac

SEQ ID NO: 116733 - DNA, 589 bp, Homo sapiens
tgtaaagcagtgagtggttctcaaagtgtggtatgagggccagcagcatgggtagcacctgatggcttgctggagaagaaagttctaagttccctttagagctacagaaatacaaactctggagtgaggcccaacagcctgcgtcttaagtcctacagataattctgaagcacattcaaattttagaattactgcgctagagtttcttttgttgaagtactgggaaaactgatcagtacaacatactacaaacaacatttgcatgtttaagtcttggacctgcttacagtgaaattaatattaactcatttaagaatatttatccaattcagctaaatgttttaccaaaaatacctaagctaatgctttgatcccctaggtttaaaatcacaatagcaaacacttttcaaacattgaccatcaccagagactgttctaagagttttacattgattaactcatttagtcttcatgaaaaccmatgagatatgtactatttttaccctctttttacaaataaaacactgaggctgagacacattaagtaacctgcccaggtcccagagtgggtaaatgacagttgagattt

SEQ ID NO: 116734 - DNA, 573 bp, Homo sapiens
catggctcccagctgacctgtaagcactaaatcagcacacactgatgatgaggatggtgacaatgacaatgaggtcaggagagccattatgctaggagtgactgactcagtgtaaatggagaacagaaacctcttcctgctctgctttaagaggtgtagatatttgaaagccccgacgcaggggaatgaaaaattagggcccatgactcattcttgacaaagaattaatctctttgaaggaagactcagcagagggctcttctaatcagccagctctctttgtgtgtgttcaaagtgcaattgattggcatgtctcttggaggagggtttccagagtgtaaaaccagatatatgaccggsatgtcatgagtaagatagtttccactgaacagaccagggctgtgtctgtgatgcaggttacatccgagcagccaggacgccactttcctcccttcccagaaaagggtaaaatggcttagaaggcccacaggcagacgccaggatgacctctgcatgatcctacctgtggatattccggctgttctcccatctggccgtgagggagaggaattc

SEQ ID NO: 116735 - DNA, 584 bp, Homo sapiens
gaattcttgcctcattctgaggtgcatggctcccagctgacctgtaagcactaaatcagcacacactgatgatgaggatggtgacaatgacaatgaggtcaggagagccattatgctaggagtgactgactcagtgtaaatggagaacagaaacctcttcctgctctgctttaagaggtgtagatatttgaaagccccgacgcaggggaatgaaaaattagggcccatgactcattcttgacaaagaattaatctctttgaaggaagactcagcagagggctcttctaatcagccagctctctttgtgtgtgttcaaagtgcaattgattggcatgtctcttggaggagggtttccagagtgtaaaaccagatatatgaccggcatgtcatgagtaagatagtttccactgaacagaccagggctgtgtctgtgatgcaggttacatccgagcagccaggacrccactttcctcccttcccagaaaagggtaaaatggcttagaaggcccacaggcagacgccaggatgacctctgcatgatcctacctgtggatattccggctgttctcccatctggccgtga

SEQ ID NO: 116736 - DNA, 527 bp, Homo sapiens
ctctctaggttccaaactcagtgtagcaggaggctttaactgagtaatctgtgttcattggtagagaaagtctcattgaaatccatcctctgtgaccttgaaaagtcaccttggccatcctcctgccctggggaagggatgttctttcaggtctaaactgtcatgacttctcctgctttcatggtctcagagctgttgaatgaatgaatgaatgaatttgattccctcacttggtcaccagctgggagtcactgcattgctccctccygtcatggctattattgaaaaagaatatattgaaaatatatgaaaaagggacaatcagctccctgttagaaaccactaatggagaataatggagactcaggggtctgaaagcaacagctaatagagatgggagcaattatcaggtgcaatgtcatcagaaacccatgtacgcatgcatagacatgaggctgcaggctcacaaagctgatgtctatggaagatgcaaaacatttaacagctggtacaagcaggcactaacc

SEQ ID NO: 116737 - DNA, 496 bp, Homo sapiens
gaattcaagttggagacttgaatagatagatacaaattgttacatataataatacatataaatgtatttattgtcacctaacagggcccagaagcagtgacacaccagcagcagtgagcacatcttgtacctagatcttggttgctaatgctattacccactcttacccactgttaccatgatggttaattttatgtgtcaacttaactgggctacaggtgcccatatatttggtsaacactattctaagtatttctgtgaggatgttttggatgagattaagatttgaatccatagactgagtaaagcagattgccctccctattgtgggtaggtcttattcaatcagctgaaggcctgaatagaacaaaagcctgactgaccctccctctggtaggagagaactctcctgccttatggccttcaaactgggacattagctccctctggttctacagcagcttccagccttcaaagtcaaactgacacatcagct

SEQ ID NO: 116738 - DNA, 604 bp, Homo sapiens
tttcaccatgttggacaagctggtcccaaactcctggtctcaagtcatccgcccaccttggcctcccaaagtgctgggattacaggcatgagccaccatgcccagcctgcccagcactttctatacatcaatcttcacaacaaccttgcaggaaagcattacggtttctctttacagatcagagaggctaaacaacttgcccgaggtcacacagctggtgtatgacaacgttagacttcaagcccaggcccatctgactcaaagctggggctctttcaaccacctctcactgtgcaccctgggaagcctcagggaaatcactgggctgggagtcagaagcctagctgtgtgaccttgagcaagactcttcyattctctgggctgaggaaatgggcaaaagggcccccaaaggccctcctttcccattttaccccagggaccactgctaggctgtcacagatccccgtatggcacaattctaggcaattatccattcaaggggagaagaggagaaagtatcaagggtggccaccatagtcaattcttccccagctgtcacatgaagaaacaagcacaggactccttacacacatggaaagaaaat

SEQ ID NO: 116739 - DNA, 654 bp, Homo sapiens
aacatcacacaccggggcctgttgtggggtggagggagggggcagggatagcattaggagatatacctaatgtaaatgaagagttaatgggtgcagcacaccaacatggcacatgtatacatatgtaacaaacttgcgckttgtacacatgtaccctagaacttaaagtataataaaaaataaaataaaataaaataaataaatattgatgttgtttgtgtctcagccacgggtcctctctctcccgacactaaactagtgattgcacacacctcagggggtgaagccctccactgaagggaaaatccagtatctaaaggggaaacccagctctgggtcattactggcatgcagaaataaaaaataaaatgttgcctgattttttagtttttcaagagtagcttcaatctggatcatgtggaacctcctgatttttaaatactggcaaataaatgattttctaataattgtaaaagccaatttgctaatcaaagtaaacccaacatgcctactagaatgtttcttctctctctgctctactctttattctcttttcataatatcacccatgacccatagttcaattactatataaacaccaacttgtaattacttatctgtacagtagaccctttttgaagctccaggtaaatt

SEQ ID NO: 116740 - DNA, 629 bp, Homo sapiens
tgttacctaaaactgtgtcaacacaccctagaccatagcagaaagaattaagttgagataccaggtgacttgttggtgtgggaaatatgagcagatagtaaggaggcataggatggccttgtatgtgtgagctggatatggagtgttttgtccagagaccagatttgaatatcctgatggttcctattcatccatatgtagtaagctgtttctccccatatctgttactcatcactagaagaaaaggtgattcttggtgcaaaggtgattctagttggagggagatttatctggctatataacatagagtggtcagaaattaaagattgtyaatgaaaatgaatcctattgcatcacctatgtcacaccccggccccttttaaaacactccagtggcttcccattgcattggggataaagtccagcttcctgctgtgccctgcaaggctgtggttctaggccctgcctactttccaactgcatttcatgtcccttcacccaccagctgcgctccagccacaagaacttccttcaggaagcttgaacatcccaaactcgtttctgccttaggatttctgcatagtctatgaccttggtagaaagccttatttccatcttcatgtggctgg

SEQ ID NO: 116741 - DNA, 598 bp, Homo sapiens
ggagttacataataagtgggaagtgaagacagctgagcctgctctgaaaacatgataaatagccccagtgtcctgaatgtgccttccctgtggaggccaagggactccatacagactcgggaaggattatctggtactccagccgagtgcagactggcacagaggccaggcacatgtaggccacatgaggttactctgaggcttctcctttctgggagaacttggacttcccttcttccatcacaggctcagattcctgagtcccggaggcccatggcgcagccacartgatcagtgttgccaggaacagtggtaagtagcaagagcagaaccctgactgtgtccggactcactccaactcttaatgattcaggcaactcacttggccaccagctctgttctctcccaactttgcttaaatagccaagtctgtgatggctggtgcccagtagtgacatttccatttcaggctagggaatgtaaaaataataataataataataataatataaaagagttaatatgatcaatgttcttgaaaattgctttttttttctttcagtaccaaaacaccattaaagtgactagaggaactgat

SEQ ID NO: 116742 - DNA, 576 bp, Homo sapiens
ggattttatttctgaattaatcatatttatttcttttatttccttgctaaattctgctagcttacttttattgtccttctattggcttgtcttttcttctttgagccattctgtcttgttctaaatatttcttcaaaaaggctttatttaaaatttttttcaatatcattgaaaattatttgaggaaataatatatttcttctataattgttacatttaatttgtgtgcctcttttgtataattttttwatttttttcttgtagtatctctatatgttgtttttattccagcttctttctgatatttttctcatctttaaatggggccattgtttcgggggtagctagctatttgctaaacaatagtctgaaaaagggctggggaagtaagttggggcagaagatagctttattatggttctgctgtttcaattcttttcccaaagtttctgctaggggacagatttttgctcacttctttcacagatgtgccctttcagtttgcttatcttgcaatggagcaatgtgttggaattcgtatttattagttttactttagcaattttgaacagcaac

SEQ ID NO: 116743 - DNA, 576 bp, Homo sapiens
ggattttatttctgaattaatcatatttatttcttttatttccttgctaaattctgctagcttacttttattgtccttctattggcttgtcttttcttctttgagccattctgtcttgttctaaatatttcttcaaaaaggctttatttaaaatttttttcaatatcattgaaaattatttgaggaaataatatatttcttctataattgttacatttaatttgtgtgcctcttttgtataattttttaatttttttcttgtagtatctctatatgttgtttttattccagcttctttctgatatttttctcatctttaaatggggccattgtttcgggggtagctagctatttgctaaacaatagtctgaaaaagggctggggaagtaagttggggcagaagatagctttattatggttctgctgtttcaattcttttcccaaagtttctgctaggggacagatttttgctcacttctttcacagatgtgccctttcagtttgcttatcttgcaatggagcaatgtgttggaattcrtatttattagttttactttagcaattttgaacagcaac

SEQ ID NO: 116744 - DNA, 605 bp, Homo sapiens
gttctacatagcactgtttaaaacttgttctttaaagacatttgttttgtataagtttgactgttttatgtagatttctttcctttatggtactttttattgagatgtaactcaccacaaaattcatgcttttgaagagcacattaaatgattttagtatatttgcaaagttgtaccaattttataaaatttcatatccattagcagccactccctttcccctggttcctggcaaccrttaaactactttctatctctatgaattttcctgttctgaatatttcacataaattgaattacataatatgtggccttttgtgactgaattctttcacttaccatgatgtttacaaggctcactcttgttgttacatgtatttcatacatttttattgctgaataatatttcattgcatgaatatatggacacttcagctgttttcactgtttggctattatgaataattctactttgaatgttcatgtacagtttttatgtggccatatgttttcatttctcttgggtatatcctaggaatgaaatacagtatctctatgttaactatctaaggaattgccattgtttcccagagtggctgtgctat

SEQ ID NO: 116745 - DNA, 605 bp, Homo sapiens
gttctacatagcactgtttaaaacttgttctttaaagacatttgttttgtataagtttgactgttttatgtagatttctttcctttatggtactttttattgagatgtaactcaccacaaaattcatgcttttgaagagcacattaaatgattttagtatatttgcaaagttgtaccaattttataaaatttcatatccattagcagccactccctttcccctggttcctggcaaccattaaactactttctatctctatgaattttcctgttctgaatatttcacataaattgaattacataatatgtggccttttgtgactgaattctttcacttaccatgatgtttacaaggctcactcttgttgttacatgtatttcatacatttttattgctgaataatatttcattgcatgaatatatggacacttcagctgttttcactgtttggctattatgaataattctactttgaatgttcatgtacagtttttatgtggccatatgttttcatttctcttgggtatatcctaggaatgaaatayagtatctctatgttaactatctaaggaattgccattgtttcccagagtggctgtgctat

SEQ ID NO: 116746 - DNA, 476 bp, Homo sapiens
tccaacctacagaatgttctcagctgaggtgtaaaagattcaattgtaattggcagagaaagtattttctttctacatgagaagagccagcgagaacaatggaaaggacccagcaaataaatgagacattccaaaaagatggagagactgatgtggctatgtagctcaaactgactccttcctactacgttttatattatcttacctcttcttttctcaaaaacagtttcctctttttctctcccttgtgtcttcctgtcacttcttgaaagacttgttatttagattacggcttctgtataccaatgaaaacttgtacttgaaccattaagttgaaagaktcttactcaaaggcccctgagagattctgacaacagaactgcttctagggacttgagaaatgaccagtctctttgatttcccaagggaagccaccacaacaaagtcctcaaggtcaaagctcagttttacactga

SEQ ID NO: 116747 - DNA, 630 bp, Homo sapiens
ggaatattgttgcaaagtctctgtggatggatttaaaaatttgatgaagactgggcatggtggctcatgcctataatcctggcactttgggtgrcccaggcaggctgattgcctgagctcaggagttcgagaccagcctgggcaacgtggtgaaaccctgtctctactaaaatacaaaaaattagctgggcatagtggcatgcgcctgtagtcccagctactcaggaggctgaggcaggagaattacctgaacccagaaggcggaggttgcagtgatctgagatcacgccactgcactccagcctgggcgacagaacaagactctgtctccaaaaacaaacaaacaaacaaacaaacaaacaaacaaacaaacacttgatgaaatgattgatcaactggatgtaaaatatgattaagtggatcaaagagtaaagagtgacttagagtgcaactgtaaacacataaacttaggtatagtaaggcaaaatttctcatttctgtgacttttgcaaggttaaacttatagtcttgttgtctttttccaagtcaaggcacattgactcaggcttctccctgtgtcccctctccccacaaaagtgatttgatgttcttctgctcttttgaatctct

SEQ ID NO: 116748 - DNA, 566 bp, Homo sapiens
aaatctttaattactacaagggaaattccagacacctggctagccatgagaagtaaatgagcagcttgataagcaagaaggtaatartagcttaaaataatagccaagaaatctagaatcacaggattctagattttgttcccctatagaaactaaacataacacctaacatatggctctgagttgtttttcaaaaatccatatccacaccaacagatgtactggcatatagatttcagataagagggaactgaagactgaactttgaccatcattctttgttctaaatttgttcctgaggggcctgaaaggagtcacattcatgggccagagataacattcttttctgatgatcccacatttttaaacaaagcttctcttccttaagcaattgcaaatcagaaaatcttgggatgtcacccttgcattctgtgtgcctgcagacttagcaccacacagaggctgccaaggcttatagcttgcactatgctgagtggcatcccaagcagcacctgggccctttgagctgtggccatagctggagcagcatcccaaatcatcacagg

SEQ ID NO: 116749 - DNA, 566 bp, Homo sapiens
aaatctttaattactacaagggaaattccagacacctggctagccatgagaagtaaatgagcagcttgataagcaagaaggtaataatagcttaaaataatagccaagaaatctagaatcacaggattctagattttgttcccctatagaaactaaacataacacctaacatatggctctgagttgtttttcaaaaatccatatccacaccaacagatgtactggcatatagatttcagataagagggaactgaagactgaactttgaccatcattctttgttctaaatttgttccygaggggcctgaaaggagtcacattcatgggccagagataacattcttttctgatgatcccacatttttaaacaaagcttctcttccttaagcaattgcaaatcagaaaatcttgggatgtcacccttgcattctgtgtgcctgcagacttagcaccacacagaggctgccaaggcttatagcttgcactatgctgagtggcatcccaagcagcacctgggccctttgagctgtggccatagctggagcagcatcccaaatcatcacagg

SEQ ID NO: 116750 - DNA, 385 bp, Homo sapiens
gattaattttgaaagatttatttgtctacatgtaaagtaaaaataccttatctctactttaagaaatgggagttgggagagaaagctattgtattagggttctccagagaatcagaacaacaataacaatgatatattttatatacaagtattttttatatatatattatgtgtttatgtgtgtgtatatatatatakagagagagagagagagatttttaacaaattggctcatgcagttctgggggctggtaagtacaaaacccataggctagctggagattcaggtaagagttgagcttgcagtctatagtcttgaatatgaaggctggacactcaggcagaatttctatgttgcattctggaggcagaattccttcctttt

SEQ ID NO: 116751 - DNA, 562 bp, Homo sapiens
ttaaaacactcaaacaccaatgtaatcatccacagataatctttccctaatataaacagcagaaccagtaatattttcagaagtttttctgtatttttttctacaaattaaaaatattaaygcatagttcttagagatgtaagtatggccaagtttatgttagttcatctctctcaatatgctttatcacccaatttttctttttaggcctctcgagtgtgcttgttttattcagaggctttttgctttcttagaagacattctcactcaataatgtggtaagttgagagcgctaatgcacagctcgagcctgctgggagggtagctgaactatggatgtaacacattctccatctttttgacaaggtgtacctgcaacttaaatgtttttgctagctcacacgatgggatttttttatttaagtagtgaattctggataaaataaatcttataagttatagcaaatgtttggatagcaagagtttggatggaatatctacagacgtgtttggagctaaggtcttctcggttaccaaagtatttatgtgcatgtctatgtgt

SEQ ID NO: 116752 - DNA, 593 bp, Homo sapiens
ctggcattaatagcttttgacatacttgaagcagtattaagcagtgggtaggggtatgccaatttagagatagactcttggaaagacctcagtggatctgctgaggaaacagagagaggttgagaagctgggagtgaaggctgaggagggtgagaatcaaaggggaaaaggagagggatcagagggggctgcagggctcagaagaaagactcaggaaaggaggcaaacctaatagaaaattttcaaagctgcagtatactttcacttctacaacttttaccaaatgaggtgtaaatatttttaaagcgacagcttgaaggggtagcctattattaagctgtctgaagcacacgtgtctcagtctagccattttgakgccccatccctcaaggggctctgctctgtggaccttgcctcctggcttcatctcacctggtgcctggatcacagtccccaagcaggtgtagacctagctggggagtgggataataccacacaaaggggtgaaggaggtgggaaatttctttagaaagctttctctctgattgagatgaacatcttaaaaaagacccctttatgaacaaatgtttttc

SEQ ID NO: 116753 - DNA, 406 bp, Homo sapiens
ggaattcctagggcataaggtttcctcctgtaactgtagctggtttctgtagggttgaaactacaataatggattctcaatttgtagaaggacttccttaggttccatgccatttggcaactgtttgactcatgagacatccatctgattacagggttagagagggcttgtgcatctcaagacactgtggggtctctagwccctactcatgtataccgttctctaggcacacaactgattagaagacagtggtggcttatccttctagcaagaacccctttgatatcttattttgctcatggccacatgggcttgaaagattttttggctttaaggaagattttattaagtaacaattaatgtatttattttcattactctgtgaaaatctaattagaataacagc

SEQ ID NO: 116754 - DNA, 406 bp, Homo sapiens
ggaattcctagggcataaggtttcctcctgtaactgtagctggtttctgtagggttgaaactacaataatggattctcaatttgtagaaggacttccttaggttccatgccatttggcaactgtttgactcatgagacatccatctgattacagggttagagagggcttgtgcatctcaagacactgtggggtctctagtccctactcatgtataccgttctctaggcacacaactgattagaagacagtggtggcttatccttctagcaagaacccctttgatatcttattttgctcatggscacatgggcttgaaagattttttggctttaaggaagattttattaagtaacaattaatgtatttattttcattactctgtgaaaatctaattagaataacagc

SEQ ID NO: 116755 - DNA, 572 bp, Homo sapiens
  misc_feature (1)...(572): n = A,T,C or G
ctttgcagcaggaacaactcgcaaatctcagtggcttacaatgacaaagtttatttatcattcaggttttatgtaagctgtagatcagctgcatctctgcttcctgtgtcctctntgttctagaaaagcaggcctgaaagagcagcctccttaggagcatgctgttctcataataaaggagtgggcaaatgtacatttccactggcaaaacacatcacatggccaggtccaaagacagtggggtgaaaatacatactcctacctcaggtggatagtaatacagtatactgctggcatattttattattatgattgtacttctcattttatacaagtggaaatcaaggcatagagaggttagatgaattgcccaagaccacactacagacaagtgtcagaggccaatttgaaactgaattctgacccaaggtagttactttttataccgtaccaactagaatggcatttctttcatttactcatccaactttgttgaaatttgcctggagaacaatttcctttctaataaccaagaayaaaatttatgttgttaacccactgcccattatgct

SEQ ID NO: 116756 - DNA, 622 bp, Homo sapiens
taaacagtgagctctgcagtcctgtccttcaagaaacaataagagaaagttaaaattgaatatgtagaggcggctacacaccttcctagcacaaagtctttacacaagtagaaggctcttactcttgtcttattacatttatttattgttcgacttactgttcatatttaaaaagaaaaacatttatcacagaaatccstgaaccagaaaaaattatttttgcatttttaattttatacacacacactgactcagtgagctacactggaattttgtaatattgtagatattcaaagaacatggcctaaattctgggctgtctgtgtccgggctggtctttgaagatctgctgtttgttactggaggcaggcctggattgatcattaaacgtatgggagcctgtgtttatcagcagatgtatttcgtctatatccgaggaaaccacagcgtagtcattgtcatttcgttccattgctggagtggacattggacatcactcaggactacctgcagttgaattttcttgataatattctcacaagtcaatgcccagctaacatcaaataactgtagtgacagctcattgccccagagacagctgatttcatgtttgaacattttt

SEQ ID NO: 116757 - DNA, 622 bp, Homo sapiens
taaacagtgagctctgcagtcctgtccttcaagaaacaataagagaaagttaaaattgaatatgtagaggcggctacacaccttcctagcacaaagtctttacacaagtagaaggctcttactcttgtcttattacatttatttattgttcgacttactgttcatatttaaaaagaaaaacatttatcacagaaatccgtgaaccagaaaaaatwatttttgcatttttaattttatacacacacactgactcagtgagctacactggaattttgtaatattgtagatattcaaagaacatggcctaaattctgggctgtctgtgtccgggctggtctttgaagatctgctgtttgttactggaggcaggcctggattgatcattaaacgtatgggagcctgtgtttatcagcagatgtatttcgtctatatccgaggaaaccacagcgtagtcattgtcatttcgttccattgctggagtggacattggacatcactcaggactacctgcagttgaattttcttgataatattctcacaagtcaatgcccagctaacatcaaataactgtagtgacagctcattgccccagagacagctgatttcatgtttgaacattttt

SEQ ID NO: 116758 - DNA, 587 bp, Homo sapiens
gggggagggtaacaaatatgttcattatcttgactgttgatggtttcacgattgtgtgtgtgtcaaaacttttctaattgtacactttaaatatgtgcaagttattgtatattgattatacatcaataaagcttttttaaaaatcatcatctggagatccattacactattttgtccatttttatatgtgtttaaaatattccagaataaaaggttgaaaagaaacatttttgtctttttggtgcaatataatcagaatcatggaagtagaagtggcctcaaaatgacattatatcaattcctttccctcactgggaaggtccacaagtgatttcaatgtttgtgcatgttataacctaggctatgttgctagagttttcagaagcatgctgggcttgcacaaatttaatttgacccctaaaatgaaattcttctattctcccccactctcactgctcgttgcatcagggcaataaccaaatctgttcatcgctgctggcagttaacatctcgctrtagattctaactcccatgagaacaaacagagtgcagagaaaagcaatgtaaatgtaaaacacatatttgat

SEQ ID NO: 116759 - DNA, 599 bp, Homo sapiens
acacagatcaccctctgcaaggacatgtcagtgcaaagaaaggaatgacacagacataaatcaaatgaaactgaattatgtttaataattagaagtacatgtgggcctttcatttctaaaggtatttattccatttctatttgtttctagaagctaaagtgggtcctggcaatacaagagaaaagagcactaggtcctacccacaatctgttcatagcctaatgggagagacacatgggaaaacaaatgccattagaataacgartcttttagtaataaagacaagaggctataaaaatgtcttgtagaggaggtgatattttacttgagttttttaaatgaataaacactttccagggagacaatgagctaaaggagagttctggatgagaacccaaaggcagccatttgataagcagaatggtggttggagaactaggcaaattgttccacaatgcgtgtaataaagaggattcgatggctctgaaagaacagaaagaaaaaggcagagacaacatgcaaagggccttgtactgcactacagtgaagtagtaagtacagagttttgcaattgaaaagacctaaaatcgtgtcccagc

SEQ ID NO: 116760 - DNA, 585 bp, Homo sapiens
gaatgcaatttccacatcctgattatttcattacgcttacctgaccaattaatgacctcaattttctaggcccttgccctccatgatccccttaaaaaccccagcgcagaacatcttggggagatggatttgagtctyctcctatcttttcacttgaccactctgcaatcattaaactctttctctgctgcaaaccctgttgtctcagcctatcagtctgatactgcacagcggacatacaaacccattggtcctgtaacagtgagaactacagtgaagacaataaaataaggtgacatgactgtgagtgacttgaggtgggggatactttagatgagtggtcagagagggtttctatgaggtgacatttgaggtgagacttgaatgcaggaaaggggagagccatcagagcatcccaggaagtgtaaaaaccctgaggcagggagtgagattgtggtctcagaggaaagaaaaaaggccagagtgactgaagaattgtaaaaatgggaaagggcaggagcagacaaggtcagagaggtaggaaggtgttgaatcacccaggatcttgttgaggccatggtgagg

SEQ ID NO: 116761 - DNA, 476 bp, Homo sapiens
ttggcaagagttctttgcaggcaatactgcatactttccattgtgtcacatcagagggaccctcatgtctagttatcccccttttaatgatgctcaatgtttagtgttgtcaacctgatctttccactgtcaagctctctattagtagttttagcagctgttgttcatcattgtccagctccatggttctcagtcatggctgcatgttaaaatcacctgggaagattttagaagacactgatatcagggtgctgttccagatcaattgctggaacgtggagccgaggggttaatttctggggtagggctgaggttgtgtgtatgggaggccaaggttctgtgtgtgcgtgtgtgttttaagcccctcasatgattctaataggcagcagataggcctaggtcaactttttttcattctgtcttccaaaatagtaatattttcagcctcactttttttcttcgttaattttgtgagc

SEQ ID NO: 116762 - DNA, 519 bp, Homo sapiens
  misc_feature (1)...(519): n = A,T,C or G
cggccaatgggacagcggtgcctggctgagtgtcaggcaaaactagccaataaacatgtagtttgggcaaggtgggtccgtcccctaactcggaccttataaagcgcgcccgctgctcccacaaagccgggctgtcccaggctgaggcggttgctcccctgccgggtgtgttagaagcaagttagaggaagaaggtcttggggactacgggcgccaccgagaacccatacgaggcagccgccgacggcgggtcgccgrggcggggccagaacggcgccaaggccaaccagaacggcggcaagaactagggggacgcggngcaggtgctgtgggagttggctggacctgtgggatcgacgtctgcgccgtccaggagccgcccaggggagagagcggagactcgggaggaggatgtgcgctccgacccgggcaaggcttcccatccctcccttcctcttctctccttccctccacctgggctcggagtcaggatctgaccgcgggctctgcccaggaaga

SEQ ID NO: 116763 - DNA, 344 bp, Homo sapiens
gaattcctaggctcaagcaatcctcttgcctcagcctcctatgtagctaggactacaggcatgcaccaccacacctggctactttttctattttttgtagaggtgtggtctcattatgttgctcaggctggtcttaaacacctggcctcaagcaattatccagcttctgtctcccaaagtgctgggattacaggtgtgagccactgtgcctggccttatagacactttaagtgggcagagggaargaatgtaaatataaatatgtacagtgatctatctaggtctctatatattaaaaaccataaattcatactaatacgtctaactccaattcctcagtatgg

SEQ ID NO: 116764 - DNA, 595 bp, Homo sapiens
cctgcttggtcaagaaagtagtggctgtttatattacatgggtggtgtttaccctgactccrcagttggaatttgaacaggttaaaaactgtatgttcaggttgttgtctctctgaccatttcacctaactccatactttgaattagaatgtttaaaaagaatcaggaaatatagacagataaagcaagtcttagaattttccctcctctctctaagtggactccaaagcacatcagtaggtaaatttgattagaatctatcaactaggctaaaagagatccaaggatccagaagctggcattaaggcagggagcatctcagcaaccatacccttactttgccacctgcatgcccgcatctgtgggtacatgatctcacaccagggtgctgggaaagatgcctacaagcctcccttcagttatgtccccttctagagcccaccccacggggtagccttcacattgcattgtccctgctgtctgccatccatgcaccattttaaaaatatatttttaaaatttagaagttttaactatacagaaaagttgcaacagtagtgcagagttcctagatgccttgtttctactttcctct

SEQ ID NO: 116765 - DNA, 595 bp, Homo sapiens
cctgcttggtcaagaaagtagtggctgtttatattacatgggtggtgtttaccctgactccgcagttggaatttgaacaggttaaaaactgtatgttcaggttgttgtctctctgaccatttcacctaactccatactttgaattagaatgtttaaaaagaatcaggaaatatagacagataaagcaagtcttagaattttccctcctctctctaagtggactccaaagcacatcagtagrtaaatttgattagaatctatcaactaggctaaaagagatccaaggatccagaagctggcattaaggcagggagcatctcagcaaccatacccttactttgccacctgcatgcccgcatctgtgggtacatgatctcacaccagggtgctgggaaagatgcctacaagcctcccttcagttatgtccccttctagagcccaccccacggggtagccttcacattgcattgtccctgctgtctgccatccatgcaccattttaaaaatatatttttaaaatttagaagttttaactatacagaaaagttgcaacagtagtgcagagttcctagatgccttgtttctactttcctct

SEQ ID NO: 116766 - DNA, 637 bp, Homo sapiens
ttcaacctcctgccctaaactgatttttcctaatacttctgaatttgtgctataacagataagcagcwttctgatgcagttaattaagtaaaacctcactgcatccaaagcagcaggagttaagatagatggatgtggccttaagctttccctcacccaaagaatatttctacccagaacaaagaaatcagaccaagcttgatgtgacttggttgtttatatgtattctttaaatcggatgcctttagaacataatgtgttctccatgggggggtgaatagaagttccttgtggagagaatgtttgctcaaatacgctagtggtacgtgcatttgcagcagtcctgttccctgtgatcatgggtgtacctttatgttgtggaaaatcacatgaaacactccacctcctacctgtctgatgatgcttccctgcagaggaggcattgagtgtttatatataatacctaacactttaggatgctcagcactgtgcttaatgctttatgtatattaattcattaagaggtatttttacatataataatttgggggttttttgagatggaatcttgctctgtcatccaggctggagtgcagtggtgcaatctcagctctctgtcctccatctcctgtttaag

SEQ ID NO: 116767 - DNA, 637 bp, Homo sapiens
ttcaacctcctgccctaaactgatttttcctaatacttctgaatttgtgctataacagataagcagcattctgatgcagttaattaagtaaaacctcactgcatccaaagcagcaggagttaagatagatggatgtggccttaagctttccctcacccaaagaatatttctacccagaacaaagaaatcagaccaagcttgatgtgacttggttgtttatatgtattctttaaatcggatgcctttagaacataatgtgttctccatgggggggtgaatagaagttccttgtggagagaatgtttgctcaaatacrctagtggtacgtgcatttgcagcagtcctgttccctgtgatcatgggtgtacctttatgttgtggaaaatcacatgaaacactccacctcctacctgtctgatgatgcttccctgcagaggaggcattgagtgtttatatataatacctaacactttaggatgctcagcactgtgcttaatgctttatgtatattaattcattaagaggtatttttacatataataatttgggggttttttgagatggaatcttgctctgtcatccaggctggagtgcagtggtgcaatctcagctctctgtcctccatctcctgtttaag

SEQ ID NO: 116768 - DNA, 515 bp, Homo sapiens
agataattggtgctggttggctccaggatgggatgttctttctagtgcccactttctaagaaagggtcaatgaaagaaatattctgtggaacagcagagggaaaccctgttacggcccttcatgcctctctacctcccatcctttctgctgctcaaccaggtatactcctagactaattacgttgtagaatccactgaaaaatccaatacaatcctcatttctcctaacaacatagcaatttccagcaggtgttargtgcttaaaaaaataaaagaaagagtaaaaacttcacaccagatgtagcccatataaatattaccacacaggtgctgggaagagaataagttctctaaattatgcaaataagtcttcttgacaattcaattttttagaataaccatatatatatttctttagagattttttattaatttaaaaatatcaatgatccatgtttgcaagttaatttacacaattatatcttcaaacttctctcaaagtcttaaagccaaga

SEQ ID NO: 116769 - DNA, 582 bp, Homo sapiens
agacatgaaaaatccaaaaactaattgagctcattttaattatagctataaaacacaacaaagaaatggcaggatctggaatgggaaatagttgagacaatgtctagatattcttcagattttcttgccccaactcagagaattaagacatctggaaactgtatttacttcccctcattgaagctctccacacattttaacaaggcatttaatgaaaacagtgtgaacaagttggaaagcatacatgrccttaggtcagatagactttattttgagtctaggtttggattacatgattaaattaatcaaactcaaagagtcttggtttttttatctggaaataggggttatattgcttatgtcacggaagatgctagaagaataaagtaactacctatcgtctgtgtgccaatcaatgcaaacaacaatgacacaagtaaaccacagttttagtacacagaagatactcacaactgacagttgagtttggctttgcataaatacctgatttgtgagtttgtctttaatctctgagaaaaaagtgctctgtccgacttctggacatcagtgcaaatgctactt

SEQ ID NO: 116770 - DNA, 651 bp, Homo sapiens
taaaaacaaaacaaaacaaaaaaacaaaacaacttcagtctcagagacaggtactatttgagagaagaatctttgaacactgtattagtctgttttcatactgctgataaagacatacctgagactgggcaatttacaaaagaaagaggtttattggacttaaggttccacatagcaggggaggccgcacaatcgtgatggaaggtgaggaggagcaagtcacgtcttacatggatggcagcaggcaaagagagagcttgtgcagggaaactccygtttttaaaaccatcagatcttgtgagactcattcactatcacaagaatggaaaggccttcccccataactcaatcacctcccatcgagttcctcccatgacatgtgggaatactgggagatacaattcaggatgacatttgggtggggacacagcaaaccacttcaaatacttttgctgaagtttggttaatggtatgtttcttgagaaatggtgtattttttgagaacttatatagaatatctttgttttctatgtacacaaataatatacatttgaaacccatctctttcttcctcattcactagtaatgtcacagctctaaacataccttatcatcattcaccttgaggtagggacagtatctttataccat

SEQ ID NO: 116771 - DNA, 651 bp, Homo sapiens
taaaaacaaaacaaaacaaaaaaacaaaacaacttcagtctcagagacaggtactatttgagagaagaatctttgaacactgtattagtctgttttcatactgctgataaagacatacctgagactgggcaatttacaaaagaaagaggtttattggacttaaggttccacatagcaggggaggccgcacaatcgtgatggaaggtgaggaggagcaagtcacgtcttacatggatggcagcaggcaaagagagagcttgtgcagggaaactcctgtttttaaaaccatcagatcttgtgagactcattcactatcacaagaatggaaaggccttcccccataactcaatcacctcccatcgagttcctcccatgacatgtgggaatactgggagatacaattcaggatgacatttgggtggggacacagcaaaccacwtcaaatacttttgctgaagtttggttaatggtatgtttcttgagaaatggtgtattttttgagaacttatatagaatatctttgttttctatgtacacaaataatatacatttgaaacccatctctttcttcctcattcactagtaatgtcacagctctaaacataccttatcatcattcaccttgaggtagggacagtatctttataccat

SEQ ID NO: 116772 - DNA, 582 bp, Homo sapiens
gtgacagctccatggagaaatctttgtgtgcagagaactggtagaaattatggtgatgagttaaggatgttagaaaatatattgctttcatggaataaatttgaccacttcaccacaactgyggaaggctgtttccctctcttacgtaaggggagtaaggaaatagaagctccaattgttttttccctttttctcagttcttaaaaacgattcattctgccattttctctggagatttctgaaatattttatttaactgaggtggtatagaataacaacaaaatataataatacgacagacttgtggagtttaagcaaaagagtttaataccttaatgttaaactctggcatcctggagaagccagattgtagtttagtgaataataatattagagaattgtcaataccttccagccaaagaccaccaagaacacacctataattgaacaagttgggtttattgctcactaccacggggagaatacacctcatggggaactgtgaaatatcttagtcaaagagtttaggaaagaacttacagaatttgagttagtggtttagggaaggtttaacaaaggaca

SEQ ID NO: 116773 - DNA, 603 bp, Homo sapiens
cattatacaacacaagaagaacttgagaagaaaaagcactctggtattcttagtaggaagaaaaatattgtgacagctccatggagaaatctttgtgtgcagagaactggtagaaattatggtgatgagttaaggatgttagaaaatatattgctttcatggaataaatttgaccacttcaccacaactgcggaaggctgtttccctctcttacgtaaggggagtaaggaaatagaagctccaattgttttttccctttttctcagttcttaaaaasgattcattctgccattttctctggagatttctgaaatattttatttaactgaggtggtatagaataacaacaaaatataataatacgacagacttgtggagtttaagcaaaagagtttaataccttaatgttaaactctggcatcctggagaagccagattgtagtttagtgaataataatattagagaattgtcaataccttccagccaaagaccaccaagaacacacctataattgaacaagttgggtttattgctcactaccacggggagaatacacctcatggggaactgtgaaatatcttagtcaaagagtttaggaaaga

SEQ ID NO: 116774 - DNA, 603 bp, Homo sapiens
cattatacaacacaagaagaacttgagaagaaaaagcactctggtattcttagtaggaagaaaaatattgtgacagctccatggagaaatctttgtgtgcagagaactggtagaaattatggtgatgagttaaggatgttagaaaatatattgctttcatggaataaatttgaccacttcaccacaactgcggaaggctgtttccctctcttacgtaaggggagtaaggaaatagaagctccaattgttttttccctttttctcagttcttaaaaacgattcattctgccattttctctggagatttctgaaatattttatttaactgaggtggtatagaataacaacaaaatataataatacgacagacttgtggagtttaagcaaaagagtttaataccttartgttaaactctggcatcctggagaagccagattgtagtttagtgaataataatattagagaattgtcaataccttccagccaaagaccaccaagaacacacctataattgaacaagttgggtttattgctcactaccacggggagaatacacctcatggggaactgtgaaatatcttagtcaaagagtttaggaaaga

SEQ ID NO: 116775 - DNA, 570 bp, Homo sapiens
tccctgccatgcaaccagattggacatgaatactgaatgagtcccctggaaagaaactcaagccccaaacyaggccatgattccagagaaaggctacctccaactctcttaaagtgatttgcttactgaaggaaaattctaagttctttgcatcttatatatgctagaaaaagatgttttaaatatttaataggcctgagaactaggcagagccaattgtaattatattataatccacatctggcacgaggatgtgaagttacaacaaatgtctgcaagccttgacctcattccagcttgggttcatccattcgtgctgtcagaaaaacctatattttattgcccatgcagttttcccttgcttatggattccctagtgttaggtgagataacttatttatttcactgttcctctccttgaatacacttcattcatcagagggcaagctcagggatggggttgggaagctctaaaatcaatttgctatacaagtgaaattaagaaatactactggtggttgtttctctcaaggttctgggaagatgtgaagaaaactcaagtgcccggtt

SEQ ID NO: 116776 - DNA, 537 bp, Homo sapiens
ttaaaaataccactacttttatatttctgcctttctttgtttcttccattcaatatgctcttaagtatcttcaaaactctaaggacttccaaccaaggaggtcaagctttgtagcatgtaaagagaataatcaatttggccaattctgaagatgacagtttctaaaattcaaaataaaaatataatgtcttagtgaaaggaaacagccaatgcaaaagatttttyatttactattactgtctcatctctattcaaacatttaatgttcactagcaggtcatatgttatgaacactttagaattttattgaagaatttaataatttcttacctttgcacatgtgatgcactttagacatatataaattcagttccgtttatttcatcgatttaaagtaatacacacacacacatgcacacacatgcatacacacacacatacacagtaaagtacattgctcctagttatcttgagaagattaatcttatttcaaagaggctctacatgatttctggaattaggcactagatttaaaat

SEQ ID NO: 116777 - DNA, 419 bp, Homo sapiens
gcactggtacctaatataaaatagaataatttatagcaccctcacttctgccccaacccacctctgatttctgccgcaactgtggcagacagccataagcctttgcatctctttgcttctcagcctctgaattttctctgacactatgagaattcatgtaggaggyagcctgcaagtgtgggtgaattatcacattgaggggtaaccctgaacccatgagattcaaaaactgaagggttaacgtctgagcatctctgccttgggagggaaaattctgaggtgcattctacatagctcctcaaaaagtctccagtgggattgggcttcagatgcccatagtagtaacagtcttccacaatcttttttattttcttccctgtctcactttccccatttcttaattcttgctttctgacatc

SEQ ID NO: 116778 - DNA, 419 bp, Homo sapiens
gcactggtacctaatataaaatagaataatttatagcaccctcacttctgccccaacccacctctgatttctgccgcaactgtggcagacagccataagcctttgcatctctttgcttctcagcctctgaattttctctgacactatgagaattcatgtaggaggcagcctgcaagtgtgggtgaattatcacaytgaggggtaaccctgaacccatgagattcaaaaactgaagggttaacgtctgagcatctctgccttgggagggaaaattctgaggtgcattctacatagctcctcaaaaagtctccagtgggattgggcttcagatgcccatagtagtaacagtcttccacaatcttttttattttcttccctgtctcactttccccatttcttaattcttgctttctgacatc

SEQ ID NO: 116779 - DNA, 671 bp, Homo sapiens
ctgtcacatcccatcaccacaagttgatgggattgaaatgtgccatatgttctgaatatagacagggtcagaactttcattttcactgagtgtgcggtaattaaaaaccttactgaaagcaaatgatggaggatgagctttagarcatctctgaagcaacttctaatgaatgcaaaaataactggagttgcaaagtcacattgcaaccaccctctccttaaaggttaggtatgaaggccaagttgccttcatcagccacattgcaaaatatttaaagataagcatacgctacagagtttaaatgaccatatatcaaaacaatattgttttcagtctaatattaagtgtagcaagccagatgtttcttatcttatttaaatgaaaaaaatggagctactagtatgcacattaaaacttgtaaccagattgtaagatttgggtacaaccaatatttcataattctttgcagctcctttaacacccagcaagagattacaatgaattcttgttaaatgaatgaatgaatgagggcttgtttcttgattcagagggcagaatacagaatctaacaaagaatctttaacatactaaacactcaggaaataaaaacactgatctagaagacagaaaatctaaaagctaatgagttgaacaagtcttttaaactttct

SEQ ID NO: 116780 - DNA, 382 bp, Homo sapiens
caaatagcaaggagaaaatattttagtagtagtggtggtgacactgaccaattaaccttccctttgcaccatccttggatttacaaggcatgttgccatccactgtctcctttgagttttacaaataacccttgaaggagggaagaacagggcatattctgtccattttgtaggtgagggattttaggatcagaaaggttaaggacatgtccaagtaggagtaaatggtagagtgagtcatccartccctgactctggacccccttctgctcaccttgcagccagaggcagataacacatgtccaatattaggtcaaagggaggtaagcaaagccctgtggggaagggcaggaggtaggagttgaggagagaggaagtggga

SEQ ID NO: 116781 - DNA, 553 bp, Homo sapiens
  misc_feature (1)...(553): n = A,T,C or G
agtggtgtccaacagatgtccagcattactgagttttccttgaaagcttaaaatatcccctggcacccctgaatttggtgtggcaatctggggtgcctcatcccttagtttgggatagagtggacttgaagccgtaaatcatctgtttaggtaagagactgtgatgcaattccggctgatgaaaagggagngaagtcttttgagagattcctagaaaagggtctcctcaccctatcaaagctgtytgggaggatgccttctgctgggggctgttgcagagtctgcgtaggaacctggacccgcagctgccctcttggacccagaggaccactgtccccaggagaagacactggatggtgaaggggatggaggggctgtggctttggtggcattgtttggctgctgaagcctggaaatacccatctctggacttgctattttgtaagctaatgctgtcctggaaaatgtagcctatttagagctggatttcctgctcactagcagcaaaaaggacccttcctgatacactgcaaagaatgtttgggaacaccac

SEQ ID NO: 116782 - DNA, 583 bp, Homo sapiens
aagttatgcagaaaagtaaaagaaagaaatcatccgcaattccactacttcagataacttttaacattttttgacttttatttcagaaggcttttttataaatttttaaaactggtttctcttgagtataaaatcccattgattataagatgtagcattaatttaatagtacattttcagaaaacaaaacagaaaaacactgaaaactttgaatttacatgaatgaaaagatayattggatgaggatatgtggtactcgtgatcataatttgtgcattcaaaggaatcctgttctgttcaataaacatttacagaacaataatttttcatagtaatagaaactcataatgagccttattttaacagctgtgcataattctaacttgtggatttcccatatttgtttaaccttcacaattgttggcatgtggtttgatttcacttataaataactctgaatggatgtatttgtgcatgaattgcttttgtatttcagattattctctcaagatggatttttggaagtgagataattagattaaatactaagaaaatatttatgatattggatggccatcgccaa

SEQ ID NO: 116783 - DNA, 301 bp, Homo sapiens
ggtgacacaggaagagcggtgaggacacagcaaggagaagagagttcttgctgaaggaaagaaatagaaagttaagctctaaaacacttgtgttgtctgaagtccacagaggaagaaagaaaaggtgtaggagkaatagtaatagaagacaagaccaagcaaaataggaacaggaagaacagtgctggtggaatctaaggataaagggcatcaaactgagaagatactgaagccgaattagaaacaaaatgaaattacagaatttgggggtggggagcatatcctcaaattgacagagata

SEQ ID NO: 116784 - DNA, 584 bp, Homo sapiens
gaccttttatccaaagagttgttttgaaaataagctgtagttacctaaataaaaaacactgttacttacagcagttaaatgaaatgtttacatgtcttactgataacaaatttgaaataaagttgagaccaatatgattcctgccttaataactctggatggcatgaatcatggcactcacattagttccccttgataatggaatatttgttattttcatttattagtcctttttgcctcccaaggttccttttgaaagctttatttgccagcaataaaaaggaataaaatatatgataaaagtagacagattattaaggaaactcaagaacaaaagatctttttttagcaaaaataattgctatcacttagactataaacaaaaagatcttctctgtttcccatggtccctcccacttgatgacgaattgaattactctgaaggaaagcataaatcagagtaaaagtaggtatattggggaatatttataaatatatatgtatttatatacatatgtcttaatttgtttgttgytgtaaaggaatacctgagactgggtaatttataaagaaaaacatatggc

SEQ ID NO: 116785 - DNA, 557 bp, Homo sapiens
aaatttatagtgtgaagccatggtatagtgtgaagccatagctgtatgtattcaatttgcttcagcgagactcttgaagaatacctaggtttaaagaaataggaaggatctattcaaaagaagattcagcctctgcagaaatttaataaaacatgctgaaatagtgaaatgcatttattttttgcctgtcagtgtgttatcttctctattgtttacctattgcctcaatcatttacataataaaaaacccaaaaacctagtggtttatgaaacaaccatttttttatttctcctgtacaattgggtaatttcgcttgtcagtattagccggggtgggagttctggtcttkgttgggatttactcacaaaactggtggtttttatagtattggctcatttaggatgtccttggctagctccaggatctcatccttcagtaggatggcttggccatgttatcatgattacaggattcaagataggaaccacgaatgcaaatatacttctttgcttacaccaagtttgttactatcccaatggccaaagcaagtcacatg

SEQ ID NO: 116786 - DNA, 632 bp, Homo sapiens
aaaactacagcatcaatagagtatatactttttgtcagaacacaagacctgcaagggacatgagaaatagaacttccaaggccttgtttgacaaagaaataagggcacatatttattagttagctcgycttgtttaactgagctagttcataagcttctataccagtcctcaatgtctgatctttgaatagtgctggcaaattttattgcacacagagagaacactggccttctgatacataccagaccatcactgcacataggaaagtgctggctttctggtgtccatcaaacaatcataggtaatgctggccttccactgggcaccagaccaatacagcacaaaggaagaaaggccaatagagggaagcagttaaaagcacagagcctgaagctgactacctgggtgcaagtctaggttctatcacttcagagccatctgaccaggggcaacttaccaagttctctgtgcccccatttcttcttcatacagaggatattagaagtgtggaaccaatagcttgtggaagttaaaataaattgatatgaataatgaattaatacatataaagactttgaaccacactctgcatgtagtagcaatatatgttttccttgctatcactgcaaac

SEQ ID NO: 116787 - DNA, 643 bp, Homo sapiens
aatggcaacattaaatgagacagcaattagttttgttttaatttatccttatgtggaagtaatatcacagtcaatggccattcacgttatacaatggatttagtagggttaaggacagagaaattttgcctagttctagactagaggaactcgctctacttctgcttatatttttctgaaaagagtaccataaatgaggtttttaaattcttaaagatamtaataatggatggaaatagatcaatttaagtctgtaatgaaatgtcagacagatcaagtaaaattgaaatgatatctaatacattataagaaattgccatgtgctggtcaaatagctgtgatttgtattacttatatagaaaggaacttgagacttaagggatttaaacacctttccagcagcacaaatttagtaaatatatcaaggttaaaattgaaactcatatatcatatttttctcactattagtgattttcttgaataaaatgaatacttggatactatatgagacaatatcataatggtctaaataaatttcagcttaatgacatcatttttaaacattaataaaactgctattaaactttatgccacttttgggaagtcggggctcagagctaaattagatttgatttagaaacaa

SEQ ID NO: 116788 - DNA, 643 bp, Homo sapiens
aatggcaacattaaatgagacagcaattagttttgttttaatttatccttatgtggaagtaatatcacagtcaatggccattcacgttatacaatggatttagtagggttaaggacagagaaattttgcctagttctagactagaggaactcgctctacttctgcttatatttttctgaaaagagtaccataaatgaggtttttaaattcttaaagatactaataatggatggaaatagatcaatttaagtctgtaatgaaatgtcagacagatcaagtaaaattgaaatgatatctaatacattataagaaattgccatgtgctggtcaaatagctgtgatttgtattacttatatagaaaggaacttgagacttaagggakttaaacacctttccagcagcacaaatttagtaaatatatcaaggttaaaattgaaactcatatatcatatttttctcactattagtgattttcttgaataaaatgaatacttggatactatatgagacaatatcataatggtctaaataaatttcagcttaatgacatcatttttaaacattaataaaactgctattaaactttatgccacttttgggaagtcggggctcagagctaaattagatttgatttagaaacaa

SEQ ID NO: 116789 - DNA, 643 bp, Homo sapiens
aatggcaacattaaatgagacagcaattagttttgttttaatttatccttatgtggaagtaatatcacagtcaatggccattcacgttatacaatggatttagtagggttaaggacagagaaattttgcctagttctagactagaggaactcgctctacttctgcttatatttttctgaaaagagtaccataaatgaggtttttaaattcttaaagatactaataatggatggaaatagatcaatttaagtctgtaatgaaatgtcagacagatcaagtaaaattgaaatgatatctaatacattataagaaattgccatgtgctggtcaaatagctgtgatttgtattacttatatagaaaggaacttgagacttaagggatttaaacacctttccagcagcacaaatttagtaaatatatcaaggttaaaattgaaactcatatatcatatttttctcactattagtgattttcttgaataaaatgaatacttggatactatatgagacaatatcataatggtctaaataaatttcagcttaatgacatcatttttaaacawtaataaaactgctattaaactttatgccacttttgggaagtcggggctcagagctaaattagatttgatttagaaacaa

SEQ ID NO: 116790 - DNA, 536 bp, Homo sapiens
gccttttacttggtgtacagtcattactggtgcagaattgagtgatttggatgaagtttgcttaaggatcactgtcattatatatttatgaataacagcaaacactatttaagataagccattccctgagaattgacatgccacatcagggactggatgatagaattcccaggcctgtgtttatggcactaacaatctgttttataagccagcctctgcaagataatgatcatgggcactaaccattctattctcattttaataamaatttcaaagagggaaaaaaatcagggaaaaaagatgatggatgtaatgtttaggctacctaccaaacagtaaaaaaaatttgaccatatttggaagaataacagaaataaacaggcacacttctagtagtatcagcaagacattgccatttgtactcatattctcccttgtattctaatcccatttttctagaagagtaatcaaatcctcatatattttttctgtttttgcttttgttgttgatgtgtcttaacagctaataatcactg

SEQ ID NO: 116791 - DNA, 609 bp, Homo sapiens
ccttacctagaaccagatacaaaaattgactcaaaatagatcaaagacctaaatgtaagaccaaaacatacacaactcttaggtaataacatagggcaaaaacctcacaatattagatttggaaatgagttaacagacatgacacaaaagacacatgcaacaaaagaaaaattagacaaattggaattyataactttctttttttttttctgagacagagtcttactctgtctcccaggctgtagtgcagtggcacaatctcgactcactgcaagctccgcctcccgggttcatgccattctcctacctcagcctcctgagtagctgggactacaggcgcctgccaccgggcccggctaattttttttttttttgtattattagtagagacggggtttcaccatgttagccaggatggtcttgatctcctgacctcatgatccgcccgtctcggcctcccaaagtgctgggattacaggcgtgagccaccgcacccagccctataacatttttaaaaaatatttatcaaaagacactaccagcataataaaaaggcaaccagcaaaatgacagaaaatagttgtgaattttatatctataaggtattaa

SEQ ID NO: 116792 - DNA, 536 bp, Homo sapiens
gagtaaaaaaagagcaatatccttgattcctcatggcttgctagttcctggagtcagacttttcaaaagcctcattgcaattaagacatcaggtctcatgagatacatccatatcattccaatgaattacctttttgactttaatctttctttattatctccttggagttaaaggagccccacttgagaaaagagaaatgcagtacaaattgacttaagttgtgcaaaactcaaatgagtgagttttctatttttggaaatatacatatattttatgcttataaatatatgtgctgcattttttcataaattatactagatataatttgtgaaaattctgctcaacatgcttatatttcccaattgacatgggaaaacatttatgtacagccagtttattcacrtgtaatctcgtaattataacactttaatacaaaatctgaaataaattacaaaaagcaattttcacataattggaaaagtgctcatgcatatttattactccaagttgtacaaaaataattcttttcacattt

SEQ ID NO: 116793 - DNA, 438 bp, Homo sapiens
tgggtctagaataactgtatatgaatcctgactaccttgcttactaggtgtgcatctttggggaagtcactgaaactcaatgagtttcttcatctttaaaatgagtatgttaagcacctactgctgggggttgttacaaagtttaaaaattattatacacataatggaaccagcacatagtgggcactcaataagcagaggcttattggacttctaaggcattcttggaatggggttcttgggcagccactggaccctgatgactcttayggagtctgtgttaaattaaagtcactacatcttttttatatgagcttcagaatgctctccgtaacttttgtccattcaaatgctactctttcttcagagcccattttactgggaacacttccacaactgacccaaactcttttctccttccttcacctcccagctccc

SEQ ID NO: 116794 - DNA, 628 bp, Homo sapiens
ttgctgggtcccatccccagagtctctaattcagtgggtctggggtgaggcttaagaatttatagttctaacaaattccctggtgatgttgatgtggctggttctggaatcacactttgaaaaccattgccttccagtttctgcaggtgtgactggtttgtagacatattgaaattccactgaggcttccagaaatagctggaatgcctttcgataaggctaatttctgacaattaggccagcaataatttgaactatcatcatttggccattaaaagtaaataagatctttttagtcacaggttgttgatatcttgggcgtttgaattacctagcaatgataagacattcgttatgagtctatagatctgyctgctgtactcactttattctccttaagggcagggatacatttctgtatcttcacttatttatttagtaaatatttattgagtacctactaggtgcaagacattcttataggaactggtaatatggcaatgaacatatataaaaacatgtaaaaatttcctgtctttatggagctgacattttagtcaaaggaaacctgtggaaagcaagctcaaccataatccccacaaacctgggggacttgttaaagctacag

SEQ ID NO: 116795 - DNA, 613 bp, Homo sapiens
caggaattcgagaccaacctggccaacatggtgaaacctcgtctctactaaaaatacaaaaaattggccaggcttggtggcttgcrcctataatcccagctactcaggaggctgaggcaggagaatcacttgaacctgggaggcggaggttgcagtgagtggagatcgcgccacagcacttcaacttgggggacaagagcaaaactctgtctcaattaaaaaaaaaaaaaaaaggagagagagagaaaagagagaggatagaaataataggaaaaatgccgggtgcggtggttcacgcttgtaatcccagcactttgggaggctgaggctggcggatcacaaggtcaggagttcaagaccagcctggccaacatggtgaaaccccgtctctactaaaaatatgaaaaaaaaaattagctgggcatggtggcatacacctgtaatcccagccactctggaggctgaggcaggagaattgcttgaacccaggaggcggaggttgcagtgagccaagatcatgccactgcactccagcctgggtgacagagtaagactgtgtctcggggttgggtggggggaagaaagaaataataggaaaaaaatccctaagttg

SEQ ID NO: 116796 - DNA, 611 bp, Homo sapiens
ctctttactttcctgaggctgttttctgcagtttggggttttggagaaggcatcaaggctgaaggacggtgggatctcccctagggggcctcaaggcaactgctgaagtcgtttttctcagtcctttcaaatcagatcttccttttcttttctttttcttttcgtttttttttctttttttgagacaaggtcttgctctgtcasccaagctgaagttcagtggtgtgatctcagctcactgcaacctctgcctcccaggttcgagtgatgcttgtacctcagccttctgggagtagctgggattacaggcacccaccaccactcccggctaatttttgtattttttgtagagacagggttttgccatgttggccaggctggtctcaaattcctggcttcacgtgatgtaccaaccttggcctcccaaagtgctgggattacaggcatgagccactgcacctggccagatcttccatttcaaacctctttcattctctgtctccctccacctcttggtgctgatttgtctgtcctgaggctttctggctttacaaagcatcttctggcactggacacgttgtctaggaacaggtttcacccccagggccctg

SEQ ID NO: 116797 - DNA, 535 bp, Homo sapiens
gtggggtgggttaaggcctctgtgacaactgcactgcagttcaacttcccctctgcccagtgctactcctctcacagcatgtcagatctggttggtccccaacatatgatggttcaacttacaatttttagrcttcttgacagtgcaaaaactatctacattcagtagaacccgtaattccagtagccatacaacttttctgtttctcactttcagtacagtatttaataaactacatgagatactcaacactttattataaaataggctttatactagatgattttccccaactctaggctaacgtgagtgttttgagcacagttaagggaggcaaggctaagctatgatgttcagtaggttaggtgcattttcaacttaagatagtttcaactcacagtaggtttatagggacataaccccataagtccagatcatctgtatggttttcgagagcattccccaataaactgcctacatgaaaatctctgcctcagaatgtatttcctggggaatttgaccctagaaaatacag

SEQ ID NO: 116798 - DNA, 636 bp, Homo sapiens
ttaggaaaaaagtaaccaagcaaataaaggaagtgattagagggactggacaaatagaataaggaaataaggtgaaaacagcgaggagacaagaagaaggatatacagtggcagggagaaagataataaattggaagaactataaagaaaaaaaaacatgataaattgtcttgccagtaaaagaatcttgctatttaatcttctggatattttgtataccattaccacctgataaactagaacagatataagaagcatcagaaaaggaagacaaaagagtaactaaaaggaaggaaaaaatttaaaagttcatatatctgagatttcccaagagacttgaaaattactcagtggtatgagctaccttactataattaaaattacttcggaaggtaacttcttgcttatgcagcayctcagatgcagaaaagtatgacaacctcgccacctacttttcaatttagagacctttttattaggtacccagacataactgttttctagggaaaagtaattttataattttttttcaaattttcagccaaagaatgattttgcactagctaaagtggaacataaatgagcctttaagcaggagacgtgctcatctttaaaatggaggatgaagggcatagt

SEQ ID NO: 116799 - DNA, 552 bp, Homo sapiens
gtacattccaatagatttagctcataattaattatttttatgtatttgtttgtttgtattttttaatattggtaacacattttgctcataagaccattctgaacttagctttagtattaggtatcaagtaaagcataaatatatccactctatttattaatctagtaactagccttttaaaattgccatttacatactaaaaagcctcttttttctttacaatgcatgaggtaattttgattgtttcccataattcttagacaaatagcacatattttatttgtaattcyttgttaatattaaactaaagcagactcaagtcactcttggactttttgtacaattaaccatatactttaccaactacattatatgtttttcaccattttcaactcattcctggctacattgcatagtggcagatatcaatttcaaaattggtgagactgctgactctatttgaggcttaagcttaaggatgcatggaaaaaaataatggtcattatgaatattcaaatcaactatgagatcttgagaaaagcgttgggatgt

SEQ ID NO: 116800 - DNA, 583 bp, Homo sapiens
atgtcttttttaaatttaaaaatatctattgcttctcagtatggaaaaagtaggatttttaagatgcaacatgccgtctttatttctacttcattaggtacattttccttgtgaaatgactattagttcactcatatattgatttttttcagtaaatatttttaattttaagagctttttattgccctctgattaagttattctttttcttgttaatctgattttttgaaggcaatatcttagaaaatttaatttggttttctaaaggtcatttttaatagatgatctttatattctcttagatgttactgcttttactaatatattaaataatgatagcctatgctgagtggtgtggctaaatcttatagatttccttttcttctgtgtattttatctttccccaccatagatctctgactgaagagaagtctagctagggccatcttgyatattggtttaatctcatttaatctcagctctttttcaagtgttttgatggggagatggtcttttgctagagtacttactttttatcagaaacacctcttctctcttggcaacactttcaaattattaatac

SEQ ID NO: 116801 - DNA, 564 bp, Homo sapiens
agaagtcctatacaggcttcactgtatagkgacacatcaaggtgtcagccaggccacagttcttctgaaggctgtaggaggaaatcagtttccttcccttttcaatttctataagcacccacgtctttaatatattagactgttcttgcattactataaggaaatacctgaggccgggtaatttataaagaaaaaaaggtttatttgggctcacagttctgcaggctgtgcatgaagcatagtgccagcatctgcttctggtgagggcctcaagaagcttccaatcatgcctgaaggtaaaggggaatgagcatgttacttggcgagagagggagcaagagagagaagagagaattccaaaactcctccaaacaaccagaccttgcatgaactaactgagcaaaaacacatttattaccaaagggatggtgctgaaccattcatgagggcttccccccatgatccaactgccctcccactaggccctgcctccaatattgtgatcacagttcagcatgaaatttgcaggagccaatatccaaaccatatcacttgccatacggc

SEQ ID NO: 116802 - DNA, 564 bp, Homo sapiens
agaagtcctatacaggcttcactgtatagtgacacatcaaggtgtcagccaggccacagttcttctgaaggctgtaggaggaaatcagtttccttcccttttcaatttctataagcacccacgtctttaatatattagactgttcttgcattactataaggaaatacctgaggccgggtaatttataaagaaaaaaaggtttatttgggctcacagttctgcaggctgtgcatgaagcatagtgccagcatctgcttctggtgagggcctcaagaagcttccaatcatgcctgaaggtaaaggggaatgagcatgttacttggcgagagagggagcaagagagagaagagagaattccaaaactcctycaaacaaccagaccttgcatgaactaactgagcaaaaacacatttattaccaaagggatggtgctgaaccattcatgagggcttccccccatgatccaactgccctcccactaggccctgcctccaatattgtgatcacagttcagcatgaaatttgcaggagccaatatccaaaccatatcacttgccatacggc

SEQ ID NO: 116803 - DNA, 485 bp, Homo sapiens
gagaattccaaaactcctccaaacaaccagaccttgcatgaactaactgagcaaaaacacatttattaccaaagggatggtgctgaaccattcatgagggcttccccccatgatccaactgccctcccactaggcyctgcctccaatattgtgatcacagttcagcatgaaatttgcaggagccaatatccaaaccatatcacttgccatacggcccgcttcagtcatcttcaaagccagatatgttggatcttcctctgacttaaaccagaaaatgtttttccctttggaggattcatgtgattagattggccaacctggataaacccagataatcttcccatctcgagatctttaaccttcttcacacccagagaccctttgccacgtaaagtaacatttcctcaggttttgatgagtaggatgcagacaccgttggagtagggaggaattattctgcctatcacagtgttcaaaggattcat

SEQ ID NO: 116804 - DNA, 564 bp, Homo sapiens
agaagtcctatacaggcttcactgtatagtgacacatcaaggtgtcagccaggccacagttcttctgaaggctgtaggaggaaatcagtttccttcccttttcaatttctataagcacccacgtctttaatatattagactgttcttgcattactataaggaaatacctgaggccgggtaatttataaagaaaaaaaggtttatttgggctcacagttctgcaggctgtgcatgaagcatagtgccagcatctgcttctggtgagggcctcaagaagcttccaatcatgcctgaaggtaaaggggaatgagcatgttacttggcgagagagggagcaagagagagaagagagaattccaaaactcctccaaacaaccagaccttgcatgaactaactgagcaaaaacacatttattaccaaagggatggtgctgaaccattcatgagggcttccccccatgatccaactgccctcccactaggccctgcctccaatattgtsatcacagttcagcatgaaatttgcaggagccaatatccaaaccatatcacttgccatacggc

SEQ ID NO: 116805 - DNA, 622 bp, Homo sapiens
atggcagttaagcaattatttcaataaaatgaatcacaaaaatgtgttgtcttcccagtgaatatgaaagctatttttacattatattataatctattaagtttgcattgacattatacctaaaaagcaaggtatactccttaatttaaaaatacttttattgctaggaaatgctaacaatcatctaaacctacaagagttttaatctttttgccagtggagggtattgcctcaatgttgatggctactgactgatcatagtggtggttactraagtgtggagtgtctgtggcaatttcctaaaataagacaaaaatggagttttccacatctatttacttttccttttacagaagatttctatgtagccggcaatgtttgatagcattttacccacactagaacttcttccaaaattgaagttgattatttcaaattctgccactgccttatcaactaagtttatggaatattctaaaccctttgttgatattcccaaatcattcccagcatctttcccaggagtagatttcatctcaagaaaccacttttgttgttcatctatacaaagcaatttctttccattcaagttttatcatgagattcagcaattcagtcacat

SEQ ID NO: 116806 - DNA, 516 bp, Homo sapiens
ggctccttgtcatttaggtctcatttcaaatgacaattgaagtgaaaaaacatatcgttaacatatttgcaaaataatttcctttcctcctgatggtgctttacaaactatattaatttgagagttgacttgaatgtaatagcaaataaaatatttttaraattatgtgagtggtaaagtttctgagaagttgcttctctgtaaataacttccagttgcattaaaaattaaaagtaaattgtccatcttagacatttccagggaatttctttcttcgaaagtgtaggtatattttccataagttcagaaatttacagttgagagaaatgtaaaacaaattcttttcttttgtgaaaaagtctattttttattttttaatataaatgcttatggaatattttcataattttgaaggttccaaaatgttatagggcatgcatacaatttcatagatttttgacaaatgctcaacactttcaaatagctcactctcaggattcataacactagaaagcc

SEQ ID NO: 116807 - DNA, 386 bp, Homo sapiens
ggaatattcatgggaacattacaatagaccaaaagttgaaaacaatccaaatacccaccaagactagattagattgctgtaaataaacacaatggaatactatgcaaccataaaaacaaaggaattatgagtgacaactgtatatacatctttgctaaacatgagaagccacagagaaaatttaatatttgctagttaattatatttatataagctccaaaacacagattaaattaagctatggtatttagtatgcatattrtggggtgcaaggaagttattcccataacatttaggataacgtttatctccagagaggagatgaaaggttgtagaatttggaatgaagtgtcattgaggaagctaacaatattccctttgtctgg

SEQ ID NO: 116808 - DNA, 381 bp, Homo sapiens
ttatttcactattatttctctccaacttttctatcaaatacacttgtggagtttctgtagtgtgaattgtcttacttcaatctgtaagttcaatctatattcatgaagtaggagggcacccctaaataagattgagagggaaaaaacatgaatattttcagttttagtgggaactctcatatttgacttagtaacattaaaaatgattatatataaattacaaattttttatggtaaaggacaccataagtaatgtcaacaaatgattaatacactgagaaaaatgacacgtgaaaaaaattctaatataagtatatataaagagcctctatamatttataagaaaaagacaacatatagaaatatggacaaaggaagaga

SEQ ID NO: 116809 - DNA, 568 bp, Homo sapiens
tcttggctggtccatattttaatattttaatcccatttctggagataaacaatgcttgcctcattaattctcctgattggtttgaaaaaatgctttttaattaatttttcattcacttcttccttattttctttgttgatctcttcacgtataggtttcatmagtcataatatgggtattgtagtcacttctaccttataaattcttctgagtattaaaatgacaaaatgttaaaaagtatcttacatttagcataatgctggatgcatacttctcaatatggtggttattacaaatattaatatcaatatctgttccacacagattgtaaataccagctgtcaatttagtgagtctctactttaatcaacttagtaaggcttcatgccaagttgaccatttactcagttttaattttgatacctttttgatgcataagtctaatggctatttttattagattgatttttatttaaagagttgtctggtttatcatccattaatttagaatttgctagttactaaatagagaatttcatgtttttcagtcctaaatctctaatattta

SEQ ID NO: 116810 - DNA, 610 bp, Homo sapiens
atataaggtttttttttctcaaatgaccaaatttgataagcatatagttatgtatgtatcatcttccaaacagtgcataatccttctttcatactttaatacatacctgatgctctcaaaattcatttcatatataacatcaacattcaaacttcaagtgtatttctatataccactctattagatgtctagggctgccataataaagtaccacaggctagatggcttaaacaagaaacatattttctcaaaattcaggaggctagaagtgtgtaatcaagtgtaatcaaggtacgattaacagtgttgtttccttctaaatcctcartgattggtttgtagatggttgccttccttcagtggttttacgtggactttcttctctgtgtttgtccttatgttcatataagacatcttctatatgtcctcattttatattattgttttccttaatggccctgtctccaaatgtagacctattctgaggaactgggtgttagaacacaaacaaatgaatttggagtaatgagccatgattcagctcataagcactatttaatatttcaaaataatatatacattttgccaaaaaataccaatagcagagtat

SEQ ID NO: 116811 - DNA, 397 bp, Homo sapiens
ggacttgctttggctcacactccatgggttggttgcactcactgtcctgcacccactgtctgacaagccccagtgagatgaacccagtacctcagttggaaatgcagaaatcaaccatcttctgtgccgctcatgctgggagccatagactggagctgttcctattgggccatcttggaactgccccccatattagtccttcttgaacttgcttaattcacttagcataataccctctaggttcatccacattgtcacaaatggtaccttttgtcaaaccttggcaactgaattgacatttctactgcttccatatacagagaaattatactaacygaacttgtgaaaataatttattgatattaaattaaaatgctcatgaatagtttttgaattc

SEQ ID NO: 116812 - DNA, 567 bp, Homo sapiens
gctgagtggagttagtgggttggagaactggggagagtcaggtggtccaggctaggactgtgacacccccctccactgacagtaacatggttggtcaaactgtcacctaattcaccttaacttagagaccttatgcccaccaaggtagaagaatactaaccagagtaagatgcctgccagcaaatgcagaaataacagtggtgcgttttatttgaaacaaatttctaattttcatagggagaggccattcagctaaaaaaaataagaaacctttggttttaagacagtgtccggtcagatcactaactatggtgatcaggggatgaaattttcatgggcaaaaaaatagactggaagcctattaagtatgtgaggaaaacgttttgccaaggaaacccaaaawctagccacgcttccttaagtcaatcctgagatcttggaactccatttctggggacctgcgctgttatatctgggtagacctgtgaagtatatccttacctataattgaccccagtagggaccatggagaaatataaacaaagaacatcttataagacagaacaa

SEQ ID NO: 116813 - DNA, 567 bp, Homo sapiens
gctgagtggagttagtgggttggagaactggggagagtcaggtggtccaggctaggactgtgacacccccctccactgacagtaacatggttggtcaaactgtcacctaattcaccttaacttagagaccttatgcccaccaaggtagaagaatactaaccagagtaagatgcctgccagcaaatgcagaaataacagtggtgcgttttatttgaaacaaatttctaattttcatagggagaggccattcagctaaaaaaaataagaaacctttggttttaagacagtgtccggtcagatcactaactatggtgatcaggggatgaaattttcatgggcaaaaaaatagactggaagcctattaagtatgtgaggaaaacgttttgccaaggaaacccaaaatctagccacgcttccttaagtcaatcctgagatcttggaactccatttctggggacctgygctgttatatctgggtagacctgtgaagtatatccttacctataattgaccccagtagggaccatggagaaatataaacaaagaacatcttataagacagaacaa

SEQ ID NO: 116814 - DNA, 595 bp, Homo sapiens
ctccagagatgaattcaagtatacagagtgatataatggattttggagactttggggtgttgtttgggaggtgggtgaggaataaaaggcttcatagtgagtacagtgtacacttctctggtgaagagcacactgaagtctcagaattcaccactatagarcttatccatgtaaccaaaaatcacctgtaccccaacctattgaaataaaaataattataattaaaacaataaagtacatgggataatgtacatatgttatatgcaaaaatactataccattttatatcagggacttgagcatccatggattttggtatccaatggagatcctataaccaatcccctatggataccaagggacaactgtatttactgaactgttaccagcaggctgcagatatagtcagatactaatggacacttaaaattgaaaacctgttaagaagtgcactgtacattttctttgtttgcttaaaagcagcttcctagaagctgtctagttctacctcgtgttaatcttttcacatcctacagagttttacagacttttagaatgcatcctggtaagtgctgtctctctaatcattggactt

SEQ ID NO: 116815 - DNA, 595 bp, Homo sapiens
ctccagagatgaattcaagtatacagagtgatataatggattttggagactttggggtgttgtttgggaggtgggtgaggaataaaaggcttcatagtgagtacagtgtacacttctctggtgaagagcacactgaagtctcagaattcaccactatagagcttatccatgtaaccaaaaatcacctgtaccccaacctattgaaataaaaataattataattaaaacaataaagtacatgggataatgtacrtatgttatatgcaaaaatactataccattttatatcagggacttgagcatccatggattttggtatccaatggagatcctataaccaatcccctatggataccaagggacaactgtatttactgaactgttaccagcaggctgcagatatagtcagatactaatggacacttaaaattgaaaacctgttaagaagtgcactgtacattttctttgtttgcttaaaagcagcttcctagaagctgtctagttctacctcgtgttaatcttttcacatcctacagagttttacagacttttagaatgcatcctggtaagtgctgtctctctaatcattggactt

SEQ ID NO: 116816 - DNA, 580 bp, Homo sapiens
aaacaacatttatttctcacagtccttgaggctggaagtctgagacgagaatgccatcatggttgaatccgggtgagtgccctctttcaggctgcagagagccgccttccccttgtatcctcacatggtggaaagaggggcaagggaactctttggagtcttctaataaggacactaatcccttatatgagggtttcaccctcatgacctaatcacctctcaaaggcctcaccttcaaatacattcacattggggattagattttaatatatagattttaaaaagaacacaagcattcagtctattatgggtatgaaatcacaagtcataactttaaaacacaaaagaaaacaaatgctaggagagagaattagttcagcaaatccttcagatattacaattatccagctgagatataaaatggatatttaatayattttaataatttatgtatgagtgaaaatatgaggaagaagaaagaaactcatagaaataataaggtttggtaaaaccaaatagaacttctagacataaaaatacatatataattataaagttttaaaagttagtagatggattt

SEQ ID NO: 116817 - DNA, 545 bp, Homo sapiens
ttacatggtgaagagtcatcagaatacaagattacatggtgaagagtcatcagaataatcaatcttcctccactttccttytaacagtctcttcgtggcctgtgctgaggactacatcagtctcctgcaattatcatctacactgaaaaacaaagaggacagaggcaaagctagtggccctcaccatcccctgcaagctgattgcttcttactgcaagcacttgagcatcttcctgagagctttcttgggcaatgggaaccaggcttggcccaatcacaggcaggtgaaaagtatgaggaaatggagaaggcattgtccaaggagcagtcttcaaccttcaccccgcaagtgagacaactctgaataagatgtgttctacactctcttccaaaggtccccagttggatggagctctagctgctcatgtgataagctgcctattaatacacaaaagattgcctttcctccttgctctgtcttcctgctgctctcctactaatgtttcctgggattgcctccaaataaaccacttgaactcacatat

SEQ ID NO: 116818 - DNA, 545 bp, Homo sapiens
ttacatggtgaagagtcatcagaatacaagattacatggtgaagagtcatcagaataatcaatcttcctccactttccttttaacagtctcttcgtggcctgtgctgaggactacatcagtctcctgcaattatcatctacactgaaaaacaaagaggacagaggcaaagctagtggccctcaccatcccctgcaagctgattgcttcttactgcaagcacttgagcatcttcctgagagctttcttgggcaatgggaaccaggcttggcccaatcacaggcaggtgaaaagtatgaggaaatggagaaggcattgtccaaggagcagtcttcaaccttcaccccgcaagtgagacaactctgaataagatgtgttctacactctcttccaaaggtccccagttggatggagctctagctgctcatgtgataagctgcctattaatacacaaaagattgcctttcctccttgctytgtcttcctgctgctctcctactaatgtttcctgggattgcctccaaataaaccacttgaactcacatat

SEQ ID NO: 116819 - DNA, 577 bp, Homo sapiens
tttgattgttttcaaacctccaaatacatttctcttttttcttcatataatgttggacattatttttggcagwtgatgctgatagcagaaaatgtttagtttaaccacttgggcagctgtggggtcttttttccttttcttcctcctattaatgaaaaagcagttccttgcagcaaagaatgggagtgaagttagcaattaattgacaatgtaaaaatcttgaataaaaataagtatctgagtaggaagaaaaaatgtcctcaaaaatatatttatgcatctcacatagacatagcctctctgcacctgttttcagaagggaagaattccaggtcatatacaataaacttctcctttcaaattgattgtttctaaatggtagctcaacataacagatcctcacagtctgtatttctttttagcaaaacacaaaactctgtattggttttgttttgcatgtacagtcatagcaacttcagaatatgtgtacatctttcatcccaaaactttcattattaatcataatggttagctctctctcccctcaatcattaaccctgtctggttaatattgttt

SEQ ID NO: 116820 - DNA, 589 bp, Homo sapiens
cggtggcacacgcttgtggtcctagctactcaggcgtctgaggtgggaggattacttgagcctgggagacagaggttgcagtgagccaagatcatgccactgcactccaacctggttgacagagtcagaacttgtgtccaaaaaaaaaaaaaaaatcattctaaagtcaccctaaagtgtgtgtctttgtatatctgcagatggacacttaaaatactcatactctcagccctaaggtgatccttggtggtgtgtgagccaagcatagccccaacatccagtcacctccagcctcatccgtttaccctgagggccacagagatatcattgcttttgctgtgagccaaagcagctcaaaggaaggaagcaccgagcaagcaatctgagtgaaggagatgtaagagactgggttgaacgtgtcttgacccagtgtcttacattggtttcctcatctgtaaaaatgtaaaagtatctacttctaaaatacaccacaacaaagagaagaaatgtatgctttgtggccaaaaygaaaccaaaaaaccccccagaatatcttgggtaagaggatgagggattgatcatgtacccc

SEQ ID NO: 116821 - DNA, 618 bp, Homo sapiens
agataggctattgggtcactcatgtctctgcttcagtttgtgtaagtctggctcaaggctatctaagctagctgttagctgcccaacaactttgcccagttttaaagtttattaataatcattgaagctattagtatgcaaaccatccagcaaaagaactcaacagataaatagcaaagtcgagctatctctccaagtttgttgaatttccatccagmccctttgtctcagtcattgtcactctactgtagctttccaaaaggcttccccacgttgattttccccacaactcccacacattttcacaatgcagccagagtgatttggttttccaagatgaaaatctgacctagttagctctctgcttaaaactcttcagtgctttgtattgtccatataatagggtccaaactcctaaatggcccacaggcctgacaggggaaagctcccccagcctccgccagcatggcatctccctcttccacctgcttcccaagaactctccttcaaaagctctttgaagtccccacttctttcttcacctactcatccttaagatccaagtctcactccctcagagaatacttcctgatttctccaattagatcaaaatgagct

SEQ ID NO: 116822 - DNA, 537 bp, Homo sapiens
agcaaagtcgagctatctctccaagtttgttgaatttccatccagcccctttgtctcagtcattgtcactctactgtagctttccaaaaggcttccccacgttgattttccccacaactcccacacattttcacaatgcagccagagtgatttggttttccaagatgaaaatctgacctagttagctctctgcttaaaactcttcagtgctttgtattgtccatataatagggtccaaactcctaaatggcccacaggcctgacaggggaaagctcccccagcctccgccagcatggcatctccctcttccacctgcttcccaagaactctccttcaaaagctctttgaagtccccacttctttcttcacctactcatccttaagatccaagtctyactccctcagagaatacttcctgatttctccaattagatcaaaatgagctataaatagtaagcattctttgatactacatttttctccttaacgataacctccaaagttgaaattgcccattggttttatgtgttatttgg

SEQ ID NO: 116823 - DNA, 587 bp, Homo sapiens
gaatgaacatttctgaacacactgaggtgtatactgaaaactgaatatcctgcaataaaagccacaaagaagcaacctatgaaactgcttcttgatgtgtggattcagctcaaagagttaaacctgttttttgattgagcacgttgaaaacactcttttttgtagaatctggaaatggaattttctgagccctttgaagcctrtagtgaaaatcaattatttcaccattaaaaatagaaagaatctacctatgaaactgctttgtgaagatgtattcagctcagagaattaaacctttcttttgatccaacaggttgaaaacactctttttgtagaatgagtgaaggaacatttctgaaccctctgtggcatatagtgaaaaccgcatatcctgcaataaaaactaggaagaaactatctgtgaaagtgctttttgatatgttgattcagctcactgagtaaaacctgtcgtttgattcagcaagttggaatctcattttttgttgaatctgcgaagggacatttcagggcacactgaggcctatagtaaaaaagaagagaatatccagctataaaaagtagaaaga

SEQ ID NO: 116824 - DNA, 587 bp, Homo sapiens
gaatgaacatttctgaacacactgaggtgtatactgaaaactgaatatcctgcaataaaagccacaaagaagcaacctatgaaactgcttcttgatgtgtggattcagctcaaagagttaaacctgttttttgattgagcacgttgaaaacactcttttttgtagaatctggaaatggaattttctgagccctttgaagcctgtagtgaaaatcaattatttcaccattaaaaatagaaagaatctacctatgaaactgctttgtgaagatgtattcagctcagagaattaaacctttcttttgatccarcaggttgaaaacactctttttgtagaatgagtgaaggaacatttctgaaccctctgtggcatatagtgaaaaccgcatatcctgcaataaaaactaggaagaaactatctgtgaaagtgctttttgatatgttgattcagctcactgagtaaaacctgtcgtttgattcagcaagttggaatctcattttttgttgaatctgcgaagggacatttcagggcacactgaggcctatagtaaaaaagaagagaatatccagctataaaaagtagaaaga

SEQ ID NO: 116825 - DNA, 571 bp, Homo sapiens
ttcaaggtggggtgggagagagtaggagcctggaccaagggggcttcctttgatggagcaggagactctgggcttatatttccagagggaatatttatctatattccaaagggttagagaaagaacccaagatccttctctttagatttccaaggaactctctcagaacaggagaaagcaggaagcagttgcttctttcctctatataagcacctgcataaatgttttcaaggctcctcatttacaacacagactccttatgtgtagggttttatcctgccagctctcagggtatttctcttggggyaagacttggcacagaagggagccatgtagttattctttgctgtatgtaagtaataacaatccgttctattctggaaatctgtgtgtatattcagaaaaatagtaataaatatagatagtaagaacttaaagataatattgtaatgatgttaattctccctaaattgacctataaattcagtgcatttttttccccctgagatagggtcttgctctgttgatcaggctggagtgcagtgacatgatcatggctcactgcagcctc

SEQ ID NO: 116826 - DNA, 571 bp, Homo sapiens
ttcaaggtggggtgggagagagtaggagcctggaccaagggggcttcctttgatggagcaggagactctgggcttatatttccagagggaatatttatctatattccaaagggttagagaaagaacccaagatccttctctttagatttccaaggaactctctcagaacaggagaaagcaggaagcagttgcttctttcctctatataagcacctgcataaatgttttcaaggctcctcatttacaacacagactccttatgtgtagggttttatcctgccagctctcagggtatttctcttggggcaagacttggcacagaagggagccatgtagttattctttgctgtatgtaagtaataacaatccgttctattctggaaatctgtgtgtatattcagaaaaatagtaataaatatagatagtaagaacttaaagayaatattgtaatgatgttaattctccctaaattgacctataaattcagtgcatttttttccccctgagatagggtcttgctctgttgatcaggctggagtgcagtgacatgatcatggctcactgcagcctc

SEQ ID NO: 116827 - DNA, 591 bp, Homo sapiens
gagcccaggaaatcttgcactgacttttccaccttacaagataatgttattaaataatgtttaacattctcagataagaggggcttttaagaaacaacattaytgattttaacctatgcctcaaaatgtaataaattgataggaaatgttcctggtatcaaaagtaaactagtaaagaattgaagtcagtgatacagagaaatctaaacaacactcattatcggttctgctctggatattttctgttctttacacattattactctaagtcagcaatacccaacctttttggcaccagggaccagttttgtggaagacaatttttccacagcccaggagtccaggagatggtttcgggatgaaactgttctacctcagatcatcaggcattagtcagattctcataagaggcatgcaacctagatccctcgcatgagcagttcacaatagggttcacggtcccatgagaatctaatgccaccgctgatctgacaggaggtggagctcaggcgctaatgctcactcacctgccattcacctcctgctgtgcggcccagtctgctggtaccagtttgtcgcccgagaattggg

SEQ ID NO: 116828 - DNA, 591 bp, Homo sapiens
gagcccaggaaatcttgcactgacttttccaccttacaagataatgttattaaataatgtttaacattctcagataagaggggcttttaagaaacaacattactgattttaacctatgcctcaaaatgtaataaattgataggaaatgttcctggtatcaaaagtaaactagtaaagaattgaagtcagtgatacagagaaatctaaacaacactcattatcggttctgctctggatattttctgttctttacacattattactctaagtcagcaatacccaacctttttggcaccagggaccagttttgtggaagacaatttttccacagcccaggagtccrggagatggtttcgggatgaaactgttctacctcagatcatcaggcattagtcagattctcataagaggcatgcaacctagatccctcgcatgagcagttcacaatagggttcacggtcccatgagaatctaatgccaccgctgatctgacaggaggtggagctcaggcgctaatgctcactcacctgccattcacctcctgctgtgcggcccagtctgctggtaccagtttgtcgcccgagaattggg

SEQ ID NO: 116829 - DNA, 593 bp, Homo sapiens
ctgttaatgagcgaagtcagtactcactgaacaaatgtgaagacagaagtaaaatttacagaacagattgagagcagtagttcatttgttaatttaggaggctgttgataaactagcaaagtctgtaaatgatgaacttgtagagttattggtgataaactagcaaagtttgtaaatgataaatctgtgaaattattggacattatattattatacctttctgcccaggtatagaaaagagaggaggcttcctagcacctttgagtaacccgtatatcattaattatatatttgacatatggcttgaaacagaataaggtaaataagttgkacataaacctctgaaaaaattgttttaaagcatcaacaatacacaaataaaaaataaggaattttgctgctcatttgtaatttattaagcatcactggtaggtcttgttttccaaagttggataagtcatggtcagaaggatttttagaaatgtttttgtttttaaaaagatctgcttattcaagaatagaaatacaatttctattttaaagtgaattcttccttaaaagtttcaatgcagaatttctgtctaaaagataaa

SEQ ID NO: 116830 - DNA, 572 bp, Homo sapiens
agaatagttgttaacagccacttaaaaatcctagtctgctattaataatttctacatctgggtcatttcagggatactcttttctcttgtaaaggagttacatactcctttttctttatacattgggtaattctgaatgttccctgaacataataaatgytaaatttctgaaactctggattctttaatttttctccagttagcatttttttctttctttttttaatcagctgattaaacacatttaaactgcaaactgtttcttgggaagaagtttcttatcttttgtctttagctgagcagctctgagtgaagctatcactcaggggtcatgtgagctgtcagtagacagattttggatcccctctctaacaaacatagtttccccaaattcagctttcacaggccatagagaccagagttcttctacttatcttcttgttatcttctcccatgccacaatgtacaccatgccattttcacccagccccaggctgagagctgcaaaacatgagatgtcatttcatatacctccatcttctttgaggatgtattcccaatcaggttctccc

SEQ ID NO: 116831 - DNA, 656 bp, Homo sapiens
gcaacctcatcgctacaaaaactacaaaaattagccaagaatagtggtccacgcctgcgctagtggtcccagctacccaagaggctgaggtcagaggatcacctgtgcccaggaggtcaaagctgtagtgagccgtgaygatgccactacactctagcctgggtgacagagcaagatcctgtctcaaaaaaaaagcattctaaaacaacgattacattgaaagggcaacattctatgggtgattttttttttaacttcactagaacatcagtaccaaaagcatgattattacaaatattacccccataagaccaaaatgcggatacgacattagttaatctatatagtttcaattctggctggacactgaattcaactatagagggttattttaattgcatgtaccttggccccaacccagacaccactaatcaaaatattgcacaggggattggtccctgacaaccactaatttaagacaggcatttctcttcccagcaacatcacattaatatctcccattcggttcctttttatcatttatataggttagggtagtggactcttctaaaacaatacttttattttctaattttcctactcctccttttttatactcataaaaacagcatactgcattatattaaaatgaaact

SEQ ID NO: 116832 - DNA, 591 bp, Homo sapiens
aacccactggagaaattcgagacgaaagagaagaaggaaaataatgggtgaagggaaggttaaaatttcttgctccagcactctctgttctcttccaggccttatcttactccttcagactctgtctttatttctcatcttttcttctcacttatgcctctgcctttccactctctctttctattggacactttctgacaccatggtagctatcactagtggcttgcaatctatgttcctaccacctggccagtagttgtagggaggaaggaggttggatgggagaattgaaggagactctgttgttggatcttgggctacacagagtagggagaaagatgtaccttgcaaggtwtaccaggcattttgtattggaactttgagttctttttcttctagaattattcatttatctgttcattaaacagtaaacaatgaaccccaggcagtgttttaggaactcacatagaaacatactttgttcttttcagtttcagagatcttttttatttaacttagaattatttcacttttgaatctcttaatttcagcatctgtatttatttcaaaccttttgggaataaagaggca

SEQ ID NO: 116833 - DNA, 497 bp, Homo sapiens
taaaattcttgtatttgataacatttgtacatgycttttatacctgaaagtctgttttgttcacattttcttttctagggtattataaatctttatcataaagcttcatcactgggaagtctaatgataaagtagttttctctcccctctaatccactggctctttatgccccctacttttttttttaactttaaaggtaaataattattctagaatttgtttatgccctacctctctcgattatctcatagctgtcatatacattatgtattcattcaatatcccaaaaaacaacttttactttaaagccatatattttaaagatgtaagaaaaaaaaaatatatatatatacagtatttcatatacactgagatatttactaattattattctctttcttctttcctaaaaatccaggttgccttctgctatctttgccctacattctgaagtgcttttttcagcatttcttgtaaggaaggcctgaagcaatga

SEQ ID NO: 116834 - DNA, 599 bp, Homo sapiens
acagaattctcaattcctgctgtttgaaatatatagtaattgttatatttgatatctaagcattaaaatctgaccagcatgcctctactgtcgaaacttaaggttgtttaaagtgggaatgggaaatatgtcagaagagagaggaagaagagaaacatacttaaaaaaaaaaaaaaaaaaaaaaaaaaccttaacaaaatctacctttccagtacatgttcattcagctgtaaccagttcatgtcaaaaagtcaagttaaaaatgttttccttccacccccttgccagtcattacccaggacccacaaatgtttttttcagcaatgccatataatttttaaagatctcaaagagcaaataatgcttctctacattcagagaaactaaatcaaactcagtcacctggcttctagaaaaacacaawttacagacaactcacagaaagtagcaaaaacaaggaacacaaaaactagcagcaaatattacctaaatggaaaatacatatatgtagacaacagtagcatgaaatttagaaataagggaaaggataatccaaattatttccgggaactattcaaaaaggtgattctccatagaag

SEQ ID NO: 116835 - DNA, 589 bp, Homo sapiens
acattggtttggcccgagaaagcaggacatctcaaagcaggggattataagtcatgggcgagccttaggtcttattgacaattggttgaaagagttaagctttctctaaagacttgaagtcagtacaaaggaatgcttgcattacgamaaggaggtcttctgtaggtcatgtgatgctacaccacagtcaggttggaaagtaagccacattgtatcaggttaattaaaaaaaaaaaaaaaaaaacatttagactggtgcagtggctcatacctgtaatcccagcactttgggaggccaaagcagaacatctgaggtcaggagttcgagaccagtctggccaacatggcaaaacccttctctactaaaaatacaaaaattagccaggcatggtggcacacacctgtagtcccagctagtcaggaggctgaggcaggagaatcgcttgaacctgggaggtggaggttgcagtgagctgagattgtgacattgcactccagcctgggcaatagagtgagactccttctcaaaaaaatttcaacatttaatgagattataaaatctcattgtaggcttaacttttcccttgta

SEQ ID NO: 116836 - DNA, 589 bp, Homo sapiens
acattggtttggcccgagaaagcaggacatctcaaagcaggggattataagtcatgggcgagccttaggtcttattgacaattggttgaaagagttaagctttctctaaagacttgaagtcagtacaaaggaatgcttgcattacgaaaaggaggtcttctgtaggtcatgtgatgctacaccacagtcaggttggaaagtaagccrcattgtatcaggttaattaaaaaaaaaaaaaaaaaaacatttagactggtgcagtggctcatacctgtaatcccagcactttgggaggccaaagcagaacatctgaggtcaggagttcgagaccagtctggccaacatggcaaaacccttctctactaaaaatacaaaaattagccaggcatggtggcacacacctgtagtcccagctagtcaggaggctgaggcaggagaatcgcttgaacctgggaggtggaggttgcagtgagctgagattgtgacattgcactccagcctgggcaatagagtgagactccttctcaaaaaaatttcaacatttaatgagattataaaatctcattgtaggcttaacttttcccttgta

SEQ ID NO: 116837 - DNA, 489 bp, Homo sapiens
cgcctcactctttacacacacggtcacttgccccgcgcactcccgagccctttccagccctgacacacagctgggattctcacttccgatcmgcggtcctgaacccgctcccagggcacgggaactcccttcgtggcgacgcagcaagtggcgaagcagcagcctctgcgctgcctcatctacatagaagtcgccctgtccgtgatgtcaccgacagtgccttgcccagtccccgtctgcctttctgccactcaaccgaccaatctgctgccagagtcgccaaggggaagtgacgtctgcctctccctttttccctcccgcccctgcgtctgttctctcccaaagaagctggtccttagcctgtgttaaggagcaacctttcggtggccagatggagccggggcatccttcttcaaataatggcttttaattcgcagactagaatgtttcggattacaaaagaaaccgtttctcttcacatccttatcc

SEQ ID NO: 116838 - DNA, 489 bp, Homo sapiens
cgcctcactctttacacacacggtcacttgccccgcgcactcccgagccctttccagccctgacacacagctgggattctcacttccgatcagcggtcctgaacccgctcccagggcasgggaactcccttcgtggcgacgcagcaagtggcgaagcagcagcctctgcgctgcctcatctacatagaagtcgccctgtccgtgatgtcaccgacagtgccttgcccagtccccgtctgcctttctgccactcaaccgaccaatctgctgccagagtcgccaaggggaagtgacgtctgcctctccctttttccctcccgcccctgcgtctgttctctcccaaagaagctggtccttagcctgtgttaaggagcaacctttcggtggccagatggagccggggcatccttcttcaaataatggcttttaattcgcagactagaatgtttcggattacaaaagaaaccgtttctcttcacatccttatcc

SEQ ID NO: 116839 - DNA, 489 bp, Homo sapiens
cgcctcactctttacacacacggtcacttgccccgcgcactcccgagccctttccagccctgacacacagctgggattctcacttccgatcagcggtcctgaacccgctcccagggcacgggaactcccttcgtggcgamgcagcaagtggcgaagcagcagcctctgcgctgcctcatctacatagaagtcgccctgtccgtgatgtcaccgacagtgccttgcccagtccccgtctgcctttctgccactcaaccgaccaatctgctgccagagtcgccaaggggaagtgacgtctgcctctccctttttccctcccgcccctgcgtctgttctctcccaaagaagctggtccttagcctgtgttaaggagcaacctttcggtggccagatggagccggggcatccttcttcaaataatggcttttaattcgcagactagaatgtttcggattacaaaagaaaccgtttctcttcacatccttatcc

SEQ ID NO: 116840 - DNA, 179 bp, Homo sapiens
ggactgcatatcatgcatgtacttaaaattatgggatggaggcaatgtgcaagcacacaagggccaaartaactaagcaacccacctatcaatcaaaaggcaaacactggctaacgattaggcatccttgggaagagaagagaaagaaacacacataaaaagacccaacgtacaccaaa

SEQ ID NO: 116841 - DNA, 179 bp, Homo sapiens
ggactgcatatcatgcatgtacttaaaattatgggatggaggcaatgtgcaagcacacaagggccaaaataactaagcaacccacctatcaatcaaaaggcaaacactggctaacgattaggcatccttgkgaagagaagagaaagaaacacacataaaaagacccaacgtacaccaaa

SEQ ID NO: 116842 - DNA, 179 bp, Homo sapiens
ggactgcatatcatgcatgtacttaaaattatgggatggaggcaatgtgcaagcacacaagggccaaaataactaagcaacccacctatcaatcaaaaggcaaacactggctaacgattaggcatccttgggaagagaagaraaagaaacacacataaaaagacccaacgtacaccaaa

SEQ ID NO: 116843 - DNA, 179 bp, Homo sapiens
ggactgcatatcatgcatgtacttaaaattatgggatggaggcaatgtgcaagcacacaagggccaaaataactaagcaacccacctatcaatcaaaaggcaaacactggctaacgattaggcatccttgggaagagaagagaaaraaacacacataaaaagacccaacgtacaccaaa

SEQ ID NO: 116844 - DNA, 594 bp, Homo sapiens
tgtctcagaaaaaaacaaacatacccatgtatcttggttgacactttgagtctgataacaccatgctcagcaattacagggcagggacacactccctggtgagcaaacagtagagttcagggaaaatcgctatcaagtataagtgtattatgaggtcagagaccaatttaccaaatagattgatgacagagttgctattcacagtttgaaagtgcagttattttaaaagacattcataaagttattgaatttgagtgagtatgcacttgtgtattctattcccctgggttttctgatacaagtttataaaaagaaagtgactagttacatcccacagctaattagtggtctgggctaggacgcaagcccatttttctttcctgagccttggcctgtttatatgagcctccctggaatggaagcgtttgcttacaggctgcccattaaaygctaaaagtaaaatagaagataaaagagtgacttgaagctcaagtattccaaaacatagtacactgatgaccagttcaacatttagataaagtactatagctctgaaatgaatatttgcttcatagcagtcaatggggaaatggg

SEQ ID NO: 116845 - DNA, 578 bp, Homo sapiens
tgtggtgttctatatattggctattagttcattattaataacattgttcaaaaattctatatccttagagacattttttgtctccttgatcaactactgagagaggtgtggtaacactttccattctaattttatatttgcttatttctcctttagtaaattaattttcctttatatatttcaaggctttgttatcagcataatcattcaaatttgctaaacttcccggtgagttggaacttttatcataataaaataaccttctatatctctcgtaatgctttttgcttttaagtatattttgcctgctatgaatatagctatacaagttttctatctgttatatattatttgcatgatttttctgtctccatgtttttactatcaacctatgtgtacccttatattttggatttgtctcttttaaacagcatgtagttgtgtttattaatcccatttgacattattttttaacttgagcctttagcttttaaaatcttttatgttttgtaattttaaaaatccttttattgatacatacyatttatacatatttatgggatacatgtgaccttttg

SEQ ID NO: 116846 - DNA, 594 bp, Homo sapiens
atttaatatacctattagcaattttaatttcttttcttgagaagtgtctatttaggtcctttgcycactttttaattggcttatttgtgtttttggcattgagctatacaggttccttatatattttgggtattaatcccttattggatatatagtttgcaaatattttctcccattctgtatgttgcctttgcattttgttgattgtttcctttgctgtgcagaagatttttagtttgatgaagactcgcttgtctatttttcttttgttgcctgtgcttttgctgtcatatcaaaaagtcattgccaagaccaatgtcaaaaaggcttttctctgttttcttctagagttttgtggtttcagatcttatgtttaagcaatccattttgagttgatttggtatatggtgtgagctaggggtcttagtctttttctgatgctgtaacagaataccaaagattggataatttataaacaatagtttatttgactcatggtctggaagctgggaagtcaaagagcatggcacctgcatctggcaatggccctcgtgctctattatctcatggcagaagggcaagacagaaaataag

SEQ ID NO: 116847 - DNA, 563 bp, Homo sapiens
ttaacttttaaaaaatatattgttattaagtattttaatttatatcagaatttactaaaactaaaaatatttcaaacatgtagtaaaataacattattctcacatttatacttttttgttctttggagagcaattactatatgatggaaagccatgagagcatctggcttcttggcaagtcccaaatacaaccggcaacctagagataytgaatggctgtcagatggttcagatgctatggatgagctttccatcttaactcatccacagttgcccccattctttatattggttgtattctgttttccacataaagtaaacccatcatttctatgcatgcacattatttgcttctttataataatacaattaattagacttgcctacaatctatttttatattttaaaatattttggaagtataatgtctttctgagtaaccatatttttttatatactcatagcagtgacacctataggcaagcttctaatcttcatggtgtatattttctgcaatgattaatagctttgctttgaataagaatttaattattttaggacaa

SEQ ID NO: 116848 - DNA, 588 bp, Homo sapiens
acatcgtttcaaggagcgagattgacttaaatcttatcaaatgtcacttcaagaagatgtacggcaagaccctcagcagcatgatcatggtaagcaggcattcccaatgctgaggccagcctgaaacccagacattcagggaaacctggaggctgtggccaacactacgtgagcccctcccttcccagtgggcaccatgtgcttgcattcatgaccatgtggtgtgtgcagggaacagcagaggtcagtgtggctggatcccaaggggaatggggggcagaggggagatgcagagaccagggcacagaggctcccctgtgtcccactcagaaagttggtttcacatttaagttatggttgctccttggaaaagacaccaaatccttgcagaagaagccacctctgaawagtcaatgagatgaactagtccggtaggaatcgggcccaccgctcaaatccagatttaagtagtcctggcggccaacttctaaggagataagtcagatgagcgccaatagactatctaaccagattccaattagcaaaagttctggagccttcaaaacacagactgattatcacgctgcg

SEQ ID NO: 116849 - DNA, 616 bp, Homo sapiens
atattatccagcgagtccatccttaggtttttatccaaggataaagaggtgaaaactcatatctaacaaatagacttctgaaaagatgaaaatagaagctttattcataaaagacaaaaactagaaataacccaaatattcattcacaggagaatgaataaacagactaggttgaatccatacaatggaatggtagcagacaataaaaagaaaatgaactattgatgccccctactgcacagcagaagctctgaatcgtgttcctgaatgaaagaagtcaggtatgaaagaataaacattgtatgattccatttatatgaaaatgaatctgtgatttaaaaatcagactagtattaggttggtgcaamagtaattgcggtttttgccttttttttttttttttttaaatagttgctttggggtttatggatggagtggcatggtagaggttagctgaagggggcatgaaataactttttgggggtgctagagtgttgtaaatcttacagtgggggagggacaggagtgcaggcatttgacaaaacacattgaattgtgaaatttaagatttttgaatttctttgtatgtaaattacctgccaataaaaacatgacg

SEQ ID NO: 116850 - DNA, 453 bp, Homo sapiens
gaattctgccaagcagtgacttgattcatgaacactcactggatgctgactctgtttctcttctgagtgctggggtagaggagaggagaggtggagcacagttcttgcttttatgagcttatgttctaggaagttcaagtatttttttcaggtagtatgaaatagcaggaagaggaagcaggctaaagggacacagagtgattgggggctattttaagtagaatgataaggaagagcctgtctagagagctatttgaacartgacctgactgaagggacaacagaaagcagtgctgacattacaggtagcaggatgactgccaagacagaaacgcatttcatatgtgtttgaggaacaaacagcaaggtgaccagcatggggagagtgaagaatgagggaaaccttgaatgagaataaagcaattccatcttggatgctaatctgccatattc

SEQ ID NO: 116851 - DNA, 458 bp, Homo sapiens
ttgattcatgaacactcactggatgctgactctgtttctcttctgagtgctggggtagaggagaggagaggtggagcacagttcttgcttttatgagcttatgttctaggaagttcaagtatttttttcaggtagtatgaaatagcaggaagaggaagcaggctaaagggacacagagtgattgggggctattttaagtagaatgataaggaagagcctgtctagagagctatttgaacagtgacctgactgaagggacaacagaaagcagtgctgacattacaggtagcaggatgactgccaagacagaaacgcatttcatatgtgtttgaggaacaaacagcaaggtgaccagcatggggagagtgaagaatgagggaaaccttgaatgagaataaagcaattccatsttggatgctaatctgccatattctgattaatcccagttccaacaattc

SEQ ID NO: 116852 - DNA, 438 bp, Homo sapiens
tagaacacaatatgtgttgtaaacctagacggtgaaatgatgacagcagccaagagacagatggagctggaacagtgaagggaaatgcaggggaaccaattttctcattttacagagtgaaaattcaagggaaactctaaccaataggtcaggatgtaaaagtccaaaaatactacttaaagctacagtggtagccaagagaggaactaaaaataaaatgtgtcaagcagaaactaaagtggargaaaagaaagaaacataaattaatcattgttgtaatggggagacaatagatactgtcaaaaaattataaatcaaggaacagaggtaaaatcacatcattgcaagcacggcagtaactaccagaagaaccaaaaagaggaagtttaaaaacttgtatctctaaggagaaaaacaggctgaggtggctgaagaaaa

SEQ ID NO: 116853 - DNA, 306 bp, Homo sapiens
gagtccagcccgagctacatggcaaaaccccgtctctaccagaaggattagccgggcatggtggtgcacacctgtggtcccagctactcaggaggctaaggtgggaggattgcttgagcccaggaggttgaggctgcggtgagccaagatcacactgctgcactgcagcctgggtgacagagtgagatgctgtcttaaaaaaaaaaatctatctatctayctacctacctacatacctacctacctacatacctacctacctacctatctacaaacacacacacacacacacacattattttcctt

SEQ ID NO: 116854 - DNA, 523 bp, Homo sapiens
tttctgcaccatccttagaaataacagtaaccaaagttttagcactatctttacagtgaaaaacaaggaatgtgccatccttcaaaaaaatagcaacaaaaaaaattagcattcatttctacagtgagaaaaaatgtccttatagggccagaaaatttgaagactcctaaagacagaagtcaaatggaatcaggttaaagaaggaaaccacaaactaaagcatatgcaaaaaagggactgttgaataaaaaaaggaggctcaaaggtgcttgaaacccagatgcagcagttactatggagaggaatgggccttggggcagctaatgagcaagtacccctctaaccccaacaggaatgctgcacctcagggagaacttggactgcmatcacctgggtcacagacacagagcaaagccctgggtaaaatgaggggaatcaggtatctactagacccagaaaacacctacatgctctagacataagcactacttctccttctccacagtcactggagaatatacct

SEQ ID NO: 116855 - DNA, 388 bp, Homo sapiens
gaattctgctaagggacagactgcctcctcaggtgggtccctaactctggtggctcctaactgggagacacctcccaggaggggtcgacagacacctcatacaggagagctctagctggcatctggcaggtgcctctctgggatgaagcttctagaggaaggagcaggcagcaatctttgctgttctgcagccttcactcatkatacccaggcaaacagggtctggagttgacctccagtaaattccagcagatctgcagaagaggggcctgttagaaggaaaactaacaaacagaaagcaatagcatcaacatcaacaaaaaggacgaccatgcaaaaactccatccacaggtcaccaacagcaaagaccaaaggtagataaatcca

SEQ ID NO: 116856 - DNA, 601 bp, Homo sapiens
tgttgccatttctcaaaatatttttggaactttctgtggaactgctcagaaaaatcattctgttatttcaatcactccctatttttgaccaaaaatggttttaccagtttgaaacatcattcacctgacttgacatcaaatttttttagggctcttaggtttgccctaaaaaaaaaccctattctcaaaggrtaaagattcccaaccactgagattcttttttttaagtcctcacacaatgaaaacaattctaaacctgttcccaaccatattttgagtaataatagcattcctgcaatacctggctgatccctcaagatgactagtctgaagaggccaattttggggatgggagaaaagaaagggatccattacggattcacgaaaagcctagataaaggcaatggagttaggctaattttgtatcccagtaaacactaatagaaacctattagaagccaaaaattctcgagtacaatcgaaaaatgaaaagccatcagtggttgctttggtcttttggggtggccagcaggggcagaatcccaggctggagaccccaggggctccttcttataggacagtgttttatacaaggtaagac

SEQ ID NO: 116857 - DNA, 507 bp, Homo sapiens
tacacattacaagataaatgcaaatttcagatgacaaaaaatattttaactatttgtatacccagaccaaaaagctaattccacagtgtgtcatttaaatatgagggaaaaaatsccggggcattgtaaaattgtataacacttacagaaggcaatttagcattacatgtcatatatacaaagacatttactctttggctttgaaattacttctcaaggtattcatcctacagatataaaggcacacaggcaagaatgattcataagcaaaacaagtccatgtacagatattttatatttgaaaatatctgaaacaacccatatgcccaccagttggggactgctgaactatattatggcacattcatctgatgaattttggtagctattcaaaataatggggtagctttttatgtatggatttaaaaagatcttcaatacatattggttaataaatcaaaaagcaaagtatagaacaaagagtacagtataatatatagtgtttcc

SEQ ID NO: 116858 - DNA, 303 bp, Homo sapiens
aaggagaaaatgtctctatgagattgagtacaacagcaactaaagggactgaggtcatgcattccacttctgagcttatggccacgtccaactcttacaaaaaataacctttctctcctgcactcttagtagtttggccaattttatatggacttgtgctattcctttactttttggcttaagcrtatatatgactcccaaggccatgaaagccctaaccatttggctgagggtggtattttcaggaactccaccagtgaagcagatactatgtattggacaacatcatgtgttcctaatgat

SEQ ID NO: 116859 - DNA, 657 bp, Homo sapiens
aagttttggaagaatgaaaacagaagccaaaatctgaggaaacaggaagaagaaaataatgaaagcatgagaacattctacttagagcatcctcctagattcacaaatcctgttactgttccagctcaaagtggcttgcagttcagcaaacaagagaaaccatttcaaggactagattacaattcatatctacaaaccattaactgagtactgtacacccagaaccatgataaacctgcctgtctctgaattgcaacaaacccttgctatcagactttttcagatgctgtttctttcctttctgattagaaagaaaacttccttaagcttgccctcttttttaccagctgctattgcacttttcatttaggtaatttcctctcagatgccaggattcagcttagtgcccacattttctgaagacattgccttgatcccttcccactcaccaaatatgtttcctctgtgcttccaatgcatcctatagtttcctattggtgtcatttatgacattgtattatgactacttattatcgtgtttgtcttcaccaacaaaccaaaaattctctaagtcagaaaccataggctatcttgtttacaaatagtacctmagtgcctagcctaatatttgatatattgtgagttaagcaaatattt

SEQ ID NO: 116860 - DNA, 583 bp, Homo sapiens
tccctaaaagcaatggcaacaaaaacaaaattgataagtgggacctgattaaactaaagagctcctgcacagcaaaagaaacttcaacagagtaaacagacaaacttcagaatgggagaatatattgcaaactatgtgtattagtcagggctctctagagggayggaactaatggaatatatatatatatgtgtatatatatatatatatatatatatatatgtaaaggggagtttattaagtattaattcacatgatcacaagttcccacaatagggcatctgcaggctgaggaggaaggagagccagtccgagttgcagaactgaagaacttggagtccaatgttcaagagcagcaagcatccagcacaggagaaagatgtaagctgggaggctaggccagtttctcttttcatatttttctgcctgcttatgttctaccatgctggcagctaactagaattgtgcccacccagattaagggtgggtctgcctttgactcaaacgttaatctcatttggcaacaccctcacagacacgcccacgatcaatactttgtatccttcaatccaatcaagttgac

SEQ ID NO: 116861 - DNA, 583 bp, Homo sapiens
tccctaaaagcaatggcaacaaaaacaaaattgataagtgggacctgattaaactaaagagctcctgcacagcaaaagaaacttcaacagagtaaacagacaaacttcagaatgggagaatatattgcaaactatgtgtattagtcagggctctctagagggatrgaactaatggaatatatatatatatgtgtatatatatatatatatatatatatatatgtaaaggggagtttattaagtattaattcacatgatcacaagttcccacaatagggcatctgcaggctgaggaggaaggagagccagtccgagttgcagaactgaagaacttggagtccaatgttcaagagcagcaagcatccagcacaggagaaagatgtaagctgggaggctaggccagtttctcttttcatatttttctgcctgcttatgttctaccatgctggcagctaactagaattgtgcccacccagattaagggtgggtctgcctttgactcaaacgttaatctcatttggcaacaccctcacagacacgcccacgatcaatactttgtatccttcaatccaatcaagttgac

SEQ ID NO: 116862 - DNA, 583 bp, Homo sapiens
tccctaaaagcaatggcaacaaaaacaaaattgataagtgggacctgattaaactaaagagctcctgcacagcaaaagaaacttcaacagagtaaacagacaaacttcagaatgggagaatatattgcaaactatgtgtattagtcagggctctctagagggatggaactaatggaatatatatatatatrtgtatatatatatatatatatatatatatatgtaaaggggagtttattaagtattaattcacatgatcacaagttcccacaatagggcatctgcaggctgaggaggaaggagagccagtccgagttgcagaactgaagaacttggagtccaatgttcaagagcagcaagcatccagcacaggagaaagatgtaagctgggaggctaggccagtttctcttttcatatttttctgcctgcttatgttctaccatgctggcagctaactagaattgtgcccacccagattaagggtgggtctgcctttgactcaaacgttaatctcatttggcaacaccctcacagacacgcccacgatcaatactttgtatccttcaatccaatcaagttgac

SEQ ID NO: 116863 - DNA, 583 bp, Homo sapiens
tccctaaaagcaatggcaacaaaaacaaaattgataagtgggacctgattaaactaaagagctcctgcacagcaaaagaaacttcaacagagtaaacagacaaacttcagaatgggagaatatattgcaaactatgtgtattagtcagggctctctagagggatggaactaatggaatatatatatatatgtgtatatatatatatatatatatatatatatrtaaaggggagtttattaagtattaattcacatgatcacaagttcccacaatagggcatctgcaggctgaggaggaaggagagccagtccgagttgcagaactgaagaacttggagtccaatgttcaagagcagcaagcatccagcacaggagaaagatgtaagctgggaggctaggccagtttctcttttcatatttttctgcctgcttatgttctaccatgctggcagctaactagaattgtgcccacccagattaagggtgggtctgcctttgactcaaacgttaatctcatttggcaacaccctcacagacacgcccacgatcaatactttgtatccttcaatccaatcaagttgac

SEQ ID NO: 116864 - DNA, 617 bp, Homo sapiens
agtcttcattattgtagaattgtctctctcttaaattctgtcaaattttgcttcatatattgtggaaatccattgttagatatacgtatgtgtttatcattattatatcttcctgctggattgaaacttttatcaacatacaatgccttttatctcataaccttttttttcaaaacttaaagtgtatactgtctgccaataataatatagtcaccccagatctcttttggttattatctgcatggtatgttatattagggttctctagattagttctgtccctctaaaggggagttaaktattaactcacacgatcacaaggtcccacaatagggcatctgcaagctgaggagcaaggaaagcaagtctgagtcccagaactgaagaacttgggagtctgatgtttgagggatccagcacaggagaaagatgtgggctaggaagctaggccagtctagtctttccatgtttttctgcttgctttatagtctagccacgctggcagctgattagatggtgcccccccgccccaagattgagggtgcgtctgcctttcccagcccactcgctcaaatgttaatctcttttggtaacaccctcacagacacacccaggat

SEQ ID NO: 116865 - DNA, 582 bp, Homo sapiens
actctccagccccatgacctaaactgccataccatggttccgtcttgaaactgggcccactactagagtgcatcttgcccttggggtgagtagccactgcctctcaccatccctgaggccctgcaatcattctaccatgctcacattagtgaccacagaaccacaacacgggacacccaaagcctgggaccaacaggaaggctgaaactgcagaattttaattcaaacaatatttcaccctcagggaacagacaaacctgcacagcaagaaagccaacatacagccagctagaatgctgcaccagtgcttgcccacgtcccaccaaacaaatagtaaggagggggacccatgtgtgccagaaactcaccaccagagagaccaccacacagccagccagtccactatgccagtrcacatttgtgcccagcccaataacctctggtgctcctgcacacagcaaaaccacaccactgctggtataagctcccaaagcctaggctactgatgcaatcacagacttcactgactgagattacacctgcacagagatcatgctactgagtccacctagaaacaaagcc

SEQ ID NO: 116866 - DNA, 592 bp, Homo sapiens
tccaaaaaaaaaaaacaaacttcagtttgtcattttattatttcatttttcatattatattttaataagcatatagtctcttctacttcaaataaatgccatctaatatttacttatgtttctaaatatatatatatatatatatayacacacacacacacacacacacacacacatatatattttttgagagggtgtctcgctctgttatatgtgtatatatatatatattttgagaaggtgtcttgctctgtcgtccaggctggggtgcagtggtgcgatcttggctcactgcaacctctgcctcccgggttcaaataagtctcctgcctcagtttcctgagtagctgggactacaggcacatgccaccacacctggctgattttcacatttttagtagagatagggttttgctgagttggcccggctggtctcgaactcctggcctcaagtgatccacctgccttggcctcccaaagtgctgggattataggcataagccaccacacctggcctctaaatatctttaagattacttgtatctagttcttgaatgccatgttcatgtttttatatactctatttttttaa

SEQ ID NO: 116867 - DNA, 612 bp, Homo sapiens
ggctctcaggtgctagataaagcaaggcactgtttagggtggtccttatattgacagtagctttggggatgyacttgtcacacaagatgtttgagttttttgggggagttaggattgttttgcatcttctttctatagccagtgaatatgctccttcagcatacacaccatgcatttgcatgatattgtttttaatctttgagattgcctaaacagcaacttatatataaaaaacaatcaatgaatacctgtaatgtgacttattttgtttgcctatagacattattctccatagacaactttaaacagctattgtagtgagatggatctgtttctatgttcatctctttcagcatttgtttcatccagagaaagtgcatggaagataaaagctctgtactagcaaattgaaataaaagtttatcttggagaaaataatttctgattacatttagtatgacctaattaagagcagaggataataaactgctttgttagtttcgcctcacacagcaacatgctggataacctttggcaattggtttaaccttgctggttctcacttttataaaaaacacctctaaccccagcagaggttagaggctggtggac

SEQ ID NO: 116868 - DNA, 607 bp, Homo sapiens
cacttattgggttgaatttcaacatatgaattttgtggggacaaaattcagtccataacaaccctgaatgcaaaatttgggttcaaggactcaatttcaattggtaagatacaatgagaatttcaatggacttctggaaaagaaaatttcttcctttacttctttactttaacctggatttagcatcaaaaaaatattggcaactattttggcwcacacgggatgagattgtctcccagtgaagtagattttagggaagtgaaatcaaggactggagaaaggaaaaaaatgatgttggaaaaacatctgggttctggagcaaattgcaccgaaaacacaccctaatattttaactccatgaatatgtaatttctattttgaccttcagaagtctgggttacattttctgtcacttataaataaaaaattcagagacaaccagcattggagtacagagtcaaaggaattttctctgcttctcctaggatgcacaatcactccttttctttctgcacaacgacttcattattctctctctgcagaccaggtaattgtctctttgatgcacatgtttgcaaatggacttcatatttccagagatacagta

SEQ ID NO: 116869 - DNA, 640 bp, Homo sapiens
ctggctggatgggtaaaaaaaaccaagccctgaaacccaattatatgctgcctatatgtacaagaagcacatgtagtatattctstctacaattatatatagtatattctctctacaagagaatcacttcactggtaagcactgcacagactgaaagtgaagagatggaaaagatattccgtgaaaataaagaccaaaagtgagcagcagtagctagatttatatgaaataaaatatattttgggtcaaaaactgtaaaaagagacaaagaaactcactgcataaagataagtggatttattcagcaagataatataacatttgtaaatagatatccacacaacaccagaacagccaactatataaagaaaatgttattagatttaaagggagtgatgaacctcaatataatgataataggggatttcaacaccccattttcaacaatggacagatcatctagacaggaaatcaacaaagaaacatcaaacttaaactgccctctgcaccaaatgggcctaattgacatttacagaacaatctatccaacagctgtagaatacacattcttctcagctaacatagtacattatccaggatagattatatactaagccaaaaaaaagtctttacagagtca

SEQ ID NO: 116870 - DNA, 640 bp, Homo sapiens
ctggctggatgggtaaaaaaaaccaagccctgaaacccaattatatgctgcctatatgtacaagaagcacatgtagtatattctctctacaattatatatagtatattctctctacaagagaatcacttcactggtaagcactgcacagactgaaagtgaagagatggaaaagatattccgtgaaaataaagaccraaagtgagcagcagtagctagatttatatgaaataaaatatattttgggtcaaaaactgtaaaaagagacaaagaaactcactgcataaagataagtggatttattcagcaagataatataacatttgtaaatagatatccacacaacaccagaacagccaactatataaagaaaatgttattagatttaaagggagtgatgaacctcaatataatgataataggggatttcaacaccccattttcaacaatggacagatcatctagacaggaaatcaacaaagaaacatcaaacttaaactgccctctgcaccaaatgggcctaattgacatttacagaacaatctatccaacagctgtagaatacacattcttctcagctaacatagtacattatccaggatagattatatactaagccaaaaaaaagtctttacagagtca

SEQ ID NO: 116871 - DNA, 576 bp, Homo sapiens
tacagaaacagcaggattggttacagctcagcattttccttattttaacttgttttgaacagttgactrcctgtgacttgttgaggtatggctgctgggattggctgagaccattgtgcctgtagtaccttatttaactactccataacttaacccagtagaatgagtttccctatcactggagatgtcctcagggatatcacataaaggaaatacattttctttcttttttttttcttttttttttttttttgagacagagtcttgctctgttgcccaggttggagtgcagtgatgtgatcttggctcactgcaaacctccacctcctgggttcaagtgattctcccacctcagcctcctgagtagctgggattacaggcgtgtgccaccacgcctggctaatttttgcatttttagtagagacggggtttcaccatgttgatcaggctggtctccaactcctgacctcatgatccacctgcctcagcctcccaaagtgctaggattacaggcataagccactgcacctggccaggaaatacattttctaataatttctttgctattgtgacagc

SEQ ID NO: 116872 - DNA, 576 bp, Homo sapiens
tacagaaacagcaggattggttacagctcagcattttccttattttaacttgttttgaacagttgactacctgtgacttgttgaggtatggctgctgggattggctgagaccattgtgcctgtagtaccttatttaactactccataacttaacccagtagaatgagtttccctatcactggagatktcctcagggatatcacataaaggaaatacattttctttcttttttttttcttttttttttttttttgagacagagtcttgctctgttgcccaggttggagtgcagtgatgtgatcttggctcactgcaaacctccacctcctgggttcaagtgattctcccacctcagcctcctgagtagctgggattacaggcgtgtgccaccacgcctggctaatttttgcatttttagtagagacggggtttcaccatgttgatcaggctggtctccaactcctgacctcatgatccacctgcctcagcctcccaaagtgctaggattacaggcataagccactgcacctggccaggaaatacattttctaataatttctttgctattgtgacagc

SEQ ID NO: 116873 - DNA, 576 bp, Homo sapiens
tacagaaacagcaggattggttacagctcagcattttccttattttaacttgttttgaacagttgactacctgtgacttgttgaggtatggctgctgggattggctgagaccattgtgcctgtagtaccttatttaactactccataacttaacccagtagaatgagtttccctatcactggagatgtcctcagggatatcacataaaggaaatacattttctttcttttttttttcttttttttttttttttgagacagagtcttgctctgttgcccaggttggagtgcagtgatgtgatcttggctcactgcaaacctccacctcctgggttcaagtgattctcccacctcagcctcctgagtagctgggattacaggcgtgtgccaccacrcctggctaatttttgcatttttagtagagacggggtttcaccatgttgatcaggctggtctccaactcctgacctcatgatccacctgcctcagcctcccaaagtgctaggattacaggcataagccactgcacctggccaggaaatacattttctaataatttctttgctattgtgacagc

SEQ ID NO: 116874 - DNA, 462 bp, Homo sapiens
gccttgcctctaggaaagacagggctcagtctctccaccagctgaatcagatcccttctccgggaaaccactgaagcttgagtggcttatcataaagacagaaaatgggtactactctagtgctctaacaagatgggtgacagcatttgccacctgcatcactgcagctgatatggtccttgatctactctttctgacattgttcattcttccactattcattccatttggtaagctgctccagtaactttccagtaaagtttctttattctgaaattagccagaactcatttctgttctgtaacaacacacacacacacacwctctctctctctctctctctctctaattgattaaaatacctagaaaaaaattaaaattattagagaaaatagaaaattaaagttttaaaagataagaaaaaatcaaaatgataatgacagtgaacttttatggagtctt

SEQ ID NO: 116875 - DNA, 462 bp, Homo sapiens
gccttgcctctaggaaagacagggctcagtctctccaccagctgaatcagatcccttctccgggaaaccactgaagcttgagtggcttatcataaagacagaaaatgggtactactctagtgctctaacaagatgggtgacagcatttgccacctgcatcactgcagctgatatggtccttgatctactctttctgacattgttcattcttccactattcattccatttggtaagctgctccagtaactttccagtaaagtttctttattctgaaattagccagaactcatttctgttctgtaacaacacacacacacacacactctctctctctctctctctctctaattgattaaaatacctagaaaaaaattaaaattatyagagaaaatagaaaattaaagttttaaaagataagaaaaaatcaaaatgataatgacagtgaacttttatggagtctt

SEQ ID NO: 116876 - DNA, 594 bp, Homo sapiens
cacacaactagttaacattgtgttacaactgcctacaggatttgtacagtacagtagagttcacagcccagaggcaacaaattataccatataacttaggtatgtggtaggctataccatctaggtttgtatgagtacactctatgacattcacacaatgatgcaattgcctaaaaacacatttctctgaacacatccccatcattaagcaatagatgactgtaattgtctttytcaagcataagagaatctcacgaaggtagaattatgtcctgatacatctaatcaaatgaattaggaatagctgtaagcctaaatgagttcaaggattattaaatttttttggatcatgaatcctttgagaatgtgttgaatgctatgaacaaggtaggcatggtatttaccctatgaaacctaaataattttgtggaaatcaacatcagaggaggacctgccatgactgtggtgaaacaagacaaaaacaagatcacctcataatcttgcttgaatagaaatttaacaaggggatgggggaaaaatactgtgtaaccacaaaaataaccaaacatcctgctctcctggataacttctcta

SEQ ID NO: 116877 - DNA, 593 bp, Homo sapiens
atgggagtttaggtttatgatgatgaaagtgtgtgtggaaggcacatggcaaaacgttgacttttgctactcagtttttcttataggtcacaggttgaattctttttatcaaaatctgcatgttcttgccagttgtggtggctcacacctacaaccccagcactttgggaggctgagaggcaggagcatctcttgagcccaggtgtttgagaccaccgtgggcaatatggtgaaacctgtctctaataaaaatacaaaaaattagctgggcattgtggtgtgtgcctgtagctctaactacttaggaggctgaggtgggaggattcttgagcccgggaggcagaggttgcaatgagccgagatcgcgccattgcactccagcctgggcgacaaagtgagaccctgtctaaaaataaaattaataaaataaatctgcatgtctttctataaataggaattttattttcataaataagactaaaatagtggtctggggggaattaacacagtgggaggggaagagtaaaaaamgtgtatggttctaaaaagaacttacaaggttaaaatcatggtctattacttttatagtaggt

SEQ ID NO: 116878 - DNA, 593 bp, Homo sapiens
atgggagtttaggtttatgatgatgaaagtgtgtgtggaaggcacatggcaaaacgttgacttttgctactcagtttttcttataggtcacaggttgaattctttttatcaaaatctgcatgttcttgccagttgtggtggctcacacctacaaccccagcactttgggaggctgagaggcaggagcatctcttgagcccaggtgtttgagaccaccgtgggcaatatggtgaaacctgtctctaataaaaatacaaaaaattagctgggcattgtggtgtgtgcctgtagctctaactacttaggaggctgaggtgggaggattcttgagcccgggaggcagaggttgcaatgagccgagatcgcgccattgcactccagcctgggcgacaaagtgagaccctgtctaaaaataaaattaataaaataaatctgcatgtctttctataaataggaattttattttcataaataagactaaaatagtggtctggggggaattaacacagtgggaggggaagagtaaaaaacgtgtatggttctaaaaagaacttacaakgttaaaatcatggtctattacttttatagtaggt

SEQ ID NO: 116879 - DNA, 561 bp, Homo sapiens
gagaagagaacagctttaaagactatttttagcttgttagcacagataaggaattcttaggattggagaactaatcaggagatcaaggtgaaaaggaaatgaayatgcagaacggcagaaaggagacatggcagaactgagggccagaaggaggagcagctccgcacccatgaagctgtgtgaagacatgaagcacttctttggggagaggcctccactgttccttgcgccacccagaagatagcatgaaactgctggcactagggaggaatcttgttgttttgcagcaagaaaaagtgagaagcaggcctggtgagagcagatctgcgggcaggtctgtgggtggacttctggggcttgttctcaagttggggtggagtgttcgaccagactctgcaagctcactgatgggaatgggtgcctgttacctcatgtgggcaccaaacctctgcgcttctctccagagatcttgtggttctgggtgtgaagctgaagattcagaatgatacgttttcatctcttcttgcagttgaagggtcttcatttgaaagagaacaaaga

SEQ ID NO: 116880 - DNA, 561 bp, Homo sapiens
gagaagagaacagctttaaagactatttttagcttgttagcacagataaggaattcttaggattggagaactaatcaggagatcaaggtgaaaaggaaatgaatatgcagaacggcagaaaggagacatggcagaactgagggccagaaggaggagcagctccgcacccatgaagctgtgtgaagacatgaagcacttctttggggagaggcctccactgttccttgcgccacccagaagatagcatgaaactgctggcactagggaggaatcttgttgttttgcagcaagaaaaagtgagaagcaggcctrgtgagagcagatctgcgggcaggtctgtgggtggacttctggggcttgttctcaagttggggtggagtgttcgaccagactctgcaagctcactgatgggaatgggtgcctgttacctcatgtgggcaccaaacctctgcgcttctctccagagatcttgtggttctgggtgtgaagctgaagattcagaatgatacgttttcatctcttcttgcagttgaagggtcttcatttgaaagagaacaaaga

SEQ ID NO: 116881 - DNA, 399 bp, Homo sapiens
aatcatgtaatcagataatagagttagattactgacttatttattttttcctttcccatttggatgccttttatttatttttcttacattactacactggctagtgcttccaatacaatattgaaaagacgtggtgagaatgaaaattttggctttgttccagatcyaatcaggaagcatttagtctttcacaattaattaaacgtttgttttaggtttttcatagatgtgctttatcaggtttacaaagttcccatctattccttgtttgctgatagtatttttttttctaatcaggaataaatgttggattctgtcaatttattttttttttggtctattgagaaaatcatacagatttacagattttattttttagttagttaatgtggtgaattc

SEQ ID NO: 116882 - DNA, 616 bp, Homo sapiens
aaaattttcaaacatacgtaaaagttgaaagaattttatagtgaataccccttatcccaaagtgattctacatttgacattttaatgtacttgcttagtaacgtctattcatctatccatccatccttccagccatcaatccattttattatttttatgaatatcaaagtaagtttttgatcagtaaacttcactttatacacacaaaatagagttgaatatttgtttagaattctttttctttaaagtaaacataacatattaaaaccacaaaacttacgtataccatttggtgagttctgacaaatgcattcatctgtgcaaatcaaatacctatgatatgaaatattatcaacagaaaaacttcccccatgcaccttcccaacaccttcaaaattaacctctgttctgcttttttccccaaaatatatttgttttcaatttcagaactttacacagaatcaattctttatatctcttttttttcattctctatttttgagatttacccatgttgtttcaagttgcaygtataagttcatttgttttgggggagaagtagtaaaaaattgcgtgtatatatcacagtttgtttacgcattcttatattgatgga

SEQ ID NO: 116883 - DNA, 562 bp, Homo sapiens
cttgaccacctggaagatatggaaacatccccaccccccactgagagatgagactcccatgggtgatggtctaattacaaaatgggctgattagctttgggttgccttgctatgaaatgcaccgtcggtaaaagcaccacactgtcttctcccgtaatatttccctccttttggggatccaggatccagtataaaatggcrcacttaactctgggggtttgtctttgccttcagctctttatttgctgcttatttggccccagaaatgctttcctggccctcttcctccaagggctccaccctgaagccagtgatccaattaagaaactggcaaatgaaaaatcttgcaaatgccaaatcttctacctgtatgtgttgtgtgtgtgtgtggcatttatatataaaagagctctgattaattggcttagaaagataagcacttaaatattttgtcacaaaaatagaaactttaatgccttttgttctcgtgactttagtaatcttttggaaataaagacacttttaaagattattggtaaataaaaagccttgaaaatgtaga

SEQ ID NO: 116884 - DNA, 595 bp, Homo sapiens
gtgactaaatggataaacacttttaaataagattatatctctttctgagctctttgaggatgtgtagagtacctcactgattttggtattttgagggcctgaaccctctgtagcaggcactcaacaaatgtagaaacacatgttaatcaagcactttataatacggttctatttttaaarcttattttatacaacttaattttatcacttataaaaacaaatgcaatattaataaaataatctttggaagtacaaaatgcatatataaaaggaaacataggcccggcgcagtggctcacgcctgtaatcccagcactttgggaggccgaggtgggcggatcatgaggtcatgagatggagagcatcccggctaacacggtgaaaccctgtctctactaaaaacacaaaaaaattagccgggtgtggtggcgggaggctgaggcaggagaatggcatgaacccaagaggtggagcttacagtgagctgagatcatgccactgcactccagcctgggcaacagagcgagactccgtttcaaaaaaaaaaaaggaaagataaattaccgaagattacacaatccaaaaatgagcagtg

SEQ ID NO: 116885 - DNA, 548 bp, Homo sapiens
ggtaactactctgtggtcacatcctgtttgctagttgagcacccatctaatggtgtctttgcctctatagcatttcctccagattactgatgactacagcacatgggaaagcaccaaaagccagggtacaaggcaaccagagtgtatcagctgcttcccttcaattcaccaggccgaccctaaagtcctaagtccagactagccatgaactattttctcactgttaccctagtctccttaaaactgttctcaaaactatttttctactactttgctgagtttrgaataaataccaccttgcatttgctaggtctttgagttctgattgtggcaattagctttagcatcctcttttatgtcctcttataaaaacgatccaccacctagtccatatctcaatttcatcttcaatatggctccagactcctccttccctttgtctctccttgttccaggttgcagtcctagaatgaacacagagcaaaattcagacactaggctatttctttcctgcagtattttttcccagcatctgacaagttcatagc

SEQ ID NO: 116886 - DNA, 527 bp, Homo sapiens
tgttcctccacaattttttccatctcattaaaatatactatagtccattcagttgctcaaaccaaaaatactggcatcatcttccttattcctcacatccagtgcatcaatacactcygtagagctcacctctaaagcacatcccaagtcaatgcttttgcccatctccacttctaccaatctaatcctcatgtttccctacatctcatctgtccctgtcttcattctccacgtggtaaccgcagttatcttgaaacatatgtcaggtcatgttattctcctgatgaaaaccctccaatagtgacatagtttggatatttgttccctccaaatctcatgttggaatgtggtccccaatgttgaaggtggaacctggtgggaggtgtttggtcataggggtggatccccaaggagggcatcaaaccattaatgaatggggtaatgagtgagttctcattgtattcattcacagttgtttaaagagtctggcacttcctctattctctcttgctccctctattgccatg

SEQ ID NO: 116887 - DNA, 488 bp, Homo sapiens
caaatagtagctcattggtcctagaacaaaatataatcccttttctgtaaagttaaagcccatgctaaactgtgattctagtttgtcctcacctataaaattctagtcaccaacctttttatttgccaggcttgccttgcctagagcctttgtacattctcatcccttagtctggaaagctttctctcttatcttcatatggctcattcgctcttttcacttakatctcggcttaaatatcaccaccccaaagaaccccttcttgatattctaatccaaggaagccaatcagttactttctgtcacatcaccatattttaatccactgcatagtactttccttatctgacattttctttcttttttagtattaactattttataacttaaaatgtaaaaaaaaaatacttataaccaaatactgcttataactgagacttccatattctctattatagttttggtaaatattttgtctgacttttaac

SEQ ID NO: 116888 - DNA, 470 bp, Homo sapiens
aaaacctacacaaagagatatagtcaacagcacaataaattaaaatgaaataatttaaaaagttttgataatccaaaagaggccaggaaaggggaaaacagattaatgaaaaacaaaaggaacacacacaattaaaaataaaaatacagacaagtataaacatatcaataattgtattaaatataaatggtttatagacatcaatcaaaaacagagattatcaaaatggattttaaaaaaaatcaatgttccctcaaccctgactgtatgctttctacaagaaattcacttcacgtawaatgatataggtaggttaaaagcaaaaggttgggaaaaagatataccacagaaatgcaaattaaaatgtcacttgcgtctgcttttcctgggaaaatatctgctgttcaagaaacctgacactgcagtatgaagtaaatgcatttggttacctaagtgaaatacttaactta

SEQ ID NO: 116889 - DNA, 446 bp, Homo sapiens
tcaatgttatcagaatttgggaaccactgcattrcacaattctctttcttggatttgacttaattagaagttctatctctagacagagttgagaagtatttactattatttcgaagagccagagaaactttgtatggtcagaaaaggttaacctgctttcttttcatcattatatccacttctttgaaatataagtgaacaagaactttgaattttcttgtttgggaagatgtttcttttgggtatccgcatgttactttggccaacttcaggctacaattctccaaaatacaggcctgttaagattattctaacttcatatgaatgagattgttggttggcttggttatagtctgtaaagacatcctaatgatattaacaaatccatgatcagagtatatttcgcaggtccaaagtcatcttctctcctaggagtgggggtggtg

SEQ ID NO: 116890 - DNA, 446 bp, Homo sapiens
tcaatgttatcagaatttgggaaccactgcattgcacaattctctttcttggatttgacttaattagaagttctatctctagrcagagttgagaagtatttactattatttcgaagagccagagaaactttgtatggtcagaaaaggttaacctgctttcttttcatcattatatccacttctttgaaatataagtgaacaagaactttgaattttcttgtttgggaagatgtttcttttgggtatccgcatgttactttggccaacttcaggctacaattctccaaaatacaggcctgttaagattattctaacttcatatgaatgagattgttggttggcttggttatagtctgtaaagacatcctaatgatattaacaaatccatgatcagagtatatttcgcaggtccaaagtcatcttctctcctaggagtgggggtggtg

SEQ ID NO: 116891 - DNA, 446 bp, Homo sapiens
tcaatgttatcagaatttgggaaccactgcattgcacaattctctttcttggatttgacttaattagaagttctatctctagacagagwtgagaagtatttactattatttcgaagagccagagaaactttgtatggtcagaaaaggttaacctgctttcttttcatcattatatccacttctttgaaatataagtgaacaagaactttgaattttcttgtttgggaagatgtttcttttgggtatccgcatgttactttggccaacttcaggctacaattctccaaaatacaggcctgttaagattattctaacttcatatgaatgagattgttggttggcttggttatagtctgtaaagacatcctaatgatattaacaaatccatgatcagagtatatttcgcaggtccaaagtcatcttctctcctaggagtgggggtggtg

SEQ ID NO: 116892 - DNA, 446 bp, Homo sapiens
tcaatgttatcagaatttgggaaccactgcattgcacaattctctttcttggatttgacttaattagaagttctatctctagacagagttgagaagtatttactattatttcgaagagccagagaaactttgtatggtcagaaaaggttaacctgctttcttttcatcattatatccacttctttgaaatataagtgaacaagaactttgaattttcttgtttgggaagatgyttcttttgggtatccgcatgttactttggccaacttcaggctacaattctccaaaatacaggcctgttaagattattctaacttcatatgaatgagattgttggttggcttggttatagtctgtaaagacatcctaatgatattaacaaatccatgatcagagtatatttcgcaggtccaaagtcatcttctctcctaggagtgggggtggtg

SEQ ID NO: 116893 - DNA, 590 bp, Homo sapiens
ttttccttagccttatgcaaatcctggaagatatcaattctgagggctggggtgtatcttgatcacctttggaatctaccactgcatggagcacagcacttaccacytagtaggtaagcaacaaatgcttgcttgtcaattgatttattcagtagactcagtgctatgtgtacattaaacacctggggagctttaaacaataaacgagcaaaccaacaaatgctgcatcagcctagaccaacacaatcctgatctctggatgtgggatccccgcactggtaagtttgtaaagcaccacaggtgatactagtgcatggggaagattgagaactactggattcattaacctgttgctttacttggctacagttctgtttgtttccaagtttggaagaaacataattgaatcattttgaggaattccaatccctgacaagatgccagtgctattttacagcaagagtagacgaggaaggctatactacgtggtcctgggcaagttatttaaattctctgtgcctcagttttctgaaccgtaagatgggaagaataatagtaactacctctggaggctgttgtaaaagttaaat

SEQ ID NO: 116894 - DNA, 644 bp, Homo sapiens
gaagtgctgggtagttgtttatttccttcaacatactyagtcttaaaaagtgattgtatttgggcccatgttctggagcaagagttgaggtgtatttgtatctgagggaaacatttctgcctggagtctccctccttgagactgccagattctgcccgagaagctaaacgttgcatttcttcagagtctctgaccttctgccattgttcttatgcactgttaattgttgttaatttctaacacatcattaattatttgccattaaagatgtgggagacggaaatgcccttcactcatgggtggtcacaggaattaaccattaataattacaaaatgtgttactttaaatgtgaaaagtgaatttgagccatttgcatgaaagttgctgtgtttctgtggctgagctgtgacacactggcagcgtgggtggggataccatgagtgatcccgtcatggctggggaagaagccatctcctcttgcttccttaatgactgtcacatttggcctctggagcatgatgtacttttcagagaaattttctctttacaattttctcctcctttgcacaagaagcctgaagtggaacagttttctctgatgtcacagccccaaatcagtcacacaattagtacttaccgtgga

SEQ ID NO: 116895 - DNA, 517 bp, Homo sapiens
gaatgaattctataaacattttgaaaggaaagagttcgaatgaagggaaaggtagggaagaaaagctcatgattttgaggagttaagcctgggaaacaaaagtgcttattcctttgataataaatggaaggggaatgtagcttgggttgactggtggaagatgatagatttgaacttgcatgtatagtgtgttcatctccaagagatgttgatgccaggagatcttcctttcctttaaaactgcagccaggatggaccaatatttttgttgtgtttccacatatccacaaggatacacgccagcatgtagtgttttttttttttcagcctaaaggttgtagtcattctccttcagcctactgtgtggcagctttcttcttattcggtgctttccattctcatctcaagtcctggacatctgagctgtgcatatgagtgcgcgcgcrcacacacacacgcgcacacacacgtgtgcacacagactagagaccctgattgcatgctttctccccatgga

SEQ ID NO: 116896 - DNA, 468 bp, Homo sapiens
agtgagtaccaacatatacctattagaatggctaaaatttttaaaaacctgaaaacacagagtgctaaacaggatatagaacaagtagaccctcatrtattactgtggaaatgcaaaatgatagttactttgaaaacagtttttggcagtttcttacaacctaacaatcctactcctttgtatttacccacatgaaatggaaacctatgttcacacaaaaacttatgactgcttatagcaactttattcataattgctaaaaactggaaataacccaaatatccctcaactgggaaagagattaaacaaactggtaagtctgtaaaatggatccataaaactactcagcaataaaagcctcaaactatttgtagtttgttaacataacaaagtaccacagtctggatgacttaagcaacagaaatttatcacctcaccgttgtggaggctgggtgtctgagatcaagg

SEQ ID NO: 116897 - DNA, 468 bp, Homo sapiens
agtgagtaccaacatatacctattagaatggctaaaatttttaaaaacctgaaaacacagagtgctaaacaggatatagaacaagtagaccctcatatattactgtggaaatgcaaaatgatagttactttgaaaacagtttttggcagtttcttacaacctaacaatcctactcctttgtatttacmcacatgaaatggaaacctatgttcacacaaaaacttatgactgcttatagcaactttattcataattgctaaaaactggaaataacccaaatatccctcaactgggaaagagattaaacaaactggtaagtctgtaaaatggatccataaaactactcagcaataaaagcctcaaactatttgtagtttgttaacataacaaagtaccacagtctggatgacttaagcaacagaaatttatcacctcaccgttgtggaggctgggtgtctgagatcaagg

SEQ ID NO: 116898 - DNA, 561 bp, Homo sapiens
aaggcaattctttccttagggtgatagaaatggaaggcctagattcattcccacaacaccaccacccaccacttataatctattagcactgcccctgtaacattttaaataacacttaaaaagtattacacgaataataaaamaagaataaaattattcttactttaagaatgtcaactctgggataaatggatgaattttgtaccaaagagaatgactatataaacctatcttgtagatggaatggattaggcagaaagaaggttataaagacttttccacttctacatctatctctgtgaactccatatctgcatccaggccatcacacacaggggagcttttctcccctctatctttcttccagacaatacagaaggaataaaatgtccactgaaaacattgtacatactttggtataagaaatcacacaataagacattggtgctgcctacaagcgtttgctgcatgacatactgttcatatagatgtaatgtttcatgacaaagcaaaatgtatcctgtataaatgatctatttaagtgtgaaatagaaaacacac

SEQ ID NO: 116899 - DNA, 602 bp, Homo sapiens
tactatatgctgctgtgaagagggtagagctctgctcagcaaacctcatctttctgcagatggagctggtccacggtgggctggagcactgctggtgatcctttgtccagcatcctgtccagggaaaagctgcctttgttcacttgtctgaccaggcaccagattataccctccaactaaagatgaactgggaactgtagttgtcctagaggtaggggagaaaagaagggtagtggtgggagagcaaaagcagagaaggagaggctggaggtatggagctcatctggctttatctggatattgctctcctggactccaaatggaaaatagaactgaacacccatgattaaaaaatgcaatacacgctaagaaagtctaaagtaatttacaccaggcattaaagtattttgcatgagaatatagtgtgatgtagacaacccaagaattatgtctttcattaaaaggtttgcaactcagtgtgctgtgatataactatagcagtttttctgtcttggtgatggttttttattttaaacactgycttacaaatcgaggaatgcaaatgcgtcgggaacactcagcctctgggttttaacttattg

SEQ ID NO: 116900 - DNA, 530 bp, Homo sapiens
gcagcattctcagaaatttctttctgatgtctgcattcaactcatagagttgaagattccctttcatagagcaggtttgaaacactctttctggagtatctggatgtggacatttggagcgctttgatgcctatggtgaaaaagtaaatatcttcccataaaaacgagacagaaggattctcggaaacaagtttgtgatgtgtgtactcagctaacagagcggaacctttctttttacagagcagctttgaaactctatttttgtggattctgcaaattgatatttagattgctttatygatatcgttggaaaagggaatatcgtcatacaaaatctagacagaagcattctcacaaacttctttgtgatgtgtgtcctcaactaacagagttgaacctttcttttgatgcagcagtttggaaacactctttttgtagaaactgtaagtggatatttggatagctctaacgatttcgttggaaacgggaatatcatcatctaaaatctagacagaagcactattagaaac

SEQ ID NO: 116901 - DNA, 599 bp, Homo sapiens
atggataagacttttaagactttttttgaagaaatcatttcaaactagaataagcaagaggaatagatcaaaacaaaaaggaaaacagtgaaggtgatatacacatcctcttactgaaaattaattttaaagaactttaaattaattttaaagaattaattttaaacactaaaactcagagtcatcaatgtgtctggatacggattcatttttatttcttctgctcagcacttgttttatactttaaattagagtcctcaagtctttcctctgcaatggaaattttatggcatcatgtaaagtatacaaatagtgaaggcattgccagtgttttcttstgtataagtattctctaccattagaatggaaacgtcatcaaagtgggcccttagtgagagtttgctgagtggatgaatactgtccttaaatatggcttctccattctctttggactccttttgaaactcctatcatacatgtgttggggactttcttgactggtctttctgacttttaaatccttttatctggataaattcatcattatctcccaattgactaattctttgtgtttattgcatttacacttcttttttata

SEQ ID NO: 116902 - DNA, 495 bp, Homo sapiens
atggataagacttttaagactttttttgaagaaatcatttcaaactagaataagcaagaggaatagatcaaaacaaaaaggaaaacagtgaaggtgatatacacatcctcttactgaaaattaattttaaagaactttaaattaattttaaagaattaattttaaacactaaaactcagagtcatcaatgtgtctggatacggattcatttttatttcttctgctcagcacttgttttatactttaaattagagtcctcaagtctttcctctgcaatggaaattttatggcatcatgtaaagtatacaaatagtgaaggcattgccagtgttttcttgtgtataagtattctctaccattagaatggaaacgtcatcaaagtgggcccttagtgagagtttgctgagtggatgaatactgtccttaaatatggcttctccattctctttggactccttttgaaactcctatcatacatgtrttggggactttctt

SEQ ID NO: 116903 - DNA, 452 bp, Homo sapiens
aacttctttgtgatgcgtgcattaatctcacggagttaaacctttcttttgattgagcagattggaaactctctttttgtaggatctgcaagtggacatttggcagggctttgagkcctgtggtggagaaggaaatatcttcacataaaaagtagatagaagcattctgaaaaagttctgtgtgatgtctgcattcatcccctggagttccaactttctttaggagaaccagttttcaaatactctttttggagaatctgcaaggggacatttcaagcaccttgaggcttaagttggaaaaggaaatatcttcacacaaaaaaacagaagaattctgataatcttttttatgatgtgtacgttgagctaacagagttgaaactttcttttgattgtgtagtttggaaataccctttttgtagaatcggcaagtggacatttggagcgctttg

SEQ ID NO: 116904 - DNA, 389 bp, Homo sapiens
tcaataaaatgtgcatttcttcatggatactctttgaatcatctaaatggagactctttatagaartattgaatcattaattcttccaactattgtactcctttccaacatactgtcttactgatttttcactttttcctatttatatccattttgttctactaatccgtctgtcattggccttcttctatagccaacctcaaatttcagttcacactagctgtgaacagcactcaaattgctgctgtattcttaaaatataaatttacttcataaagcaaaagtgaattatatgcatgttacaaaaaatattcctagcagagataagatggggtggtatttgctgggatgtgcaacatcgttttttccaaattaatttctctcagaat

SEQ ID NO: 116905 - DNA, 604 bp, Homo sapiens
attgggagcatttgtaattagggacattcctgtttctacctctggttttctgaacctgtagattcttcctatggaagaagaactactatataaagatctgtgatagaatatatataaaagatggtgccccctgcattcagaatgtctcctttagcatagtgtctcagttgcatctttagaatgtttctccagggctccatgagtctagctgcttcttgaagagtgtatgtaatacaaatagtagattacatggtcatggacccacttctgcccatcytttgctgtgaacaaggaaccctggtcagatgctataccatgtgggattttatgcctgtggatcaggaattctggaagcctcagaaaagtggtcctggctcaggctctgtgaacagaagtgccaaacccagccctggaataaggatatatccctctgaggatgaaaaggtggtcattcaaggtcaaaagacttgccatataagagtctcattattgatttatgctgttgaaaagtaggacagtcagaggcagcagtagttagaaaaaccttgatacatagaagtccaggctgtggggcccatatgtatcgtccatctctgccaacatg

SEQ ID NO: 116906 - DNA, 576 bp, Homo sapiens
tatcatatttaggtgggagtataaagtggataatcagtttggattgcagtttggcagttaaacatacacttacaatttgacctagaatattccattcttacttactgaagagaaatgaaaacatgtgcatacaaatgaacatagcagctttacttgtaataatcaaggaatagaaacatttgtaaatggttcaccaacaggctaaaggataaacatattgtagtatttccatacaatagaawaaaatagaaagaaccactgattttgcaacataggtgatcctaaaatatattgagagaatgaaccaacagtaggcatattataaaagtttattactacaaaattctagaaactgaatttatagtggtaggttgcagatcaatggctgcttggagccagaggttttggtaaggaatacaaaagaacttttgaggtgatagacagcttcaatatcttcatcggtggtagccacataactttatatgtttgtacttaatttggatgcattttattgtattgaaagtaaacctcagttaagttgacttttataatttattagattctaaaacattaatt

SEQ ID NO: 116907 - DNA, 586 bp, Homo sapiens
ttttcatctctatgagttgaatggaaatatccgaaagaaatttctgggaatgctgctgtctagtttttatacgaattcccgcttccaacgaaatcctcaaagcaatccaaatatccacttgcagaatccacaaaaagagtgtttcaaaactgctctatcaatagaaaggttcaactcttttagttgagtacacacatcacraacaagtttctgagaatgcttctgtctggcttttattggaagacgtttccttttcaccaaaggcatcaaagcgctccaaatgtccacttccagattcttccaaaagagtgtttcaaacgtgctcaaagtaagggaatgttcaactctgtgacttgaatgcagatatcaccaagtagtttctaatagtgcttctgtctagattttagatgatgatattcccgtttccaacgaaatcattagagctatccaaatatccacttacagtttctaccaaaagggtgtttccaaactgctgcatcaaaagaaaggttcaactctgttagttgaggacacacatcacaaagaagtttgtgagaatgcttctgtctagattttgtatgacgat

SEQ ID NO: 116908 - DNA, 586 bp, Homo sapiens
ttttcatctctatgagttgaatggaaatatccgaaagaaatttctgggaatgctgctgtctagtttttatacgaattcccgcttccaacgaaatcctcaaagcaatccaaatatccacttgcagaatccacaaaaagagtgtttcaaaactgctctatcaatagaaaggttcaactcttttagttgagtacacacatcacaaacaagtttctgagaatgcttctgtctggcttttattggaagacgtttccttttcaccaaaggcatcaaagcgctccaaatgtccacttccagattcttccaaaagagtgtttcaaacgtgctcaaagtaagggaatgttcaactctgtgacttgaatgcagatatcaccaagtagtttctaatagtgcttctgtmtagattttagatgatgatattcccgtttccaacgaaatcattagagctatccaaatatccacttacagtttctaccaaaagggtgtttccaaactgctgcatcaaaagaaaggttcaactctgttagttgaggacacacatcacaaagaagtttgtgagaatgcttctgtctagattttgtatgacgat

SEQ ID NO: 116909 - DNA, 586 bp, Homo sapiens
ttttcatctctatgagttgaatggaaatatccgaaagaaatttctgggaatgctgctgtctagtttttatacgaattcccgcttccaacgaaatcctcaaagcaatccaaatatccacttgcagaatccacaaaaagagtgtttcaaaactgctctatcaatagaaaggttcaactcttttagttgagtacacacatcacaaacaagtttctgagaatgcttctgtctggcttttattggaagacgtttccttttcaccaaaggcatcaaagcgctccaaatgtccacttccagattcttccaaaagagtgtttcaaacgtgctcaaagtaagggaatgttcaactctgtgacttgaatgcagatatcaccaagtagtttctaatagtgcttctgtctagattttagatgatgatattcccgtttccaacgraatcattagagctatccaaatatccacttacagtttctaccaaaagggtgtttccaaactgctgcatcaaaagaaaggttcaactctgttagttgaggacacacatcacaaagaagtttgtgagaatgcttctgtctagattttgtatgacgat

SEQ ID NO: 116910 - DNA, 466 bp, Homo sapiens
gacatatatgtgacaaataatatttagagtgtaagacgctttttaaaggtatatttgcaatttgtgtcaaaacatttaaatatacatttgttactttataaaatttcaaataatttaagctaaatacatagtatatgcagaaaatttagcaatatttgtatgtagcaccttactgtgcattactgtaaccagctgtctaatataaagaactaattaaggtagyacctacttttcaaatatcgcattttttcacagacctattaaataagacaaataacatttaaactttatttttaaatttgcagaatagtatttttcagcagatggtttattttagcaaattccatcttcacattgtgctatgcttttatgagttccagctgttaacggataatattttactgctgaatctatcatgtgtgatataattgctcattatgtgccttaaaacacaagcgatatggtt

SEQ ID NO: 116911 - DNA, 587 bp, Homo sapiens
ggcgtgttgactaccttgcctttcctggagtttttatacatatacagtatatatttgtatatcaatttataatatacaaatatttgtatatacatatttatgtatattatgtaaactccaagtgcatacttgtgcacgtaattatatctgtaaaccttttttcctgttaatttgtacattatcagtttgtttgatagactcaaataattaaagcttcaagggaaaaatttaaactttcctatagagaaaagacatatatgtgacaaataatatttagagtgtaagacgctttttaaaggtatatttgcaatttgtgtcaaaacatttaaatatacatttgttactttataaaatttcaaataatttaagctaaatacatagtatatgcagaaaatttagcaatatttgtatgtagcaccttactgtgcattactgtaaccagctgtctaatataaagaactaattaaggtagtacytacttttcaaatatcgcattttttcacagacctattaaataagacaaataacatttaaactttatttttaaatttgcagaatagtatttttcagcagatggtttattttag

SEQ ID NO: 116912 - DNA, 591 bp, Homo sapiens
tagaataaagcatactagacccacacaaatattgtcaattgatttttgacaaaggcaaaaattcagttcaatggagtaaatatagacttatttggatggccatatgataaaataatcctaaacacagactttacactttactgaaaaattaagttaaaatgcatcatagacctaaatgtaaaatgacaaactataaaagctttagaagaaaacgtgggcaaaatctacatgcccttgaatttgatgacaagtttttagataaaacaacaaaaggatgattaatgaaataaaatattgatcttctatttcattaaaaatgaaatattttatgaaagtgactgttgatagaataaaaagcgaagccatgaacgtggggaaagcatttgcaaaatatatctgataaatgagtagtatacaaagtatgctaggaacactaaaagtcagcaatattaaaccaaaagacccaattaaaaatgagcaaaatatataaactgttmcattactaaatgtaacagatagcacctaagggaaatgatacatcatttgcttgaaaatttgcttcaaatgaaaacaatgatgatataccactac

SEQ ID NO: 116913 - DNA, 575 bp, Homo sapiens
  misc_feature (1)...(575): n = A,T,C or G
nnnnnnnnntgggaacacagccaaacgatatcattccaccccgacccctagaaatctcatgtcctcacatttcagaaccaatcatgcctttccaaactttcccacattttcctgtcttcttctgagccctccaagctgttccaacctctgcctgttatgcagttccaaagtagtttacatattttgggtatcttttcagcaacactccactctactgatacaattcaagttgcgatttgggtggggacacagtcaaaccatatcagtcatcaaaaacaggaaacctctaagaaattgtcatggcccacagtagcctaaggagacatgacagaaaaatgtarttatattcttgatgggatcctgggacagaaatctaaagccaaggaaacctgaataaagtgtagactgctgttaaaataatatacttgtatttgtttattaattgtaaaaaaaagttaccatactaatgtataatgtttgcaacaataaaaactcggtgtggtggtgcacatgaaaactctgtcaccctcagttttcctgtaagcctaaaactatactaatttcttacaaagttt

SEQ ID NO: 116914 - DNA, 394 bp, Homo sapiens
ctcctgacctcaggtgatccacccaacttggcctcccaaagtgctaggattacaggcatgagccactgcgcccagccacaaccacagttttaatgggagttaaccaatttaaatattttgttttatcattggtattttagactcattcagcattcatatatagtgtaatttttttactgattgttataacattatttttaatactctctagaatattaaatatttttcaacacagaatgttttggattgaacataatgttttgtattgtatttgtagccagcaaatattgtaaaatttgaatatatcatactgagatacaggttgaacatsctagatttgaaaatttgtaattctgaatgctcagtttaaaacttttgagtattgaagtgatgc

SEQ ID NO: 116915 - DNA, 573 bp, Homo sapiens
tcaaaatttaaatatattgtttatcaaaggacattataaagtgaaataacgtatagaagtggataaaaatatttgcaaattatatatctaataggggtttaataatcagaatctacaaggaagacctacaactcaacaacagaaatgcacacaaccatccrggcgcggtgggtcaagcctggaatcccagcactttgagaggccgaggcgagtgaatcacttgaggtcaggagattgagacgagcctggcaaaagtggtgaaactccgtctctactaaaagtacaaaaatttgtcgggtgaagtggtgggtgtcagtaatcccagctacttgggaggctgaggcaggagaatcgcttaaacctggaaggcggaggttacagtgagccaagatcgcactattgcactccagcctgggcgacaagagcaaaactccgtccgaatagatgtttctcaaataagttatacaaacgaccaataagcacacaaaaaagacgtccaacatttttagccattagggaaattcaaataaaagccacaatgagttgttacttcgtatctaccaggataattat

SEQ ID NO: 116916 - DNA, 636 bp, Homo sapiens
tgatctgtctgatagaaataaaggaatgtggctgggcacagtggctcacgcctgtaatccccgcactttgggaggcccaggagggtggatcacaaggtcaggagattgaaaccatcctggccaagatggtgaaaccccatttctactaaaaatacaaaaaattaagcatagtggtgggcgcctgtagtcccagctactcaggaggctgagacaggagaatggcatgaactgggaggtagagcttgcagtgagccaaaattgcgccactgcatcccagcctgggcaacagagtgagacccagtctcaaaaaactaaactaaactaaaataaaaataaataaaggaatgcatccaatagaaagcayggaaggtaaaaaaaagttagaaatttcctaaggaaaaaaaaatgaggaaggagtctgtaaataaacacataaggaaaaatcttacatctaacaaggaaacaatggtttgaggctataaatagtgactctctgtacttgagtccactttcagctatatgcccctaaaaacccacatgatccctgtgaaacacaacctatagtaggtgggtacaccagatatacagactgtatcagtagaaagaaaattcctcaaagaatatttggggttccag

SEQ ID NO: 116917 - DNA, 501 bp, Homo sapiens
atgtttgaacactgaagtctctgtttgcttaacttagtagtcagtgaaagaatagacagaaatttcattaaagacctggaacccgtaactcttccggtctctgctgagtggctctgtgtgcatttcagggcacacttttaacacccagccggttggttgacaactctgccttagtcttcacattctgctttcccatagcttcatggtcatctggaggtgaaagcttagggccttctcatattttycttgagaataagcattgtgcttagaatgtgcacaatcatacgtgtgtgagtgaccttttatagtgccagtaatatgtcagaagtcttcaaaactcctatttatatttcctagctttttaagttttccagctaccatattatttgccctaactgttatctaccactttagtctaccatgatttaaaaaagttgcctttcaatgttttcaataagtatgctagttaaaaagactttcatgggccagttacaaatgagg

SEQ ID NO: 116918 - DNA, 515 bp, Homo sapiens
ggcacacttttaacacccagccggttggttgacaactctgccttagtcttcacattctgctttcccatagcttcatggtcatctggaggtgaaagcttagggccttctcatatttttcttgagaataagcattgtgcttagaatgtgcacaatcatacgtgtgtgagtgaccttttatagtgccagtaatatgtcagaagtcttcaaaactcctatttatatttcctagctttttaagttttccagctaccatattatttgccctaactgttatctaccactttagtctaccatgatttaaaaaagttgcctttcaatgttttcaataagtatgctagttaaaaagactttcatgggccagttacaaatgaggtcaaataaagacagttttataagtggtatcttgcagtaagccatgttccaggtcaaacaataattctcagggaactaagctgaaggctgccagattgctagtagtcagygattgagagatatttattttcaaggtgactgtg

SEQ ID NO: 116919 - DNA, 448 bp, Homo sapiens
ggaattcaaaggttacaaaacgtaagcagttgtaggttttaaataagcaatgactttgagttcaaccatgatggggtatattgaaaagaatctctcagaaaaaaagaaaaactgttataaagctatgtasaaaatgttaagcactattaaagtcttccaattctaccagttatggagttattggtcttggactaactctcctgaaaagaaaaaaaacaaaacaaaacctaaaaacctggataaaatggcctaccgtgggcactggcaatgcaaccaagcaggtaggacatgggtgctactttctctttgtcagaacacaaagcattcatacactcttctcaccctcactctcaccttttaatcttagatctactattaaatgtattcaactactatcaatcctttggtcaaaatttcttttctcacattttgcttgatgcacttggat

SEQ ID NO: 116920 - DNA, 597 bp, Homo sapiens
ctgaaactcatgaaggtagtgggaatcccatgggttagttagtaacagtccctgagattatttggtcatataaataatcagaaaactcatagtcatcttgcttttctcataatgcccagctgggggatgttgggggtagggaggactgsagtgagaagagatagaaccagagctggctttcatgtatggggctctccagagcaatcaggcctaagtacaaccaagaagggtcttgaagccactctggcaagggcagcctggtctcagaccccagctcacaccaagcacgtcacctgtccgactggaaagcttaaacaatgtgtttctgtttttgcttttgttttctggtaaagaattcaatgccattagctacattcacaatgctgtgcaatcatcaccgctatccatttctgaaacattctatcatcccagacaggaactctgtgcccattagacattaaccccgcccatttccacctcctgccagtcctgaaaacctctattctactttgtgtctctattaatttgcctgttccaggttcttcatatagatggaatcacgtagtctgtgtttgacgtctcacttagcataatgtt

SEQ ID NO: 116921 - DNA, 597 bp, Homo sapiens
ctgaaactcatgaaggtagtgggaatcccatgggttagttagtaacagtccctgagattatttggtcatataaataatcagaaaactcatagtcatcttgcttttctcataatgcccagctgggggatgttgggggtagggaggactgcagtgagaagagatagaaccagagctggctttcatgtatggggctctccagagcaatcaggcctaagtacaaccaagaagggtcttgaagccactctggcaagggcagcctggtctcagaccccagctcacaccaagcacgtcacctgtccgactggaaagcttaaacaatgtgtttctgtttttgcttttgttttctggtaaagaattcaatgccattagctacattcacaatgctgtgcaatcatcaccgctatccatttctgaaacattctatcatcccagacaggaactctgtgcccattagacattaaccccgcccatttccacctcctgccagtcctgaaaacctctattctactttktgtctctattaatttgcctgttccaggttcttcatatagatggaatcacgtagtctgtgtttgacgtctcacttagcataatgtt

SEQ ID NO: 116922 - DNA, 610 bp, Homo sapiens
ttcaaatccggttctctctgatgccaaaaattgtgcaatttaacgaggaccaagttacacctagaacatggggggatcaaracatgtggattcccttttctgccccctcatgtgggaatttcaatagctttcactgcctcagagcaatactaaactccctcccaggttgccttgcaatggcccccttattcgtggggatgattaggaatctgcatttttggaccacaagcatctataaagagtggtgttgatcaagaaataaaatttactaggccataggttgctgtgaatagtctagcttctctgacaaaaaataaaggggctattccatgtaaaaaaaatcacaggatccactgaatctgtgcagaaagacatagaaatatactgcaggagcatcttacagacagctgcgcctgaagaccagccaaaacacacaaagcaagagcacctccaatgaccaagtgtggtggctcttcctgtcatcccagcagtgtgggaggccaaggtgggtgaatcacttgaggccaggggtttgagacaagcttgggcaacacaatgagaccttgtccgtacaaaaaaaaatcattttttattattagaatcaagaaga

SEQ ID NO: 116923 - DNA, 610 bp, Homo sapiens
ttcaaatccggttctctctgatgccaaaaattgtgcaatttaacgaggaccaagttacacctagaacatggggggatcaaaacatgtggattcccttttctgccccctcatgtgggaatttcaatagctttcactgcctcagagcaatactaaactccctcccaggttgccttgcaatggcccccttattcgtggggatgattaggaatctgcatttttggaccacaagcatctataaagagtggtgttgatcaagaaataaaatttactaggccataggttgctgtgaatwgtctagcttctctgacaaaaaataaaggggctattccatgtaaaaaaaatcacaggatccactgaatctgtgcagaaagacatagaaatatactgcaggagcatcttacagacagctgcgcctgaagaccagccaaaacacacaaagcaagagcacctccaatgaccaagtgtggtggctcttcctgtcatcccagcagtgtgggaggccaaggtgggtgaatcacttgaggccaggggtttgagacaagcttgggcaacacaatgagaccttgtccgtacaaaaaaaaatcattttttattattagaatcaagaaga

SEQ ID NO: 116924 - DNA, 610 bp, Homo sapiens
ttcaaatccggttctctctgatgccaaaaattgtgcaatttaacgaggaccaagttacacctagaacatggggggatcaaaacatgtggattcccttttctgccccctcatgtgggaatttcaatagctttcactgcctcagagcaatactaaactccctcccaggttgccttgcaatggcccccttattcgtggggatgattaggaatctgcatttttggaccacaagcatctataaagagtggtgttgatcaagaaataaaatttactaggccataggttgctgtgaatagtctagcttctctgmcaaaaaataaaggggctattccatgtaaaaaaaatcacaggatccactgaatctgtgcagaaagacatagaaatatactgcaggagcatcttacagacagctgcgcctgaagaccagccaaaacacacaaagcaagagcacctccaatgaccaagtgtggtggctcttcctgtcatcccagcagtgtgggaggccaaggtgggtgaatcacttgaggccaggggtttgagacaagcttgggcaacacaatgagaccttgtccgtacaaaaaaaaatcattttttattattagaatcaagaaga

SEQ ID NO: 116925 - DNA, 435 bp, Homo sapiens
ccactgcactctgatccattgcactcaactccactccactccactccacttcgttccattccattctgtatcattcctttccattccactccatttctttcctctacactccattccattccactccatttcactctattccactccattccactccattcctttccattccactcaacttccttccgttccattcyactcaattccattcctttcccttccactccattccactacgctccattccactacactccattctcctccactccactgtattatcttccattccagttcattccatcccattctattccattccattccagttcattccattccattccactccattccattccattccactccattccattgcactccaatcctctccactcaactccagtccactcctctccgctccactccatt

SEQ ID NO: 116926 - DNA, 514 bp, Homo sapiens
gatgttttgttaaatctttgttgatacagaatacataatttcctttttctgtttgtgtgagaagaaaagattgaacaaaaatatatgagtgctaaactgtctttaaaaagtagataactatatcaaaaacagtaaggaccagtgggcaccacgcagaacaagcaaatagaagataatctcagctttgagtagcagctttggtagtatacawtaatgaactgaaaataggtactcagcagtgttttctaagatgacagattaaacaaacatcccaccagaaagtggtaatcacttagactaatttcctcatcccctaggataaaatcttaagtcggtgacttgaaaactattttgacccaatccattgacaaatgcatttttacattgcagcccagcacacacatatgtataactgaagcaagagttgtacttaacaatacatacttatccatgtgttatgaaccttgatatttcttattctcttttaccccttcctctgtgtgtctgtgtgtat

SEQ ID NO: 116927 - DNA, 468 bp, Homo sapiens
taaaaacaaggctcataatgtcatcagaaacaagtcttcccttaggtctggggtatggggaccactgaaagtgcatggtccttatccgcttgggccgatcagaatcagtagcactgaaactcgacaatcaactttgatatctcctgggcaagtgctccactaagtgaaaaactttctttttacaacttctactcattcaccctagcaggaaacgtgagggctggcacaaatgtctccatcccatgcacgctgcctttcatcagccctgattgtctcttgcaatcagatttctggaatcatctcctgacttgcacactcaaagtgtggcggaggaacaygcagcatcagcatcacttgagaggctgttagaaatgtagttaggctccacctcacaccttagtagagtcagccttttaacactacccccaggtgattcatgagcacagaaaattttgagaagcactgtcc

SEQ ID NO: 116928 - DNA, 571 bp, Homo sapiens
tctggaacacagagagaactctataaagatttgtcaagctgtactgaacaaccccaagcggatgcagattgggtcacaccaaatgtgaytgctgattcatgtggtcatttggcaaatattgattgagtgcctatgatgtgccaagcactattcttagccaacgctaagccaaatacacaaaaataatgataaagtgagtgcttgtcaattaggtacaacccaggtattttaccaggctagttaattggtgtgttgagtcaatatgaagactgttttaaacttcagcttttgctataatattatttaagcctagacaggaaattcagggttccaataactcaatgctctctctttcctgggcttcagtgtccacacctacatgatgcacatatactgtagtctcccatgagatattttgacatatgtttatacaggatcctctgaaattccttgcacatttttaaatcttaacaatttgcctagaaacactttacaaattgcattaagtatttcaaggcttagaaaacactattgcacaaaatgcctttgtatttaagatctcatgataaag

SEQ ID NO: 116929 - DNA, 510 bp, Homo sapiens
aaagatagtatacaaaacacaaaataagtgtagacatttgtctaagataaaattctactgaattcagggaatctctgcttcactcattgtgcatgctgatgctgcctgaacttcatccatgttcactgaagagaaaggtcagggtcttcccatgagtgatggagcagtgctaagcagccagcacagaaaggaaaacagaaaaacaaacatcaggttcccggaagagtgaaaggaaaacaagtgtgtattgaatgtctactttatgtcaggggttgcccgcaggatgcttttctgtgacttgattcaatcctataagaaagggatttataattttcattctagagaaatataaactgctttagttaaagtcacatagctactaagtggctgagatttttatttggtctgtctggctccaracctctatctttttctactaaaccagtatttcctatgtgtttctgattcaaaaaataacctgaagcacttaataaaaatatacattttcag

SEQ ID NO: 116930 - DNA, 542 bp, Homo sapiens
tggtttttaaatgagatagaaggggaagaatacataatggagaaaaaataaaagaaatttctaatagagccaagagaaaataatcgtactgaatgaaactgtcgccaaaagacaagactttgtcccgtcagaacctagcagtttaggtggtaaatgctcaacagagatgagagggaatgaatgaagtataagctgggatgggcacacaatgcaagacaaagaaaagatggtagaggggaaytgggaactaagattaatttaggagcccagcatttgtatttttgtggctggactaaaatccaaaaatcataatcatacatattatatgaaatggcataagtagtaaccaagatggctccaataaaacaggtccaataggaatgaccccaagccatatcagtctcttgtgtcacactttcttttaaagtaccgccagtcatgttagaatctgtatcccacatcacagtccctagacagaaatttctaaaggctcactgctgccttcagaacaaccccacattgggatgttgaataaaaacaag

SEQ ID NO: 116931 - DNA, 592 bp, Homo sapiens
gaattcatagaagtagagaatggaatggtgattatcagaggctagtagttgggggtagacatggaaaaggtagatgttgataaaagggttcaaagtttcagttagacaaagtttcagtgaactattgcacrgaatggtgactgtaataaataacaaggtattgtatgtttcaaaatgactaacagagtagattttaaatgttttcaccacaaaaaagatatgtatgtcaataagatagacctaatctttccacaatttaaacatgtatcaaaacattacattgtaccccataaatagatacaattattatttgtcaatttaaaatttttcactaatttatattgttattgttgcaccaactcctttccaccaggcagattctcataaagactattttctcttttacatgaagcatttcctacacacctcttaatcacggtagcattgacgtcattccaccagattctatctccagtgttaaaataatcaagaacccagaaatctccaccagggggcaaccaatgcgtatcaaagtttcccactttcctttagatttacttatgggtaacttatgggaaaaaatacttaagta

SEQ ID NO: 116932 - DNA, 592 bp, Homo sapiens
gaattcatagaagtagagaatggaatggtgattatcagaggctagtagttgggggtagacatggaaaaggtagatgttgataaaagggttcaaagtttcagttagacaaagtttcagtgaactattgcacagaatggtgactgtaataaataacaaggtattgtatgtttcaaaatgactaacagagtagattttaaatgttttcaccacaaaaaagatatgtatgtcaataagatagacctaatctttccacaatttaaacatgtatcaaaacattacattgtaccccataaatagatacaattattatttgtcaatttaaaatttttcactaatttatattgttattgttgyaccaactcctttccaccaggcagattctcataaagactattttctcttttacatgaagcatttcctacacacctcttaatcacggtagcattgacgtcattccaccagattctatctccagtgttaaaataatcaagaacccagaaatctccaccagggggcaaccaatgcgtatcaaagtttcccactttcctttagatttacttatgggtaacttatgggaaaaaatacttaagta

SEQ ID NO: 116933 - DNA, 550 bp, Homo sapiens
actattgcacagaatggtgactgtaataaataacaaggtattgtatgtttcaaaatgactaacagagtagattttaaatgttttcaccacaaaaaagatatgtatgtcaataagatagacctaatctttccacaatttaaacatgtatcaaaacattacattgtaccccataaatagatacaattattatttgtcaatttaaaatttttcactaatttatattgttattgttgcaccaactcctttccaccaggcagattytcataaagactattttctcttttacatgaagcatttcctacacacctcttaatcacggtagcattgacgtcattccaccagattctatctccagtgttaaaataatcaagaacccagaaatctccaccagggggcaaccaatgcgtatcaaagtttcccactttcctttagatttacttatgggtaacttatgggaaaaaatacttaagtacttccctttttaaagaaaaaaattatatgaattctacaaaattatggcagaaaatttaagaagagcagatgcttccca

SEQ ID NO: 116934 - DNA, 586 bp, Homo sapiens
agaggctagtagttgggggtagacatggaaaaggtagatgttgataaaagggttcaaagtttcagttagacaaagtttcagtgaactattgcacagaatggtgactgtaataaataacaaggtattgtatgtttcaaaatgactaacagagtagattttaaatgttttcaccacaaaaaagatatgtatgtcaataagatagacctaatctttccacaatttaaacatgtatcaaaacattacattgtaccccataaatagatacaattattatttgtcaatttaaaatttttcactaatttatattgttattgttgcaccaactcctttccaccaggcagattctcataaagactattttctctyttacatgaagcatttcctacacacctcttaatcacggtagcattgacgtcattccaccagattctatctccagtgttaaaataatcaagaacccagaaatctccaccagggggcaaccaatgcgtatcaaagtttcccactttcctttagatttacttatgggtaacttatgggaaaaaatacttaagtacttccctttttaaagaaaaaaattatatga

SEQ ID NO: 116935 - DNA, 544 bp, Homo sapiens
tgggggtagacatggaaaaggtagatgttgataaaagggttcaaagtttcagttagacaaagtttcagtgaactattgcacagaatggtgactgtaataaataacaaggtattgtatgtttcaaaatgactaacagagtagattttaaatgttttcaccacaaaaaagatatgtatgtcaataagatagacctaatctttccacaatttaaacatgtatcaaaacattacattgtaccccataaatagatacaattattatttgtcaatttaaaatttttcactaatttatattgttattgttgcaccaactcctttccaccaggcagattctcataaagactattttctcttttacatgaagcatttcctacacrcctcttaatcacggtagcattgacgtcattccaccagattctatctccagtgttaaaataatcaagaacccagaaatctccaccagggggcaaccaatgcgtatcaaagtttcccactttcctttagatttacttatgggtaacttatgggaaaaaatacttaagtac

SEQ ID NO: 116936 - DNA, 586 bp, Homo sapiens
agaggctagtagttgggggtagacatggaaaaggtagatgttgataaaagggttcaaagtttcagttagacaaagtttcagtgaactattgcacagaatggtgactgtaataaataacaaggtattgtatgtttcaaaatgactaacagagtagattttaaatgttttcaccacaaaaaagatatgtatgtcaataagatagacctaatctttccacaatttaaacatgtatcaaaacattacattgtaccccataaatagatacaattattatttgtcaatttaaaatttttcactaatttatattgttattgttgcaccaactcctttccaccaggcagattctcataaagactattttctcttttacatgaagcatttcctacacacctcttaatcacggtagcattgacrtcattccaccagattctatctccagtgttaaaataatcaagaacccagaaatctccaccagggggcaaccaatgcgtatcaaagtttcccactttcctttagatttacttatgggtaacttatgggaaaaaatacttaagtacttccctttttaaagaaaaaaattatatga

SEQ ID NO: 116937 - DNA, 585 bp, Homo sapiens
acacacgtgtgtctatacatatcctacatgtacatattgaggattaacaggtgctagtagaaaatattaactttctttgtattaacaggtgttagtagaaagtagtagtaggtgctaagataaaagccataattaaacctcctggtgaatgaacacaccatcacctacaatcttaccaaaaatagaatcaagcacgtgtcctagtcaaacctctggattcaactgtcatttggataaaacgcaaaggatagtgaaaatgtcgatcttcactgagagtctcaccagcaaaattcacagtgtggacaccaagtgacaaaaatcccaaatttttcaacaaatatattgtatgggaaagaaaactttgaaaagaaacctgtatgttagaagggattttaaaaacacgacaaatgaaaacaaatgggcaagactaaatcatagtgtcttggaatgcatgcakgaaggacacagccgtgaaaatgcaaggacgcctctactggaacagtcatgtttatcgtcacttttcaggagaaaggtggctgcagttgaggagagtcacatgcttcagggctggcaaagtcctatatc

SEQ ID NO: 116938 - DNA, 583 bp, Homo sapiens
ttcatgtaacattggcattatttctttattaaatatttggtartatttctttattaaatattgcatccacctagccctggagttctttttacaggaaaaaaaaattttctaaataaaatttctacaatgaaaaaaaaactactcagtttttctagtttttttctgatcatttcataaaagtaggtatttttcataggaacttgaccattccttatgattgtcaaatttattaatataaagtttcatattttatatttattttatcagataaataaaattatatgttttgaaatatatattcattgtaaaatagccatgttaagctaacatatgcattaccttacatgcttatctttttttatgagaacacttaaaaatctactcttagcaattttgaagaatacaagtacatcccctatggagaacagtttgaaggctcctcaaaaaagtaaaaatagagctaccatgtggtccagcaatcccactgctgcatatataccccccaaaaaagaaatcagtatatcgaagagatatctgcactcccgtatttgttgcagcactatttacaatagcgaagttatgg

SEQ ID NO: 116939 - DNA, 583 bp, Homo sapiens
ttcatgtaacattggcattatttctttattaaatatttggtaatatttctttattaaatattgcatccacctagccctggagttctttttacaggaaaaaaaaattttctaaataaaatttctacaatgaaaaaaaaactactcagtttttctagtttttttctgatcatttcataaaagtaggtrtttttcataggaacttgaccattccttatgattgtcaaatttattaatataaagtttcatattttatatttattttatcagataaataaaattatatgttttgaaatatatattcattgtaaaatagccatgttaagctaacatatgcattaccttacatgcttatctttttttatgagaacacttaaaaatctactcttagcaattttgaagaatacaagtacatcccctatggagaacagtttgaaggctcctcaaaaaagtaaaaatagagctaccatgtggtccagcaatcccactgctgcatatataccccccaaaaaagaaatcagtatatcgaagagatatctgcactcccgtatttgttgcagcactatttacaatagcgaagttatgg

SEQ ID NO: 116940 - DNA, 559 bp, Homo sapiens
ccacaaaaattaaatttaaaaacaatacattgttatccactatagtcaccatattgcacaatagatctgttgaattcattcctcctgtacaatgcaattttgtaccctttgaccaacatctacccaatcctcctggtaaccatcattctactctgtacttctatgtgttcagccttcttagacctccacatacaagtgagattatgcagtatctggctttctgtgcctggattattttactcagtataatgtcctcccggttcattcatgttgtcacaaatgatactttttttattttttaaggttgtatactattctattgtgtatgtgtaccacattttcttcatccactcatgtgtcgatggatacttaagttaattccacatcttggctgttgtgaataatgctacaataaatatgggagtacagataactcaytgacacactgatttgatatctttttaatatatgcccagaaatagcattactgaatcatatggtaattctatttttacagaatcatttatactgtcttttacaatggctgaaatagtttaca

SEQ ID NO: 116941 - DNA, 562 bp, Homo sapiens
tattcagtcctattttacatttctttttctgattctttggatagttttaaaatgaagcttttattttggaataattttagatgtacagaaaagttacagagatagtccagagggtgcccrtatgccccttaccaagtttcaggttcccctaatgttatcaccttatatttccatggtacattttccaaaactgagaaatcatcactggtataatacattactgtaaactaaactctagactttattcaaatttcaccaattttttccattaatgtctttttatgtttcagaatccaatctgaatatcacattacatttagctattaggtctctttaatctcctctgaggtttgtgacaatttctcagtcttaccttgcttttcatggtgtcacatcttagaggaatattggtcagatattttgtagaatgtccctcaatttgagtttgtctgacattttttattatagttatacatgggttctggattttttaaaagaatacccaaaagatgaaaagatcttctaatcacgtgataacagggagtacataatatccacacag

SEQ ID NO: 116942 - DNA, 562 bp, Homo sapiens
tattcagtcctattttacatttctttttctgattctttggatagttttaaaatgaagcttttattttggaataattttagatgtacagaaaagttacagagatagtccagagggtgcccatatgccccttaccaagtttcaggttcccctaatgttatcaccttatatttccatggtacattttccaaaactgagaaatcatcactggtataatacattactgtaaactaaactctagactttattcaaatttcaccaattttttccattaatgtctttttatgtttcagaatccaatctgaatatcacattacatttagctattaggtctctttaatctcctctgaggtttgtgacaatttctcagtcttaccttgcttttcatggtgtcacatcttagaggaatattggtcagatattttgtagaatgtccctcaatttgagtttgtctgacattttttattatagttatacatgggttctggattttttaaaagaatacccaaaagatgaaaagatcttctaatcacrtgataacagggagtacataatatccacacag

SEQ ID NO: 116943 - DNA, 539 bp, Homo sapiens
aaaattcaccatgcttaagtgggattcatccctgggaagcttattagtcttatttgattcgtgtaatcagaaaatttctatgtctagtgaagagaaatgagagcaatagagactcatagcacctcaacaaatttccaggcttgagccagttaacaaatacragtccttcaaatacaaaaagactgtgaaagaaaatagaacagatcaatgaaactaagaatttgttctttgaaaagataaacaaaactgacaaaccattagctagactagaaaaacgagagaatactcaaagcaataaaatcagaaatgaaagaggaaatattgcaactaataccacagaaatatagaggatcataagaggccactataaacaattacaagccaacaaattggataacctagaaaaagcagataaatttctagaaaaatgcaacttacctagagaaagtcaagaagaaagataaaatctgaacagaacaatactgagtatggagagtatatcaataataaaacatctcccatcaaagaacatcccagga

SEQ ID NO: 116944 - DNA, 559 bp, Homo sapiens
aagtccttcaaatacaaaaagactgtgaaagaaaatagaacagatcaatgaractaagaatttgttctttgaaaagataaacaaaactgacaaaccattagctagactagaaaaacgagagaatactcaaagcaataaaatcagaaatgaaagaggaaatattgcaactaataccacagaaatatagaggatcataagaggccactataaacaattacaagccaacaaattggataacctagaaaaagcagataaatttctagaaaaatgcaacttacctagagaaagtcaagaagaaagataaaatctgaacagaacaatactgagtatggagagtatatcaataataaaacatctcccatcaaagaacatcccaggaccagaaaacttcattgctgaattctaacattttaaaaaataataatacaatccttctgaaattcttccaaaaacttgaaggagaaagagtatttccaaactcattttaaaagatcagcattattgttttttttttaaagtgatgttccccttcctgtgtccatgtgttctcattgtccaa

SEQ ID NO: 116945 - DNA, 559 bp, Homo sapiens
aagtccttcaaatacaaaaagactgtgaaagaaaatagaacagatcaatgaaactaagaatttgttctttgaaaagataaacaaaactgacaaaccattagctagactagaaaaaygagagaatactcaaagcaataaaatcagaaatgaaagaggaaatattgcaactaataccacagaaatatagaggatcataagaggccactataaacaattacaagccaacaaattggataacctagaaaaagcagataaatttctagaaaaatgcaacttacctagagaaagtcaagaagaaagataaaatctgaacagaacaatactgagtatggagagtatatcaataataaaacatctcccatcaaagaacatcccaggaccagaaaacttcattgctgaattctaacattttaaaaaataataatacaatccttctgaaattcttccaaaaacttgaaggagaaagagtatttccaaactcattttaaaagatcagcattattgttttttttttaaagtgatgttccccttcctgtgtccatgtgttctcattgtccaa

SEQ ID NO: 116946 - DNA, 559 bp, Homo sapiens
aagtccttcaaatacaaaaagactgtgaaagaaaatagaacagatcaatgaaactaagaatttgttctttgaaaagataaacaaaactgacaaaccattagctagactagaaaaacgagagaatactcaaagcaataaaatcagaaatgaaagaggaaatattgcaactaataccacagaaatayagaggatcataagaggccactataaacaattacaagccaacaaattggataacctagaaaaagcagataaatttctagaaaaatgcaacttacctagagaaagtcaagaagaaagataaaatctgaacagaacaatactgagtatggagagtatatcaataataaaacatctcccatcaaagaacatcccaggaccagaaaacttcattgctgaattctaacattttaaaaaataataatacaatccttctgaaattcttccaaaaacttgaaggagaaagagtatttccaaactcattttaaaagatcagcattattgttttttttttaaagtgatgttccccttcctgtgtccatgtgttctcattgtccaa

SEQ ID NO: 116947 - DNA, 539 bp, Homo sapiens
aaaattcaccatgcttaagtgggattcatccctgggaagcttattagtcttatttgattcgtgtaatcagaaaatttctatgtctagtgaagagaaatgagagcaatagagactcatagcacctcaacaaatttccaggcttgagccagttaacaaatacaagtccttcaaatacaaaaagactgtgaaagaaaatagaacagatcaatgaaactaagaatttgttctttgaaaagataaacaaaactgacaaaccattagctagactagaaaaacgagagaatactcaaagcaataaaatcagaaatgaaagaggaaatattgcaactaataccacagaaatatagaggatcataagaggccactataaacaattacaagccaacaaattggataacctagaaaaagcagataaatttctagaaaaatgcaacttacctagagaaagtcaagaagaaagataaaatctgaacagaacaatactgagtatggagagtrtatcaataataaaacatctcccatcaaagaacatcccagga

SEQ ID NO: 116948 - DNA, 559 bp, Homo sapiens
aagtccttcaaatacaaaaagactgtgaaagaaaatagaacagatcaatgaaactaagaatttgttctttgaaaagataaacaaaactgacaaaccattagctagactagaaaaacgagagaatactcaaagcaataaaatcagaaatgaaagaggaaatattgcaactaataccacagaaatatagaggatcataagaggccactataaacaattacaagccaacaaattggataacctagaaaaagcagataaatttctagaaaaatgcaacttacctagagaaagtcaagaagaaagataaaatctgaacagaacaatactgagtatggagagtatatcaataataaaacatctcccatcaaagaacatcccaggaccagaaaacttcattgctgaattctaacattttaaaaaataataatacaatccttctgaaattcttccaaaaacttgaaggrgaaagagtatttccaaactcattttaaaagatcagcattattgttttttttttaaagtgatgttccccttcctgtgtccatgtgttctcattgtccaa

SEQ ID NO: 116949 - DNA, 616 bp, Homo sapiens
attctctccatccattggtccagccaactgggctgtggctaaaattatgagaactaagaaaatggggaggaaattgtgattatgaagataataatatgtactaaaatcaatattgcaatgtcactatgaataaatagtatacagttattctgttcctcacatattaaaaacaaaaaatcaacataatattatcacaacatgtgagctgcaacctgatttaaacccatcatcaatactttcagtgtaatgtctgatctaaaattaacagattaggtaagaacaagattcctgactatccatgaaattcatcaggtgtttaaatgacctgygatattaactattcctcatttccaacatattccatttgtacttatacatattcttataatttccttcccttcccagtttgcacccacaattctctgacagaaagtagacataagaggaaaacatgattaacagatggattatcactgcagtaagaggtgcctgggacggacttagttgaggtaggctgtggattgagagaatatagagactggggtatgtgaaatcggaaagcccacaactgtagcagactagagtaagtggactttcacaagaaatagaatcacca

SEQ ID NO: 116950 - DNA, 616 bp, Homo sapiens
attctctccatccattggtccagccaactgggctgtggctaaaattatgagaactaagaaaatggggaggaaattgtgattatgaagataataatatgtactaaaatcaatattgcaatgtcactatgaataaatagtatacagttattctgttcctcacatattaaaaacaaaaaatcaacataatattatcacaacatgtgagctgcaacctgatttaaacccatcatcaatactttcagtgtaatgtctgatctaaaattaacagattaggtaagaacaagattcctgactatccatgaaattcatcaggtgtttaaatgacctgtgatattaactattcctcatttccaacatattccatttgtacttatacatattcttataatttccttcccttcccagtttgcasccacaattctctgacagaaagtagacataagaggaaaacatgattaacagatggattatcactgcagtaagaggtgcctgggacggacttagttgaggtaggctgtggattgagagaatatagagactggggtatgtgaaatcggaaagcccacaactgtagcagactagagtaagtggactttcacaagaaatagaatcacca

SEQ ID NO: 116951 - DNA, 616 bp, Homo sapiens
attctctccatccattggtccagccaactgggctgtggctaaaattatgagaactaagaaaatggggaggaaattgtgattatgaagataataatatgtactaaaatcaatattgcaatgtcactatgaataaatagtatacagttattctgttcctcacatattaaaaacaaaaaatcaacataatattatcacaacatgtgagctgcaacctgatttaaacccatcatcaatactttcagtgtaatgtctgatctaaaattaacagattaggtaagaacaagattcctgactatccatgaaattcatcaggtgtttaaatgacctgtgatattaactattcctcatttccaacatattccatttgtacttatacatattcttataatttccttcccttcccagtttgcacccacaattctctgacagaaagtagacataagaggaaaacatgattaacagatggattatcactgcagtaagaggtgcctgggacggacttagttgaggtaggctgtggattgagagaatatagagactggggtatgtgaaatcggaaagcccacaactgtagcagamtagagtaagtggactttcacaagaaatagaatcacca

SEQ ID NO: 116952 - DNA, 616 bp, Homo sapiens
attctctccatccattggtccagccaactgggctgtggctaaaattatgagaactaagaaaatggggaggaaattgtgattatgaagataataatatgtactaaaatcaatattgcaatgtcactatgaataaatagtatacagttattctgttcctcacatattaaaaacaaaaaatcaacataatattatcacaacatgtgagctgcaacctgatttaaacccatcatcaatactttcagtgtaatgtctgatctaaaattaacagattaggtaagaacaagattcctgactatccatgaaattcatcaggtgtttaaatgacctgtgatattaactattcctcatttccaacatattccatttgtacttatacatattcttataatttccttcccttcccagtttgcacccacaattctctgacagaaagtagacataagaggaaaacatgattaacagatggattatcactgcagtaagaggtgcctgggacggacttagttgaggtaggctgtggattgagagaatatagagactggggtatgtgaaatcggaaagcccacaactgtagcagacyagagtaagtggactttcacaagaaatagaatcacca

SEQ ID NO: 116953 - DNA, 550 bp, Homo sapiens
caatctttcacaattatgaagccctaaatggcttcccatcctgcaatgatttcataaggagcctatgccacctgtcatgtaaggctttttccatgcctaataaatatgttttggagggatttcaccagtgtttctgctaagatacatgcataaaatggacacagaggttgtgagaaatctctgcagtttctctttgtctatacacatgaaagtattgaagaccagcacttggattagttaagataatgttttaattcatcactgtctcctcctccccttggtaccagcttttatgttcattgcattccccacccttttaagtactcagtacctcctgcatggtaacctattctgatatttgatattatcatgcttaatttgactgaatccattyggatattttatctttaagaaatttgtagttttatacttttaatttatgataaaattagattaatatcaaacattaacaagtgacttttaggaaggtatatgagctttcttattgacttcaaactataaagtacaaactgtgacactagaaatttag

SEQ ID NO: 116954 - DNA, 475 bp, Homo sapiens
agaccagcacttggattagttaagataatgttttaattcatcactgtctcctcctccccttggtaccagcttttatgttcattgcattccccacccttttaagtactcagtacctcctgcatggtaacctattctgatatttgatattatcatgcttaatttgactgaatccattcggatattttatctttaagaaatttgtagttttatacttttaatttatgataaaattagattaatatcaaacattaacaagtgacttttaggaaggtatatgagctttcttattgacttcaaactataaagtacaaactgtgacactagaaatttagtcctttaacacatattgtatttatatgtgaagtggasggtgagcagaaaacagtgttatatttctctgtgtccagatggatactcacctcaatcattttcctatagtagaaagtagttcctgaaaacacttaatagagattat

SEQ ID NO: 116955 - DNA, 473 bp, Homo sapiens
attactcctccagggagagggtggtgaatattgattttactgatacagcaatttgacatcaaatgcactttctttgtgatttccacaggtaaacacaggtaccaatctaccagactatttcaccatcccttaaattagcaagctcatgtggcagcttcgttactgtcacatgtaactgcagcagtagtrgccaaaagaatgtcatttgttattcatgaggtgctcaggtaatatttgactttcatggttatatactttttcatagaggctattaatataatactattaattagaaatttctcatttttttttctctttaggtaacgtgaaagtgaacttatcaaatgaatagggacaaccagtctgtggtgtctgaattcgtgttgctgggactctcaaattcttgggagactcaagatttttcttttttgcttttcttgtcttttctatgtgtccggtgtgatggcaaacct

SEQ ID NO: 116956 - DNA, 586 bp, Homo sapiens
tacttttctaaatgtctctctagtccacacaaacttctctagaattgttatcactgaaaggcatttttactactgctacattgaatgtgccgctatatcaataactctgttcagtgggtgacattgcaagcttggacaacaattgggaaatactcttgccagcaaaagcatgcaaaccattcctcttctccttcctggtagaggacactaattaggcacaatataagttggcagctaagaaagaatagaacacagaaaccaagatatataattatgagaccccaaagactcactacaagtctcaggtccacacaaatggataaaaataattctgaagtgaggggtacaaaatacagacatgaggagaggaagtaaccctctgagccaggtcactataacgtaaaaatcaacaaaggrcaatctagaccaaaccagagcaaagcacatctttcaagaactctggctaacaatgtattattatctttgcttaattaaggcaaactgaaagtttatgtccaactcccacatatatcatgtgcggttgtctataaatcatgcataaattacttatagaaattaattctat

SEQ ID NO: 116957 - DNA, 586 bp, Homo sapiens
tacttttctaaatgtctctctagtccacacaaacttctctagaattgttatcactgaaaggcatttttactactgctacattgaatgtgccgctatatcaataactctgttcagtgggtgacattgcaagcttggacaacaattgggaaatactcttgccagcaaaagcatgcaaaccattcctcttctccttcctggtagaggacactaattaggcacaatataagttggcagctaagaaagaatagaacacagaaaccaagatatataattatgagaccccaaagactcactacaagtctcaggtccacacaaatggataaaaataattctgaagtgaggggtacaaaatacagacatgaggagaggaagtaaccctctgagccaggtcactataacgtaaaaatcaacaaaggacaatctagaccaaaccagagcaaagcacatctttcaagaactctggctaacaatgtattattatctttgcttaattaaggcaaactgaaagtttatgtccaactcccacatatatcatgtgcgrttgtctataaatcatgcataaattacttatagaaattaattctat

SEQ ID NO: 116958 - DNA, 586 bp, Homo sapiens
tacttttctaaatgtctctctagtccacacaaacttctctagaattgttatcactgaaaggcatttttactactgctacattgaatgtgccgctatatcaataactctgttcagtgggtgacattgcaagcttggacaacaattgggaaatactcttgccagcaaaagcatgcaaaccattcctcttctccttcctggtagaggacactaattaggcacaatataagttggcagctaagaaagaatagaacacagaaaccaagatatataattatgagaccccaaagactcactacaagtctcaggtccacacaaatggataaaaataattctgaagtgaggggtacaaaatacagacatgaggagaggaagtaaccctctgagccaggtcactataacgtaaaaatcaacaaaggacaatctagaccaaaccagagcaaagcacatctttcaagaactctggctaacaatgtattattatctttgcttaattaaggcaaactgaaagtttatgtccaactcccacatatatcatgtgcggttgtctataartcatgcataaattacttatagaaattaattctat

SEQ ID NO: 116959 - DNA, 547 bp, Homo sapiens
aaacaggttcaatttcacacaccttcatcatgtggatatactttgcgttcttttttttttctttttcttttttgagacagagttttgtttggttgctcaggctggagtgcagtggctcgatctcgtctcactgcaatctccacctcctgggcaccagtgatcatcccacctccgtctccccagtagctgtgactacaggtatgagccaccacgccaggctaattttttgtattttttgtaaagatggggtctcactctgttgcccaggctggtcttaaactcctggactcaagaaatccacctgccttggcttcccaaaatactgggattacaggtgtgaggcattgtgcccagcctatactttgggtttttaatattataaattaaatctttaggtgcttgttctggatagtctagacatttggagtcaatatctttccttctcccttacttctctttatcttacagcatccttttgyagatcctccatggatctagtaacagtcttgtcatctttctcctgacggtgctatagggcagctcactt

SEQ ID NO: 116960 - DNA, 351 bp, Homo sapiens
tgattccattccattccattccatttcaatccattcccttccattccatttcattccattccattccattccattccattccattccattcctttccattccattccatgccattcmactcgggttgattccattcctttccattccattctagttgaacccattccattccattccattgcattccattccattccattccattccattgcacacgggttcattccattccattccattccattccattccattccatttcgttccattccattctattccttaccattccattccattccattcccttccatgccatttcactcgggtttattccattcctttccattc

SEQ ID NO: 116961 - DNA, 556 bp, Homo sapiens
  misc_feature (1)...(556): n = A,T,C or G
nnnnnnnnnnnnnaaaaatggaagggcaagaacaaagatacagatacaaggatgatgagagagaaaggcagagatgtcatgttaactgaagcatctgtttacatggcctatgaaggaagagaacccagataagagattctgggggatgaagctcaggccaaatccttggccttagtttgcccctgggtgttgctgacctctaaaarctgcagctgaaatggaaacaaatctgtccgagatgtttctgtccatctgaggtctgttcttttcgcctgagaccatcaccttgatatataccaccgtactgtattcgttttctatggctatcctaacaaatgtccacaaacttactggcttaaaacaacgcaaatgtattatcttacagttctggaactcagaatccctaaaggggtctcactgggctaagatcaagatgttggcagggctgcattcctttctggaagctctagggctgaattcttgtccttgttttttccagcctgaccacatttgttagccaagtccttcccatggtgccatctctctggttctccct

SEQ ID NO: 116962 - DNA, 556 bp, Homo sapiens
  misc_feature (1)...(556): n = A,T,C or G
nnnnnnnnnnnnnaaaaatggaagggcaagaacaaagatacagatacaaggatgatgagagagaaaggcagagatgtcatgttaactgaagcatctgtttacatggcctatgaaggaagagaacccagataagagattctgggggatgaagctcaggccaaatccttggccttagtttgcccctgggtgttgctgacctctaaaaactgcagctgaaatggaaacaaatctgtccgagatgtttctgtccatctgaggtctgttcttttcgcctgagaccatcaccttgatatataccaccgtactgtattcgttttctatggctatcctaacaaatgtccacaaacttactggcttaaaacaacgcaaatgtattatcttacagttctggaactcagaatccctaaaggggtctcactgggctaagatcaagatgttggcagggctgcattmctttctggaagctctagggctgaattcttgtccttgttttttccagcctgaccacatttgttagccaagtccttcccatggtgccatctctctggttctccct

SEQ ID NO: 116963 - DNA, 609 bp, Homo sapiens
gaaatcagggctcctttaagggcgcaaaaaaaaatagaacatctttctcatttgcttcaggggacawgcaacctaacatgccattttccctacagagtctgtgatcaagagttttaggagatctgaattcatgacaaaattaaaaaagcaaaaagttcagaacattcaatctgctcagcaattcactttgtgatgttcttctgtggtgtaatcaatgctgaaacttgactcacaataccaagaagggcatgggttatgtcttcattacaggaacgaggcctttttgtcgaattctcatttataacttgttctcctattgtaatattttattaaagaaattagcattcacagaaaacatcactttcataagatctttacagtaataacaacaacaaagtaacagctttgcaaaccagacagaacgtatgagtctccctaccgtttagcaagacaattttttattttgctcgtaaggtgcaaattcatgtcagcattaattcatgtaagcatttgtatttcaaaagctgtggttggatcacatcattgtgtcataatttgtagaacaggaaaaatgaatattttttaaagtagtttgattaaatatagtga

SEQ ID NO: 116964 - DNA, 551 bp, Homo sapiens
ccaaagagagttttcacaaagcaaatttaaaaaataattcatgcccaatttatagattttttttttcttttatggatttggtgtcatatctaggtctcttcacaaagctctgggtccctaggattttctcctatgttttattctaaaagttttatagttttctgttttacatttaaatctatgatccattttgggttcatttttctggaagatttgaggtttatgtagagtgttttttttttttttttttcctgtggttgtccaattgctgcaggaccagttgttgaaaaggctatccttctttcactgaattggtttgcacttttgtcaaaagccagttagccaaatgattctcttttaacagtttcagctgattagatccagttgtagtgatacagcattttgttttcatattcataggcaaatgctgtcataactggatttttttccttttccatggcataggcagaatataaatgtgtgattaattatayttgaattcctaagtaactttagtagccctcaagctaggacagatgcatgactagtta

SEQ ID NO: 116965 - DNA, 563 bp, Homo sapiens
gtcatgattaatttagagagacagcaacaaagactcttgtttttctgagatggagtcttgctctgtcacccaggcaggagtgcagtggcacaatctcagctcactgcaacctctgcctcctgggttcaagtgattctcttgcctcagtctcccaagtagctgggattacaggcatgtgttaccacgcctagcaaatttttgtatttttagtagagatggggtttcatcatgttgcacaggctggtctcatattcctgggctcaagcaatccacctgcctccacctcccaaagtgctgggattacaggcgtgagccaccaagcccagcccaaagacacttttattggcctaaaaatatttacgttaatgaagtagctttgcttctttgatcataatgaaaggaaatttaagttaaaaattgttaaagtagtcatcagtattttcattttaaaacttaagattcagtggactgttattgttcctaygcatactaactttatgaatcattcactcctgaatcaagcttttctgtgcaaccgagtaggtgctatttataagtgaatg

SEQ ID NO: 116966 - DNA, 647 bp, Homo sapiens
gatttagccattacacaatgtataagtatacatttcaaaatatgctatatatcataagtatgtaaaatttttgtcaattaaaattttttaatgctaatggytcatttgtttatgtacatttatctcaataaaaaatgaatccaacctagattatattcatctttgtaccaatatagtcataattttaaaaatatatttatgaaggagtctataaggcaaaagtgcctaggacctatgaaagtcataatgcagccctaaccaagtgcacaggatgcagagacaagtggaaggaacctgagccatctgagtgagaaagggtagttggtcagagcacagcgagtaagggacaggctcatgtgtgcggaggctggggaagccggcagaggcccagccaggcatggcaaagcctcgggatgctaggtgaagtgccaataaagagttttaaggagactgacattttcaaagatcactctgggctgctgattggagtgtggactagtcagagtcaggaagagtggttacgaggagcccagattccaggatactgctgtaatccaagcaaaaaatgatggctgttgctcggatgctggtagaggagatgtagagagatgcatggctttgagacacttggacaatcaacaagatca

SEQ ID NO: 116967 - DNA, 647 bp, Homo sapiens
gatttagccattacacaatgtataagtatacatttcaaaatatgctatatatcataagtatgtaaaatttttgtcaattaaaattttttaatgctaatggctcatttgtttatgtacatttatctcaataaaaaatgaatccaacctagattatattcatctttgtaccaatatagtcataattttaaaaatatatttatgaaggagtctataaggcaaaagtgcctaggacctatgaaagtcataatgcagccctaaccaagtgcacaggatgcagagacaagtggaaggaacctgagccatctgagtgagaaagggtagttggtcagagcacagcragtaagggacaggctcatgtgtgcggaggctggggaagccggcagaggcccagccaggcatggcaaagcctcgggatgctaggtgaagtgccaataaagagttttaaggagactgacattttcaaagatcactctgggctgctgattggagtgtggactagtcagagtcaggaagagtggttacgaggagcccagattccaggatactgctgtaatccaagcaaaaaatgatggctgttgctcggatgctggtagaggagatgtagagagatgcatggctttgagacacttggacaatcaacaagatca

SEQ ID NO: 116968 - DNA, 647 bp, Homo sapiens
gatttagccattacacaatgtataagtatacatttcaaaatatgctatatatcataagtatgtaaaatttttgtcaattaaaattttttaatgctaatggctcatttgtttatgtacatttatctcaataaaaaatgaatccaacctagattatattcatctttgtaccaatatagtcataattttaaaaatatatttatgaaggagtctataaggcaaaagtgcctaggacctatgaaagtcataatgcagccctaaccaagtgcacaggatgcagagacaagtggaaggaacctgagccatctgagtgagaaagggtagttggtcagagcacagcgagtaagggacaggctcaygtgtgcggaggctggggaagccggcagaggcccagccaggcatggcaaagcctcgggatgctaggtgaagtgccaataaagagttttaaggagactgacattttcaaagatcactctgggctgctgattggagtgtggactagtcagagtcaggaagagtggttacgaggagcccagattccaggatactgctgtaatccaagcaaaaaatgatggctgttgctcggatgctggtagaggagatgtagagagatgcatggctttgagacacttggacaatcaacaagatca

SEQ ID NO: 116969 - DNA, 647 bp, Homo sapiens
gatttagccattacacaatgtataagtatacatttcaaaatatgctatatatcataagtatgtaaaatttttgtcaattaaaattttttaatgctaatggctcatttgtttatgtacatttatctcaataaaaaatgaatccaacctagattatattcatctttgtaccaatatagtcataattttaaaaatatatttatgaaggagtctataaggcaaaagtgcctaggacctatgaaagtcataatgcagccctaaccaagtgcacaggatgcagagacaagtggaaggaacctgagccatctgagtgagaaagggtagttggtcagagcacagcgagtaagggacaggctcatgtgtgcggaggctggggaagccggcagaggcccagccaggcatggcaaagcctcgggatgctaggtgaagtgccaatraagagttttaaggagactgacattttcaaagatcactctgggctgctgattggagtgtggactagtcagagtcaggaagagtggttacgaggagcccagattccaggatactgctgtaatccaagcaaaaaatgatggctgttgctcggatgctggtagaggagatgtagagagatgcatggctttgagacacttggacaatcaacaagatca

SEQ ID NO: 116970 - DNA, 472 bp, Homo sapiens
gaccaacatccttctgcccggtggcttgctctcagctcctcttcgttgggccttgggcagccagactgtctagttttaatccttgctctgccacctgtgaccttggacaagttacctaccttcagttacctcatctacaaaatgcagatattaataataccctcttttcaatttattcagaggattaaaagagttaataaaaagtaaaaaataaaaagacttggtaagcataggcacagaggaaaaaaaagtaaaaataaataattaaataaaaagaccagtgcctagcacataaaagttcatcaggaattaattctataatatgaactcaattttgcaaaacttcaaagtacatataacttttaacttactagggtatacataccagtaataaattyacaacggtagacatgtttgcctactgtaaatataacaaagactaaacaagcagatactaaatcattaagcaatt

SEQ ID NO: 116971 - DNA, 542 bp, Homo sapiens
ctgctgtcaccagatttattctaagaccgtttcttcactgttactcccctgtttctcaaccagttacacagaaagatgaatatccaggcatggtgtcatgtgcctgtagtcccagctactcaggaggctgaggcggcaggatcgcttgagaatgtgagattcagactgcagtgagccatgatcatgccaccgcactccagcctgggcaacagagtgagattgtctcaataaataaataartaaataaataaataaataaatgtggtctatccatgcaacggaatactataaaattatcagccttaaaaaagaaagaagccctgtcacatgctgcaatatagatgaaccttgaaaacattacactaattgaaatcagcccatcacacaaagacaaatgctgtacgatttctcttacattaggtttgaaattagtcaaactcatagaaacagaaaatagagcggttgtttccataagccaggggatagagaaatggggagttgttgtatagtggctatagtttcagttctccaagagaagcaag

SEQ ID NO: 116972 - DNA, 587 bp, Homo sapiens
gaggcggcaggatcgcttgagaatgtgagattcagactgcagtgagccatgatcatgccaccgcactccagcctgggcaacagagtgagattgtctcaataaataaataaataaataaataaataaataaatgtggtctatccatgcaacggaatactataaaattatcagccttaaaaaagaaagaagccctgtcacatgctgcaatatagatgaaccttgaaaacattacactaattgaaatcagcccatcacacaaagacaaatgctgtacratttctcttacattaggtttgaaattagtcaaactcatagaaacagaaaatagagcggttgtttccataagccaggggatagagaaatggggagttgttgtatagtggctatagtttcagttctccaagagaagcaagttctagaaactcgttactcaacatgtatatttttaacactactgcactgtatacttacaagtggttaatatggtaaattttatgttgtgccttatcaccataatgtttttaaaagaaggggtttgtgtttcccttcgttgtgatcacccatttttcacttcagcattttgaact

SEQ ID NO: 116973 - DNA, 587 bp, Homo sapiens
gaggcggcaggatcgcttgagaatgtgagattcagactgcagtgagccatgatcatgccaccgcactccagcctgggcaacagagtgagattgtctcaataaataaataaataaataaataaataaataaatgtggtctatccatgcaacggaatactataaaattatcagccttaaaaaagaaagaagccctgtcacatgctgcaatatagatgaaccttgaaaacattacactaattgaaatcagcccatcacacaaagacaaatgctgtacgatttctcttacattaggttygaaattagtcaaactcatagaaacagaaaatagagcggttgtttccataagccaggggatagagaaatggggagttgttgtatagtggctatagtttcagttctccaagagaagcaagttctagaaactcgttactcaacatgtatatttttaacactactgcactgtatacttacaagtggttaatatggtaaattttatgttgtgccttatcaccataatgtttttaaaagaaggggtttgtgtttcccttcgttgtgatcacccatttttcacttcagcattttgaact

SEQ ID NO: 116974 - DNA, 587 bp, Homo sapiens
gaggcggcaggatcgcttgagaatgtgagattcagactgcagtgagccatgatcatgccaccgcactccagcctgggcaacagagtgagattgtctcaataaataaataaataaataaataaataaataaatgtggtctatccatgcaacggaatactataaaattatcagccttaaaaaagaaagaagccctgtcacatgctgcaatatagatgaaccttgaaaacattacactaattgaaatcagcccatcacacaaagacaaatgctgtacgatttctcttacattaggtttgaaattagtcaaactcatagaaacagaaaatagagcggttgtttccataagccaggggatagagaaatggggagttgttgtatagtggctatagtttcagttctccaagagaagcaagttctagaaactcgttactcaacatgtatatttttaacactactgcactgtatacttacaagtggytaatatggtaaattttatgttgtgccttatcaccataatgtttttaaaagaaggggtttgtgtttcccttcgttgtgatcacccatttttcacttcagcattttgaact

SEQ ID NO: 116975 - DNA, 451 bp, Homo sapiens
tttgtatcagacttgttttttaaacacttggtttctcacagagataggtggtttctccttaaaatcgaacatttatatggtgtattttactgtagttgctatcagaaaagttagttttcccaaatttaagttcactctggggtactatagcatgaatgtagttcattctgttgagctagytgttcacgttagtgtagttcacatatttatctggaactcaaaaatgaggggttgagaggggaagctaaacttcacatgtccaaatatataattttaatatttactttatatttagaatagaaaagtaattgattctagaattagaccaattgctaggattgctaggatatataaaatgaagctgaatgttttaactccggaatttttctgaatagtctaagaaagaaggctgaaatgtaccacttgccttttgacttttgcttgtgtgttt

SEQ ID NO: 116976 - DNA, 451 bp, Homo sapiens
tttgtatcagacttgttttttaaacacttggtttctcacagagataggtggtttctccttaaaatcgaacatttatatggtgtattttactgtagttgctatcagaaaagttagttttcccaaatttaagttcactctggggtactatagcatgaatgtagttcattctgttgagctagttgttcacgttagtgtagttcacatatttatctggaactcaaaaatgaggggttgagaggggaagctaaacttcacatgtccaaatatataattttaatatttactttatatttagaatagaaaagyaattgattctagaattagaccaattgctaggattgctaggatatataaaatgaagctgaatgttttaactccggaatttttctgaatagtctaagaaagaaggctgaaatgtaccacttgccttttgacttttgcttgtgtgttt

SEQ ID NO: 116977 - DNA, 451 bp, Homo sapiens
tttgtatcagacttgttttttaaacacttggtttctcacagagataggtggtttctccttaaaatcgaacatttatatggtgtattttactgtagttgctatcagaaaagttagttttcccaaatttaagttcactctggggtactatagcatgaatgtagttcattctgttgagctagttgttcacgttagtgtagttcacatatttatctggaactcaaaaatgaggggttgagaggggaagctaaacttcacatgtccaaatatataattttaatatttactttatatttagaatagaaaagtaattgattctagaattagaccaattgctagsattgctaggatatataaaatgaagctgaatgttttaactccggaatttttctgaatagtctaagaaagaaggctgaaatgtaccacttgccttttgacttttgcttgtgtgttt

SEQ ID NO: 116978 - DNA, 637 bp, Homo sapiens
ccttcagtgaccacgctgatcaagcccaatttctctctcacagaccctcagagccccatgtctctcttctttgtgccatttattgtcactgccattttctgtgtgcttcagtgaatagataattaagatttctctcccttcaccagactgtacaatgtctcttaatgcttgacactgaattctcgccacctagaaaacacagtgcctagtgcgtaagagggactcaaatggtatttgaataaaatgacaatcaattacacgtatctgcgtatagcatttttttagattatcacctgctaatgcttttactgtctccttaaaataattcactgtgatatcttgaatagagacgacagcttctccagcccgtmtggtccattcttcagcttctttctccagggcaactacccttctaggacctaggtcatcctcatccaaggacttctacagacagaagggaaaattatcttagtaagagctaatagttatgtagaaccattaggaaattgaaaggaaattggtcacatggattaatttaactacactactactcagtcagttaaattttcattcattcagcagtcccttactgcatatgaataaggctctaagctgagcaccacctggaagacaaaag

SEQ ID NO: 116979 - DNA, 525 bp, Homo sapiens
gcactctttcagtgaatgccagcaaatctgttattccatcggtaaaatcgtaytgttgctctcctgttaatgtcatatttatagaagtatcatgaggatgccaaatgctaaaaatggagatgatctagtaactagaaatccccaccgcagggagcacacacacctatctccctgcatcctaacaatgtgatgtgttttggaacacagacattagaacttcatgaagttttaactgttgagtctttcccaagcatcatcaagttacgatttaggcaatatataactgaaatgcattcattcatcatgcataggcacaatcacataaatattgcacaaaatatgtcccgaacagaaacccagaggtacaaaaacatatttcactttgtaaagaagtctgtgagaaaatataactctgtgattgtatagacacgtttcctgataatacattgacattcacgaacagtagattgcactgcagtttgtacacattttaagtttcataaacttctccttgattttcaaaga

SEQ ID NO: 116980 - DNA, 457 bp, Homo sapiens
gggcaaaactgaatttctctcaaagaagaaaaaccagacagaacagttatttaactttctgtaaacagagcacttatttcatgatactcaagaacattttcttaaaacaagtgaaggttgttgaaagaggatatcacatggtaggggaaattgatcaagaactgtcagcatcaaggcatataaattattggccttaaaaggtaatggcagaatcctttaggcastcaggcaaaacaatcaaaccagtatataaaaaggtgaaaaaaattaggctggcagctctgtatgccagaagagagtggagtgattgctgtaatctcaaggatagtaaatatgagctaaagattttatatcatatagtaaatacatgctaaagattttatatccaaactgtccttcgggtgcataaaaagccatatattcattagtaataaatataaagagctgaaagagtctt

SEQ ID NO: 116981 - DNA, 667 bp, Homo sapiens
cttttgcttgaaaataagatattgattatttcaaatagtggctgaattgaaagaccaagaagagaaagggtgatctccctgtaattgaaagagagaagaccartttcttctataataaattatttgaagtagggcttcgacattttaataatgataaagaaaaccgtctcgttcacttcagccaatccccaaagaaaatggtcttctctgaaactatggaaaaaaatgtcaaaagtgaaaatccatctctgtctgcaagttaaaagtgaagaatgatataattttgccaaagaaccaaagccagaagtcactgtgagatgtggaactagaataactggaggaacttcccaagtttagaccacactcaacacacacattcacttcactccttggtagaagttcattaaaacaattggattgacagatgaccagatcagtgttttcatctttagcccgcatagtccaaagcaaatacataaatcaatgagaacatcttgaggaaccaagtggtctggaatcctttggtttatcagaatttcaattactcttattatttgtttgatttagcaaagccagcctaatttaatttgtacatttatgataatactcttttggtgctagataatcatcttgtagctcattaggtaattttcataacaaatattta

SEQ ID NO: 116982 - DNA, 543 bp, Homo sapiens
cagctcagctgcagccaaattgccttcttgagaataaacaataagaaaattaccaggctgtctgatgatggtgcttgtggttcccatgtctggccagagattgcctggcagggcctgaaacttgctgaaygttgaagtgaaggtcaggctgactggagaccacagacaggggtggcaaaggggagaggaattccagtgagaggagggggaagaagaggggagggaggcagggaaggaaagcagtattcaggggaagaggaggcaaagagatagaatgaggaaggggtggggagtgatgaaggagaggaagagcaggcaggagaggtgggaataggcacagaccaggacgaggagaaggaatatgtgttatagtagggattctccacatttctgagaatttggtgaaagctgcggatcccctccacacacacttacacacaccaacatgcacaaatatgatggtggcatacatttcagtgggttcacggaatccctaaagccctatctatggaccagagaacacaggctaaagacccccaaatt

SEQ ID NO: 116983 - DNA, 543 bp, Homo sapiens
cagctcagctgcagccaaattgccttcttgagaataaacaataagaaaattaccaggctgtctgatgatggtgcttgtggttcccatgtctggccagagattgcctggcagggcctgaaacttgctgaatgttgaagtgaaggtcaggctgactggagaccacagacaggggtggcaaagsggagaggaattccagtgagaggagggggaagaagaggggagggaggcagggaaggaaagcagtattcaggggaagaggaggcaaagagatagaatgaggaaggggtggggagtgatgaaggagaggaagagcaggcaggagaggtgggaataggcacagaccaggacgaggagaaggaatatgtgttatagtagggattctccacatttctgagaatttggtgaaagctgcggatcccctccacacacacttacacacaccaacatgcacaaatatgatggtggcatacatttcagtgggttcacggaatccctaaagccctatctatggaccagagaacacaggctaaagacccccaaatt

SEQ ID NO: 116984 - DNA, 543 bp, Homo sapiens
cagctcagctgcagccaaattgccttcttgagaataaacaataagaaaattaccaggctgtctgatgatggtgcttgtggttcccatgtctggccagagattgcctggcagggcctgaaacttgctgaatgttgaagtgaaggtcaggctgactggagaccacagacaggggtggcaaaggggagaggaattccagtgagaggagggggaagaagaggggagggaggcagggaaggaaagcagtattcaggggaagaggaggcaaagagatagaatgaggaaggggtggggagtgatgaaggagaggaagagcaggcaggagaggtgggaataggcacagaccaggacgaggagaaggaatatgtgttatagtagggattctccacatttctgagaatttggtgaaagctgcggatcccctccacacacacttacacacaccaacatgcacaaatatgatggtggcatacatttcagtgggttcacggaatccctaaagccctrtctatggaccagagaacacaggctaaagacccccaaatt

SEQ ID NO: 116985 - DNA, 601 bp, Homo sapiens
gccagtggtggtgcctggaggggaccccagcggccttggggatgctggcaatgttctttccttaatctgagagctggttgcttgggtgcactcagtatgtgaaaaattcattgagttgtactttatgcactcttctgtacatgtttttttaaaaaattcaaaacaagaggagaatggtaagttggcacttcttggcaccattccgagggctcccacgtgtttatgccatttaattctcctaacatgtaaaagaagtgatgctttcttcattttttgattttttcagtaggggttatggtagcactgagagattatagaatagggtagtagcacattgctggcaagtctgagtaaacctgggtcttccaaacttaaatcctaagctcaagttctcaccaaatatttacaatagatggagcaaagttataaccccagaaccaaggagaggagagccagcaattagaccctctctaggattttaactaaaatccatgaccccaaggagaccttacaagtcaggaaasaatctgtgttcccagggttgtgggtgggttctgagctacttagggaccccttgtaggctctctgcaacattcaaaat

SEQ ID NO: 116986 - DNA, 587 bp, Homo sapiens
ccaccatgaagggtcatctgaaaaaagagaactcataaagctaagcgttttttagacattggcaagaaaacctcatattaaatttaagagagagagcactgagtattctaatattttttctcatgataaaaccactcaatatcagtaagttttgcctaatccaggttcttgttctctggcagcmagtcataatgataagtaatttagtttatacaatgcaagttgaaatactggattttcaaccagagtaaaatatttgagactcaaagagcgataaaatcttgggaattaatggcatagtaccacagtggattcaaagcacaacatgcctcaaagaaacatagaaaaataggtcacatccctgtcacatctgtcagaaagatgcacaaaacaatatttagtacctaatggctgcctctgtcattgaaatattgagaagactaaaaggaaaactctgaattatttatatgcaacactgtgacttcagaaaaaaatataacttctagttcctgcagctagttttacctcaactctctacaccataactgaccaacagaacttgggtgatgatgaaatgttttatgaca

SEQ ID NO: 116987 - DNA, 587 bp, Homo sapiens
ccaccatgaagggtcatctgaaaaaagagaactcataaagctaagcgttttttagacattggcaagaaaacctcatattaaatttaagagagagagcactgagtattctaatattttttctcatgataaaaccactcaatatcagtaagttttgcctaatccaggttcttgttctctggcagcaagtcataatgataagtaatttagtttatacaatgcaagttgaaatactggattttcaaccagagtaaaatatttgagactcaaagagcgataaaatctkgggaattaatggcatagtaccacagtggattcaaagcacaacatgcctcaaagaaacatagaaaaataggtcacatccctgtcacatctgtcagaaagatgcacaaaacaatatttagtacctaatggctgcctctgtcattgaaatattgagaagactaaaaggaaaactctgaattatttatatgcaacactgtgacttcagaaaaaaatataacttctagttcctgcagctagttttacctcaactctctacaccataactgaccaacagaacttgggtgatgatgaaatgttttatgaca

SEQ ID NO: 116988 - DNA, 559 bp, Homo sapiens
actgttaatgctcaaagttaatcatagtagttaccttccttcattctcctctaacatccccagtactggctcagaaattgaaagattgctcctgaataatggagggtagaggaggcatcagcagacccagaacagtgttggtagagacggaggaaactgggtcttccagcttggagccatatttttwagcttaggtgtgtgtgggttgtgatgttggctttctaaccttcataaaaccatagaaggtaagaaactgccattcacctactcatgtaccagtaccaaccagaaagggttagtgttgcagtaatttttagcaggagatatttttgacaattaacaccaaaggtcaaaaataattaatgttatagcaatttgatttatgggtcaaatatttagggaaacctgttaaggaaaaagagaaaaaaagaagacatgatcagtcagcccttagatgtagaagcccaggacccattaaaatgaaacattgcaaagccatagcactcagtcctcccaaacccacactttattttcttggtttatatattcagaatgttta

SEQ ID NO: 116989 - DNA, 586 bp, Homo sapiens
taccagtaccaaccagaaagggttagtgttgcagtaatttttagcaggagatatttttgamaattaacaccaaaggtcaaaaataattaatgttatagcaatttgatttatgggtcaaatatttagggaaacctgttaaggaaaaagagaaaaaaagaagacatgatcagtcagcccttagatgtagaagcccaggacccattaaaatgaaacattgcaaagccatagcactcagtcctcccaaacccacactttattttcttggtttatatattcagaatgtttatgattttttattctctgatcaccttttttttccaaacatttgggtctcaaaagtaagtttccagggaaggaaaacaacacacaaaatggatagtggctgttttttttttcctttgaaagctttcacatagattaccatctcaaaaacagtgacatgctaagaatgcagaaatcagatgaaaaatgagccaatgggcaacaaaaagtagctgtgagaaatgaggtttattagcatcttcccgggggatgtcagagaataagggaagctttcaggactttcttccaactcttccttactatt

SEQ ID NO: 116990 - DNA, 528 bp, Homo sapiens
caaccaaacacaagtgaagacagcatgaaaagaaaaagatattattaagttggtgcaaaagtaattgcagtttttgccattaaaagtaatggcaaaaatactaaagygtaatactaaattgtcagacaaaaattaacaaaatggcagtagaaagtacttacctatcaataattgtttaagtatcaaataaattatctaataaaaacacattgctatggtttgaatctccccttcaaatttcatgtgggaatttaactgctattgttataaaattataaagttagacgtttaagaagataataggtcctgagggacctactctcgtgaatgaattaatgtcattatttccagagtgggttagtcggcaggaaagtgggtctattataaaagtacgctctctggtgtgcaccttcagtcatcctcatgcctttggccattttgtgatgtggaaatacgattctcatcagatgtcaatgggatgctcttggacatccataatctaaaattgtgagctaagtaaactcctat

SEQ ID NO: 116991 - DNA, 528 bp, Homo sapiens
caaccaaacacaagtgaagacagcatgaaaagaaaaagatattattaagttggtgcaaaagtaattgcagtttttgccattaaaagtaatggcaaaaatactaaagcgtaatactaamttgtcagacaaaaattaacaaaatggcagtagaaagtacttacctatcaataattgtttaagtatcaaataaattatctaataaaaacacattgctatggtttgaatctccccttcaaatttcatgtgggaatttaactgctattgttataaaattataaagttagacgtttaagaagataataggtcctgagggacctactctcgtgaatgaattaatgtcattatttccagagtgggttagtcggcaggaaagtgggtctattataaaagtacgctctctggtgtgcaccttcagtcatcctcatgcctttggccattttgtgatgtggaaatacgattctcatcagatgtcaatgggatgctcttggacatccataatctaaaattgtgagctaagtaaactcctat

SEQ ID NO: 116992 - DNA, 593 bp, Homo sapiens
ttctgaaccaaatcccaatgtctccagtactcccatcacagacttctgacataaggcacaaacagatctttaaaaatagcctaccatagaggtctccaaaaatgtgcacaaatttatccagaatcctcaaagcaatggacgagcagtcagatcacacaggtcccccacagcataaagggaagagttcagctcttactgtgaatgcactggtagatcactgatggacaggagaagtcttagagaatttaaaagcataataagcatagtgcaggaaattgccctctgtgacagtaaaaaaagaaatctaggcttgtcaaaaaaaaaaaaaacaattccrttgaagcagagcttgcaaaaccacattttgaactctggtttcctctttgacctttgggcctctcacatgtgttatctcctctgctcatacgttcccgccaatctgggtgtacagctattgtcttctcccttttacattccagggatacttcctttgctgcatgcttaaaggctgttcatcacatcccttcttctttcccagaatagcaattaggtccaggaaaaaacaaacaactcccagagtctccctcaggagt

SEQ ID NO: 116993 - DNA, 432 bp, Homo sapiens
aacagccacccacagtcagttagaaatctctctgttgtactcgcagattacatttttaatcaatcactttctcttctcctattcaatcagcaaatatccaagcaactattaattttcatatgaagaaaatgtaactttttcctgcttactttctgttgttttcacaatcacttctctactaagcatacagagtgactattatgaactaaactgtgttccccgaaaatcagtatgttgaagttttaactcccaaacagatggtggttrgaggtgaggtctttgggcaacaataaggtttaaatgagttattgagagtgagaattagtacccttcttaaaaacagatcaaacaacttgctctctctatccacctatgagaacacagcaagaaagcacccatctgctagctgggaagagaggcatcaataggaat

SEQ ID NO: 116994 - DNA, 604 bp, Homo sapiens
tcatacaactaaaatataacaaatccacataagctaaaaataactggagaaaatatttgcaaggtatattgagaaatacattaccagcacccaagaagtttcttattgtatgatcatcacatttttgtgtgtgtgtacaaattaactgtgattataccttctaataccatagattactcttgcatgtttttgatatttgcacgcatggactcacacaatataaattcttttgtacatagctttttggttcaacattatgaaattcatttatgttayatataactgtcatttgtttattatcatctgtctaaagggatatttggttgaatttgctaacaaatcttgtgacgtttaactgatgaatataactgatgttttaataaattcagccattactaaaatctctgtgtttaaattttttgaagtaggaacatatgtgtgaaatgttttctttcttgcaaagtctatttcactaaacagaggagaaattttaacaaattaattttcaaacataatgttgagaattctacctctctccatgatgtagtaaaatagagtatatttatcacctcaccttaaataaccaacaaacaagacaaaacat

SEQ ID NO: 116995 - DNA, 604 bp, Homo sapiens
tcatacaactaaaatataacaaatccacataagctaaaaataactggagaaaatatttgcaaggtatattgagaaatacattaccagcacccaagaagtttcttattgtatgatcatcacatttttgtgtgtgtgtacaaattaactgtgattataccttctaataccatagattactcttgcatgtttttgatatttgcacgcatggactcacacaatataaattcttttgtacatagctttttggttcaacattatgaaattcatttatgttacatataactgtcatttgtttattatcatctgtctaaagggatattkggttgaatttgctaacaaatcttgtgacgtttaactgatgaatataactgatgttttaataaattcagccattactaaaatctctgtgtttaaattttttgaagtaggaacatatgtgtgaaatgttttctttcttgcaaagtctatttcactaaacagaggagaaattttaacaaattaattttcaaacataatgttgagaattctacctctctccatgatgtagtaaaatagagtatatttatcacctcaccttaaataaccaacaaacaagacaaaacat

SEQ ID NO: 116996 - DNA, 590 bp, Homo sapiens
aatagtgaaaatcaaatgatttttgcaattatctaaatggacaattgtctcatagtagaaaaccagaaaattcacgcagccagatccctgcccactaagtcatataatcttttttttctttttcaaattggaaactttatcccaatccttgttttagctgtatgctgacgtagatgaggagtkcttggtacaagtaactttgctcactattgtaggaggaaagacatacatctttatgtaggatacagacgttgatgagattgatgtgtttttgcataaaaaatgcagaaatggtcaaactcttgcagtcaggagctacaggaaaactgttgagttttattagttaaaccaaaactgttattggaacagcaaaaatccaaaatagtgatttccagcttacccctaccaaatgggtcagctatctagaacattcctatgacgttgtttctaagcaattagaagcctggaatattttgagtggtctgaaacactttcctccacaaaacagatgcctgttttaccagtttttcaaccccattgtgatgatatatttctttgttttataatgaaactgttgtgctccttttcag

SEQ ID NO: 116997 - DNA, 552 bp, Homo sapiens
gtttacaaacaacagaaatttacttctcacagttctggaggctggaaagtgcaagattatggtgctgacagattgggtgcccagtgagggctggctttctggttcatagatgattgccctttcactgtgtcctcacatgttggaagggtcaaggaagctcactgtggcctgtattataaagacaatgatcctattcatgagagctctgctctcatgacctaatctcccaagagctttacctccctataccatcaccttgggagttaagatttcaaagtatgagttttgagggacacaaatattcagtccatagcactccacatagagtaggtttcttttgtgtttgcatgcaagagaaatgaggttattcagattcttcatgagctaagagttatactgtactaaacagcaaattgatccttttcaatatatcctcygtaactgaaaaaaagtactacagaaacttccaggatgtttataaaaacaaactaaactaaataggatctaaaagctcttcaagatttcttaaagctcttacaaactgagataagc

SEQ ID NO: 116998 - DNA, 485 bp, Homo sapiens
agaccaggatggaaatactggctcttctttactagtttgtgatcttgggtggtgataggaaagcatttttctattctatgcaraacacccagtgccacgaagaaagccgtgacaggtgcagcctgaatgccagtcaactggcaaattgtggcatctcttaacatttatcaaaatatccttatctataaaaacggggataataatacttacctctccaagctgttgtgatgatggaaggcttgagctccaaaccagctggtacaaatcccaactctgtccctggctagatgtgtgcccttgggcagcttagatgctcactctgtgcctcagttttctcacctgcaaaaggataataaaagtaggacctagtttataggattggcatcaggatcaattagttaatatatgtaaagtggttggcagataataagtgttcagtcacttttagttcatcctggtctggctggctccaaagcagggaattc

SEQ ID NO: 116999 - DNA, 581 bp, Homo sapiens
ttaataataaaattgaaacatagtacacctatatattttgcaaacccattaagaaaaaaaatcagcttgtttactagctaaacatagctatggcagaaatataaatggaacaaygtagaacaaaatacaattaccaactgttctgaattatgtttttaattatatttttaatgaatatactatgatgtgtgtattggtcaaattttaaaataaagcatttttaataacttggcaaaacttataggtaaagattagaaggatttattgaaaaatgtaaaagcaattgacctgttcacagttgaaggctttctattttatggcaaaatttattatcaactctaaagttattatacacattttctaaagttagaacataattaattagaaattatctttctatgctaacattctcagtcagtttcaactacaggacccaaagtattagcatcattatcaacctggtatcagcttctttgaattgcagaaaggaggtgcttgtaatatgagggaacttacaaaactcgaatatagaaacattgaaaacacaggctgcttctatgaatccattcattttgagactt

SEQ ID NO: 117000 - DNA, 588 bp, Homo sapiens
gtgacttccaggggacttaaagggccagaattctttcctcttgcccttttgtccttttttcctttctgggaggcagacattagagactaagatattcaaatgcaactrtatatatgaagaaaattaaaaagtgactttgcatacccagggaaaggttcaggttcaggaaaacctgtaaaaaccttaagtttatacctctggctgatccttagcacagagacagcctaggacaatcaaaaaacaaaaataatacaaacaataacaaaaccagcacaacctagaaaatggaaagagtctgatttccagagttactacaaatattcagttttcaaccaaaaaaaaataataataacaaggcatacaaagaaataaagtatggccctttcaaagaaaaaaataaaaatcaacagaactctccctgaaaaaatatctgatagcagatctactagacaaatactttaaaacaactgtattgaaaatactttgaaaactaaagggagatctgaagaaaatcaagaaaatgatatatgagccaaatggaaatatcaaagaaagagaacctaaaatgaaacaaaaaaaaaattctgg

SEQ ID NO: 117001 - DNA, 588 bp, Homo sapiens
gtgacttccaggggacttaaagggccagaattctttcctcttgcccttttgtccttttttcctttctgggaggcagacattagagactaagatattcaaatgcaactatatatatgaagaaaattaaaaagtgactttgcatayccagggaaaggttcaggttcaggaaaacctgtaaaaaccttaagtttatacctctggctgatccttagcacagagacagcctaggacaatcaaaaaacaaaaataatacaaacaataacaaaaccagcacaacctagaaaatggaaagagtctgatttccagagttactacaaatattcagttttcaaccaaaaaaaaataataataacaaggcatacaaagaaataaagtatggccctttcaaagaaaaaaataaaaatcaacagaactctccctgaaaaaatatctgatagcagatctactagacaaatactttaaaacaactgtattgaaaatactttgaaaactaaagggagatctgaagaaaatcaagaaaatgatatatgagccaaatggaaatatcaaagaaagagaacctaaaatgaaacaaaaaaaaaattctgg

SEQ ID NO: 117002 - DNA, 588 bp, Homo sapiens
gtgacttccaggggacttaaagggccagaattctttcctcttgcccttttgtccttttttcctttctgggaggcagacattagagactaagatattcaaatgcaactatatatatgaagaaaattaaaaagtgactttgcatacccagggaaaggttcaggttcaggaaaacctgtaaaaaccttaagtttatacctcwggctgatccttagcacagagacagcctaggacaatcaaaaaacaaaaataatacaaacaataacaaaaccagcacaacctagaaaatggaaagagtctgatttccagagttactacaaatattcagttttcaaccaaaaaaaaataataataacaaggcatacaaagaaataaagtatggccctttcaaagaaaaaaataaaaatcaacagaactctccctgaaaaaatatctgatagcagatctactagacaaatactttaaaacaactgtattgaaaatactttgaaaactaaagggagatctgaagaaaatcaagaaaatgatatatgagccaaatggaaatatcaaagaaagagaacctaaaatgaaacaaaaaaaaaattctgg

SEQ ID NO: 117003 - DNA, 599 bp, Homo sapiens
aagggagggcacattccattaacacagatctgttccctgggggttctgatggggagccaggtgggtggcacatgcagagcaccattgtcactgcctcattatgagtttggagtccagcctgaggttccaatgcaaactcagcgtagcttcacctttcaaggtccagttttaattctgctccctccagaaagatgtcccaaacttctytagcacgcaccaatccctctcctcattcacctctttacatttttattgtctatcccacaccactttgtctttctactggatacacaactctaaggaaaaagaattagcaggtatttaacacctgctttgggccaggatttgcatgattatctcatttaagcctctcagcaacccatgaagaggatgtccttatcccttttttggaaggcagggtgctaattctcagagtggagaggtagtttgcacaagactgcacagtagtctcattaatttagtcagtaaaattttattatatacctgccatgtacaggcactgctgtaggtggagcaaagccctttatctcatgcagctgattttctagtgagagaggcggaaaataaaaagtagacca

SEQ ID NO: 117004 - DNA, 599 bp, Homo sapiens
aagggagggcacattccattaacacagatctgttccctgggggttctgatggggagccaggtgggtggcacatgcagagcaccattgtcactgcctcattatgagtttggagtccagcctgaggttccaatgcaaactcagcgtagcttcacctttcaaggtccagttttaattctgctccctccagaaagatgtcccaaacttctttagcacgcaccaatccctctcctcattcacctctttacatttttattgtctatcccacaccactttgtctttctactggatacacaactctaaggaaaaagaattagcaggtatttaacacctgcyttgggccaggatttgcatgattatctcatttaagcctctcagcaacccatgaagaggatgtccttatcccttttttggaaggcagggtgctaattctcagagtggagaggtagtttgcacaagactgcacagtagtctcattaatttagtcagtaaaattttattatatacctgccatgtacaggcactgctgtaggtggagcaaagccctttatctcatgcagctgattttctagtgagagaggcggaaaataaaaagtagacca

SEQ ID NO: 117005 - DNA, 599 bp, Homo sapiens
aagggagggcacattccattaacacagatctgttccctgggggttctgatggggagccaggtgggtggcacatgcagagcaccattgtcactgcctcattatgagtttggagtccagcctgaggttccaatgcaaactcagcgtagcttcacctttcaaggtccagttttaattctgctccctccagaaagatgtcccaaacttctttagcacgcaccaatccctctcctcattcacctctttacatttttattgtctatcccacaccactttgtctttctactggatacacaactctaaggaaaaagaattagcaggtatttaacacctgctttgggcyaggatttgcatgattatctcatttaagcctctcagcaacccatgaagaggatgtccttatcccttttttggaaggcagggtgctaattctcagagtggagaggtagtttgcacaagactgcacagtagtctcattaatttagtcagtaaaattttattatatacctgccatgtacaggcactgctgtaggtggagcaaagccctttatctcatgcagctgattttctagtgagagaggcggaaaataaaaagtagacca

SEQ ID NO: 117006 - DNA, 511 bp, Homo sapiens
gctggtcggatagtaatgcaaatgactaatgcacccttctgaggtctcatgtggtttgagaccccaggaatctgggccaggcaggagacacataggcggtggctccaaacgagaatgagggtgattacacaagaggcagctcagtttggtgaagtgttgttctgggaatcaggagtgaggtttgctctccagtgtccctgaacaggccaggttccttctctggtttcagttaccttgtgaatgtctggctctgacatactagggggctatggaagacctggcaaatgtttagcygtgtctgcatcctaatggcagatgttaaaatccaaccacatagccttacttgttgctccctaaacacccgctttatacatcactatgcctttaaacattaagttccctttaccaggaccaggctcagggacaagtcactgtgcacatcttcctgctccccctttaagattcagttcatttctctttgactgggaagttctgactctcacagacagag

SEQ ID NO: 117007 - DNA, 585 bp, Homo sapiens
actcatgtgtcactctacctaaaataaaaggaaaatctctggcccattctgtgaacaatacaatcacccaaaacttatttatgtggcccctgaaggttatatattacactacctctctcaraaaggtattgctgatggcaggcaaatctgcccactctaaaatgccagaaatgatatcttcccactcaattcctttgattcaatggagccaggaccctggtgtttaaattcccattcacaagggagctcacaaatcaaagaaaatggcacagagaggactcctgcactaactagacctaggggtgggggttttgttatccactcaatcagtaatcagtgtgctcagtcttctggggtgcagagataggaaagtcacaactcctaggctcaatctactggagatggtaaaagcatattcaactaattttaacacttgacaacatgaagtaatgttaactaggcaatcatatcaaatgcagtgcaagccagagaaggcagcaacaaattctagctagggcatcagctgtggtgacagtgagctgaggcttgtgggatttccataatggaggcaggtgtttagagttt

SEQ ID NO: 117008 - DNA, 482 bp, Homo sapiens
ggtacaaaaacaggcatatagaccaatggagcaggatagagagcccacaaataaggccacacacctacaaccatctgatcttcaacaaagctracaaaaacaagcaatggagaaaagactccctattcagtaaatggtgctgggataactggatagccatatgcaaaagattaaaactaaccccctcttccctttttttttgttatttttttttttttgagacagagtctcattctgttgcccaggctggagtgcagtggtgtgagttcagatcacagcaaccttcacctcctgggttcaagcaattctcgtccctcactccacccaagaagctgggattacaggcatgtgctaccacacccaggtagttttttacttttagtagaggcagggtttcaccatgttggccaggctggtctcaaactcctgatctcaagtgatcagtctgccttggcctcccaaagtgctgagattacaagcgt

SEQ ID NO: 117009 - DNA, 482 bp, Homo sapiens
ggtacaaaaacaggcatatagaccaatggagcaggatagagagcccacaaataaggccacacacctacaaccatctgatcttcaacaaagctaacaaaaacaagcaatggagaaaagactccctattcagtaaatggtgctgggataactggatagccatatgcaaaagattaaaactaaccscctcttccctttttttttgttatttttttttttttgagacagagtctcattctgttgcccaggctggagtgcagtggtgtgagttcagatcacagcaaccttcacctcctgggttcaagcaattctcgtccctcactccacccaagaagctgggattacaggcatgtgctaccacacccaggtagttttttacttttagtagaggcagggtttcaccatgttggccaggctggtctcaaactcctgatctcaagtgatcagtctgccttggcctcccaaagtgctgagattacaagcgt

SEQ ID NO: 117010 - DNA, 482 bp, Homo sapiens
ggtacaaaaacaggcatatagaccaatggagcaggatagagagcccacaaataaggccacacacctacaaccatctgatcttcaacaaagctaacaaaaacaagcaatggagaaaagactccctattcagtaaatggtgctgggataactggatagccatatgcaaaagattaaaactaaccccctcttccctttttttttgttatttttttttttttgagacagagtctcattctgttgcccaggctggagtgcagtggtgtgagttcagatcacagcaaccttcacctcctgggttcaagcaattctcgtccctcactccacccaagaagctgggattacaggcatgtgctaccacacccaggtagttttttacttttagtagaggcagggtttcaccatgttggccaggctggtctcaaactcctgatctcaagtgatcagyctgccttggcctcccaaagtgctgagattacaagcgt

SEQ ID NO: 117011 - DNA, 539 bp, Homo sapiens
aaaacccaatgcaaggaaattaagaatcataataaggtgaaacaggaactgaaggattaaagagccagaatataaaagaacctaacagttctgacagaactaaataacacaggccaggtgcaacggcttacacctggaatcccagcactttgggaggccaaggtgggtggatcatctgagatcagaagttcaagrccagcctgaccaacatagtgaaagcccgtctgtaactaaaaatacaaaaattagcagggcatggtggtgggcgcctataatcccagctactcgggagattgagacaggagaattgcttgaacccgggcggcggaggttacagtgagccaagattatgccattgcactccagcctgggtgacaagagtgaaattccgtctcaaaaaagaaaaaaagaaagaaccaagaaagaactaaacaacacaatacaagaatttcacaatgcaatcacaagtattaacagccaaataaactaagctaaggaaagaatctcagaatctgaagaatggttttctgaaataagat

SEQ ID NO: 117012 - DNA, 539 bp, Homo sapiens
aaaacccaatgcaaggaaattaagaatcataataaggtgaaacaggaactgaaggattaaagagccagaatataaaagaacctaacagttctgacagaactaaataacacaggccaggtgcaacggcttacacctggaatcccagcactttgggaggccaaggtgggtggatcatctgagatcagaagttcaaggccagcctgaccaacatagtgaaagcccgtctgtaactaaaaatacaaaaattagcagggcatggtggtgggcgcctataatcccagctactcgggagattgagacaggagaattgcttgaacccgggmggcggaggttacagtgagccaagattatgccattgcactccagcctgggtgacaagagtgaaattccgtctcaaaaaagaaaaaaagaaagaaccaagaaagaactaaacaacacaatacaagaatttcacaatgcaatcacaagtattaacagccaaataaactaagctaaggaaagaatctcagaatctgaagaatggttttctgaaataagat

SEQ ID NO: 117013 - DNA, 654 bp, Homo sapiens
ctatattaaatagcaaaattaccacctatccctattataccatgggcacattaaaatagaaaaacatgatttcatatatatataaaactagtaatcaagtactaatagattacctcaagaatttttatgggtacaaaagtgcccttgaaatcagtgggtgttttgttcaaggaaagaagaaaaagaacatagtcatgttccctagtttgaaaatgaaatttttgtttcattactggtacctattgctgggtttcattcaacaagcatwggcatgccactgcttgcagttcctataaaccttgagagctaggaggctgaagggacgaaaattccagaaatgggattcagagactgtgttctacatactgttaagtatacaggggctttttacacaatattagtccattcatttgtatagtggaagctactgccttactcaaaaggtggccatgaatattaattgaactaagacacaagtaaagtgcctggcacaaagtagctgtccaataagtattaatttcactatttctaccacctttaacatctcaagaccttatacagcatagggttcaatgaaacacccactttagtcaaaccccttaaatgaaagatcacaaaacaaaatactcctagaccctggataaatgtgaacca

SEQ ID NO: 117014 - DNA, 641 bp, Homo sapiens
aactcaggtttcttgacatctgatattccacccaccatgctacactgtttctcatctcctatataattgttttttccatataattttttctcagagctctttatttagattttctgaaattcccaagctaaaaagcaggagtcaaactatactcatagagcttattgtgaatacaacccaggagctgatgtatcccataaccagaggtgaatttttgaaactaccttggctacatccagcaggggggaaaaaagtgggaaagtttcaagatccagattccagtaagaatcttctctaccctaatcctaaggctgtttcacacatgggtaggattgctgtsacacatgtaatttaaggttattactgtgtgattaccacctcctctattgaagcagagattaacattttggcattcttagagaataaggccacattttcaagaattccctggaaggcagaaaacaacatcaacatccaataaggccttccggtgaattagtatattagatcaaccaattgctatcaaacaaaaataggggaaaggctggtgcattttagcatgagagaaaaagaagagagaatatatagaaatatatatttattttatatgtggaaaaaaattgaaggaataaaaataaata

SEQ ID NO: 117015 - DNA, 537 bp, Homo sapiens
aattcataaggtttctaaggctggtgatctaacagtttgaaaatttctaaatggtgccggattaaaatattaagtcctgaagctgcaaattttatttccagtaaaaaaaaaaaaaaaaactaaagtaaaaataaatgattaagacaaaaattaaggaagtgggtgcctctgtgtggttagtaattactactcttcctaggttgtagcctggcccagaaagtcaccataatacattttatacaatgcaacatgtatccttccattgctagacatagataaatcacaacagacagaaactgacatgcttgaagctgtacagagttcacttcccaggaactatgtcacattatagcatcctttttatcataaatatgtatgactattatgtatccataaaaattaaaaacacactttttaagaattcaaactaataacaaactatcattcacaaaaagaacaatttccatggatcatggytgaaagaaggtaaacacagatttccaagaagtatgttttaggaaattctaaatatcatgc

SEQ ID NO: 117016 - DNA, 610 bp, Homo sapiens
tggagaaaaaggaactcttgtacactattgtggaaatgtaaattagtacagctattatggtttggagcttcctcaaaaactaaaaatagaactaccatgtgattcagcaatcccacttttagggtttttccaaaagatttgacatcagtttgtcaaagagatgtctgcaatccattgtcactgcaacactacgcacaatgtccaagtcatttaatatttctaaatgtccaccagcaggtgaatgaataaagaaaatgtggaatataaacacaatagattatttaacctttttaaaaaaggaaattctgtcayttgtgacaacacagatgaacctagagaacattatgctaaatgaaataaggcacagaaagaggggtactgcatgttttcacttatatgtgcatcctaaaaacattgatcttatagaagcagataacagaatgatagttacagaggctggcggtggggagaatgatgatcaaagtacagttagacagtacaataagtgtgttttcttagatcaagtttccaatgcggtacatatggttattaatactttactgtacatttttaaattgctaagagtaaatttcaaatggtctcaccacaa

SEQ ID NO: 117017 - DNA, 620 bp, Homo sapiens
caaaaataaaacagctttatgtcatagatactgttatcctcattttacaaatgagattaagacactaagatcacacaactaatatgaaagtgcagtgtctttccagaacactttctttttaaattaagtaaaaaaattcctgtttatgtcactctttcattcagttgtacttgactgtacactctttgaaaaaccccacccaaagaatcacgaaactgtgctatctcaactccgtcattatggcaccactaartcaagagaagccaccccaggcagaccatggcagagggcaggccagtgacatcaggggattccatggcctctggcttctctcacacttgtgtttggaaatgtgagttcttaacattaaaagggaaaacaggccagttgtaagcatgccactttacacacgagcaaacacatagtgcagcacactcaagcacttagccagattttgagaagagtgttagtcattaagccaatagtggaaactgtgtaggagaattttctttaacttgcttctctatcagtccagaaagagaaaagaggaaaattgcgagaaagcaagattcttaaagacggcttggaaaaaatgcttttaaaaagaaactacaaataat

SEQ ID NO: 117018 - DNA, 576 bp, Homo sapiens
cattgcaaatttaacttccctctttcttcctctctgcaataagcccaacgattctccaggtaggggctgctttgtcagtttagttcccagagtaaaaacattgtgaaactgagctgtaagcaatgacccacaactgacatgtaacatgagcaagcaatggagctttgtggttgtaaaccaccataactgggattgtgaggttgaatgttactgtagtatagcagcctaagctgacagatagaggtragatcaaagaataattccaatgaccaccggtcctgatgcagtgacccaagggacagcactatcagatacatttttttttttactttagttcaataaaaaaatttaattatagaataatgcaaaaattattctcggttcatgtgtggtttagaataaatgtgatgggtactgaatttcatatttgagaacagctgtaagaaaaagaattccacatggtactagatgagcccagaagagaattctggacaagcaattattcacttgtggggggaaaaaagtccatttaatgacaaaagggtgagacataatctgtgctccaatctggtgaaa

SEQ ID NO: 117019 - DNA, 591 bp, Homo sapiens
tcatatcagggcaatactacactagtttcataaaatgaattggaaagtcttccatcttcaattttctggaagagattgtatgaattgctcccctcctcctccctcccttcctcccttccttcttcccttccttcctcccttccttcctccctcccttccgtccttctttctttccttcccttcttcctcttccttcttttttttcttctttctttcagtcaaatttagcagtggggggttgtataccaactttaatgccatcaatgttaataaattctgataactcattaccatacgaccagcttaattcttctttaaatgtttgaattttctagtgaaatcatttgagccaacagatttcttttttggaaactttaaaattatgaattcaattttcttaatagttatagggctattcaaattatgtgtttatgtttgtgcgtacgtastagcttgtgttttttgtggaactggtccatgtcatttgagatatcgtattgatgtgtgaagaattattcataatatttccttgatatccttttttaaatttatttttaatgggcaaacaatagttgtatatatttctggggt

SEQ ID NO: 117020 - DNA, 591 bp, Homo sapiens
tcatatcagggcaatactacactagtttcataaaatgaattggaaagtcttccatcttcaattttctggaagagattgtatgaattgctcccctcctcctccctcccttcctcccttccttcttcccttccttcctcccttccttcctccctcccttccgtccttctttctttccttcccttcttcctcttccttcttttttttcttctttctttcagtcaaatttagcagtggggggttgtataccaactttaatgccatcaatgttaataaattctgataactcattaccatacgaccagcttaattcttctttaaatgtttgaattttctagtgaaatcatttgagccaacagatttcttttttggaaactttaaaattatgaattcaattttcttaatagttatagggctattcaaattatgtgtttatgtttgtgcgtacgtactagcttgtgttttttgtggaactggtccatgtcwtttgagatatcgtattgatgtgtgaagaattattcataatatttccttgatatccttttttaaatttatttttaatgggcaaacaatagttgtatatatttctggggt

SEQ ID NO: 117021 - DNA, 455 bp, Homo sapiens
gacaagaagactgtgaggtgcattatggagaaaatacatatccaataagcttcattgagacatggattatagtactttgggccatgaatgtgatatacaaaaatcaaaagtatatattaaataaggcatctttaaacagaaacacacataaaacaaagctatactttgattgattgatraaaatgttgtgaccagaggctcaaagaacctcaccctgtatcttccctagagacaatgattcaattttcgctaattcagtgttcaaggcaactttgcagaacataactaccctaaataatgagaattgactatatctaagtagcaatttgattatctcttaaaaatgaggtcagggaaatgctgtacacataaaaggacagcaaagaaaccacacagtgtcctttccagtgtcaaactctagtattcaatgaaaaactgatgcaagccccagaaag

SEQ ID NO: 117022 - DNA, 417 bp, Homo sapiens
caagatggcagaacaggaggccctccactcacctctccccacacaaacaatgatctggcagccattcatggacaaaactgcctttgcaagagttttaatatccaggcaggaggtggcaaaactctagcaaagcccaaaaccaaggagagctgctttgagaaggcaggtccacacaccagtgacaggttcccagttgcagactgaaagcagctttgtcctcctatrgacttgggtccagctccactagatcatggtcttgcaactagccccatccactaagcacctaggaggaaccatgaccatttatgcccccagtaacaggccttctaaccatggtcctgactgcagaaactaaagcagccctgacctggcttcagccccactctaccacagtcagtcttgcctgcccaggaattc

SEQ ID NO: 117023 - DNA, 464 bp, Homo sapiens
agtgagccaagatcgcgccactgcactccaacctgggtggcaaagtgagaccctgtctcaaaaagaaaaacaaataactaaatgtaaggaaagaattttcttagaattactccaagycaaagattttgaaaatagaacatatttagtgaaaacttacagtggaaacacatattctactctgaaaaaattcactcactcaaagtgaattgctaattaaaactatatagtatatgtctatcattccattcattcagatgtcagtataaggaaaaacaaatgaatacttaggacactcaggtaatgactgatacctaagtcattttatctttaccaaatttcctgaagaaaaagttgctaaagtacaccaagtttttagatcagaattaattcactcaattacccaattaaaccaaaagggccattgagtctcattcaaatagcctccaagctagagaaaagatatt

SEQ ID NO: 117024 - DNA, 613 bp, Homo sapiens
cacccacctcgacctcccaaagtgcttggattacaggtgtgagccacagaattctatgattctttataaggcattcatgaatcatgcagactttgagaagctagctttggcatgttggaaaggcagagtgaaattacacagtcctcatttaggcaggagatttttagcttccttatctgacgtgtccaacatttggccagggctgaatgcstgatttttacatacatgccacagcatatctggctatacgttaccactgctactcagtgtgctgttagtagcttttgtctaaatacatttcatttgaaatggtaactgaaacgtgctatatgcctgaaggaaccattgcatttagtgctccatttcaaaggaggaactacatttccatttaagatgaagcagaggaaactgtagagaaaccactttcacataaacccatcgttaaggatttgaatgacaggttgtataaggctggcactaggaaatccagaactgctaaacaagaattcttatataaaagaaatctgtagaatattcatgttgcaatgcttacaagatagaggagatactcctaaaactctatgtaatttaatccaaagagatatattgttaa

SEQ ID NO: 117025 - DNA, 613 bp, Homo sapiens
cacccacctcgacctcccaaagtgcttggattacaggtgtgagccacagaattctatgattctttataaggcattcatgaatcatgcagactttgagaagctagctttggcatgttggaaaggcagagtgaaattacacagtcctcatttaggcaggagatttttagcttccttatctgacgtgtccaacatttggccagggctgaatgcctgatttttacatacatgccacagcatatctggctatacgttaccactgctactcagtgtgctgttagtagcttttgtctaaatacatttcatttgaaatggtaactgaaacgtgctatatgcctgaaggaaccattgcatttagtgctccatttcaaaggaggaactacatttccatttaagatgaagcagaggaaactgtagagaaaccactttcacataaacccatcgttaaggatttgaatgacaggttgtataaggctggcactaggaaatccagaactgctaaacaagaattcttatataaaagaaatytgtagaatattcatgttgcaatgcttacaagatagaggagatactcctaaaactctatgtaatttaatccaaagagatatattgttaa

SEQ ID NO: 117026 - DNA, 591 bp, Homo sapiens
actctactcgatactttacaaaacttacaaaatttgccccacctaacaactcattttatatatgaggaaaccaaggctcagagagactatgtcttacccaagataacccagttgtaattcaaacctaagccaggcagttattaagtctttctcaacttaaacctgttggctctagaagtgattctcaaagttatggctatatccctatctctcttcctttttccatggctttttatcaagcacaatgccaggagctgtgctatatattaggaatacagacatgagtgtgatggatatagaccctaccctctggggtaaatagaaacgtagacacctaacggctggcacagtggctcatgcttgtaatcccagcactttgggaggccaaggcagtaggatctcttgaggccaggaggtagaggttgcagtgagctgtgatcctaccactgttctccagsctgggtgacagattaagaccctgcctcaaaacaaggaaaaaaacccataggcatgtacaggtaaacttcaacacaggagaaaggacatgctctaaggacactctccctaagcagagaaaatgaagaacaagcc

SEQ ID NO: 117027 - DNA, 575 bp, Homo sapiens
tctgcacagtaaaggaaaatatcaacagagtaaacagataacctatagaatgggagaaaatttttgcaaactatgcatcggacaaaggtctaatatccagcatctataaggaacttaaacaaatttacaagaaaaaaaaattaaaaagtgggcaaaaaaataacraacacttctcaaaagaagacaagcatatggctaacaatcacatgaaaaaaagctcaacatcactgatcattagagaaatgcaaatcaaaactgcagtgagataccatctcacaccagtcagaagagctattactaaaatgtcaaaaaataacagatgctgaagtgattgtagagaaaaaggaatgcttacacactctttgtggcagcgtaaattagtttaaccattgtggaagacagggtggtgattcctcaaagacctaaagacagaactaccatttaatccagcaatcttattactgagtacagatccaaaggaatataaattctattataaagacacatgcatgtatatgtttattgcagcactattcacagcaacaaagatgtggaatcagcctaagtgtccattg

SEQ ID NO: 117028 - DNA, 490 bp, Homo sapiens
atttttgctcttcattctgttcctatgaaatatcaaggtatcacattggttaatttgcatatgttaaaccatccttacaccctgaaataatttcacttcatcatgctgaataatcatttcaatgtgtttttgaattgagtttgctagtactttsttaaggatttttgcatctaagttaatcagagatattggcttggagttttttggttgttgttgtgtctgtctgattttgctatcagggtaatacttgcctcttcaaatgaatttgggagtattctctcctcctcaattttttgatatagtttgaatagaattggattagttctttaaatgtttggtagatttcagtagtgaagtcattgggtcctgagctttgatgggagattttttattatagcgtctatcttgttacctgttactgggcatttatgttttggatttcttcatggttaaatcttggtaggtgatatgtgtctaggaatttatgtgt

SEQ ID NO: 117029 - DNA, 554 bp, Homo sapiens
gaggagtggtgaaagcactcttgtggccaccacagctgggactggactggttcacatctgaagccagcacattattgggccttgcccaaggcttgtggtggctactgcctggctaccatgaatgattattcaaggatgaagagatctttagtcagcagatggggtatcaggaatcaggaccaagactgggtccttcccttcaggacagtgggttcccttctgacccaggatgagtatacaaatgccatccaggagctagggcctggatgcagaggcttcatgaatctgcttgacattttatttactgtggctgagctggtactcaactttcatgaccaagtcctctgtactcttcccttccctttccccaagtggaaagagtctctccccgagaagcactgcttggagttgggggaggggtgatacaagcactcccttggccaccacagctgrtgtctcacgtgcaccccaagtccactggctccaagcccagcatagcaccaggacttgtccaaggccgttttgccgttcaaattcattcaggaccccagggc

SEQ ID NO: 117030 - DNA, 484 bp, Homo sapiens
ttgtgcttcccaggtgaggtgatgccttgccccacttgagctcacactcggtgggctgcatccactgtcctgtacccactgtctgacaagccccagtgagatgaacccagtacctcagttggaaatgcagaaatcacccgtcttttgtgttgctcatgttgggagatgtagactggagctgttcctattcggccatcttggaacctgccccctacttcctcatattttaaatggaaaaggacataaagtcctagaagataaattacaatttttgccaaaacatcgtccattatttaggaccagacccatctatggagggaaaaatgcaatctcctgatagactaaagaccatcaaacttattctagaccccttgctgaatgacatttgagagaatttctaagttaaacttgatattgcagaagagtgccaaattttttctkagattttcacacttaattatgaactaagtcctcagtaacaggt

SEQ ID NO: 117031 - DNA, 577 bp, Homo sapiens
aggaagcagggacttcctgctgtggccttaccagctgtcactgacttctcctcttttccatcatccacgtaaccaattccctacatgaaacttcctcaaagtggttttttgttttcttaaaaaaaaaatcacatggactgatacatgtgaagatgacaatagaaagccagagcagatttatcaccatttcaccttgtggttatttgtaygcctttcattgccaccttaggaaggaggcaccaagtgttatgcatttactacattaccacaccaactcccaaagcaccttctacatattaaaacatccatgaatatttgttgaatgaatgaatgaatgaatgaatgaatgaattgaacctggggagctgtaatatcttaagtgtttaaagcttctatgaatatcataaagttatacattaattagaatcagtctatgagcacctttctcaataacacacaaatctggaagtaatgtaattaattcaaaattacataagtaatcaaggtgtgcttacttttccatcaatcaaggcataattacttagctgtgagaaagctcaaaaggggtttatatagc

SEQ ID NO: 117032 - DNA, 577 bp, Homo sapiens
aggaagcagggacttcctgctgtggccttaccagctgtcactgacttctcctcttttccatcatccacgtaaccaattccctacatgaaacttcctcaaagtggttttttgttttcttaaaaaaaaaatcacatggactgatacatgtgaagatgacaatagaaagccagagcagatttatcaccatttcaccttgtggttatttgtatgcctttcattgccaccttaggaaggaggcaccaagtgttatgcatttactacattaccacaccaactcccaaagcaccttctacatattaaaacatccatgaatatttgttgaatgaatgaatgaatgaatgaatgaatgaattgaacctggggagctgtaatatcttaagtgtttaaagcttctatgaatatcataaagttatacattaattagaatcagtctatgagcayctttctcaataacacacaaatctggaagtaatgtaattaattcaaaattacataagtaatcaaggtgtgcttacttttccatcaatcaaggcataattacttagctgtgagaaagctcaaaaggggtttatatagc

SEQ ID NO: 117033 - DNA, 626 bp, Homo sapiens
tcagttcttgagcatttactatgtgttttacataatagagatgatattaaatcagcatattttccattcccctgcaaatctctttgccttgaaaatcacatactctaacagtctcctaccattcatgctaagtaagaaaaatcaacccaggaaagaaagcacaaactacaacaaatcaatcttttgtcaactcaaagctgactctcttgagtccttagcaaatctaagtaaatagttttaaaagccaggatttgtgaaaacaaaatagtttttctgaattgtaatagctccctytacacatgttaaaatacaggcttatctagaccatggaaaatattatttgttctttttttttttttttttgagacagagtctcactctgtcgcccagcctggagtgcagtggcacgatcttggctcactgcaagctctgcctcccaggttcacaccattctcctgcctcagcctcccgagtagctgggactacaggcacctgccaccaggcccggctaattttttgtatttttagttgagacgatgtttcaccgtgttagccaggatggtctcgatctcctgacctcgtgattcccccacctcggcctcccaaggtgctggaattacaggcgt

SEQ ID NO: 117034 - DNA, 566 bp, Homo sapiens
taatttagacacttttagaaattctgcacataaaattgaaatattgctaccaatatatgcaaaattatttctagcaattagataggtagataaacagagataaagagatagtgaatttatcaagtatatttgcacaaagttgaaatgatatttgaaaaaagtastcaaaacttgccagtattgaaaaagacaaaactattgcaatatacccttcacaacctaaaagtaatctagtttaaaaatgtgaatctagtttaaaatgtgatggggctattaatgagagtggaatgaatcatcaaataaatgtgctgaatacatgcaagaatgaatgaccctagaaaaatttctgataagactctaacacttggtacaataagtttgataaaaaacttaaaatataaaataaaagatgtgtaacataatcatagaaatatgcaaagcttttatctttgtttcttccagtttaacctaagggagaaatccagacacatgaaacactatgtattaggatatttaccacagtgttacctataaatggtaaataaacaatgcaaaacatcaatatc

SEQ ID NO: 117035 - DNA, 622 bp, Homo sapiens
gactttgccttgtctgtctagtgtatatcagacactcaagaaatattctgattaaataaagagatatcttccagtctggaaataaataaatggcttatctgtggaattgtgagccctggcagagttcacattgagttttactctgcgctcaatgaagtgctgagtcaggaagaaaacatgaagaaagacagacagaaagataagaaacagacagaccaggaaacagaaggcacatgcagggaggcggtgggcatggatttttaaggaaatatttaaaagaaaggatgctgtaagaggtgtgggcctgataaagggaattagcagttgacaatgaggtgctaactggagaggaagccattasttctcttaagcctaacagatcagtgggggcagagacggggtgatgttactggatgggagctggtgcactgaaaatgaggtgcccaaaagactctgtagacgttggatcagccacagacagaaatacaccaaagctaggaagtggtagaaaaaatacataccttgagcattcgccttccaccatccgatcctcagtgaaatccccggttagaagtgcctatttgaagaaccattctggacatcacctgggaaaaaagcccag

SEQ ID NO: 117036 - DNA, 432 bp, Homo sapiens
tgtgttcatgaaaacacatagcacatgggttagaacacaggtgtgtttgctggggctaggaaaatcaatggaaataaatgcatctgaactgagctattaggccaccttgctaactttctcatatagaggaaaacaaatagttctaaatttccagtgcaatcctgactctattcatgtacaatcacttttagttacttttatcttgctcttacaataccctttagaatgggttatttgatattacctcttactcattagcttccatctctgcctggctgcagagtgaaataaactaaattacctgagcaagtsaagacaaaattgcataaaactcaggaatataaatgctggctctacctgttccaggacacaatgcactttccctctgacatagtatggaaccttctacttctcaattctggttctccatat

SEQ ID NO: 117037 - DNA, 421 bp, Homo sapiens
tgaggtttataaatgtcattgtctatatgttttcacttttattatttttaattgtttgagtccacttaatcttatttcatttccacctgttttgtttctaggttgcctctttcctggtccttagccaarggaagcaggcttttgttgagactttttgttttgtctgtacctgttggcagtgtttggaatatgcaaggcagaaataaatcccagggagctcgctgctgagttatttttctgtcctgacatccctagttggtctccctttttctctctccccttcagcatctgatgtttgttttctgtataatgttcagggcttagctggagaaatggggagaactctgtcattccatttggttccagaactagttgcccctgctgcctatttttatgatgttattattttcattagtttttt

SEQ ID NO: 117038 - DNA, 503 bp, Homo sapiens
gttaatggggcatgtgttctggaaatcgagggaagaaaacacatatggagcggggarcagagtctcctgtctctgtgtttttctgcacaaatcacaccccaccccacccaccacccagtggccatcagcagggatagtccctcacaataagtttctctagcttccagcttgttcaactgtagagggagcaatggtcagatcctacatgttctgtcccttgttgagtgtgttttggggtctttgtgccttgtgatattctgaattctctctctataatgctgaattaatttttttctctatttttagcatcttattgtttgcctataagaattgccaagtcattcaatcttaaaaccatcaagttattacatctgaagatttctgagtcaatctgagaagcatcattatcttatccttattctgtgctcactgtgcaaatgctcggctataccgattattgcctaagcagtatccattatctttaaaaaggacaaacaaaaatt

SEQ ID NO: 117039 - DNA, 503 bp, Homo sapiens
gttaatggggcatgtgttctggaaatcgagggaagaaaacacatatggagcggggagcagagtctcctgtctctgtgtttttctgcacaaatcacaccccaccccacccaccacccagtggccatcagcagggatagtccctcacaataagtttctctagcttccagcttgttcaactgtagagggagcaatggtcagatcctrcatgttctgtcccttgttgagtgtgttttggggtctttgtgccttgtgatattctgaattctctctctataatgctgaattaatttttttctctatttttagcatcttattgtttgcctataagaattgccaagtcattcaatcttaaaaccatcaagttattacatctgaagatttctgagtcaatctgagaagcatcattatcttatccttattctgtgctcactgtgcaaatgctcggctataccgattattgcctaagcagtatccattatctttaaaaaggacaaacaaaaatt

SEQ ID NO: 117040 - DNA, 503 bp, Homo sapiens
gttaatggggcatgtgttctggaaatcgagggaagaaaacacatatggagcggggagcagagtctcctgtctctgtgtttttctgcacaaatcacaccccaccccacccaccacccagtggccatcagcagggatagtccctcacaataagtttctctagcttccagcttgttcaactgtagagggagcaatggtcagatcctacatgttctgtcccttgttgagtgtgttttggggtctytgtgccttgtgatattctgaattctctctctataatgctgaattaatttttttctctatttttagcatcttattgtttgcctataagaattgccaagtcattcaatcttaaaaccatcaagttattacatctgaagatttctgagtcaatctgagaagcatcattatcttatccttattctgtgctcactgtgcaaatgctcggctataccgattattgcctaagcagtatccattatctttaaaaaggacaaacaaaaatt

SEQ ID NO: 117041 - DNA, 635 bp, Homo sapiens
cttttccctgggttgttgggttgaaaatttagaagtaattgcttaaccttggggctgcctgaggcagtggatatcaactgaggaagataataarctataaaaagatgaaaaggaaaggctggggaattcgatgtccacaagttctttgaaaagctccaaaaaacacatgtaaggctgtgcacatgctcaggaaaaatctgagaaggccttagactctcacctctgactgaccttgagactgtgcacaggcaggaagtgaaggctaaagcagggctgtcagctgcctggctgtgtgcggaaggtgtgccccagcacacaacacagcccactgcaaacactgggggcagagctgtcagctgcctggctgtgtgtggaaggtgtgtcacagcacacagacatagcccactgcaaacactggggacagagctgtcagttgcctggctgtgtgtggaaggtgtgccccagcacacaacacagcccactgcgaacactgggggcagagctgtcagctgcctggctgtgtgtggaaggtgtgccccggcacacaacatagcccactgcaaacactggggacagagctgtcagctgcctggctgtgccgaagatgtgctccagcacacagatgcagcccactg

SEQ ID NO: 117042 - DNA, 635 bp, Homo sapiens
cttttccctgggttgttgggttgaaaatttagaagtaattgcttaaccttggggctgcctgaggcagtggatatcaactgaggaagataataagctataaaaagatgaaaaggaaaggctggggaattcgatgtccacaagttctttgaaaagctccaaaaaacacatgtaaggctgtgcacatgctcaggaaaaatctgagaaggccttagactctcacctctgactgaccttgagactgtgcacaggcaggaagtgaaggctaaagcagggctgtcagctgcctggctgtgtgcggaaggtgtgccccagcacacaacacagcccactgcaaacactgggggcagagctgtcagctgcctggctgtgtgtggaaggtgtgtcacagcacacagacatagcccactgcaaacactggggacagagctgtcagttgcctggctgtgtgtggaaggtgtgccccagcacacaacacagcccactgcgaacactgggggcagagctgtcagctgcctggctgtgtgtggaaggtgtgccccggcacacaacayagcccactgcaaacactggggacagagctgtcagctgcctggctgtgccgaagatgtgctccagcacacagatgcagcccactg

SEQ ID NO: 117043 - DNA, 522 bp, Homo sapiens
cttctttgtatgcaagtgttaatctcccactatggttccttctatgcctagtactgtatcaacatccaggtgcttccccttcctttctccaccccaccccccagccagatatgtcaattgtattgaaaacaacttacatctagtttactaagtacaaacttgtgctggttaatgcttctcaaaaagtaggagtgggctgtttgttgagatcaacaatcatttttttaaaaatccgatatggaaatttttgtgtcaagtttcactrtcatttagttcttgactgattttcttctgatgggttagtagctctcaacagaagattttaaaagtcccctgctcaggtacctgtcctgccgatagagctggggtgtaccctgcaccctgactcaacattgcttgtctccacatgcctgtaaatgggcttgggtggctttctcaggctacacacctgtcacttcttagtcacccagaatcaaaatattaacagctctgatcacattttctgaacctatgaggctttat

SEQ ID NO: 117044 - DNA, 544 bp, Homo sapiens
tttgcacattcctcactcatcatccttccctcctccctgctaattctctctgattagtttagaagccttgaaatcagtttagcttttataaggaagcttttgtaagttgcagtctttctttcctaaatatgtttgttgtcagcaagccaaaagtacatttacaatcttctgtaagctcatttgagggagatcgaggtttataagaaggaggctatttgcatataaattatgcccagaatataaggagtgaaggctaagaaatgctaktatttaaaaggaaaatagaggtcaatctgtgatgtaaaacattttttaaagtttagtgggatttgatggtttgtatttcttgcagcattaccagctgaaagttcagggtgggagtggggagattttggcaatccgcagaactcccagtcaagattttgtataacatttaattggaaatcaacattcttctagagtgtataataagggatcttggagatattatcaaaaagttattttcctgttctgaataatagaacaaattcaaaatattatggtg

SEQ ID NO: 117045 - DNA, 544 bp, Homo sapiens
tttgcacattcctcactcatcatccttccctcctccctgctaattctctctgattagtttagaagccttgaaatcagtttagcttttataaggaagcttttgtaagttgcagtctttctttcctaaatatgtttgttgtcagcaagccaaaagtacatttacaatcttctgtaagctcatttgagggagatcgaggtttataagaaggaggctatttgcatataaattatgcccagaatataaggagtgaaggctaagaaatgctagtatttaaaaggaaaatagaggtcaatctgtgatgtaaaacattttttaaagtttagtgggatttgatggtttgtatttcttgcagcattaccagctgaaagttcagggtgggagtggggagattttggcaatccgcagaactcccagtcaagattttgtataacatttaattggaaatcaacattcttctagagtgtataataagggatcttrgagatattatcaaaaagttattttcctgttctgaataatagaacaaattcaaaatattatggtg

SEQ ID NO: 117046 - DNA, 545 bp, Homo sapiens
tttgcagtatattttgaaaccwtattttgtaataccttcagctttgcttttctttcttaagattgctttgtatattttgggtcttctgtggttccatataaatttttgattttttttatttatgtgaagtaagtaactggaattttaatagagtttgtattgaatctgtagatgagtttgggtagtatggacacttaaaaaatattaattcttctggtccatgaacacaaaataaagatatcttttcatttatttgggtcttcttcaatttctttcatcaatgttttatagttttcagtgtacagctatttcaccttttatataaataaatttctatgcattttatattttatgttgtatattttgttggcaggatttgacctcattcagtgtggttatagaatctttatatttaacagatttttaaagtacttcagtggaataactaaaaatacacttgtcaaatgtaaaggacaaaacagacacaatatgcttaaaacataatgctattgattatccccacaaggaaaagtggggaccaaaag

SEQ ID NO: 117047 - DNA, 514 bp, Homo sapiens
tttaacccattttataactctcattttgtcccccagcagtctcagtccttgtaccttctactatgagcttacrctgtgaactgtgtttcactgtatatttccagactagagttggccagaagtgaggctggaggagatttggaaagcagaagtgaaagcagcagccattatacttggaaagttatcattggttagaagcagtgaagacagatgccaagtgccatgagattccagttcatctccatgcttccccactccacttccagctgtccttcccagctgctggccctcatgaccaacagcagctcctggcccaccaccaactctgtgagttgccgtaaacttacagaggtggtagctgcagggtcaacaaccttttggagagttctacagcagcccccttcacagtacaactcagcaatgggatgaacttgtctcctagattcaaatatgattgaggagtagagtagtgggtgttttttaatgtaccaactggcatctaacacctggtaac

SEQ ID NO: 117048 - DNA, 610 bp, Homo sapiens
tacatagtaaatataacaatttttatttgcagttctattaatttttgctttttgtatgcaaagttatgttattattctaggaaggataaattaattctttttaagttaactatgtactggttttctttcaccctgtttaaacttcaagtctatttgtccaacagtaatatggctataccagctttcatttcacacatatttacctatcttttcctatccttttactttcaactttttggtatcgttacaggggtgtgtgtctgtgtgtggtgtgtgtgtgtgtgtgtgtgtgtgtgtgtgtgagtgatccactataacaatgttttgcttttaaatagagaatttaactaatttatatttattgaaaacatattttttatttatgtattttgtgctttcattttatcctgctttttctacatttatttctttttccttgacttcttttggattaactgattttttgacmcttctttgctttattctcctctaaaagcttgaaaaatatataatctatttctattttcttatgacttcccagaaacttaacatacgtaattaacaaaatctgaagttaatcaacctctttcttgtcaaccaaacaattcat

SEQ ID NO: 117049 - DNA, 570 bp, Homo sapiens
gtctgttcttgtccatggccctcactataaattatgttccatgatgagaaagatgttgttgctattactacctggatccccagagtctagatgtatgcctggcacacagtagaagctcagtaaatatttgtcatttgaatgaatgaatgaaagagtgaaatattcatgaagagtggatcaaggaataaaaggaaatctattaatccctttctaagaaatgtgtctaataaacacattaattaggagccttagctacttcaactgatggtaacattttaaattcaggcatgtgtttgactgatcctggaaagtgaaggaggacagaagatattagcgctgggccagaaatctacccagccagctttgtaaagactttcaactytaaagattctgtgtccagctatgtagctaaaaagagaaaaatgtgagctgtgagtctttaagaagaaatagaatcctgtctcctttcagcctgcctggagggagtcctgctggcttcttcccttagaaggacagcttgctcccctttgaatggaaaacgggggggcggggggggggggaatgggtttt

SEQ ID NO: 117050 - DNA, 577 bp, Homo sapiens
tgctcacatttctattgcctaaataaagattcatcagtgtgagaggattatagctttctaaggaatagtgctatgaaaaacttaattagtgttttatgtagccactgattcttttgatagaccctgargcatatttggaaaaattggcaatgtttaatgaaacaatggaaatgtttagtaagccaatcaggttaacatatgaataatggttcactttataaaggttttattgatttttgttaaatgacctccagatgtgtttgcattttttccataacttattacaatccatattataatatttataaataatacagagaattctttggagatgatgctatatataatatgttgatctacaccagatggcattaggtaagaggcaaatactgttaaagttaaaggcctgtgtggtgtaggatttgaagcaattctcaagcaagttgtaaaatactagatacgtaaatttaaaaatctacatcatttctaaaaggaaaacttttgcaagcttaatcaaattctcatctcacatgtgtgagacagcttttgtgctgtttaagttaggaaatgctactgc

SEQ ID NO: 117051 - DNA, 542 bp, Homo sapiens
ttctttgccttctgcaagaacatacttggcttagaaaaatgttttgtagaaggaatgattgctctttcaaaacagaagaacaaaacaaagaaaaagaaatgaaagaaagaaccaatatcttcttaaattttatttttaaaacggcagaggcaggcagtgggaagtggaatatgtgtgcaaaaaagaagtaagcagttaataagcatagaagaaggggcagaacaggataagtgaaataaagtggagatgactcctggattaagtctttgcaaactgtaatccagaagttgttgatctccccataggcattctgtttttttraaaaaaatctttaggagaatttacctttcttattatgaatgtcctttttttcctttctgatgccattaaaatgaaattactctctcacaatctgagactgcatctcaacctcccttgctggtaaaataattcctgctaagattttaacttgatagtcaagagcagtttaaattagagaaatgctgaattaagcaaactctaactgtatttgggttattgtg

SEQ ID NO: 117052 - DNA, 356 bp, Homo sapiens
  misc_feature (1)...(356): n = A,T,C or G
tcccacccacagtgtacacacactttgtaagcttctacccttgaatgtgggtgggactgtgaatatgatgaatttcactcttatggttaggttatgttatayggaaaaggtgaaggattttttttcagatgtaactaaggttcctaatgagttactcaaaagggaggttatgttgggtgggtctgagctaatcaggtgggcctgtaaaagaagtgagagattcaaaacaagagtgatcctctattggccttgtagaaacacccttccctgctgctgacaggaccacaggcagaggacagcggggccttcntctgaggagctgaagacatcannnnnnnnnnnnnnnnnnnnnnnnn

SEQ ID NO: 117053 - DNA, 586 bp, Homo sapiens
agcatatatacacaatggagtattattcagcataaaaaaggatgaaatcctgtcatttgcagcaacatggatggaactcatggtcattatgttaagtaatatatgccatgcacagaaagacaaataccatacattctcacttatatgtaggagctaaaaaaaaaagtggaccttattaagaagaaaacaaattggttgttaccagaggttggaaagagtggggagtagggggagaaaataaaaacatacatacatatagccatatacaatatgatagaagaataaggcctggagtttgayagatctgtagggtgactatagcatacaacgatctattgcatatttcaaaatagctaagaagagaataattcaaatctttctagcataaagaaaagacaaatctttaaggtgatggatatcacagtcacactgattagatctttacaaattacatgaatgtattgaattatcacatgtacccagaaaatatgcaaatctattatgtatcaatacaaaaaatttaaaaatagtttctttggagaatattttaaaattatgaaaaaaaccattagctagactagaaaaa

SEQ ID NO: 117054 - DNA, 517 bp, Homo sapiens
ctgctccagaatatttgtccttcagtgggaaaatacttagcaacctgacataactactggtgtcctatagagagagagagaragagagagaaagagagaaaggagcctccagtcaaaatgcaaaggctgatgtcagtgatatcaacaacagggtagcagaaaaaaatccaaaatcagctgtccagtcttaaatccaggtaagatacatttataatattttctttaaatctataaaaacagttgaagtcctaggtaactcatcagacagacatgattaatagtccaatgataagtagaacatactaaagctagctccatttcatcatttgatttttctgaagtcctagtactttgtaaagataattaagtggttccctggccttatatgtattacacctgtatccatttctagaagtcattcattctgttcatgtttagtagaaatcagaagacatgataaagtcagaagtcagaagttatggtaagaatcagaatgaaaagattgcggcccaaataa

SEQ ID NO: 117055 - DNA, 658 bp, Homo sapiens
gcagtaatcaatgctacttcttggttgggtttgcagtcatcatcctctgtgtccttgcaaacacaaacaggccttcaggatctgtgtgatttttgtagggcaaactgataaagtaaaaaatataaaataaagtggatcattttgccagcattctttaggtctttatgggtggtgctaattttttaccattctgcytggagtatgatattatttggccagtagttgggagagagaattttagagattcccactcactaagaatgtctatgacccactgtaactgccaaatatgtctatttcaataatacatttggggattgggaaaatgactagtaggtgaacctacacattcagtggacccactgtgacttgaaccttggcctggactccgtttattacctgacttccatatacctccactctaacagggcccatagtaatcttctgatctccaggtataaatatcaaatagaacactgtgtccaaaaagttttacaatacttgaataatcatttttccaaatggtcagttacccaaatcattagtgggaagttgttttagggaattattagagaatcaatattatgtacactgccacagtattttaggatccttactcctaaagacctggcctctcattcaatgtggtccagttata

SEQ ID NO: 117056 - DNA, 622 bp, Homo sapiens
gagcgattctttgtgatatcaaaaacgcaaatttaaataacacagttttcaagttcggccatgataacgttgaaatgatattattactagccaaaattctcattccagtttcaaaaacattgtgagcagattattttttgtctttgacacctccctaaatttcttcttggtgatgtacaggctgtatagcgcatattgtttgttgaaaatgacccatgcactcaaatataaacatatgcatttctttaaagttcactttttttggtctcaaatcagttattctcttcccccaaccccattgttttttctttcttttcccttcagtttctgtatttttctcatttcttttctcccttgtcttgtttccctttcccacatatattgactattgagaaatttaaattaaccacgttatccctaagtagatcatgggcctttaatgtatagagacataccagtatatcatttaggtacttgattcccactgatgctgtattgactraaaagtgcaaaaccaaagagaatgacccgttcaagagagtcaaaaaatgtgtacacattaaaacaaaaataaattcagccactttcaccccataaggatttgatgaaaatagagtataat

SEQ ID NO: 117057 - DNA, 599 bp, Homo sapiens
aaatctccaaatactaattttcagttttaacaaattctttgccttcaaagttcagtttttttaatcctaaatatgcccttgctttagctgttacatgtataggcaacatgaaaaaacatgttttaactaatatagtcaattgttcctactaactaacatgtaaacatagtcatcttataataagctgccatcagtaaaaaaacttcgggttgacattgtccactatatttttaaatgtgtttttattgtacatatttgagaagtacatgatgttttaatgcatatatgtagtgaaataattactgcaaacacttttgcataccctactctattttttgagtagttctcaggtctcawatatatttgtgtcaaatgaaaggagaaaataaaagtgatctctgtgtgaacccacaaaaatataaaacccttcactattctcccatagtcaaagtcccttggtgattttctctgaaggcttgactcacatcacctgatatacaagggcatttatatttctagtcatatttcttggcactttcagaaattatagtaaatgtttctcctgtttattccagaaaaaacaccattcatattttaac

SEQ ID NO: 117058 - DNA, 599 bp, Homo sapiens
atagttcactaatatgtgttcgatgcaactaatctctgagggaggcagaataattgtacaaatttcatcagattttagacgagaaatttgtaatattaggggatgttttaattagctccagatggttaaattcaactgttcctaatatggaaagccagaatgaaatcttctaactcacaatwctataaacaaacaaagtagttgaaaaaaaaacaaaacaacaatgtaagttgaaaaaaatcacttaatattttaaaattacttaaaaataattgtgtctcaataattcggatcagttatctctactattaaggatgattcgttcctgattgttagtaaagatttacgctaaatagcctgttaataaaaactcagtttagtgaattcatgagttactctaaatcaatttctatgtccacctttgaaattccaaattttcccccataactgttatgaatccagctgttagctggatcatgctgaggattcatttgtgaaatcttctatgctattataagattaaaattgggttcaaaaactacctaccaggtatgatgcttattacctgggtggcaaaatcatctgtaaaccaaaccccc

SEQ ID NO: 117059 - DNA, 546 bp, Homo sapiens
catcgaagtattttgttatagctgcccaaagcaagacagctaccatatgccctcaccaaattttccctatttattaacatctaacattagcatgttaaatttgctacaattattagagcaatgtgtagatttattgttataactgatgtgcagattttatttagatatccttatttttcttttaaatctacactcctttttttattttagaatctcgttcaggatattactttacatttagggcaggtttcttagcaatgaattccttcactttaatgtttttcttaaaaatttattgctcttcattcaagtttgaagattaattcactgggtaaagwttaattttgtggttttcttctttccacactttaaatacttaagttcattttttttttttctggcatggtttctgatgagagtccactataatatcatttctctatagaaaatatggagttttttatctattttatttctggattttctctatgtctttgtagtttctttttgaagtttgcgttagcagcagcgaatttgtagggttct

SEQ ID NO: 117060 - DNA, 425 bp, Homo sapiens
tagcattagtattgaaaaaagaatggtttttgcaattatctcattttaaattgccctcttatgtttggaggagtatagctgatggaggaccatgtttttttgatagaatgacagatttaaaatgtgtgtaccagctgtacaggcaaagatacatttttgtacaacttgaactttgttcaaaaggattttctttactwcttcttgtttatgtgttgtttactgcttttattctcattcaattactaatgttttaaataatctaaactcatttaattctctccttttgtccacctctgctcccaaagttactttgtgtctataaataatatagtcacaactcaaacattagaaaagtaacccaacattagctacgcaaatctatctaaattaaatcttatagaagacaaaaatatggcatttaacaa

SEQ ID NO: 117061 - DNA, 598 bp, Homo sapiens
tgaattgtacactttagtgaagtcaattttatgtcaattatacctcaaaatagtaagtattttttaaaatatgcctctttgtgcctcaaagtcctccctccagtgacatttctaaagcttagaagaatatttaacgtcatttctatggcctctttggaccccaattttaaggaaatatttctccatcctcagctgctaccattctgtgctttattaactgtgttcaattacagaccaccttgctgttctwaattgccacacttattcttgcctagtgccttcacccttgctattcctcttcctgggaagttagtaacctgaataatttgatagttcactctcttttttacattgaaatctctgtttgaatacaaaatatttagagatgctgtttttgaatgcagtatgtgaaatagctcatttcctccacctccttcaaccatccacttatttatatttatttttataagctttaatacttcttattgtacatataatgacttattatttatgtttttagtattctatttaatgagacaaaacttttgttttatttacttacataatttaggaatttttcctgagttaaatagaaaaa

SEQ ID NO: 117062 - DNA, 655 bp, Homo sapiens
atgaagctttccatttatttgatatacaggtaataaaaattgttgctagtaataataaatgatgcataaagtgttctttctctgaaaactataatcaataacattccaaaatattgcactctaatatgacaagcctgttcttagcttgtgccactccatcatatttaaatctataaactccacttattatttcaactactaacatttattccagaaatggtagtagaggacaaaaaaatgacagtttagcgttcacaaggatattaatgcttacaacagcattttgaatgtayaaatttgttcaaacttattcatgtatttttttctactgtatattatttgacaattatcaaattaaaatcctgatagaataactctactaaaattacagaaataataattcatatactattagtactactaatacatgtattatcacagcctttaattatattaatgagaataaaatgaaaatactaaacaaaaatttataaaaatatgtaattaaatacatatttttaaacactgttcacttcaacatatagctgaaaaatgaaaagatgtaattgggccactgagctgctgttaagcagatactattctatttgaaaggctaaaatgactttaatacagagctgtttttgaggagtacagg

SEQ ID NO: 117063 - DNA, 533 bp, Homo sapiens
acaaactaaaccataaaacaaagaagcaaaaaattatcagaactaataagtgagctcagcaaggtcacaagattgaagataaatataaacacatcaattttatttctacattttagcattgaacacayagacatcaacataaaaaatacgatttgcatagaaaagctaaataaatgaagagacataccatgttcatgttttagaaaattcaacatggtaaagatgtcatttcttctcaaatggataaaaagctttcaggctatcaatatttaagcaagattttttttgtagatacagacaagattatcctagacttcatatggaaaggcaaaagaactagaatagctaaaacaatttcgaaaaataagaatacagtgggaggaatcgatcgacctgatcttgaaacttattttaaagctgcagtaatcaaaataatcaaattataaagctgtgtggtattggcagaagtacagacacataaataaatgaaagaaaacagagaattcagaaatagactcacacaaatatgccta

SEQ ID NO: 117064 - DNA, 507 bp, Homo sapiens
ccttcccaaactcttccccaagagcrtaaacctccacttaatatcgttttgaaaatcaggcaatcaatgtggactgattgttatctagacctggtgcacagtgtttgtcttgggatctcagtttaaaatatggtgggaattattctggcctgtatcctactgattctttattgcctgaatctcatgtttcttctttggatactcccttgtcttggccgtgcatatcatccagtagcgtcctgagaaagcatgcacaggagatcattattttgagaatgagcatatgtgaaaaagcctttattctccccctagtactttatggcctgttaagcggaggtgtgtcaaccattgggcttttctatggggtgttctggctgagttcattaggcaacctccaaatgttaatattaatattatcatggtattcttctttctccacttcttcctcctcccttctccctttcctttccttctccctctcctctcctttcccctcctccccagcac

SEQ ID NO: 117065 - DNA, 507 bp, Homo sapiens
ccttcccaaactcttccccaagagcgtaaacctccacttaatatcgttttgaaaatcaggcaatcaatgtggactgattgttatctagacctggtgcacagtgkttgtcttgggatctcagtttaaaatatggtgggaattattctggcctgtatcctactgattctttattgcctgaatctcatgtttcttctttggatactcccttgtcttggccgtgcatatcatccagtagcgtcctgagaaagcatgcacaggagatcattattttgagaatgagcatatgtgaaaaagcctttattctccccctagtactttatggcctgttaagcggaggtgtgtcaaccattgggcttttctatggggtgttctggctgagttcattaggcaacctccaaatgttaatattaatattatcatggtattcttctttctccacttcttcctcctcccttctccctttcctttccttctccctctcctctcctttcccctcctccccagcac

SEQ ID NO: 117066 - DNA, 507 bp, Homo sapiens
ccttcccaaactcttccccaagagcgtaaacctccacttaatatcgttttgaaaatcaggcaatcaatgtggactgattgttatctagacctggtgcacagtgtttgtcttgggatctcagtttaaaatatggtgggaattattctggcctgtatcctactgattctttattgcctgaatctcatgtttcttctttggatactcccttgtcttggccgtgcatatcatccagtagcgtcctgagaaagcatgcacaggagatcattattttgagaatgagcatatgtgaaaaarcctttattctccccctagtactttatggcctgttaagcggaggtgtgtcaaccattgggcttttctatggggtgttctggctgagttcattaggcaacctccaaatgttaatattaatattatcatggtattcttctttctccacttcttcctcctcccttctccctttcctttccttctccctctcctctcctttcccctcctccccagcac

SEQ ID NO: 117067 - DNA, 526 bp, Homo sapiens
catcctgtggggccatgtgggaatatgatgcttttgcttgactcaccacttctacccctggggaatttatctgcagatacttgtgtatgtgtacaaaaatgtrcacacaaagtcattcactgtggcactgtttaagcttcaaaatattggaaacaacaaaattgtcaattagaatattgctaaataaatgatggtttactcatacaattaaatgttatgtggctgaaaaaaagaatgaggacactatgtaataatttggaaaaaattctaaaatatattactaagtgaaaaaacaaagtagggaagaatgtttcagaaaaggctaacttttgggtaagaaaatgggagaaataagaatatatatttgcccagcgtggtggctcgtgcctgcaatcccagcactttgggaggccgaggtgggcggatcacctgagttcgggagttcaagaccagcctggccaacatggtgacaccctgtttgtactaaaaatacaaaaattagctgggcatggtgttgggtgcttgt

SEQ ID NO: 117068 - DNA, 473 bp, Homo sapiens
tacccctggggaatttatctgcagatacttgtgtatgtgtacaaaaatgtgcacacaaagtcattcactgtggcactgtttaagcttcaaaatattggaaacaacaaaattgtcaattagaatattgctaaataaatgatggtttactcatacaattaaatgttatgtggctgaaaaaaagaatgaggacactatgtaataatttggaaaaaattctaaaatatattactaagtgaaaaaacaaagtagggaagaatgtttcagaaaaggctaacttttgggtaagaaaatgggagaaataagaatatatatttgcccagcgtggtggctcgtgcctgcaatcccagcactttgggaggccgaggtgggcggatcacctgagttcrggagttcaagaccagcctggccaacatggtgacaccctgtttgtactaaaaatacaaaaattagctgggcatggtgttgggtgcttg

SEQ ID NO: 117069 - DNA, 615 bp, Homo sapiens
agagatggaagaataaaaacaggtaaaaagtaaagggattttaaaggcactggggtggcagagaatcaagagaaattagtagcttgttaggtgactattttcaaaattaatgagagaatgtgggagtgatcggccaggacttttgttacccattgaccatgattggtttgagtatagatactagaccaggttccacttttcttagttgcaggccaacttgcctgcaagtaaagctagaatctccaaactgttccaggaattaatagagaactgctacagttatgagcaagttacctctattaaatggcataatgtagttccattcattctaagtggttctttrgtgggttgatccggtggtggaattcatgaaataattcatgaattattcaattatatgggttagatagaaaaagtcatttgatagatctgattcaatgaatactcattaagtgaaagtatcatgctggatactttcccagagtgaaaattatttcactactttaagctcatgtattctgggctactttgagtaaataaaggaagatgatatcaaatttgcctctacaaatatgtatccttaataatattgtcaattcattcaagagggtaggt

SEQ ID NO: 117070 - DNA, 544 bp, Homo sapiens
atatcttaccactataatgtatgagaaatgagatttgtagaaggggaaaaaaaaaaccactccccaagcaaatctatatcaacttaaatattttgaacagctttattcagatacaattgacataccacaaactacacatattgaaagtgtatacttagatatgttttgacatatgtatacactcatgaaaagagttaccaggatggggaatgtgtctactacagtcaaaagtttcctcctgttcctctgtaatcccacattccccatcctcccatccctgggctgttttttgtcactacaaattggtttgcattttctagaattttaygtaagtggaataatattgtatgtactcttgtgtcagacatcattcacttttagagatttatccatgaagttgtatttactaatagtttggttctttgcagattattattttattatacagatacgccgtaattcatttacccattcatctgttgaacagattttagcttccaaactggatgcatttatttacttattgcatgctttaatggcttaa

SEQ ID NO: 117071 - DNA, 609 bp, Homo sapiens
tgagcactttttgctttcttgatctttggctcccatttgtgttggctcataggtagttctgatgaagccaggaggttgttgcctaaatcygagactatcctgttactaaagttctagccaccacgaggcagtaggaataatgaagtcaaggatggatagctccaagctaaatgagttaggaagaactgtagatttcactgatgagactgtgtttagatatttaaatcttcctctttattagttgtaagtggacaaatcaggctttctgagtttcaattttcatctgtaaagggaattgtctctggaattgagaataaaatgaaatgaaatgtataaaagcactaatcatgtgtctaacatcattaatggtggtttcagcagcatcagaggcattggttcaggatatcctttaagtgtagctttgagtagatcagacttcttgctgccacccattttcaggggtccttagatacttaggttccctggctaatctaaaggtatatgaaagccacttaagtagtaattggaataagataggggattaatatgttaattaaatctgaatataagtaggagaattctgaaaccaagcagtatcaggtaggagta

SEQ ID NO: 117072 - DNA, 609 bp, Homo sapiens
tgagcactttttgctttcttgatctttggctcccatttgtgttggctcataggtagttctgatgaagccaggaggttgttgcctaaatccgagactatcctgttactaaagttctagccaccacgaggcagtaggaataatgaagtcaaggatggatagctccaagctaaatgagttaggaagaactgtagatttcactgatgagactgtgtttagatatttaaatcttcctctttattagttgtaagtggacaaatcaggctttctgagtttcaattttcatctgtaaagggaattgtctctggaattgagaataaaatgaaatgaaatgtataaaagcactaatcatgtgtctaacatcattaatggtggtttcagcagcatcagaggcattggttcaggatatcctttaagtgtagctttgagtagatcagacttcttgctgccacccattttcaggggtcctyagatacttaggttccctggctaatctaaaggtatatgaaagccacttaagtagtaattggaataagataggggattaatatgttaattaaatctgaatataagtaggagaattctgaaaccaagcagtatcaggtaggagta

SEQ ID NO: 117073 - DNA, 609 bp, Homo sapiens
tgagcactttttgctttcttgatctttggctcccatttgtgttggctcataggtagttctgatgaagccaggaggttgttgcctaaatccgagactatcctgttactaaagttctagccaccacgaggcagtaggaataatgaagtcaaggatggatagctccaagctaaatgagttaggaagaactgtagatttcactgatgagactgtgtttagatatttaaatcttcctctttattagttgtaagtggacaaatcaggctttctgagtttcaattttcatctgtaaagggaattgtctctggaattgagaataaaatgaaatgaaatgtataaaagcactaatcatgtgtctaacatcattaatggtggtttcagcagcatcagaggcattggttcaggatatcctttaagtgtagctttgagtagatcagacttcttgctgccacccattttcaggggtccttagatacttaggttccctggctaatctaaaggtatatgaaagccacttaagtagtaattggaataagataggggattaatatgttaattaaatctgaatataagtaggmgaattctgaaaccaagcagtatcaggtaggagta

SEQ ID NO: 117074 - DNA, 609 bp, Homo sapiens
tgagcactttttgctttcttgatctttggctcccatttgtgttggctcataggtagttctgatgaagccaggaggttgttgcctaaatccgagactatcctgttactaaagttctagccaccacgaggcagtaggaataatgaagtcaaggatggatagctccaagctaaatgagttaggaagaactgtagatttcactgatgagactgtgtttagatatttaaatcttcctctttattagttgtaagtggacaaatcaggctttctgagtttcaattttcatctgtaaagggaattgtctctggaattgagaataaaatgaaatgaaatgtataaaagcactaatcatgtgtctaacatcattaatggtggtttcagcagcatcagaggcattggttcaggatatcctttaagtgtagctttgagtagatcagacttcttgctgccacccattttcaggggtccttagatacttaggttccctggctaatctaaaggtatatgaaagccacttaagtagtaattggaataagataggggattaatatgttaattaaatctgaatataagtaggaraattctgaaaccaagcagtatcaggtaggagta

SEQ ID NO: 117075 - DNA, 425 bp, Homo sapiens
attagagatagaaggatataataatacaacaaggtcaagtgatgaatcagagataaaatataaggcagaaggtattgaattgacagaaaaattacaaaagaaacagagaagccaaaaaatgtacagtgcaatttgaagaatttaattttaaaatgatttattgaaatataagaccccaaagtcattgtacataaaacattattttaccgaaatctacattccaattagatcaaaaggcttaaattataggaagcagtaatatcttatatgcctaataagcaacttagaaaataataatataataatataamaataataataaagtgttccttcaaaattggctgaaaatatacatatgtaccattaataaataaaaatgctatttttgtatgctagattgaataagcttgctattaactctcatt

SEQ ID NO: 117076 - DNA, 401 bp, Homo sapiens
tcctccaatgcataaaaggaacttccatagggctggcaggagtcaggctgttcaagacaactggaaggagttgaataacatctatccagtgagtcctgcaagacttcaggctctactacctccagcagctccctgctgagcctggaaaaggaggaaaaagtaaagaataagccaggggaaatcagacacaacagagccccaactaggtttcatgggtagcatagggaagtggttaaaaaactaaaaggatagatccattaatgaggtaacaaattattgccttcatgttgggacagaacagggccaaatggaaaagaatgaaagagaaagacagatagayacacacacacacacacacacacacacacacacacacacacagacacacacacacacacaga

SEQ ID NO: 117077 - DNA, 533 bp, Homo sapiens
gtaccttggcttggctcttgacgtggacagtgagtaccttactgtgaaggtgataagcctccacctggtcttccagataggggtgatattcctgttccaagtggcccttactgacccgagagatgtcattgccgcaggcaggacctatgggcgcatataggttgtaatgaaactgtagtctcagttggaagcctagacatgaaatgggtcagtgagcaaggctctattcctagtctccagccatgcctgtggcaagctgagcccgctctcagcacattggacccaggcagatgtaaaaaattcacagaastatgatttggactcaagggtttgtagatttcctccttcattctaatttcagtgtctaaaattcttgcatccatgaacgagctgggcatttgatgagacagggctgaatactgcagttttcctcctagaaatcatctggggcattttctttgaactgatgggaacaataaggcataactgtttgcacaaacttgggataaatgattttgggataacgatctacc

SEQ ID NO: 117078 - DNA, 533 bp, Homo sapiens
gtaccttggcttggctcttgacgtggacagtgagtaccttactgtgaaggtgataagcctccacctggtcttccagataggggtgatattcctgttccaagtggcccttactgacccgagagatgtcattgccgcaggcaggacctatgggcgcatataggttgtaatgaaactgtagtctcagttggaagcctagacatgaaatgggtcagtgagcaaggctctattcctagtctccagccatgcctgtggcaagctgagcccgctctcagcacattggacccaggcagatgtaaaaaattcacagaagtatgatttggactsaagggtttgtagatttcctccttcattctaatttcagtgtctaaaattcttgcatccatgaacgagctgggcatttgatgagacagggctgaatactgcagttttcctcctagaaatcatctggggcattttctttgaactgatgggaacaataaggcataactgtttgcacaaacttgggataaatgattttgggataacgatctacc

SEQ ID NO: 117079 - DNA, 489 bp, Homo sapiens
cattatcgattacatcttttccagcaagcctgaattattcctactaacattgctgttggttttcattgcagtagatatttaggtttccatttcttcctccccttatcatttactaacctactgtaggtggaccagacttcaaaaactgtattctcatggcgactgcatggaaacttgagcacattttatggaaaattattgagcacagtcttttcatgatccctgtatgctgtgtgtcctgagggcactaactcagagtgtcctgttactccctcatcagtgtgtcacctggacaattcactgagctcgttctctctgtgtgtgtgtgtgtgtctgtgtgtgtgtstgtgtgtgtgtgtgtgtgtgtgtgtgtgtgtgtctatctgtctttctctttcattcttttccatttggccctgttctgtcccaacatgaaggcaataatttgttacctcattaatggatctatccttttagttttttaaccac

SEQ ID NO: 117080 - DNA, 576 bp, Homo sapiens
attgctgttggttttcattgcagtagatgtttaggtttccatttcttcctccccttatcatttcctaacgtaccataggttgaccatacttcaaaagctgtactctcatggccactgcatcgaattttgagcatattttatggaaaactattgagctcactcttttcatgatcacagtttgctgtgtgtcatgagggcactaactcagagtgtcctttkactcccttaccagtatgtcacctggccaattcactaggtcactttctctctgtctctgtctctgtctctctctctgtctctgtctctctctctctctctgtctttctctttcattgttttctacctggccctgttctatcccaacataaaggcaataatttgttacctcattaatggatctgtcctttttcttttcaaactcttccttacgttagccatgaaatctagctggggctgtgtggtttctgattccccctggcttattctttactttttcccacttttccaggctcagcagggagctgctggatgagaaagggcctgaagtcttgcaggactcactggatagaagttatt

SEQ ID NO: 117081 - DNA, 576 bp, Homo sapiens
attgctgttggttttcattgcagtagatgtttaggtttccatttcttcctccccttatcatttcctaacgtaccataggttgaccatacttcaaaagctgtactctcatggccactgcatcgaattttgagcatattttatggaaaactattgagctcactcttttcatgatcacagtttgctgtgtgtcatgagggcactaactcagagtgtccttttactcccttaccagtatgtcacctggccaattcactaggtcactttctctctgtctctgtctctgtctctstctctgtctctgtctctctctctctctctgtctttctctttcattgttttctacctggccctgttctatcccaacataaaggcaataatttgttacctcattaatggatctgtcctttttcttttcaaactcttccttacgttagccatgaaatctagctggggctgtgtggtttctgattccccctggcttattctttactttttcccacttttccaggctcagcagggagctgctggatgagaaagggcctgaagtcttgcaggactcactggatagaagttatt

SEQ ID NO: 117082 - DNA, 576 bp, Homo sapiens
attgctgttggttttcattgcagtagatgtttaggtttccatttcttcctccccttatcatttcctaacgtaccataggttgaccatacttcaaaagctgtactctcatggccactgcatcgaattttgagcatattttatggaaaactattgagctcactcttttcatgatcacagtttgctgtgtgtcatgagggcactaactcagagtgtccttttactcccttaccagtatgtcacctggccaattcactaggtcactttctctctgtctctgtctctgtctctctctctgtctctgtctctctctctctctctgtctttctctttcattgttttctacctggccctgttctrtcccaacataaaggcaataatttgttacctcattaatggatctgtcctttttcttttcaaactcttccttacgttagccatgaaatctagctggggctgtgtggtttctgattccccctggcttattctttactttttcccacttttccaggctcagcagggagctgctggatgagaaagggcctgaagtcttgcaggactcactggatagaagttatt

SEQ ID NO: 117083 - DNA, 543 bp, Homo sapiens
ttttatggaaaactattgagctcactcttttcatgatcacagtttgctgtgtgtcatgagggcactaactcagagtgtccttttactcccttaccagtatgtcacctggccaattcactaggtcactttctctctgtctctgtctctgtctctctctctgtctctgtctctctctctctctctgtctttctctttcattgttttctacctggccctgttctatcccaacataaaggcaataatttgttacctcattaatggatctgtcctttttcttttcaaactcttccttacgttagccatgaaatctagctggggctgtgtggtttctgattccccctggcttattctttactttttcccacttttccaggctcagcagggagctgctggatgagaaagggcctgaagtcttgcaggactcactggatagawgttattcaactccttcaggttgtcttgaactgactgactcatgccagccctacagaagtgccttttacgtattggagcaacagcgtgttggcttggctgttgacatgg

SEQ ID NO: 117084 - DNA, 540 bp, Homo sapiens
gtaccttggcttggctcttgacgtggacagtgagtaccttactgtgaaggtgataagcctccacctggtcttccagataggggtgatattcctgttccaagtggcccttactgacccgagagatgtcattgccgcaggcaggacctatgggcgcatataggttgtaatgaaactgtagtctcagttggaagcctagacatgaaatgggtcagtgagcaaggctctattcctagtctccagccatgcctgtggcaagctgagcccgctctcagcacattggacccaggcagatgtaaaaaattcacagaactatgatttggactcaagggtttgtagatttcctccttcattctaatttcagtgtctaaaattcttgyatccatgaacgagctgggcatttgatgagacagggctgaatactgcagttttcctcctagaaatcatctggggcattttctttgaactgatgggaacaataaggcataactgtttgcacaaacttgggataaatgattttgggataacgatctaccagaatgg

SEQ ID NO: 117085 - DNA, 487 bp, Homo sapiens
cattatcgattacatcttttccagcaagcctgaattattcctactaacattgctgttggttttcattgcagtagatatttaggtttccatttcttcctccccttatcatttactaacctactgtaggtggaccagacttcaaaaactgtattctcatggcgactgcatggaaacttgagcacattttatggaaaattattgagcacagtcttttcatgatccctgtatgctgtgtgtcctgagggcactaactcagagtgtcctgttactccctcatcagtgtgtcacctggacaattcactgagctcgttctctctctctgtgtgtgtgtgtgtgtstgtgtgtgtgtgtgtgtgtgtgtgtgtgtgtgtgtgtctatctgtctttctctttcattcttttccatttggccctgttctgtcccaacatgaaggcaataatttgttacctcattaatggatctatccttttagttttttaaccactt

SEQ ID NO: 117086 - DNA, 577 bp, Homo sapiens
tttcccaaaaaagagctatatttagctacttttcttttgcatattgttccatttgcagccacactatttgtcttcccccacaccacttctatcaccaggaatccattttccttgttttctttttaatatcgggagcctctgctcactgcactgcatagtccttggggctttttttaaactttatttttaacaatcatttgagcagaaagtagccaattcagttctttaatttcccattttattcttggtttgaaactgacctgattgtgtcccttttgttatgaccagttacttagaagccatacagcccacaaggtrcccttgggtataaatccaacttcttcattttaatggtgagaaaccaaaagcccacgtttcctgatttctggcccagcactggaactgttttcatggcacgtcaattcatcatacattttaatagtgatattttatatttgcataattttattgcctttgcaatgggctttcacatctatcttctcatgtgtatatagtttaaaggccatttttacccactatctcctaatcatatcgaccacagcctcaggaaatgtct

SEQ ID NO: 117087 - DNA, 571 bp, Homo sapiens
agagggtgtgcctcctagatattcctcatatgttaccatccattaattgttcctgagtattcagtgttacctgggggcagacgatttctgcactttctcagccamctcaacttgaacatcttcatcgtcatcgttgtcattttctgtaaatacagaagtgttcgttcagatatttcccacttcacagtctgcaagcacagtcagcccaatgtgcaacagagacatgaacatctaggcatgggtcaccgttcaactgaaaactctcatgttttatctttaacagaatgccctggcatggtttcctgatccatcaggcaatgcatttctgatctggagggccaccatcaagatgtggccaaatattgaaaagaccttttgcttcccatatcactggaggcttgtgcagcctctctctggacgttggcagctgtctcccccatcctgccagatctgattcccaggcacaggcttggtgtcctgtcacggtttgcatttcaaacctcattctttctcttagaagcagacaaacttgtcccacagtcctctatgcatcagaagatttcaagcctcc

SEQ ID NO: 117088 - DNA, 571 bp, Homo sapiens
agagggtgtgcctcctagatattcctcatatgttaccatccattaattgttcctgagtattcagtgttacctgggggcagacgatttctgcactttctcagccaactcaacttgaacatcttcatcgtcatcgttgtcattttctgtaaatacagaagtgttcgttcagatatttcccacttcacagtctgcaagcacagtcagcccaatgtgcaacagagacatgaacatctaggcatgggtcaccgttcaactgaaaactctcatgttttatctttaacagaatgccctggcatggtttcctgatccatcaggcaatgcatttctgatctggagggccaccatcaagatgtggccaaatattgaaaagaccttttgcttcccatatcactggaggcttgtgcagcctctctctggacgttggcagctgtctcccccatcctgccagatctgattcccaggcacaggcttggtgtcctgtcacggtttgcatttcaaacctmattctttctcttagaagcagacaaacttgtcccacagtcctctatgcatcagaagatttcaagcctcc

SEQ ID NO: 117089 - DNA, 571 bp, Homo sapiens
agagggtgtgcctcctagatattcctcatatgttaccatccattaattgttcctgagtattcagtgttacctgggggcagacgatttctgcactttctcagccaactcaacttgaacatcttcatcgtcatcgttgtcattttctgtaaatacagaagtgttcgttcagatatttcccacttcacagtctgcaagcacagtcagcccaatgtgcaacagagacatgaacatctaggcatgggtcaccgttcaactgaaaactctcatgttttatctttaacagaatgccctggcatggtttcctgatccatcaggcaatgcatttctgatctggagggccaccatcaagatgtggccaaatattgaaaagaccttttgcttcccatatcactggaggcttgtgcagcctctctctggacgttggcagctgtctcccccatcctgccagatctgattcccaggcacaggcttggtgtcctgtcacggtttgcatttcaaacctcattctttctcttagaagcagacaaacwtgtcccacagtcctctatgcatcagaagatttcaagcctcc

SEQ ID NO: 117090 - DNA, 541 bp, Homo sapiens
tttccacatctttactcttcagtctcctgactttctggcatctgatcctccaaaatttagagatgaagaaagagaacctcaagggcacatcaaggaagttgacaagatgattcaaccacaacgaagtggagtcagaattcacagyccgtgaggtctgactctgaatgcggggccactttcccaagccttgcagcctctcctctaaaacactgcactggggcatgaagtagtgatttcttgtacagtcgggaaggcccctaggactatgggactgatggtttcccttttactgggaatttcaaggacaagtatgtgaaagatttttaaaatctttgatttttaaatcatatcttcagttatgattttaagaatcatatctgaagcataaagtgtgacacataacaccttaaggccatgaaggaaatatgcccaaatgttaataaagtttgtgttaatttagaaacagcagaatgaagaattaataaatagtgttcactgtgtgccaataaatgttctaggagattgacaagaaatagctcat

SEQ ID NO: 117091 - DNA, 541 bp, Homo sapiens
tttccacatctttactcttcagtctcctgactttctggcatctgatcctccaaaatttagagatgaagaaagagaacctcaagggcacatcaaggaagttgacaagatgattcaaccacaacgaagtggagtcagaattcacagtccstgaggtctgactctgaatgcggggccactttcccaagccttgcagcctctcctctaaaacactgcactggggcatgaagtagtgatttcttgtacagtcgggaaggcccctaggactatgggactgatggtttcccttttactgggaatttcaaggacaagtatgtgaaagatttttaaaatctttgatttttaaatcatatcttcagttatgattttaagaatcatatctgaagcataaagtgtgacacataacaccttaaggccatgaaggaaatatgcccaaatgttaataaagtttgtgttaatttagaaacagcagaatgaagaattaataaatagtgttcactgtgtgccaataaatgttctaggagattgacaagaaatagctcat

SEQ ID NO: 117092 - DNA, 541 bp, Homo sapiens
tttccacatctttactcttcagtctcctgactttctggcatctgatcctccaaaatttagagatgaagaaagagaacctcaagggcacatcaaggaagttgacaagatgattcaaccacaacgaagtggagtcagaattcacagtccgtgaggtctgactctgaatgcggggccactttcccaagmcttgcagcctctcctctaaaacactgcactggggcatgaagtagtgatttcttgtacagtcgggaaggcccctaggactatgggactgatggtttcccttttactgggaatttcaaggacaagtatgtgaaagatttttaaaatctttgatttttaaatcatatcttcagttatgattttaagaatcatatctgaagcataaagtgtgacacataacaccttaaggccatgaaggaaatatgcccaaatgttaataaagtttgtgttaatttagaaacagcagaatgaagaattaataaatagtgttcactgtgtgccaataaatgttctaggagattgacaagaaatagctcat

SEQ ID NO: 117093 - DNA, 559 bp, Homo sapiens
tgtgcctataggacctccctgtggcaatgacatctctcagctcagtaagggccacttgcagtagcaatatgaccctaacaggaagactcagtggatccttatcaccttcatagaaaggtactcaccatccatgtcaacagccaagccaacaygctgttgctccaatacgtaaaaggcacttctgtagggctggcatgagtcagtcagttcaagacaacctgaaggagttgaataacatctatccagtgagtcctgcaagacttcaggccctttctcatccagcagctccctgctgagcctggaaaagtgggaaaaagtaaagaataagccagggggaatcagaaaccacacagccccagctagatttcatggctaacgtaaggaagagtttgaaaagaaaaaggacagatccattaatgaggtaagaaattattgcctttatgttgggatagactagggccaggtagaaaaggatgaaagagagagacacacactcacacacacacacaaacacacacacacacacacacacacacacacacagagcgagctcagtgaa

SEQ ID NO: 117094 - DNA, 496 bp, Homo sapiens
actaaatttgctgaatcactatsctgctatatgaaatctacaaataccagataaaatgtacatgtcatttttcaaaagtatattactgacttgaatagaaactaaggtgaaccacataggccaagcataaggagaatacataaatccagagaggtatgcagacccccaaaccagaagcttccataaggacagtcctggtcctagtaccctgagcttcaatttttatgaccacctgggatatgggagagtgtgagacaaaacctagtgcctgcccagtatagcagtcttacaggagaaaactgctgaaagccacagatacgaaggactataatttcagggaaaggataaactagataaaaacctgttcctcagggggagacaaccaggaaattttcctgcctcaaactcggtgctatttagaggaaaaatgagaaggccatcttcacatgaatttgtggtttaaattttcactgtaagtataagttaaaaaaaaccc

SEQ ID NO: 117095 - DNA, 496 bp, Homo sapiens
actaaatttgctgaatcactatgctgctatatgaaatctacaaataccagataaaatgtacatgtcatttttcaaaagtatattactgacttgaatagaaaytaaggtgaaccacataggccaagcataaggagaatacataaatccagagaggtatgcagacccccaaaccagaagcttccataaggacagtcctggtcctagtaccctgagcttcaatttttatgaccacctgggatatgggagagtgtgagacaaaacctagtgcctgcccagtatagcagtcttacaggagaaaactgctgaaagccacagatacgaaggactataatttcagggaaaggataaactagataaaaacctgttcctcagggggagacaaccaggaaattttcctgcctcaaactcggtgctatttagaggaaaaatgagaaggccatcttcacatgaatttgtggtttaaattttcactgtaagtataagttaaaaaaaaccc

SEQ ID NO: 117096 - DNA, 549 bp, Homo sapiens
tttagaaataaaaaatataatgaaaattaaaaactaaatggacaggttaaacacaatattggatagaaccaaaaagaaaataagtgagttggaagttagactaaacaaattatgctgaagacagtacagaggaggaaaggaaaatggatatgtgaaatagaggttgaaaaattagagtatctaatcatatctgcaaaagaaaaattgaattgrgggaaggttatatttaaggttatatttaatatctgagggcttttcgtcattggaatttattaatgttcaaggaaacctggaaagttttctaacacattaaaggagctttaattataagttccaaattcttcttagaagaagagaaccagcaggcccagacatttttactggtgagttctatcaaatgttttcaagaaatggattatttccattttataaaaacaactccagaataaaaaaaggtccatttgttcgttcattttatgaggccagtacaaccttgataccaatgttatatgagaaatgtgtaagacaggaaaattacatgccaacttt

SEQ ID NO: 117097 - DNA, 576 bp, Homo sapiens
aaattaaaagttagcaaattaagtttagaagtctataaaaaatatagtatgaaaattgtgtttgttccatgaatgcaaggatttctaacaatagaaaaaaaaaactatgtataattcatcacattaacaagttaaaggaggaaaagcaaatcatcattgtaggagaggcaaaaagtgaattcaataaaataaaatatttaactttgacaaatcttgtttagcaaacaagaaatagaagagctttcagtgtttgcttataaatcagaaactattcttcrtctttcaagcagaggtgatttaatacaggtgattgattacacaagtgatggaagccaaaccaggcttggtgagtcagcagcccatatttaatatatttatatattaaatatttaattatacttcaaaacttttatgtacactataatctcattattgttttctatactattatatgcaatatacaaatacagaaatacagaaatgtacctcagtttgaaagagaatttgaatatgaggcaaaaagatacccccaaattatagttacattacaagaattgaatttaagaaggaagaagc

SEQ ID NO: 117098 - DNA, 443 bp, Homo sapiens
ctcattcctaacatatcatgttatgatatgaaaatatttcaaaatttgaaaaaatccaaaatctacaatatttttggtcccaagcatttcatataagggataccatactccagaatgttagaatgtttatggctactttgtttgtagtacagggggaaaaaaaccatgatgagtctccatcagtaaaaagatagtttaaaaacttgtagaatttastcatatacatatatttacacatgcatatatgcacacatattatttttctctatatagagaaactgtgcattcatttaaagtgatatttcctctgttaattgacttggagaaatgttcatactgtgttgataagttggaaaatcagtttgtttacatgaggtgaagtggaaaagttaaactacattataaagtacattataggcttttcaaagggcaaaaaagtgtca

SEQ ID NO: 117099 - DNA, 443 bp, Homo sapiens
ctcattcctaacatatcatgttatgatatgaaaatatttcaaaatttgaaaaaatccaaaatctacaatatttttggtcccaagcatttcatataagggataccatactccagaatgttagaatgtttatggctactttgtttgtagtacagggggaaaaaaaccatgatgagtctccatcagtaaaaagatagtttaaaaacttgtagaatttactcatatacatatatttacacatgcatatatgcacacatattatttttctctatatagagaaactgtgcattcatttaaagtgatatttcctctgttaattgacttggagaaatgttcatactgtrttgataagttggaaaatcagtttgtttacatgaggtgaagtggaaaagttaaactacattataaagtacattataggcttttcaaagggcaaaaaagtgtca

SEQ ID NO: 117100 - DNA, 580 bp, Homo sapiens
acaaaaccagtacaagtttaatgagattaaacttatttagcaaacaaatcaatctgacwttgattatctttgacagaaatgagagtgaatatagagagaaaagttatgtttcgggagaaaactgcagtgcacccaatattagattctagctgttttttttttttcctgaggttttattatctgcctgcaatctgcaatagatcctcaatttttctagcttactacaatatttagctacaacactccaaattaatatttcatttttttcctgctattctggcttggaatcactaaaattataaacttttcatttcttgaagtccttcaaactgaaactggatgacttgacataagcttcagaaaaattaccacaacagcttgtgtgtggcccatctttatggcattcaaactgcaaactaatccaatgcctcttctcactccagctgaagatactacaagcccagcatctagaaatcttattgatcagctgccctctgggctcagaaactgtctttatagtttgttccaactattaatcttttttaattttatttttatagaaactaaacttcccacatta

SEQ ID NO: 117101 - DNA, 636 bp, Homo sapiens
atggtgggttttgatcttcttccccttcttttcttccccttcttctttccttctttgatcttcttccccttcttttcttccccttccccttcttttcaatttctgcaataaattcagacatggacagacacattaagctgattcccctacacacataacaatccactgtctaatcctcacacagggacctcaggctcctcagcataagaataggacaccgtgagagatatatttcaggaggcctgaaggctggtcatgatagaaattcctcggtttttctcccagaaactgtgggtaaaatgtccctattctagtagatcgttatcccaatatcatttgtcccaagtttgtgcaaacagttaygccatatttttccaatcaacttaaagcaaataccctcaaatgatttctaggagaaaaactgcaatatttagccctgtctcatcaaatactcagattgttcatggttgtgaggactttagacactgaaattagagtgaaaaaggaaatctacaaacccttgagtcaaaatcatagttctctgaatttgtcacatctgcccaggtccaatgtcatgaggataggatcagggcgccacaggtatggcctgagactaggaagagagtcttgctcact

SEQ ID NO: 117102 - DNA, 636 bp, Homo sapiens
atggtgggttttgatcttcttccccttcttttcttccccttcttctttccttctttgatcttcttccccttcttttcttccccttccccttcttttcaatttctgcaataaattcagacatggacagacacattaagctgattcccctacacacataacaatccactgtctaatcctcacacagggacctcaggctcctcagcataagaataggacaccgtgagagatatatttcaggaggcctgaaggctggtcatgatagaaattcctcggtttttctcccagaaactgtgggtaaaatgtccctattctagtagatcgttatcccaatatcatttgtcccaagtttgtgcaaacagttatgccatatttttccaatcaacttaaagcaaataccctcaaatgatttctaggagaaaaactgcaatatttagccctgtctcatcaaatactcagattgttcatggttgtgaggactttagacactgaaattagagtgaaaaaggaaatctacaaacccttgagtcaaaatcatagttctctgaatttgtcacatctgcccaggtccaatgtcatgagrataggatcagggcgccacaggtatggcctgagactaggaagagagtcttgctcact

SEQ ID NO: 117103 - DNA, 611 bp, Homo sapiens
tatgtagaatcacctctgctgtagaaagcgagaatgaactaagaggatggtgaaaatgcagacctaccaatggcaagctcatgccaacataaggcatcctgtgtgtgcaacttacacttgatttacaggtattgaacaagtttaaaaacagtggaattgtatagagagtyatatcctcatatgaagccttgctctttcaacatagagcctagggcactttgttaataaatttaaaaatttaattaaaaataaccaaaaaacagcttcttttcagaagacataggttcttccaagatgaatggagtctgaacgtatctacctcatctgtttttattttctgctgcttcaaaaatcaaaatttagagaatgttttactttcacggataacacaaagaggaagatgtatttcttggcatcaaagattgaaacatagaaaggatgatggaaggtgcgcagagaaatagaatgagaatgggatgcaaacaaaatgccccaaagcttttttattaacttagtttccagtggaaaatatcaaagtaggtgttttagtcatgtttcaccccaaaaaaacaaactaataagacacatagaaagacatataggaagtgact

SEQ ID NO: 117104 - DNA, 611 bp, Homo sapiens
tatgtagaatcacctctgctgtagaaagcgagaatgaactaagaggatggtgaaaatgcagacctaccaatggcaagctcatgccaacataaggcatcctgtgtgtgcaacttacacttgatttacaggtattgaacaagtttaaaaacagtggaattgtatagagagttatatcctcatatgaagccttgctctttcaacatagagcctagggcactttgttaataaatttaaaaatttaattaaaaataaccaaaaaacagcttcttttcagaagacataggttcttccaagatgaatggagtctgaacgtatctacctcatctgtttttattttctgctgcttcaaaaatcaaaatttagagaatgttttactttcacggataacacaaagaggaagatgtatttcttggcatcaaagattgaaacatagaaaggatgatggaaggtgmgcagagaaatagaatgagaatgggatgcaaacaaaatgccccaaagcttttttattaacttagtttccagtggaaaatatcaaagtaggtgttttagtcatgtttcaccccaaaaaaacaaactaataagacacatagaaagacatataggaagtgact

SEQ ID NO: 117105 - DNA, 611 bp, Homo sapiens
tatgtagaatcacctctgctgtagaaagcgagaatgaactaagaggatggtgaaaatgcagacctaccaatggcaagctcatgccaacataaggcatcctgtgtgtgcaacttacacttgatttacaggtattgaacaagtttaaaaacagtggaattgtatagagagttatatcctcatatgaagccttgctctttcaacatagagcctagggcactttgttaataaatttaaaaatttaattaaaaataaccaaaaaacagcttcttttcagaagacataggttcttccaagatgaatggagtctgaacgtatctacctcatctgtttttattttctgctgcttcaaaaatcaaaatttagagaatgttttactttcacggataacacaaagaggaagatgtatttcttggcatcaaagattgaaacatagaaaggatgatggaaggtgcgcagagaaatagaatgagaatkggatgcaaacaaaatgccccaaagcttttttattaacttagtttccagtggaaaatatcaaagtaggtgttttagtcatgtttcaccccaaaaaaacaaactaataagacacatagaaagacatataggaagtgact

SEQ ID NO: 117106 - DNA, 577 bp, Homo sapiens
attttatttttgtatggacaggaatgacaaatgacaatttctttgttcattgaatgttagagctaaaacctcaatgttttataatattttatttgttccttcatgtattgagcctttatttgttgggtgttattttagctttatttttaaattcttttaaacttttttttctggaaaacatatgagttatttggacatagtttgatgctttctaattttgcttttaagatttgttggtcaggatagaacctcaaactagggctaattattttatactatgaggacaagactttcctgtgtaatctaacctgtttcattaatcttacratttttcagtcaaactgatggcaatggtcactcttcttagccctgtgtgaccacaaggaccgttcaccataacgcttttggataactctttcaccagcttcaggtaatttatttgcatgcatgtggtgttcaagactcagatgaataatagagggtattcctccaaagatctctggagttcttactcacagcagatctttcctctccagtatcctgtatgacatattctagccatttttttctccctaaa

SEQ ID NO: 117107 - DNA, 577 bp, Homo sapiens
attttatttttgtatggacaggaatgacaaatgacaatttctttgttcattgaatgttagagctaaaacctcaatgttttataatattttatttgttccttcatgtattgagcctttatttgttgggtgttattttagctttatttttaaattcttttaaacttttttttctggaaaacatatgagttatttggacatagtttgatgctttctaattttgcttttaagatttgttggtcaggatagaacctcaaactagggctaattattttatactatgaggacaagactttcctgtgtaatctaacctgtttcattaatcttacaatttttcagtcaaactgatggcaatggtcactcttctyagccctgtgtgaccacaaggaccgttcaccataacgcttttggataactctttcaccagcttcaggtaatttatttgcatgcatgtggtgttcaagactcagatgaataatagagggtattcctccaaagatctctggagttcttactcacagcagatctttcctctccagtatcctgtatgacatattctagccatttttttctccctaaa

SEQ ID NO: 117108 - DNA, 553 bp, Homo sapiens
tttttaatttctaagtagttgagacttccattgttaacatacatttttctaattatgattatggttatatgacacagcagaaaacatcttaaatttaaatattttgtttgttttcttttttggccaaatacatacttgatttttacaaatagttcatggacagtgagaagaaattttttgttttttaattgaaaactctctgtcataatgtgtgtgcaggtgggtgtgtgccaactactacctttctttatttttcttttagcctttatgtattgacttatgtgmcttatattttaaagggctcatggcagttgtattttcctcaaaattgttggtttttattctcataaaatatttttcatcttatttgatacatttaacttcaaatatgcattttctgatatttaatacttccccatttgctttccattttatggactttcacctgatatttgttacttaatgctcaacactgtattttatacatcttttttttttttttttttttgagacggagttttgctcttgttgcccaggctggagtgcaatggtg

SEQ ID NO: 117109 - DNA, 549 bp, Homo sapiens
ggtatcactatagataattgtatatatttggaaagccaaataacaatyctagaagacttaaataaatgcaaaacatatgttcaggaaaatatacaaattatatcaaaagacaatttcccactgagttttaaaattagattaatttagacacaattatgatgaccttgcaaaaatgcattaaactttttgatctttggttttttatgctataaaatcacaggattgtttggtaaaatctaaataagttaatatataatagatactgaaaattaaagagtgatagaggtaggaaaacaaataaaggtagagatagaagaaaaaaggaagaaaaaaaactaagagagacagagactgaattaaaataaggacttgcaaacagagtttcaggacaataccccagttgctaataggcaaatttgggttaatagaaatgtaagaggttctggacaaccaagaacagagggaaagaggcagagcactctttggagaaaagttcttgggcttgtccagattgtgagaccatgattcttattcattggcccacgagct

SEQ ID NO: 117110 - DNA, 549 bp, Homo sapiens
ggtatcactatagataattgtatatatttggaaagccaaataacaattctagaagacttaaataaatgcaaaacatatgttcaggaaaatatacaaattatatcaaaagacaatttcccactgagttttaaaattagattaatttagacacaattatgatgaccttgcaaaaatgcattaaactttttgatctttggttttttatgctataaaatcacaggattgtttggtaaaatctaaataagttaatatataatagatactgaaaattaaagagtgatagaggtaggaaaacaaataaaggtrgagatagaagaaaaaaggaagaaaaaaaactaagagagacagagactgaattaaaataaggacttgcaaacagagtttcaggacaataccccagttgctaataggcaaatttgggttaatagaaatgtaagaggttctggacaaccaagaacagagggaaagaggcagagcactctttggagaaaagttcttgggcttgtccagattgtgagaccatgattcttattcattggcccacgagct

SEQ ID NO: 117111 - DNA, 538 bp, Homo sapiens
gaatactatgtttatatctctgctatgcaatttctcgagttagttaaatgaggacttgtatagctatgtagtcaaccaactgccaagcacccaggtccattccattaaagcawtcagtgtttggccttgttcacattgacaaagatgtctcacaaagatatgcgtcttcaaatctgtaagaagagggaaacttttccttgaagtagagtgttactatagtgaagggagagttgatggtagctttgagctaggggtaataatagagtggtgagaggtattaaatgttagccatgttttgaagaagctgccaacaggatttttttgagtttgcttattccatccctcagtaccctattattcctattccaatgacattcactgtcctcttagaacatgcaaagcaggctcatgcagcaagaccttgcccagcaccaatgaatgttcaaaacaacttaattagctgtcttcttttcccccactaaaacttcagcctttctctttgtctttggacatacctaggggctaacctggcttgtgt

SEQ ID NO: 117112 - DNA, 538 bp, Homo sapiens
gaatactatgtttatatctctgctatgcaatttctcgagttagttaaatgaggacttgtatagctatgtagtcaaccaactgccaagcacccaggtccattccattaaagcaatcagtgtttggccttgttcacattgacaaagatgtctcacaaagatatgcgtcttcaaatctgtaagaagagggaaacttttccttgaagtagagtgttactatagtsaagggagagttgatggtagctttgagctaggggtaataatagagtggtgagaggtattaaatgttagccatgttttgaagaagctgccaacaggatttttttgagtttgcttattccatccctcagtaccctattattcctattccaatgacattcactgtcctcttagaacatgcaaagcaggctcatgcagcaagaccttgcccagcaccaatgaatgttcaaaacaacttaattagctgtcttcttttcccccactaaaacttcagcctttctctttgtctttggacatacctaggggctaacctggcttgtgt

SEQ ID NO: 117113 - DNA, 631 bp, Homo sapiens
aaaattttaaaccaggtatattaccaaaagaattttttttttttttacatattgactttcaagctaattcctgactaggccataatataagtgctcttcatttcttatatgcactcatacaatgctgaccaatctataagctaaacttaagcatttttgtacctactcaagtggtcatgtggcattccccatcaaccatagatgtgaattcaggaacggatgctggggtaccctttagtgycttgaaagttgtgttatcttacttttcgtaggaggcacaggtgcaataactttgcatctactttggagagggtgacccagagcaccctggattaagtattcctaaatagttttaaaatatgccaggaccctgaatctccacagggttaatgtctcaccctctaaaatgtgtgtatcttaccaaaacttttagaatgctagtcatgtcatagtcataagccacgtctctatcaaaaatacaaaaaaattagttgagcatggtggtgtatgcctgtggtcccagctactcaggagactgaagtaggaggatcacttgagcctgggaggtggaggttgcaatgagctgagatcgtgtgccactgccctgaagcctaggcaacacagtgagacc

SEQ ID NO: 117114 - DNA, 601 bp, Homo sapiens
ttagaaaacgtctggagacatttttggttgtcatgactaggagggtgctaccagcatctagtaggtagaggtcagagatggtgctaaacatcctaaaacgcacagcacagccccacaataaatmcctgtgggctcgaaatgtcgctagtactaagacgaggaactctactcgagaccaagcaatacagagtgctgcagcacttacttgcttctagctttaatgtgtacattccccttctgtttcacgtatccttctgaactactttcaggagtagtttctggaacagggcaatataagtaaaatagaaatactacaaacagggaaaggcaaagttcaactaaaatctgcagtgtttcgaaacacaatactttggagaggcagcctgttgaaaatgtgtggcgtgcataaaatttagagataattccaatgacaaaaagaaaatatgagcctgcggtctgagtttcaatgcctaatatttttttcctcatgttccaaaaaaatttataaacaagtctctgactatgagatgaatatgtttgtgaacaagttgtggatgagatgttggccacatctacaatttaattttaaaacagaaacaaa

SEQ ID NO: 117115 - DNA, 351 bp, Homo sapiens
acctagtctatggtactttttataccagcctaaacagactaatccaaaaagtaaatacatgacagaaaattttcatagaagctaaataaagcccaattaccataccttctaagttgtcatcgtgcagtatttagactcaatagatttcaaagttttagatataccatacttaattaaattaagactgcatgtctttgtatgttttatgagaatcttctgagaaaattaagtaaatttcaaggaaaataatcaayataataggggtaaagaagaagaaaacaaaaacagatttataattggaaggattaatggcagagtaatgtttacgaattaggaaaaaaaatactgtga

SEQ ID NO: 117116 - DNA, 592 bp, Homo sapiens
gcatgaagaccaatatttctaactaactcagtcacacagaaataaagaattgtttaaaaatgagtaaaattttttagaaacataggattatgttaagcaaccaaatctacaaaagattggaattcctgagagaagaagaaaaagtaaacagctggaaaacttatttgaaggaataattcaaaaatgttttcctaatcttgttagagaggtagacatccaaacacaataaacctggagaacacctgcaagatactatacaaatgtcaccaaggcacatagtcaccagagtatccaaagtcaatactaaagaaaaaatgttaaaygacacctagggaaaagtgtcagatcacttacaagggaaccccattaggctaacaatggacttctcagcagaaaccttacaaatgagaagagattgagtacttattttcagtattctcaaagaaaaggaagtccaaccaggaatttgatgtcttcccaaactaagcttcataaacaaagaagaaataaaatattttccaggcaagcaattgttaaaggaccttattttttaccactagactagcattacgagatatcctaagagagtttt

SEQ ID NO: 117117 - DNA, 592 bp, Homo sapiens
gcatgaagaccaatatttctaactaactcagtcacacagaaataaagaattgtttaaaaatgagtaaaattttttagaaacataggattatgttaagcaaccaaatctacaaaagattggaattcctgagagaagaagaaaaagtaaacagctggaaaacttatttgaaggaataattcaaaaatgttttcctaatcttgttagagaggtagacatccaaacacaataaacctggagaacacctgcaagatactatacaaatgtcaccaaggcacatagtcaccagagtatccaaagtcaatactaaagaaaaaatgttaaatgacacctagrgaaaagtgtcagatcacttacaagggaaccccattaggctaacaatggacttctcagcagaaaccttacaaatgagaagagattgagtacttattttcagtattctcaaagaaaaggaagtccaaccaggaatttgatgtcttcccaaactaagcttcataaacaaagaagaaataaaatattttccaggcaagcaattgttaaaggaccttattttttaccactagactagcattacgagatatcctaagagagtttt

SEQ ID NO: 117118 - DNA, 592 bp, Homo sapiens
gcatgaagaccaatatttctaactaactcagtcacacagaaataaagaattgtttaaaaatgagtaaaattttttagaaacataggattatgttaagcaaccaaatctacaaaagattggaattcctgagagaagaagaaaaagtaaacagctggaaaacttatttgaaggaataattcaaaaatgttttcctaatcttgttagagaggtagacatccaaacacaataaacctggagaacacctgcaagatactatacaaatgtcaccaaggcacatagtcaccagagtatccaaagtcaatactaaagaaaaaatgttaaatgacacctagggaaaartgtcagatcacttacaagggaaccccattaggctaacaatggacttctcagcagaaaccttacaaatgagaagagattgagtacttattttcagtattctcaaagaaaaggaagtccaaccaggaatttgatgtcttcccaaactaagcttcataaacaaagaagaaataaaatattttccaggcaagcaattgttaaaggaccttattttttaccactagactagcattacgagatatcctaagagagtttt

SEQ ID NO: 117119 - DNA, 455 bp, Homo sapiens
cagccacttcttttatcaggcacctatagcgctattacactccaggccactatttgccttccctaatcaccccagggccaagtgccagacacttagagacagcccctatcctccagagcccactggaattattcaatctagccaatcctaaacctgcttatcctgccccatccatttatttccasagaaaccatgataaaggctcttacccacatttttctcatttccccactcacctaaccaacctcttatttctagggatttgtgagtctaaaaacttcttccttcatgacagtcatttccatgacagtgtgtcttaccattccagattaaaataaataccgggcacctttaaaacagtgcagcagacaagaactacatcttgatggcagctacattgtttttgtcagtagttgccacaggctcccaacataaaattgtggagctcggaaagc

SEQ ID NO: 117120 - DNA, 519 bp, Homo sapiens
atacttatttatgtaagcatgttgtagcttgtcttcacctggacctctatttaatggtaattatattttggaacaatgcatgataggccaactggtctgcttccaatggagttggaggggtgagactttataaactttgttaaagaaaatccctgagaaaagagattgccagtgatacttgtyttgttctttatatattcatatgtttttaacttttaatgaatatatattattttagtaattaaaaaaacagaagaactttaattttgtttgagcaataaagctctcttttaaccagatataataataaagttctggttaatattgagattagcaaaaagccagaagatgaatgggacttgggttctaaagtctcacacaagtcagtgtataattgaaagtataatcacaatactgagctaaagataatatactcaaccgagatattgctgattttaaacatagtagctcagcagcagttttgaaagaaagaggagtaggagagactgaaagaaaaaa

SEQ ID NO: 117121 - DNA, 555 bp, Homo sapiens
cttactcagcatttcccctaatcctccctccagaagcacgactgccaggaaagttcacagtgtactatctccagctgggaacccgaaagaagcaggaggactgtaggccacaggtcctgggcaccatgtgtttcccccgttcctactcctattcttccctctctgtccagcaaacctgcttgtttctgtcacctgccctcctgcccttggggtgacaatggatgccttgaacactcagcagagggatgctctttcagaggaggaagagtctgtgygattgatctgatgcctgagcaggaaaatcacccctgagaagaggctctgagacagagggtagccgtggttcctaccccttatatatgtggggctcctggcacatgcacacttctcctcaaactctgtttaggagaacaatgctgggtgttgtcagcctctctcctccctacatactgctctgtcatcagcctgagcacaatttccccatgaaaggcgttaatctgtctctcaattagatcaactttttacatgtctttgatggatgacagtttttcagtg

SEQ ID NO: 117122 - DNA, 612 bp, Homo sapiens
aatatatttatttcattaggatgctactaatgaaattaacttttttttwaaaaaaaggtgaatcatctcatttttatcaggttcactacatatatatgaagtagttgataaatgactcagcgttggccaattgcaagaataccacttaaaagtaaatggttattactgaagagtgaattatatattttcattttgtagacttaacatttaaaatggaagatggtgggaagcacacacatttctcagtcttgttggaaaagcaaatgacaacgagattttctgtttcttgtttcgttttgtttttagatgcattagcaagacaggtgtgggtagaatggagtagccatgaacatagacaaaaagtggagagagtgaaaacatatcagagtgaaaaaacatagataaatgtaagggagaagaaagaaaaaaaaataaagaacaatatttaaagagaacaaaataaatagagccagaaagaaacagagaaggggaaaagaacaggcaacaaattaacagggaaaagaaatcacaaccagaaaaaaaaagaaaatgaactgcttattgatgaataaagaaagagagaaaaagaaaaataaggaaggaggcggagta

SEQ ID NO: 117123 - DNA, 612 bp, Homo sapiens
aatatatttatttcattaggatgctactaatgaaattaacttttttttaaaaaaaaggtgaatcatctcatttttatcaggttcactacatatatatgaagtagttgataaatgactcagcgttggccaattgcaagaataccacttaaaagtaaatggttattactgaagagtgaattatatattttcattttgtagacttaacatttaaaatggaagatggtgggaagcacacacatttctcagtcttgttggaaaagcaaatgacaacgagattttctgtttcttgtttcgttttgtttttagatgcattagcaagacaggtgtgggtagaatggagtagccatgaacatagacaaaaagtggagagagtgaaaacatatcagagtgaaaaaacatagataaatgtaagggagaagaaagaaaaaaaaataaagaacaatatttaaagagaacaaaataaatagagccagaaagaaacagagaaggggaaaagaacaggcaacaaattaacagggaaaagaartcacaaccagaaaaaaaaagaaaatgaactgcttattgatgaataaagaaagagagaaaaagaaaaataaggaaggaggcggagta

SEQ ID NO: 117124 - DNA, 602 bp, Homo sapiens
acaaaacaaaacaaaacaaaaaaatcagttgaataaagtaccttagagtcatctgttcaattaacatgtttaactccaaagaaatcatgaaaatattttccaaaaaggaagtgccattttatgttcctaccaacagtgaataagactttcttttctggagccttgtcagtattcaccaatgctttgctgtgcagccattgtaatattatagtaaatgagtagcagtatttaatgkttgtttaaatatacatattcctaatacaaagtcttgatgaacacttttttatacattgttttacgaggtgcgtgttcagatctatgtatgccagaaatgcctggcagcattaatttaagcacactgtgagaatgaccctatagtttaagaagaatgtatgttcagagctctgagctaagaaatccaggagctgtccacccagaagtttattccttgtctgtgaaggacgtctgaagccctggcctatcccttggaacacaggatgtccaggtgattgaggctctttgttaaatctggaggttgctaggtagagggtgctaagtgaaaatcataatataaactacacatgttttacaaatggtagtgg

SEQ ID NO: 117125 - DNA, 556 bp, Homo sapiens
gtgcaagaactctgacaagtcaaaaagccagcatgctgtctttcctccgaatgcctccaycagctctccaccaaaagtttttaactgaactgggttggctgaagtgacacaaatagaatttggagtatggatagaaatgaagagcaacaaggtacaggagtatgttgaaacccaatccaaggaagctaagaatcacaataaaacaatgcaggagctgacagacaaaatagacagtatagaaaagaacataactgacctgatagaactgaaaaacacactgcaaaaatttcatgatgcaatcacaactattaacagcagaatagaccaagcagaagaaatgatattagtgctttaagactggcattctgaaacaagacaggcagacaagaatagagaaaaaagaatgaaaaggaagaaacaaaacctctgataaatatgtttatgtaaagagaacaaatctatgattcactggtgtccctgaaggagatggggagaatggcagcaacttggaaaacatattccaggatatcattcatgagaacttcctcaacctagc

SEQ ID NO: 117126 - DNA, 556 bp, Homo sapiens
gtgcaagaactctgacaagtcaaaaagccagcatgctgtctttcctccgaatgcctccaccagctctccaccaaaagtttttaactgaactgggttggctgaagtgacacaaatagaatttggagyatggatagaaatgaagagcaacaaggtacaggagtatgttgaaacccaatccaaggaagctaagaatcacaataaaacaatgcaggagctgacagacaaaatagacagtatagaaaagaacataactgacctgatagaactgaaaaacacactgcaaaaatttcatgatgcaatcacaactattaacagcagaatagaccaagcagaagaaatgatattagtgctttaagactggcattctgaaacaagacaggcagacaagaatagagaaaaaagaatgaaaaggaagaaacaaaacctctgataaatatgtttatgtaaagagaacaaatctatgattcactggtgtccctgaaggagatggggagaatggcagcaacttggaaaacatattccaggatatcattcatgagaacttcctcaacctagc

SEQ ID NO: 117127 - DNA, 556 bp, Homo sapiens
gtgcaagaactctgacaagtcaaaaagccagcatgctgtctttcctccgaatgcctccaccagctctccaccaaaagtttttaactgaactgggttggctgaagtgacacaaatagaatttggagtatggatagaaatgaagagcaacaaggtacaggagtatgttgaaacccaatccaaggaagctaagaatcacaataaaacaatgcaggagctgacagacaaaatagacagtatagraaagaacataactgacctgatagaactgaaaaacacactgcaaaaatttcatgatgcaatcacaactattaacagcagaatagaccaagcagaagaaatgatattagtgctttaagactggcattctgaaacaagacaggcagacaagaatagagaaaaaagaatgaaaaggaagaaacaaaacctctgataaatatgtttatgtaaagagaacaaatctatgattcactggtgtccctgaaggagatggggagaatggcagcaacttggaaaacatattccaggatatcattcatgagaacttcctcaacctagc

SEQ ID NO: 117128 - DNA, 556 bp, Homo sapiens
gtgcaagaactctgacaagtcaaaaagccagcatgctgtctttcctccgaatgcctccaccagctctccaccaaaagtttttaactgaactgggttggctgaagtgacacaaatagaatttggagtatggatagaaatgaagagcaacaaggtacaggagtatgttgaaacccaatccaaggaagctaagaatcacaataaaacaatgcaggagctgacagacaaaatagacagtatagaaaagaacataactgacctsatagaactgaaaaacacactgcaaaaatttcatgatgcaatcacaactattaacagcagaatagaccaagcagaagaaatgatattagtgctttaagactggcattctgaaacaagacaggcagacaagaatagagaaaaaagaatgaaaaggaagaaacaaaacctctgataaatatgtttatgtaaagagaacaaatctatgattcactggtgtccctgaaggagatggggagaatggcagcaacttggaaaacatattccaggatatcattcatgagaacttcctcaacctagc

SEQ ID NO: 117129 - DNA, 581 bp, Homo sapiens
gtgggggccagatgtttgaggaggctagagagtgagctggaatccttgtgagccattcggagaagcagcagtgtgcaagggtgtattgagtcctcctgagttaacagatgctgaatagataccagtttcactgccytcattttgatttatcctcaagactctattggatttctagatttgaacactggaaaagctgatgaaactcaacatgactaggaatatttctgggaagatttatgtaatgatgtgagtgtatttaaaattaggttatgaaaatttcattatctaaaatgttggtatcagtatctattaatttgttctttttttcttagagacagggtcttgctctgtctctcaggctggaatgcagtgtcatctatgaattttatagtattaaaaatgatcaccctgattaatgttaccatattatgcccttgagggattttgctccatgtgtgcctgtgacatagttctagtcacagatgcaggagaagtggtctgttgaggcaattcttcctcctcagaggagaatataaactgtcatctcctcaccttgcttattccattttcagaattgcaca

SEQ ID NO: 117130 - DNA, 569 bp, Homo sapiens
catttcaatttccttcaggtttttgttttgtagatagacacaagtatattttgtcatatacattgtaagaactgggcttcctttacataacatttactggtggggaaatacaaaagacagccaatgtagataaaaatgtttttcaattcttacttgctcaacaaattttaccaaactgaaagctccttaactgtagggacattaggtgccaagtactctgtctggcacatagtagactttcagtataggtttattgaattatgtttccataaaattacagcttttttctgtatcattaygagaatcaaactctaattcttagtttcattttcacagaatgcaagcaggattggagagagagctaaactggaggtatgtataatggtttataaagccctttcacaattttcatgaacctgtactacttttcacttgcttttaagcaaaccatactaaccaaatacttacagtctttactgagagtaaatatttaatcaacaacaaatatttatctgaaatttgctatgtacaagacatcatgccaggtgctagggatgcagctataagca

SEQ ID NO: 117131 - DNA, 480 bp, Homo sapiens
aaattcctggtagaggcagayagaatgagaaaatgactatataactgagatcaaattatatccacagggagtaggatgctttctatattctacaaaagtctacagcaaaaatgcactaacgtggatgaattgtgtgaagagtcattttgaattggtgaaaagactgaattacagattattgggaaagaaatgcatttttttcaggtacatccaatgggaagaattgctaacaaacattcatttaaaacagcatattcattgttgattttcatgtgagttttgatagcgtacttgaaagctgttaattatcttaagtaggttaaacaatttcttgaaatgtgtttatattaataattcacttagtaaagtagggctttttgtctgatagcataaaggtatattatagcctagaaagagtaaagagcctgcattttaaagtagttatttctaaaattcacaagtttgtagctctttattacc

SEQ ID NO: 117132 - DNA, 612 bp, Homo sapiens
tgtagtcatcctattgtttgagataaaggtttgagggcaaatgggttattgtgggggaggtcattctagaatgtactgcragggaatggaagaaaggaggcaacgaaagagaaaagtcagtgaagcacttgtttatgaccgggctcctgctttgggaccctggagctcaatctcatggagactcttggagggaccctgtggaccgtgcctcagagctgtccctacctaagatgaggaagtggagcatcagccataacacccgtcctctgttggttggagtctcagctgggcattagttcctaggatgcgcctcatagggaccaagtgtgcccccatggccagagaatgtccttgagagggctgggtcatccataggagtgcaaaggagctgcctacagtgacttcggggtagacccagggcatacagatggagcaccaacagcgtgggctctgccctgtaaaatgtattccttaccatgcacggcagtcagaaaagttcaaatacccatgccctggcagataaaagtaggagaggcaccatccacaccactaaaatattctataaacttctaggctttttaacaactccatattaactccatgttaatactt

SEQ ID NO: 117133 - DNA, 609 bp, Homo sapiens
cagttaggttggtagaattttggggaacatgagatgaaattcatctggttggatctatttttccgctgaagtatgaggctaagtagcgagtgacctggggaagggatgttagagatttgagaagactagaagattggtgaaactcttatctcaaaatggaaaggtaaatatatagaaagaagtgattggattctgtatctgacagtgttaaatccccatttgagatttgtgataataaattttaagtgagcacagttggcacagtgtgtgtgtgtgtgtgtgtgtgtttcctgacactgttcatctgctcagaagcaggcttagtgtaagctcatggttgggttggcattttactagtaaagacagggaaggagagtcaagagagtgtttgcaaaatggaaaacatgatgattgttcatggaatttaatatgggtaaagmgcgaagtgagaatactgattaaaatgataagggcaatgattttgtatctcagtgagatccaagaattgttggagtaagcctctacattttaagcaaacatctcaggtgagtatgattcctgtgggctgtgggccactcttgaagaaaccttcacaattgctttgggtca

SEQ ID NO: 117134 - DNA, 622 bp, Homo sapiens
caccagcattcagtggcatttaagggcacaggtgagatcacctaggacaaccatgcacaaaatgtggtctgagacttctgctaatcctcaagatccttttaacatttgcctttttaatgcttcttctttcacaattgtacagtggagttttccagggactacgtaagatgtgttatggcaacaactagaatgcctaggcagatatgacagtccaaccrtcttctattaactcagatgttaaagagacctgcaaaaatatataactataccactcttcttaccacattttttgttttgaaaaatataattattctttataaaaatgttttatgttaatatgtaatggctttgttatttttaaacaaattaataaaaatttttaactttctcagtcttaatttctaatacagtaattatcaatagatataactcatataagcaaatgttctttgggttccttaataatccttaaggctgggcatggtggctcatgcctgtaatcccagcactttgagaggccaaggtggtaggattgcttgaggccaggaacttgagaccagcctggactacaaggcaagactccatctctaaaaaaaatttaaaaactagccaagcatgatgg

SEQ ID NO: 117135 - DNA, 503 bp, Homo sapiens
acataattctagttcagctaccttcattctagccacagggaggcacgtgcagaggcctctgcatcacttctggagaacatggggactaggggaatggaaacrtttgttgatgttcttaaagttctttgcctttggccttggagtctcatgtcttctaccagcattcatgaaatagcaggaagctaatttgttagcttgtattaatttattaactcaaatcccagactggtgtacactcacaaaaagctgaaaagcacagaattagattgtaaaacagaaattatatatctcctcaaaacacaaagcatgcctttgcttttctttgaccactcaagtccacctggtttattcaacaaaacctgtgctacttaaatgtcaagtaagagaattataccagaaagccattactctaaagggagcatcttcattacattgataggatctcaggtacaggcataatttctgagtcattcaatataaaatatatgcatatccaagaaaaa

SEQ ID NO: 117136 - DNA, 642 bp, Homo sapiens
acagtgttagttcttaatttttggtttttataaatttattgattttcatttttcttactgtactggttagaaccttcactaccatttatcatttgtcaaagttagactcttgcctctcccaacagacactaggagacaggggccttatcttcaggtgcaggctagtaacacacagtaaattcttctggcagtcttgagcgttcccagcaggcattttaaagaagtggggtcatccctgggaaaaaatcttaatctgcaagaagccatgttagagtttggttaaggagagactctttgccacttcttataagaactgtgctgtacytgctactatcttcacttcccaattttttttcttaaccaaatacaatgattatattatataatatggtctagatttctgttttccattcaaataatttttgttgtgattttcaaaacaaaatagatatatccttgttttaagacttttctgcagattttgccttttggctatcacatccttcttgaaattctcttctcccttgcctacagaaagaccactttattcttctagctcttcaagtatttcttttattcttcccttggtcatgtctctgcctcttgacaatccttaaaaactagtgtttacttggttggacc

SEQ ID NO: 117137 - DNA, 620 bp, Homo sapiens
aggggacttacttatcttccatatctcagaaactggttgctactcagtcaataactgtcaaatgaataacaatatgaacaatggttaatgggtaaaacatgaatacggctgggcctggtggctcacgcctataatctcagcactttgggaggccgaagcaagtggatcacctgaggtcaggaattcgagaacagcctggacaacatggtgaaatcccatctctaccaaaaatataaaaaattagatgggtgtggtggcaggcacctgtaatcccagctactcaagaggctaaggcaggagaatcacttgaacccaggaggcggaggttgcagtgagctaagatccagccattgcactccagcatgggcaacaagatcaaaactcagtctcaaaatacataaatamataaataaataaataaataaataaataaataaataaataaaacacgaatacttgctttgctaagcactttacttatattagctcaattaatgtttgcaacaacccatgaggttgcttctaccattattctcactttggaaatgaggaaactgaaattgaaaagcgttaagtcacaaagtctgctccacaattagtaagtggtgaagccagtgttt

SEQ ID NO: 117138 - DNA, 617 bp, Homo sapiens
caagccataagccttgatgaatataatgtggtgttaagtctgtgtgtctcagaatgcaatagtgaagaagcttggcatcttctgtagatttcagaaaatgtatgatgatatggtttggctctgtccccacccaaatctcatcttgaattatcatatgttatggtaggaaccccatgggaggtaacttaatcacgggagcaggtcttttctgtgctgttctcatgattgtgaataagtctcatgagacctgatggttttaaaaaggggagttttcctgcacaaactctcttctcttgtctgccaccatttgagatgcacctttcaccttctgccacgattgtgaggcctcccagccacatggaactrtaagtccattaaacttattttgtgagttgcccagtctcagtatgtctctataagcagtgtgaaaacaaactaatagagtaaattggtatcagaagtgggtgctgctgaaaagatacccaaaaatgtggaagtgactttgtaactgggtaacaggcagaggttggatccattaggagggctcagaagaaaaccggaagatgtgggaaagtttggaacttcctagagacttgttgaatggctttaaccaaaat

SEQ ID NO: 117139 - DNA, 594 bp, Homo sapiens
atctctatctttaagtctcccacaacacctggaatggtgctacgtacataacagcagctcagtgatgtctgttggattgaattgtattgagtcactatgcatatcttaataatgctattcctgaatctaccaattttgaaacatactcattatgtaacttctgttactttaagaatttaaaaagcgaataggtgatagtgtgttatcaacaccagtaaactttcatgcataaaacttcaggtattcgaattagtttctagaaatgttctattggctaaatgcatgttaaaatgatttaatacgtacacagacaagtatcaacgatgtgaccataacagctcaacattttaagctaccacaactaattctcatctttatgtgaaaaaaaagcataagagaaggatattaatcartagcttcttacccataaactggaatgagttagctatttgaaatataaactgggttcctctattttctggttgcacctactccagagaaaagcaatgagtcattttgagggttccccaagtccaagttcaggtagctttgtctgttgggaagcatagggcagttagatagggagaaggagaa

SEQ ID NO: 117140 - DNA, 586 bp, Homo sapiens
agaggggcctagaagaggatttggaggagcctgatttaagtttgcttaagaagagtatcattttagtctttcgatgtgatgatgttgctcatcaaattaaaaactctctagtgaaatatgaatattttgcttctctccatagctaattttggggctcagaaaatgatatcccaaaatgaaggcctcagaagcaagtttttctctgacctcaccctgctttcctgtcgctcactctcattctcccctgaggctagctggaggaactagcatgcctcttccctaagtcaggacacagaaaccagaaactttttccccaaaccagccatcaaacttaaaaatactactctaactcagtcatacmctgtgcctttctgtgtaggtcataagacccccattccagagagtgtcctgcctcatacccacaaggaaggaatgctgcacagaggagaggaagaatctagaccaggccatgctgggtttctcactcagtctgttaggttagcattagatcatgcccttttaatccaatcgtatttccacatggctgtcaatactttgttgaccctgggcataaaaatggacaatt

SEQ ID NO: 117141 - DNA, 580 bp, Homo sapiens
ttcatattacaatggttttatcatatctttctataaaagagaagaaaaaaatatttttctctagtgtatttgatgaaaatatatttttataacttattagcattccttttagtattataacttattactgaaactatcatgcaatttctagaattgttttccaaaattgggaaagactttaaggtttttttttcaatatgygagtatgatttagggtgaattttacacacattctggttcctaacattttacaaacagattccattccccaactcacaggttggtgtgtcataggacctgctcatatcataatgggatttcatttctgcagcactttatgtcagtgggtagaagagtatttctagaagtcattcctatactgaaacaggtagcagttatctagttatgcacagaagtgactgaatctcatcagtatttcccactaaactcaaactaaatgtactccaacttaacttctccttagctatatccccaaaggcccaaaggtatgctgtgccatctaacaacaggaggagttgaatagcaaaaaagacagtgttcttaaccaactgcagttaaa

SEQ ID NO: 117142 - DNA, 593 bp, Homo sapiens
caggaagcagtaggaaacctgaacagactaataacaagtaagaagattgaatcaataataaaaagtatcctcaaaaggaaaagcccaggaccagatgacttcgctgtcaaaagttagcaaacttatcaagaagaactaacaccagttctccttaaattattccataaaattaaaaaagagggaattctgcctcacttctacaaggccagcattatcctggcaccaaaatcagacacaaacacaatagcaaaaaatatacaccaagaacgctgatgaacataggaacaacaattatcagtagaatactagcaaactgaatacaacagccagcacatcagaaatataaaacataatgatcaagtaggatttatcccaaggatgtagcaatgtcaacatgcacaaatcaataaatgcgatatattacattgacagaatgaaggacaaaaamcatatgatcatccaaagagatacactaaaagcatctgataacattcaaaatttcttcatgttaaaaaactctcaacaaactaggcatagaaggaacatactgcaacataataaaggctgtgtatggcaaacctatagctgacgtc

SEQ ID NO: 117143 - DNA, 575 bp, Homo sapiens
cagtgtggaaggggacccgagtgggttgccaatgctggctcccacagcctgcttttattctcttatctggccccacccacatcctgctgattggtagagctgagtggtctgttttgacarggtgctgattggtgcgtttacagtccctgagctagacacaaaggttctccatgtccccaccagattagctagatacagagtgtccacacaaaggttctccaaggccccaccagagtagctagatacagagtgtggattggtgcattcacaaaccctgagctagacacagggtgctgattggtgtgtttacaaaccttgagctagatacagagtgctgattggtgtatttacaatccctgagctagacataaagattctccacgtccccaccagactcaggagcccagctggcttcactaacccagtggatcccacactggggctgcaggtggagctgcctgccagtcccgcgctgtgcgcccgcactcctcagcccttgggtggtccatgggactgagcgctgtggagcagggggcggctctcattggggaggcttgggcagcacaggagcccac

SEQ ID NO: 117144 - DNA, 520 bp, Homo sapiens
ggctggtaaaaccatgatgtataactaaaatttggggtcgtacctcaggctactgaaaagtgcagagggaacccagatttttcagagatgtttgtgtggacacaacgctcacacaccagacgcatgaggcaaatggattcaaaaagaaatgttttgacctggtaccaagaagacatctctaggaggttggaatgcgatctaaaaaaaaataagtcattctggaatttcaggaaaaactagcataaaaaaaatttttaaaggacaatgctttcaagaattaagaaaaaaaataagcaaaagaaacccagaagagtcatactaacrcatctaaagtctatgcctaactaaaggaatgactcgaaggtactcctgtgaacttgctcccttgtgtgtgatttgtccccactcccttaaaaagttctcatgccttagtaaggttggtaaagttgaactcatatactctcctctgcaatcaatgaaagcaaaagaagtggtcttgagtcctagacattagtgctag

SEQ ID NO: 117145 - DNA, 520 bp, Homo sapiens
tcgtttgagtctatgggatatctaggtgtttccattggtcttagctgggctcacttttgcatcttcagtcaattgtggatcagacaggcaattctattgcatgtttcggtacagctggtataaactaacctgggaagatcttaagagggacagctggactctcctccacatggatttcattcttcagcaggtagtcaaagcttaatcccataatggaagggtttcaagatagagagtgaagatacacaaggcctcttgaggcctaggctcagaactgatacgttatcaactttaccacattctaytgaccaaagtaaaatacaagttcagtctagattcaagagacagagaaataaatttcaccccttggtggataaataggtatggatacctggagagggtaggggatattgaagaattgaagctgtttttgcaattaatctacaacattctttaaagaacttaaactgcctggtgcttaagtatcgattattatcactacaagtttcagtaagaattt

SEQ ID NO: 117146 - DNA, 540 bp, Homo sapiens
aataactcatcttttaagccacttcacaatattttgttgccttttcacaacttactattcttggtctgattcagtatgtaagtgctgaatcaaactgctccttcgggtcatcatttccttatgagggctcacaggctacataaatcttgtagtaaataaatttgcttgtttttctcctgttgatctatcttatgtcaatttaattcttggactcaaccagaacccaaagggatggaaatggggttttgtctcccctcactatccacttgaacctctggtgacagttgaggcttagtggtgtcaacagttggaaagtaatgatgttgacaaagaaatgtgaggggtgaggaagtatgttaacaacgcccttcaccataccacatctacctgaccatatttctttatcagagaaaaaaaggttccttgcccagtttcccaaccagtcagtaacaggaccrgaacctaggttttctgattcctggtctcatgctgtttccattgcattgcttctgatgagtcttctataattggattgaattc

SEQ ID NO: 117147 - DNA, 562 bp, Homo sapiens
agttaaatacaggcaattttatgtcagtgctgttgtgataagcccatgctctggaatcaaagaaacctgggtttaatactggctcagaatttatcaagtaagtaatttaaatctccaaaccccagtttcctacgctatgaaatagcaacaatgatatgagtgttttatagatgttgtgaggactaaacgaaagacacatgtgaagcacttggcacaatgccaggcacttctcatcttccctcctattacagagaacagcatttccctacccatctttgaggttacttttgtctttccatccttctttcatgatcattatttccctggtattcccttcctcccacactgtcaaccacttctccccactctctgcaatcacactcaggtcttcaatatcaggacaaaacttgactccaytggcccctcctgccacactgctgttttctgagtgtacaatttataatctgcttctgcttcctcaaggtccacccatctataattccttgaagtagaataactgtccctgtaattctactgaaatggccactcaaatattaccaaa

SEQ ID NO: 117148 - DNA, 632 bp, Homo sapiens
tgaattaaattccatccaaasaccagcaggtgatagtgctgctatactacactggaaccacgagggagtatggttgcaaatcaaggcctgcatctgcccccctttcatagtgaaactttgagagacccctcctcaagagggtggacagggttggcagaagaatagggtgaagtgtgaaggggcagtggactcagaggggtgggaaggaatgtgacctttcttccccagaagggaagcatatataacaaactgtctgaaatgtactgtaattgatcccgtcaaagaatgaaatgtgaaacactcaatacaagaaaaaaaatatataaggagggcctgcaggctcttcgattagactgcgtgggtgtggatcccagctgctacggactgtttgtgtctctccaaggtttgcgtgttgaaatcttatccttcagtgggatggtattaggaggtggggctcaggaagataattagttcatgagggtcgtgctcacaggaatggaatcagcgctcttataaaaagaaacaagagaaagatatttttctcttggcccacatgaggataacacaagaaagcagccatgtagttttcctccagctcagcaacttttaattttctgttttgttcatggagc

SEQ ID NO: 117149 - DNA, 632 bp, Homo sapiens
tgaattaaattccatccaaagaccagcaggtgatagtgctgctatactacactggaaccacgagggagtatggttgcaaatcaaggcctgcatctgcccccctttcatagtgaaactttgagagacccctcctcaagagggtggacagggttggcagaagaatagggtgaagtgtgaaggggcagtggactcagaggggtgggaaggaatgtgacctttcttccccagaagggaagcatatataacaaactgtctgaaatgtactgtaattgatcccgtcaaagaatgaaatgtgaaacactcaatacaagaaaaaaaatatataaggagggcctgcaggctcttcgattagactgcgtgggtgtggatcccagctgctayggactgtttgtgtctctccaaggtttgcgtgttgaaatcttatccttcagtgggatggtattaggaggtggggctcaggaagataattagttcatgagggtcgtgctcacaggaatggaatcagcgctcttataaaaagaaacaagagaaagatatttttctcttggcccacatgaggataacacaagaaagcagccatgtagttttcctccagctcagcaacttttaattttctgttttgttcatggagc

SEQ ID NO: 117150 - DNA, 615 bp, Homo sapiens
tataagaattaccctgcgtgcaccagcaggagtcagatggatgccactagggttgtatttggagaatacttcaacagaaggcccgaacttaagcctggatatgtacaaagttttgaattggtggcacacttttaggatatgggatttaacgccctggcatggaccccaggggatatggcacaaacataactaagttggcccaagttaagcaaagtggaaatgtttgagttgccttggagggtggtggaagaagaaataaaggggctggagggatgggcctgatgaatcaatgtattatatgaggccataagacccaccacatattatattccagaggaaatcaggggaaacaccatttgctaaggacatcaaggatacactactaagaacttcactaagacatcaagcggtggctctcctctgtaggccaaggctgagagttggaggggtgatctcagatgggcttgttaatgtcctggggatgatggagccttgaagtaagagatgcaggtggtagcatttactagccagaagccaggggatgtgattactgtaatgatggtmaagatcataggggcaaccaaggggatttgatctgcagtagtgggaatagtt

SEQ ID NO: 117151 - DNA, 623 bp, Homo sapiens
gctagcaaaataagggcataagtaaacaatagacagtacagaaagcgctgtagaagatttacttgaaaagtatcatggaggatgaagatacagttctgcaatagctggtaagggatgctcatcaaggaagacttggtaagtgatatggtctgactctttgtccccacccaaatctcatcttgaattataaattaaattgtaatccccatgtccccatgtgttgggggagggaccttttgggaggtgactagatcatgggagcagttcccccatgctgtccttgtaatagtgagtgagttctcatgggatctgatggttttatamagggcttttccccattccctcatcacttctctctcctgctgccatgtgaagaaggacatgttttcttctccttccaccatgattgtaagtttcctgaggcctccccagccatgcggaactgtgagtcagttaaacctctttgttttataaattactcagtctccgatatttcttcatagcagcctgaaagttaattaatacagtagaggaataacaagtagaaagataggaaatgacactccagaaacaagaaattgtgcaatgatatcacaatgcagtagaagcatgagaaagtgttt

SEQ ID NO: 117152 - DNA, 623 bp, Homo sapiens
gctagcaaaataagggcataagtaaacaatagacagtacagaaagcgctgtagaagatttacttgaaaagtatcatggaggatgaagatacagttctgcaatagctggtaagggatgctcatcaaggaagacttggtaagtgatatggtctgactctttgtccccacccaaatctcatcttgaattataaattaaattgtaatccccatgtccccatgtgttgggggagggaccttttgggaggtgactagatcatgggagcagttcccccatgctgtccttgtaatagtgagtgagttctcatgggatctgatggttttatacagggcttttccccattccctcatcacttctctctcctgctgccatgtgaagaaggacatgttttcttctccttccaccatgattgtaagtttcctgaggcctccccagccatgyggaactgtgagtcagttaaacctctttgttttataaattactcagtctccgatatttcttcatagcagcctgaaagttaattaatacagtagaggaataacaagtagaaagataggaaatgacactccagaaacaagaaattgtgcaatgatatcacaatgcagtagaagcatgagaaagtgttt

SEQ ID NO: 117153 - DNA, 583 bp, Homo sapiens
taaggaaaacttaaggcctgggtgattctgttgatggattcttttaagcctttttggaagatataataccaaacttccccacttccagttctgtttttgttcatttttctccttttcttttcataataaacttcctgcattcttatcctcatctcagcatttgtttctggagaatgcaaactgaaacatccaccaaaatagatgtataacaattttcacagtggctatacttacgatagttaaaaaccagaattcattcaaatttctatcaaaaggggaatgaagtaagttgtattatatccagacaatggaatactacacagcaataaaaaaagttattgatacatgtgacaatctggatgagtctcaaaaactgttcattagaccaaagataccagacaaagtgatacacacattgtttgacactatttatgtgatattgaataataagcaaaagagtctatagaaatagaagccagaagaatgttgacttccggtgactgtgttcgatttggaargagtaagaggggccttgtgggataacagatataccgaataccttgatctgggtggtggctgcata

SEQ ID NO: 117154 - DNA, 583 bp, Homo sapiens
taaggaaaacttaaggcctgggtgattctgttgatggattcttttaagcctttttggaagatataataccaaacttccccacttccagttctgtttttgttcatttttctccttttcttttcataataaacttcctgcattcttatcctcatctcagcatttgtttctggagaatgcaaactgaaacatccaccaaaatagatgtataacaattttcacagtggctatacttacgatagttaaaaaccagaattcattcaaatttctatcaaaaggggaatgaagtaagttgtattatatccagacaatggaatactacacagcaataaaaaaagttattgatacatgtgacaatctggatgagtctcaaaaactgttcattagaccaaagataccagacaaagtgatacacacattgtttgacactatttatgtgatattgaataataagcaaaagagtctatagaaatagaagccagaagaatgttgacttccggtgactgtgttcgatttggaaasagtaagaggggccttgtgggataacagatataccgaataccttgatctgggtggtggctgcata

SEQ ID NO: 117155 - DNA, 601 bp, Homo sapiens
tttgtactttgtatatctttctttttccaagtgaatagtcccctgaaaatatcagctaatttggtaggtaatgcctatttgcagagaggaatgggatcttatggcatagctctcttttgctctggactgtcatttctctctccacttttccccaatcttccccctgacaccccaggacccagtcactgtgtctatccaggaatttttcatagatttttaggtcagtatctgggatccaccaactttcttcctatcacttctgtggcatctctaattcagtattcaggagcagcacatgctattgcaccaagttatgaactgatcagaagtaggatatatatgtctttttcattatgtatcctgaaggctggagactgtatcttatttctattaagtacctatatacraacacacggtaatcatttaatgtatgcttgtctataataaaggaataaaagtgacacctcaaaaaaatccaatccttagggaacacaaaaataaatttgacatttgttacaagtcaacaaaacatagattaattgtagtatgtcagaaaggagaatttaatgaactcctgctatcttttcaaaccttgttaaaa

SEQ ID NO: 117156 - DNA, 554 bp, Homo sapiens
tggcaatgttggagactggatagaggctagggatggtactaaacatcttacaatgcrcaggacagctcctgacaacaaagaattgtctggtctgaattgtgaatacactgctattgagaaacccttgattgcaaggattctgatctccaaactcttcctacctctgagctccccatgggctgttaactgtggcactgcacacagggaaatgaaatgcaagtgtctgatgttgtttaaagctacttgcattgcgagtttggccactggatgttcaagattctagggaaatctgcaatctacccaccctaccttactttctcataaacacacatacacgtgcgcattgtctctctctctctctcaacacacacacacacacgcacacacacagagctgacagttggtgttgctaggataccaacctgggttggttggacatcaaagttagggctgtctgtatggattcttcaactttgactttactcttttctaggatgtggcttattttctacattcagcttttcttgctcttgaacactggataactctcctat

SEQ ID NO: 117157 - DNA, 554 bp, Homo sapiens
tggcaatgttggagactggatagaggctagggatggtactaaacatcttacaatgcacaggacagctcctgacaacaaagaattgtctggtctgaattgtgaatacactgctattgagaaacccttgattgcaaggattctgatctccaaactcttcctacctctgagctccccatgggctgttaactgtggcactgcacacagggaaatgaaatgcaagtgtctgatgttgtttaaagctacttgcattgcgagtttggccactggatgttcaagattctagggaaatctgcaatctacccaccctaccttactttctcataaacacacatacacgtgygcattgtctctctctctctctcaacacacacacacacacgcacacacacagagctgacagttggtgttgctaggataccaacctgggttggttggacatcaaagttagggctgtctgtatggattcttcaactttgactttactcttttctaggatgtggcttattttctacattcagcttttcttgctcttgaacactggataactctcctat

SEQ ID NO: 117158 - DNA, 554 bp, Homo sapiens
tggcaatgttggagactggatagaggctagggatggtactaaacatcttacaatgcacaggacagctcctgacaacaaagaattgtctggtctgaattgtgaatacactgctattgagaaacccttgattgcaaggattctgatctccaaactcttcctacctctgagctccccatgggctgttaactgtggcactgcacacagggaaatgaaatgcaagtgtctgatgttgtttaaagctacttgcattgcgagtttggccactggatgttcaagattctagggaaatctgcaatctacccaccctaccttactttctcataaacacacatacacgtgcgcattgtctctctctctctctcaacacacacacacacaygcacacacacagagctgacagttggtgttgctaggataccaacctgggttggttggacatcaaagttagggctgtctgtatggattcttcaactttgactttactcttttctaggatgtggcttattttctacattcagcttttcttgctcttgaacactggataactctcctat

SEQ ID NO: 117159 - DNA, 598 bp, Homo sapiens
tgaagaaatatcagtactcccttggtcacagtattatacacaatagctaagatactaaagcaacctaggtgttcatcatcagagaaataaagaaaatgtggtatatgtacatacaatggaatgctgttcagctctataagaggaggaaatcctgtcatttgtgacaccatggatgcatctggagaacagtatgctaacagaaataatctgggcatagaaagacaaacatcacatgatatcacttgcatgtggaatctgataaagttcatctcatatagagagtasagtgatgtttatcacagacatgttggagacatgggcagtgaatgggaaaagcatagatgtgttgatgaaaaggtaaaaaatttcagacgggaggagaaagatctagtgatctattgcagagtggcaactatattaaataataatgcattgtatattccaaaattgctaagagaagatttttaaatgctttcacccagaaaaataagtaagtgtgctgatagatttgttaatttgcctgatttaatcattctacattgtaaacatatataaacagcatattttgccctataaatatgtatcattattttcaatt

SEQ ID NO: 117160 - DNA, 630 bp, Homo sapiens
aacaggtagttctaggcaagcaactgggattcttagtttgaggtcagggaaaaattgtggttttaggtgattcatttgactcagagcaaaacctcaaggagcagttgatttcatcacatggaaggaataaggtggcaagagctaggtgaactatcagtttgctaatcaagttgaggaacttgagtacttgatcacaggggaggmagaagaaaactgaatccaggtgaatatgcagagaatttctgtccacctacatgctctgaataccaggagtgagatcgcaaaatgaattggagaattgatttgccgtatgtgaggaattaagaattcatatttactacttcaccaatattgatttgtcaacaacaactttcaggtagaaaaatccagtggcctctccttggtcatcattttacttgtcttattggcaaattgtaatacatttgagacttcatcttgaaacattttgttagctatgcttctcagatacacactttctgggtcctactcctacctctgtggttactcctcagtctcctttactctagaactttcgtatattggagtggcttaggtctcagtctacatgcttattttattctctatctgaacacattctaggcaatttca

SEQ ID NO: 117161 - DNA, 630 bp, Homo sapiens
aacaggtagttctaggcaagcaactgggattcttagtttgaggtcagggaaaaattgtggttttaggtgattcatttgactcagagcaaaacctcaaggagcagttgatttcatcacatggaaggaataaggtggcaagagctaggtgaactatcagtttgctaatcaagttgaggaacttgagtacttgatcacaggggaggcagaagaaaactgaatccaggtgaatatgcagagaatttctgtccacctacatgctctgaataccaggagtgagatcgcaaaatgaattggagaattgatttgccgtatgtgaggaattaagaattcatatttactacttcaccaatattgatttgtcaacaacaactttcaggtagaaaaatccagtggcctctccttggtcatcattttacttgtcttattggcaaattgtaatacatttgagacttcatcttgaaacattttgttagctatgcttctcagatacacactttctgggtcctactcctacctctgtggttactcctcagtctcctttactctagractttcgtatattggagtggcttaggtctcagtctacatgcttattttattctctatctgaacacattctaggcaatttca

SEQ ID NO: 117162 - DNA, 614 bp, Homo sapiens
tctggctctcagcccatacccctctcactttacagctggataaatcagagaattctcattcctctttttctggaggtgttcaggttttctttacrgtaggaggatacaggtctctggcacaaaaccaggtatttacctcaacactaaacgcacatttccagagcatgagatggttctgtgaggcaatggggaggggaagaaagtgcacacacctgagcactaggtattaccggtttgttctgaatactgactgtagtacttactagctgtgggcccattcctgtggcagtgaccacttatagcagaatcattatggggattcatgggagtaatttggaaagcaagaagagtagactgataataaggagaaataactctcatagtgggatttgtttctatcatgagtatcagctgaggctgtttctccacattcttccatcccactacagagatgaaaatgcaaagaatactttttgtgtctaccaactgttcatcaccagttacttgtttgttcattaatctacttgttttcttgtttctttatacttttttcttaaatcatgaataggccttgattagaatatagaacatcaagattatgagcagaactatga

SEQ ID NO: 117163 - DNA, 614 bp, Homo sapiens
tctggctctcagcccatacccctctcactttacagctggataaatcagagaattctcattcctctttttctggaggtgttcaggttttctttacggtaggaggatacaggtctctggcacaaaaccaggtatttacctcaacactaaacgcacatttccagagcatgagatggttctgtgaggcaatggggaggggaagaaagtgcacacacctgagcactaggtattaccggtttgttctgaatactkactgtagtacttactagctgtgggcccattcctgtggcagtgaccacttatagcagaatcattatggggattcatgggagtaatttggaaagcaagaagagtagactgataataaggagaaataactctcatagtgggatttgtttctatcatgagtatcagctgaggctgtttctccacattcttccatcccactacagagatgaaaatgcaaagaatactttttgtgtctaccaactgttcatcaccagttacttgtttgttcattaatctacttgttttcttgtttctttatacttttttcttaaatcatgaataggccttgattagaatatagaacatcaagattatgagcagaactatga

SEQ ID NO: 117164 - DNA, 614 bp, Homo sapiens
tctggctctcagcccatacccctctcactttacagctggataaatcagagaattctcattcctctttttctggaggtgttcaggttttctttacggtaggaggatacaggtctctggcacaaaaccaggtatttacctcaacactaaacgcacatttccagagcatgagatggttctgtgaggcaatggggaggggaagaaagtgcacacacctgagcactaggtattaccggtttgttctgaatactgactgtagtacttactagctgtgggcccattcctgtggcagtgaccacttatagcagaatcattatggggattcatgggagtaatttggaaagcaagaagagtagactgataataagkagaaataactctcatagtgggatttgtttctatcatgagtatcagctgaggctgtttctccacattcttccatcccactacagagatgaaaatgcaaagaatactttttgtgtctaccaactgttcatcaccagttacttgtttgttcattaatctacttgttttcttgtttctttatacttttttcttaaatcatgaataggccttgattagaatatagaacatcaagattatgagcagaactatga

SEQ ID NO: 117165 - DNA, 615 bp, Homo sapiens
cccatacccctctcactttacagctggataaatcagagaattctcattcctctttttctggaggtgttcaggttttctttacggtaggaggatacaggtctctggcacaaaaccaggtatttacctcaacactaaacgcacatttccagagcatgagatggttctgtgaggcaatggggaggggaagaaagtgcacacacctgagcactaggtattaccggtttgttctgaatactgactgtagtacttactagctgtgggcccattcctgtggcagtgaccacttatagcagaatcattatggggattcatgggagtaatttggaaagcaagaagagtagactgataataaggagaaataactctcatagtgggatttgtttctatcatgagtatcagctgaggctgtttctycacattcttccatcccactacagagatgaaaatgcaaagaatactttttgtgtctaccaactgttcatcaccagttacttgtttgttcattaatctacttgttttcttgtttctttatacttttttcttaaatcatgaataggccttgattagaatatagaacatcaagattatgagcagaactatgaattgtgaaatgaa

SEQ ID NO: 117166 - DNA, 626 bp, Homo sapiens
ccttgggtaaactcgactttgtcaattaaaacacattccacttacttaaaatgtaaccaagattccctcaggacgaatcagtatagtggttaaaaataggattttcttaacactaataaaaagtmtatttctccttcctccttacatactactatgattcccatctgatgcaaattcttccccatacagtatccctgggggtcactgaaaatgtcacagatgtttgtaaacaaattctcttggctgccatcccaccatgttcctcctctcccgcccctctgctttgatgtgttctgttgttgccagccacaaaagcgtcatgaagctgcctatgtccctgaggcactgttaacacccaccaaaaagtgacatctgctaccacgtcttcatgagagacacaggctagctcaccctgctcccaatccctctgtgccactctcttccacagcagccacaaaacagcattgccttagggacttagcatctcgtggtgcttttgctgaaatacctccttcagatttgacgctcagtcctctctctgtgcgatcagacaaaagtgtggtatttaagccataaacaaacagagtggcagacaataggtgattttccagaatgactccaaactc

SEQ ID NO: 117167 - DNA, 626 bp, Homo sapiens
ccttgggtaaactcgactttgtcaattaaaacacattccacttacttaaaatgtaaccaagattccctcaggacgaatcagtatagtggttaaaaataggattttcttaacactaataaaaagtatatttctccttcctccttacayactactatgattcccatctgatgcaaattcttccccatacagtatccctgggggtcactgaaaatgtcacagatgtttgtaaacaaattctcttggctgccatcccaccatgttcctcctctcccgcccctctgctttgatgtgttctgttgttgccagccacaaaagcgtcatgaagctgcctatgtccctgaggcactgttaacacccaccaaaaagtgacatctgctaccacgtcttcatgagagacacaggctagctcaccctgctcccaatccctctgtgccactctcttccacagcagccacaaaacagcattgccttagggacttagcatctcgtggtgcttttgctgaaatacctccttcagatttgacgctcagtcctctctctgtgcgatcagacaaaagtgtggtatttaagccataaacaaacagagtggcagacaataggtgattttccagaatgactccaaactc

SEQ ID NO: 117168 - DNA, 626 bp, Homo sapiens
ccttgggtaaactcgactttgtcaattaaaacacattccacttacttaaaatgtaaccaagattccctcaggacgaatcagtatagtggttaaaaataggattttcttaacactaataaaaagtatatttctccttcctccttacatactactatgattcccatctgatgcaaattcttccccatacagtatccctgggkgtcactgaaaatgtcacagatgtttgtaaacaaattctcttggctgccatcccaccatgttcctcctctcccgcccctctgctttgatgtgttctgttgttgccagccacaaaagcgtcatgaagctgcctatgtccctgaggcactgttaacacccaccaaaaagtgacatctgctaccacgtcttcatgagagacacaggctagctcaccctgctcccaatccctctgtgccactctcttccacagcagccacaaaacagcattgccttagggacttagcatctcgtggtgcttttgctgaaatacctccttcagatttgacgctcagtcctctctctgtgcgatcagacaaaagtgtggtatttaagccataaacaaacagagtggcagacaataggtgattttccagaatgactccaaactc

SEQ ID NO: 117169 - DNA, 533 bp, Homo sapiens
cctcccaaactactgaccacatcaggtgttgatatctttggttggatattctaaatagatctcctaaatcatgtgcttttacatagatgcttctatacctgtcactttatttactaaacagaatgtgatttgggattagagcaaactcacataaatgactattamattcaataacacctatagacaggtattatattaactcaataatagctgtagacaactagttccagtcatttggaatcagataagtccttattctaaagtccctccattgagaaatagaaattgttggagaagaaatgcaagggacatatatatgttcattgaagataattcttaaaacacagaaaaacaaaagaaagaaggatagtaaaaattatccataattgcatagttcagagacaaatcattcaacatttttgtttatacccttctgatttttctttgttttccaagtttatatgttttctttacagaatcagaaacattctgtatgcactgtgcaacatgtctttatctttgctcaatatata

SEQ ID NO: 117170 - DNA, 597 bp, Homo sapiens
agacccaaagctgacctttctgcttccacttatttcttctctcactgctttcataataattcttcttaaagaaacaaattcaatcagatcactcccctttgtaaaataatctttcagggcaagtattttgacttttcatggcccggtcagtatctgccattcacatttcatttcttgtgrcacctaacttttcagccttacagtttccttcatggaaacttcctttatcttgtttttgaactcaaaattttgcatatcgtgctttcactgccttgattaatttgcctttctctttgttacgtggctacttcaaatttgggaattaccccctacagggcacacatcaggaattaactcttctagagagcatttatggacaccttgcctaagaggtaggtagcataccagggtaccatgcgcatatttctgtcatagtggttattacattgtagtgtaattctacattcagccagctttatctgcctcatccacataactaggagactcttgttttctacatcttgtatgtctagtatctagagaaatgcctgagggtaggagtgtttagcaacaccattgctaaatgaatgaaggcaa

SEQ ID NO: 117171 - DNA, 603 bp, Homo sapiens
ttattatagaagttttacatgcacacacacacacacacaccactttgataacaaaatgaatacagaaagttgtcaaagtcataaagcttgaaattcacatcttgtctgaacttaaagctcatgtttgtaaaatattagtcaatttgaaaatcatttcttggttttgttggattttacaagggataaatacatgtataaagatctaaaaactgtcgtgtctttattcaactggaccaaaaaagaatttttacattttcttaacttaaattagtttattttatattgaaacattaatatccttactkccagttaatcagcaatcacttagaattctcagaatcgttctgtttaaccaaaatatatttttgtcattcacattacagaaaaaaaatatgtcatgcacatctgtgctttcattctctagcttacatagttggtggatcagagacctcaacgcaggcattctgactctagagtcaattctcaatgactgctttatactgcctgtttatagtattggcctaagtctagtgacattcattttagctctcaactcttttcataataatagttatcatttattgaagtccactacaggcaaag

SEQ ID NO: 117172 - DNA, 362 bp, Homo sapiens
gaattcatgatgacaccaaaggtctatcaaggaagtcctggtggcacagcccaggaagaagcagaaatcaagaccccactggattcatagtaggtttcattatgaataatgccctcttcctttggggcctggcttcttcttttttttttttttagtgagcgacccacacatactacacatcagccaatgacagacccagctagacagtctyacactattttcccaaacttcagaacagacactatggttttcactgctatgcacataaactgtgtgtcttaaccttccctcctgcaagcatgcttctagtttgccttgggcagctggttcctccccttcaacaaaggtggggttcagcatga

SEQ ID NO: 117173 - DNA, 529 bp, Homo sapiens
tctgtgaaatcatcatattctatcttgcactctttctctgcccagatactaccgattccatgtgcactttctatctattctttttcaaaagcatgacatcgaccaggaatcttgtagggctgttcagcactttggattgtcaaccatcgatctacgttaaggccgaaccttttctgcacatccaagaaaggcatggcgatctgatgctyatgcccttgtctcttctctaatttatggtttttaaaaatcacaatataattactggatttactggctaagcaaggttcagcatgctcgccatgctcataacattcttctaagtgatttctttcacctaaattactctcctgctactgtatgacctgcttgttggctagatttgtttggtcagaataggtactgccctcaaaagtgagggggtaggcataataatggtcccttcatagatctccgcatctgaatccctggaacctgttaatatgttatgttacatgcaaaggggaattaagattgcagacagaatgaaggt

SEQ ID NO: 117174 - DNA, 591 bp, Homo sapiens
ttctcagggagaaaagatctctttgtcaaggtagatgtgaggagattttctgggaaaggcagaaacaaggtgaccagaattccacgatccaccccacaccctggttcacagcgtacttctgctgcagggagccattccatcttcaaggcccagagaggcattcctacaacaccccatggttcaggctggagtgaacaaacactgggaagytgaattataaggaaatcacccaaaacttctcctggcccgccgggctttccatctcttttcaactttaaagaaaatatcacatatttattccctctaagcaggttcatagggtgtttatagatcatgcaatcccacacaaggtgtaaagtagaccctgcaatcctcagagaacattcacatggattcaactgattatgatgatgatcactcatatcacagatgtcagaatgattggtgcttcttacttgaagagagccaggtgtctgaaaagccagccacaaataattacatatagaaagacagaattggaagttttaagactttttttcctgttactagtctctgctttagaaagcatttaattgattaaaaagaaggctt

SEQ ID NO: 117175 - DNA, 602 bp, Homo sapiens
ttcttcctcttgatgattatgcagacacartgggatgcatcttaagcaggggaccttggaaatctatttaaaagcttcacttatcccgttttatgaatatagaaagtaggaggacttacaagatgaaatgacctatccaaagctccaggattttggagcctgaactgtaacccaaggcttttgcttcctaggcttgggttcttcatcagttcagattattactgtagtcatgattaaccacattcagtgattcagttgtgcttgtattcaatccaaattcaatgtacgtgtgtctaacaaccataacttcatccctaaaaacaggatttagtctacatccctttcctttctgatacaagatttcctattgttatggaatgtttccgttcccttcaaattcatatgttgaagtcctaacctccaatacggtggtactagcacaggggcctttgagaagcaattaggtaatgaggatggagccctcatgaatgggattagtggccttataaaaagcatcctatagagctctctcactttgttttcaccatgtgaggatacaacaaaaagtcagcaggctacagcctggaagaaggccctcacca

SEQ ID NO: 117176 - DNA, 602 bp, Homo sapiens
ttcttcctcttgatgattatgcagacacaatgggatgcatcttaagcaggggaccttggaaatctatttaaaagcttcacttatcccgttttatgaatatagaaagtaggaggacttacaagatgaaatgacctatccaaagctccaggattttggagcctgaactgtaacccarggcttttgcttcctaggcttgggttcttcatcagttcagattattactgtagtcatgattaaccacattcagtgattcagttgtgcttgtattcaatccaaattcaatgtacgtgtgtctaacaaccataacttcatccctaaaaacaggatttagtctacatccctttcctttctgatacaagatttcctattgttatggaatgtttccgttcccttcaaattcatatgttgaagtcctaacctccaatacggtggtactagcacaggggcctttgagaagcaattaggtaatgaggatggagccctcatgaatgggattagtggccttataaaaagcatcctatagagctctctcactttgttttcaccatgtgaggatacaacaaaaagtcagcaggctacagcctggaagaaggccctcacca

SEQ ID NO: 117177 - DNA, 602 bp, Homo sapiens
ttcttcctcttgatgattatgcagacacaatgggatgcatcttaagcaggggaccttggaaatctatttaaaagcttcacttatcccgttttatgaatatagaaagtaggaggacttacaagatgaaatgacctatccaaagctccaggattttggagcctgaactgtaacccaaggcttttgcttcctaggcttgggttcttcatcagttcagattattactgtagtcatgattaaccacattcagtgattcagttgtgcttgtattcaatccaaattcaatgtacgtgtgtctaacaaccataacttcatccctaaaaacaggatttagtctacatccctttcctttctgatacaagatttcctattgttatggaatgtttccgttcccttcaaattcatatgttgaagtcctaacctccaatacggtggtactagcacaggggcctttgagaagcaattaggtaatgaggatggagccctcatgaatgggattagtgrccttataaaaagcatcctatagagctctctcactttgttttcaccatgtgaggatacaacaaaaagtcagcaggctacagcctggaagaaggccctcacca

SEQ ID NO: 117178 - DNA, 585 bp, Homo sapiens
agtaacagagggattatacttccttgcaagtagctggaatacagctgcattctgtccagttaagttcagggtttggcagctgagctgtgggtaggattaacattttcccctaaagtctgagaaacaaacaagtgtaaacccctgactagaagaccaccaaagagccacttgaaggtgagttcaaggagtacgtagctgggccaagattaccctcagaaagtcatatttgaaccattttaacagaaacaaatgaactaacaagagcacacacttgactgggtaaagcattgcttcaatatttttagccaggaaatatgtaaaaatgaaatattcccaaaagtacaccttaaaattcctgtgyataggcagcaagagattatctttgacattttcccttgaattttaatgaaactatttatgaaatgtgctatgtatctccagcattatttagcagaatgcacaaaacgtattttaaactcttaggttagttctcagaaaacttataaagaaaacttataatggtgaaatagccttcaatgatttctaagattcctttccttattagtactttaaatttcacaaata

SEQ ID NO: 117179 - DNA, 565 bp, Homo sapiens
cctgtcacaaagtggctattgagacttcaaatgtcagatgatctcctttgaagcagcaaaatagagtggatagaactccaggatggatgtcaaaaaactctgtgatcctagttctaactcaaatttacctttcatatggtatgaggtaagctttagatatctctggatttgaagttatttttgactcctatttttctcacacactggtgtgtgtccatatctagcccaacagcaaaacttggtggtgctatattcaaactgtatccagaatctgaccactactcaccactgccactgctaccaccttcatccaaaccatcattgtctctcctccggataatggaagaagcctcctaatgagtccatctgcctgcttctccctttccttcyctgcacatcagtaattccagagtttgtcagtgacactttcataattgacttgttcttcacttggtaatcttaatttgttcctaaaaatcctcccacaaagtaaaatgccattatgtgaaaaagcgtttttatgaatttgaatttaaaaatttaggaagcattttatcccaaccca

SEQ ID NO: 117180 - DNA, 460 bp, Homo sapiens
ggacctgtctcaggcaggtttcccaaaccaaaaggaaattctggaactggaaagcaccacagaccatacaatgggtcataagataaatctcaaatgtttccaataattgaaatcacagagatgacattctctgatcacaatggagttaaaagagaaatcaataataatcatacatctggggaaaaacacaaatatttgcaaattaaagaaaacatctaaataacctatgggtcaaaagaaccacaggagaaatttgaaaatatttcaaacaaatgatagtgagcacaaaacatataaaaatctrtaagattgtgtctggagttggttccttccagtggggtctttgtctcactgacttcaagaatgaagctgcggacctttgcggtgagtgttaccgctcttaaagatggtttgttcagaatttgttccttcagatgtgtctggagtttcttccttccgg

SEQ ID NO: 117181 - DNA, 552 bp, Homo sapiens
tcacactgctttggataaaatgccacagaaagatgtggagtggttttaaggagagaaaagtttaatatgtaagaaggaaggaagaataaaacagctaaacagctaccctgtacaaagacagagggacaggggattccaacaaagagaaaactccatctgtggtggaaaagtggctgcttatatgaggagaatgaaggaggtggtgtctgatttgcaaagggctcaagggattggtttgaccaggcatgttattcacatagcctgagcaaaaactggccctcccaccctagcctttcaatatgcacatgtagggcatcataatgttctacrcacatggggatatgtgggggcagccatgttgccaggcacatgtaggggcaaggaagaagaaggtaggaatagccatgttagggtggacccagtttctaatggccttcatttgcatatcaaatcttgccagcctggctctaagagccggagctttcctattagacaagaaacatgtctggagttgctttaaaagaaacaaaatcttaccaaggatgccttttc

SEQ ID NO: 117182 - DNA, 552 bp, Homo sapiens
tcacactgctttggataaaatgccacagaaagatgtggagtggttttaaggagagaaaagtttaatatgtaagaaggaaggaagaataaaacagctaaacagctaccctgtacaaagacagagggacaggggattccaacaaagagaaaactccatctgtggtggaaaagtggctgcttatatgaggagaatgaaggaggtggtgtctgatttgcaaagggctcaagggattggtttgaccaggcatgttattcacatagcctgagcaaaaactggccctcccaccctagcctttcaatatgcacatgtagggcatcataatgttctacacacatggggatatgtgggggcagccatgttgccaggcacatgtaggggyaaggaagaagaaggtaggaatagccatgttagggtggacccagtttctaatggccttcatttgcatatcaaatcttgccagcctggctctaagagccggagctttcctattagacaagaaacatgtctggagttgctttaaaagaaacaaaatcttaccaaggatgccttttc

SEQ ID NO: 117183 - DNA, 380 bp, Homo sapiens
agcatgttgctgttgatactagtaatgactagaaattcgagtgtagaaagatgtgtakttatgatagaaagccacagggtggacttgggcagaaatagcccctgaatccatgaaaacagatgaatctacatgagactgaaatgaagatgtaatcaacacaggcaggtctgcagagaaaggggtcaggtctctagtagttgatagcggagcagctgtccttcggggggcagtagtgagaagagctgctctctttcctgcaggagacagcttgaatgtggagtctcaggcagcaggagctcctccccaacctgcgccagcagtgccattcttggaattgttccagaggctttgcctggagcctgttgcttaaggcttttcaa

SEQ ID NO: 117184 - DNA, 380 bp, Homo sapiens
agcatgttgctgttgatactagtaatgactagaaattcgagtgtagaaagatgtgtatttatgatagaaagccacagggtggacttgggcagaaatagcccctgaatccatgaaaacagatgaatctacatgagactgaaatgaagatgtaatcaacacaggcaggtctgcagagaaaggggtcaggtctctagtagttgatagcggagcagctgtccttcggggggcagtagtgagaagagctgctctctttcctgcaggagacagcttgaatgtggagtctcaggcagcaggagctcctccccarcctgcgccagcagtgccattcttggaattgttccagaggctttgcctggagcctgttgcttaaggcttttcaa

SEQ ID NO: 117185 - DNA, 380 bp, Homo sapiens
agcatgttgctgttgatactagtaatgactagaaattcgagtgtagaaagatgtgtatttatgatagaaagccacagggtggacttgggcagaaatagcccctgaatccatgaaaacagatgaatctacatgagactgaaatgaagatgtaatcaacacaggcaggtctgcagagaaaggggtcaggtctctagtagttgatagcggagcagctgtccttcggggggcagtagtgagaagagctgctctctttcctgcaggagacagcttgaatgtggagtctcaggcagcaggagctcctccccaacytgcgccagcagtgccattcttggaattgttccagaggctttgcctggagcctgttgcttaaggcttttcaa

SEQ ID NO: 117186 - DNA, 570 bp, Homo sapiens
agacacatctaacacgaggacaggacacacatgggaggtggcggggtccacagagttcaccctcccaccccatcatcctccctcatttcccttctgcccttaccagggacccagagcattagcagccccaggagctgagcagggagcctcactgtgagaaggtgaactgaggagtcctgatcagtcaaggcaaggttagagtgagctttcrtctcagactcacaaggaaagtcctccctaggggacagtatgcaaatcccctggtgggtgcagtggggtggaaagagccaaggagaaggtgggggcgtctcttgtgagcaaaatgacataaatatattttatgtttttaaggaaatcaatagaggtaaaatctgtgttgcctgagtggcagaagggacgtatttagattttcctgctgtttcctctactagacttctagttctttaggactttctcgggcatgttttatgtttctttttaataagcttgatctttcataaatatttgatgattcttatttctttgtttaggtttatttaaaagagtctaggtttgtttattttattttat

SEQ ID NO: 117187 - DNA, 648 bp, Homo sapiens
cacaattttttgtttgtttgttttagagatgaggtattgctttgttgcccaggctggtcttgagctcctgggctcaagcgatcccccgacctcagcctccgaaagtgctgtctttacaggcgtgagccaamgtgcccagcaagaaataatgcaatttttcaaagaaaaatcacacctcttcaagaatcaagactcagactctttgaagaaaggggcttcaaaggtggccattatttacataatcaatcactgacctttgtatcattattgctcacaaattatttctgctgcattgtctcacttcagcctcatgacaaccctagaaatgagcatcactatctttgccagtttccaggtgcagagaatttgagaaactaagcaagacatgaagtctaagcagcttgtaactgacaaagtggtggctggaatttcgtcttctatttcaaaatacaatgtcctttccattatgcatgggaatgtgagcactttctcaagaacacacagagaagttcttatcacatgtatcaatctaaaactgaaggcaaattctatatgaagtatctaggtgaattcatcatatttatcatataatgaatactgtcttacagtatataatatatatttgtatttctgcttatgaataatcat

SEQ ID NO: 117188 - DNA, 551 bp, Homo sapiens
tgaaggctgagagaggtgaggaagctacagaagaaacgtttgaagctagcagaagttgcttcatgaagtttaaggaaagaagctgtctttccattccattaaagtgcaaggtgaagcaggaagtgctgatggagaaggtacagcaagttacccagaagatctagctaagatcattgatgaagatggttacactaaacaacagattttcagtgtagatgaaactgccttctattgaaagaagatgccaccaaggactttcatagctagagaagagaagtcaatgcctggcttcaaagctgcaaaggacaagttaactctccctttagggctaattcagctggtgatggtaagcagaagctcatttaccattctaaaaatcctagggcccttaagaattatgctgaatctactctgcctgtgctctrtaaacggaaaaacaaagcctggatgacagcatatctgtttatagctcagtttactgaatactttaagcccactgttgaaacctgctcagaaaaaaaaaaaatttctttcaaaatattactgctcat

SEQ ID NO: 117189 - DNA, 583 bp, Homo sapiens
ttcttgaaatgggcagtgtgagtattaatagcaatatttattgcatgttggagcttgaactttggtaaaacatgtgaaactaaagaaatattttacattcaaattcttgctttatacacaacaattttgtcttaggattggataataatagagataaaagatacagcccctgccctcaagaagctttttgtttaaatgaaaaaaaaaatcatccaaaagtgccatgccaaatgctcatttagaaacaaagagtcttggaaacagtaaatgtttaaagtgagtttttgagatgatcagatttaatgtggtgaggcagagaagggatgtttccaagggaaggagtggcatgtgggaaagtacagaagagtgagaaggaagcgaccaaattttatttactttctgtgagtgtaagtccataagcttcyagttcagttgagagatacataattttttgaattacatattgtttttgttttatattgttttacagtgtggcctcacaccacttttgcttggcgtacatgaacaaaaacagcaagtggtgaaatttttaatcaagaaaaaagctaatttaaatgcactt

SEQ ID NO: 117190 - DNA, 583 bp, Homo sapiens
ttcttgaaatgggcagtgtgagtattaatagcaatatttattgcatgttggagcttgaactttggtaaaacatgtgaaactaaagaaatattttacattcaaattcttgctttatacacaacaattttgtcttaggattggataataatagagataaaagatacagcccctgccctcaagaagctttttgtttaaatgaaaaaaaaaatcatccaaaagtgccatgccaaatgctcatttagaaacaaagagtcttggaaacagtaaatgtttaaagtgagtttttgagatgatcagatttaatgtggtgaggcagagaagggatgtttccaagggaaggagtggcatgtgggaaagtacagaagagtgagaaggaagcgaccaaattttatttactttctgtgagtgtaagtccataagcttccagttcagttgagagatacataattttttgaattacatattgtttttgttttatattgttttacagtgtggcctcacaccacttttgcttggcgtacatgaacaaaaacagsaagtggtgaaatttttaatcaagaaaaaagctaatttaaatgcactt

SEQ ID NO: 117191 - DNA, 566 bp, Homo sapiens
aactgaaaaccgtagggtatttccaatataaatgtaagaggaagtactgtaagaaaagctgaaaatttagttggaaggggaatttaagatagctagattatcaaaataattcacctttgacattaacttcaagccccttccgattctaggtggtggctttttatctaaaatccctgcttcatacagtgagacaatrtcaggattcataaatctgaggaacatggcacttcctgctgcactgatactgttctgagggaaacgttggctaaccccctaaaaacaagttgagacttgagtataaggtttgaattaaaataggggcatgggaacaaagagttcaaaggtcaacatttgcacaacaactctgagtcaatcagtcctcatgaatgacacatttctattttttcttctcccaaaacatgagaaaataaagtttcctctcaattctagtcttgtatcatattaaagtacaatttaggtatctcagaggaaagaaaaacctcatggatgagatgggtagaagaaacctgaaaacagatcttcactgtatcatcacctatactgca

SEQ ID NO: 117192 - DNA, 566 bp, Homo sapiens
aactgaaaaccgtagggtatttccaatataaatgtaagaggaagtactgtaagaaaagctgaaaatttagttggaaggggaatttaagatagctagattatcaaaataattcacctttgacattaacttcaagccccttccgattctaggtggtggctttttatctaaaatccctgcttcatacagtgagacaatatcaggattcataaatctgaggaacatggcacttcctgctgcactgatactgttctgagggaaacgttggctaaccccctaaaaacaagttgagacttgagtataaggtttgaattaaaataggggcatgggaacaaagagttcaaaggtcaamatttgcacaacaactctgagtcaatcagtcctcatgaatgacacatttctattttttcttctcccaaaacatgagaaaataaagtttcctctcaattctagtcttgtatcatattaaagtacaatttaggtatctcagaggaaagaaaaacctcatggatgagatgggtagaagaaacctgaaaacagatcttcactgtatcatcacctatactgca

SEQ ID NO: 117193 - DNA, 597 bp, Homo sapiens
ttaattggtagcaatagagccaggatttgaacccagggctgcctgatcaccaaataaaattgtactcaacatgatgcacttaacttttctggcctcatttctctcacctgtaaaaatgcatatttcagatgtttgtaatattttacctgtggttgaaagagttaccagcccttccttgatcacccatggtaagacccatgagcctctgaatataattatagaaaacatttggagagggatrgagagagacaagatcatgcctcctttgataatgtcaaattttcagtgcacgaagccatacatagtgcagttttctagcttccctttcacacatggcgttgaagaaagtaaattaagcaactcagctaacactgggaatgcagcagaagtcatcgagttcagtgctgggagacagttgccatgatattccaacatggacaccaggatcacagtcgatgactatgccctcccttgaagatggtggcttgcctctctttctgtaagcacatgtcatgtcataacaatattaaacaattaaaagtaatgtccccatcttcttctacactgcctttgaattattattttagatctgccaaa

SEQ ID NO: 117194 - DNA, 597 bp, Homo sapiens
ttaattggtagcaatagagccaggatttgaacccagggctgcctgatcaccaaataaaattgtactcaacatgatgcacttaacttttctggcctcatttctctcacctgtaaaaatgcatatttcagatgtttgtaatattttacctgtggttgaaagagttaccagcccttccttgatcacccatggtaagacccatgagcctctgaatataattatagaaaacatttggagagggatggagagagacaagmtcatgcctcctttgataatgtcaaattttcagtgcacgaagccatacatagtgcagttttctagcttccctttcacacatggcgttgaagaaagtaaattaagcaactcagctaacactgggaatgcagcagaagtcatcgagttcagtgctgggagacagttgccatgatattccaacatggacaccaggatcacagtcgatgactatgccctcccttgaagatggtggcttgcctctctttctgtaagcacatgtcatgtcataacaatattaaacaattaaaagtaatgtccccatcttcttctacactgcctttgaattattattttagatctgccaaa

SEQ ID NO: 117195 - DNA, 614 bp, Homo sapiens
agctgggaggtattggatcatggggtcggtttcctccatgctgttctcttgatagtgagttctcacaagagcagataattctataatgggctctttccctttcacttctctctctcctgccaccttttgaagaagttgcctgcttcccctttaccttctgccatgattgtaagtttcctgaggccttcccagccatgtgtaactgtgaatcaattaagcctctttcctttatgaattacccagtctcaggtatacatacatacatacatacatatatatatatatatatatatatatatatatatatatatatatawaattttctttattccactcatcagttgatggacactggctgataacatatctttgcatatgtgaattgtgctgcagtgaacatatgtatataggtgtctttttgagagtatgatttcttttattttgggtaggtatccagaaatgagaatgctggatagaatggtaagatctactttaacagaactctccataatgttttccatagatttgtactaatttgtatccccaccagcagtgtataaatcttcttttttcaccacatccacaccaacatctgctgttttttttattttagt

SEQ ID NO: 117196 - DNA, 614 bp, Homo sapiens
agctgggaggtattggatcatggggtcggtttcctccatgctgttctcttgatagtgagttctcacaagagcagataattctataatgggctctttccctttcacttctctctctcctgccaccttttgaagaagttgcctgcttcccctttaccttctgccatgattgtaagtttcctgaggccttcccagccatgtgtaactgtgaatcaattaagcctctttcctttatgaattacccagtctcaggtatacatacatacatacatacatatatatatatatatatatatatatatatatatatatatatatataattttctttattccactcatcagttgatggacactggctgataacatatctttgcatatgtgaattgtgctgcagtgaacatatgtatataggtgtctttttgagagtatgatttcttttrttttgggtaggtatccagaaatgagaatgctggatagaatggtaagatctactttaacagaactctccataatgttttccatagatttgtactaatttgtatccccaccagcagtgtataaatcttcttttttcaccacatccacaccaacatctgctgttttttttattttagt

SEQ ID NO: 117197 - DNA, 614 bp, Homo sapiens
agctgggaggtattggatcatggggtcggtttcctccatgctgttctcttgatagtgagttctcacaagagcagataattctataatgggctctttccctttcacttctctctctcctgccaccttttgaagaagttgcctgcttcccctttaccttctgccatgattgtaagtttcctgaggccttcccagccatgtgtaactgtgaatcaattaagcctctttcctttatgaattacccagtctcaggtatacatacatacatacatacatatatatatatatatatatatatatatatatatatatatatatataattttctttattccactcatcagttgatggacactggctgataacatatctttgcatatgtgaattgtgctgcagtgaacatatgtatataggtgtctttttgagagtatgatttcttttattttgggtaggtatccagaaatgagaatgctggatagaatggtaagatctactttaacagaactctccataatgttttccatagatttgtactaatttgtatccccaccagcagtgtataamtcttcttttttcaccacatccacaccaacatctgctgttttttttattttagt

SEQ ID NO: 117198 - DNA, 430 bp, Homo sapiens
ctctcagcttggttgtagttggtgtatagtggtactattcattggtatttgtatattttgtaacctctgagactttactaaattcatttatcaaatctaggagtgttttgtaggagtctgtagggttttctaggcataagatcatatcattggtgaagagagagtttgactttctcttttccaatttggatgccctttatttctcttgcccaattgctctgcctagggcttcccagttttcttcttaatawgcatgaaataaaagtgaaattgaaagcgattaatgatcagtttatttcacatctctctctcatacacagataaaattaattcaaagttctatgttaaaaacacaatattagaccctgtcttgttccaaagggaatttctaatttgtctataaattacagaggaatcaagaatataagtg

SEQ ID NO: 117199 - DNA, 590 bp, Homo sapiens
agaaaccaacatgctccaaattttcttcacaggagtataccttactcaattatgaaaggctataaatagttcaaaataagttttcttgactctgaaaaacaaaacaaggatcagcaatattccaagcaaaagtcaaaagattgtttcagttttctgagttcagtcaatttagttcttgttttgcttgatattcataaatattcagctcttcatgagtcctgtacatttttcctgtactcaaatatcacaatttacatagttatcagaaacctgtatttaaacacacttagctakaacttatagaacttcagagttctatagcttattataaacaatattttgaaaaggattaaaacaagacaattgtctatgaataacaaaatgtccagggtagttacagttagaaacaaaattaataaagaagtttagttatctctgtggtttacaaaaacttaacataacaacttcaattatgattgatagcatatactcagatattagaattttagaaaccccagacaattttggaacacatattagtattattcaacaaaatatagcctaaagaagactgaacaccattttggcaa

SEQ ID NO: 117200 - DNA, 451 bp, Homo sapiens
tgacagagaatcattaagctaaatcaactggaaaagaacaaggatccggtaccttggcatggayccataaaaaatgttgcttttcattatgagattccctttgttccttgtgggaaactgtgcatctacatggatgtatatgtatatgtctacacaggagaactacagaaagagatgcacaaaccagttatgcatctgcacatatatagatatgcctttagaaagaggatatgcttaatatgtgatctttttaaaggtcctctagataccttgatgggttttttgtttttgtttttaggtaaagatcaaacaacagaatttccaaagtgatagctttctaacgacacttaagatgggaatcaagtttaagtgtgaggtgaagatttatgacacacgagaatataagataaaagttatttcattttatcttgcatggtcctaaaaagaattc

SEQ ID NO: 117201 - DNA, 595 bp, Homo sapiens
tgttattaaactttctgagttagtatgttctatcaaaagtgaggcaaaagtttatttatattcttctagaataccatatttagattaaaggagtagatatacattctcccttcaaaaatcagtctttgttcaagaaatactttacaattacagactctttcagtcaaacattttaggaatcaggtgaattgaatattttgccaaaggcagtaaaccctcagaatagagctcaaatgaggcaagtcttcctcatttttggttcttccaaatcacttcagtacagtggagcaagttgggtctagaattgggtctgagagaggcaggcaggcaggtagggatgcaccacttcagccacttagcaaaactgcttccctaaaatcaggtatttttctctaattttaaactttaatgatttttaatttatttgagaaaaaaccccttttcartagaaatttatgaggactccaatatagaaaacagatgaaaggaatacttttgaatatacagttattttataattttttatttttataagacttactgttagttgatcagtaaaatcatactgattaatgtgtcagtggctttcattatg

SEQ ID NO: 117202 - DNA, 563 bp, Homo sapiens
ggtttctcttactcagtgtcttgtgtttgcttttcaagtcctacattgtcccactgaaagaattaattattgtcctgtaaaacctattaaaattctgtcttaggaaaacctattgtcctgcatgtcaaatatttctacagttttataagttccttttggcttctgcttctcctagcctaatttcctcatcttttcttccaaagtgtatttctcttacccggtcaatgagaccatattctttcctcatgcataagtggtactcccataatcattccatcctcttccagcagcaaggagccaccttattgcctccttaattttttttatgtctctctttaagttagtatgtgtgatttaattccctagaatgaccatttgggattgaattcctgactacctgataaaattacatcacatagaccatgawcccagaatacaaagttgtatgcttttatctgggcctttctatgttctatttcaagacatctgactcaaacaatgaagtgagacatctaatttcatttctgctgcttactcaatgtcacttttaacaatatattaac

SEQ ID NO: 117203 - DNA, 472 bp, Homo sapiens
ttacatcacatagaccatgaacccagaatacaaagttgtatgcttttatctgggcytttctatgttctatttcaagacatctgactcaaacaatgaagtgagacatctaatttcatttctgctgcttactcaatgtcacttttaacaatatattaacctctccaagtcttaattccccaatttagaaaagataggtaatagttcatgtgtaagatggttgctgtgagagttataaatgctcagtgcagtgtctgagacatgataggtctttagtagatgacaacaactattaataagaacaataaaaataataatatagtggccttacctcaagtttattaataaggtagaaacacaactcttttaattttactattaaatctttacagagggtttatacatacaaacatacataaaacctctaagttttacttaaagatatacctgtctctgatagatacatatggattct

SEQ ID NO: 117204 - DNA, 550 bp, Homo sapiens
cctctgggaaaaatatttcaagaggaaaacattagcaaatactttcatgttgtctattagcatcatattgctgttcaaattattctcacacactgtccraatcatttcagaaaggttggtacaagataaagaacttgtcaacattaatacatactaaaaataatggcatacctcttcttccttctacagttcacacattcattttctgtcttaaatttaaatttcaattagtttttcattttttccaggttggtgtcttggatttctcctgttttggggttctttaagtagtactgatagaaaattttctttgtaaaatggcttattttaccatgccttcagatattgggtcatagtctgttttgcttactttaatcaaaggattcatttaagaaattttgtggacaccattttctgagcatctattaaaatattatcttggactattgaatttaaggtttcactttgtgtatcactgagttaaacagggccctggaaatctgaaggatatatacatttggattgctttccttaattggccaaagtgagg

SEQ ID NO: 117205 - DNA, 594 bp, Homo sapiens
tcaaagactatgagaactagtaggacctttgagagtgtctagggtgactcccttattttgcagatgtggagactaaggtctaggaagmgtaatttgacaagaatcaaaatgtgagctggtggcagaggactttaatgtagatccctagagtctacctctctaccagaccacacagctctctgatggttcagttacaagcctggctactaagtagagggacacaaatcaagtcaaagatatggctgtagcttatatgccagcatctcttataaatagaatgaatctatcttttggtaaatgtaactggcttctcatttcttattgcctttttgtggctttagggcagtgctagtgatgagtttatgaacaaattcaatgagctaaatgaaatagtgggccgagaattcaatttgagtgtgaaagaacattttacttcccctttctgtaagtaagtgacagggcagattgttgagactttccttgtatgtcactgacattgatggaaatatcttacagcaaacatgttgttttacatttacatgaaggaaatcggtttgtcttggtgacataatgctgcttgtgataacgtgaaaa

SEQ ID NO: 117206 - DNA, 462 bp, Homo sapiens
tatgcttctttggtggttcttgtagcaaaacttcacaatgtgagtcccagcgggactgtccatccagcgggaggtggatgttagtcctgtctcctagccaccatttttttttttcacttatgaatttctaatatttcttcttttcacctcgctccacacacaaaaagatttacgccagttaacttaaactatgtaaatcctccarcataattttggccaatacccaacctaccaatcacaaatggtagctaaaagtaggataaaaagcatcattctgttatttatggatttcagtaggtaaatattagatatgacttgattaccagctcccccaagtagctacatgaaggttaacctcccctctgctgttttgtctctgccccaagaacatctagctttctcctaatattgaatatatagaaagatgaggggtagcaacctcaagataagcatttgggaatt

SEQ ID NO: 117207 - DNA, 266 bp, Homo sapiens
atcctccaacataattttggccaatacccaacctaccaatcacaaatggtagmtaaaagtaggataaaaagcatcattctgttatttatggatttcagtaggtaaatattagatatgacttgattaccagctcccccaagtagctacatgaaggttaacctcccctctgctgttttgtctctgccccaagaacatctagctttctcctaatattgaatatatagaaagatgaggggtagcaacctcaagataagcatttgggaatt

SEQ ID NO: 117208 - DNA, 607 bp, Homo sapiens
actataggtagataggtagctaagttcctggcagaaacttggtatgcaatacaaggaacttattgctagtactaaacttagcatatagtatgaaggattagggcattgagaaatgaatacaatttcattactatcatcagcataaaatatagggtaacaggcttaaaatcttgtcttcttgatgggaaaaggataatatcatttaacatattaacagcaatatttattattattatcatatcttttgtatctgttttggttataaaattatttctcatattgtctcttaagatcaaactatttttcatattgtctcttaagatcatttgcctcttgagccaaactctcagttccagacacaatgcagtagcttgcagcagatgatktatctatctcctgagaataaccaggaagaaacagtttttaaaaatttcttttttattttttttagttctgaggaaattggagagctgtcaaggcagccaggacttgtggaaccagatcctggagaaaagaggagactgaattgagctgcaattgagttcagcccaactttctatgcaccacttctccccttgggacatctgctgactctcagcacaggaca

SEQ ID NO: 117209 - DNA, 600 bp, Homo sapiens
catcaatttaatgctcactatatttgaagyttattctgtactgttttgcttttagtcttcccctagtgtctattagccaaagtggctgataaaaaaaacaaaaaacaactgaaaaaaacccagactatataaagtatgcctcttagaaggcttccctctgcatgtggagatatcctaaaaaaatacgtagtcataagaaattggctctaattccacagggacactaatcttcagaaattaggatatgtttctgaagcacactctagtaatttcaccatcagtaagccctaaactgagattcagcttttccatggaaacctctttaacaagtgatgaaaacatattctttccctttttctttctttcacaaaagctttctttaaaaaggtagtgtggagagtaattataaaacatttaatgtccacttacgctttcgagtactgtttatcttttttcaaaattacctgcttcttatttcaagtattagtcactgtgaataacataatagtatttctcacagtaactctatttatttctcctgtaaagaacttgtcaatggtaagcataacacctacctcaaaaactgctacccaagagcaa

SEQ ID NO: 117210 - DNA, 601 bp, Homo sapiens
aatagcacagaaatatcaaattgtgattggaattacagagctaatagaggttattgagtcagtttggttctgagtaaccccagatttggtagatgaacttaagaaacctcagaaaaatgcaatcaaaattcaattttattatttttaatkatttttaggtttttaaaaaattgacagataacattgtatgtttttatcatttacaacatgttttgaagtatatatgcattatggaatagttaattctagctaattaataaattatactacctcatatagttatcatttttgtggtgagagtgtacagcaacctctctgtacgtttttcaaaaatacaatatagcatcattaactatagtcaccttgccgtacaattttaggtataattttaaatatcttaaaattctattgagaacattatacattcaaatgatggcatactgaagaccaatgaagatataacttgaatcatcctttgcacttattttgagcaacatctaagaatggagcttttcctgttttctctgttaaagatgaatatcctgagattacagttcaagaaattaaaaaccaacaagcaagcagcaagcaagcatacaaa

SEQ ID NO: 117211 - DNA, 601 bp, Homo sapiens
aatagcacagaaatatcaaattgtgattggaattacagagctaatagaggttattgagtcagtttggttctgagtaaccccagatttggtagatgaacttaagaaacctcagaaaaatgcaatcaaaattcaattttattatttttaatgatttttaggtttttaaaaaattgacagataacattgtatgtttttatcatttacaacatgttttgaagtatatatgcattatggaatagttaattctagctaattaataaattatactacctcatatwgttatcatttttgtggtgagagtgtacagcaacctctctgtacgtttttcaaaaatacaatatagcatcattaactatagtcaccttgccgtacaattttaggtataattttaaatatcttaaaattctattgagaacattatacattcaaatgatggcatactgaagaccaatgaagatataacttgaatcatcctttgcacttattttgagcaacatctaagaatggagcttttcctgttttctctgttaaagatgaatatcctgagattacagttcaagaaattaaaaaccaacaagcaagcagcaagcaagcatacaaa

SEQ ID NO: 117212 - DNA, 514 bp, Homo sapiens
cacaacactgaatgtcatcataaagtccagttaccctctatctcctacaccacattgactccagcragggaatttgcgtatcaaaactgcttctcacacacccatcctcttagctgccaaaactcagcatgtatttgtaatcaaagcagagacagccctattcctctgtatcattttcaccctgccaattcactaggcatcaagggtgtaaaaaactgcctggatatacctcccatatataagcaccatgcttatctgagaagccctagaactctgtggacgaaccttgaaggagcctccaagcctgaaccaaagcactacagatcacctgctatcttcatagcaccatgaggtaaagtctttctctgcttcactgaccttatttctgcacactttgaaattctaaaactttccttaagggccaattttttgacaggccttctcctaagggagctgtcccactggtggttctgaccctgataggcaccctcaacatgataaccaagaagagttt

SEQ ID NO: 117213 - DNA, 624 bp, Homo sapiens
cactaacaagtttgaggtcatgggttttagatccatcaataataaattttaatcacagtgtggcagaaaacagtatcatggtcaatgtataaccaaggatgagaagtcatagttaagagtctaatagatgccgggtgtgatggctcacgcctataatcccagcacttggggaggctgaggtgggcaaattgcttgaaccaaggagtttgagaacagcctgggcaacatagcaagaccctgtctctacaaaaaatacaaaaaaaaattcccaggcacagtggcgtgggcctgtagtcccagctactagggaagctgaggtgggaggatccttgagcctgtgaggtagaggttgcaatgagacaagatcacactactgaactacagcctgggtgacaagagtgagaccctgtctaaaaaaaaaaaaaaaatgtctaatagaatagaccaagaaaaaagaagaaaaaacccacaaaatttagcagagtgaaatcatgttgtgtagaaggaaacacatcaatatgccttcttaatccagagcttcctagttgcttagccgggctccaggtgtgayatgaatctgtattagtctactccagctgctataacaaaataccagacactgga

SEQ ID NO: 117214 - DNA, 526 bp, Homo sapiens
cattatgtttttattgaagaatgctctttggcagtctctttaaaaatcataatctggcccctctattcccccgattaaaccctttcatgggctccccggaacaggactcaaattccctaatgtgaccggatgactttcctgatctgggccctatttggttctccatctccccctattctcctgccccactgaattacatatgtgaagtcatatgagtggtccctgcttctcctcacctctagacctgtgctcrtgccaatttctccatctagaaagcccttcctcctggtagttcagccttaaattgtatgtcacaatttaaatgtcagtatgcttgagtttatgtgcccctcatctaccttcctagtgtccagtgcttgctcttctcatagccctcatcacagagcatttaacccctctctgcccactctattatcagtgctgagcagaggctctatcttgttcacttatacatacctaacacctagatgagtgcttggcacatagtaattacattggttttgaa

SEQ ID NO: 117215 - DNA, 697 bp, Homo sapiens
ctgcaataggccttactaaggcccttgccctgtatcagccgcccatagtttctgccagcctaatccatgatgctatcccctgagcattaaagagtttatgtttcttgagtcagtcttgtgctttggtctaagaattttcaagctctcagaatccacagcctgtgtgatggatacacgctaaggataggtgtacagtttagcttggagtttcatgtttgagaagctgactgtagggagaacctgagagwcatctcccttgggatattgactcccttgtcaatatccctttctttagggcctaccttctttttctctccgcactatatctgaggcagtggtactaatgcttaagatggaaacttcatccactacatttagtgaggatagaaaagcgactctcattaaacccaaactttgtaacagaaatgctgaagtcttatgcagagtgtcaagtttgtctctgtgtttccattcaatagccgtttttctgtcaatatgcaatgtttcccaattcaaaggataaccaaagaaagaagattctttatgagagagtaagcagagatgagtcatatcacaggcagaatagagacaaaaagagagcaaccacagaaggtggcatgcagctgggaaaagtataagggaataaataataagatgtggattctgtttctgaaattcccaataacaagctggctgg

SEQ ID NO: 117216 - DNA, 563 bp, Homo sapiens
agctctccttgcaggaaaggcatctgggtatgtggaagactctctaatatggaccatgaaatccagggttacaaagtcaggactacaataccagtccttattgcactccctcaaagagcatttattaagcacttctgcattcctaaaagtgttttgcatgatgaaggatttaaaacaacagcagacaattgcatatcactggggagctgaaactaatgatgcagaaagcaagtactggatttggtaaaatgcaagggagctcagtgctaaaggatgcaaaggcaggaagaatctggcaggggctgggattccctgttgacacctctcccaccagaccagtccatgttctggtctggtgcctggctcagaaactagcaggtgtttcataaatatttgtccagccagtgcatgaawcaatgtgcttcagttttcataccagtaaataggagtattggcctccccacatgtttgtgggaagatcagatacagaagggctgtacacttggaagaaaaaaaacgggttcaaaagtcagtgtcattatttttgtgagtggcaggaattc

SEQ ID NO: 117217 - DNA, 530 bp, Homo sapiens
ttgaaattgagtgtgctggttttattttttaacttaattgatatctgttttcaaaaggacttttaatatctagaagggcaaaagtatttcatgcaaattgtgcatagatttctgttgaaaaacaatatggcattggaactttttgttataaaatggtgtgttttctcctrtttatttcttatcataaattatctttttaccgtggtatcatcaaaataacttcactggtatcaattagtaacataggaagctatatatcccaactgtctacatttttattccaactcttttacttaaggaatctgatagtagctgctattggtttaggaaggaaaattaataattagtttgacaatctacttgaagtcaaacatttaggaaaacaaacaaatactgaatcccttaactatctggagagctaatatttattgagggactgctctgggcctcgctgtgctagattctctatgtacatgatttcatttggtccttcaactactctgaaatataaattatttcatttcttgata

SEQ ID NO: 117218 - DNA, 649 bp, Homo sapiens
ggtcaggaaggctgaggtggtgacatttgacagtcctaaataaagtgagggagcataggaagatccagggtgaacggtagtccaggcagagggaacagcaagtgtcaaagtcctgaggacaaatttggactgctagccttcatattagtttaaaatcattgtttgattttataagacatactagcctttcagaaatataggatataattgatcagggcctgaaggatgaactcattttcttctgttagctccaggtacttcttaacaatayttaatctacttttgctgtttgctctttgtagacaacaatgcagaagttggatgcatcttctatgacatttttggacttgtgttttaagagaggtacattgcctctttggggatctggaatcttcctgatagcgagtcagcaagattggtgggcccaacactggcacatgtctcagccaaattctctgtgtagcttctgacaaatgccaaactactggtaaatatccaccccccccccccccccactgaaagccaaggacaataatattctttattcattttctggctctgagtatcttttctttttgtttttgcagcctaacctttttgtcatctttggcatttttcacaggctccagctcattcctggctttagttg

SEQ ID NO: 117219 - DNA, 649 bp, Homo sapiens
ggtcaggaaggctgaggtggtgacatttgacagtcctaaataaagtgagggagcataggaagatccagggtgaacggtagtccaggcagagggaacagcaagtgtcaaagtcctgaggacaaatttggactgctagccttcatattagtttaaaatcattgtttgattttataagacatactagcctttcagaaatataggatataattgatcagggcctgaaggatgaactcattttcttctgttagctccaggtacttcttaacaatacttaatctacttttgctgtttgctctttgtagacracaatgcagaagttggatgcatcttctatgacatttttggacttgtgttttaagagaggtacattgcctctttggggatctggaatcttcctgatagcgagtcagcaagattggtgggcccaacactggcacatgtctcagccaaattctctgtgtagcttctgacaaatgccaaactactggtaaatatccaccccccccccccccccactgaaagccaaggacaataatattctttattcattttctggctctgagtatcttttctttttgtttttgcagcctaacctttttgtcatctttggcatttttcacaggctccagctcattcctggctttagttg

SEQ ID NO: 117220 - DNA, 562 bp, Homo sapiens
tcagatctcaaaaaggtctatatggtacctgagttagtgcatctcaagtaaccaacccctgggaaggtgttttatttctgtaacacaaatgaggcaggattttatgcccctggaggggagatgtttgtcttttatctcyatattggggtacctaatacaggaaagagtgttaaatgaataaaggaatggacccacagtggggaaaaggagcttgcttgatatcagtgtgtttgaatttattaccatgaatctcactttctaaaattgctagcactattaaagtttctgacagtgaagcaagccattggaacatgtttgtggtgtgaatattaggtgtattattatgcactcaatttagcttttttattttatataatttctctccaagtggaaatcatgttctaggtaaaggaacaagaaattaagcagtgtggaggttagattcaacttccactaatggagaagatgactttggataactattggctccagtttcatttggggattagggattggattagaatttgtaaatctaattgttgtttctctgtaaaattgggag

SEQ ID NO: 117221 - DNA, 509 bp, Homo sapiens
tgttctgattcaccagtcaatatttatttctaagccttcagatctcaaaaaggtctatatggtacctgagttagtgcatctcaagtaaccaacccctgggaaggtgttttatttctgtaacacaaatgaggcaggattttatgcccctggaggggagatgtttgtcttttatctccatattggggtacctaatacaggaaagagtgttaaatgaataaaggaatggacccacagtggggaaaaggagcttgcttgatatcagtgtgtttgaatttattaccatgaatctcactttctaaaattgctagcactattaaagtttctgacagtgaagcaagccattggaacatgtttgtggtgtgaatattaggtgtattattatgcactcaatttagcttttttattttatataatttctctccaagtggaaatcatgttctaggtaaaggaacaagaaattaagcagtgtggaggttwgattcaacttccactaatggagaagatgactt

SEQ ID NO: 117222 - DNA, 535 bp, Homo sapiens
taaacagttcaatgctatcccattctcagtgccttggaagttttatctaaaccctcaaggttacatcaggaataactatcatgccctgtttatttcatatacatgtacatactagtattttttgcaccagctcctgttggcctgtataatgataattgctgatatatcatttgaaaccactgttttgtttttttctgggaagaggacactactattttttaactggtaagcagaattcagctaagaagtctaagttagcattgtgccaatctacwttaaaaatataaaacctttttatccctaccgttaatgaatggattttgctaatttcctgatttagattgttttgcatttcttgagtgctcctccataaatgatccattttcttcagaagtttctcctgcaaaatagacatgacctttagtagcagatacgacgttactggatatgttattccctttttatgagaaaagcctgttgttgagagaatggtaaatttgagtccccctgaagtggtcagagtttttacaagtta

SEQ ID NO: 117223 - DNA, 577 bp, Homo sapiens
gtttctggaaatttaaaacagaaaaatttaagtgagaaaattattttttgaccacatggagggggaagggcctgtagctagttcttcttgtctgcttcagctctgttcaatctacccgttaacttaagcccagtacagacctagatgtggtaaatacaggcaagctaggtttatactataacacaagtggaaaaatgagacaagcatcattttagtttaaaacaaacaatgttctcaattataagttatttgggcaagcttaatattggggtagaggggaacaattaggataacttcacagttacttctattagctgattgttccagaaacccatataaacccatctctctctctctctctttcttttcctccatgaccccttgagtggaacttatacagggatacttagtctcactctctggcacccaagtagcagatgtacttttctaaagacaattaaaawttggttaagtttaatctaagtgtctttagtttaatcattgtgggcttcaacactcaactcctgtaactataaacagctgaacttatgcttctaattttaatcccaaaattcaa

SEQ ID NO: 117224 - DNA, 579 bp, Homo sapiens
gtttattatagtctacatggtatagagtgaaggaataagagaacatttctgataagtgttttcaaaatttggagaatcattcctatctaaatcattcatttaagggactaaaatacaagtatgatgtttcttgccatctaaccctcagctagccaggctctaaaaaggacaacactggacacctcgacagtggtaaaaagcagggtttactcactcttgaatactaagaaatggtgctaaccttaggcagcagcttatctatttggttgaggttcagctttgtttcattgaacaaatctcttgggttattttcagttgtgccagtcatttaatttgttttctgaatcaaatgataagaataaatatggttttgagtgtaaacagcattcccagatatatcttacaacttggtgtgccatctgcctaattttgaacctataggatgggaataaatgcattgtgaaaaacaccaggtgatttccttaaagccaaatactcttgtccctcctacttttctyccggctttcctgctgcatgggacatggcaataaatgggagtttcctgcacacagaggtaaa

SEQ ID NO: 117225 - DNA, 500 bp, Homo sapiens
tgagggtatgcagaaatcctggaaatatttcagagagcagaaaactcagacaaaaacctttgggacctcagcctgcagttgtcactaatgctagtcagtgtctaacagagaatgttcactgaggcaaaagtctttaatcttttgtgcaaaacaaaggagtctaattccagcctgagaaccttgctgctgaggggcccgaggtaaccattttcctgaggtctttcctagaactgggtgtatggtgatggagsaggcccgggtcattgatgcttttaggagcaaaacatccctcctcagcccttccttagggaatctctctcctccctctgtctttttttttttttaacctcccacccctctagagtagaagacacctctatgattcctcagagtaattttgtattaagatctgtggggtatggttggtcaggatggatggattgggaaaccaaacttccgaatggcaaattgtttctatgtatattttaattcatacaaat

SEQ ID NO: 117226 - DNA, 611 bp, Homo sapiens
aattcctctgtcagaaaatgtttgagtagccgcttctgaaatctcttctttttttaattgtcacatgacaacaaaaatatttgttatagaaagaaaaatataatccatccctatcatttggattctgtatttgtgaattagcctacgtcctaaaagttgtttataatccccaaattattacattgcatttctagtcatcatacaacatcatgcactatgtggagaaaagcattaaaataataatttatatttcacccatgagattggcaaagttttgtaaattcaataagagacctcaaattagtggggttatttggttaatcagtgatttctcttagagtggtggaaaataaaaaaagttttatcttcctgttggacttctctgggaatagcctataaatgtactaaagcagcatttagggttggaagaggtggtttatgcctgtactccmaagcactttggaagtccaagaccagaggatcatttgaagacaggaattggagaacagcctgggctacagagccataccctgactctatgaaaagttttaaaaaacattagccaagtgggatggtgtgagactgtagtcctagctacttgggaggctgaa

SEQ ID NO: 117227 - DNA, 652 bp, Homo sapiens
gagattggcaaagttttgtaaattcaataagagacctcaaattagtggggttatttggttaatcagtgatttctcttagagtggtggaaaataaaaaaagttttatcttcctgttggacttctctgggaatagcctataaatgtactaaagcagcatttagggttggaagaggtggtttatgcctgtactccaaagcactttggaagtccaagaccagaggatcatttgaagacaggaattggagaacagcctgggctacagagccataccctgactctatgaaaagttttaaaaaacattagccaagtgggatggtgtgagactgtagtcctagctacttgggaggctgaagcaagaggatcccctgagccttggaattcaaggctgcagtgagctatgattgtaccactgcactccacaaggagacagtttctctagaataaataaatatgcccttagaggaatgcctgcatcttggatgaaactcaataaacagtataaaatgcatcttagttaatttctagtgtatgtgtaatctcataggatttatgttacatatgattcacttcagtcacggttttttggaatgaaggagtgatgataatttaatcagtggtgcaarggtgtgttctaaatactgcataaacctaa

SEQ ID NO: 117228 - DNA, 287 bp, Homo sapiens
agaagctatgagagctgagtatcagaagatggctgcatttcaccatgaagaagaaaaacataatttggagatgctgaaaaagaaggggaaagatatttttcatcaacttcatttaagtaaagccaaaatggctcataggagggagattttaagaggaatgtatgaggagctgaaggaaatgtgccataaaccagatgtggagctacttcaggtacaaactcacaatgtggtttcaggtttttgamtattcacatgtgtaagtatattcctcatggctgaaatccatc

SEQ ID NO: 117229 - DNA, 477 bp, Homo sapiens
ttttatataagttagtgtgactctttggtaggatgtctaatcagaccacagatgttacccaagcatgctcatctgtttccatacaaacctatagcaatacccccaacaaatacaagaaactgggccatttcacactgttcccaatgggctgcctggataaattctggatacaagtgttatttgtcagtcatggaaatttcaggtgacccttctaaggctgagtcagtatgaatttgaatcctggtgggcamctatattgaaatgtgagctaaatttcaggcagaaggagcaagagcacaaccttagggaaagcatgaaattaaatatcagcgctaattaatattgagtaagtcataacacataatgggaaaagtggtgagaaatgtagacttgtgtcttgatgaagacataaatatgtgagaaatatgggaactagtatttaatataaggagaactctaaggacttgagaagaattc

SEQ ID NO: 117230 - DNA, 529 bp, Homo sapiens
atacatccccttcattcgcaagagaacaaacttttcagaaatagcatttttttagtgtaaamtcaccttgctgatacatttctcacatcctgcaaaaaaatgaaagataatgttaattatgagagatttttccttctgcatcttttctcatactcttgtttctttctgttttaataatgtatatctttttatttcctgctaaggaatcattcaagactacattaataatagaacctcaactaaacaataaaaagcttcatcagtgggcattaagaagaaaggagctcagcaagagacagtggagtaaagcaaagatatctaggtttccagtgtcattaatttcctaatcttacttccaaggaaaggtctgaccacacatgacaacgattaaaacaaaacagagaaccatatgagaaacagagtacatggacattgatgagcagctttgacaaaccttgcccaggcaaggggaaacccctcaatgtcttcagcaaatcactgctgtgtgggacatcagagagaggaggaa

SEQ ID NO: 117231 - DNA, 654 bp, Homo sapiens
caaaagatgatatccaaatagtcaatgaatgtatgaacatgtgaaaggtactgaactcattggttaatgtaaactcagggaaaatgtaaactaaaagtagataaagtaccactacaaacccatcagtgtggccaaaacttaagactgaaaataccaatcattgaggcattcactattgtttagcatataaaattaatgcaatctgcttagcagagtctggcagtgtctaaggattgaatacaagcacactgtagatctagcacttcccctcctaggaacagatataacagaaatgtgtacatatgtgcaccaagcgccatgtagaagcacgttcttagcggtattatttgtttttgcctcaaactaaaaatacccaaatgcccattaacagtaaaattgataaatgaattgtagctgtaattctataatggaagattaaaaaatactgaaaaataaaaattacagttaaaataaaatcctgagtaaatttcacaaatatgaygagcaaaagaaaccagccatgaaagcatttatattgtgtaatttctcactatataattcaaaacagacaaaactaaactatagagtttagcaacacatgcctagagataaatctataaagcaagccagaagatgattacaataacagccaag

SEQ ID NO: 117232 - DNA, 498 bp, Homo sapiens
ggctgggcgcagtggctcacgcctgtaatcccagcactttgggaggctgagacaggcggatcaagagatcaggagattgagaacatcctggctaacacggtgaaaccccgtctctactaaaaatacaaaaaaattagcctsgcatggtggtgggtgcctgtagtcccagctacttgggaggctgaggcaggagaatggcgtgaacccggaaggcagagcttgcagtgagttgagatcgagccactgcactccagcctgggtgacagagcaagactccgtttcaaaaaaaaaaaaaaaaatcccagctactcaggaggctaaggtgggaggatcgtttgggcacaggagtaggaggctgcagtgagctatgattgtgccactgcactccagcgtaggtgacagaatgagactctgtctcaaaaaaataaaaataaaaataaaaaagaaagaaaaagaaagaaagaaagaaaaagaaaatatgggtcagatgcagtggct

SEQ ID NO: 117233 - DNA, 413 bp, Homo sapiens
gttagtgatatggagaccattagtaaccttgagaagagcagtttcaatgagtgatagagacmaattatgattcgagagggtttgttagaaaagaaggacaaaaattggagacagtgagttataaaaggccattttcaaagagttttgttattgaggaaaagagagaaagggatagctagaaaggaaagcagagccaggagagagttttttgccgtatgcattcactctggtctgggagaaatgttcataggctaacagttttcatctagtaaagaggaggaaatgatgactccgaagaaaaagggagaattgccagagcaatgaccttgagtgaccttgagtgggcatgaaaggctgggaactacagcacaggccaaggagagctggagctcagtgaagaagacaaggggcag

SEQ ID NO: 117234 - DNA, 492 bp, Homo sapiens
ggaatggccatatttgtgcatttatgtaatatcacatatgtgtaagaggaaacatcraaactcaagaaaagaacaatgaaaaatgtattcccaggaataactgtactttggctttttgaaactttggtaatgctatttcggaaagtgaaatttgaaattctcaggcaatattatagatttctataattgcactcattttgtatatttcaacaattaaataaaaatcaaatatttgtgacattttatatatgccttctatcttgttttcaaaagtctgagatagtcttatcaatggttaaaaaataacaacaaatattaattcataatctgtacaatgacaatagatgttttgagaggagaaatgtgtgcttcatagtcaaaccagtgcagaagacacagcattaacgttaaacagaatatttttagtcagttcaccttacataatttactatgttgatgtttactgtaaatctctaaaagggactaaagtat

SEQ ID NO: 117235 - DNA, 585 bp, Homo sapiens
gctgtctccccgacccctaccaccaaagatacctttcagatggcagctttttcccccaaacaccttcttcagtagcattatcttagaaagttattgaggtgcttargtttacagacttggaagcctgactgtgtgatgcaattgagaatcatctgtctctaagattcagatgcatattcgttgagcttaaggttgacatacaaacatagaatgcaaatttatctatttatagtgaaacttctgtcttaggaatcagaatactcaagtcctcagcaccagcacattctctccctataggtcatcccatatagggagcccattataatcagaagactttccagggtgacatgagaacatactgttagtttgatgaacttcagtgtttcttggcaacaggctaaattagcttgttgtttacaccgccacaaaaagaaagaccttgacaatggactacagtattctgtgtctgctaggcctgtttaaaatgctttggtgagcagcttacatgtaactttctgactctctttttaaatcttccataactcatcaggcatactttgtatcaacatattatttctttagatg

SEQ ID NO: 117236 - DNA, 361 bp, Homo sapiens
cctcaacctcctgggctcagaccatccttgcatgtcagcctcctgagtagctaggactccaggcacctaccaccatgtctggctaaattttttaattttgttttttgtagagacagggctccacaatgttgcccaggctggtcatgaactcctgggctcaagcaatccacccacctcagcctcccaaagtgctgggaatacaggagagagccagtgtgcctggcctggtatattaagtgctaggtattctattcttttttaaaatgcycctattgtaaatgaggttttaaaacttatttttctgatgattgttgtcttatacaggaaatacattgattttattggtaattttgtaataagc

SEQ ID NO: 117237 - DNA, 538 bp, Homo sapiens
gtgcactccaaaccttctagtatccttagccctgtcaaaggaaaactgcctactaaagccacagtaaaatatacaggagcactccagctggcatcaggacagtgtcctctgggaagaagcttccaggagaaggatcagggagcaatcattgctgttctgcagtctccactggtgataccccggtgagtacaccccggcaagccacagtaaaggtggtaacccctccccccaccaaacttgatcatcccaggctgactccagactgctgtgctggcagtgagaatttcaagctagtggttyttatcttgctgggctccatgggagtgggacccgctgagcaagactgcttggctcccatgcttcggcccctattccagggaagtggacgattctccgcatttcatctggagttccaggtgccactgaaaaaactcctgccggtcagtgcctgcccaaacagccaccaagttttgtgcttgaaacccagggcccctggtggtgtaggctcatgaaggaatctcctgatccacaaattgca

SEQ ID NO: 117238 - DNA, 588 bp, Homo sapiens
taggaaaattactctgcctgtggaaacctcacccttcaactataaaatgagataatataaaacrgagataatagtagtccttacatcattggcctattgtgattataagaaaaaataacttgagtacaacaactattgcaatgttgttacaatattaacaacaatattaatattaatgttgttaatattgtaacaacattacaatagtaatagtacatagtactaacaatggtaatgttattactattatcatagtaatagtatgtgctagtaagttagtacagccttagcactatggttgttattactatgatttctggcagtgaatacatatgtttggtcacagagatattactgtctaatgatgtccacatttttctctagttgatttttctcccaactcttgaaatgtcatttttctatatcctaactcctggttttttctcctccatactggaatccacgaagtcaagcaaccaactccatggtaactgctaagaggaaaataaggaagtgtagaccatggctctttgctaaaagaagcctataacttattctggaagataattctgcagagccgtactgaat

SEQ ID NO: 117239 - DNA, 635 bp, Homo sapiens
ctgggttgctttcgcttcttggctattgtcaacagtgccactatgaatagtacctcattcctttttctggctgaatgataataacttttagaagttatttattaatgcctgaaatatgctgggtgtatcttactccctaatcttttactcattattacttattttacttattatttttaaatgctgtttctaaagtatatcttattcataggacttgcttagaaaaatrctttatgatcatttataaaggaccttaacttgactcataagacttctttgaggccagacatggtggctgacaactgtaatcccggcaatttgtgaggccgagtgggtggatcacccgaggtcaggagtttgagaccaacttggccaacatggcaaaaccctgtctctactaaaaaatacaaaaagtagccaggcgcagtggctcacacctgcaatcctagctattcagcaggctgaggcacaagaatcgcttgaacctgggaggcagaggctgcagttagccaagatagcaccactgcactccaacctgggtaacagagtgagacactgtcccaaaaaaaaaaaaaaaaaaagacttctttgagcatgtgtgggccccttgagtcctgccttcagttggtcaccaa

SEQ ID NO: 117240 - DNA, 635 bp, Homo sapiens
ctgggttgctttcgcttcttggctattgtcaacagtgccactatgaatagtacctcattcctttttctggctgaatgataataacttttagaagttatttattaatgcctgaaatatgctgggtgtatcttactccctaatcttttactcattattacttattttacttattatttttaaatgctgtttctaaagtatatcttattcataggacttgcttagaaaaatactttatgatcatttataaaggaccttaacttgactcataagacttctttgaggccagacatggtggctgacaactgtaatcccggcaatttgtgaggccgagtgggtggatcacccgaggtcaggagtttgagaccaacttggccaacatggcaaaaccctgtctctactaaaaaatacaaaaagtagccaggcgcagtggctcacrcctgcaatcctagctattcagcaggctgaggcacaagaatcgcttgaacctgggaggcagaggctgcagttagccaagatagcaccactgcactccaacctgggtaacagagtgagacactgtcccaaaaaaaaaaaaaaaaaaagacttctttgagcatgtgtgggccccttgagtcctgccttcagttggtcaccaa

SEQ ID NO: 117241 - DNA, 608 bp, Homo sapiens
ctttgcattaacaactactgagaattatacatttaaagattatcttcaatgtccaataacccttatattcaatactgaatttatttccacttctcgccttcatttttatttgttacgtattctcaaagttctctcctagtagaagaatgaaccagaaatgaacataagcatgtyggaattcacgtatgtggcagactgtattttccaaagatggccacaacaatatttctcattccacatggtctgctggaaccttgtcactcctccatcaagagctggaacccatgtcccctgtacttcaaccactatgggtccttatgacggcctcaaccaatgagtaggtgaaaaggacccttatgtgacctccaaggtataatcatcagaattccatgaacttccaccttcttctcttgggatgcttgctcttagaacctagctgccatgttttgaggaagccttaagcagtctgtcgagaggcctacagccaacaccaacttgccagccatatgagtgtgccatcttgaaagtagatcccccagctaccaccaaacagcccagttgataccatgtgaaatggagattagctgcctctgccaagtactgcccaa

SEQ ID NO: 117242 - DNA, 608 bp, Homo sapiens
ctttgcattaacaactactgagaattatacatttaaagattatcttcaatgtccaataacccttatattcaatactgaatttatttccacttctcgccttcatttttatttgttacgtattctcaaagttctctcctagtagaagaatgaaccagaaatgaacataagcatgtcggaattcaygtatgtggcagactgtattttccaaagatggccacaacaatatttctcattccacatggtctgctggaaccttgtcactcctccatcaagagctggaacccatgtcccctgtacttcaaccactatgggtccttatgacggcctcaaccaatgagtaggtgaaaaggacccttatgtgacctccaaggtataatcatcagaattccatgaacttccaccttcttctcttgggatgcttgctcttagaacctagctgccatgttttgaggaagccttaagcagtctgtcgagaggcctacagccaacaccaacttgccagccatatgagtgtgccatcttgaaagtagatcccccagctaccaccaaacagcccagttgataccatgtgaaatggagattagctgcctctgccaagtactgcccaa

SEQ ID NO: 117243 - DNA, 608 bp, Homo sapiens
ctttgcattaacaactactgagaattatacatttaaagattatcttcaatgtccaataacccttatattcaatactgaatttatttccacttctcgccttcatttttatttgttacgtattctcaaagttctctcctagtagaagaatgaaccagaaatgaacataagcatgtcggaattcacgtatgtggcagactgtattttccaaagatggccacaacaatatttctcattccacatggtctgctggaaccttgtcactcctccatcaagagctggaacccatgtcccctgtacttcaaccactatgggtccttatgacggcctcaaccaatgagtaggtgaaaaggacccttatgtgacctccaaggtataatcatcagaattccatgaacttcyaccttcttctcttgggatgcttgctcttagaacctagctgccatgttttgaggaagccttaagcagtctgtcgagaggcctacagccaacaccaacttgccagccatatgagtgtgccatcttgaaagtagatcccccagctaccaccaaacagcccagttgataccatgtgaaatggagattagctgcctctgccaagtactgcccaa

SEQ ID NO: 117244 - DNA, 599 bp, Homo sapiens
  misc_feature (1)...(599): n = A,T,C or G
tgttgtactaaaaagcaaggagctctcaaggagaattaaaattaggcccatgtcaaagggactcaagagctaacttgaataagctcccactggccaagatggaacaatgtgagaataaataaggacactaacaacaatggattgaaacacaaatatgttaaatgctcgagtttataatgaaaaaaatatgtatttcatcatctntagtggatgctaggaaccaatttattttataaactgtccctaaaggggaaagagtcaaatacacccacccccgctacacgcacagacactggtactgtctcttaaggcaaacaaacaaacaaaaattgatgaagggaagtttctttttatagaagtattctggctaagagaaacaaatgaaggaatgacagatcataaattttttctcctccaattaatatgttgaggcagtattcacatatctgataatatcacaaaaggagaaacaatcagacttatttayctaatgattgcatagaacattatggagtagtcctgctaaaggaaagaaaggaagaaaataaaaatctgaactgaatctgattaagactctatatcttactaccaagtttcag

SEQ ID NO: 117245 - DNA, 599 bp, Homo sapiens
  misc_feature (1)...(599): n = A,T,C or G
tgttgtactaaaaagcaaggagctctcaaggagaattaaaattaggcccatgtcaaagggactcaagagctaacttgaataagctcccactggccaagatggaacaatgtgagaataaataaggacactaacaacaatggattgaaacacaaatatgttaaatgctcgagtttataatgaaaaaaatatgtatttcatcatctntagtggatgctaggaaccaatttattttataaactgtccctaaaggggaaagagtcaaatacacccacccccgctacacgcacagacactggtactgtctcttaaggcaaacaaacaaacaaaaattgatgaagggaagtttctttttatagaagtattctggctaagagaaacaaatgaaggaatgacagatcataaattttttctcctccaattaatatgttgaggcagtattcacatatctgataatatcacaaaaggagaaacaatcagacttatttatctaatgattgcatagaacattatggagtagtcctgytaaaggaaagaaaggaagaaaataaaaatctgaactgaatctgattaagactctatatcttactaccaagtttcag

SEQ ID NO: 117246 - DNA, 617 bp, Homo sapiens
tcatctgggaaggcaaatgaagtttgtgagcactttatagaacagggaaggtaggcagtatctgggaaggggaaagtagggcattccagacagagggaggagcacttctgaagttctcagggcattgggagtctggttggccagagtacattctggaatagatgtgatcatgaggataatctggaaaagtagaagctagccaatgcaggactgaagtccatgttttcatcttgagggcaatgggagcttgtaatgaaagtaacgtgacctgatgagatatgcattttgaaaaagatcagactgtattgtggagaatggatttgttgttgttttgttttttgagayggagtctcacttcgttgcccaggctggagttcagtggcatgatcatggctcactgcaacctccacctcctaggctcaagtgataatcctgcctcagtctcccgagtagctgggattacaggtgcctatcccacgcccagctaacttttgtattttttttagtagagatgagatttcaccatgttggctaggctggtcttgaaatcctgacctcaagtgatccacctgtctcggcctcccaaagtgctgggattacaggtgtgagccaccgca

SEQ ID NO: 117247 - DNA, 606 bp, Homo sapiens
ttgagagaactgggggatattttgtaatttgtcatggtttggcaacattcgaatcttttatatttttaaatatcacatgtattcatcttccatattcatctctctgtctatatatatcatatatatgtgatatatatgatatatatgtgtrcgtatatatgttcgctcctgtatctatatctatatattccttgtttgcttgtgtgagccgtgtatggtttggagtgtgtgtaatgagatggatggagatatatatatatatatagagagagagagagagagagagagaacatatatacacccacatatatcacatgtatctcacacacacacacacacacacacatacatatatatatatatagtaggcagaggatacacacatacgtttattccttagctctggccatctaacaaaggcacctcaggtgcaatgcatgcacctagagcccatatcttggtctttaaaatcattcataccaaaaggaaccaggactccagaaagaaatggctgattccagggttgggacacagtggagataagatgaatttggagcatacttaatacaaaaaagtaagaaagtgcccccccaaaatgatggggac

SEQ ID NO: 117248 - DNA, 606 bp, Homo sapiens
ttgagagaactgggggatattttgtaatttgtcatggtttggcaacattcgaatcttttatatttttaaatatcacatgtattcatcttccatattcatctctctgtctatatatatcatatatatgtgatatatatgatatatatgtgtgcgtatatatgttcgctcctgtatctatatctatatattccttgtttgcttgtgtgagccgtgtatggtttggagtgtgtgtaatgagatggatggagatatatatatatatatagagagagagagagagagagagagaacatatatacacccacatatatcacatgtatcwcacacacacacacacacacacacatacatatatatatatatagtaggcagaggatacacacatacgtttattccttagctctggccatctaacaaaggcacctcaggtgcaatgcatgcacctagagcccatatcttggtctttaaaatcattcataccaaaaggaaccaggactccagaaagaaatggctgattccagggttgggacacagtggagataagatgaatttggagcatacttaatacaaaaaagtaagaaagtgcccccccaaaatgatggggac

SEQ ID NO: 117249 - DNA, 606 bp, Homo sapiens
ttgagagaactgggggatattttgtaatttgtcatggtttggcaacattcgaatcttttatatttttaaatatcacatgtattcatcttccatattcatctctctgtctatatatatcatatatatgtgatatatatgatatatatgtgtgcgtatatatgttcgctcctgtatctatatctatatattccttgtttgcttgtgtgagccgtgtatggtttggagtgtgtgtaatgagatggatggagatatatatatatatatagagagagagagagagagagagagaacatatatacacccacatatatcacatgtatctcacacacacacacacacacacacatacatatatatatatatagtaggcagaggatacacacatacgtttattccttagctctggccatctarcaaaggcacctcaggtgcaatgcatgcacctagagcccatatcttggtctttaaaatcattcataccaaaaggaaccaggactccagaaagaaatggctgattccagggttgggacacagtggagataagatgaatttggagcatacttaatacaaaaaagtaagaaagtgcccccccaaaatgatggggac

SEQ ID NO: 117250 - DNA, 564 bp, Homo sapiens
aacttgctccaaggtacactaaattttcaataaagtctatcaaaaaagaacaagatgagtgagattaactctactgtggaaaccaggaaagatgagtttggcatcctgaacaatgtgaccctcaggtatgtcagcccacatcgacgcrgagctggctggcctggaggcttctgcttctttgctggaacagcctttgttttgtgggagatctacttcttgcaaagcataagtggacacatgttcctgggaggccaggggggtgcttattgcctcttcacaaccatctgttccagaagccccctgagcaggccacagaagaccacacatatcagcaaagccaacacagctggaaaccaacagattgtctggaagggatttctccaagggaaaactcaaattgcacagatctctgtccaaaggcaatgcttatggattctgccctgttccagtcattcccttacatagatactctgtgtggtcagttctcattcatcaaaggatgcctgtgctgattcttaacgatgtgcaaatgtcagaggagaaaatgcacatgtttcagcagag

SEQ ID NO: 117251 - DNA, 564 bp, Homo sapiens
aacttgctccaaggtacactaaattttcaataaagtctatcaaaaaagaacaagatgagtgagattaactctactgtggaaaccaggaaagatgagtttggcatcctgaacaatgtgaccctcaggtatgtcagcccacatcgacgcggagctggctggcctggaggcttctgcttctttgctggaacagcctttgttttgtgggagatctacttcttgcaaagcataagtggacacrtgttcctgggaggccaggggggtgcttattgcctcttcacaaccatctgttccagaagccccctgagcaggccacagaagaccacacatatcagcaaagccaacacagctggaaaccaacagattgtctggaagggatttctccaagggaaaactcaaattgcacagatctctgtccaaaggcaatgcttatggattctgccctgttccagtcattcccttacatagatactctgtgtggtcagttctcattcatcaaaggatgcctgtgctgattcttaacgatgtgcaaatgtcagaggagaaaatgcacatgtttcagcagag

SEQ ID NO: 117252 - DNA, 623 bp, Homo sapiens
atttaccattttggcttcaattcgttagtgttggcattttcattgggacaaaatatatggctttggcatcagataaacctggctttgaagtttagcttctgccatttactaggtgtaatttacgtggacaaattgcttgaattctctgwacttcagttgtttcactgaaaaacatggctaaaaaaaaaatcaccagaacagggtaattatgaggattgaggaagattgtataagtgattataaattgtggccataatttctcaagtttaaaaaacacttcttacctatgaattattaagaattaatacatttggattttctgtttccctttccaattgatttacaactaagttcttcactataaagtaggtaggctgtggggtctctatattctgcctaagtggctcatggtttgagaacaaattgagaaccaaagtttcttatgtaaaattgaaaagctgaggagacttggggaaaagttggattttggagttaccttgggaatactttcataaaacaagtatgcatgggtttcccctacactttctgcccattttctgattttgtaagtcagaggtgggccccaatatatgtacaagtaattctcctgtcatgcatttttt

SEQ ID NO: 117253 - DNA, 481 bp, Homo sapiens
cacttttaccactttcattgaaaactgtagtagaggttctaataaagacatttagtcaagaaaaagaaataaaaggcatccagattggaaagtaagaagtacaactatctctgttcacagatgatatgatgctgtgtacagaaagtcctaagaaatccactagaaarctactagaactaataagttagctcagcaaggttgtaggatatgaggtcaatatataaaaatcaatattatttctacacactaacaatgaacaatccagaaatgaaaataagaatacaattccattcataatagcatcaaaataattaaatatgtaggaataaatttagcaaaataagtgcaaaacttatactttgaaatccataaacatttttgaaagaaactgaagaagatacaaataaatgggaaaaggttcacatcatggattcgaagacaatagtgttataatggcaatattccccaaattgatcttcca

SEQ ID NO: 117254 - DNA, 481 bp, Homo sapiens
cacttttaccactttcattgaaaactgtagtagaggttctaataaagacatttagtcaagaaaaagaaataaaaggcatccagattggaaagtaagaagtacaactatctctgttcacagatgatatgatgctgtgtacagaaagtcctaagaaatccactagaaaactactagaactaataagttagctcagcaaggttgtaggatatgaggtcaatatataaaaatcaatattatttctacacactaacaatgaacaatccagaaatgaaaataagaatacaattccattcataatagcatcaaaataattaaatatgtaggaataaatttagcaaaataagtgcaaaacttatactttgaaatccataaacatttttgaaagaaactgaagaagatacaaataaatgggaaaaggttcacatcatggattygaagacaatagtgttataatggcaatattccccaaattgatcttcca

SEQ ID NO: 117255 - DNA, 625 bp, Homo sapiens
catacactactggtaagaatgtaaaattgtacagacactttggaaaagagcctagcattttctcaaacatttaaacatagttatatcacacagcaagtccmctccttgtatatgctccaaagaattgaaaacaggtattcaaatagctgaatacagatgttcatgcagcactgttcacaacagccaaaaggcagaaacaactcaaatgtccatcagctgatgaatggacaaataaaatatgatatatccatacaatgaaacatcattcaaccataataagtaatgaactactgatacatgctataacatgtaggaatcttgaacacattatgctaagtaagagaagtcagtcaaaaatattacatattatttcattcatatgaaatatccagaattggaaagtccatcgagatagaatgttgattagtggttgccttgggctggagagcagatggagggtgaaagcaataatagctaaagcacagggggtttttctgaggtgattaaaatgtcctaaaattgactgttatgatgatctcatatatctgtgaatgtactaaaaatcattgaattgtacattttaaatgagtaagttgtgtggtataagaatgacatattaataaag

SEQ ID NO: 117256 - DNA, 549 bp, Homo sapiens
ttattgttgcaaaaaaaattgccagagctttttcatcttgcaaatctgaaaactctatactaattaaataatgtggcttttcctcttcccttaatccctggtaaccaacattgtactatttatatgaattttactgctttaaatatctcacataagtggactcttattgtgacttggttacttcacttaacatgatatttccaaaattcatccatgatgtagcatatgataagtttctttctttgtaaggcaaaatattctattgtatgcatatgctacattttggttatgccttcatctgttgatggacatttgggttacttcacctctatgctattatgaatgatgctgctattaacatgggtttgcaagtatttctttaagatcctgccttcaattctttccgatacatgctgagaagtaggattcctagatcacatggtagttcaatttttgaggaacytccgtactgtttccaatagggtttgcaccattttataatcctaccagtagtgcaccagggttcatatttatccacatgctttccaa

SEQ ID NO: 117257 - DNA, 633 bp, Homo sapiens
tcccttccctattattctatttaattttagagaaatggcaatttttaaataccctarcttcacgaatcttctgaagaacagtcaatgtatcaaaacagataatcaaatgaagacaggctaattccagcctgagtagttaaaatgtggcatatttataactcataaatcctaaattatcttaagcccatctatttttttttgctgattgcctaaactgaactagttttccatgattaattttagggcttatgatataaaaagagagatgttctaaaaatcatgaactcattgcatttctatatttgcatcttatctttccatcaaagaattggcaaaaagatttcattttggacaactccattactcaataaatcatcagataaatggataaacaaaatgtgatatatacatacaatggaatattattcagccttaggaagaaaattttgacacatgctacaataaggataaaccttgacaatatacaaaataacctagttacaaaaggaaaaatactgtttaattccacttatatgacgtagttagaatagtcagtttcatcaagactgaaggtaaaatagtgatggccaggggctgcagggagggggaatggggagttgctgtttaatatgt

SEQ ID NO: 117258 - DNA, 633 bp, Homo sapiens
tcccttccctattattctatttaattttagagaaatggcaatttttaaataccctaacttcacgaatcttctgaagaacagtcaatgtatcaaaacagataatcaaatgaagacaggctaattccagcctgagtagttaaaatgtggcatatttataactcataaatcctaaattatcttaagcccatctatttttttttgctgattgcctaaactgaactagttttccatgattaattttagggcttatgatataaaaagagagatgttctaaaaatcatgaactcattgcatttctatatttgcatcttatctttccatcaaagaattggcaaaaagatttcattttggacaactccattactcaataaatcatcagataaatggataaacaaaatgtgatatatacatacaatggaatattattcagccttaggaagaaaattttgacacatgctacaataaggataaaccttgacaatatacaaaataacctagttacaaaaggaaaaatactgtttaattccacttatatgasgtagttagaatagtcagtttcatcaagactgaaggtaaaatagtgatggccaggggctgcagggagggggaatggggagttgctgtttaatatgt

SEQ ID NO: 117259 - DNA, 591 bp, Homo sapiens
ccatgtaatggcatcatactgcccttaactttaaaatggtgcatgtaataacaatgtgtgggatgtaatttatttctggacatctgytcagtctagagtttggttaggtctattttctctggaggaagtggtcccctttgttattacaaagaaaataatttcatgataagatagaaagcatttttgctacccttcacatcgtgatgcatactgattcagcctacttctagggccacgaagactgtcaaaatgtctcaagctttactctccacctttctggaagtgagtcatgctattgagattgtctaatttctgtgtttgctttaagaaggaagaggccttcaaggagagggctcctgatggactcctcccaaagcaagcctgcatcctactctatcaaatcgaaatttcatcttgtgttaaagatttccaaccagacttttctccttttctttcttccctcacactttcccttcctctttattccatctagacttctatatacagttatgaatcactcaacaacaggggtacatcttgagaaatgcatcattaggcaattttgttgttgctgaacagcatagcatgtac

SEQ ID NO: 117260 - DNA, 582 bp, Homo sapiens
cgcctttgtcaatgtaaacaaactaaaatacattccttaataataaatgccttgtcaatatatgcaattccactcttggcatttttaaaatataagtttatcctactaacatgttgagtcttttgaacatccatttagcttcaaaaacctgagtaccatttcatcatagatacttttccccactacctccagcagtcagtaaaatattaaacaacatttccttgcataatcagtgagtatgtaaaaaaatatatctgcattatttctatgttagctggacgtctgcagtgacaccaataataaaaacattgtaaacattcacaaagatatagttaaaattacaaagatatacttgagatttttctagttaagataatataaacatgcataaaggctcaacaccaagtaatttcaagagtaagaacacatcacaaatacttagtaggtcatatatatatatatatgtatacatacgtacatatataygtatatatgtgtgtgtatatatgtgtgtgtgtgtgtgtgtgtgtgtgtgtgtgtgtgtgtatatatatatatccacttggtcatatcattgaggaa

SEQ ID NO: 117261 - DNA, 582 bp, Homo sapiens
gaataatgaaatcactaggcagaagggatggaatgtgttctaaagtctgtgtatgtgacatgttttaggagtgtgagaaaaaaagttgaatgtggtgatggggaaaacactgaagttcaaaagaagcgaagacaagaagctactcatggcagcagcttttcccataaatcaagaaatgctacagattataaatgagatgagactatcaagaagagacctaataggagtgtgaagaccaaaaatttaaaagacgtggttatatactttgagtaaactctatatataggacaatgttattgtttggttctgtgttcctcactcaaatctcacctcaaattataatccccatgtgtcaagggcaggaccaggtggargtaactggatcatgggggaagttttcctcatgcttttctcatagtaagtgagttctcataagatctgatttttttataagcacatggcatttcccctcctagcattttgcctcctgctgccttgcaaagacggcagttgcttcccctttgccttccgccatgactgtaagttccctgagtcctctccagccatgtggaactgtgggtt

SEQ ID NO: 117262 - DNA, 599 bp, Homo sapiens
tatgacaatacttagaaggatatatgtgtcaaacaaaaaagccaacattctactctcaggtgtatgtaaaatttgagctacatacatacattcatattataacgttataattactacaaagtgctgtttgtcaacggattgtccaatggtagatatcacattccaacaacagatacattcattaattactaactgatttatcacatggcaaaactcattgcagtgtgatattgctaattttttaataaattgtgtgggattctatttttaataaatggtcatttgtatattaatatataaaataatagatattmtttcattttgcacaaaagttctgattgattaaatattgaagtataaataataaaaacttaagtttctagatgtaaacctgaaaaacagccctaaaacttggcatacatacgtagtcctttggaagtatccaagatacactaaataaagagaaaaattatgaccattagtacatacgcattatgagtttccacttaccaaaccacacttgactaaatgaaaaccaaataatgagttaatcatatttgtaataacaatatttgaaaaaatttaaatactaaataatg

SEQ ID NO: 117263 - DNA, 530 bp, Homo sapiens
gaattcagatttttaaaaactagtatcatttacaatagcaccccaataaaaataaaataggtatttcaagagacctaatatatgtgtaactggacccctaatgaataggaggggaaaggagttaggagaaaatgtaagaaacagcagaaattttttccaaatgtaatgagaattgtaaacctacagacccaagaagctcagtgagctccaagcacaagaaacaggaaaattacaccaaggcatatcataatcaaattgctcataaccagtaataagtagaataatatttatttttgtattttttgtagagatggggtttcatcatgttgcccagtctggccttgaactcctgggttcaagcaattcacccaccttggcctccaagagtgctgggattacaggyatgagccacgtacctggcctagaataatattaaaagccagagaaaataggcactgggtacaaaggatcaaaaataagatgacagcagattcctcatcagaaacaagaaggtagtggagcaacatctt

SEQ ID NO: 117264 - DNA, 471 bp, Homo sapiens
ggaaacacaagcgggtacccaagcgggtcggatacaaagcagcccaagttggtccgtctgccgatacttacatatgatcgacctgacagtcactggattaaagggagtccacgtgcctgaaaacaacaacaacaggagttaaagtaaaaggaaaatctttctgggacactgagtttgtgatctatacctggtagcaccaggaaaagcagtgggggctctarggtagtggttttctagacactccaggtgacgtgtcggctgccatgactcctgggagggggccaaagcactgcctggtgggttcacaccctgctgtgtgtgggagtccttcgtggcctcccagacctccaaggccgtccacagtcatcgcggctggacatgcactcttatttaacagataaccaagaaatggttctgtatcattttacacacagaatttttcaaggatgcagtcaccagctaagttgagaa

SEQ ID NO: 117265 - DNA, 582 bp, Homo sapiens
gacacctctatcttaggcttctggccttcagaactatgaaagaacatagttgtgttgcttgagccactcagccctaggaaactagtaccccagccctgggaggcttggctctatgtgtgtccccacagttcaccagtgtatcagcaaaggaaagaagcctttgcagatctcccggtcctcagtgcagaaacttgagtgtgacaggtgaacaacttgaccaaacaaagagggagaatgtgaagaggaaagaacccaacttgcgaattgtaggatacacctccaacttcygaatgagtgctccagcaactcagaaacaaaggaaagcatgtcacatgctcacttctgttgctatggcaaatccattctcccctccctcataacgcctccccagaccctgccacccttgactaaaactgtaaatatttccataaatgtttagcacataaaaatcaggactgcccctagtcatccttatttaccactcctattttagaaacaaaattaatttgtacaatgtatcgaagtgaatatgccctgaagtctagaaagtcagtgagccagagagcaaatgttacccagcga

SEQ ID NO: 117266 - DNA, 615 bp, Homo sapiens
tcactgacaggacattttgctttcagccttctctgtctctttaatacattactgaccctgggcccaattgtcgtgcagttactttctttaaaattttcaggatactttcacaaatagagctgatatggtttggctgtgtcccccccaaatctcttcttgaattgtaacccccataatccccacatgtcgagggaggaacccagtgggaggtgattgggtcatgggggcagtttcccccatgctattctcgtgattgtgaatgagttctcatgagatctgatggttttataaggcagttttcccttctcttgctagctctctctttcctgctaccatgtgaagaaggacttcgcttccccttcaccttccaccatgactgtaagcttcctgaggcatctccagccatgtggaacagtgagtgaatcaaacctcttttctttttaaattacccagtcttggacagttctttayagcagaatgaaaacaaactaatacaagagtgacagttgattggctaaaaagtataggctcagaaaatgaaacaacttgcccaaagccacacagtgagcttctgccagattcatggcaagaataccaggaaatgaaggggaaggt

SEQ ID NO: 117267 - DNA, 532 bp, Homo sapiens
ccgtctctactaaaatacaaaaattagatggtcatggtggcatgcacctgtaatcccagctactcagtaggttgaggcaggagaattgcttgagcctgggaggcagaagttgcagtgagctgagatcrcaccactgtactccagcccatgcgacagagtgagactctgtcaaaaaaaaaaaaaaaaaaaaaaaaaaaaaaaaaaaaaagaaataatgtgctcattttatgtctttgtgtcacattttgataattattacagtatttcaaaatttttcatttgtgatcagtgatctttgatgtcattattataattgttttggggcaccacaaatctcactcatataagatggtgaacttaattgataaatgtcgtgtgtgttctgactgttctactcactgactcttcccccacctccctccccctcctcttctctctcccctcatgggtccctattccctgagatatatatatatatatatatatacacacacacatatatatatgtaacatatgtatgtaacatagatat

SEQ ID NO: 117268 - DNA, 597 bp, Homo sapiens
ttctatagccatggataaagaagtaatttcaactttcaagtcttattatttaagaaatacattttggctgggtgcagtggctcgcacctgtaatcccagcactttgggaggccaaggtgggcagatcacctgaggtcgggagttcaagaccaacctgaccaacatggaaaccctgtctctactaaaaatacaaaattagccaggcatggtggtgcatgcctgtaatcccagctactcaggaggctgaggcaggagaatcgcttgaaactcggaggtggaggttgcagtgagctgagattgtgccattacactccagcctggggaacaagagcaaagctccattcccccccccsccccaaaaaaagaaatggatttcataaggctgccataaatagtaattcttgtgatgcatctgggtaaattgaaagccatctgcaaaggattcaccagtctagatgccattaagaagatttgtagttcatggaaggcagtcaaaatatcaacattagcaggagtttggaagaagttggttccaggccctatggatgactttgagggattcaagacttcagtggaggaagtaactgcagatgtagt

SEQ ID NO: 117269 - DNA, 427 bp, Homo sapiens
tatgtgtctaaaacattcccactcaccaccggacgggaaatccagcacaggctgtgtttctgaaactctggtgaaaatgcgtaaaggttaagctcagtgctaaaaccactgacatttgaacagcctcaatgagaaagcaaagtggttgcaagaaacattcatttgaggttttatgttggaagtgtgaactcccacgataacgactcttaaaggaccatatcgacttgctgggatttgtatggttgggygggtgaggtggaaatgctgttcattaaaataacaacacacatatgctggattcttccaagtgaagatcggtggagcatggcgaatggagggtcaggtttaattatcaatgcaccataaacaacgttctttgctgggtaaactctcttttcactggaaaatggttagagctgcttgtctt

SEQ ID NO: 117270 - DNA, 311 bp, Homo sapiens
gaattctatcatgaacccaataatctcggtcccayggtgttattgtccatattgtctccttcctttgggtgcccagaggtgatgctagtggctaaggagtcaggtgcttgtgtgtagatgagttcatggggcgctttccgaaggcaggtttctacatttataaacagtgagctacacccttgcctaatcctcttgccttgaatatgactgaagtctgtgactttttactagctaatagatatggcaaaggtgatgggatgcccctactgagattagattactgtgtgtgtatgtgcttataaacatacata

SEQ ID NO: 117271 - DNA, 450 bp, Homo sapiens
ccacagtaaacactaagaagcaaaacttgagatgaggcggaggtgaatgtttcagtaggtttgaaaaagcatgaaatttggaatcataagccttacgttctgaatgtttagaaattacatgtgaggcctggcacagagggctcatgcctgtaatcctagcactttgggaggccaaggcgggtggatcacaaggtcaagagattgagaccatcctggccaacatggtgaaaccccatctctactaaaaatacgaaaaattagccaagtatggtggtgggcccctgtaattccagctactcgagaggctgaggcaggagaatcrcttgaacctgggaggcggaggttgcagtgagccgagatcgtgccactacaccccagcctggtgacagagagactccatctcaaaaaaaaaaaaaagaaaagaaaaagaaattacacatgaaagagcct

SEQ ID NO: 117272 - DNA, 594 bp, Homo sapiens
gaaagactacctctgcctggcttgtttccttatccaaaaggagcccacagagcagctgattccagagagaattcactgatgaatttgtacgctgacttcccccatctgatagtatgcaacaaaggaataatacttatgtagatatgtgtttgaagcaccatttgccatcaacatgaacataaagaacctattagactctaaatacctcatgtaagctaaattactcatctgcacactgtggcaaagacttgccttggaattaggcactcaacttctaagtctggctctgcctgtcatcaatcatgtgtcctcggatcagtcacacccttgcaaaatcacaactttgcaaacaaatgtttgcaagaaacagataaaatcattgatgtgggatacaacatagagaagaggctcaatatattagaattctctacagtttttttgtagatcaatagtgccaaatttacaaactgtgagatgacaccaactgtaccctgaactgttatttcaaatcctttattcttcagtatgttttgggaaaaggrcttgttgatatttggacatgtttacaacatggttttgttttatgggctgcca

SEQ ID NO: 117273 - DNA, 351 bp, Homo sapiens
aaaccctgtctctattaaaatacaaaaaaattagccaggcatggtggcacatgcctgcaatcccagctactcaggaggctgaggcacaagagtcccttgagccccagaggcggaggtttcagtgagccaagatggcaccactgcactccagcctgggcgacagaccaagactccgtctcaaaaaaaaaaaawttttttttacaaaatatggctgagggattaaagaatagctaaataaatggaaagatacattttgttcatgttaagactcaatatctttaagatgttaattctccccttattggtctagagagtcaatacaactccaaccaaaatcccagtggctctttt

SEQ ID NO: 117274 - DNA, 598 bp, Homo sapiens
taatggtattatactgagtatgttctctaacgataatggagtcaaactagcaatacatttcaggaggacaacaaaaaaaattccaaacacttrgaaattaaacaacatacatctaaatagctcatgagtcaaacaaaatctgaaatccaaaaaaactgtgaaaaaaaatacaaggagaaataaataataatgtaacacaaatgaaaatacaacatatcaaaatatgtaggatgcagctaagcagggcttaggaaaatttgtaacattaaatgcttatattagaaaaaaattaaaggtctcaaaccaataatctgaggtcctccccctaagaaactagaaaaagaagcaaaaaaagcaagcagaagaaaggaaataataaataaaaaagcagaatcaataaaactgaacacagaaaaacaacagagaaaaatcagtgaaaaaaagctgattcgttgctaaactagcaatgacaaagataaaagagaatacacaaattaccaatattagaaatgaaacaagggatatcaccacagatcctacagctattaaaaggataaatgaatactataaaaaattttatggtcataaattcaataag

SEQ ID NO: 117275 - DNA, 598 bp, Homo sapiens
taatggtattatactgagtatgttctctaacgataatggagtcaaactagcaatacatttcaggaggacaacaaaaaaaattccaaacacttagaaattaaacaacatacatctaaatagctcatgagtcaaacaaaatctgaaatccaaaaaaactgtgaaaaaaaatacaaggagaaataaataataatgtaacacaaatgaaaatacaacatatcaaaatatgtaggatgcagctaagcagggcttaggaaaatttgtaacattaaatgcttatattagaaaaaaattaaaggtctcaaaccaataatctgaggtcctccccctaagaaactagaaaaagaagcaaaaaaagcaagcagaagaaaggaaataataaataaaaaagcagaatcaataaaactgaacacagaaaaayaacagagaaaaatcagtgaaaaaaagctgattcgttgctaaactagcaatgacaaagataaaagagaatacacaaattaccaatattagaaatgaaacaagggatatcaccacagatcctacagctattaaaaggataaatgaatactataaaaaattttatggtcataaattcaataag

SEQ ID NO: 117276 - DNA, 528 bp, Homo sapiens
caaatgtgtcctccggtgtcctggagctgggacacactctgcctcctctttcttggacatcagaactcgaggcttctggcgtctggactccaggacgtgcaccagcagatccctaggtccttaggccttcactttcagactaagagttacacagttcagttccctggttctgagagtctgacttaggctgagacacatcactggcatcccagcatcttcagcttgtggatggtctattgtgggacctcccaacctccataactttgtgaggctattcccttaataaatcccctctcatatatctatatgcatatcctcttggttctgtcggtcgggggaccctaccgaatacactgtgcacctatgtgtctgtttgtacacagttgtggggatgggaggaatgaatggggtgggaacaggttggaarctgaacaaggtaatgggagattttaaaaactaacgggcaggaaaatgtcaagcaatgcaagcagaggactgatgttcacaaaatctggaggggaatctgta

SEQ ID NO: 117277 - DNA, 396 bp, Homo sapiens
caggaaacagtcttcacactatgaaatggtaaaaagtcaccccaaaaagagagctgtgcagcagatgtggagagcaaccagtcacaatcaaaacagaaaatacactgcgatgagacgtagctcttaaggaagggagaagagggaaattttgcatttttaacaagtttccaggtgctgctgatgcttctggttttggatctgcactttgaggaccatcatcctagggcatcagtggcctctgtggctgaaggctttttgctgactacaggggtacagcaacttagttacagccaagccacaagtgccctggaattaacagccctcaamgtggaggaagtcactggataaataccctcactttcatgcctttaggtaggagaactctgaatctccaga

SEQ ID NO: 117278 - DNA, 561 bp, Homo sapiens
acagaccaatacccagccacctgtccacgtcccagtgttggggacccctgctttagagggagtttggctctaatgatgccttgatttggaactctgacctccagaactgtaagataatatttttctcgtgtkttaagccacccaatgtgtgataatttgttattgcagccctaaaataagaaactctgaattcttcatctgaggaaggccacttctgaattttaaagcctgaacactctactacactgagctgcctttacttcactgcaccatacctactgaaatttctagagaaaagaccacaggtgaattgttaaaatgtcaaattgactgttgattttatatatggcttcaagcttgatccactcatgattcctcttttaaaaataatttgtggacattttgtttcccaatctactctgttatttatattaaatcttggtactgtcacctttcctactgccccaaacctctaatttagtctaaacaagagataagtttattgtaagttaaattagataaacagtaactttttaaaaataactatatctgactatgcaa

SEQ ID NO: 117279 - DNA, 561 bp, Homo sapiens
acagaccaatacccagccacctgtccacgtcccagtgttggggacccctgctttagagggagtttggctctaatgatgccttgatttggaactctgacctccagaactgtaagataatatttttctcgtgtgttaagccacccaatgtgtgataatttgttattgcagccctaaaataagaaactctgaattcttcatctgaggaaggccacttctgaattttaaagcctgaacactctactacactgagctgcctttacttcactgcaccatacctactgaaatttctagagaaaagaccacaggtgaattgttaaaatgtcaaattgactgttgattttatatatgscttcaagcttgatccactcatgattcctcttttaaaaataatttgtggacattttgtttcccaatctactctgttatttatattaaatcttggtactgtcacctttcctactgccccaaacctctaatttagtctaaacaagagataagtttattgtaagttaaattagataaacagtaactttttaaaaataactatatctgactatgcaa

SEQ ID NO: 117280 - DNA, 572 bp, Homo sapiens
ctccttacttgggaaaaaggcctggcctacaatatatataataaccacattgaaaaratttaggttccttccctctggcaaccagtttttcatttcctaaagatgccaggctgaattcttttgctgtgtgaaaagaatatcagtttgtctataaatcgaatgtgggtgaaaattgcacaaaagtctcatttctaataatatgcttagctattctacagagtatgatatgtaaaccataaaaagtaagacttaaatccagagtattataacatgactgtaagtaaaaagatttagattgtgatattgtatggtttgaatggatttcatacacaaatggtcacgggaggctatacatacttaagagttaatacgtgttcaattgtggaatgttttaatataatatcagttaaaggaaaaaattctactaccacaatgttaaaattgattttaaatgattgatagggagaataattgggtccaggaacaatcaaactattaacttgtaaatagttcgtgaaatttaaatgatcctttgagacagtctttatacatggaaaaaggtctgctcgggt

SEQ ID NO: 117281 - DNA, 572 bp, Homo sapiens
ctccttacttgggaaaaaggcctggcctacaatatatataataaccacattgaaaaaatttaggttccttccctctggcaaccagtttttcatttcctaaagatgccaggctgaattctyttgctgtgtgaaaagaatatcagtttgtctataaatcgaatgtgggtgaaaattgcacaaaagtctcatttctaataatatgcttagctattctacagagtatgatatgtaaaccataaaaagtaagacttaaatccagagtattataacatgactgtaagtaaaaagatttagattgtgatattgtatggtttgaatggatttcatacacaaatggtcacgggaggctatacatacttaagagttaatacgtgttcaattgtggaatgttttaatataatatcagttaaaggaaaaaattctactaccacaatgttaaaattgattttaaatgattgatagggagaataattgggtccaggaacaatcaaactattaacttgtaaatagttcgtgaaatttaaatgatcctttgagacagtctttatacatggaaaaaggtctgctcgggt

SEQ ID NO: 117282 - DNA, 572 bp, Homo sapiens
ctccttacttgggaaaaaggcctggcctacaatatatataataaccacattgaaaaaatttaggttccttccctctggcaaccagtttttcatttcctaaagatgccaggctgaattcttttgctgtgtgaaaagaatatcagtttgtctataaatcgaatgtgggtgaaaattgcacaaaagtctcatttctaataatatgcttagctattctacagartatgatatgtaaaccataaaaagtaagacttaaatccagagtattataacatgactgtaagtaaaaagatttagattgtgatattgtatggtttgaatggatttcatacacaaatggtcacgggaggctatacatacttaagagttaatacgtgttcaattgtggaatgttttaatataatatcagttaaaggaaaaaattctactaccacaatgttaaaattgattttaaatgattgatagggagaataattgggtccaggaacaatcaaactattaacttgtaaatagttcgtgaaatttaaatgatcctttgagacagtctttatacatggaaaaaggtctgctcgggt

SEQ ID NO: 117283 - DNA, 572 bp, Homo sapiens
ctccttacttgggaaaaaggcctggcctacaatatatataataaccacattgaaaaaatttaggttccttccctctggcaaccagtttttcatttcctaaagatgccaggctgaattcttttgctgtgtgaaaagaatatcagtttgtctataaatcgaatgtgggtgaaaattgcacaaaagtctcatttctaataatatgcttagctattctacagagtatgatatgtaaaccataaaaagtaagacttaaatccagagtattataacatgactgtaagtaaaaagatttagattgtgatattgtatggtttgaatggatttcatacacaaatggtcacgggaggctatacatacttaagagttaatacgtgttcaattgtggaatgttttaatataatatcagttaaaggaaaaaattctactaccacaatgttaaaattgattttaaatgattgataggragaataattgggtccaggaacaatcaaactattaacttgtaaatagttcgtgaaatttaaatgatcctttgagacagtctttatacatggaaaaaggtctgctcgggt

SEQ ID NO: 117284 - DNA, 538 bp, Homo sapiens
tttaaatccgtcaaattagtatgtctttatattttgataatcaagaatatgagctgatttttttgagccagccaagagaaaagttaactagtccactgttcaattatctttatatattttcctttatttggaaagagtgaaatatcatgagattaatactatataacatattatgtggtgaaagacatgttatcattttagcaacaaaatttttggtaaaatttgctatgaatagctactctattttcatatatgttgaactagtaagaatgtatgcattaatttctaattgtagttgccaagacaatgatacattttaactttagatgagtattctaccatcagtagagatttaacgtactgaaaaatattgttcgctggtaacactggtaatatgcatcctctttttaraaaaacaagagtaataaaataaactttgattttgatctataattatggcagttattgcatacctttagattttacaacatattgaattttaaaaagttaatattctctaatttcataaatatttcgc

SEQ ID NO: 117285 - DNA, 538 bp, Homo sapiens
tttaaatccgtcaaattagtatgtctttatattttgataatcaagaatatgagctgatttttttgagccagccaagagaaaagttaactagtccactgttcaattatctttatatattttcctttatttggaaagagtgaaatatcatgagattaatactatataacatattatgtggtgaaagacatgttatcattttagcaacaaaatttttggtaaaatttgctatgaatagctactctattttcatatatgttgaactagtaagaatgtatgcattaatttctaattgtagttgccaagacaatgatacattttaactttagatgagtattctaccatcagtagagatttaacgtactgaaaaatattgttcgctggtaacactggtaatatgcatcctctttttagaaaaacaagagtaataaaataaactttgattttgatctataattatggcagttattgcatacctttagattttacaacataytgaattttaaaaagttaatattctctaatttcataaatatttcgc

SEQ ID NO: 117286 - DNA, 417 bp, Homo sapiens
gaattttttctccccgccaagaacaatttacaccctgttgagaatgcgtatcttggattatgcttcctagcacacactgattgaattcagctgatgtttcaccagttaaagacttctctatgcaaagtcaaactactctcctgaagtacaccactcsaaagagcgtaagatagagaataattatttagtaagtcacgtcttgtcaaccaacaggtcaaatctcattccttttctaaaaataaggaagcctactaatattaaataccatatggttcccaagtcaaaatggtgttcaagtcaaaaatcttctacccacatattcaaactcttccacttacagagagaggggcaggctttgctcccagaagggataaaactatgagcttgcaacagctaccacttcatgtgctggtttat

SEQ ID NO: 117287 - DNA, 564 bp, Homo sapiens
gaattcaaaaggattactatgcatgcagagtaaatggatgagggttggtatcctatagactgggtctgcccattagtttacgtctggcaaggataatggtagagccccatgggggacaagtagagctcaccagagtgccagacagtcatccagaacacaggaatttagcttgttgttttgaagatttctggaatccgtataaacaaggtaatattatggacttccagttgagaagggggcacactctakagttttggggaaattaagaaagatgcatgatgaggggtataataaaagcccagacttcaccgctacacaatatatccatgtaacaaaacaaaactaaacttatacccactaaatatattttaaaagaacatatatcagtatcatttttctttcttatcttttttattcctcccttctctagctattccaccaacagacccagatggccttaaacaatgtttcccaaaggatggcacatgagatggttttatgtggtacaagaagcttttacttgtatagtaagttactttaagagaattagaaacaatataatga

SEQ ID NO: 117288 - DNA, 598 bp, Homo sapiens
cgttgacaaaaaaggagctctcactgattgctggtggtaatgtcaaatgatagggccactttggaagacaatttggcagtttcttgcagaacgaaacatacttttaccacataatacggcagtttgcttcttactatttatccaaatgaattgaaaaattacattcatacaaaaacaaatacactggtgttaatagcagatttattcacaattgccaaaacttggaagcaaccaaaatgtccttcagtggttgaaaagataaataaactgtggtatatccagataatggggaatcattgaatactaaaaagaatgagctatcaagccaygaaaagagcgatagccatgaaaagacatagaggaaacttaaatgcatattactaggtgaaagaagccaatatgaaaagactatatactgtatgatttaaactatatgacattctggaaaaggtaaaactgtggagacaacaagaagatcagtggttggcagaagtttagtgggagaaagggatgaatagggagaacacaggatttttagggcagtgaaactattctgtataacactttagttgtggatacatattatacgtttgtgaaa

SEQ ID NO: 117289 - DNA, 558 bp, Homo sapiens
tttgatttagttttttagccataattgctggcaatctgtgaaactatacatattcctatttaaacataaacaattcatagatggttttaaaaagcagttggtgttgttaaagctaaaaattcattaaaaattgctgagayattagtgaaacactgcatcaaaagtgtgttagaaatgatagctgcaaccactgcaaagaaagtagctcaagtcccacttttcaatgacagcatactttaaaacactacagaaaatgaagaaaaataatggacccactcacagaacaaatacagctaggaactggatgaatgcaaaaatatcactaacttggcaactattttaatctctgtgtaaactgtataggctggtgatataaagaagtattttctcaatgtcattgatgactagaaacaaccagctatggatttgtaaaactgaaaaggattgcattgacataatagttgggagtttaagtttcattaagataatgttctgatggtacagttgcaatgacaagacaatattctgaaatagttatgcagattaagaagctttcac

SEQ ID NO: 117290 - DNA, 614 bp, Homo sapiens
attttctcagtttctgctttagtttcttatcgtgtgtacgtaatatatatgtatgtatacatactttgccttacattaattgtaaagtcataatttttttggtggagaaaaggctatatatttataaagcatcttcttaatatattaaaattgtgattatatcttctatactactttgtatcttatattacctttcccatcagaaaaaycctcacccagtttctttctttctccccattttagaggaaacacttatgtgtactatttttcacttcatcttgaaaacaacactgccattacttttatcactttttttcattactttctcagacaaactccttaaaccaagagtcttattttccctacttaagtcagattttaaagattttaaaatactctgcaaaattctaaattatgatgcaattcaattaatgtgatgttttagaatacagagctattacatgtttaagctcattgtctgttttccttaatttttggcttccatgttttttatctttactttaaagatagattccaattttctaatacccatactttttataacatcttacaaaactttacaatatttcttttaaaattcaagatttcagaaa

SEQ ID NO: 117291 - DNA, 614 bp, Homo sapiens
attttctcagtttctgctttagtttcttatcgtgtgtacgtaatatatatgtatgtatacatactttgccttacattaattgtaaagtcataatttttttggtggagaaaaggctatatatttataaagcatcttcttaatatattaaaattgtgattatatcttctatactactttgtatcttatattacctttcccatcagaaaaaccctcacccagtttctttctttctccccattttagaggaaacacttatgtgtactatttttcacttcatcttgaaaacaacactgccattacttttatcactttttttcattactttctcagacaaactccttaaaccaagagtcttattttccctacttaagtcagattttaaagattttaaaatactctgyaaaattctaaattatgatgcaattcaattaatgtgatgttttagaatacagagctattacatgtttaagctcattgtctgttttccttaatttttggcttccatgttttttatctttactttaaagatagattccaattttctaatacccatactttttataacatcttacaaaactttacaatatttcttttaaaattcaagatttcagaaa

SEQ ID NO: 117292 - DNA, 668 bp, Homo sapiens
gatgatgtgaacttatatttgaaaaaaaaaaacaaagattcctccaaaagctattccaactgataaacaaattcaaagttgcatgatacaaaattaacatgcaaaattctgtagcatttctatatgtcagtagtaatcaatgtaaaatagaagtaaaaaagtaatagccacacataaattaaataccaagaattaaccaaagaagtgaaataaatctataataaaaactataaaacactgatgaaggaaattgaacaggacaccaaaaaaaaaaagaaaaatattttatgttsatggattggaagaatcaatattgttaaaatgttcatactgctcaaaatagattcagtgaaatctctatcaatgtaccaatgacattcttcacataaatagaaaaaaaaatccaaaaatttatatggaaccacaaaagacccagaatagctaaagctattttaagcaaaaatattaaaactggatgaatcacattgcctgactgaaaattatactacagagctatagtaatcaaaacagcatgatactggcataaaaacagacatatagaccatttgaacagaatagacaatccagaaacaaatccatgcacctacagggagctcatcttcgaaaaattctccaagaaaacacactgaggaaaagaaagtctcttt

SEQ ID NO: 117293 - DNA, 668 bp, Homo sapiens
gatgatgtgaacttatatttgaaaaaaaaaaacaaagattcctccaaaagctattccaactgataaacaaattcaaagttgcatgatacaaaattaacatgcaaaattctgtagcatttctatatgtcagtagtaatcaatgtaaaatagaagtaaaaaagtaatagccacacataaattaaataccaagaattaaccaaagaagtgaaataaatctataataaaaactataaaacactgatgaaggaaattgaacaggacaccaaaaaaaaaaagaaaaatattttatgttcatggattggaagaatcaatattgttaaaatgttcatactgctcaaaatagattcagtgaaatctctatcaatgtaccaatgacattcttcacataaatagaaaaaaaaatccaaaaatttatatggaaccacwaaagacccagaatagctaaagctattttaagcaaaaatattaaaactggatgaatcacattgcctgactgaaaattatactacagagctatagtaatcaaaacagcatgatactggcataaaaacagacatatagaccatttgaacagaatagacaatccagaaacaaatccatgcacctacagggagctcatcttcgaaaaattctccaagaaaacacactgaggaaaagaaagtctcttt

SEQ ID NO: 117294 - DNA, 573 bp, Homo sapiens
ccctccttttctattttaaaaaatagtttcagtaggaatggtgccagcccagctgttaatacatctggtcctgagcttttcttggttggtaggctatttattactgcctcaatttccaaactcattgttggtctgttcagggattcaatttcttcttgagggttgtatctgtacaggaatttatcaatttcttcyagattttctaccttatttgcatagtgggtttttttgtttttgttttcgtttttgtttttgacagagtctcactctgtcgcccaggctggagtgcagtggtgtgatctcagctcactgcaagctctgcctcccagattcacgccattctcctgcctcagcctcctgagtagctgggactacaggcacctgccaccaagcctggctaatttttttgtatttttagttgagacggggtttcactatgttagccaagacagtcttgatctcctgaccttgtgatccgcccgtctcggcctcccaaagtgctgggattacaggtgtgaaccaccgcgcccgaccagtggtctttttttttaaatatgctctgatggttggttg

SEQ ID NO: 117295 - DNA, 567 bp, Homo sapiens
gggagctgcataccagagctgttcctattcagccatcttgccagccacctccaaaactgatttttaaataagcaacagtaaaagtgtgcaaagaaggatgttacataatgataatgggtccaatttacaggatgatttaattctactaaatatattcatacccaacattcaagcayccacattaataaaacaagtacttttaaatctacaaaaatacttaggcagtcatgcaataataatggaaaattttaacatcccagtgacagtattagatagatcatcaaggcagaaaactaatgaataaattatcaacttatattttacatgtgaactattggaactaatagacacctatagaaaactccatccatcaatcagagtatacacattcttcttatctgcacacagaacatactctgccataaagcatgtctcaataagttcaaaaatattgaaatcaaaccaaccatacttttggactacagtggaataaaactacaagtcattaccaagaagagctctcaaaacacacagttacatggaaattaaacaatttgcttgtgaatg

SEQ ID NO: 117296 - DNA, 530 bp, Homo sapiens
agcaagagacagccaaacaaacgtgttcacttctatttatatgagattgtagcacagggaaaaccaaattattataatgaatatctgaataccagttaccttgattgggatgggggagcagttgatgcctgggaaggtgcacaagggatgaatctggasaatttgaaatattctagagattcatctggatggcgaacatacgtaaaacttagttgcatatttaacatttccatcctttgtgagtgttttatatcaattaaaaagtgtaagaagccaatcctgcaccctgaatccaatatgaatttaaaaataagaatcatcatatgtttacggaatcttaaccttgctaaggagaagtgagaaatgcacctgggaaattctaagtaacgagaaatctaagagagaagacaaagagaaaagggaatttatcctactcatgcagcacagattttatctctattggtttctctctaaacagagacaatatttaagtcattttgccctcaagagaggctcccaccatccccttg

SEQ ID NO: 117297 - DNA, 530 bp, Homo sapiens
agcaagagacagccaaacaaacgtgttcacttctatttatatgagattgtagcacagggaaaaccaaattattataatgaatatctgaataccagttaccttgattgggatgggggagcagttgatgcctgggaaggtgcacaagggatgaatctggagaatttgaaatattctagagattcatctggatggcgaacatacgtaaaacttagttgcatatttaacatttccatcctttgtgagtgttttatatcaattaaaaagtgtaagaagccaatcctgcaccctgaatccaatatgaatttaaaaataagaatcatcatatgtttacggaatcttaaccttgctaaggagaartgagaaatgcacctgggaaattctaagtaacgagaaatctaagagagaagacaaagagaaaagggaatttatcctactcatgcagcacagattttatctctattggtttctctctaaacagagacaatatttaagtcattttgccctcaagagaggctcccaccatccccttg

SEQ ID NO: 117298 - DNA, 478 bp, Homo sapiens
aatatttatgaattattcaagagcatgtctgttactgccgtgaggtgatatgattaaagtaatgttcgtatcaaaaggacaaaatatctttttttctggttaaaaaaatgaatcacatcagaaattattgtctattctaagatgatggatcccattgtgaatgaatttaaaattgtatttccaagcagaaatgtcaaaaaaaaaggaaatcatgaaatwtagcaagtaatttgtcacacgtacaaagaatgacaagtctttagagtagttttccattcatgagtgagaacacacatccaacccaaaatctactggtctcactcccataatcactagtgtggagactaaaggtagtgcaatttaaattacattcctaaccaaaaaaaggttcaaaaacaaagaaaggatgcttcatagaaaatatcttgcaaaacaaagaatgacatgtctgtagaaggtattcacaagcagggactca

SEQ ID NO: 117299 - DNA, 592 bp, Homo sapiens
gagcagaaggcccagcaagacgtaatccagcaggttttgataaatgacaattttgatattaagttgtcataaaaaacaataaaaggttttgaaataagtaaatgtattatttttacacaatgtggtcattgcctaaaaataaatctgatttccatattctaacagtaatggtatagaaaaatgtatgatttgcatatagtcacttaaaataatgctccaaaaatatttatgaattattcaagagcatgtctgttactgccgtgaggtgatatgattaaagtaatgttcgtatcaaaaggacaaaatatctttttttctggttaaaaaaatgaatcacatcagaaattattgtctattctaagatgatggatcccattgtgaatgaatttaaaattgtatttccaagcagaaatgtcaaaaaaaaaggaaatcatgaaatatagcaagtaatttgtcacacgtacaaagartgacaagtctttagagtagttttccattcatgagtgagaacacacatccaacccaaaatctactggtctcactcccataatcactagtgtggagactaaaggtagtgcaatttaaattacat

SEQ ID NO: 117300 - DNA, 478 bp, Homo sapiens
aatatttatgaattattcaagagcatgtctgttactgccgtgaggtgatatgattaaagtaatgttcgtatcaaaaggacaaaatatctttttttctggttaaaaaaatgaatcacatcagaaattattgtctattctaagatgatggatcccattgtgaatgaatttaaaattgtatttccaagcagaaatgtcaaaaaaaaaggaaatcatgaaatatagcaagtaatttgtcacacgtacaaagaatgacaagtctttagagtagttttccattcatgagtgagaacacacatccaacccaaaatctactggtctcactcccataatcacyagtgtggagactaaaggtagtgcaatttaaattacattcctaaccaaaaaaaggttcaaaaacaaagaaaggatgcttcatagaaaatatcttgcaaaacaaagaatgacatgtctgtagaaggtattcacaagcagggactca

SEQ ID NO: 117301 - DNA, 478 bp, Homo sapiens
aatatttatgaattattcaagagcatgtctgttactgccgtgaggtgatatgattaaagtaatgttcgtatcaaaaggacaaaatatctttttttctggttaaaaaaatgaatcacatcagaaattattgtctattctaagatgatggatcccattgtgaatgaatttaaaattgtatttccaagcagaaatgtcaaaaaaaaaggaaatcatgaaatatagcaagtaatttgtcacacgtacaaagaatgacaagtctttagagtagttttccattcatgagtgagaacacacatccaacccaaaatctactggtctcactcccataatcactagtgtggagactaaaggtagtgcaatttaaatyacattcctaaccaaaaaaaggttcaaaaacaaagaaaggatgcttcatagaaaatatcttgcaaaacaaagaatgacatgtctgtagaaggtattcacaagcagggactca

SEQ ID NO: 117302 - DNA, 630 bp, Homo sapiens
catgtattatctcatttaatctcaaacaactctatgctataggtgtttattattatccctatttagatgaaacatttaaccttcagagaatttaaataagttgcacttgcaagcttagcaggtgaggaatcaaatttggaataggacctagatcagtgatcccctagatctacaatcttaaccagtaccctgttctctctgcttagagagcacctagagaaaatctgtaagcaaataatcacaaaacaagggatgacacaatatatgtaaatgtaggatwttacattaagtggaagaaggaagaaggtcattatttactttttctgggtgagagatgaaaacacttctgcaagagtatttccaatttcaccaaagtatggaaagatgtttatcctaataacaatactcagtaatggtatttgatttaatttcagcctagtacatgatttgattctaaaacaacatttccttagaatttcaatatctggaattctatagctcaatggttttggtgactattaatattttatatacttcttttgatagttttggggctaagtgaatcaaatctattcataactctaagttttcaaattctgaaatcttttagagttgtttagttaaaactgg

SEQ ID NO: 117303 - DNA, 538 bp, Homo sapiens
aaatccaatctcacattaattttttcttaagtgtaaataatgggaaaacttcacttcgagaggggactcctcagtagacctccataatttcctggcttttactgccagttagtcatcaggaatagccacggctaagagagtaccaactgggcaagccagtgaattataccagtgcatctcagatttactgatttgtttaacttttgttttttgttctttttttttttcagagatagaatctcactatgttgaccaggctggtcttgaactcttggcacccaagcgatccttttgcctggaatcccaaagtgtcagatttactgaagaatatttcattgtaattactttttatactttataggtcaagagctctgttttaaatacaaaatttattgaatatactttttcaaacaaagtttcatgttctaatcattgtctgatttcagcattaaatgaaacacagtaaagaaagttgggctgatgttgttgktggtggttgtttttgtattctgattacagaactgtattttgagtgggc

SEQ ID NO: 117304 - DNA, 677 bp, Homo sapiens
  misc_feature (1)...(677): n = A,T,C or G
ggaaggcaactctcctgggccattgttcaagggctgccgcagagagggtcgggtgcatgagttctctggaggtaatggctcggggcatggacagaggggcttggggcgcgatggagaaagcccccttgcacagttgggggttagcagtgtgcaccaccgtggagctggggggacagcatcagataagtgactgatttgagtgaggaccgggggagargagggacctangatatgcacagaatttttgcccaagcagtcaggggcatggggtccctgactgatggaaggatatggggaggggtcagtttgtgaagggcaatgttgctttgtctgtgtggagtttgaggggctcgtgagggcctccaggaggcagccagatcaacggaggggagcttaaaagggtggcagagagacaggcaggtgcagtggtgcatgccttaatcccagctctttgaaaggccaaggcaggaggatcatttgatgccaggagttcgagaccagcctgggcaacatagcaagaccccatcttgaaaaaaaaagttaaaattagctgggcatggtggtgcaagcctgtattctcagctactctggaggctgaagtgggaggggaggattgattgagcccaggagtttgaggctgcagtacagtatgggatggttgaagcccagagactgca

SEQ ID NO: 117305 - DNA, 646 bp, Homo sapiens
actttcccctctctttgaaatgcatataaattctttagaaaactagataggtttattgtcagatcaataacccagagatttctttctcaaggtcctggaagccatttctttgaaatgtaaacatcaagggagatcttacccctatttcactgtttctgtgggagggtaggagcctaacttaaggaggtgccttgctccgctttgcaaaacctgttataaacatatgagaagtttgtttcttctcasaataaagccaattatctaaaactgatgatgactcctgctaccaggaaagtttaggatgataccaagtcctcttacttgagggttagtttttgtttatcttgaaaacgttcatgaaataggttgtatctgcttggttatttaaaaaaagtgtgaggttttttcctgacttggcagtgtcttagtggattgcctatgatgtacaatgcttgtttaataacaaaattggtttctttctctactacctttgtgtagaggatttcttgattgttaattgattttgtttttaattgtgttttcccaacattagtaacttagtatcgatatttaacatgtcttatgaattttccccttttctcacaaaatactttcataattacttgtgactgaacacatcatatga

SEQ ID NO: 117306 - DNA, 638 bp, Homo sapiens
ggcaatttttcaagagctttggtggaaaatcattaggcatccaccttacagtcttgatttcacactttgtgatttgtttttgtttcctaatcttaaaaagtctgtgaaaggcaccaactctttgttaataatgttaaacaacaaaacaaacaaacaaaaaacctgcattggcatgattaaattcccaggaccctcagttttttagaaataaactaaatgkctggtaacattgcttacaaaatacttaagctgctgataaactaaatcaagctaattttgtttcatgatctagataataataggcaagttagtcaatttctccatgtatctcaatttacctatcttgggattagacatagcattatgccttattcacaaagttttgtggtaataaaaataactaggaaacactttttaaaactttaaatatagtataaataaagaaaatagaaattattactatccactattataaaaggtaaacaagattcagactctgccttcagaaacttataccaaatgataagatgagtggtaaatgttcactgcaatttacatagaacacaaccttagtcaaggagagttgttgaggaaatacctacccagctttcaggtaccacttgaggttttaggctcac

SEQ ID NO: 117307 - DNA, 638 bp, Homo sapiens
ggcaatttttcaagagctttggtggaaaatcattaggcatccaccttacagtcttgatttcacactttgtgatttgtttttgtttcctaatcttaaaaagtctgtgaaaggcaccaactctttgttaataatgttaaacaacaaaacaaacaaacaaaaaacctgcattggcatgattaaattcccaggaccctcagttttttagaaataaactaaatggctggtaacattgcttacaaaatacttaagctgctgataaactaaatcaagctaattttgtttcatgatctagataataataggcaagttagtcaatttctccatgtatctcaatttacctatcttgggattagacatagcattatgccttattcacaaagttttgtgrtaataaaaataactaggaaacactttttaaaactttaaatatagtataaataaagaaaatagaaattattactatccactattataaaaggtaaacaagattcagactctgccttcagaaacttataccaaatgataagatgagtggtaaatgttcactgcaatttacatagaacacaaccttagtcaaggagagttgttgaggaaatacctacccagctttcaggtaccacttgaggttttaggctcac

SEQ ID NO: 117308 - DNA, 431 bp, Homo sapiens
ccctctacttctcctctcttcktcctctctcctgctctctttctggttgagtcactagcaaatttcaccagccacatgtgtactcagcgacaaaaggttgaatgaatagaaagatttttaaagtcactcatgttttaccttttagcatgaaagaaaagttatgaagaatctgactcagtacagaaatttctaagaagcaactccctcaagacagatccgagtgaaaccaacaagcatgtgcatacacctgtcagaagcacttgatcaaattacaggtttatgttcggcccaggacaatgtgagagccagtgttaaattccccaacaggcacctgtcactcttcttttagaccaaaaccaacataagagctgtccagagaagaaaaagagaagagcacatcagaggaacttggcaagttatcagattaccac

SEQ ID NO: 117309 - DNA, 571 bp, Homo sapiens
gaggaaactacagcagattagtctttttgcttaagcttgcatggaatgttcatcaagttagactgcattctgggtcataaaacataccttaacacatttaaaagaatagaaattctcagatcacttgggatcaggagttcaagaccagcctggccaacatgctgaaaccccatctctattaaaaatacaaaaattagccaggtttggtggtgggcacctgtagtcccaactacttgggaggctgaggcaggagaatcgcttgaaccccggaggcagaggttgcagtgagccaagatcatgccactctactccagcctgggcaacagagtgagactctgtyttaaaaaaaaaaaaaaaaaaaaaaaggaatacaagtcctacaatgtttgctcttagataacaatggaattaagctagaaatcagtaacagaaaggtagctggaaaatgccaaaatacttggagattaaacaacacacgtgtaaatatcatgggtcaaagaagaaatctcaagataagtgaaaaaatattttgaaataaatgaaaataaaaacatagcttattataatttgt

SEQ ID NO: 117310 - DNA, 566 bp, Homo sapiens
cattctctatggcagctatagccttatgaaatgcatgttttaaataataagacttggaagtctaaatgactccttgatccatgggctacaaaatgaatgttatattagcaggcatgaaaacaacattaatcttcttgaacatctccatcagagctcttgggtgattaggtgcattgttaatgagcagtaatattttgaaaggcatctctctttcctgaacagttcttgacagtgggcttaamatattcagtaaactacgctgtaaacagatacgctgtcatccaggctttgttgttacctttataaagcacaggcagagtagatttagtataattattaagggctctaggattttcaaaagtgtaaatgagcactggtgtcaactcaacattcaccagctgcattagcccctaacaaaaacgtcatcagcctgtcctttaaaattttgaagccaggaatagacttgtctgtagctatgaacatcctaggtggcatctttttccaataaaaggctgttaagtatacactgaaaatttgttgtctggtgtagccaccttcatcaacga

SEQ ID NO: 117311 - DNA, 596 bp, Homo sapiens
aacggtcactgcttttcaaataagctgatgcaaacattcaaatgagccrtgttagaagagcagacacctatttcaacaatattgcctttgcctaaaatgtttcagggactcacatttcaatcaatcaccttcagaatccatgattcattcccttgaagatgttcaacagctgtacctctttcttcattaaagatggatttaatttctggaaacagacaagtgtcatttgaaatctagcagagtgagattttcagtattacactaccactttaggtcaaaaacaaagtgtgaatacaagctaacaaaatggattttctgatatggcttatgaatgggttttaaaggaaagtctcaaaattgtttgcacaagactacaggagtagtatcaagaaataagtatatgacttcccagggtaatcattttaggggactatacacatctgtaagtacaggtgagttcaatgtgttaggggaaagggaaagtgtaaagaaaaagaaattgttattccaaaggctctggggagagatgaagcttgctacttttgaagaactgaaaggtcagcctggttaaaacacagtaaacaagtaggggtgga

SEQ ID NO: 117312 - DNA, 569 bp, Homo sapiens
agctttgggatctgagggcggggagggtctgatttttcgggtagagcctggaaaagtgagcaaaccccacagttctgctatggcatgccggcatgtggcctggcagcagcagaggcagtaaagccgtgtggggtacagggcatcagagggatgaggcaagcataccgtgggttctctgatgctggactggtgaaaaggacacagaagtagttgagaggcaacctcayacttccaaagagaaggaggaggcagaggtacagtcagatgaccagggtgatgtccacagagactggggtctaatcaaggctatacctaagaccctgagagggtcagccagcatctgagaccctgagaggatgttagccagttccctatctgccatccctgagccataatgtcagaaatgtaggagtcaccaaggaagaaggagatgggggaagaagattcagtagtgactcgttcaaatctgaagtgacagagaaaacgaggcactgattagattaatttttcctgcctttgagttgatggggattcctaatggagtttcagctggcttaggaaaataaaga

SEQ ID NO: 117313 - DNA, 537 bp, Homo sapiens
gcctaacattctctcaggctttctttcacctttggtcttattgattgattgatttttcttgccgttttttgctagtctttaaaatggatttacaagatactccttgtcttcctatcttcttattgattcattatttaattgattggtttaatatattttcacagtattaacgattacttaattgatgagttgaatcattgtaactgctatctagatattttttgcaagaataaggttgggtcttaccacttaaatataaataaaagagatataaaaagagataaaggagtctgggactttcctgagtttttcaaacagggagctggatagctgttaaaggaaatcattcagatgasggaatataagatggggaacagctgtgcagatggagattatatgtggagtttaatttggggcttactaagtatgacaagctagtgggccatcttaatggtgatggctagaccacacacgaaatatatgagaaggagatagtagatttaagagcaattagtaaatagtgggtaaatgaagcat

SEQ ID NO: 117314 - DNA, 539 bp, Homo sapiens
agatctgtggaatggtgaacctgagagatataatatagggtatctgatggaagaaatttctaagtagcaaagcatatgagatatgacctggctgcttctaaaagcctatgctcatctgcataaacaaagaaatggcctgaaactagaacttatrtttaaaagggaatcataacataaaagtttggaaaattcacagcctaatcatgtggtagaaaaaaaaaatcatattctagggagaaattcaaggctgcagaaatttgaataaataaagagccaaatgttaatagccaagacaatggacatttagttaatgctggaatgagttaagactttggggcactgttgggaaggcatgattggttttgagatatgagaaggacatgagatttgggagaggccaggggcagaatgatatggtttggctgtgtgtcaccaaccaaatctcacgttgaattgtaatccccagtgttggaagagggacctcctaggaggtaactggattatggggtggatttcccccttgctgttctcctgactgt

SEQ ID NO: 117315 - DNA, 625 bp, Homo sapiens
ttaaagttgaatctgcttatctgacatgtggaactacgtgatgtattcagagtgcttaataagacttggtttatgtaagtgtccatgagtgtattagtgacagacagaaggagatggggccagaagataaacagaaaaataaatgttagtaatagtaaataaattcaamtactactagaggacatttcattaaaagcccttgacaagacaagcatacagaacaatcagcttaaactgggagggtgaataaatttattttctctctctttcccccaggatgtaacagtggacatctgtggaaacacagcttgtgggaacactggagtctaacctataagtagtgttacttctgcttgctcctctaggacaccttaagtggactttgaggaaattttgtgtaagtagtagatactactctaaattagtgtattttctcacttgccaggcactattttaagtgtaattttatttatttcacttagtttaagaaaattagcgttctgcgggaggaagttctgtatatatggtggtaagatagtaatgatcaatttaatcgttcttcagaaaattagccaataaaatgttgaagatgttacaagtcactgaaacgtcactgggaacattt

SEQ ID NO: 117316 - DNA, 625 bp, Homo sapiens
ttaaagttgaatctgcttatctgacatgtggaactacgtgatgtattcagagtgcttaataagacttggtttatgtaagtgtccatgagtgtattagtgacagacagaaggagatggggccagaagataaacagaaaaataaatgttagtaatagtaaataaattcaactactactagaggacatttcattaaaagcccttgacaagacaagcayacagaacaatcagcttaaactgggagggtgaataaatttattttctctctctttcccccaggatgtaacagtggacatctgtggaaacacagcttgtgggaacactggagtctaacctataagtagtgttacttctgcttgctcctctaggacaccttaagtggactttgaggaaattttgtgtaagtagtagatactactctaaattagtgtattttctcacttgccaggcactattttaagtgtaattttatttatttcacttagtttaagaaaattagcgttctgcgggaggaagttctgtatatatggtggtaagatagtaatgatcaatttaatcgttcttcagaaaattagccaataaaatgttgaagatgttacaagtcactgaaacgtcactgggaacattt

SEQ ID NO: 117317 - DNA, 661 bp, Homo sapiens
tcaaattcaatttaaataactcaaagtcacacttcgtatctgatgaatgtatctatagttctatcattgtatgcacagtcctgactctaaattctttgtacattttccaaaatttaaattcacattcaatggataaatatccgctgcaatgtatattacttgctcaagcttcactagagaccagtttggaaaatttgggaaatamttttttttccaggtccttctttctctcttataataataaattatcaactgcatagctgcacagtcacatttcacgtatgttagactttgatgatcagcctctaactaatgatcattaatgataagcctctaaatcaattatggttagttttcatttacagatttactttactaccaaaaaataaaaacaaatgttcttacgttcattaaagttttctttaaaaattaggaaaaaaattaatgtaagtttatatgctcaatttatgttgaacaggaaactttttggctttgaaatacctagttaattcttagattttggacattctatattagtattgttgtttttttccaaacagtatatatttggatgagattgagttctcacatgtatttttaggaattaaatatagaacaattgaataattcataatataccaagtaattttagttaaaaaat

SEQ ID NO: 117318 - DNA, 569 bp, Homo sapiens
tgaacaaaacatacttgcataaagacaaagtctatagaggaaaaataaaataaggaagagggatagacagtctgagctgggaagggtcttgcaatattatacaaggtaacgaagtaggktctcatagagaatgtggcatttgaataaagacttaatgtaggcaagaagaaactgttggatttatctgtggaaaagatgggtgagcatcaagagtaacattttaaaatttaagtagctgacatatttgaagaacaagacagcagtctggctagagcagagtaagttaaaactagttatactgaatgaggttcgaacagtaatagaaggaagggggctactgggtaggtccttaacaactttctctggcggttactgtgtataagattaaaaactattggaagattttaaatagatgtgtatcacaaggtgccttcgatttttaaaaatatgacagtggctgctactgtgttgagaatagattgagaagagcaaagacaattaggaagacaaagtagattattggcaacaaaccaggcaaggcattgatagtgggcttggagaagtgatag

SEQ ID NO: 117319 - DNA, 569 bp, Homo sapiens
tgaacaaaacatacttgcataaagacaaagtctatagaggaaaaataaaataaggaagagggatagacagtctgagctgggaagggtcttgcaatattatacaaggtaacgaagtaggttctcatagagaatgtggcatttgaataaagacttaatgtaggcaagaagaaactgttggatttatctgtggaaaagatgggtgagcatcaagagtaacattttaaaatttaagtagctgacatatttgaagaacaagacagcagtctggctagagcagagtaagttaaaaytagttatactgaatgaggttcgaacagtaatagaaggaagggggctactgggtaggtccttaacaactttctctggcggttactgtgtataagattaaaaactattggaagattttaaatagatgtgtatcacaaggtgccttcgatttttaaaaatatgacagtggctgctactgtgttgagaatagattgagaagagcaaagacaattaggaagacaaagtagattattggcaacaaaccaggcaaggcattgatagtgggcttggagaagtgatag

SEQ ID NO: 117320 - DNA, 510 bp, Homo sapiens
gataaatgtctgttcaaattctttgtctttttttttttttttttttgagttggagcttcactctttttacccagtctggagtgcagtggtgtgatctcggctcactgcaatctccacctcctgggttcaagtgattcttctgcttcagcctcctgagtaactgggactacaggtgtgtgccaccacgcctggctaattttttgtatttttagtagagacagggtttcaccatgttggcgaggctggtcttgaactcctgacctcaggcgatctacctrcttcagcctcccaaagttttgggattacaggtgtgagccactgtgctcagcgttctccgccacttttaaaaagggatgagtcttttgcttgtcaggttgtaggagttctttatattttctggatactagagctttatcacatatatgatttacaaatattttctcccattcggtgggttaactgttcattctattgagtgtgcccttagatacacaaaagttttaaaatttt

SEQ ID NO: 117321 - DNA, 510 bp, Homo sapiens
gataaatgtctgttcaaattctttgtctttttttttttttttttttgagttggagcttcactctttttacccagtctggagtgcagtggtgtgatctcggctcactgcaatctccacctcctgggttcaagtgattcttctgcttcagcctcctgagtaactgggactacaggtgtgtgccaccacgcctggctaattttttgtatttttagtagagacagggtttcaccatgttggcgaggctggtcttgaactcctgacctcaggcgatctacctacttcagcctcccaaagttttgggattacaggtgtgagccactgtgctcagcgttctccgccacttttaaaaagggatgagtcttttgcttgtcaggttgtaggagttctttatattttctggatactagagctttatcacatatatgatttacaaatattttctcccattckgtgggttaactgttcattctattgagtgtgcccttagatacacaaaagttttaaaatttt

SEQ ID NO: 117322 - DNA, 551 bp, Homo sapiens
tgcagcctccaactcttgggctcaagcgagcctcccccctcagcctcctgagtggctgggattatagatgtgagccaccgtgcctactttaggtaaatttttatttacagcttttgtgacacattatccaaatgttgtcttgcaatatattcaaatacagtagtgttttgtttttggcatatttgttactaaagaggttcctstaacaacagaatgtattgaaatcattaggcagaacatattatgctttcaattgataaattagcattttggaaaactcgtatctgctacttgaagtgtgatagcttcacaatacttaaataattttttgttgcgtttggtgatgatattaacaaatgtgatttcaaaaatattctgtaatgaaatatatcaacatttagaagaactggctaacagtaaactaataattttcaagtgaccaatgcataatattataaaaccatttaaaatgaaagatagatccatgggctttaatataactgaggataaaaagttcattgatatggtttcagattccatattgcaatgaa

SEQ ID NO: 117323 - DNA, 608 bp, Homo sapiens
acctgtttcctaggagtaaggataaaccagaaatagttcagctctcaaagactggaacccagccctgagacaactcattctgactggatcaaggatttgcctctattctaactgcctgcttgaagaaaaagaaatcctctttrgagaagatagcatcatccaaagcctatataacttttcatatccaatggaaattattcaattaaaatttgccaggcataccagaaccttggataaaaggaccagaaacaaaaacaacagacagagacaatccatatccaagagttatcaggtacagactttaaaataaacataataggccagcggtggtgactcgtggctttaatcccaatgctttgggaggctgacatgggaggatcattgagtttgagtccagcctgggcaacatagtgagaccccatctctacaacatattaaaaaattagccaggtttggtggtgcttgcctgtattcctagctactcaggagactgaggtggtaggatcgcttaagaccaggagttcaagcttacaatgagctatgattgcaccactgcattccagcctgggtaacagggtgagaaccgacctcttaaaaaacaaacaaaa

SEQ ID NO: 117324 - DNA, 608 bp, Homo sapiens
acctgtttcctaggagtaaggataaaccagaaatagttcagctctcaaagactggaacccagccctgagacaactcattctgactggatcaaggatttgcctctattctaactgcctgcttgaagaaaaagaaatcctctttagagaagatagcatcatccaaagcctatataacttttcatatccaatggaaattattcaattaaaatttgccaggcataccagaaccttggataaaaggaccagaaacaaaaacaacagacagagacaatccatatccaagagttatcaggtacagactttaaaataaacataataggccagcggtggtgactcgtggctttaatcccaatgctttgggaggctgacatgggaggatcattgagtttgagtccagcctgggcaacatagtgagacsccatctctacaacatattaaaaaattagccaggtttggtggtgcttgcctgtattcctagctactcaggagactgaggtggtaggatcgcttaagaccaggagttcaagcttacaatgagctatgattgcaccactgcattccagcctgggtaacagggtgagaaccgacctcttaaaaaacaaacaaaa

SEQ ID NO: 117325 - DNA, 452 bp, Homo sapiens
aattgggttcttaagtgcaaaattgagactcaaagtcaattaagacataccttttccttggttaaaaagaaatcagaagatgacctgataatcactacaaaaataatctttcatgaagaagatggtcagaccaaggaagatatcacatttgtgaaaaggagggtattcaaaggccataaaaggcagaacttcaaaatattttaaaaagccraatgaactaaaatgttcacctgtgataaataatagcaacattgaacatttctcaagcacagagagtaatgtcccacccctgtactaagtgtgcacagtgagaaatgtcccacccctgtactaattgttggggattctaaaatgagtaagacaggatccttgatctcagggagtttcattatgtcatggcggaaagagatcaaccatccacagaataaagcctccagtaagaagtcatgaga

SEQ ID NO: 117326 - DNA, 430 bp, Homo sapiens
ttgttacttatggagtcctcaaaagaatggggactgagatgagggagactatgtccaggagacaagtggccatgggtccttttcagcagtcaggggccctcttcgtctgtgcccatttttccttcattcatcaggaacaagacccatgaatgtcctgamttgacatgtgatgttctttccaccacaatccatgctgcctccctgagtggagaaaccactcccctcttcaaagagggccttttgtttgatcaaggctgttttcactgtgtcatggtctcagacagctttcttttgtgttctgtttaaatacagaatgacagtccactaacacgaagtctaaaaactttggcttatctttttgtaaaagctactgtatcaaatctgtcctaaaaatagcagaatgacccattctgtatgtacaggggaattc

SEQ ID NO: 117327 - DNA, 646 bp, Homo sapiens
cttgcctccaaaataatgattatactcttcataattagatatatagccatcatttcccttcactttttctgagaaagcagtgctgcggtcttcctaatatgttatctctgtaatattttcataatgtctttccctttgtattttacttctcttgctcagcctattgaaaatgggaaattttagaggttcagagtcaaggatcatagaatattctgtggcgggaaggactagagagactatctattgcaacattttcattatatttgtgtgtaaattgtggcttagagagtgaaagttaactttcaaaggccctacagtgagttaaagttatattttttataactagcatgttctgatttttaatccaagatttattctctacttattgtttgacatcagcatgagttttaagcaaagaaattggatctgctttaaattaaaaaccaaccaaccaaccaaccaacaatcctttctgtwtttaaaagatctgggagtttgtcaagagaaatatagaagggtttgaagcttggaatgaattatatcaaattccttacagttctctaaagtgccatataccgcattttttcatgtctttttgccatttcttgtgacatctttcttctttttttacacctagtagccatcc

SEQ ID NO: 117328 - DNA, 521 bp, Homo sapiens
tctgtctgatgcagaaagtagttcttaacttttggtggattatgggctgctttgatcatctgatgacagctctctgcccacgtaagtatacaaggcatacccacaaagtgtttacctacaatttcaagtgattcctggaacactttaaatccacccatgatcttttgtcctgaggttctagtgtagcaatttagcataaatggygttttccaagccccgctgactaaaaaacagaattctgattttaaataaaaatccaaaaggaaaaagtacatgatttcattcagggcttcaaatacttgtgggagaagaatttaaaataggcatagaggaacaaagccatcttgatataagatgtttatattgaaatgacttttaaaaataaacagcatatgctgtgcatgtttttcatgatttttcagtaaaagtgaagaaaaataactatttataaatgaactattaacttttatatttaacaaaatgtagaaatcatttaacagaaaatattagaaaaaaaggtc

SEQ ID NO: 117329 - DNA, 559 bp, Homo sapiens
aatggttcatggcattttaaaaatcattaacatgagcagaaatatatttacataaattacattgtttctttcaagctattattaactagaacatacatttcaatagacttctggaaagaattatagtatgttccagtaagtatayagcaaatccttaagaactccttccatattaaatgtctcatactctttattatttgttatctgagaaatactagctcatgaattattcataatatcagccagatctgttacatcaggtgtcagatgtatctagaggtagaaagtgctgagttttacatgaagtattcattaaacttagtgaactcattaaagtatgttaattaggtagtagacaaagaaacttggtatttggtagagattgggccctgttaataccttgctttgtgctaataccttggctgcaatttttttcccccttaatgagcacagggaaaagctgattattccaaacgcagaaaaagaaaaaatcacatgtgttacgtgttggaaaaattgccccaggtgacaaaaagaaacacataccaaaggaactggc

SEQ ID NO: 117330 - DNA, 561 bp, Homo sapiens
tttcacaatatagctatctatttataaaacaaagcacatttttagaaaattcttataatagaatttctaattctcaggcctaagttcaattggcttgaatgctagtcaatgtagaaattcttaaatggtcagctggtgactcaggcacgaaacattaattcaaagatatcacttttatgcaaaaagtatattgttcaattcttgagttatatttgtatcttatacatgttattagaatacagtttcaaagttgagccatattcagaatacataataactgagtagtgatcacatttgttttaatacattctacacctcctcatttatttaaaaataaataattatacaatagataartgatgtcatttctatgttcttgtgtgtgaatatttttaatttaaattgccaatttttatatacagtgaacaattcattcactacttaatactctgccactaaaatataattagtaatatgttgaaacagcttaagaaagatgtctcaaaatacaaaagaatcctgagagtttttatcagaaaaaggtgtcaaattttgtcaaat

SEQ ID NO: 117331 - DNA, 542 bp, Homo sapiens
ctttttcatagtagtgctttgtaccaattgagaatctgggcttaaaagtcagaatgtaacagaggttcaaatactgactttgacaacagctataattaaataatataatgtcttcaaagtgtttaatgcaattcttttcatataatacactcaaaaaacaggagctttcatcgatctaataatactgcaaatttcttgaggcaaagattttgctttatttatgtctgaatcctcagtacagtgttgmcatataataaaggcttaataaatgtttattaaataaatgaatgactaaaaaagaatctgtccaatgggtatggtaatcatctaattccttaataaatttggacattataagcaagtgatctagataaattcatgtaataacaatatgcaaaataatagctactatttatcaagcatttattgtatgttaggaactattaaaatgctttggataagctatcttatctgaccgtcctaaaagtctgtaaaatctgtgaggcagctatttccatattttttattttaagtaaagataa

SEQ ID NO: 117332 - DNA, 397 bp, Homo sapiens
agagagagaggtagatagatagataaatagagagagatcttcagcaggtcctcaaatgatcataccacctgctcttctgggcaccccattttacccttggattggacatagtcattgattcaggaatgaaacttgtgggtgagaggaaagaggagatgaactggtcagctcgtgttaataaaaacactcaactatacacattgttggtcttcaatactccacccctccaaggccaagaagtttgtgaaccacacagctctgctttctgctataaagagtgctgagttaagcttggttaagagctgccaccaaataaatgcttggaatgagttagggtgattgaggaaaagtgattcacctgygccaagaggctctcctgggtgatgtctggtaggag

SEQ ID NO: 117333 - DNA, 331 bp, Homo sapiens
caggctaaagactgctttctaccgctctagaagcaggaggaaaaaaacaacaaaaaatgttaaactcatattccctgctgggagtgagctcaaactccataaaggagttacctgccttccatcgtcatggaaacaggaaatcttgcattccttgttggaatcaagtaaaactccaaaaaacaaaaaggtggggggagttstacagcaaaataaactttagattttgaccagatttggggagatcagggattctctggagggtgtactcccagacctcagcaaattgtcctgttggtttgagcataagattagctcatgctggtactaagca

SEQ ID NO: 117334 - DNA, 553 bp, Homo sapiens
cggcgcgcgggcccagtgtgggactgcggctgggagcccgggccctccgggagtgaagatacctttggaggtgagacggcctctctagcgcgttgacactgttgatggaagggattaaaggggtatcaggttattttagtttattgttgaagatgatgactgccccctccccgatccgcataccgtcctcactttcccaccccaaccctagacccgacaacaccgttcagccctttgccccgggcagcggaaatggttagcttcmtctaggagtttctgctgaggaaggcgcaggcaaccctagtcggcttagagagagacaaccgcacgcgatcaccgagcacgatttctcccaacaaaaaaactaacaataatagcgatccacacactcaagaggtctcaaacctccgaagttttgccccgagtcttgtggccctggcagaggtgacaagggcatttgggaaagacagagaaaaataaattcgctccagtgactgtacacggggcatttgaggctgtgagaaaacgagttgcttttctgcttgagtgataa

SEQ ID NO: 117335 - DNA, 423 bp, Homo sapiens
gctgaccaacatcacgtgccgacatttctaaaggcccttctcattactttagggctggacagtagactgcctgtgtttcacaagtacaaggaagttacagactttcttgaaatgcctcattagacatttggcagtayagtattgccttcagaaagcacaatttctgctttctgactcttcacatatttatccccttttggtctaaggaaaatattttttcctttaggttgtgggtgctgtggaaatttagagtttcctaaactctaaagtttggggagatttactatctatgaacatgcacataatttaaaatttaatagctacatgtcattctggtttttccttattctgtttttaagagagtctccttgccaaaatatattatttcataaaaataatggaagagttcctcattataaaagc

SEQ ID NO: 117336 - DNA, 423 bp, Homo sapiens
gctgaccaacatcacgtgccgacatttctaaaggcccttctcattactttagggctggacagtagactgcctgtgtttcacaagtacaaggaagttacagactttcttgaaatgcctcattagacatttggcagtacagtattgccttcagaaagcacaatttctgctttctgactcttcacatatttatccccttttggtctaaggaaaatattttttcctttaggttgtgggtgctgtggaaatttagagtttcctaaactctaaagtttggggagatttactatctatgaacatgcacataatttaaaatttaatagctacatrtcattctggtttttccttattctgtttttaagagagtctccttgccaaaatatattatttcataaaaataatggaagagttcctcattataaaagc

SEQ ID NO: 117337 - DNA, 591 bp, Homo sapiens
agaacatgtgacgtttgcttttctgtgcctggcttatttcacttaatgtcctccagctccatccatgttgttgcagatgacaggatctcattcttttctatgactgattagtactccattgtgcattgtgtatatgtaccacattttcttatccattaatctgtcaatggacacttaggttggttccaaatcttggctattgtgaacagtggtgcaataaacatgggagcacaggaaactcctccatagactgatttcctttcttttggttatatacctagcagtgggattgttgaatcacatggtagctctatttttagttttttgagaaatctacaaactatcctccatagtagctgtactaatgtgcattcccaccaacagtgtacaaagrgtcgcttctctccatatccttgccagcatttgttcttgcctgtcttttgaataaaagccatttttactggagatatttcattgcagttttgatttgcagttctctgatgatcaatgatgttgagcaccatttcatatacttgtgtgccatttgtatgtcttcctttgagaaatgtctattcagatcttttgcccatt

SEQ ID NO: 117338 - DNA, 445 bp, Homo sapiens
ctgaaattttattacttagagcaaatgttgccaatttattacaggatctgtcatggtaaagtatacaatataatctttactcataacctaacattttactgataacctcaaacatatgaatgagtggctgtctaaaaaactacactgtatgcatcccttatatatgaatagagcattgggcaaattcagattttcagagacctgaagtctaaacaatttktggggtaccctcttttagaaaattaacatgaaattgcaagatggccgaaaaggaacagctccagtctgcagctcccagcgtgatcaatgcagaagacgggtgatttccacattttcaactgaggtacctggttcatctcattgggactggttggacagtgggtgcagcccatggaggatgagccaaagcagggtggggcatcacctcacccaggaagcacaaggg

SEQ ID NO: 117339 - DNA, 619 bp, Homo sapiens
ttaatgatatataaatgtatgaacaaaactatatgaaacattaatcaacattctatagagttcgagagagtaagagaacaaatgcaagtgtggaaaaactaatatttaataaagttatatgagggagtatatgggtattttcttgtacaattcttgcagtaggatatgstttgaaattgatcaaaataaaaagaaaattataatggaagccatttaaattcaatttgaaaatgatgatcagcaaattgctaagtggaaagaataagacaactgctgctttgaaacagcttatggggagcagtggaataaactaatgaactcaggaggtcccgtttggtattacacttggttaattgagtaaaaaacagaacaacaacaaaaaaaatcttaagtaacatattttaacgttagcctgaacaattttcagtttcttctttgtgaacacaatggtataataaacaccacctatgtcaaacacatggatcatttggcacaaaattcttttctccgatttccagtttcaaagttatgaatgtactttctctctgaaaagagttattttcccttaacttttattatggatctattcagcacaaattttcctaaatcctctttgaat

SEQ ID NO: 117340 - DNA, 552 bp, Homo sapiens
actccacaggtttttctttgtgctgctttacagagatttgatgaacaggtgtgtttggtcctagccatctgctataaaacgttttatagtcttcaatcatattcctttgtttttttagcctgaaggaacgacattctaatctttttaatcagtctggttattgccacttcaatgtcacccactcacttttaattgcccttctcacaccttccccatgcagttatatttttctgcaggcaaaacaactgaaatagaacttatttctccaagtctctttatacwggctaaggtgcatttacagtttcatttcccagactcagataatttctgacagctttgtttgcagctgtacttcagcttgttagttcaagggacaaactgtaggacttttcttgaagcagaaatggactcttggaaattaccattttataaatataaaatataatttagattttctcccctaaaagcattatgtttcacatgcatacaacaaaattgaacctctatggttcctaaacattcagaatctacttatgatacttttaattctat

SEQ ID NO: 117341 - DNA, 590 bp, Homo sapiens
aaaatctgctgggtaactactaaaataatgaatattgaagcactggcattacagtcaaatcaactgtagctacttacaggaaaagaccattaaaagccacaaagcctagaaactaactagatggaagcaatactaaggaagttaatctgaagtcatacttgtrcattgaagaaattatattcttcacatagcatagattgtgaacatttataagtatggacacaacaacaactaactactgccttctcttaagattctgaagagttagggaaggaaggagggatgttaggggggaagggctttacctaaggagagaagctccttgcttcccttgctctctcactccttccttcttgaacttcttaaagccctgccttctaggatatttctctctccaggccctcctccagtctctctaatcaaattgctttctctttttagaactgcccttctttcgtttctgtgtatgttgatgctgctcaggtaccaacatcggtcttctgctggtggccctctaccctctctggatggtctgcttgcctctcagggtattatctctctgccaatgactgctactcagagctcaggcc

SEQ ID NO: 117342 - DNA, 586 bp, Homo sapiens
atcttgttccaggaatctctgctgcactgtttgcctccttgatcaaggtgttaattaagtatgttatgataaaaaccggtccttttgctagagaaagtttgaggaaaatctcacaacagacggctttaagcattcctcagataagatataaggaatccaggagaaaactggatataaaaatatattgaggcagtagaaagtatcattatctgcaaatgaatatttgtggcatggagaagagccctgtaacattgggctaatagagtaaaacctaagactttccaagaagctttagaaccctctatgagaaaataagcaggccacccaggcccaggtggactaaagggatcttatttttttaaggtcaaaattaatagggaataagccaaaactattttctgagatgctagaataatattttttccatttaaagctacttctagttcattagaactcattagagaatacttgatataaagttgattatgtatcagatatataaatctcacrctgaaacataaagtttctctaatagtgtatgccaaaaagtatatatgaatatggttccttttcttctgtaagaccc

SEQ ID NO: 117343 - DNA, 627 bp, Homo sapiens
ctcctttctgagtacacactacaagttaagccatatcttaaaactgtaacaattatacacaaaagcaaactaatgtagtaggcacattcatcttgccctctcaaatcaagatggttagaggatgtgtgtggtgcctatgtgtatacagtcactctgagactatgaggcatagaatgaaaataattttgttataatctacctcactcatatacacattcatagttgccttgcccagatactgagaaccattttggatcaacacaagtcatttgcattattaattgccaatcatgatgatgctcagaattgaatcacttccatccatacctagtgggaaacagttcttttgccttttaaggtcattagattctgttcctaaagcttgaaagtcacagtggcccttcactgtttgttcagctgatcacgaatcagaggtaatgacatttacattgctaataaactttgcatcaagtgtgttaactcttggtttggtatagtttcttytacctgagaaaagcttatttgacctcctctatgaaatctgaacattctcttacttatatatccataaacacacactcatattaaatctagaagtgcatgaaattccctaattatttccatatg

SEQ ID NO: 117344 - DNA, 602 bp, Homo sapiens
gagccaccaaacctggcctgatttttgtatactatacgagatgagggtctaatccaatcttctgtgtaggaatatccagttttccccacaccactgattgaagagactgtcgtttttccattgtgtgtttggggtacctttgtcaaaaatcaattgactggaggcagagcaagatgactgactagaagcctccactgatcacctttttcataggaacaccaaattaaacaactattcacacaaaaaaagcrcttttacagtagcctaaaattaagtcagagatcacagtgcctggttttaacttcatatcactgaaaggggcattgaacagggtaaaaaagacagttttgaattgccaaggccaatcccccccatcctccagcagtggccatatggtgatgagagagaatttgtgtactggaggagggagagtacagtgattctgggactttgcactgggactcaatgctgccctgtcacagtggaaatcaacaccaggaagaacttagccagtgcccacagtggaagtgtatagaccagccctggccaagaggaatcagctatcccagtggtcagagcttgagttccagcaagccccacca

SEQ ID NO: 117345 - DNA, 457 bp, Homo sapiens
gctgagagacccatagatggttcacatcacaggactctgtgcagacaacccccccatgccagtccagaaccaggaagtcttgctggatggctaggcccagaagagagataacaatcactgcatcttggctcacaagaagccacatccataggagtagggggagagtattacatcaagggaacacactgtgggacaaaagaatctaaacgacagccttcagccctagaccttccctctgacasaacctacccaaatgagaaggagtcagaaaaccggatctggtaatatgacaaaacaaggctctttaacacacgtcccctccccccccaaaaaaaaatcacactagctcaccaacaatggatccaaaccaagaagaaatccctgatttacctgaaaaagaattcaggagcttagttattaagctaatcagggagaaaccagagaaaggcgaagccca

SEQ ID NO: 117346 - DNA, 548 bp, Homo sapiens
tcattaacccaactctagcttgttccaaaacatggagcacagaacattgctgcctgtaacccctggaatggcacaagattatctatttatttatcctttaatcacagctggaggcctcagatatgaatattcaggattggtgaaagaactcaacaatttgactgagtgtcataattgtggcacagggaggaaggaaggacagcataccaagcccttaatcacacgctacccagataccagcataaggcccgacattctagaacaggggccagctcatggcctacttttctttggccggtaagctaagaatggtttttacatctttaaattgttgtgaaaacaaaacaaaaaacaaagaaaatgccagagacctatgtgacatgcaagcctagaatacttactgtcaggcctctgagcccaagctaagccatcakatcccctgtgacctgcaggtaaacatccagatggccggtttctgccttaactgatgacattccgccacaaaagaagtgaaaatggcctattcctgccttaactgatgacattat

SEQ ID NO: 117347 - DNA, 548 bp, Homo sapiens
tcattaacccaactctagcttgttccaaaacatggagcacagaacattgctgcctgtaacccctggaatggcacaagattatctatttatttatcctttaatcacagctggaggcctcagatatgaatattcaggattggtgaaagaactcaacaatttgactgagtgtcataattgtggcacagggaggaaggaaggacagcataccaagcccttaatcacacgctacccagataccagcataaggcccgacattctagaacaggggccagctcatggcctacttttctttggccggtaagctaagaatggtttttacatctttaaattgttgtgaaaacaaaacaaaaaacaaagaaaatgccagagacctatgtgacatgcaagcctagaatacttactgtcaggcctctgagcccaagctaagccatcatatccccygtgacctgcaggtaaacatccagatggccggtttctgccttaactgatgacattccgccacaaaagaagtgaaaatggcctattcctgccttaactgatgacattat

SEQ ID NO: 117348 - DNA, 732 bp, Homo sapiens
tggcttgtttttagtctttgcctgttgctaataaagctgttatgaacattcttctacagattatttcttaacgttaagtttttatttctctgaaacaaaggcccagtagtgtaattgctgggttggacagtaattgcaagcttgaatttttaagaaaccaccaaactgttttacaaagtgactggaaaattttacatttccaccagcaatacgtgagtgatccagtttttctacctttttttaacattacgttaatctatgtagatggtaaaattagtaaataaataaattacccacataagaacagcctgtaaaaagccagttcaaaaagtccaaagggtaaaaaggcaagaggtgtataaaaaagccacctcagcctctctctgtgtctcagctcacagggcttccaggtatgcaacaaatgctttatacttctgaaaagtacctgatataccctaaggctttttccagctaaattaaagtaaataaatcttttttttttcccaaaataggatcatggcctataaaatgcttcaagtagtcctgtgctcaacattgcttatcggtaagagcctatttcttttttatttatcatrtctcctacagccatcaggttgataattccttttgtcttcttaaagaaatgaacaaacacgtttttatccataggcctattctatagcactggggaaaccaaactattgtagaaggctgtggttttgaacatgttaa

SEQ ID NO: 117349 - DNA, 732 bp, Homo sapiens
tggcttgtttttagtctttgcctgttgctaataaagctgttatgaacattcttctacagattatttcttaacgttaagtttttatttctctgaaacaaaggcccagtagtgtaattgctgggttggacagtaattgcaagcttgaatttttaagaaaccaccaaactgttttacaaagtgactggaaaattttacatttccaccagcaatacgtgagtgatccagtttttctacctttttttaacattacgttaatctatgtagatggtaaaattagtaaataaataaattacccacataagaacagcctgtaaaaagccagttcaaaaagtccaaagggtaaaaaggcaagaggtgtataaaaaagccacctcagcctctctctgtgtctcagctcacagggcttccaggtatgcaacaaatgctttatacttctgaaaagtacctgatataccctaaggctttttccagctaaattaaagtaaataaatcttttttttttcccaaaataggatcatggcctataaaatgcttcaagtagtcctgtgctcaacattgcttatcggtaagagcctatttcttttttatttatcatatctcctacagccatcaggttgataatwccttttgtcttcttaaagaaatgaacaaacacgtttttatccataggcctattctatagcactggggaaaccaaactattgtagaaggctgtggttttgaacatgttaa

SEQ ID NO: 117350 - DNA, 466 bp, Homo sapiens
tggttcattaattgttaccaatgtattayactaatgcaaaatgttaataggagaagctatgtttgtaggaataatgtcatgtgagaactctgctcaatttttctgtaaatttaaaacttataaaagtaaagtcttattttttttaatgacagagagaaagtaacactttgacattacataactatagcagtgccagcaccgcttgcctaccagaatgttttactcagagatagcatgatcatgcacttgatttgcccaggatgatccagtttatgtctgttgtccaggtgtaattattaactgagcctccctttgttctcagaagttttccattcccaatgataaattgcatggtcactgtacatagaggggaaaagagaagtaaaatctttttaacgtatgtctttgactgtgccccttttttttaagagtctcatctaagcctcataatgttcctatgaggaca

SEQ ID NO: 117351 - DNA, 466 bp, Homo sapiens
tggttcattaattgttaccaatgtattacactaatgcaaaatgttaataggagaagctatgtttgtaggaataatgtcatgtgagaactctgctcaatttttctgtaaatttaaaacttataaaagtaaagtcttattttttttaatgacagagagaaagtaacactttgacattacataactatagcagtgccagcacygcttgcctaccagaatgttttactcagagatagcatgatcatgcacttgatttgcccaggatgatccagtttatgtctgttgtccaggtgtaattattaactgagcctccctttgttctcagaagttttccattcccaatgataaattgcatggtcactgtacatagaggggaaaagagaagtaaaatctttttaacgtatgtctttgactgtgccccttttttttaagagtctcatctaagcctcataatgttcctatgaggaca

SEQ ID NO: 117352 - DNA, 466 bp, Homo sapiens
tggttcattaattgttaccaatgtattacactaatgcaaaatgttaataggagaagctatgtttgtaggaataatgtcatgtgagaactctgctcaatttttctgtaaatttaaaacttataaaagtaaagtcttattttttttaatgacagagagaaagtaacactttgacattacataactatagcagtgccagcaccgcttgcctaccagaatgttttactcagagatagcatgatcatgcacttgatttgcccaggatgatccagtttatgtctgttgtccaggtgtaattattaactgagcctccctttgttctcagaagtyttccattcccaatgataaattgcatggtcactgtacatagaggggaaaagagaagtaaaatctttttaacgtatgtctttgactgtgccccttttttttaagagtctcatctaagcctcataatgttcctatgaggaca

SEQ ID NO: 117353 - DNA, 466 bp, Homo sapiens
tggttcattaattgttaccaatgtattacactaatgcaaaatgttaataggagaagctatgtttgtaggaataatgtcatgtgagaactctgctcaatttttctgtaaatttaaaacttataaaagtaaagtcttattttttttaatgacagagagaaagtaacactttgacattacataactatagcagtgccagcaccgcttgcctaccagaatgttttactcagagatagcatgatcatgcacttgatttgcccaggatgatccagtttatgtctgttgtccaggtgtaattattaactgagcctccctttgttctcagaagttttccattcccaatgataaattgcatggtcactgtacatagaggggaaaagagaagtaaaatctttttaacgtatgtctttgactgtgccccttttttttaagagtctcatctaagcytcataatgttcctatgaggaca

SEQ ID NO: 117354 - DNA, 587 bp, Homo sapiens
atttattttccttttttttttcccgtcctatccgggtgtgtgtcatgattactttttgtcattaaaaaattgaatcatgtcctgagccgccaatgtgtcttctttttctcaagagttcagcaaccccctcacccccatgttccaagacagagggatatatattttaattatgacckcctggctgggtgcagtggctcacgtctgtaatcccagccctttgggaggcggaggcaggtggatcacttgaagccaggagtttgagaccagcctggccaacatggcgaaaccctgtctctactgaaaatacaaaaattagccgggcgtggtggcgcacgcctgtaattctagctactcaggaggctgaggcaggagaattgcttgaacctgagaggcggaggttgcagtgagctgagatctcgccactgcactccagcatgggtgacagagtgagactctgtctcaaaacaaaataaaacaaacaaaaattatgacctcatggcaacatttccaattctaatttactaatacagattttttccttaacttgcttaattttatagttgtatacccttttctcttacattgta

SEQ ID NO: 117355 - DNA, 552 bp, Homo sapiens
tctcctgcctcagcctcctgaatagctgaaattacaggtgactgccaccatgcccaactaatttttgtattttagtagtgatctgctctccttggcctcctaaagggctgggattacaggcatgagccattgcattcaccccccatatttttttttgaagtaaatctcatatatatcatttctatttcatttataaataggtcagcaaaactctaaaatttaagaattccttttcaatatttaatgtttaactatccatctatctaccatctatctacctaaaaaccgcaatacctttatcaaacttagacattaatcatttcttaatatgataaaacctccagcaaacattcaawtgtctaattatacagctgactctgtttgggtactttagagtccctgtcactgaagctctctcaactgcagtccttaaaatagggaaatacatctgtgctttgatggtggattcctccttcctccagcaacatggaatctggtgaagcccttagtatctctttgctgaggtctgttagccccatgagagacctcact

SEQ ID NO: 117356 - DNA, 512 bp, Homo sapiens
atcagggctcccatagcctgaaggacttttttaacatcaactcaatgaattcccatacctcaccttcaccactctgttattatacctaagatgagaaaacccttgcagagcaattcagtttgaaatctcaagctttaacaacaacaacaaaaatgctacctaaaagaacaaattcttattgargatgctaggaccttgatttgggggcatgggtatggtaaaagaggcagttcaactcccaaaatttgtgcaaaagaaaaagtaatctatacaatctgagattttataactagaaacctttctagatatttattttggattctaataattggcacagtgatgtaagtatgaggataatctattaattttcccgacatctatttacatagtgtaattttcacccagccacattgactgagttaattcatattctttcctaggagcttcaggctctggaaaatagaccgaatgtatctgtcggcctcttttccattcaagttgtatgaatctat

SEQ ID NO: 117357 - DNA, 512 bp, Homo sapiens
atcagggctcccatagcctgaaggacttttttaacatcaactcaatgaattcccatacctcaccttcaccactctgttattatacctaagatgagaaaacccttgcagagcaattcagtttgaaatctcaagctttaacaacaacaacaaaaatgctacctaaaagaacaaattcttattgaggatgctaggaccttgatttgggggcatgggtatggtaaaagaggcagttcaactcccaaaatttgtgcaaaagaaaaagtaatctatacaatctgagattttataactagaaacctttctagatatttattttggattctaataattggcacagtgatgtaagtatgargataatctattaattttcccgacatctatttacatagtgtaattttcacccagccacattgactgagttaattcatattctttcctaggagcttcaggctctggaaaatagaccgaatgtatctgtcggcctcttttccattcaagttgtatgaatctat

SEQ ID NO: 117358 - DNA, 583 bp, Homo sapiens
aaatacatacacttattgtctattaaaaattaaatcttaaatacaaggtattggcataagagaagataaaatcatcagaagttgagattatgaatatatagactaataagcttttaraaaagagggagaatgtgagtttctaacctacttgacaatttcaatttcatgaccaagtcaataaattacttggaagtatatagtgtttgttaacagcaaatgtcatttaacattttagcaaggaaaagtgtccccttggaagcggattagaaacacagaattgcaagctcctccctggacatagcaggtcatcatcacccttttcacaggggattcagatgccttgcaggtcttggatgcgctgctgggaccagcccttctcaaggggccgcctggcctctgactgcacacccaaccctgtgagtgacaccacaggctggctgcattctcggtctcttccctttgtctctggggctctccctgctgacctaacagcgtgcctcattcttttttgggtccctggagtcggactgagctgcacggctgctgacgtacccttagcctgacttgagtggaagtagccagc

SEQ ID NO: 117359 - DNA, 547 bp, Homo sapiens
ggcaaaatgggttttatagcatttgcatcaatagagcgagtcacgagcattacagagctgctgccaggcctgggcagcagagaaccaaatacagcctgcttcccaaccgacttcacatgctctcccagagaggcttgagagtcatgggcagtgacaaacgtggcttcctgcccccactcttccctccccgtattgcctggggatcgggtggtggcccatctccatgcatttctagcaccaggcaaggtgggaggaagcagggtggtcgagagctgggcagggtgggcctgagggtgstaagggtggtaaaactgcagggcatgtccacggctctgcagagctcctggggctgtcgatgatcttcagtggctttctagaccacgcttcagaaaatatggcctgcaggccacatccagcttgccccttttaaataaagttttattggaacacacccatattcattcatttccaaaaatccctatcatcagtgagctttgggggagaatatatacatacatatatatttttacaatttgtgtataatgtt

SEQ ID NO: 117360 - DNA, 407 bp, Homo sapiens
ctttgagtccggcatttctcttccagctctcgaaccttggactgcacggcagaagcaggacagggggtcagcggtggcatttggtggtggaaatgtgtgtgcgcctgttcacatgtgttgtacgtgtgcacatrtgcactgtgtgcacgtgtgtacacacgtgttgtgtctgtgaaaatgcatgtgtggttgagtgtgtgcatatgagcatgtatcctgtgtgcacgtgtctgtgtgtgacatgtgcagcaggggccgcctcccactttcacgggagagcagtgcctgataaacccagcttctcctgccacctggctactggccaatgtgagaaaccacaggtgccaagaaatcctgcaaacactcagctcccagccaaccgtagattgttctgggctgtgcgtgca

SEQ ID NO: 117361 - DNA, 407 bp, Homo sapiens
ctttgagtccggcatttctcttccagctctcgaaccttggactgcacggcagaagcaggacagggggtcagcggtggcatttggtggtggaaatgtgtgtgcgcctgttcacatgtgttgtacgtgtgcacatgtgcactgtgtgcacgtgtgtacacacgtgttgtgtctgtgaaaatgcatgtgtggttgagtgtgtgcatatgagcatgtatcctgtgtgcacgtgtctgtgtgtgacatgtgcagcaggggccgcctcccacttycacgggagagcagtgcctgataaacccagcttctcctgccacctggctactggccaatgtgagaaaccacaggtgccaagaaatcctgcaaacactcagctcccagccaaccgtagattgttctgggctgtgcgtgca

SEQ ID NO: 117362 - DNA, 580 bp, Homo sapiens
gataaagaggaagagggaggagatgcttttttgcagagtgctgggtgagaagaggcgcagagagacaaggtcatgmttagagcctcctaggggcatggatgactaaggaaggtagagaatgccctggaggcagtcacagagtcagtaactcctccttcctcccacaggcgagtggaatgtgggtagctgccgggaacagcagccctccaggaagcccagtcaaggctgagggtggtaacgttcatgggggcattggcaggtgcagatggacacatggggaaggcatgagggcagcagagagaaggacggggcacttggggatgagatcgtatggggggagatgacccaaggggctcatgttggatgatgcagcagctttgatcccctgggcttctacgctgggccaagaaccaacataagctctttgctttcctcctcttctttgtgaaatctcatccagtcctctcagcactgccatgtggcagacattcttgctatcctgcttgtcaagggaagaaattcaagctcaaggaggttaagtaactgagcgagcagcctcccccgagcatgtggaggggtg

SEQ ID NO: 117363 - DNA, 552 bp, Homo sapiens
tgtatcagaagattcaatatttatagctacaattttcctcaaattgatctgtaaaatttttttttgagttggggtctcactctgttgcccagattggaatgcagtggcatgatcatggctcaccgcagtcttgaactcctgggctcaagctatcctyccacctcagcctcccaaatacctgggactacaagtgcatgccaataggcccagctaaattttttgttattattttttttttagagactggatctagctatgttgccaaggctgctctcaaacttttttctcaagtgatcctttcacctcagcctcctgatttactgggattataggcatgagccactgagcccagcttgatttataaaatcttaatagataattttacttatcattctaatattttacttcaaaggacaaagttctgaaatcagacttagaagatgacattactcagactacttttagataacagtggactgagagtcacaagaattcttttccagtcatgaagcaatctactgactcaagatgcagtggaataaaaattaattt

SEQ ID NO: 117364 - DNA, 597 bp, Homo sapiens
atactattatcatccataatttttttacctttgcactcctgggttggttctggattttgagctcttttctcaggaaaatttacaattttctcgatttaatctttaatttttttaactaaatcttcatgagatgtaagatttatatattttcacatgccccaaaatatatttttcttttatgcctggtaataattggtctgggtaaggaaatctaggttccatgtcattctcaaagagctctgaaagtgcagatatcaaactcactgtcttaatttgggttcctcaagaaagcaggacctaagcaaaaatttaagtataggtagtttattttggtgttagacccaggaatcagaagtgagagagtggggagagtgaggttgttaagaaagaaaatgcaatgttagggtgctctatcaaagtagctgctatggrcaactgggctcaattcctccagcatattctgagaagtgtacctactacctcccagatttttccgtctggagtataggacactggagtacttaatacagaggttaccactccacattgtttgttggtttctcttaaggtgcattaaatttctccttagcactgcca

SEQ ID NO: 117365 - DNA, 467 bp, Homo sapiens
aatttctgttgtataagtcatccagtttgtggtacttcgttacagcagccatagcaaactaatacagtataaatagcaatataactaatattgatggtcagttctagctagtgtgtattgagtgaccactacatttcaggtccactacatacatcattgtcgctgtgttacctagtcaatgaaagtttccatcagagtgtggctatagaggtaaattccgggtaataaaaagatgctacctttttggatgatggggaggaaaaaaaacattcatagcagagggaatggtaaattcagaggctttgaaggggtattaacagaaaggtcagtgtggtttgattaaactrattgaggaggagaagaatacctgttgtctaggttagagataaactttttcaaaatcaggtagggcccactcaggtattctaaaatatacatggctcagcttactgatatcagcttacata

SEQ ID NO: 117366 - DNA, 623 bp, Homo sapiens
atgaagaaaatatgccaaaagaggaagagacttcctaaagaatgacaccctcaccttcacatgctgccaccacactgtcaagatttctcttccttttttgggggagttcaataagttatgtctatgtcttggttgtgttagcagtttgtactagcagactgtgactgatatggtttgtttctctgtccctgcccaaatctcatctcaaattgtaacccccacatgtcaagggagggacctggtgggagatgattgaatcatgaggaagggatttttcccatgstgttctcgtgatagtgaagaagtctcacgagatctgatggtttaaaagtggcagtatctcctgtgctctctgtgtctttccgtccaccctgtgaagaatatgccttgcttcccttttgccttctgctgtgatggtaagtttctggaggcctccacagccatgcagaactatgaatcaactaaacctctatcctttataaattacccagtctcagcaatgttctttatagcagtgtgaaaacagactaatatagtaaatgggtactgagagtggggtgttataaagataacctgaaaatgtagaagtgactttggaactgggtaaccggcagaggttggaa

SEQ ID NO: 117367 - DNA, 623 bp, Homo sapiens
atgaagaaaatatgccaaaagaggaagagacttcctaaagaatgacaccctcaccttcacatgctgccaccacactgtcaagatttctcttccttttttgggggagttcaataagttatgtctatgtcttggttgtgttagcagtttgtactagcagactgtgactgatatggtttgtttctctgtccctgcccaaatctcatctcaaattgtaacccccacatgtcaagggagggacctggtgggagatgattgaatcatgaggaagggatttttcccatgctgttctcgtgatagtgaagaagtctcaygagatctgatggtttaaaagtggcagtatctcctgtgctctctgtgtctttccgtccaccctgtgaagaatatgccttgcttcccttttgccttctgctgtgatggtaagtttctggaggcctccacagccatgcagaactatgaatcaactaaacctctatcctttataaattacccagtctcagcaatgttctttatagcagtgtgaaaacagactaatatagtaaatgggtactgagagtggggtgttataaagataacctgaaaatgtagaagtgactttggaactgggtaaccggcagaggttggaa

SEQ ID NO: 117368 - DNA, 623 bp, Homo sapiens
atgaagaaaatatgccaaaagaggaagagacttcctaaagaatgacaccctcaccttcacatgctgccaccacactgtcaagatttctcttccttttttgggggagttcaataagttatgtctatgtcttggttgtgttagcagtttgtactagcagactgtgactgatatggtttgtttctctgtccctgcccaaatctcatctcaaattgtaacccccacatgtcaagggagggacctggtgggagatgattgaatcatgaggaagggatttttcccatgctgttctcgtgatagtgaagaagtctcacgagawctgatggtttaaaagtggcagtatctcctgtgctctctgtgtctttccgtccaccctgtgaagaatatgccttgcttcccttttgccttctgctgtgatggtaagtttctggaggcctccacagccatgcagaactatgaatcaactaaacctctatcctttataaattacccagtctcagcaatgttctttatagcagtgtgaaaacagactaatatagtaaatgggtactgagagtggggtgttataaagataacctgaaaatgtagaagtgactttggaactgggtaaccggcagaggttggaa

SEQ ID NO: 117369 - DNA, 408 bp, Homo sapiens
agtaactatttgcttgctgaataagaatgggmtataccccacaccactccccaaattcaaaagtattttttttaatggatacaaaaagatgttacccagacagtgtttgcaagtgtgagaaaagggagggagtaagtccacttgctcttgaaaactggaaatcacaaccactacaccttgatcaagaagagcatctcatgcctgaggtttaagtttacctaaaatccaaatgtttcactgaaaaaaaaaaaaaccctctgggcaattccttttaagttaactgtgaatttcattttaaatcccttcatccccaggcttaatattattacaaataaaacatgttttaacccatgttcctataaaatattttttagtaacacatatatggatttgtctcagaggaattct

SEQ ID NO: 117370 - DNA, 407 bp, Homo sapiens
agtaactatttgcttgctgaataagaatgggctataccccacaccactccccaaattcaaaagtattttttttaatggatacaaaaagatgttacccagacagtgtttgcaagtgtgagaaaagggagggagtaagtccacttgctcttgaaaactggaaatcacaaccactacaccttgatcaaraagagcatctcatgcctgaggtttaagtttacctaaaatccaaatgtttcactgaaaaaaaaaaaaaccctctgggcaattccttttaagttaactgtgaatttcattttaaatcccttcatccccaggcttaatattattacaaataaaacatgttttaacccatgttcctataaaatattttttagtaacacatatatggatttgtctcagaggaattc

SEQ ID NO: 117371 - DNA, 408 bp, Homo sapiens
agtaactatttgcttgctgaataagaatgggctataccccacaccactccccaaattcaaaagtattttttttaatggatacaaaaagatgttacccagacagtgtttgcaagtgtgagaaaagggagggagtaagtccacttgctcttgaaaactggaaatcacaaccactacaccttgatcaagaagagcatctcatgcctgaggtttaagtttacctaaaatccaaatgtttcactgaaaaaaaaaaaaaccctctgggcaattccttttaagttaactgtgaatttcattttaaatcccttcatccccaggcttaatattattacaaataaaacatgttttaacccatgttyctataaaatattttttagtaacacatatatggatttgtctcagaggaattct

SEQ ID NO: 117372 - DNA, 736 bp, Homo sapiens
atttgtaggcatcctatcttgttccattgtttgtctcttcttctagtaaaactacactattttaatttwaaaaaatacttcatatataattgtgttaggactaactctcccacattgtacttttttcagtaatttttatcaagatcatgttaaatttgtaaattaacttaaagaaaattgacacattaacagtgttgaatacttctatccatgaatatttgttcaattctagtttaatgtctttctaaggtgttttacatattgcttagatgggtcatacacattcttaggtttatgactctctctctcatatatatatatggctttataggctataaaaatgaagtcttcttatttattttgtcttttgttagttataaatgtacatgcatagctataatatatagttacatagttttatacatttagttagcattatatgatacacaaaattcattgtcttactttatatattaattttatatcctgctatttgcctaagttattttacttttactttaagtagttttttaaaaaattctttgttatatgtttacacaattatgttaaaccaaaaaaataatgattatacttcctttctaatccttgttcctcaaatacatttctcatgcttattttgattgccttttatccctaacatatattattatatagttgtggcaatagtggacatctttaacttgtttctgattacagcaggaaataaacctgtctt

SEQ ID NO: 117373 - DNA, 458 bp, Homo sapiens
gcttctcagcctcagtcctggacgtatgccccattgccctaaggttgtcccaaagaggccaccattagacctcaccttttatggacaggtgggagatgtctgaacgcaaccacatgttgcccrgtgacaggggctgggctgaccaggacacggagagtgacttgccttctggggctgagccagtcactcatactcccagcgtagccctggagcttcactgcaactgctatgttacaggaagttgtaccagcagctctacactaaggtgtatagtcggtgaccactttaaagaaagactcattagaaagaggcattgtttggggaggccaacaggccagctgttggggaccatgccagaggtactgtgtcaaggtacctggcttgatgcttacttcccattgtctgtttcttgagtttattttgcgccatctgccttcttccacctgatttggaattcc

SEQ ID NO: 117374 - DNA, 458 bp, Homo sapiens
gcttctcagcctcagtcctggacgtatgccccattgccctaaggttgtcccaaagaggccaccattagacctcaccttttatggacaggtgggagatgtctgaacgcaaccacatgttgcccggtgacaggggctgggctgaccaggacacggagagtgacttgccttctggggctgagccagtcactcatactcccagcgtagccctggagcttcactgcaactgctatgttacaggaagttgtaccagcagctctacactaaggtgtatagtcrgtgaccactttaaagaaagactcattagaaagaggcattgtttggggaggccaacaggccagctgttggggaccatgccagaggtactgtgtcaaggtacctggcttgatgcttacttcccattgtctgtttcttgagtttattttgcgccatctgccttcttccacctgatttggaattcc

SEQ ID NO: 117375 - DNA, 525 bp, Homo sapiens
ggctgagagaagtagggaagcctggggctatgggtgaaggctggctatgaaaacaccaggggggaaggagcctgtctctcctgatcattaattatacatcctgttgggtgctggagctcagctgtgttttgtggcagcacatttgtgttttggaaaatactggtgtattggaacaaagggagaaatatgaaaaccatcattctcttcgtcattctctggcttctccggaggcctgcaggtgctggtcggagagttttctttggaattaccttctcagccgtagaggtttcttcttatttgttaaggaggcaaacctcccaccttccagagaagccctcaggttaagcaaagccctatacaccagatccctgactagccttcctgctgagaacagcttattcctggagccttcaaattcccacattccctctctccrtccttctcctccacctcccccaacagtctcgggaattttgttccccggtttactgagattcagcgactgtctttaggggaaagatagct

SEQ ID NO: 117376 - DNA, 568 bp, Homo sapiens
gtttgaattatgcagttttgaaaaaaacaaaaataataaacagaagacatgtcactagtgtgaatcttattgcagaagattaaggatctaggaattagcatattagcattttacatacatctaargttaggtaattgaatagccattaaattaaccatttcctgccacattatgtataaaaagaaaaatgtaaattgaaagaaatatcactggttaaaaagtttttatctatgttaagagattcagttgaccaaatcagagcaatttgtttcagatgtatattgttaaagatcagctaagtcagaataaaccagtttactttaattcttttggtcctaaccggtaggtaaaaaatccttgagagtttcatttcttttccttttttttttagtcagtctcactgtctcccaggctggagtgcagtggtgtgatcatagctcactgcagccttgacctcccagctgcaagtgatcctcttacctcagcctcccgagtagatgggactgtaagtgcgctccacgatgtctggttaattttttaaattttttttgtagagttggggtctccc

SEQ ID NO: 117377 - DNA, 568 bp, Homo sapiens
gtttgaattatgcagttttgaaaaaaacaaaaataataaacagaagacatgtcactagtgtgaatcttattgcagaagattaaggatctaggaattagcatattagcattttacatacatctaaagttaggtaattgaatagccattaaattaaccatttcctgccacattatgtataaaaagaaaaatgtaaattgaaagaaatatcactggttaaaaagtttttatctatgttaagagattcagttgaccaaatcagagcaatttgtttcagatgtatattsttaaagatcagctaagtcagaataaaccagtttactttaattcttttggtcctaaccggtaggtaaaaaatccttgagagtttcatttcttttccttttttttttagtcagtctcactgtctcccaggctggagtgcagtggtgtgatcatagctcactgcagccttgacctcccagctgcaagtgatcctcttacctcagcctcccgagtagatgggactgtaagtgcgctccacgatgtctggttaattttttaaattttttttgtagagttggggtctccc

SEQ ID NO: 117378 - DNA, 568 bp, Homo sapiens
gtttgaattatgcagttttgaaaaaaacaaaaataataaacagaagacatgtcactagtgtgaatcttattgcagaagattaaggatctaggaattagcatattagcattttacatacatctaaagttaggtaattgaatagccattaaattaaccatttcctgccacattatgtataaaaagaaaaatgtaaattgaaagaaatatcactggttaaaaagtttttatctatgttaagagattcagttgaccaaatcagagcaatttgtttcagatgtatattgttaaagatcagcyaagtcagaataaaccagtttactttaattcttttggtcctaaccggtaggtaaaaaatccttgagagtttcatttcttttccttttttttttagtcagtctcactgtctcccaggctggagtgcagtggtgtgatcatagctcactgcagccttgacctcccagctgcaagtgatcctcttacctcagcctcccgagtagatgggactgtaagtgcgctccacgatgtctggttaattttttaaattttttttgtagagttggggtctccc

SEQ ID NO: 117379 - DNA, 431 bp, Homo sapiens
acttggagtattcccttcctgcagcaggaagagccaccaagagtttatcgtgttcagtccttttagtcacctaatgcccacaggcaccttgacaccatacaaagaacccctctggggaagccaacaaccccaaaacccgtgcaacccttgcaccytctgcagccagcccttggtagtggccttactgtactctccctctccatgactcagtttgcctccaataagccctggggcctcaagttcagactcacccaaccagacagaccagaagtgagcctctgccctgacatcttcaggcactcttttgtcaactactcacaaggatttatcagataggaagggaaaaggacagaaagaactgtgggataaggaaggctctgaatgtcagaaaagggtctgagtaggatgatttgagactgaagaagttacgt

SEQ ID NO: 117380 - DNA, 431 bp, Homo sapiens
acttggagtattcccttcctgcagcaggaagagccaccaagagtttatcgtgttcagtccttttagtcacctaatgcccacaggcaccttgacaccatacaaagaacccctctggggaagccaacaaccccaaaacccgtgcaacccttgcaccttctgcagccagcccttggtagtggccttactgtactctccctctccatgactcagtttgcctccaataagccctggggcctcaagttcagactcacccaacyagacagaccagaagtgagcctctgccctgacatcttcaggcactcttttgtcaactactcacaaggatttatcagataggaagggaaaaggacagaaagaactgtgggataaggaaggctctgaatgtcagaaaagggtctgagtaggatgatttgagactgaagaagttacgt

SEQ ID NO: 117381 - DNA, 499 bp, Homo sapiens
gaattcctgagattttgggggttgcttgttatgcagaataatctcatcagaaatctgattaatattaggccaaaaaggataggccaagttagaagagaaactagttgtctagattggctgaagaatatacatgcaagcctgcacctgtgtgtggagaattttaactttacacatgaaaataatgartaagatgactcagactttgttgggtttggcagccaaaatggccaagattattttacaagcatcttatataggatttatttaaaaatatacaaaattaaggacttggaataaaagcacagaatggctcaggtatttttccttttcttcctcactactttactcttatttatttatttatttattttttgagatggcgtctcgctcttgttgcccaggctggagtgcagtggcatgatctcgtctcgctgcaacctccacctcctgggtggagcaattctcctgcctcagcctgctgagtagctgagattacagg

SEQ ID NO: 117382 - DNA, 597 bp, Homo sapiens
gctttagctgtaaatattaaataataatagagacatagaaacaagacaaggtggaagcttaataattattacctataacagaggaattccctcaggaagaatttacctaagccttctatgtgcttccttggttccttgttcattatgacatttagcttaggaagttggaattagttatttctgctttgtctccatttcttaatcatgagactcttgaagacaggaatcatagttgactcaggaattatagttgtttcatctctctctctctgtctcagaccccartgcatttcttctatgactcactgcaaggctttatataataataaaaaaaaaccttcgcaactatttgaagaataaaggattttggatgcctggcaaaagaatgtaagtgctatcacttcaggactaccaagatggtatttccctagctcagagtttcacctgcggttatcacttcccgcatggaaagggactgggtttcactgcaggagctctgagttctattgtggttaagtccagtcccctttggtgaggctgagatgaggactagtctggatacaactcctgaaactaaaggtgcattaaatcacagtg

SEQ ID NO: 117383 - DNA, 597 bp, Homo sapiens
gctttagctgtaaatattaaataataatagagacatagaaacaagacaaggtggaagcttaataattattacctataacagaggaattccctcaggaagaatttacctaagccttctatgtgcttccttggttccttgttcattatgacatttagcttaggaagttggaattagttatttctgctttgtctccatttcttaatcatgagactcttgaagacaggaatcatagttgactcaggaattatagttgtttcatctctctctctctgtctcagaccccagtgcatttcttctatgactcactgcaaggctttatataataataaaaaaaaaccttcgcaactatttgaagaataaaggattttggatgcctggcaaaagaatgtaagtgctatcacttcaggactaccaagatggtatttccctagctcagagtttcacctgcggttatcacttcccgcatggaaagggactgggtttcactgcaggagctctgagttctattgtggttaagtccagtcccytttggtgaggctgagatgaggactagtctggatacaactcctgaaactaaaggtgcattaaatcacagtg

SEQ ID NO: 117384 - DNA, 640 bp, Homo sapiens
gcaatgagatgtgtattgaggttgcaatgattccagagactgtatttgtttgttccttttatagcttcctgatgatttgttcrgtttatgcatctaagcttcagcaccatgtgatagaaagggaacttgtgttttgttcctagctgagaaactttttggctttctgccaaatgtggggcatcagttgaggtgatttctaaggaacatttaagatctggtaatgttctaattctgtggcatataggagctttttgtacttaaatgtagcaagatatcagtggttttgaggttgtgccccacaaaataccaatttgctttgggtaattctgtatgcacatccttgcctttataggcaacctgactcctacgggcctcagttgcatcattagtaaaacagataacaaaaactctgcctacaatcattcaaaaatatgcagggagaaccaactgagtttatagtactttgtatgcaaagaattattttacagataaaatcagcatcattgttcttccaggggctagcttatagggttcctgatcattcactggtagccaggactgcctccgtaaacagaactttgggtatggttctgtttaccatattatgctccaggtgaccagctgaggttctggctgacca

SEQ ID NO: 117385 - DNA, 640 bp, Homo sapiens
gcaatgagatgtgtattgaggttgcaatgattccagagactgtatttgtttgttccttttatagcttcctgatgatttgttcggtttatgcatctaagcttcagcaccatgtgatagaaagggaacttgtgttttgttcctagctgagaaactttttggctttctgccaaatgtggggcatcagttgaggtgatttctaaggaacatttaagatctggtaatgttctaattctgtggcatataggagctttttgtacttaaatgtagcaagatatcagtggttttgaggttgtgccccacaaaataccaatttgctttgggtaattctrtatgcacatccttgcctttataggcaacctgactcctacgggcctcagttgcatcattagtaaaacagataacaaaaactctgcctacaatcattcaaaaatatgcagggagaaccaactgagtttatagtactttgtatgcaaagaattattttacagataaaatcagcatcattgttcttccaggggctagcttatagggttcctgatcattcactggtagccaggactgcctccgtaaacagaactttgggtatggttctgtttaccatattatgctccaggtgaccagctgaggttctggctgacca

SEQ ID NO: 117386 - DNA, 640 bp, Homo sapiens
gcaatgagatgtgtattgaggttgcaatgattccagagactgtatttgtttgttccttttatagcttcctgatgatttgttcggtttatgcatctaagcttcagcaccatgtgatagaaagggaacttgtgttttgttcctagctgagaaactttttggctttctgccaaatgtggggcatcagttgaggtgatttctaaggaacatttaagatctggtaatgttctaattctgtggcatataggagctttttgtacttaaatgtagcaagatatcagtggttttgaggttgtgccccacaaaataccaatttgctttgggtaattctgtatgcacatccttgcctttataggcaacctgactcctrcgggcctcagttgcatcattagtaaaacagataacaaaaactctgcctacaatcattcaaaaatatgcagggagaaccaactgagtttatagtactttgtatgcaaagaattattttacagataaaatcagcatcattgttcttccaggggctagcttatagggttcctgatcattcactggtagccaggactgcctccgtaaacagaactttgggtatggttctgtttaccatattatgctccaggtgaccagctgaggttctggctgacca

SEQ ID NO: 117387 - DNA, 593 bp, Homo sapiens
tgaggagacagttcttggaaagctcaggttacctacctacatctgcagacttataatctaactttactcatttgagtctggctttcgttttgtgcatcttttctatcttcccacaagactaggatttaacctatttaaatcttatttttccctataagggcaagatctaggtcttattcatctacatatccctcatcacatccaacacagcgmatgggccattgagggtgcccaaaaaatgttcacagctgaatacatgtatgaatgtatgtattacttatgtatgtatgtaagtatgctgtattcatttaatggaaaaaatataaagtttggaatcagaaagactaggatttactctccttcctgccatttgagaactgcgtgtctttaggcaattcctaaaaaccttcacagattttctgctcactagagtaaggcagaaatatacaacatatgctggtatcaggaaatagtcaatatttgcctggctaggttacagtagaattgattgctccatattctttctggtgacccattcagaagtgttttaggaatagtttaacaaaatgcttaacctatagaaataaatctga

SEQ ID NO: 117388 - DNA, 532 bp, Homo sapiens
ggtactcatcttccagttggctgggtgaataaagaaaagctacagaatgtagttgaagatttggccgtttccacataagtcagaagcaagaccaccctgggaccatgtttgggctattccagggctacagtttgatttcaagtatcagcgtcctctgtcatttccaaattgtcaagctactgtctttgagtaaacaatcccaggcaaccacccagacctagggtrggtgggagaaacagcactgatgtaaacaccttaaacacatccatcatttagatgacaatggacagtccgggctcctgttgtacttccataacatttgttaggctgaattgtgatttggtaagatagatcctaaatttcaaaactcctcttaatgtaaattcaaacttaatttcactggcatgcaaatgacagagcagctcatggaacgcttccctccccctctcccatttcccagcagaagttctgttatatcatctctaggacagccacaggaagatttaataacagcttttaaagaagcccattt

SEQ ID NO: 117389 - DNA, 579 bp, Homo sapiens
ggcaggattagaatggcacctaaaaagtaatattgccaaggacttatgcaacacaatagtaatattcattcacacacttctagttgctaaagcagcatgcatgtcctgtgataataaactttgaagtaataaatatgtcacagcctcggaaggttccaacacttgatcttctggatggtctttctatgaggtggaaaaagcatagactttgaagtcagagatgcctaggttcaaagtttagctttgcacacctactctcgtacaaggtatttaatatctctgggctccagattccacattgcaaaatgagatggtaaaccttatctagcagggttattatgaagattaaatgagaaaatgtaaagaagaaacccagcccaatgtttgttgaaaagtaggtacttacataatmgttttcctttgttacctttactaaaatcatgagattatgtgaattcagctagagcttcggtgcagcagtgttaacaaaaccaattgaggttcccaaattaaacatttccttatgtaagttacattgtggtatgctaaaagatttaaaggcgtgactctatacccaag

SEQ ID NO: 117390 - DNA, 579 bp, Homo sapiens
ggcaggattagaatggcacctaaaaagtaatattgccaaggacttatgcaacacaatagtaatattcattcacacacttctagttgctaaagcagcatgcatgtcctgtgataataaactttgaagtaataaatatgtcacagcctcggaaggttccaacacttgatcttctggatggtctttctatgaggtggaaaaagcatagactttgaagtcagagatgcctaggttcaaagtttagctttgcacacctactctcgtacaaggtatttaatatctctgggctccagattccacattgcaaaatgagatggtaaaccttatctagcagggttattatgaagattaaatgagaaaatgtaaagaagaaacccagcccaatgtttgttgaaaagtaggtacttacataatcgttttcctttgttacctttactaaaatcatgagattatgtgaattcagctagagcttcggtgcagcagtgttaacaaaaccaaytgaggttcccaaattaaacatttccttatgtaagttacattgtggtatgctaaaagatttaaaggcgtgactctatacccaag

SEQ ID NO: 117391 - DNA, 587 bp, Homo sapiens
aggcaatatgctgattcacatatctctaaatagctttaatttttgtgcctgctttgcaaggggatggagaagaaaaggggcaggagagaggaaataagaagctctttacataattaagctttgggtattcaacaagatgttggaactattaatagctaccataaagtcaayctttaaatttaaacagtaagtccaaagtattttcctctatttgttatctcattaaactgttttttctactctgcctttctaaagaataaaaacaaacagaaatgaaacaaattctatcaggccacagtccctcacagaacctcaccagcaggaaagatttccaaaggcatgcaatggaagaactgagatgcagcaaagtccatggtatctatgggacctctgactctcccaaatcttaataactgtttgtgccagttgaacccatcaggataaaggcagtttgaagcagcccaacgatgttatatcacttcaggataaataaggctagcaagtttaattcaagaaacattgctcaaatgcatattacctgctgagcaccttgagattctatgagatgcatcctttccccttaggga

SEQ ID NO: 117392 - DNA, 552 bp, Homo sapiens
tcacaattttggagattatcaagtaaaatctctcatttgacagaggggaaaattaaaacctaaggatgggaaggtcccacagatacaatgcaatatttttttctgttttctgtttgtttgtttgtttgttgttgttaatgttcaaactttttgcacaaactcctttgcttgacttacaagggcctccaagatggcatcacatcattctaatttggatttttaccattggtctctcccttttcataccctactctgaagataaagctaagctgyttatggtttcctgaaatagtttatgccatgtctgctcctgaagcatcactccaacctacattagtgaatgtccacaattgaccaatggaaaattgatctctatggcagaaagtgactcgtcagtagctgtcaccatcttccgcaacacacaatcttcctcaacccacagtacacaccaaactgtacatctccattctccttttactctgtaaaggacctcctactctgtaatctctattagtgtatatgttatattttccctactaaaacgtaagttcc

SEQ ID NO: 117393 - DNA, 552 bp, Homo sapiens
tcacaattttggagattatcaagtaaaatctctcatttgacagaggggaaaattaaaacctaaggatgggaaggtcccacagatacaatgcaatatttttttctgttttctgtttgtttgtttgtttgttgttgttaatgttcaaactttttgcacaaactcctttgcttgacttacaagggcctccaagatggcatcacatcattctaatttggatttttaccattggtctctcccttttcataccctactctgaagataaagctaagctgtttatggtttcctgaaatagtttatgccatgtctgctcctgaagcatcactccaacctacattagtgaatgtccacaattgaccaatggaaaattgatctctatggcagaaagtgactcgtcagtagctgtcaccatcttccgcaacmcacaatcttcctcaacccacagtacacaccaaactgtacatctccattctccttttactctgtaaaggacctcctactctgtaatctctattagtgtatatgttatattttccctactaaaacgtaagttcc

SEQ ID NO: 117394 - DNA, 523 bp, Homo sapiens
agtggactgagagggcacatgacatactgagacaccagctggggcagccaagggagtgccggcatctcccctctgctatcttcaggctgcacagctcacagatccaaaagagacccctatctttcacttgaggagaggagagagaagagtggggaggactgtgtcttatatccaggataccagcaaagccatagcaggacagggtgccagtcagagttgtgaggcccgaggtcccagacaaagtttctagacacaccctgggaaagaagggaacccactgcgttgaaggaaaggacccagtcctggcagcattcatcarctgctaactgaagagcctttgggccctttctgctcttccctacccttcccatagccacaaccagtccagactgcaaggagtactcccagactactgcagatgttcccttcaggcccaagtctcttaagtcagctcgtcatgatcttttcctggcctgggactccccattcagggtagtgggctcccctgtggcccagggaaggt

SEQ ID NO: 117395 - DNA, 532 bp, Homo sapiens
cacttgcaggctgggatgctgctgcttctcacagtgtaccttcagagaaagtatctctttccaagcctgtatatcattcttttcttctccaacaattcaggacttgtgataattttttggacatcaarcatatgtatgcagaactcttgcacattatgcaaaaggcaggactttcagatgtgtgcttttgctgctccctgcttttataaactgttggtcctccctgcattttataagttaataaatcagggaattcattcagaatttgtctaatggtgccctatccacttaaactcaaaaccttggcaagattagaaattgcctaaaactagttcttccattagtcatcaaatataattttgacaatgaaagtgatctctgagatcaccccgtccataaaattccccacagcggcttcctcatactgctccactgggcctcactttcccgtcatcctcatccttcctctctccgccatcacacccccagctctgtctcacaaagaacaaccaaatagcaggtgaaaggcaca

SEQ ID NO: 117396 - DNA, 575 bp, Homo sapiens
cctcttttattcattcagggttttttggtaccatgactcataaaatatatgactcatcaaaatataaattcttccatgtttctactgctgaaaaattgctttagcatctggatttccagaggtgaaatctttgacagctggtaggggattagaatttagaaataacttcaactgaaaaagttcaggttgaagccctgtaacacaaaagtacctggttggggcttgagaaggcctgggttttgcttttactytacctctgactagttacatgacctttttatgccatagcttcataggattaaggaaatcaggcaaaccactaataggttatcagttctctttattaagctttgtcaaggacagatactatattttggtcagcaaggttccaagtgtctgcagctttgggctgtgatttacaccagattctagcttcttagaggtgcttctcctgggcgcaccattaagccgctagaaagccacttctttgagcctttcccatcctctctctctaaagctagggcttgtgctggggatagttaattcctaggaatcacactctggaaaacctcagt

SEQ ID NO: 117397 - DNA, 547 bp, Homo sapiens
  misc_feature (1)...(547): n = A,T,C or G
tgttcacatatgtcagagtgagaatggcacggccaggtgtgcctgtcatgcagggtaccagctgcctgaagataaaaacatttgtgaaggtaggagactgaaactgaaggattaattgtgtaattgtttgaaattttgtggtaattcakttttgaatagtcagaacagctaggagaaaaggtgttttcgtttattcttaaaaaggaacatttaaattcttatttgatcatttgaaagctatttttataccataaaacttcagtgaaattcttagtaacattttaaaaaatgacataggatagttccagacttaatacgttttgtttctcattctgaagtgaattccagaattaatatttcaaaatcttctatagccacacaggaagttttttattataggctacagaaggtggggataacctttgaaaagcaagtatatgtaaatgagtgttttcagaagtcaggaataattaaaacaaaaaagaaagaactctataaatacaaaatcacacatttatctttcctagaactagcanaacagacatac

SEQ ID NO: 117398 - DNA, 602 bp, Homo sapiens
gctcgggtcactcactgcccagtgaaagaaaagcacattaaagaagcaaaacattctgtaaggaaccttaaaaacagcttgaccaggatgctgaaatccacaaaaagttagatctattgtcatgagtttagggaaccattctcaggacaagtcagatttctagaccttctcttcttctgcaaaattgtcaaatgatgaacagtatctatttttctgtaatacctcattaagatggagtaaaatcagttatgaaaactaggctttgctgactactctccataccactcatcaaggatcagggacataagatggaagaagatatggagagagcacaaagaatgaccagggatgtaaaaaactactgctgacagtgtcatcragaaaaacaaatgagagccttatgtgcgtagcaaaatttcttttcgtgaccaaggaaggcacctgatctctacctttgcgttctccgccaccatatgcaacttgctgcttggggagtaggagtgtagtcatgagaattaaaagagaagaaaagagaagttttaaacctaagagcttaaatagagagcttagaccattgggagcttctgatctagtaaggtgac

SEQ ID NO: 117399 - DNA, 582 bp, Homo sapiens
ctaagtctttttcatgtaattatgtacacagttgctgtaggcctcaggggccccattggacctctaataacgaagaagcctggaaagtctgtgcctccccagatcacagcagtgacaggctatggactcaccccagtaacagatggttttattagtgrccactgccagacacttggctgagggcggggcacatagccattagcgtctgctccactttggtggaatggtagccgtgtgcaaaagaaaagctgggtctaaaaataattgacagtgagggagacaatgtactttttatgtcacccggggagaaaacaagctaaaataaaaatttttaaaaatcctttcccttggctcctgaaacaggaaagataagctcaagtaattgtgatatttccatggaagagaaggttaggatgtctcctagtgggagaaaaataaagaaggggacagaatgtcataggtgcctaacactcagtgaatttgtgggaagaaattctgactctggctacttggcaaacaaattaaaaaataaaataaaaagcttttctcccactaatgccacttcagattataggcactcag

SEQ ID NO: 117400 - DNA, 520 bp, Homo sapiens
agatttgaacccagatctggctgaccaaaagtccttgctcacagacactgaactcagtccacaaggcactggtaacttgttgacaggtacacagtgggtgatacaggactctgagttcccacctcctgcttcgggatccttccccctgcccatacttagctcagctgagtctcttggagtgggtggcatgatccatgcaagaaaggcttgacaaactgaacttcattaaaattaagaattcctctccttgaaagacatcgtcaagagaaaaataagtcaagacrtatttgcaaaacacatatctgataaaggactctcatccaaaatatacaaagaactattcaagctcaacaattagagaacacaatttaaaaatgggccaaataccttgccagacacctcagcaaagaatacatacaaatgacaaataagccaatgaaaagattcttcacattatatgtcatcaggaaaatgcaagttaaaacaattgtgagatggatgtcactacacacatattaaa

SEQ ID NO: 117401 - DNA, 613 bp, Homo sapiens
ttgtggtttccgtcttcatttgtatttacctaaaaactattggtattaagtatattttcacgtgatttttgacttttcatattgyggccatttatatatcttctttggaggaaaggctattcaagtctgttgtttatttttcaattggattgtttttccttttgtcatcgagttctaagagtccttttcatattctgagtattagaccttaacaggcatttgattccagatactttctccctttctgtaggttgtatttcacttatttataatacatgcaaatttgaattttgaagtccattttatatattttttcttgttacttttacttttgaaacgatatgtaaaaattcattgccatatctaagacaatgaagattttcctctatgttttcttctaagagttttataactttagaatgcacatagaggcctttgatccattttgagttaaattttgaataatgtgtgagataggaatccaattcattttttcgcatgtagatacccagttgtctcagaaatattggttgaaaagaccattatttccaaagattattctttattcttgttaaaaatcagccaaagatttatggatttatttctggactat

SEQ ID NO: 117402 - DNA, 602 bp, Homo sapiens
atttttcattgtttccaaaacaacttgttttttctttaagacccctgaaagagaaggctatgagtgccttcaaaagcatagaataaagcactgtgtaagtaacagacatctmcaagtaaataatacacttgaaccagtaccttatcttgcagaaaagaaatttcattttcagaatggatctacattgatttaaaaaaaaaatagcatctgcaatgtaaactatatgtgcatatgtggcaggcagggcacttcagacaggccaactgtataagatgatgattttcttaccctggacgtagaaatacactcaatagaacacttgtcctggtagtacaatctcactatctgtgtgaacttggcagttagtctctgagcctttgtctttgactcttaaatataagcataaaaatgcttacctgtccacctgtctgcctgtctaactgggcaggttaataacaaagtgtttgtgaaatgcttagaaagctaccaggcctaaacagatgtaagtgctcaaggttttgcgtgcaagtgattgggcaaatgctcccaggaggaacaaggaaagatgttgggaagtaggacaaggaatggggagaagagaa

SEQ ID NO: 117403 - DNA, 573 bp, Homo sapiens
tatgatgaaatgaaaacatattttatgtggttgttttagtaaaaagaacagtatttttatatcacattctttttgttcacaattattgccctttataaattttgttttcttatatgataaaaagtaagtgccatctagaattgaaaaggctaaatatatctctatttacaagttgtaattaaaatgaacaggtgtggtggtagcagttaccagtggacagwaacgttttcaagaaattaatcacgtgaaaaattgagtaaatatcacaaggaagtgccttgacttctccagggcatgcagaattcctatgaacaagagatgattcaaaagcagagggagtgatatttctttttcatttgtcaagccttgcctaaggagaaagttcctccctcccccagagtgtgcagaaagtacatttatgcaagaaaacaagggtttgaatccttccttctacttaagagctatttacctctgggcaattcattttagtctctcttgtcctcagattctgtattatttacctaatttaaacagtttttaatttttacttacattatttacttaattttacag

SEQ ID NO: 117404 - DNA, 573 bp, Homo sapiens
tatgatgaaatgaaaacatattttatgtggttgttttagtaaaaagaacagtatttttatatcacattctttttgttcacaattattgccctttataaattttgttttcttatatgataaaaagtaagtgccatctagaattgaaaaggctaaatatatctctatttacaagttgtaattaaaatgaacaggtgtggtggtagcagttaccagtggacagtaacgttttcaagaaattaatcacgtgaaaaattgagtaaatatcacaaggaagtgccttgacttctccagggcatgcagaattcctatgaacaagagatgattcaaaagcagagggagtgatatttctttttcatttgtcaagccttgcctaaggagaaagttcctccctcccccagagtgtgcagaaagtacatttatgcaagaaaacaagggtttgaatccttccttctacttaagagctatttacctctgggcaattcattttagtctctsttgtcctcagattctgtattatttacctaatttaaacagtttttaatttttacttacattatttacttaattttacag

SEQ ID NO: 117405 - DNA, 573 bp, Homo sapiens
tatatttaagaaaaacatttcacaaggctatagttgccattctagtgactcctctgatggatctgggcaatgtaaactgaaaaccttctggaaaggactcatcattctagatgccattaagcatattcacaaatcatgggagcaggtaaaaatatcaacatgaacaagaatttggaaaaagttgattccaaccctcatggatgactgagcacttcaagatttcagcagaggaagtaactgcatatgtgatggaaatagtaagagaactagaattagaagtggagcctaaagatgttactgagttgttgcaatctcaaaataaaacttgaatggatctggaattgttctgggtgagcaaagaaagtggtttcttgagatggaatcaactcctagtgamgatgctttgaacattgtttgaaatgtcaccaaaggatttagaatattacattaacttagttaataaatcagtggcagagtttcagaggactgactgcaattttgaaagaaattctactgtgagtaaaatgctatcaaacagcattgcatgctacagagaaatcttttgtaaaaaga

SEQ ID NO: 117406 - DNA, 655 bp, Homo sapiens
tgcaatatactttgaacattaactaacacactgaaagtattcaatatttcttagcttcttttaccaccatcaatatttatgtcacacctccctcaggaattgacagtccttcatgaagacatttgaaataaatactacagcttccctggatattgtttattttatattaatgcatctttaatacagttatggacaagtattcataaacacatacacacatatacacacgcatatatattaactgtatatatacagttaaatagattattttaagccttttacatgtttcttagcatcctgacycaaagattccttcaaatacttatcgagacatcaattgacacttgtggacaagcaacatctcttatagtaggttactggtttaagtttacttatacgtcaagatgccacatgctatactagaatggtaaaaatcacttgttgaactaaattcacataccagctagttcatgtttcatcctgatttcatatagggaggagattagtagccacagcatcttacattaatatattggagtgcctctattttgaagcattacaaggagtcttggaacgtggaaggaaaaggcatattacaaaaagagtaattctctcaggaattacagctctagaaaagaattctgcaaaatgtgcg

SEQ ID NO: 117407 - DNA, 551 bp, Homo sapiens
aaatgcagatgtgtatatgaattccaatattgacctgctttactcaatgcagagtcatgaaaagggacaattgcctatcaaatcctcatactacaatagaactttcaatatgtacccagaagggcagccctcccaatactctatattgccttttaaagcaataggaggcttcttaagtctctcacagatttaataaaacctccatcaaatttctgttgctgtagccccaaacaatcaagtctcaaggacttgcgaggcctcacctggatttgcgcggccctggagccagacggagtttttattaaacctgatctcacactgttggagatgtcggtggagttgagcgaatgagcaactggagccgctccatggtgggacagatccaattggcaatcctctgcgcaggcatcccccagcactgcttgcctgttgtatgttgcagtgtttacatagcgttttcacagaaggattcatttaggattaacttaattgaataaacacaaagctgcataatttayggaccaaaatagtttttcctggttgggttgctg

SEQ ID NO: 117408 - DNA, 564 bp, Homo sapiens
tagttccctaaaaactctctttgcttttcacttcactggacaataagcacatccatggctgggtgcggtggctgatgcctgtaatcccagcacattgggaggccgaggcaggtggattgcctgaggtcaggagtttgagaccagcctggtcaacatggtgaaaccccatctctactaaaaatagaaaaaaaaattagctgggcatggtggctggcacctgtaatcccagctactctggaggctgaggcaggagaacttcttgaacctaggaagcagaggttgcagtgagcygatgaggtcgtgccattgcactccagcctgggcaacaaaagtgaaactctgtctcaaaaaataaataaataaataaataataagcacacccaaagaactttacagcttgtaggttcttagatctgttttatttctttgcttcttcaccttcatgcctctttttctgaactccattgtgaataccgatattaggctattaggtttgaatgagagggtcacagcttgagcaatatttgccttgaggcttattaactaagtgagaaaccttttccc

SEQ ID NO: 117409 - DNA, 631 bp, Homo sapiens
acatcagtttctaactagaggtatataggtagacacagaaaaccttgataaaaatgtaaaaactctttgaaatgaactagcattgttagtattataaaactgaggaaaatactttctctgcttgcttcagtacctttcaagaagcatagaagcaagagatgctcaaaaattaacattgtaggatgacatttccaaaattttttattgaaaaaaataatgggtgttgtgacttagcttcttttaaagttttacatttggtgcacatttgaaaaatttactagtttatagtcaatgtgagacactggtaagcttataaaatgtttccacttttataccctcaattctaacaatatttatctatgctttccataatctgtcactctgcaaggcactgggaacacaaatggtctcattaaaayactcctttcaaaatgttgtttactctgaacagacattggaagaggtttccagttaaacagtttgactgaataaagaataaagggaaagagtaacaaaacactgaacttggaaatgcaatattgtatttttaatttggtatttaatgtatctatcagatgccaatgaagtctgctttccatatgtctaaatcatgtcaacacaccaagtataa

SEQ ID NO: 117410 - DNA, 537 bp, Homo sapiens
acccaccaatttcagacacactctcacgtggtagattcttgaaaatatttatttgctaaatgaatgaagtaatggatgtcttttttccactaaagtattatgttttaaggtacaagcagagtaaggtagagatgtgaagtcataccaacttgatgaatgaagatgatagtcacagttaacattaattacatgcttactatatgtcagtcatttgataagcatcttatgctaatttattccttagaagaacttatgaaagtgggtagtagtattttttacattatacacatgaggaaaccacaggttgtgttttagagctggaatacactcagataggctgacaccacagcccatgctcttagctcccactactccaggtagaatcaaatttaaaagtcagaagtcacarcgatggcaaagagcagccgttggaatagcaaggggaagcccggcaagtcgggaggtctaatatctaccatgtgcctggccttcagctagctgctttacatagattatccctagttctcaagttaaccc

SEQ ID NO: 117411 - DNA, 475 bp, Homo sapiens
caagtcgggaggtctaatatctaccatgtgcctggccttcagctagctgctttacatagattatccctagttctcaagttaaccctaaaaattgttatgagaatcttacttcatagataaggaagctgaagcttagaggctaaatgacttcctcaaggtcattcaactaacaaatgacagaattgtggttcatatcaggtccaattccacaccagatcatgtttttttcattatatataataatctgtggaagtaatatgcagaggaattcaggtaagtgtatttttcaccaaagaacagtctttctcagtttgaaaagttcacccyttttaatggaacatatatattaatgcctcccaagaatgaacaaggagctatgaggaaaaaacacagttgtagacattgcatggtgtgtatacttctttgtatttgaggatatacaaatgctgccacatatctatgatgatctcttttt

SEQ ID NO: 117412 - DNA, 433 bp, Homo sapiens
atccaaaaaaaaaaaaaaaacctcagcaagtttatgtaaacactgtggtactcaatgaaggaagtgctgagagggtaacaacatctgacgaatgggtaaattttctggaatctcgcaaggctttgaacatagctctccctggtggagactgcctgagccgacctgatgttgtttttcctcatggttggcagttatagagtgcagtggaacaatcagttccttggttatcctccaaggtgagcaaggtcagttttaaacagctttgctgtcagggagcctcatattttactctagtctcctaacctcacaaatcttgaggctggcactgaagtcaatgagccctctgcagcctgattcyccacagcgacttctctcttcttacaaacaatgcctcatcttggttctgcacacctgcacaggtttttagggagca

SEQ ID NO: 117413 - DNA, 564 bp, Homo sapiens
atgaagtgcagactgagaatgtctcagatagagatgaggaacttattgggaactggagcagaggtcacttttgttatgtgttagcaaagaatttggaggcataacaaagaatgttatgccattgccctagagatctttggaactctgaacttgagagagatgatttaaagtatctggtagaagaaatttytaagcagtaaagtgttcaagatatggcctggttgcttctaacagcatattcctttgagtgagcaaagaaataatctgcaactggaacttatatttaaaagggaagctgagcataaaggtttagaaaatttgtagcctggccacgtggtagaaaagaaaaacccattttcaggggagaaattcaaggccactgcagaaatgtgcaaaagtaaagaggagccaagtgctaatagccaagacaatgtggaaaatacctcaaagacatttcagagacttttgtggcagcctctcccattgcaggcctggagatctaggagggaataatggttttctgggccatacccaggactttgctgccttgcacaaaggcgggac

SEQ ID NO: 117414 - DNA, 463 bp, Homo sapiens
aaacaatgaagtaaacagaatagcagagatttggctttgtaaaaagaaaaaaaagcgattgtgccagaccacttcagcgcctctagttgmtgaattgcaggactggtagttgaaccaaaagcaataaacataatgcatcttggctgtggtcagatattttgatttagtcaaatatgaagccctcaccactaaaattggaaaatatggtttgcagtacagatacagtactagctgaaaagtgatatctgaattgtcctggcatgacgtggagagcagaggaaaaagagaagtgtaccacactgggaatatcacttttgttgttgtagttgttgttgcttgcttgttgcttttaatttttttaggtttcagattcagtaggtacatgttcagtattgttacatgaatatattgtataatggtgaggtttgggtttctagtgtacctgtcacccaaacagtgaaca

SEQ ID NO: 117415 - DNA, 598 bp, Homo sapiens
gtttcatcctcacaagccagtaattatcattgccattttacagatgggcaaactgaggtttagagagattaactaacttgcccaagaccacacagctggcragggttagagccagggttccagttcagctctgaccacatgactcctctgaacaattccccttccaaggcaagccagtgccacccttgggaagctctgatatttacaaaattgtccttataataaagacagtctgccttttaatactttcacctcttcagcatctactaagttattatgtaacccttggaactgcacagagcatctatttttttcttacatctgagaaactttcacctatttgaaaatattccctatttccccccaagtcttctcttttccacacaaaatatggacaacactttactttccagtgaccaactatctggattttcaagggatggagggaattcttaggataagggacttccagtgctaaaatggggacagttgcgcaaaccagaagagttgatcaccctacattttttttttgctaatggtgttacctgatgcatagattgtttttattttttttacaaggcctgttctgcatgatgac

SEQ ID NO: 117416 - DNA, 568 bp, Homo sapiens
ggcaggaaatatatacaaggtgagccaagggcatcttatagtgccagaaagtaaaaaggtgttttaaaaaatcccatattgatgggagtatgtcaaaggggcacataagccaactgaaagagcaccccctggccaatgtgggacaatttgagacaaaaaataaagtaatactggagtataacaaaagtataaaataaatatccacaagcccatactgatatataacaaataaatgagtgaataaatatgagaagaagagagaaatctcctgtaagaataattccaactaatttatgtagatattctaccctcaaggagagggagcctagtgagggctgcataagtgacttccttccaaagggtatgaaaagggaattaaaaaaaaaaaaaaccaagaaaaagaaaactttataatggaggaacctgtaaaacacracctcaagccaggtgttatagtttggatatttgtaccctcaaactacatgttgaaatttgatgcccagtgttgaaagtaggggcctaatgggaagtgtttgggtcatggggttagatccctcatgaataatta

SEQ ID NO: 117417 - DNA, 601 bp, Homo sapiens
gggctgttgaagtccccaactattattgtgtattggtctgtctttatatttagctgtaataatatttatttcataaatctgggtgctccagtgttgggtacgtatatatttacaatcattatattgtcttgctgaattgacacttttatcattctgtaatgacyttctttgtctcttcttacagttcttctcttgaaatctactttgtctaattatagctactccttctcttttttgtgtcttattggaatgaaatatctttttctaaccctcatttacagtctgtggatgtgtttatagatgaagtgtgtgtcttgtattcaatagattattgggttttgtttttatatccattataccactctatgtcttttgatcagaaagtttagtttacttacatatttaaattcaatgttattattaagtaaggacttatttctgccatttgttatttttttctaattggcttgtagtcctttcttccttctttccttttttcctttcttcctttattgagggtgattttctctgctgccaaaatttaattcattgctttttatttttggtctatcccttgtacttttgtttaaccatgacactt

SEQ ID NO: 117418 - DNA, 601 bp, Homo sapiens
gggctgttgaagtccccaactattattgtgtattggtctgtctttatatttagctgtaataatatttatttcataaatctgggtgctccagtgttgggtacgtatatatttacaatcattatattgtcttgctgaattgacacttttatcattctgtaatgactttctttgtctcttcttacagttcttctcttgaaatctactttgtctaattatagctactccttctcttttttgtgtyttattggaatgaaatatctttttctaaccctcatttacagtctgtggatgtgtttatagatgaagtgtgtgtcttgtattcaatagattattgggttttgtttttatatccattataccactctatgtcttttgatcagaaagtttagtttacttacatatttaaattcaatgttattattaagtaaggacttatttctgccatttgttatttttttctaattggcttgtagtcctttcttccttctttccttttttcctttcttcctttattgagggtgattttctctgctgccaaaatttaattcattgctttttatttttggtctatcccttgtacttttgtttaaccatgacactt

SEQ ID NO: 117419 - DNA, 539 bp, Homo sapiens
ggagctgattggatcatggagctggatttaccccttgttcctgagataatgatttctcacaagatctggttgtttaaaggtgtgtagcacctctcctctcccctctccttctttctttgctcccactatgtaagacgtgcccgcttcccctttgccctcagccatgattgaaagtttcctgaggcctccccagccatgctacctgtacagcctgtggcacagtgagtcaactaaacctcttttctttttaaattacacagtctcaggtatttctttatagcagtgcaagaatggactaatacagaatattagcatacacacacaaatttgcacataagtacatcaggggatagacacacagacctctcccaccccaatcctcaaagccctttatggacaccgtaagatataamccaggttaaaatcctcacaataagagaaggaggaccaaacattattcaggccccctttatgagtgtttttgatttgaaggagctagagcctttaggtggtttaattcaagaacttagaatacgtga

SEQ ID NO: 117420 - DNA, 561 bp, Homo sapiens
tctgaggctgaattaaatctgactggttttcactgtgaaaataaaatataaaaactgagctgggcatggggctcatgcctgtaatcccagcactttgggaggccgaggtgggtggatctcctgaggtcaggagttcaagaccagcctggccaatatggtgaaaccccacttctactaaacatacaaaaaaatkagtcaggcgtggtggcacacgcctgtaatcccagctactcgggaggctgagacaggaaaattgcttgaaccagggaggcagaggttgcagtgagtcaagatcgtgccactgcacaccagcctgggcaacagagtaagactccatctgaaataaataaataataaaatataaaaactgttcttggagttttttctaaacagaactgacatcagaattgtctatttcagaaaaactggatttatcaaatgtcaatacctgtcagagaatgatgttaatatcatgcgtaagaatgctactttttctagaattcgacattttcagcatttgagaattactatattttgtaaatgggaataacactactaagg

SEQ ID NO: 117421 - DNA, 611 bp, Homo sapiens
tcaagagtgtaaaaactgagaaagaagagaagtctggaaagatcaaggtaaaaagacttgaaccacgttgctattagaaagtgtaaagacctttctgtcgtttttctgatctaccctagcaaaaataatagattacatgtattgatttctgactagtacatggaacaggcactgtgtcaaattctttaaatatcttattattgtttacaataaccctgcatggtaggcayttttaaaatcccattttctagataagggattaagagattgacttgagctcattcagctaccaagtggcagagctaagtcctgaacttaggcaggttatcccaagaaaaagcacttcaccatgcactgtactgcttcataagcatccaagcatactgcacattttgtccaatgcgaacctgtctcaaataaactgaagacgacacttgctgtttgtgttctttgtagtcttacttcatatcctgctgcaacatgagctcatggtctttatttacaagttgcccccaaagcttctagattcttttatttctaggactgagtcttatgtttttatctgcatctgttctaacacatattttagcatgtgataaatttcaatgtag

SEQ ID NO: 117422 - DNA, 611 bp, Homo sapiens
tcaagagtgtaaaaactgagaaagaagagaagtctggaaagatcaaggtaaaaagacttgaaccacgttgctattagaaagtgtaaagacctttctgtcgtttttctgatctaccctagcaaaaataatagattacatgtattgatttctgactagtacatggaacaggcactgtgtcaaattctttaaatatcttattattgtttacaataaccctgcatggtaggcatttttaaaatcccattttctagataagggattaagagattgacttgagctcattcagctaccaagtggcagagctaagtcctgaacttaggcaggytatcccaagaaaaagcacttcaccatgcactgtactgcttcataagcatccaagcatactgcacattttgtccaatgcgaacctgtctcaaataaactgaagacgacacttgctgtttgtgttctttgtagtcttacttcatatcctgctgcaacatgagctcatggtctttatttacaagttgcccccaaagcttctagattcttttatttctaggactgagtcttatgtttttatctgcatctgttctaacacatattttagcatgtgataaatttcaatgtag

SEQ ID NO: 117423 - DNA, 611 bp, Homo sapiens
tcaagagtgtaaaaactgagaaagaagagaagtctggaaagatcaaggtaaaaagacttgaaccacgttgctattagaaagtgtaaagacctttctgtcgtttttctgatctaccctagcaaaaataatagattacatgtattgatttctgactagtacatggaacaggcactgtgtcaaattctttaaatatcttattattgtttacaataaccctgcatggtaggcatttttaaaatcccattttctagataagggattaagagattgacttgagctcattcagctaccaagtggcagagctaagtcctgaacttaggcaggttatcccaagaaaaagcacttcaccatgcactgtactgcttcataagcatccaagcatactgcacattttgtccaatgcgaacctgtctcaaataaactgaagacgacacttgctgtttgtgttctttgtagtcttacttcatatcctgctgcaacatgagytcatggtctttatttacaagttgcccccaaagcttctagattcttttatttctaggactgagtcttatgtttttatctgcatctgttctaacacatattttagcatgtgataaatttcaatgtag

SEQ ID NO: 117424 - DNA, 622 bp, Homo sapiens
ccttgcaacaagatcaggaattccaggccctcttgctccagcagtagtgacagcctccataaaaatgacttacctggagggaagaaaagggtgatggatttaaaaaaaaaaaaaaaaaggttgctgattttgtgagaaagtaaaccaggctgagtgctgtggctcacatctgtaatacctgcactttgggaggcagaggcaggcagatcacgaggtcaagagtttgagaccagcctgaccaacatggtgaaaccccgtctctactaaaaayacaaaaattagctgggcatggtggtgcacacctgtaatcccagctactcaggaggctgaggcaggagaatcacttgaacctgggaggcggaggttgcagtgagccaagattgtgccattgcactccagcctgggtgacagagtgagactctgtctcagaaaaaaaaaaaaaaaagaaagaaaaacaaaaaacgaaggtaagccaaatggcagttttcaagaagttgcagggagtgccaggtggggacatatttcagcaacagaaaaacggttaaagtctgtggagctctgcagggcaaaggggaaaagaaaaatcaaagaatagatgttctgaatcaaaaatgtgtaacag

SEQ ID NO: 117425 - DNA, 616 bp, Homo sapiens
tagattactgtgaaagacatattatagatcataactttttgatttttagtaaaatcttgttaaattttatcaaataataaacaaaatatcaaagtaccaaagggcttacaataaaaatcaatagctaccctttttgcaatctctgtcctcttcctcagtggaaaaaggacttttaagagtctctgttggatccttctatgtgtgtgtcccattgtttcatgattttccaattttatatactatatatggtttttctgctgtgacacataacaatgtaagttacattactaccactttccacttgccctccactcactcaccaaatcactattcttagtaatttcattagattgccttagtttagttactttaaataaatcacttaaaattcctttccttgttcaatcaattatagacatatgtcatatatgtaaattaacacaagtgattgaaaaaggagatactggcactaaactaacctggatttgaatgctacttttatgtgaccttgactcattraataataataagccttatctttctcattgaaaaaatgggaaactaaaattttttggaggctgtagtacaaattatagacattatacataaataattt

SEQ ID NO: 117426 - DNA, 584 bp, Homo sapiens
cataaaaatcattttgagcactgcacgtttctaataaaattattcatgtaaatatacacactaagttacttaagatgaaaataaagctatggacatttcaaattagtaaaaagaggttcttaaagacttgtccaagtacttcaggattgaaattagagtttatcttgaaatatgaacctgaaaactatgcagagtcygttgtggttctggacaataaatacaacctcccttaatcggtatctttagtctccccttccccaaaagagcaacattacaaaatagagtccaatgcttacacttttcagagattctccactgcctactgccactattttcaaatttcggtcatttatagactaccttctcaatttttgctatatttgtgtagcacctcttttggtatattcttattttttttaaaaaagatcaactcaccatggtgcttttatattagcttcttcttaagcaatcttcctatctgtgtaattgcagatttcgtgttagttacacattttttctagtttgtataaaactagaaaatcagtacatatctactacaagtctttaaaacattgtttgtgtac

SEQ ID NO: 117427 - DNA, 615 bp, Homo sapiens
gaaatctggttggaaatccccggccaggttgcttcatactgctaagtttgacagataggactgaccctctgagttgcttgagtggccttatgcctatcattaatcttatagccataatatatctcattgtataccacactccacccctgaccctgagggggtcaataattgagaggctgcccaagtttgaaagtgcgctccatggtcagtcaaatcttgagaaatggatcttctgtaggacggtgagtaggagttggtggcgcccttggaaaaacctggaaatgaactgtatcatcacagagaggatacagtagatctagtgtccagctgagcagttasgggagatcatgagaatggggttcggctgtggctttggggcagactcgccaatgatgggggaagagtggaggacaggtagcgaccaagtctggacgggaagcaatggatgtgtggcaggccaatgaaggcatgcccagcaggctggaaggttagctgctcagtgggtggccaaaatgtggtggaggctgtcagtgacctcagtgccaagtaattggtgaataggtctggagaagccacagttggatgtggaaagtcaggccacccggagtagcagca

SEQ ID NO: 117428 - DNA, 560 bp, Homo sapiens
agcaccttgatgttggacttctcaatttccaaaactgtaagcaataaatttctgttatatataagccatgcagtctaaggtattttgttatagaagccagaatagactaagacatcttcctttgtttttttggggggttcaggagaaggatggcagtatcttccctgggaggttgggcatgaaggaatcaagcttaggttatagaagtgaagagaaaaagatgtggaacagtaaggaaagagaaaagagaaaaagttgtggaacattaaggaaagagaaaagaaaactgtccaggaactagagattttaatgggctcaaaacccaatttttttgaatgatcagattaatattaaataatttcaatgsggataagacctatgtctgcctctaagtcctccacatagtatgtcacagcaaaaaggaggatcatcagggagatttgtgcaattgtacagacatctgcatttctaaggtaagtttttgccaggccaaacctttgaggtatgtgctgagggctgctgggatactcacactcgctggcatgactcctggatatagc

SEQ ID NO: 117429 - DNA, 497 bp, Homo sapiens
gtccaccctatctactatccagctgcagacagtgctgaaaacccccatggggatctgatatagcaaaccctgggcagaggcctgggccatccagggcaaacccagcaggctcataagtgacaagaggatgcaactccaaccaactgggcgctttccacagctttgagaggctgtggtcgtggaggaaagaccatgtggtcagccaggccacactgctctgttccttggctccccgtggctaaagctgccttgcagtggtgagagcacaccttacctttgcagtgtccatcgtaatcaacctggattttggatccagtgaggcaggcatctcgatgcagttcacagtggttgaggtaggtcttgccattactgccacacacaggcctcttgtgaggtttgcattgctgaaacagacccaaaagagaatgttatgtgcagttatggatatcgacacacagacacacacacacacayacatgcacacacacacacagagc

SEQ ID NO: 117430 - DNA, 571 bp, Homo sapiens
agaagtacatagctataactctgccttttatcctggtatttaaaataatgtagtatttagcatctatgcaatacataatattttaaaagatactgtataaggcttgcatggattttttttgacttagagtaaaattatgaatccaagtataaatataaataatctaaatgttttaaaagctatcttgaaaagataattaaattttattttttactgatagattttgtccctcttattatattaaattttaaagtataagagtggccttattgaatgtcaacaaaacactatccacagtttcataagtgaatagagcagtgagtatagtcctttcagtagtaaaacattaagctcttaagttcttggtgcagattttaactccactattttcttgcacaagccatataacttatctaaacctcaatgtcttaatcagtaaaacaggcacagtaacagtactaatctcatagttctttagtttgttgttgttgttggtatgaggatwaattgagataatgcatggaaacttttgttactatttgactagaaatagacattcaataaatactag

SEQ ID NO: 117431 - DNA, 574 bp, Homo sapiens
ttttaaatgcccttcatgactgatcctctttcagaaggtcattcactttgaatgagcatgtaagtctggaagggacacaaatggtgtggtaaaagagaccggagatcagctcagaccatctgcatcaaccctggaaatcaatgtgttgacagatgtcacagctagttttctctcagatccagtaacctgaatgtcatgaaacatttgctgagacaagaaaatgttatacacaatatttaagcttatgtaaggactttatttgagagaaaaacatagtgaaaagttacagayatttggagccttcacacctcatacaacataaacttaatagtacacatagccactctgcaatatatatttgtcttgtttatgtttttctatatttcttgtcttgtccatttggaaaataaaatcaagcaattccattttccattacaccaacacatatacccacttttattattttcctgctttcaaacaataatgagagccacaagcaaagattagttaacatttcaggaacttgatgggaagaatgcattttgtcattgcagaacagaaagagatgattagg

SEQ ID NO: 117432 - DNA, 553 bp, Homo sapiens
aattttttaaaaagcaaatgcacatatttatatatgtgggaggtagaaaatatattttaatattgcacattatgtgtatataaaaattggaacaaattagtacttacaaaaaagtatttaaagggcagaatctactattacatttcttatgtctgtgtacatactacacaatatttcttagtaaaatgtgctatgaaaccatttaaataaaactaggacattgtttaatatctaaggaaaagtaacacatttttaccagatggtttaattcataaatatttcacaatataaacaaaaaaaatgtttaacctaaagttagtcttgggatctagtccattttttcatttgtttggaatgctatttaaattcaaaatgctttgatgttacctgaatttattttacataattccagatattgggcaaattatttgagcagctgaatgacattatcacagattctgtttctatcattctkctctgccatcctcacgatgttggctttggccttagactaacttcctccctgctcccaagatgtccagagcagtcctag

SEQ ID NO: 117433 - DNA, 614 bp, Homo sapiens
aaatataccacaaggctatagtaacctaaacatcatggcactagcataaaaatggaacacataaatcaatgaaatgaatggaagcccctgaaataaattcgcctacctatagccaactgattttcaacacaggtaccaatagggcaaattggggaaaacccagtctcttcaataaatggtrctagaatatgacaaaaacccttcttcccaccatatacaaaaataaactaaaaatagtttacatacatacatgtaagacctgaaactatgaaactactagaaggaaacataggtaaatgctttacaacattggggctgggcaaagatttttaaaatacgacctcaaaagctctgcaacaaactcaaaaataggcaaattgaatttcatcaaactgaaaagcttttgcatagcaaaggaaatgagtgaagggacaacctgcagaatgtgagaaaatattagcaaacttcccatctgacataatgttaatattcataatatataaacactttaaacaactcaaaaacaaaataacccaatttttttttaaatcagcaaaagaccttaatagtcacttttcaaaagaaggcatacaaatatccaaaggtaaatgaaa

SEQ ID NO: 117434 - DNA, 614 bp, Homo sapiens
aaatataccacaaggctatagtaacctaaacatcatggcactagcataaaaatggaacacataaatcaatgaaatgaatggaagcccctgaaataaattcgcctacctatagccaactgattttcaacacaggtaccaatagggcaaattggggaaaacccagtctcttcaataaatggtgctagaatatgacaaaaacccttcttcccaccatatacaaaaataaactaaaaatagtttacatacatayatgtaagacctgaaactatgaaactactagaaggaaacataggtaaatgctttacaacattggggctgggcaaagatttttaaaatacgacctcaaaagctctgcaacaaactcaaaaataggcaaattgaatttcatcaaactgaaaagcttttgcatagcaaaggaaatgagtgaagggacaacctgcagaatgtgagaaaatattagcaaacttcccatctgacataatgttaatattcataatatataaacactttaaacaactcaaaaacaaaataacccaatttttttttaaatcagcaaaagaccttaatagtcacttttcaaaagaaggcatacaaatatccaaaggtaaatgaaa

SEQ ID NO: 117435 - DNA, 614 bp, Homo sapiens
aaatataccacaaggctatagtaacctaaacatcatggcactagcataaaaatggaacacataaatcaatgaaatgaatggaagcccctgaaataaattcgcctacctatagccaactgattttcaacacaggtaccaatagggcaaattggggaaaacccagtctcttcaataaatggtgctagaatatgacaaaaacccttcttcccaccatatacaaaaataaactaaaaatagtttacatacatacatgtaagacctgaaactatgaaactactagaaggaaacataggtraatgctttacaacattggggctgggcaaagatttttaaaatacgacctcaaaagctctgcaacaaactcaaaaataggcaaattgaatttcatcaaactgaaaagcttttgcatagcaaaggaaatgagtgaagggacaacctgcagaatgtgagaaaatattagcaaacttcccatctgacataatgttaatattcataatatataaacactttaaacaactcaaaaacaaaataacccaatttttttttaaatcagcaaaagaccttaatagtcacttttcaaaagaaggcatacaaatatccaaaggtaaatgaaa

SEQ ID NO: 117436 - DNA, 572 bp, Homo sapiens
taattacttaaatccaacccagtctacctggactcaaagtctggccttgctacttactaacagtgtgtccttgagcaagttgcttagtctcaccatgtctcagttttcacatttgaaaaatgaggagagattacaatagcatctgcctcttgaccttttataagtattaatgagttaatactagtaaagcacagactttattacatagtaagcctcagtaatggtgagaaatcattcttagtaatggccaccagtgttcatggtaaccaatcagacaggagacatcaggatgttagtctagaaaacgttagaaaggccaggtgacattacacagattcttagaacgtggcccatttactaatacactctaaaaataagttagttgrttttattaagattgactatggaaataaatggtattctcatccaagttgaaggaagcctggctcttcctttacagactatttcagtccactaatgattacttagctttagccttctaggctttgtgctgtatgtcaagttcttgacctcgatgaggcggtccaatgagttattagtaaaacaataga

SEQ ID NO: 117437 - DNA, 628 bp, Homo sapiens
aaacacttaccatcgtgttccaattgcctgcaatattcagtatagtaatatgctctacaggtttacagcctaggagcaataggctataccatacagactagatgttcagtaagctatactgtaaaacccaggattgcagtaagctataacctctatatttttatactctataatgtttgctctatgaagtacactctatggtgttcacgcaacaayaaaaatcagttaagatatgtttctcagaatgtatccccattattaagtgacgcatgactgtagtttaaaacacacattacaaaaacaaaaagcactggtgaacctcactgaagaacttcactgcaaagctgtgaaaatgaaactgacataattataaaaattatcatgaagattttcagaagcttgaaaggctcacagtcagtgagtcctctatatgcattttgagccatttctgtaaaaattactgagcacatttttaagaaacttatatggcacaacggtaaacattatattcaaccacatcacctattcatgtttccaaaatcccacttctaagtgatttcaaaaagaaagttggcaaaagagatttcaaatactatcatttatcactcggttggagaatatcacttat

SEQ ID NO: 117438 - DNA, 628 bp, Homo sapiens
aaacacttaccatcgtgttccaattgcctgcaatattcagtatagtaatatgctctacaggtttacagcctaggagcaataggctataccatacagactagatgttcagtaagctatactgtaaaacccaggattgcagtaagctataacctctatatttttatactctataatgtttgctctatgaagtacactctatggtgttcacgcaacaacaaaaatcagttaagatatgtttctcagaatgtatccccattattaagtgacrcatgactgtagtttaaaacacacattacaaaaacaaaaagcactggtgaacctcactgaagaacttcactgcaaagctgtgaaaatgaaactgacataattataaaaattatcatgaagattttcagaagcttgaaaggctcacagtcagtgagtcctctatatgcattttgagccatttctgtaaaaattactgagcacatttttaagaaacttatatggcacaacggtaaacattatattcaaccacatcacctattcatgtttccaaaatcccacttctaagtgatttcaaaaagaaagttggcaaaagagatttcaaatactatcatttatcactcggttggagaatatcacttat

SEQ ID NO: 117439 - DNA, 622 bp, Homo sapiens
ttgctggcttagattgtaaccacaaacctctcagttttgaacattgacataacctcttgtacttcgcattcaatggaacaactctctttgcattctttgctcattcattcaactctctatgaggaacttcacaggraaacaaacatataaacatataaaaaaggataagcagttgttctgagtttagatattcctgataatctatttttggagaattgagaaaatagaaccagaaaataaaagctccaagagaaagttcatttacatgaacatgtcccaatatcaggcactgtctcttgtacgtaaatgtggtaagccatggccccactacttaggtcaatccttctggcgtgggtaagctagtgaatagcttcctgtgagcatcataacatcagtggacagtgactggcaagagcctatctagtagacaccatataacgtttgagtgctacagcatgatgatatttaatgggcaataagaaattctcctcggaacatgaatgttagatccaggtgatatcacctgataaaggcaggttttgtaattaagtttagagtgatgtgtttcctggtaaaagtctgggtagggtaactattaataaaagaatctcacactagacag

SEQ ID NO: 117440 - DNA, 619 bp, Homo sapiens
accgttttagccaggatggtctcaaatctcctgacctcatgatccacctgtctcggcctcccaaagtgctgggattacaggtgtgagccaccgcgcccggcccagatctttaaagggtttaaaaaattttccagtgagaccatcttggactgctgctattgcatttattaattgacaattttatccatttctyctatgtaaataagtttttaggtttttatctcttgaattcagttttggtaaagcacattttcttagaaaattgtcttcagtttgggttttcaaatttacttgtatattgtttagcaaaataattgattattactcttaaattaactctgtgggtttctttaatcgtttataatttatttttgtgtatttctattttattttaaaaaaaataggccagtgattttttttttatttcacataaccagctttcagttttcttcttaactccttttcttttttatcactttattttggttttgtttgtgtaatatcccattccttttctctcttgaagttagctgtgtaatttatttttgttaattttttatggataaaatacttgagaatagtaatttccttagcaatatgtttaacttttaagaattgt

SEQ ID NO: 117441 - DNA, 519 bp, Homo sapiens
ccctaacatcaacaatactctaagaagttctgtaggattacaaaatgcatgaaaattggcctgaggctgttgagtgacttcgcaaagtgtatacgatctgggtaatgatatcagaaatagaaaccatgaccactcacagcacactcatccagcagtgaatggccctgtttaggtaataractttacagactcacaattctgtaaacgccacacctccacagttccagagacacttcttattgaaatcttatgaataacattgagccatatactctatcgagtccctgggtggtgcctgaaaccttcccaaattctgcatacctcattgtgaattaggaaactaatctgtactccattagccatgaaatttgccacttagaaaactacatattcataatttgggaacttgtaatgatacattataactgacagatgatcagttatattgctcaggcacatattgcttttagttttacttattgaagatagaagatatttcacttattttcatgaagaatt

SEQ ID NO: 117442 - DNA, 595 bp, Homo sapiens
aaaaaaaatgtaatttatttttaagttctagcatacatgtgcaggacatacaggttccttacataggtaaacatgtgccatagtggtttgctgcacctaccaacccatcacctaggtattatgccctgtatgtattagccatttatcctaatgctctccctccctccacccccatgacagacccaagtgtgtgttgttcccctccctgtgtctatgtgttctcattgttgggctcccacttataagtgagaacatgtggtgtttggttttctgttcctgtgttagtttgctgaggataatggcttccagctccayccacgtccttgcaaagaacattatcttgttcccttttacggctgcatagtattccatggtgtaaatataccatattttcttcatccaatgcatcattgatgggcatttgggttgagtctatgtctttgctgttgtgaatagtgctgcaatgaacatgcacatgcatgtatctttataatagaatgatttaatattcttttgattatataccctataatggaattgctgggttaaatggtatttctggttctagatctttgaggaatcaccacagtgtctt

SEQ ID NO: 117443 - DNA, 517 bp, Homo sapiens
ttagtggattcctatggatttttttatatgcaagattatgtcatatgcaaataccaattatttttcttaagccaggagtggtggctcacgcctgtaatcctagaactttgggaggctgaggcgggtggatcacctgaggtcagaagttcaagaccagcctggtcaatatggtgaaaccctgcctgtactaaaaatacaaaaattacttgggcrtggtggcacatgcttgtaatctcagttatttgtgaggctgaggcaggagaattgcttgaacctgggaggcggaggttgcattgagccatgatcgtgccactgcactccagcctgggcgacagagcaagactctgtctcaaaaaaaaaaaaaaaattattttgtgtgttgttttgctttgtggatgcattgttttttcttgcctagttgttctggctagaacctctagtacaatgttgaatagaagtgaagagtggacatctgatatggtttggctgtgtccctacccaaatctctttttgaatt

SEQ ID NO: 117444 - DNA, 554 bp, Homo sapiens
ggattgggacccctttccagtaacattcccactaacagtggataagagttcacctttctctgctttctcatttattactttttgataatagcctttctaaccagggtgagatatttcattgtgattttaataaacatttccctaatratttgtgaggcagagcactttttcacatacctgttgaccatttgtatgtattcctttgaaataatttatttagttcattctttttacttaaattcgggtttaaaatttgcatcaccgtatctttctctacctaataattttaagtttttaatttattgtcagaaaagttaagaaacaatatttttaagtcaaagatgttatgcatattggacagattatctagagcctgagataaaaacctatcctttcttcttctttccccttctttgctcacaatctatcctatggattagagttcatgttcacttctctcacttttgcctctaatttctaaccttgcttggaagtagagggtggtacctgtgcctgcaggccaaatctggccagagatcatttattaaaatata

SEQ ID NO: 117445 - DNA, 554 bp, Homo sapiens
ggattgggacccctttccagtaacattcccactaacagtggataagagttcacctttctctgctttctcatttattactttttgataatagcctttctaaccagggtgagatatttcattgtgattttaataaacatttccctaatgatttgtgaggcagagcactttttcacatacctgttgaccatttgtatgtattcctttgaaataatttatttagttcattctttttacttaaattcgggtttaaaatttgcatcaccgtatctttctctacctaataattttaagtttttaatttattgtcagaaaagttaagaaacaatatttttaagtcaaagatgttatgcatattggacagattatctagagcctgagataaaaacctrtcctttcttcttctttccccttctttgctcacaatctatcctatggattagagttcatgttcacttctctcacttttgcctctaatttctaaccttgcttggaagtagagggtggtacctgtgcctgcaggccaaatctggccagagatcatttattaaaatata

SEQ ID NO: 117446 - DNA, 567 bp, Homo sapiens
ccaaggtcctgctgctctgtacagcctcaggacrtggtgccatgcactatagccactccaggcccagccatcttaaggtctgtatcttaaagttcccaagatacagctcagcctgttgtttcagagggtacaagttgtaagccttggaggcttccatgtggtgttaagcctgtgggtgcagaatatgagagttgaggcttaggagcctctgcctagatttccaggaatgtatggaaaggcctggatgtccaggcagaagtctgctgcagggccaaagccctcatggagaacctctactagggcagtgtggaggagaaatatagggttggagcctacatacagagtccccactggggcactgcctagtggagctgtttgaagacagccaccatcctccagaccccagcatggtagatccaccaacagcttgcaccgtgcccctggaaaagctgcaggcacactcaatgccagcccatgaaagcagccatggtggctgtcccctgcagaaccacaggggcagagctacccaaggccttgggattctgcccatttcatcagtgttgccag

SEQ ID NO: 117447 - DNA, 567 bp, Homo sapiens
ccaaggtcctgctgctctgtacagcctcaggacatggtgccatgcactatagccactccaggcccagccatcttaaggtctgtatcttaaagttcccaagatacagctcagcctgttgtttcagagggtacaagttgtaagccttggaggcttccatgtggtgttaagcctgtgggtgcagaatatgagagttgaggcttaggagcctctgcctagatttcmaggaatgtatggaaaggcctggatgtccaggcagaagtctgctgcagggccaaagccctcatggagaacctctactagggcagtgtggaggagaaatatagggttggagcctacatacagagtccccactggggcactgcctagtggagctgtttgaagacagccaccatcctccagaccccagcatggtagatccaccaacagcttgcaccgtgcccctggaaaagctgcaggcacactcaatgccagcccatgaaagcagccatggtggctgtcccctgcagaaccacaggggcagagctacccaaggccttgggattctgcccatttcatcagtgttgccag

SEQ ID NO: 117448 - DNA, 590 bp, Homo sapiens
tgacagcagttaatcacaccttagagtcacataacaatatacagcttcctaaatgctcccacccacatcatgtcatttatatttcacaataatcctatgaagtagatatcactccccctccttgatcagcagaagaaagtgagagtcaaagacacaaaaatccctgctcacagcaaatagctggtatgtagcacagcagacttgcrtgtagatgttctgatgtaaagctcctgtttttaaagccgaatttcacttctaagtcagtatttttgctgcatatatatgccaatgcacagatgccagctgtggcaataaattaattttaatgatcttttaactttattttaaaatatcatatggcagactcagaccacatggcagagttaatcagtggttataatagagttctacctgtgccaatgaggaatagggaaattcctttcctgcgggccattctcttagtgccacatgtacattaatctaaatggaacattcctcagtgattatttatgaacagaagcaggtggtactgaatgattgcatgtgagataaatctaggaaatatttttgttgcatgtgttcattatatt

SEQ ID NO: 117449 - DNA, 529 bp, Homo sapiens
tcattacatcacacaaggaccctggctggcacccaggaggcttattttcccctttctgatcagatctaagtcctgtttcctcattttctatagacgatgaataagtttaaactgaacaaccacctgtaccaattcctgccacaccccccaccctaccgcccccagctaccgttgcaggtgtctagtctttgcttagctatttgattggacacagggsgtagacattttttataaatacctattagctaaccacgcatttcttcaaacatgtatttcagtttcttacttaataagcttagacttctcacatcaacattctatcaaaggaatatacagattttagaggttctcatattcaaatacagatcagttacaatccctatttacttgctgaaaaatcggatgggaacaatgtaagacagtctcagctcttccccactctgatcctgagccacatttctctatataaaactccagccattgaggctcacccagaactcatcctttactattactgtaagaatctaat

SEQ ID NO: 117450 - DNA, 563 bp, Homo sapiens
taacaagttgtattagtggtatctgtcttagatcatcaagagtacaacttttgaaatatgacttagagctaaaactctgagtagaaatatctcctcatcagtcataaatggtgactttcaggtcagcaggagccttagagaccattttgttcaaagttgatgcaagactggaacctctcagcagcatcccagtacttcaaggacagcccactctgctccatcaggaatttctccagttcttagaggtttatatccctccattcatggcatgagtggctgaagctgtctcctggacatgacacttgggttttccagaaaggtccacacccctaggtgcttctgggaggttcctcctgacaggtctctaactgctccaaacatatacattcttccttttatttatagccaatgatgtacattttatatacaatctatatacattcactttatggagggccaaagatttttactagttaaatagaagatgaatgattrtagattattaatatttgaggctcatcaactaaacttagccacattgttaaaatttaaggaagaagata

SEQ ID NO: 117451 - DNA, 613 bp, Homo sapiens
aacaactgactcttagctagagcagatttcttttaaaataacaacatgatacaaataatagaaagagcacttaactgagagttaagaaacctgagtcctgatgccagtcctgatactacctatgtgaccctgggcaagtgtttgacctctctggctatgagttcttttttcataaaataagaaattaaaatgccatggtttctgataagtgccatgatcctagrtgctatataatgtctttctaaaattgaatgattcagattatcaacagactacttcaccttcttaggagaaaattttgctgcaactctttttatattataatttcaccctggattcacctggaggctcgtagtgaagaaatcaaaacattcaatgtgccgaaggtcagtaactctgaatcaattatcacaggagattatgtgtgctagtgtgtttacatggcatgctgtcttctcctggagcatttgtgtggcttaaagactgctctttattaccaaataaaaagctccttgccacctacactcaagaatatagcaataatggattatcattattcctgacagcatatgctaattcatagacttttaaatgaaaagaaagcagagattac

SEQ ID NO: 117452 - DNA, 571 bp, Homo sapiens
atcccacatcaaaaagatttcataactgaataatcttaagaaggcctgcatattaaatccctttctttcagattcataatgcatattattatataaaggctcagagaatatctacagtaaagaaatatgtttaaccagcattttccaaggggtgtgtgtgtgtttgtgtgctatgtaatacttcatgaaatcctgtgggaaacgtaattggagaaaatacagcactaagtattttttaataatattcagatacattcattcaggataagaattcaaatctatatgagtgtaatttaaagcttgccattaaaaaagaaaaagcttcagaaaattttcgactgtcttttacccacagctattgttcctatgtcacccacttctcactcatcagcatgcatgtgaatgtgtaatattctacagggtgtstgcaaaattgggaaaaatggggcaagcttattgttaagtaattttagtttaattgtcaaatcatgtgctcaacatattttcaggtgatatactcttgcaaagaaatgagaaagaccagtaggatttgcataacagcaagctgatt

SEQ ID NO: 117453 - DNA, 557 bp, Homo sapiens
ggcatgcattccctccaagagcaagggccaggatgagaattctcggttcagctgactaacgcagctcacattttaatagtctgcagctctttctaagctgttaacactttactgtcttagaggatgtttgggctgaatacctcccatagttcttccactgagacataccttctccatggtagagaaaagcaaacaggagtgttgtagagaaagatgagtcaggggccaagtgggttggtgccaagacaaagcaggaacaaaccagtgttctggtgccttccgaaaggtatgtgtttagctcccactgataagtgagaacatgatatatttggttttctgttcctgcattaattcgcttaggttaatggcctccagccacawccatgttgctgcaaaagacctgatttcattcttttttatggctgtgtagtattccacggtgtatatgaaccacatctttatccaattcaccattgatgggaaactgggttgattctgtgtttttgctatcatgaataaagatgggaacaatagtcaccggggactactagaccagg

SEQ ID NO: 117454 - DNA, 573 bp, Homo sapiens
gagcctgggggtggacggggaacctgagggtgcagagtggggtttgtcatgcctgtcttcatctcagcggccccactctgagtggccctatctttgcccatcttgattcttctcagtctttcaagccaggctgaaccragcctttcctgactcccccagttagaaggaatcagccctgtctctatgtttctgcagatttttgaaaaggaacaactgtccttgtacaaagcccaacagacctctttgccttttccaccagaccctcgggctctttatttactttgcctccttctgcccttagcggggtgtgtatgtggaggaaggcagcgttggggagtgggcaatgcaaggaatggagcatggagaaggggaaggaagctgtgcatggattgatggacacgcaaagaactaactaacacagcgctattttacgcatatacacatcgtatcttactatacacagcctgtgtatgtgtacacagtggctattaggtattacacacacgtatgcatataaaacacatatagcatacagtgtctattgtaagatggagaacatagcaaagggtgcta

SEQ ID NO: 117455 - DNA, 604 bp, Homo sapiens
catcatccttatcactgcagtggctcttgtgcaggtgaagaagagcatgggcctctgtgccaggccagcatagaacttggggtaggaggactttaaagagaatatttccttgtccctcaccagccacccgttggagattttgatacgccccaccccagcctgctcgacaagttttacagcggaaaactcagtaggaaggacagcacttttgtattttcttctcattccctgttttccatgggatcttgatgtcaatttcagtttttgccactcaccagggtacttctcaggaacatgaccttcatgccaaccagtggagacaagagctcacagagccttccgcaggatgagagcataggaaggacccactggaaaggcaggtatgcaagcattccagaatgttatcttcttccaccttttgtaatctcttatatttggatgtcagttccttttggtacgagcacctcaagagcatttcatgatggatggcagggtagcaaaagaagacacattgcatgtacatggatgcacacgmcttctgaccctgtgacacttttcgcagtttgaccaacaatattgatttttgtctgtgctgctatttgat

SEQ ID NO: 117456 - DNA, 590 bp, Homo sapiens
cttgcatattttctatgtatttacttatgtcattgctttttctggtactctttattctatctatcaggtgatttcaagttactgtttaatgtctaacatgaaggtttctttaatatttcttgacagatatgctagtgattaattcttgtagtattttatattctgggaataccctaatttcttcttaattcttgaaaggtagcttttgtggatttaaaattcttggttaatgatctgcacattgaatatatcatcccactgctttctggcctctatagtttctgatgagaagtcagctgttaattgtattgagcatcccttatatgtgatgaataacttttgtgctactcctttcaagattctctcttcatctttggctctcaacagtttgactataatatgtctaggtgtagatctctttgaatttatcataayttggagtttgttgaacatgttgaatgtgtatattaatgcttttaaaatcaaatttgggaagttttgaccattatttgttcaaatattctttcagtccttgtctatatcttcaccatagggtatttcatttgatcccatggctttaaatggactcc

SEQ ID NO: 117457 - DNA, 592 bp, Homo sapiens
ggaatgtaaatcggtagagccattatgaaaaatagtatagatggtttttcaaaaaactaaaaatagaactgccatatgttccagcaatcccactactggctctttattcaaaagaaaaaataagtatgtcaaagagatacctgcacctacatgtttattgcaggactattcacaatagcaaggatatagaaccagaataagtgtcgtacactggatgagtggataatgaaaatgtgggatatttacacaattgaatactacttagccacaaaaaaatcaaatcctgtcacttgcagcaatatagatggagctggaggtccttatgttaaatgaagtaaaccaaatccataaagacaaataccacaatttctcagtaayatgcaggagttaaaaaatctaacctcatgaaagtaaaaagtaggatgatagttactagagactaggaaggctctagtgagttggggtgagttgggggaagggtgaagaaagactggttaatacatgcaaacatacagctagctagaaagaattaagtgttaatatttgataagaggttaggatgagtatagttaacagtaatatattgtatatt

SEQ ID NO: 117458 - DNA, 567 bp, Homo sapiens
caactcattatggtataaggtaacataagcgaggcctgaattacaaaattttaatcagaatataaggagtatagttatttgtcaagagaaaattacattaggtatttttaagagttaacaaaataatgtttagatattaaaaagcatctatatcttagagttaaattttgccatgatcgtcttgcagattggcagacagtaacaaagtaaatatagcmctttattcagagtttaaactacaagtaaaattattttctaaattacagttttattagcttcaaagtacatgttgagaacataataaaactggtctgtaacatgtttatacaagtttttaaagttagagtttatgaggtcagttgttaagtataccatagcattaaagtacatcgttcttaattagaatggttattctcttaaatccctagaacctatttttcactattaaatatttacttataagtttacaaataaaacagaataaatgtatttggatagactgtatttaaattttccttttcccgtgattttcttatttggattttcaaaacatatgatattacattt

SEQ ID NO: 117459 - DNA, 605 bp, Homo sapiens
tgccttaaggacatgttcctgctgcagataactagccagagcccctccctttgtttcccataaggaatattttacttaatctataatctatagaaataatgcttatcactggcttgctgtcaataaatatgtgggtcaaactctgttcggggctctcagctctgaaggctgtgagtcccctgatttcccactccacagtctatatttctgtgtgtgtatctttaattcctctagtgccactaggttagagtctccacaactgagctggtcttggcaatctatatttcacaaagatttacatccaaaattagttgaacctacaataacctaaagacatattagcttaataaaacattgcacaccaggggaagtaaaaatatgtcagttacaggttctgcctacaggagaagcaattcaaaatggaacatactgagacagaacaacatttgatttgacttaygccaaaggatctgaaaagagtttttctctcaagaaatgggaacatttatttctgatgcctgattaatgaaaaagtcactatagagacaaaaaccccttagtttgagaaatttaataaatagatacataaaatatgagaaaaataa

SEQ ID NO: 117460 - DNA, 540 bp, Homo sapiens
atttattaattagcttactgattgatgacccaagggaaaatatagtgtaatgtttcaaaattcaagtcttttttcatgtttttataacaatatgatgcattttgagtacatgactttcactagtttagatttctgatcaagaataattgcaaacttgaattttatgtttaaaataaaatgcattacataaagatataaatgttacatattgaaattaactttaaaattagtaataggcacaattgcttatcatgcaacaagtgaattyattaactttacctatattacctttataaagctctgcaaaagatatattactacctatgttctttttgtgagctgagaaaaattggtttcagaaagaaaaagagatatcctgaaagcaggagctagaaaattgaaaatctgagatttgaactgtatcaactttacttctttaaaagacaatattgaattgtctaaatctatcaaaacacaattaggtgagaattgcgagcaactacagaaaattataagcaaaattggaagaaaatgtcacag

SEQ ID NO: 117461 - DNA, 618 bp, Homo sapiens
ctgaaggactcagacataaagatctgttcaaaagatgagactcaacactctggtggtagtctgaatttagtaaatattcccagtcctgagaagaataaaaagaatattaatttttaaaaataatacctccttataatatcataagaaaattaattcacttaaaacaattcaagtttcattttcacattaagttgatctaagagtatgttaaaaaaaagacaatgctaagaatgaagtaactataaaatagcaagccagttataaacgttaaggcaagccacctttaaaaaccattaaaaaaaatcttttcatgcccttttaggaaagacattgggagaagaattatacwatttaggtagagattgagagagaaaatttaagattatctcaggctaggttttataggaaaagtagatggcaagttagtggccactacactgaactgtgttttggtaagaaggaaggtccacctgcattcatctggtgtattcatctttccacatgtataagatgccagggctactaatataatctaataatcaactgatttttatattcagactgattggactacattttccaaatgttcagtctattttggttctacttgtgatttac

SEQ ID NO: 117462 - DNA, 649 bp, Homo sapiens
actttgttaactacctagctgcaatgcagatgcacttactagaaccacagtattcctctgattaagagtctgaaaatcttgccataaaagttagccaattcttaaatacccaaatgccagcacataacctacattttatgcttataatcatttgwtcattaagctttaaaataaactgatcaaataaaatacaagcatctaagatgtttctattatatattcattctacagaaatatgtggtagttaataaagactgaggtaggtatctctgtgctgaagtggaacaatgaagaaacattcagaaaagcaaggcatctggcaataggtaaagcacacccacattgaggcacaatattttttaaaagcagagaaagaatgtattgcacatttgcatatgcaaaaaatatttctgaacacccaagaaactcctaacagtagctgtcatctaggaaaggagacctgagtgaatggattaagagggaaactaacttattatgattaaaagttcacagtcaggtgtggtggctcatacctgtaatctcagcactttgggagggcaaggcagaaggatcacttgaagccaggagttcaagaccaaccagcctgggaaacatagcaagaccttgtctttacaaaaaatttaacaat

SEQ ID NO: 117463 - DNA, 649 bp, Homo sapiens
actttgttaactacctagctgcaatgcagatgcacttactagaaccacagtattcctctgattaagagtctgaaaatcttgccataaaagttagccaattcttaaatacccaaatgccagcacataacctacattttatgcttataatcatttgttcattaagctttaaaataaactgatcaaataaaatacaagcatctaagatgtttctattatatattcattctacagaaatatgtggtagttaataaagactgaggtaggtatctctgtgctgaagtggaacaatgaagaaacattyagaaaagcaaggcatctggcaataggtaaagcacacccacattgaggcacaatattttttaaaagcagagaaagaatgtattgcacatttgcatatgcaaaaaatatttctgaacacccaagaaactcctaacagtagctgtcatctaggaaaggagacctgagtgaatggattaagagggaaactaacttattatgattaaaagttcacagtcaggtgtggtggctcatacctgtaatctcagcactttgggagggcaaggcagaaggatcacttgaagccaggagttcaagaccaaccagcctgggaaacatagcaagaccttgtctttacaaaaaatttaacaat

SEQ ID NO: 117464 - DNA, 429 bp, Homo sapiens
ctgaattcggctttaaaataatctgacaaggatagctagtggccttgcacagtggcaggacagwtctactaggaacagcaaagtacaggggaaaagcatgtacttttcagacagctatgagtttgaattttgttccaccatttaccagcttcaatttttctctcaaccagtgatgagattaaataatgtatgtagagcccagggcctgggtcataagaactcctcaataagcagtatgactatattctgaggggtgatttatcagtgagccagggtggaaatacctcatttgagtaatcctcaactgttctgcaacattcctagatgtttctggtgtctactttaaacaggaaaaacttcccatgccactttgccatctccacctgaaaactgtttagtagttcagtactataaatatcagttgaataa

SEQ ID NO: 117465 - DNA, 420 bp, Homo sapiens
gtggccttgcacagtggcaggacagatctactaggaacagcaaagtacaggggaaaagcatgtacttttcagacagctatgagtttgaattttgttccaccatttaccagcttcaatttttctctyaaccagtgatgagattaaataatgtatgtagagcccagggcctgggtcataagaactcctcaataagcagtatgactatattctgaggggtgatttatcagtgagccagggtggaaatacctcatttgagtaatcctcaactgttctgcaacattcctagatgtttctggtgtctactttaaacaggaaaaacttcccatgccactttgccatctccacctgaaaactgtttagtagttcagtactataaatatcagttgaataatttaaattcactggttatctttagaattc

SEQ ID NO: 117466 - DNA, 617 bp, Homo sapiens
atgtatgtggagtgttactacctatctcctttttcttttaaaatttagttttaaaaagtacacctaatattaagtttttcttctgtgtatagttctgtgaatttcagtacrtgtatagattcatgtaattactacaatgaggatatagaacatttacatcaccctcaaaaatttctctcatgattttgagactcatccaagttgtttcctgtatcgacagttcattgcattctatggctaattagtagtttattgcatgaatgtgtcatagttggtttttcattcaagataattgggttgatttcagttgttagcaattgtaaatatagatgctgtcagcattcatgcttagcgttttatgtgaacataagttttgctttctctaggacaggtacctaggagtaggattgatgggtcatacagttaagtttatattttgtttttaaagaaactgtcatctgttttccagagtggctcttccattttacatttttaccagcaatatttaagagatcatttacctgcattcttgttggtatttggtattgtcactcttttttatttttgtctttctgagagatgtgtagttatacctcattgtggttttaatttgcatt

SEQ ID NO: 117467 - DNA, 617 bp, Homo sapiens
atgtatgtggagtgttactacctatctcctttttcttttaaaatttagttttaaaaagtacacctaatattaagtttttcttctgtgtatagttctgtgaatttcagtacgtgtatagattcatgtaattactacaatgaggatatagaacatttacatcaccctcaaaaatttctctcatgattttgagactcatccaagttgtttcctgtatcgacagttcattgcattctatggctaattagtagtttattgcatgaatgtgycatagttggtttttcattcaagataattgggttgatttcagttgttagcaattgtaaatatagatgctgtcagcattcatgcttagcgttttatgtgaacataagttttgctttctctaggacaggtacctaggagtaggattgatgggtcatacagttaagtttatattttgtttttaaagaaactgtcatctgttttccagagtggctcttccattttacatttttaccagcaatatttaagagatcatttacctgcattcttgttggtatttggtattgtcactcttttttatttttgtctttctgagagatgtgtagttatacctcattgtggttttaatttgcatt

SEQ ID NO: 117468 - DNA, 520 bp, Homo sapiens
cccaggctggagtgcagtggcacgatcttggctcactgcaacctccgcctcctgggttcaagcaattctcctgcctcagcctcctgagtagctgggattacaggtgcctgccaccatgcctggcttatttttgtatatttagtagagatgaggtttcaccatgttgaccaggctggtcttgaactccagacctgtgatcttcctgccttggactcccacagtgctgggaatacaggcatgagccactggaccctggccttaactacatattttttacatctgcacagtgttttggaaaaagtggttcaactgaaagaatgaaaagttgggggcagaatttgctttaaaaaaaaattaaaaaaagggcattgaaaaaagtttcagtggtgttgggagggycttggaacaaggagtgaatggaagatgagggagtggagggaggccatgtatggactctttctacagaccaggctgttgaaggagagagggctaacaggaaatgaagtgcagggggaagttt

SEQ ID NO: 117469 - DNA, 520 bp, Homo sapiens
cccaggctggagtgcagtggcacgatcttggctcactgcaacctccgcctcctgggttcaagcaattctcctgcctcagcctcctgagtagctgggattacaggtgcctgccaccatgcctggcttatttttgtatatttagtagagatgaggtttcaccatgttgaccaggctggtcttgaactccagacctgtgatcttcctgccttggactcccacagtgctgggaatacaggcatgagccactggaccctggccttaactacatattttttacatctgcacagtgttttggaaaaagtggttcaactgaaagaatgaaaagttgggggcagaatttgctttaaaaaaaaattaaaaaaagggcattgaaaaaagtttcagtggtgttgggagggccttggaacaaggagtgaatggaagatgagggagtggagggaggccatgtatggactctttctacagaccaggctgttraaggagagagggctaacaggaaatgaagtgcagggggaagttt

SEQ ID NO: 117470 - DNA, 601 bp, Homo sapiens
cagtctattaaatgttcaatagcgttatatttaaaaaaacaatgtgcatactttaatttaaaaatactttattgctaaaaaatgctactgatcatctgagctttcagtaaattgtaagattttttgctgatagaggatgttggtggctgctgactgatcccarcagtgattgctgaaggttggggtgcctctggcagtttcttacaataagacaacaatgaagtttgctacattgattgcctctttctttcatgaaagatttctctgtagcacttgatgctgtttgatagcattttttacccaaaagtagaactttttttcaaaattgtagtcagctcaaaccctgccactgctttaacaactaaggttatatagtattctaaatcctttgttgtcattcaataatttcacagccttttcaccaggagtagtttccatctttaagaaaccactttcttgggtcatctgtaaggaacaactcctaatctgtgcaagttttatcatgagattgcagcaattcagtcacatcttcaggctccacttctaattctcttgctgtttccactacatctgcagtaacttcctccacttgagtcttgaa

SEQ ID NO: 117471 - DNA, 601 bp, Homo sapiens
cagtctattaaatgttcaatagcgttatatttaaaaaaacaatgtgcatactttaatttaaaaatactttattgctaaaaaatgctactgatcatctgagctttcagtaaattgtaagattttttgctgatagaggatgttggtggctgctgactgatcccaacagtgattgctgaaggttggggtgcctctggcagtttcttacaataagayaacaatgaagtttgctacattgattgcctctttctttcatgaaagatttctctgtagcacttgatgctgtttgatagcattttttacccaaaagtagaactttttttcaaaattgtagtcagctcaaaccctgccactgctttaacaactaaggttatatagtattctaaatcctttgttgtcattcaataatttcacagccttttcaccaggagtagtttccatctttaagaaaccactttcttgggtcatctgtaaggaacaactcctaatctgtgcaagttttatcatgagattgcagcaattcagtcacatcttcaggctccacttctaattctcttgctgtttccactacatctgcagtaacttcctccacttgagtcttgaa

SEQ ID NO: 117472 - DNA, 601 bp, Homo sapiens
cagtctattaaatgttcaatagcgttatatttaaaaaaacaatgtgcatactttaatttaaaaatactttattgctaaaaaatgctactgatcatctgagctttcagtaaattgtaagattttttgctgatagaggatgttggtggctgctgactgatcccaacagtgattgctgaaggttggggtgcctctggcagtttcttacaataagacaacaatgaagtttgctacattgattgcctctttctttcatgaaagatttctctgtagcacttgatgctgtttgatagcattttttacccaaaagtagaactttttttcaaaattgtagtcagctcaaaccctgccactgctttaacaactaaggttatatagtattctaaatcctttgttgtcattcaataatttcacagccttttcaccaggagtagtttccatctttaagaaaccactttcttgggtcatctgtaaggaacaactcctaatctgtgcaagttttatcatgagattgcagcaattcagtcacawcttcaggctccacttctaattctcttgctgtttccactacatctgcagtaacttcctccacttgagtcttgaa

SEQ ID NO: 117473 - DNA, 506 bp, Homo sapiens
gtgtgcaccacacatattgccctggcatcttatttatttctctcattaccagtgcatacctacctatcatgttaaaacaagaaagggagaaaagtggactttatatgtaacactttagaggcatagtggaatgtatattattattaacaaattagatagcaaagcattatatttgttatgctagaagactatggctgtgctaaaagaatataatatatgtcaacattgccagactgggcacttctcacaatattcccaaccaacaggaataaaactaaaggtcagaaaaaaaawagtaaattaaaacaaaattttatcacagcagaatttcttctcaaaaacaaaaaatggaaattaggctataattaaagtaagtttttcaatggcttgttagccaagcaaggaaaaccattaccaacagtagttaattaaattatgttttattatggtaaccaaagatgtgtccatagaaaataaactttaaaaaagactattagcctttcagc

SEQ ID NO: 117474 - DNA, 551 bp, Homo sapiens
aaatttacaaagcttgttaaatgtcaggtgtttaaagcctgattatttattgtattatttattagcaggtactttgcagaaaatatttaaatctgtcatgttttagtgaackattatataatagtgtcagcagtgattttgacttgcatttgtggacttcatcatcatcaaatcctatgaatttttgttagatatagaggcagaatatactgaattgccattatacagagcaatttaatgacttggcagtggtaaagttttatttcagttttttgcgctgaggaatgagattgaaatttttctgaataatattgccctcaactgttaagtcaaatgcttaatagctttgaaagttggcttttcctatagatttcataatattttgtaacaaattcacctaaaattacaaggcagaacagtgattataagtgaaccttatactgtggtaaggtcacttctacaagaataatgaatcatgaaaatcaagagaaagaacaaatagtaggaaaatatcttccaattccttttggcccttcatatttccacctaaa

SEQ ID NO: 117475 - DNA, 554 bp, Homo sapiens
ggcagtggtaaagttttatttcagttttttgcgctgaggaatgagattgaaatttttctgaataatattgccctcaactgttaagtcaaatgcttaatagctttgaaagttggcttttcctatagatttcataatattttgtaacaaattcacctaaaattacaaggcagaacagtgattataagtgaaccttatactgtggtaaggtcacttctacaagaataatgaatcatgaaaatcaagagaaagaacaaatagtaggaaaatatcttccaattccttttggcccttcatatttccacctaaactcataagcttttaaaaagataattattatttatacttaaaaagataatataggataatatttttgtaaaagagttcttgagatacagcactgaatataaagaaaatattggagcattcaactacatttgagaaataacttctgtttattaaaagatacygtaagaatgaaagcacaagccctaatgaatattcctgtttgatactaaaccaaagcttgagaagtggtagtttctcaagtttttcaa

SEQ ID NO: 117476 - DNA, 646 bp, Homo sapiens
cattatacagagcaatttaatgacttggcagtggtaaagttttatttcagttttttgcgctgaggaatgagattgaaatttttctgaataatattgccctcaactgttaagtcaaatgcttaatagctttgaaagttggcttttcctatagatttcataatattttgtaacaaattcacctaaaattacaaggcagaacagtgattataagtgaaccttatactgtggtaaggtcacttctacaagaataatgaatcatgaaaatcaagagaaagaacaaatagtaggaaaatatcttccaattccttttggcccttcatatttccacctaaactcataagcttttaaaaagataattattatttatacttaaaaagataatataggataatatttttgtaaaagagttcttgagatacagcactgaatataaagaaaatattggagcattcaactacatttgagaaataacttctgtttattaaaagatactgtaagaatgaaagcacaagccctaatgaatattcctgtttgatactaaaccaaagcttgagaagtggtagtttctcaagtttttcaagtggtttggtgcaatctgaagactgcaatcccatcartgaactttatatctttaccctttaaaatt

SEQ ID NO: 117477 - DNA, 564 bp, Homo sapiens
catcctccctaattatttttatactttatttactgagagatatattaaatatcctactagaagcatggatttgtctgtctcctcatctgtcaacttttgctttttgaggctgtacttgggtgcatatgattcaaaaaaatacatctttttttttaatttgaacttttatcaaaatgaaatgttttccttcatttatgtatgctttcaacattatgtatgatatagctatagtaactttggttagactttgcactgtgtatctttcacgtgtgtgtgtgtgtgtgtatttttttttccactgtgctgcccaggctatagtgcaggggctgttcacagacgtgtctgtggctccctgctgccttaaactcctgggctcaaatgatcctcctacctcagtctttagagtgatgtgtgccaccactgccaaataattgtttttatttctttagagatagaatttggctatattgcccaggctggtcttgagytcttggtctcaagtgatcctctcacctctgcttcctgagtcactgggattaaaggcatgtgccgccaagcccggct

SEQ ID NO: 117478 - DNA, 564 bp, Homo sapiens
catcctccctaattatttttatactttatttactgagagatatattaaatatcctactagaagcatggatttgtctgtctcctcatctgtcaacttttgctttttgaggctgtacttgggtgcatatgattcaaaaaaatacatctttttttttaatttgaacttttatcaaaatgaaatgttttccttcatttatgtatgctttcaacattatgtatgatatagctatagtaactttggttagactttgcactgtgtatctttcacgtgtgtgtgtgtgtgtgtatttttttttccactgtgctgcccaggctatagtgcaggggctgttcacagacgtgtctgtggctccctgctgccttaaactcctgggctcaaatgatcctcctacctcagtctttagagtgatgtgtgccaccactgccaaataattgtttttatttctttagagatagaatttggctatattgcccaggctggtcttgagctcttggtctcaagtgatcctctcacctctgcttcctgagtcactgggattamaggcatgtgccgccaagcccggct

SEQ ID NO: 117479 - DNA, 538 bp, Homo sapiens
tgcatacttcagggctctatcctttaccctcttattccacataatatycctggagaaaatcatcacattttaacttcaatcactaaatgcttaatccaaatttctatcttcatctcagacttttttcctttagttccagacccacatgtccaactactactacttatgggacctcccaacatatatgacaggcttctcaaactgaacacatctaccccacttcttaaactcctcaaaattttttttttcttctttagagttcaatgaataacagaatgatccactctatcaccccactgtcatccctggcttctccttcctcatctcctgtatcaccaagatctgctaattctaccttttttagtggcccctccttcttattcccaccgtcgctctcctagttctcttcatttcttcactgaggttcagcaacatctccaatttttttgtctcccatttaggctctctaccaatctgtcatttgagtgttgccagtgatcctttccaaatgcaaaactgatccagtcactgacccaaa

SEQ ID NO: 117480 - DNA, 538 bp, Homo sapiens
tgcatacttcagggctctatcctttaccctcttattccacataatattcctggagaaaatcatcacattttaacttcaatcactaaatgcttaatccaaatttctatcttcatctcagacttttttcctttagttccagacccacatgtccaactactactacttrtgggacctcccaacatatatgacaggcttctcaaactgaacacatctaccccacttcttaaactcctcaaaattttttttttcttctttagagttcaatgaataacagaatgatccactctatcaccccactgtcatccctggcttctccttcctcatctcctgtatcaccaagatctgctaattctaccttttttagtggcccctccttcttattcccaccgtcgctctcctagttctcttcatttcttcactgaggttcagcaacatctccaatttttttgtctcccatttaggctctctaccaatctgtcatttgagtgttgccagtgatcctttccaaatgcaaaactgatccagtcactgacccaaa

SEQ ID NO: 117481 - DNA, 538 bp, Homo sapiens
tgcatacttcagggctctatcctttaccctcttattccacataatattcctggagaaaatcatcacattttaacttcaatcactaaatgcttaatccaaatttctatcttcatctcagacttttttcctttagttccagacccacatgtccaactactactacttatgggacctcccaacatatatgacaggcttctcaaactgaacacatctaccccacttcttaaactcctcaaaawtttttttttcttctttagagttcaatgaataacagaatgatccactctatcaccccactgtcatccctggcttctccttcctcatctcctgtatcaccaagatctgctaattctaccttttttagtggcccctccttcttattcccaccgtcgctctcctagttctcttcatttcttcactgaggttcagcaacatctccaatttttttgtctcccatttaggctctctaccaatctgtcatttgagtgttgccagtgatcctttccaaatgcaaaactgatccagtcactgacccaaa

SEQ ID NO: 117482 - DNA, 538 bp, Homo sapiens
tgcatacttcagggctctatcctttaccctcttattccacataatattcctggagaaaatcatcacattttaacttcaatcactaaatgcttaatccaaatttctatcttcatctcagacttttttcctttagttccagacccacatgtccaactactactacttatgggacctcccaacatatatgacaggcttctcaaactgaacacatctaccccacttcttaaactcctcaaaattttttttttcttctttagagttcaatgaataacagaatgatccactctatcaccccactgtcatccctggcttctccttcctcatctcctgtatcaccaagatctgctaattctaccttttttagtggcccctccttcttattcccaccgtygctctcctagttctcttcatttcttcactgaggttcagcaacatctccaatttttttgtctcccatttaggctctctaccaatctgtcatttgagtgttgccagtgatcctttccaaatgcaaaactgatccagtcactgacccaaa

SEQ ID NO: 117483 - DNA, 531 bp, Homo sapiens
tgtcatacagtgtaaattgaagaaggaccaaatcagcattgctttctaatttccatcaaaccctwtcatctgccaattttcattactggcaggacactgggctgactgatttgtctataaaagagaatctctggaaagaaaaaataaatcatggatgtcatccaaagaggctagaccgtatcattggcaggtagataagaaaggtcagaggactgacagaatttagggcaaaagaaaagcagcaggacttaatgtcaagaaatacaaagataaccaaagaaaagaggctggagttaaatcttaagtgaagtaaaaggaattaaagctaaatgatgagtaaatacattgaggaacagggggtgaattaagatatgtagcatttccatgtttaaaccttgcaaaaacttctcattgcagaccgaacagaacccaaactccttcccttgcttacaagcctacatgatctagcctttgttcgccttgatgatgtctctactaccctcacctagtaggctactatgctccaagtaa

SEQ ID NO: 117484 - DNA, 531 bp, Homo sapiens
tgtcatacagtgtaaattgaagaaggaccaaatcagcattgctttctaatttccatcaaaccctatcatctgccaattttcattactggcaggacactgggctgastgatttgtctataaaagagaatctctggaaagaaaaaataaatcatggatgtcatccaaagaggctagaccgtatcattggcaggtagataagaaaggtcagaggactgacagaatttagggcaaaagaaaagcagcaggacttaatgtcaagaaatacaaagataaccaaagaaaagaggctggagttaaatcttaagtgaagtaaaaggaattaaagctaaatgatgagtaaatacattgaggaacagggggtgaattaagatatgtagcatttccatgtttaaaccttgcaaaaacttctcattgcagaccgaacagaacccaaactccttcccttgcttacaagcctacatgatctagcctttgttcgccttgatgatgtctctactaccctcacctagtaggctactatgctccaagtaa

SEQ ID NO: 117485 - DNA, 531 bp, Homo sapiens
tgtcatacagtgtaaattgaagaaggaccaaatcagcattgctttctaatttccatcaaaccctatcatctgccaattttcattactggcaggacactgggctgactgatttgtctataaaagagaatctctggaaagaaaaaataaatcatggatgtcatccaaagakgctagaccgtatcattggcaggtagataagaaaggtcagaggactgacagaatttagggcaaaagaaaagcagcaggacttaatgtcaagaaatacaaagataaccaaagaaaagaggctggagttaaatcttaagtgaagtaaaaggaattaaagctaaatgatgagtaaatacattgaggaacagggggtgaattaagatatgtagcatttccatgtttaaaccttgcaaaaacttctcattgcagaccgaacagaacccaaactccttcccttgcttacaagcctacatgatctagcctttgttcgccttgatgatgtctctactaccctcacctagtaggctactatgctccaagtaa

SEQ ID NO: 117486 - DNA, 531 bp, Homo sapiens
tgtcatacagtgtaaattgaagaaggaccaaatcagcattgctttctaatttccatcaaaccctatcatctgccaattttcattactggcaggacactgggctgactgatttgtctataaaagagaatctctggaaagaaaaaataaatcatggatgtcatccaaagaggctagaccrtatcattggcaggtagataagaaaggtcagaggactgacagaatttagggcaaaagaaaagcagcaggacttaatgtcaagaaatacaaagataaccaaagaaaagaggctggagttaaatcttaagtgaagtaaaaggaattaaagctaaatgatgagtaaatacattgaggaacagggggtgaattaagatatgtagcatttccatgtttaaaccttgcaaaaacttctcattgcagaccgaacagaacccaaactccttcccttgcttacaagcctacatgatctagcctttgttcgccttgatgatgtctctactaccctcacctagtaggctactatgctccaagtaa

SEQ ID NO: 117487 - DNA, 463 bp, Homo sapiens
gctaacattaggtaactaagaggtgacataaaaaagactgaataaaatatcatggaggtttcataataagattggaaattcaatagactargagagaatagatcctaaaatatacatgctcattgggaaaacacctagtaagaaaaaggagagatctctatttaatgatacaatagtagagttataatttcctgtataatgtaaatttcaagcatttaaacattttcattgaattataaaatactatttggaaaagaaagaaaaacagcacaactgcagattacagatgactaagatagatgaatcatgaaaaggtgctagcagagatttctatcacacctatcagggatacacaatttccaagaatttcagaagtgtttggtgttcctattaacgtaaatcctgaaataacacctgagtgaactgtcttctaattcttcaactggatggctttttagtgtaa

SEQ ID NO: 117488 - DNA, 463 bp, Homo sapiens
gctaacattaggtaactaagaggtgacataaaaaagactgaataaaatatcatggaggtttcataataagattggaaattcaatagactaagagagaatagatccyaaaatatacatgctcattgggaaaacacctagtaagaaaaaggagagatctctatttaatgatacaatagtagagttataatttcctgtataatgtaaatttcaagcatttaaacattttcattgaattataaaatactatttggaaaagaaagaaaaacagcacaactgcagattacagatgactaagatagatgaatcatgaaaaggtgctagcagagatttctatcacacctatcagggatacacaatttccaagaatttcagaagtgtttggtgttcctattaacgtaaatcctgaaataacacctgagtgaactgtcttctaattcttcaactggatggctttttagtgtaa

SEQ ID NO: 117489 - DNA, 442 bp, Homo sapiens
tgctaaggaacaggtaaaagctaacattaggtaactaagaggtgacataaaaaagactgaataaaatatcatggaggtttcataataagattggaaattcaatagactaagagagaatagatcctaaaatatacatgctcattgggaaaacacmtagtaagaaaaaggagagatctctatttaatgatacaatagtagagttataatttcctgtataatgtaaatttcaagcatttaaacattttcattgaattataaaatactatttggaaaagaaagaaaaacagcacaactgcagattacagatgactaagatagatgaatcatgaaaaggtgctagcagagatttctatcacacctatcagggatacacaatttccaagaatttcagaagtgtttggtgttcctattaacgtaaatcctgaaataacacctgagtgaa

SEQ ID NO: 117490 - DNA, 442 bp, Homo sapiens
tgctaaggaacaggtaaaagctaacattaggtaactaagaggtgacataaaaaagactgaataaaatatcatggaggtttcataataagattggaaattcaatagactaagagagaatagatcctaaaatatacatgctcattgggaaaacacctagtaagaaaaaggagagatctctatttaatgatacaayagtagagttataatttcctgtataatgtaaatttcaagcatttaaacattttcattgaattataaaatactatttggaaaagaaagaaaaacagcacaactgcagattacagatgactaagatagatgaatcatgaaaaggtgctagcagagatttctatcacacctatcagggatacacaatttccaagaatttcagaagtgtttggtgttcctattaacgtaaatcctgaaataacacctgagtgaa

SEQ ID NO: 117491 - DNA, 568 bp, Homo sapiens
tccctatttacatcattctacagtggtttttaaaatgttttaagaataaaaaacatgcaaactttatttgatttttctgaggaaataactttttggatttaatttcaatgaaaccgttgataacatttccctccccaacaatctctggcaaygatccctcagattttaatgattatgtattattaccttttaatacaagtagaataacactcagggaatttacaacatttgttattttcagtaaatacattggttgaagtttaaaagtctatgcgtagtaaacttacatctttcaggagcttggtcaatgtgttctggacaaagcaggaagatgtgactgaaatcctgaaaggagccggctcctgcagcacaaggataatgatacatctgggtacatttctcttcacagcatttgatagtggctccaaagtgcttacaaaatgcacatcgctgaaaggggtaaaggagagaaatctctttataaaaccttgaaaaggaatattcaaatataagctgggaaggtataaaaaactctctgtacatcacaagtaaacaaattgaacctgca

SEQ ID NO: 117492 - DNA, 568 bp, Homo sapiens
tccctatttacatcattctacagtggtttttaaaatgttttaagaataaaaaacatgcaaactttatttgatttttctgaggaaataactttttggatttaatttcaatgaaaccgttgataacatttccctccccaacaatctctggcaatgatccctcagattttaatgattatgtattattaccttttaatacaagtagaataacactcagggaatttacaacatttgttattttcagtaaatacattggttgaagtttaaaagtctatscgtagtaaacttacatctttcaggagcttggtcaatgtgttctggacaaagcaggaagatgtgactgaaatcctgaaaggagccggctcctgcagcacaaggataatgatacatctgggtacatttctcttcacagcatttgatagtggctccaaagtgcttacaaaatgcacatcgctgaaaggggtaaaggagagaaatctctttataaaaccttgaaaaggaatattcaaatataagctgggaaggtataaaaaactctctgtacatcacaagtaaacaaattgaacctgca

SEQ ID NO: 117493 - DNA, 568 bp, Homo sapiens
tccctatttacatcattctacagtggtttttaaaatgttttaagaataaaaaacatgcaaactttatttgatttttctgaggaaataactttttggatttaatttcaatgaaaccgttgataacatttccctccccaacaatctctggcaatgatccctcagattttaatgattatgtattattaccttttaatacaagtagaataacactcagggaatttacaacatttgttattttcagtaaatacattggttgaagtttaaaagtctatgcgtagtaaacttacatctttcaggagcttggtcaatgtgttctggacaaagcaggaagatgtgactgaaatcctgaaaggagycggctcctgcagcacaaggataatgatacatctgggtacatttctcttcacagcatttgatagtggctccaaagtgcttacaaaatgcacatcgctgaaaggggtaaaggagagaaatctctttataaaaccttgaaaaggaatattcaaatataagctgggaaggtataaaaaactctctgtacatcacaagtaaacaaattgaacctgca

SEQ ID NO: 117494 - DNA, 568 bp, Homo sapiens
tccctatttacatcattctacagtggtttttaaaatgttttaagaataaaaaacatgcaaactttatttgatttttctgaggaaataactttttggatttaatttcaatgaaaccgttgataacatttccctccccaacaatctctggcaatgatccctcagattttaatgattatgtattattaccttttaatacaagtagaataacactcagggaatttacaacatttgttattttcagtaaatacattggttgaagtttaaaagtctatgcgtagtaaacttacatctttcaggagcttggtcaatgtgttctggacaaagcaggaagatgtgactgaaatcctgaaaggagccggctcctgcagcacaaggataatgatacatctgggtacatttctcttcacagcatttgatagtggctccaaagtgcttacaaaatkcacatcgctgaaaggggtaaaggagagaaatctctttataaaaccttgaaaaggaatattcaaatataagctgggaaggtataaaaaactctctgtacatcacaagtaaacaaattgaacctgca

SEQ ID NO: 117495 - DNA, 645 bp, Homo sapiens
tttttttaaaaatttattatttattattattattattattttttgagacagagtttcactctgttgcccaggcaggagtgcaatggcccgatctcggctcactgcaacctccgccccccaggttcaagcgattctcctgcctcagtctcctgagtagctggaattacaggcaccagccaccgcacccggataaatgatttcaaacttcttgaagccctcaccagaagcagatgccagcaccacacttcctgtactgtctgcagaattgtgagccaattaagcctctttttgttatcaattacccagcgacaggtatttctttacagcaacacaggagcagctatatatctatatctatatctatatatatatattcatacatatgcacaatgcacagtgacatacacaattcaaaaacagacttgaggggaaaaaacacaaacgctatccaaaaaaatgcaggtatagcaataattgcaaagaaacagaatttaaaaagcagtgaataagtcamagataataattcataataacataagttttatgttacagtgtaaattccaaaagaagccatagtcattaaagtttatacacctaataaatatatgtcacatatagaaagtaaagctgagtagaaataacatg

SEQ ID NO: 117496 - DNA, 427 bp, Homo sapiens
ggaattctgcagatgtgattgaagccaccaatcaactgcctttgaattaatcaaaagagagatttgcctaatctaatcaaataacctctttgaaagcggagttttmtccagctagtagcaaaagggaaattcatagcaagggaacatttcaatacactgttgctatctttgaagataaaaagagccaggagcaaaaaccaaggagtggcctctaggaactgagtgtgacccaagccaataggcagtaagaaaatggtgagctcagcagggtgtggtggctcatgcctgtaatcccagcactttgggaggccaaggcaggaggatcacgaggtcatgagatcgagaccatcctggctaacgcggtaaaaccccgtttctactaaaaatacaaaaaaaaaaaatagccagcatggtggcgcacacctgt

SEQ ID NO: 117497 - DNA, 589 bp, Homo sapiens
gccaccaatcaactgcctttgaattaatcaaaagagagatttgcctaatctaatcaaataacctctttgaaagcggagttttctccagctagtagcaaaagggaaattcatagcaagggaacatttcaatacactgttgctatctttgaagataaaaagagccaggagcaaaaaccaaggagtggcctctaggaactgagtgtgacccaagccaataggcagtaagaaaatggtgagctcagcagggtgtggtggctcatgcctgtaatcccagmactttgggaggccaaggcaggaggatcacgaggtcatgagatcgagaccatcctggctaacgcggtaaaaccccgtttctactaaaaatacaaaaaaaaaaaatagccagcatggtggcgcacacctgtaatcccggccacttgggaggctgaggcacgagaatcacttgaacccaggaggcagaggttgcagtgagccgagactgcaccactgcactccagcctgtgcaacagagcaagactctgtctcaaaaaaaaaaaaaaaaagaaaaagaaaatggcgagctcagccctacaactgcatagaactgaat

SEQ ID NO: 117498 - DNA, 623 bp, Homo sapiens
ctgaaaacataaatatcaactcatgattttgaaaaaaaaatcttttttatgtttggttttggtaaaaggagagacaaataagtcagaagaacagaaaatacagaaataggcaaactttcccatattcaattagtttttgaccaaggggccaagataattcaagagagcaataaataatcttttagaatgatgctggaactgccaaataattcatatggaaaacaaagaaacatgaatcttatctcgtattctcttatcatgtgtaatttaaccataaatggattttttaaacctacaagtaacactgtggcaagcaaagatttttaataaagcataaagagcataattttttcaacttccaaaaaattaacaaatgacaaatgtcatcaaaatggaaccctctgctgttcaataaacattgctaaataaatgaaaacaagtcacacattaggcaaaaatatttataaaatgcatctccaataactgacttgtgtaaataatatatawaaaaaaatcttacaactcaagaagatgacaagcaaatcaactggaaaaaaatggtggtagagacaaaatactttaacagacatgtcaccaaagatacacaaatggcaaaaaaagac

SEQ ID NO: 117499 - DNA, 596 bp, Homo sapiens
cattgaatggattcaaatgtttaaggaaaaaaataatcttagcagtccatgttgagtgaacatttcaatccatgtaaaggcgaaggtcagctgccaccatgccatgcaaaccttatagtacgtgacatgttaaatcagtaacctcaaaagggacttctgagaagctatgagtaaaaggcacacacaaaatgcctctgagatagattcacaaatgaaatggaaaacgatatctatgtatatccaagaataatagtaattattagaaaacaagaaaacttctaaattgaaagaatccctaaagtaaaagtagaccaaagaaaaagaaataaagatgagaagtgagatgaggcagaaatggtgagtgacaaggagacatactgagaaaaaaagtagctaaagacagtgtgttattatttcagcaaaattaagtatatcaatactgagaaatatgrcttgaaatagattcagtacctcaggcagaaacataaacaaataacatctggctttttcttttgataaccagtattttaaatataaaaatctaaaaatattatctttgtgtaagagttacacatttatcattccagtcctcaggg

SEQ ID NO: 117500 - DNA, 412 bp, Homo sapiens
aaaattcgttttaatgcatgtgtttatgcatagctttctatttttctcttttctatttatattccaaattagaatataatgctaatcaagcatagyggctgtgtttcttgcttcctgtagtctgcaggtagcatacaaatgtaataaactacttattcatgtcacatctatttattttctgccttataccaagcttgtgggattctcttaaatacaacatttttatacttacatctaggcaatacccattagcatcgccttcctaaatcaggggaaattgagcctctgtaaggtggagtaacttcctaagatacaaaactcagcattaaagtctgtatacttcaatatcctgcccccttctcatttgtctttactgccttttatgtatgtgttagatattcaataaattctg

SEQ ID NO: 117501 - DNA, 479 bp, Homo sapiens
atattgaaagtgtccttggtggcatttcaaagctcaacatcatctaacaaaaattttattcctttttcatttctgttagggaatgtttagtttttcctctttgataatgaaaatttggttaacaaacattgctttggaccaatcttccttttcacaaatcactgaggtgtgtctatccacaagttctcagttcagcctacattttccagtcttccatttacctattcaactaatacctgagtgcctggcatgtgtcggccctgtgaacatgctggtgacagtgtgagcaggcagggctggttcctgtcctcatgaagcttatactacctgaggctggggtgtagaaatygacacatttaaaaagccactgagactttaaaaaaaaaaaaaatatatatatatatatatatatatatatggcatacaaagatgctgagctggagctttggaaaatgaagaaaaagtaatacaaatttaaa

SEQ ID NO: 117502 - DNA, 479 bp, Homo sapiens
atattgaaagtgtccttggtggcatttcaaagctcaacatcatctaacaaaaattttattcctttttcatttctgttagggaatgtttagtttttcctctttgataatgaaaatttggttaacaaacattgctttggaccaatcttccttttcacaaatcactgaggtgtgtctatccacaagttctcagttcagcctacattttccagtcttccatttacctattcaactaatacctgagtgcctggcatgtgtcggccctgtgaacatgctggtgacagtgtgagcaggcagggctggttcctgtcctcatgaagcttatactacctgaggctggggtgtagaaattgacacattwaaaaagccactgagactttaaaaaaaaaaaaaatatatatatatatatatatatatatatggcatacaaagatgctgagctggagctttggaaaatgaagaaaaagtaatacaaatttaaa

SEQ ID NO: 117503 - DNA, 476 bp, Homo sapiens
gaatggaatggaacggagtggagtggagtggaatggaacggagtggagtggagtggagtgaagcggaatggaatggaatggaatggaatggaatggaatggaatggaatggtgaaatgaaatgtgagctgagattgtgcactgcactgcagcctgggtgacctagtgagatcctgtcaaaagaaaggaatggaattgaatggatttaaaatggaatggactggaatggagtggagtggattagagtggattatcatggagtggagtggagtggagtggaatagaatggtgtggtatggattcttatggaatggaatggaatggagtgcagtggagtggagtggggtgtagtggagtggagtggaatggagtggaatggaatgggatggaatggaatggagtggagtggaaaggtgtagaatggagtggaatggaatggagtgsagtggactggagttgagtggagtggattgaagt

SEQ ID NO: 117504 - DNA, 594 bp, Homo sapiens
caggtcacgaactcctatcttcaagcagtcctctaacctaggcctccctaagtactgagattataggcatgagccattgcatctggctcaaaagtatttctgtcttagtggctttagcaaagaagtgccattttggggacatatacaatggtgtgctgtttgggagtgatacaaaaataattataagaatggaatgaatatgtcagtatgttttcaaaagcaagttatcccaagtttttaaacaagcataattttagagtttttgtaactaacttagggtttaaatgtagcaaaaattttaaacattatcatgaatacacatacaattttaatcaatttggtttccamgatgaatttacatgcttaaattgctaatttcaagttgctgctagatatgagaaagtttgaaattttgaagaaggaagtggcgcttacaaatgtagcaaacttaaattttgaggacaatttaatttaacttccatttttatgaccagattttgggtcagctattaagcattcaaaaaataaaatctgataatatctggcaattccaattttcagttttattgatcttcaccatgaaataatatttaa

SEQ ID NO: 117505 - DNA, 597 bp, Homo sapiens
tcaattagaaaatctcagatcatgtgatctatgagttttaatatcttaggatcactaccagtaaggaataatcactttgaaaaaccttaatgctacctagagtttgtgttttgtgaggttgcttggtaaattattttcakttgataattgaatatggcttcaagagaggtgagctcagacatttggcaatgaatattgaatgtgtattccaagagacatgaccttaaaatatcatcaagctaagtagcagtgaaattgaactctgctgtattacagaagtcagtgtttcttacatctttatgatatataaatatttttgcattgtggtagataataatttgtatggaaaaatttaattgaatttaatttatcctatggcagaattatgttacatgggtcattttagttttggatttaagcatcttaaaattataaatgcaaatattcaacacataaaacccacatgaatacacactcccaaacatttgaaatcctaacagtcatttctaacagctttttcctacaaaagaagtcagctattcttagagattacatgcattcccatagcttgagaggttcacactataaggtaaacag

SEQ ID NO: 117506 - DNA, 597 bp, Homo sapiens
tcaattagaaaatctcagatcatgtgatctatgagttttaatatcttaggatcactaccagtaaggaataatcactttgaaaaaccttaatgctacctagagtttgtgttttgtgaggttgcttggtaaattattttcagttgataattgaatatggcttcaagagaggtgagctcagacatttggcaatgaatattgaatgtgtattccaagagacatgaccttaaaatatcatcaagctaagtagcagtgaaattgaactctgctgtattacagaagtcagtgtttcttacatctttatgatatataaatatttttrcattgtggtagataataatttgtatggaaaaatttaattgaatttaatttatcctatggcagaattatgttacatgggtcattttagttttggatttaagcatcttaaaattataaatgcaaatattcaacacataaaacccacatgaatacacactcccaaacatttgaaatcctaacagtcatttctaacagctttttcctacaaaagaagtcagctattcttagagattacatgcattcccatagcttgagaggttcacactataaggtaaacag

SEQ ID NO: 117507 - DNA, 605 bp, Homo sapiens
tatgctctactaactagtgttcttttgtggtgctttagaaattctggcttacttgtatttttgctggccttctaatgatttcactcatcaatcagaagatatttgtgtccacctccctgcttcctctcyggtgatcttgtctattcttggccattttagagttgacttagcagccttcacaaaactgattggaatttccactgggattaaattgataggtcatttttgggagacctttgcaatattgaactttccaatccgtgaactttacttatctgcccatttattatgtttgtttttggtagattacaaaattatatgatcactccaaaaattaccttgccctttatagtaaaaccttccattgtaaacttctggcaatcactgatctgtgttcctctagcattgcttttttttcagaattttatacaaatggaatcgttcaggatgtagccttttgagtctggctactttcatgtactgcatcacagttattcctttttattgccaaatagtaatccattgtataaatactacatggtttgcttatttgtttgtcattggaggaatatggactattttcactttttggtaaattataagtg

SEQ ID NO: 117508 - DNA, 605 bp, Homo sapiens
tatgctctactaactagtgttcttttgtggtgctttagaaattctggcttacttgtatttttgctggccttctaatgatttcactcatcaatcagaagatatttgtgtccacctccctgcttcctctccggtgatcttgtctattcttggccattttagagttgacttagcagccttcacaaaactgattggaatttccactgggattaaattgataggtcatttttgggagacctttgcaatattgaactttccaatccgtgaactttacttatctgcccatttattatgtttgtttttggtagattacawaattatatgatcactccaaaaattaccttgccctttatagtaaaaccttccattgtaaacttctggcaatcactgatctgtgttcctctagcattgcttttttttcagaattttatacaaatggaatcgttcaggatgtagccttttgagtctggctactttcatgtactgcatcacagttattcctttttattgccaaatagtaatccattgtataaatactacatggtttgcttatttgtttgtcattggaggaatatggactattttcactttttggtaaattataagtg

SEQ ID NO: 117509 - DNA, 500 bp, Homo sapiens
tgatcttgtctattcttggccattttagagttgacttagcagccttcacaaaactgattggaatttccactgggattaaattgataggtcatttttgggagacctttgcaatattgaactttccaatccgtgaactttacttatctgcccatttattatgtttgtttttggtagattacaaaattatatgatcactccaaaaattaccttgccctttatagtaaaaccttccattgtaaacttctggcaatcactgatctgtgttcctctagcattgcttttttttcagaattttatacaaatggaatcgttcaggatgtagccttttgagtctggctactttcatgtactgcatcacagttattcctttttattgccaaatagtaatccattgtataaatactacatggtttgcttattkgtttgtcattggaggaatatggactattttcactttttggtaaattataagtggattggaattcacaaggtgctttttg

SEQ ID NO: 117510 - DNA, 537 bp, Homo sapiens
ttttcatttcacttgtgcaaatgcctaagggtaggattgccgagtcacatggtccgtgtacgtttgactttatcagaacctgccaaattgtcttccaaagtgctgtgccacttctgtttctttaataaatacaggggtattcaagctgtctgtttcttcttgagttttggtagtctgtctttcaaggaattgacctatttcacctaatttgtagaatttagaagcatatagttgttttgtttttgtagtatccattatagccttctagtgtctacaggatttgtaataatattcctttcatttctggtattggcaatttgtgttttctcttcttcctttgtcagtctgctagaggcttcctcatttgattgatttccacctcccaccacccctgcaaagaaccaactttggatttcgttgaatttttttcctttactgtttttgtttaaatattactgatttagtctgttttycttatgcctgatttgagtttatttggttctttttttacttaaagtaaatgcttacattattgat

SEQ ID NO: 117511 - DNA, 539 bp, Homo sapiens
atctgtatatgaaatgttttctaggactttcctgccagaaaagtaggaatagaatggcagaaggaaagaggttccttctacaagcaggcacacatcctatttcactttatcctgtgatcagtctcataaccatctcctggtatgaagtgctaaaactgtgctttaagaataacttaagtcctttatgtacaaactaaagcatgagagcctgaaccttggaaaccaagaaattccaaaaagccttatgtgtgagactgggtgccacagatcttggcagaaattactgcttattcttaattcttattgttcctttctaacacttcaacttataatgccaatatctmcctcagcctaaagacaagctctagaatcacttgtgttacttattacatttcttttaaaaaactcatgaattacacatgaatttcaaagttgccaactgagattccaaggacttaaaaaaaaaacctggcacctttgcattataaaggctgtaaacagtgttcatagtgtttgtctttaagggacatgcctcatcc

SEQ ID NO: 117512 - DNA, 574 bp, Homo sapiens
ctgaaatgaagtgtttattgaaaacagcttggatcaacccagttttctaccactgaaccatgcatttggtttcaaaaacacaacaactctggggaatatcggctgcttccaactgtgttgaaggtgttaaagaaaagagcatataattataaatgatcatctgaggcctttatagtctctgctcaagagactagcgtcttccattcttaacgaaacacccaaatatcttaatagttgggcaaaatcttactatcagagagataattttatcttgaagactgttaaattataatggtgattcactaccttaccacgtctctgactcaaaaattagatctttgtttaggaatcaatggtactctgcaacttggaaataggaagattttagaagactcaaacactgactttcttgtgtgcaaaaaaaagacgtattgagataagacaagtctttccttgcaaggatacctgtaatgctcacacaccacctcccctaacgttaatatagcttccaggccactaaccggtgtcagagagcagccwatgcaactacagattcaaaagatgtcaaacacag

SEQ ID NO: 117513 - DNA, 505 bp, Homo sapiens
tagctgggtttatagtcgtatgcccccatgctcagctaatttttgtgtttttagtagaggtggggtttcatcatagtggtcaggttgggcttgaactcctgacctcaggtgatctgcctgcctcggcttcccaaagtgatgggattataggtgtgagccactgtgcccagcttagtttttttttttttttttgagatagagtctcgctgtgttgcccagcctggagggaagtggtgtagtggtgtgatctcagctcactgcaacttctgcctcctgggttcaagtgattctcctgcctcagcctcccaagtagctgggactacaggygcatgctgccacccctggctaagtttttatattttagtagagatggggtttcaccttgttacccagctggtctcgaattcctgagctcaggcaatccgcctgcctcggcctgccaaagtgctaggattacaggtgtgagccaccatgcccagccattcccggctagtttttgtagata

SEQ ID NO: 117514 - DNA, 505 bp, Homo sapiens
tagctgggtttatagtcgtatgcccccatgctcagctaatttttgtgtttttagtagaggtggggtttcatcatagtggtcaggttgggcttgaactcctgacctcaggtgatctgcctgcctcggcttcccaaagtgatgggattataggtgtgagccactgtgcccagcttagtttttttttttttttttgagatagagtctcgctgtgttgcccagcctggagggaagtggtgtagtggtgtgatctcagctcactgcaacttctgcctcctgggttcaagtgattctcctgcctcagcctcccaagtagctgggactacaggtrcatgctgccacccctggctaagtttttatattttagtagagatggggtttcaccttgttacccagctggtctcgaattcctgagctcaggcaatccgcctgcctcggcctgccaaagtgctaggattacaggtgtgagccaccatgcccagccattcccggctagtttttgtagata

SEQ ID NO: 117515 - DNA, 499 bp, Homo sapiens
catctaaaaatatctttatctcatctctctctcactatctcacttgtagtatagctgacaccaaaatcttcttcctctttctctcttaactttctaaaattatctttcaaaactttatttttgctgtatctctttttttactgtatctttttttatcttctatcctctctcactcttcagatgtctcaggtttcaaatttggatcctttcaatttattgaatctattaattattctaattattctcaacaaagtttcagagacagaagtgaaaaataaagaaagaacagaggagatagatatatcttgcatgtcagtctaaagagtggtcgttcctctgttgtatggtggtaggatattaaaggtttatgagaaatgtcatgataaaagcagtattcagtgaaggctaagtgggcgatattctgcagaataaattgtaggaaaggaaagaaatttgagagtaaaagwtctgttataaggccactatatggacctaagat

SEQ ID NO: 117516 - DNA, 446 bp, Homo sapiens
ttaacgagctgaggatggtttatgtctcttaaattggtagacataaatcaaggattagccccatataaaacccctcacagttttactacacggctaatgattaagagtagctgaccatctctataaaatacagattgtcagctgctccatttcatagagattaaggatctttccatccttaacatccattccagaaaacgaagtcttcacattttaggttatacaaaggtggtttaggagaatgttgagaaaaggcttcctgtacctggtgaggacaagactgaatatactgcatcagccctttgcagtattagtattagtattatcctgcttgcaacaagacagggtttagaatkaaagggaatattcctcaattcgtgaatcagactgtttctaacctatgacaaaaaattgatgaatgtgaaaagaagtgaatcttattatca

SEQ ID NO: 117517 - DNA, 446 bp, Homo sapiens
ttaacgagctgaggatggtttatgtctcttaaattggtagacataaatcaaggattagccccatataaaacccctcacagttttactacacggctaatgattaagagtagctgaccatctctataaaatacagattgtcagctgctccatttcatagagattaaggatctttccatccttaacatccattccagaaaacgaagtcttcacattttaggttatacaaaggtggtttaggagaatgttgagaaaaggcttcctgtacctggtgaggacaagactgaatatactgcatcagccctttgcagtattagtattagtattatcctgcttgcaacaagacagggtttagaattaaagggaatattcctcaattcgtgaatcagactgtttctaacctatgacaaaaaattgatgaatrtgaaaagaagtgaatcttattatca

SEQ ID NO: 117518 - DNA, 598 bp, Homo sapiens
aaaattgggattcaagctgaggctatctggatttagaatctgtgcatctaacttctctgtatattactgagatcagatgcttcctttgtaatttctaaagtgagacaggtgaggcacaactggcattgatgtccctacaaagatcacatcacattatttctgcaraagtacctctgtcccacccagagtatcctagtgcccggagcacatacaagagctgggaagtgcgtaaaggaggccatggtctacaacgcttggagccaacagattaggaacaataaataatattttgtagagcattttaatttgtagtttacaaagcactttggcataaacttttccaacaaaatcttagaaaggtattccttttagataaaattgtcatgctaaccaacctaccaaattgctttaaaccaaattgtttgtgccaaatcactggcagctgggttttatacccattgtccagaaaaggaaattgagaaccagggaagttaatgggaaaacatcacatatgtcttcaggactcaaatctagatactttgctccaaagcaaccataaaggaaatgggaaaatttgcaggaaaaaaagctaatatag

SEQ ID NO: 117519 - DNA, 574 bp, Homo sapiens
ggaagcaaggggagctaaatcaaaactggagtcttgtgatttccacagccctttcgccctttcccttatttcagggcaacttaagtacacagataatcttcagtgttcctttgttgagtaatcttgcttttggtttgagcagaacgtagtgatatggagtatatagacaaagacasatagatatacatcataaaagtgtgttctctgaggatgacctcagttctaccgcaactggctgaaatctaggcatgctacttggcctctcaaagattctgtttttttaaatctgtcaaacagtattaataatagtaactttcataatgagaactaaatgaaataacgtatgtaactagctaacctagctcactgcaaaatgcacagtatgaatttggtaaatgccatttatttgtattattagacatctcagttcacacacacacacatatacacaaaatactctagaataaatcctacactttggtactgagaaggcaggagagaggagagatatattttagtttagcaagttttcttgcaaaggaaggtttgaggagtgttttatcatggaaaagtt

SEQ ID NO: 117520 - DNA, 583 bp, Homo sapiens
gtttgctgctctcttccttatcttcttcctcctgccctctgcctcctctgcattcttcaccttctacatcaggaagctcaagtcaccaagctaagcctgggcttctcatctaaatcacggagtgccagtcaatgcctcccttcctcttcccagggagcaacttcaatcttccctgcttgcagtgaggagctagaccctactcctttttccctgtgggaccatccrcagcctgtttcctcacccctgtaatgggactgcagtcctccctgcccatctggcagtgctaattccaggccaggggctcctgggaaaatcaccagtgtgggtgatatggtgagtgtttgtgtgtgtggaggggtggggctgccctctgaccatttacagaccctgtccttcctctctccccatgcttgtcgcatgtcaggaatccctctcctttgtgccatgaaatagaaggcattttcagatccatcatctcattgagacttgcatctccttggtgaagttggagttattgtcaccattttactgatgagtaaaatgagtctcagaaaggggaaagtcgttgcccagggttccgctg

SEQ ID NO: 117521 - DNA, 201 bp, Homo sapiens
gcttctgtttagcttttctgtgaagattatcccgtttccaacgaaatcttcaaagaggcccaaacatccacttgcagatgccacagaaagagtgtttggaaaytgctgtttgaaaaggaaccttcaactctgtgagttgaatgcagtcatcacaaacaagtttctgacaatgcttctctctagtttttacgtgatgataat

SEQ ID NO: 117522 - DNA, 205 bp, Homo sapiens
acgaattatcgtcacgtaaaaactagagggaagcattgtcagaaacttgtttgtgatgactgcattcaactcacagagttgaaggttccttttcaaacagcagtttccaaacactctttctgtggcatctgcaagtggatgtttgggcctctttgaagatttcgttggaaamgggataatcttcacagaaaagctaaacagaagc

SEQ ID NO: 117523 - DNA, 556 bp, Homo sapiens
ttttgactgtttggggtctgttgcacacagattttagaattgcttttttccattgctttgaaaaatgycactgaaattttgataggggttgcattatatctgtagatcacactgagtaatagagattcttttatcttcaaattctttcatcagtgttctatagtttttggtatatagaaattttactttcttatttaaatttattcctaagttaattttttgatgctattgtaaatgagattgtgttctttcagatggactctcgctctgtcacccaggctggagtgcagtggtgtgatctcagctcactgcaagctctgcctcccgggttcacaccattctcctgcctcagcctcccgagtacaggcggccaccaccacgcccggctaattttttgtatttttagtagagatggggtttcaccatgttagccaggatggtctcgatctcctaacctcattatccacctgcctcagcctcccaaattgctgggattacaggcgtgagccaccgcgcacagcccgagattgttttcttaatttctttctgggatagt

SEQ ID NO: 117524 - DNA, 556 bp, Homo sapiens
ttttgactgtttggggtctgttgcacacagattttagaattgcttttttccattgctttgaaaaatgccactgaaattttgataggggttgcattatatctgtagatcacactgagtaatagagattcttttatcttcaaattctttcatcagtgttctatagtttttggtatatagaaattttactttcttatttaaatttattcctaagttaattttttgatgctattgtaaatgagattgtgttctttcagatggactctcgctctgtcacccaggctggagtgcagtggtgtgatctcagctcactgcaagctctgcctcccgggttcacaccattctcctgcctcagcytcccgagtacaggcggccaccaccacgcccggctaattttttgtatttttagtagagatggggtttcaccatgttagccaggatggtctcgatctcctaacctcattatccacctgcctcagcctcccaaattgctgggattacaggcgtgagccaccgcgcacagcccgagattgttttcttaatttctttctgggatagt

SEQ ID NO: 117525 - DNA, 562 bp, Homo sapiens
tattattatatctgttatggtgatctgttatcagtgatcrttgatattactattgtcattgttttggggcatcacaagccatgctccaaaagacaatgagcttaattgatacatatgtgtattcgaatggttccatcgatctgcccttcctccatctcaccctctcctcaggtctgttttctgagacacagcaatattgaaattaggccaattaataactctataaaggcctctatgtgttcaagtgaaagtaagagtcacacatctcttattataaatctaaagtgagaaatgattaagctgagtgaggaaggtatgttaaaagccgagacaggccaaaaggcccaggctggtctcgaacgcctgacctcaagcaatccacctgccgcagccttccaggtagctgagattaaaggcatgagccaccatgtccagcttctatgcattattttaaatggagtattgaagactctgttactgtagaactatttctaacttcaattctgtcaatattttggtcacaggccttaatgtgattacacgctggtctgatgttcatggc

SEQ ID NO: 117526 - DNA, 544 bp, Homo sapiens
tattattatatctgttatggtgatctgttatcagtgatcattgatattactattgtcattgttttggggcatcacaagccatgctccaaaagacaatgagcttaattgatacataygtgtattcgaatggttccatcgatctgcccttcctccatctcaccctctcctcaggtctgttttctgagacacagcaatattgaaattaggccaattaataactctataaaggcctctatgtgttcaagtgaaagtaagagtcacacatctcttattataaatctaaagtgagaaatgattaagctgagtgaggaaggtatgttaaaagccgagacaggccaaaaggcccaggctggtctcgaacgcctgacctcaagcaatccacctgccgcagccttccaggtagctgagattaaaggcatgagccaccatgtccagcttctatgcattattttaaatggagtattgaagactctgttactgtagaactatttctaacttcaattctgtcaatattttggtcacaggccttaatgtgattacacgc

SEQ ID NO: 117527 - DNA, 564 bp, Homo sapiens
tattattatatctgttatggtgatctgttatcagtgatcattgatattactattgtcattgttttggggcatcacaagccatgctccaaaagacaatgagcttaattgatacatatgtgtattcgaatggttccatcgatctgcccttcctccatctcaccctctcctcaggtctgttttctgagacacagcaatattgaaattaggccaattaataactctataaaggcctctatgtgttcaagtgaaagtaagagtcacacatctcttattataaatctaaagtgagaaatgattaagctgagtgaggaaggtatgttaaaagccgagacaggccaaaaggcccaggctggtctcgaackcctgacctcaagcaatccacctgccgcagccttccaggtagctgagattaaaggcatgagccaccatgtccagcttctatgcattattttaaatggagtattgaagactctgttactgtagaactatttctaacttcaattctgtcaatattttggtcacaggccttaatgtgattacacgctggtctgatgttcatggcca

SEQ ID NO: 117528 - DNA, 564 bp, Homo sapiens
tattattatatctgttatggtgatctgttatcagtgatcattgatattactattgtcattgttttggggcatcacaagccatgctccaaaagacaatgagcttaattgatacatatgtgtattcgaatggttccatcgatctgcccttcctccatctcaccctctcctcaggtctgttttctgagacacagcaatattgaaattaggccaattaataactctataaaggcctctatgtgttcaagtgaaagtaagagtcacacatctcttattataaatctaaagtgagaaatgattaagctgagtgaggaaggtatgttaaaagccgagacaggccaaaaggcccaggctggtctcgaacgcctgacctcaagcaatccacctgccgcagcctyccaggtagctgagattaaaggcatgagccaccatgtccagcttctatgcattattttaaatggagtattgaagactctgttactgtagaactatttctaacttcaattctgtcaatattttggtcacaggccttaatgtgattacacgctggtctgatgttcatggcca

SEQ ID NO: 117529 - DNA, 564 bp, Homo sapiens
tattattatatctgttatggtgatctgttatcagtgatcattgatattactattgtcattgttttggggcatcacaagccatgctccaaaagacaatgagcttaattgatacatatgtgtattcgaatggttccatcgatctgcccttcctccatctcaccctctcctcaggtctgttttctgagacacagcaatattgaaattaggccaattaataactctataaaggcctctatgtgttcaagtgaaagtaagagtcacacatctcttattataaatctaaagtgagaaatgattaagctgagtgaggaaggtatgttaaaagccgagacaggccaaaaggcccaggctggtctcgaacgcctgacctcaagcaatccacctgccgcagccttccaggtagctgagattaaaggcatgagccaccatgtccagcttctatgcattattttaaatggagtattgaagactctgttactgtagaactatttctaacttcaattctgtcaatatttkggtcacaggccttaatgtgattacacgctggtctgatgttcatggcca

SEQ ID NO: 117530 - DNA, 256 bp, Homo sapiens
ataatgggggtacagggattgggtaaatactcccatttcaaaagggagaaattggccaaaagtaaggggctacgggccscatgcaagtctgaaacccagtaggaaagttattaagtcttaaagcttaacaatctcctttgacgccatccagggcataccactgcaaggggtgagctcccaaagccttgtgctgctccactcctgtgactttgcagggttcagctcctacagctgctctcaagggctggtgttgagt

SEQ ID NO: 117531 - DNA, 561 bp, Homo sapiens
gggtaatttataaagaaaagcagtttaattggctcatggttctgcacgttatacagaaagcatgatgcatctgctgggcttctgcgggggcctcagtaagctaacaatcatggcagaaggtgaagggggagccagcacttcacatggctggaagcaggaagaagagtgagaggtggggaggtgctatacacttttaacaaccagactcacaataactcactcactgtcacaagaacagcaccaaggagatggtgctaaaccatttaagagaaaccgcccgatgatccaattgcctcccaacaggccccacctccaacagtgggacttacagtttgacatgagatttgggtggggacacagatccaaatgatatcaatgtgttaaaaggaaaaggagatagcagtgggaaatggatatttaacttcagtttatgagtttttattttagagttctaaaattatgtcttatactgcctatacaagtgctagaatagtttctgtattaagtggtagatattaatatccaaatatcatacttacyttctttgaccttgcagtttaa

SEQ ID NO: 117532 - DNA, 398 bp, Homo sapiens
tccccaacctttgtggcaccagggactggttttgtggaagacaatatttccacggacaggggagcagaggatggtttcaggattgtaatggttaataataggtgtcaacttaattggattgaaggatgcctagataattggtaaagaatagtttctgggtgtgtcagtgagggtgttgctggaggagattaacatttgagtcggactgggagaggaagaccsatcttcaatgtgggtggacaccatccaattgactgtcagcttggctagaacaaagctggtggaagaaggtgggataagctgacttaatgagtcttctggctttcatcattgcgctgtgctggatgcttcctgcccttggacatcagattccaggttctttaggctttgaacacttg

SEQ ID NO: 117533 - DNA, 398 bp, Homo sapiens
tccccaacctttgtggcaccagggactggttttgtggaagacaatatttccacggacaggggagcagaggatggtttcaggattgtaatggttaataataggtgtcaacttaattggattgaaggatgcctagataattggtaaagaatagtttctgggtgtgtcagtgagggtgttgctggaggagattaacatttgagtcggactgggagaggaagaccgatcttcaatgtgggtggacaccatccaattgactgtcagcttggctagaacaaagctggtggaagaaggtgggataagctgacttaatgagtcttctggctttcatcattgcrctgtgctggatgcttcctgcccttggacatcagattccaggttctttaggctttgaacacttg

SEQ ID NO: 117534 - DNA, 452 bp, Homo sapiens
caaagaaaaaaacatttacatttaaatacattttatgattttctgtcaagcctggattgttgagtgggaaatcttaaccattatatatttatattatgtttaaggctatagattccattcattttacatcactaaaatacaccgacatatacatatatgcaaaaaatatatcaatatatccaacatatacaaaaaaaacactgaaaacacaacaataaggaaaaaaaacctagttaaaaagtgggcaaaatctggacacctcactacagatacacaaagggcaaataagcagatgaaaatatgctcaataacatagatcatcaaggaattgcaacatggatgcagccggaggccattatcctaagcaaattaacacaggaacagaaaactaaatactgcatgttttcacttataactgggagctraacactgggtacttagggacataaaga

SEQ ID NO: 117535 - DNA, 459 bp, Homo sapiens
ttcagatttcattcactaccatcttcccccttctctctctgttccagttacaacagcttgctgcccccctcaaacacaactagcacgttcctgccccagggcctttgcacctgctttttcctgttagtgcaacaagcttgctccagatatctgaaaggctgactatctcgccaccttcagatgtgtgttctaatgtctctttatcaatgagagcttctttgtccaccctgggcatcttcttgcccttccctgctttattcttccccatggcagttactcacattggacactaaacacttgtttccttagctaggcattcttctcctaccctcacaacagtaggaatgtcctaaggttctgagaagactcctgtgctaggtttccagactcctgtcctctcacatttggtgctcatgcacctcttgktcattagtgcactccagaggttaggacctagag

SEQ ID NO: 117536 - DNA, 645 bp, Homo sapiens
actctgcaatccatcgtaatatccgtacaaggattctgctcttttaaaaaaagaaaaatggtgtgaaaaaatatgtaggactggccaggcagcgtggctcacacctgtaatcccaacactttgggaggccgaggtgggtggatcacttgaggtcaggagatcaatcctggccgacaagcctgaccaacatgccaatatggtgaaaccccgtctctactaaaaatmcaaaaaattaaccaggcatggtggtgggcacctgtaatcccagctaattgggaagctgaggcaaaagaatcgcttgaacccaggaggcggaggttgcagtgagccgagatcttgccactgcattccagcctgggtgacagggcgagactctatctcaaaaaaaaaaaaaagtaagacaatcagggaaatttgaacagcgactggattttggttaaaagtaagtaattctggctaatttttagatgtattattttaaaaaggggatccttaccctttggaggtggatacctccaaatattcatggatgaaatgacaggatgccagaaatgctcttcaattaatctatgtcagggaagtgggatcagaggaatcaggactgtctaaaactgaagctgggtattaggtcaatgagttaattat

SEQ ID NO: 117537 - DNA, 645 bp, Homo sapiens
actctgcaatccatcgtaatatccgtacaaggattctgctcttttaaaaaaagaaaaatggtgtgaaaaaatatgtaggactggccaggcagcgtggctcacacctgtaatcccaacactttgggaggccgaggtgggtggatcacttgaggtcaggagatcaatcctggccgacaagcctgaccaacatgccaatatggtgaaaccccgtctctactaaaaatccaaaaaattaaccaggcatggtggtgggcacctgtaatcccagctaattgggaagctgaggcaaaagaatcgcttgaacccaggaggcggaggttgcagtgagccgagatcttgccactgcattccagcctgggtgacagggcgagactctatctcaaaaaaaaaaaaaagtaagacaatcagggaaatttgaacagcgactggattttggktaaaagtaagtaattctggctaatttttagatgtattattttaaaaaggggatccttaccctttggaggtggatacctccaaatattcatggatgaaatgacaggatgccagaaatgctcttcaattaatctatgtcagggaagtgggatcagaggaatcaggactgtctaaaactgaagctgggtattaggtcaatgagttaattat

SEQ ID NO: 117538 - DNA, 581 bp, Homo sapiens
tgtgcatgtgtgtgtgtgtgtgtatgtaaaaccaatcaacttctgctgaaaaacttctgtaaaactcatttttttttttccagtatgtttcctctgaagacaatcttcacatctagggaatattaatggtaataataacagcattgatttattgagagttttcctatgtaacarttactatacaagtatgccatttaatctatttctctagtttcaatattaatattggtacttaataaacgagtaaactgaaaataataagtttaaaatcttttttcacagctagtcagcaatacaactgggatttgatatcagattcatacgattccgaagaccctgaccaccaaatgcaaaaggtacatggcaacagctgattgcaatgagagaaaaacaactaataaggcaacaagcaggatactaagatattttccaaaatgaatagcactgattctgtgaggaatgaacattgccaaacaagtgttttgttttgtttttcaactcctctaaaaaaattcacatatatgcatgccactttcctgaaaaatatctgcctcataattgccataagaaacggtatggac

SEQ ID NO: 117539 - DNA, 535 bp, Homo sapiens
atttgccaacattaattccagattgggggcatgaagtgaagcatgctggcaaatttcagcctcatgagactcctccagcttgctcttgatggccaaaaatggataaaacctatacccttgggttctgcaactggtgacacatacctggccactattgctcatgtgggctcactgatctgcaggagacaatgctgcctaaatgtatcctttcaggtttgtcactgtgtctttctgcagaagcatttgcacctctcttctgtgaccctccatgttgtgagcaggggcccggatgcagacctgcaccagtgtttccagctgaaatcccgcgcagaggcagtgtcctgccttcctgtgaccaaagtgagtcattgtggggacagacaggcttgtttagcaaggctctgcccgtgtttctcctggctgctcagcctggctctgtgtgcaaggaaggatggaaacagtgcccatggcaacccctgtatgttggctactgctccatctcacattgarccatttccagtagtcttttagcaga

SEQ ID NO: 117540 - DNA, 312 bp, Homo sapiens
gccttcccaactgtatctgcctggccacctgaaactctgcctgtggctcaaargcaaacactcctgacactatattctgtttcctgcctattctgtggcttcttgcttacagcctgctgtccatctcccgtcctactcttgcttccctgcttatctgtcttgtctctatgttccaacttccatcacctttattaacctggtttcatctgctgctaaatgagcgcctgttatagttttggccatctacaatgttcaggaagattggtgaatgcaaagttcataaattacggcttctgggagttatcacagcca

SEQ ID NO: 117541 - DNA, 581 bp, Homo sapiens
cgaactcgtgaatcagaatctcttgggtgtggggctggatcgcacttttgacaaaggctccccagtagattttgactcaacagaggggtgtttgggagcctatatctaaytttccctgccccaggtctacacttcagtgttccccacattttctaatccttctctccctccacactccggttcctttcattattctaatacttccatgaattaaccaggtatagaactaatctaggctgggcgcagtggctcacgcctgtaatcctagcactttgggaggccgaggtgggcagatcacgaggtcaggagatcgagaccatcctggctaacatggtgaaaccccgtctctactaaaaatacgaaaaaattagccgggcgtggtggcgggcgcttgtagtgccagctactcgggagactgaggcaggagaatggcgtgaacccgggaggcggagcttgcagtgagccgagatcgtgccgctgcactccagcctgggtgacagagcaagactccgtctcaaaaaaaaaaaaaaaaactagtttatcaaataactgtgatatagaaattaaatacatattgctgc

SEQ ID NO: 117542 - DNA, 540 bp, Homo sapiens
acaaagtgaagctctgccttcctctctcagctcccatactataaacttcacagtgcatttatcgccacattgtttccatagttgtgctttgcgatgctgagtttactgttttaaatggacttcaagcatagccctgaagtgttgtcccgttgttcccacctcctagagggcctgacagaagaggtacatatgctatgtaagtttccctcaggcatgaactacagtgctattggccactaattcaatgttaatgaatcaacagtatatactaaggtgtctttaaacaaaaacatacataaaacattatgtattaagttatgtattgatccgttgattaaaatattgygaccaaagccacacagtcacctaacactgtatctcttctaggaatgatggattaatatttgcaaattcagtgttcccagcaactttatggaacataattattgcaaaacgtgagaatcaattgtacatataacctatatcatacatattatataatcagtatcctattacaaatcggatgcttatatagataac

SEQ ID NO: 117543 - DNA, 388 bp, Homo sapiens
tcccaaacaatgagccctaagagagactgcatgaggccaattaaatctgtctctcaaatcttataaacaaatctattaaattttaatcattttgaccataagctataatttccataaacctttaaataaccttttaatgtttttttaaattaaaaagtgggttaatgctataaraaccttgtttatctaacgcaggggtcctgatgctggtctttcatcaaactataatattaatgtgtaatttatatggaaactctgaactaagtttatctctcaaaattggcccttataatttcacagacgcatgtcttctgtgacagtccctgggattagaggggttcagcagttttaatttctggcactgtgtctcatgaatgcagtttatttt

SEQ ID NO: 117544 - DNA, 553 bp, Homo sapiens
ttttaaaaaaggcaaaaatctttattttttgagagaggagacttaatttcccaaacaatgagccctaagagagactgcatgaggccaattaaatctgtctctcaaatcttataaacaaatctattaaattttaatcattttgaccataagctataatttccataaacctttaaataaccttttaatgtttttttaaattaaaaagtgggttaatgctataagaaccttgtttatctaacgcaggggycctgatgctggtctttcatcaaactataatattaatgtgtaatttatatggaaactctgaactaagtttatctctcaaaattggcccttataatttcacagacgcatgtcttctgtgacagtccctgggattagaggggttcagcagttttaatttctggcactgtgtctcatgaatgcagtttattttgattatcatcttttcctgggtctgaagatgagggtttgactggtgttacggtttaagatttagcaggacttggtgtgctttttagacccagaagtaaaagccctttaatttaacaga

SEQ ID NO: 117545 - DNA, 553 bp, Homo sapiens
ttttaaaaaaggcaaaaatctttattttttgagagaggagacttaatttcccaaacaatgagccctaagagagactgcatgaggccaattaaatctgtctctcaaatcttataaacaaatctattaaattttaatcattttgaccataagctataatttccataaacctttaaataaccttttaatgtttttttaaattaaaaagtgggttaatgctataagaaccttgtttatctaacgcaggggtcctgatgctggtctttcatcaaactataatattaatgtgtaatttatatggaaactctgaactaagtttatctctcaaaattggcccttataatttcacagacgcatgtcttctgtgacagtccctgggattagaggggttcagcagttttaatttctggcactgtgtctcatgaatgcagtttattttgattatcatcttttcctgggtctgaagatgagggtttgactggtgttacggtttaagatttagcaggacttggtgtgctttttagacccmgaagtaaaagccctttaatttaacaga

SEQ ID NO: 117546 - DNA, 520 bp, Homo sapiens
ttttatgtgaaggtatttcctttttcaccatggcctcaaagcactcacaaatatccctttgcagattctacaacaacggaatttccaaactgctcataattagtttttaggaccaacatgagcatttagacacactgcttgtggtgcagcacacatgtattatccacactgaaattaggaattcaactgaagttcatgtagagccaaaaatgtgaatatwtgggagacctcagagatgatctagctcactttaatttgtagaaaagaaaacaggttcagggaaagggcatgcattgctaaggtgattcagcagctttggcacagaaacacaacacacttaaggtgactcttcaggtttggagtagaaacgcaatataatctctgttcttttgcttctcagatccagaattttttcacaatactgaactacttatgtttctgattccttattttttctttctaaattttgccagtactgtctaacaaagatctattctttaccataaatatttaaattcgt

SEQ ID NO: 117547 - DNA, 533 bp, Homo sapiens
agtttctcagaaaccttctttatagtttttatgtgaaggtatttcctttttcaccatggcctcaaagcactcacaaatatccctttgcagattctacaacaacggaatttccaaactgctcataattagtttttaggaccaacatgagcatttagacacactgcttgtggtgcagcacacatgtattatccacactgaaattaggaattcaactgaagttcatgtagagccaaaaatgtgaatatatgggagacctcagagatgatctagctcactttawtttgtagaaaagaaaacaggttcagggaaagggcatgcattgctaaggtgattcagcagctttggcacagaaacacaacacacttaaggtgactcttcaggtttggagtagaaacgcaatataatctctgttcttttgcttctcagatccagaattttttcacaatactgaactacttatgtttctgattccttattttttctttctaaattttgccagtactgtctaacaaagatctattctttaccataaa

SEQ ID NO: 117548 - DNA, 523 bp, Homo sapiens
caactcacacagttaaacatttcttttgatagaagaggtttgaaacactctttttgtagaaagtggaagtggatattaggagcgctttgaggactatattggaaaaggaaacatcttcacaaaaaaccagacagaagcattctcagaaacctctttgtgatgtgtgcatacaactcacagagttgaacctttcttttcattgagcagttttcaaayactctttttgtagaaactgcaagtggatatttggatcgtttgaggcctatggtggaaaaggaaatatcctcaaaaaaaaaaccagacagaaggattctcagaaaattccttgtgttgtttgtattcaacccacagagtttaaacttttctttgattgggcagttttgaaacactctttttctagaatctgtaggtggatatttggagtgcttcgatgactatgggagaagaggaaatgtcttcatataaaaactagacagaagcattctcagaaacttccttgtgacgtgtgcattaaataacagtg

SEQ ID NO: 117549 - DNA, 523 bp, Homo sapiens
caactcacacagttaaacatttcttttgatagaagaggtttgaaacactctttttgtagaaagtggaagtggatattaggagcgctttgaggactatattggaaaaggaaacatcttcacaaaaaaccagacagaagcattctcagaaacctctttgtgatgtgtgcatacaactcacagagttgaacctttcttttcattgagcagttttcaaacactctttttgtagaaactgcaagtggatatttggatmgtttgaggcctatggtggaaaaggaaatatcctcaaaaaaaaaaccagacagaaggattctcagaaaattccttgtgttgtttgtattcaacccacagagtttaaacttttctttgattgggcagttttgaaacactctttttctagaatctgtaggtggatatttggagtgcttcgatgactatgggagaagaggaaatgtcttcatataaaaactagacagaagcattctcagaaacttccttgtgacgtgtgcattaaataacagtg

SEQ ID NO: 117550 - DNA, 254 bp, Homo sapiens
  misc_feature (1)...(254): n = A,T,C or G
tntcgttcttgattaatgaaaacattcttggcaaatgctttcactctggtccgaactgcgccggtccaagaatttcacctctagcagcgcaatacgaatgcccccacctgtccctcttaatcatggcctcagttccgaaaaccaacaaaatagaaccgcggtcctattccattattcctagctgaggtatccaggyggctcggacctgctttgaacactctaattttttcaaagtaaacgcttcgggctgcagg

SEQ ID NO: 117551 - DNA, 435 bp, Homo sapiens
tgtgggtgagtgtggctcccactgagtacctagcaggttttccccaggttatctacaaagagtgacttttgaactgtttcatgtgagtcacgagtatgatgtccccagcttttttcttattcctcatgattggcttggtcattcagcctacattgtaggcttgcattttctattactataaaaagtgggacagggattttgatacggatttgagttagcttacagattgctttggataatatgacaccttattaaycaaaagccctgccttctcaaaatgacccttttcgatcttgggttttagcaatgtttcataatgccctgtatcccaaagctcactatattgcccaggctgttcttgaactcctggcctggcagtcctcccacctcaggctcctgaatggaggagattactgtcatgagccacagtgcctg

SEQ ID NO: 117552 - DNA, 435 bp, Homo sapiens
tgtgggtgagtgtggctcccactgagtacctagcaggttttccccaggttatctacaaagagtgacttttgaactgtttcatgtgagtcacgagtatgatgtccccagcttttttcttattcctcatgattggcttggtcattcagcctacattgtaggcttgcattttctattactataaaaagtgggacagggattttgatacggatttgagttagcttacagattgctttggataatatgacaccttattaaccaaaagccctgccttctcaaaatgacccttttcgatcttgggttttagcaakgtttcataatgccctgtatcccaaagctcactatattgcccaggctgttcttgaactcctggcctggcagtcctcccacctcaggctcctgaatggaggagattactgtcatgagccacagtgcctg

SEQ ID NO: 117553 - DNA, 585 bp, Homo sapiens
agtgtttgacattggatcaaggtgggatgcaacagtaatcatttttctcagaagtttacaatctaggaattgaaatatatatggttcacttaatcatattcccttgcgtgtctagatttgcaacaaagccatttccccttacgctgttaggcatggggtggtattttccattattttttcctaacacactaactgatatttaaacagcatcacagatgstggggcccttgcctccagcgtccaccaaacattgcctcttagggcactgacagcctctatgacaaggtgcagaaatggctaacataatctcacataatgtagagaagtgtggggtaggaggaaacaatttcacagttcattcatgttgagaaacgtttcctaacatgtacacttgcatgctgccaagcagagcaaaatggatgccatttgcagcttcaagtcatttattttaaaatgccatctattggtttgtggggtttagagctgtcccttaggcacatttatttagatgcttgtgtagattcttcagaaaaacgtaagatattcctgctcaggaatgagttttatgaaataagctgtgattac

SEQ ID NO: 117554 - DNA, 631 bp, Homo sapiens
tggggttgtaaagccaggctgggaagatctgccctcaggccctccacagtgatgcatgcaggcacttaactgtggtagacaaggacgaggtgatcctcaggccactggcaaaatgcgcaggtgggggtggctgtagctgcactttggtccttctactgagcaggctggggttgctttctctggaagcagccattaggatggcagctggaaaacctgtagcagtagcagtccaggtcatgagcagtggaatttgtccttgggacacatgaaaatgcacagccacacctctgctggaggcaggatatgggattactacytgtggcttccacctcagccccagtggcagagtaggacacagtttagtgagggtaacactctcaaaatggcaccatgctgcagctccttaggacttggtggtttgtaggattgagcatgaactgtctctctgcagcatgccttcacgcagtctccagacagcgccttgtcttagccttgaggccggccctcaagggtcaacaggctctactgtggctaggattacaggagtctgtggcaggattatggaccagtaggggcctcccacttactttttccccacattaggaagccactccagactcccagaacaaga

SEQ ID NO: 117555 - DNA, 631 bp, Homo sapiens
tggggttgtaaagccaggctgggaagatctgccctcaggccctccacagtgatgcatgcaggcacttaactgtggtagacaaggacgaggtgatcctcaggccactggcaaaatgcgcaggtgggggtggctgtagctgcactttggtccttctactgagcaggctggggttgctttctctggaagcagccattaggatggcagctggaaaacctgtagcagtagcagtccaggtcatgagcagtggaatttgtccttgggacacatgaaaatgcacagccacacctctgctggaggcaggatatgggattactacctgtggcttccacctcagccccagtggcagagtaggacacagtttagtgagggtaacactctcaaaatggcaccatgctgcagctccttaggacttggtggtttgtaggattgagcatgaactgtctctctgcagcatgccttcacgcagtctccagacagcgccttgtcttagccttgaggccggccctcaagggtcaacrggctctactgtggctaggattacaggagtctgtggcaggattatggaccagtaggggcctcccacttactttttccccacattaggaagccactccagactcccagaacaaga

SEQ ID NO: 117556 - DNA, 631 bp, Homo sapiens
tggggttgtaaagccaggctgggaagatctgccctcaggccctccacagtgatgcatgcaggcacttaactgtggtagacaaggacgaggtgatcctcaggccactggcaaaatgcgcaggtgggggtggctgtagctgcactttggtccttctactgagcaggctggggttgctttctctggaagcagccattaggatggcagctggaaaacctgtagcagtagcagtccaggtcatgagcagtggaatttgtccttgggacacatgaaaatgcacagccacacctctgctggaggcaggatatgggattactacctgtggcttccacctcagccccagtggcagagtaggacacagtttagtgagggtaacactctcaaaatggcaccatgctgcagctccttaggacttggtggtttgtaggattgagcatgaactgtctctctgcagcatgccttcacgcagtctccagacagcgccttgtcttagccttgaggccggccctcaagggtcaacaggctctactgtggctaggattayaggagtctgtggcaggattatggaccagtaggggcctcccacttactttttccccacattaggaagccactccagactcccagaacaaga

SEQ ID NO: 117557 - DNA, 374 bp, Homo sapiens
tattgtctgtattttaagattatgtatgatctcaggagatgtgcgtgggttcaagttcacaaggggtgggcttrtgatggtttataatgagtgtcaacttgattggattgaaggatgtaaagtattcatcctgggtgtgtctgtgagggtgttgccaaaaaaagattaacatgtgagtcagtgggctgggaaaggcagacccacccttaatctgtgtgggcacaatccaatcagctgccaacccagccatactataagcaggcagaaaaatgtgaaaagagacgggcctcgcctcccagcctacatctttctcccatgctggatgcttcttgccctcgaacatggactccaagttcttcagttttggaactctg

SEQ ID NO: 117558 - DNA, 374 bp, Homo sapiens
tattgtctgtattttaagattatgtatgatctcaggagatgtgcgtgggttcaagttcacaaggggtgggcttatgatggttwataatgagtgtcaacttgattggattgaaggatgtaaagtattcatcctgggtgtgtctgtgagggtgttgccaaaaaaagattaacatgtgagtcagtgggctgggaaaggcagacccacccttaatctgtgtgggcacaatccaatcagctgccaacccagccatactataagcaggcagaaaaatgtgaaaagagacgggcctcgcctcccagcctacatctttctcccatgctggatgcttcttgccctcgaacatggactccaagttcttcagttttggaactctg

SEQ ID NO: 117559 - DNA, 437 bp, Homo sapiens
ggctttcactttagcctggtccctacctcaagcataaggtaaagattttccatgggttcttttctggtactactacctgccagtgtggrgtcatgtcctagtctatcttgagggaattcccctgttcattattgtcagagtgagactgttaagtcttgatttccctggacaacttcactgcatgacttttaatatgattttttaatataccctttactgggcaataaattatatagttatctgagtaagagatatggtcaggaagaggcattgcctcattcaacttttctctttggtgaactcgcatatgttctcctcacccgccagtcacctctaaaccgtattgttccaagacaacaaacagaactcgagtgtgtatctttcaccactggatttgtctttgctccataaagcttcatgcttaatagggtttctgt

SEQ ID NO: 117560 - DNA, 598 bp, Homo sapiens
gtctttgtacttactttcagaatgtattttctttaacatgaaaagaatccaaggcctttttgcttctaattgctttttgtgtatctactaccatcccttgctaaattattgataggtttcctcaaatctcggcatgatgtcctacattctaaattttcaatagctgaaaatttcaccttttcagtgccttcaagtttatctcagtaaaaagttgagaaagactgtaatagagttatttaatcagatttttttcatctaccataatttttgaataaggaaaaacagcaatactttttctccttacttggcaactaattttcatagagaggaaaaaaacaatcaaaacaggtacaaaatgtaacaaaaccaaaggaccatgtgaggtgaaatttaaaatgagaaaaatgtccacagtactttgggcaatgcractcctgggaaatagtaactcagcacctgagagctaaataattctacaggactaaatatatattctggtactcaaggggaaaatgacatcatatagagtttaggtctattaaaacatatttgtagatgtgtaggtatgaaaaatgcttttagagatgggaagagaaaa

SEQ ID NO: 117561 - DNA, 588 bp, Homo sapiens
ggttcattgtataccttgatactgggcttaaagcagcaatcctaattccagatctaccttcaagtctgggtcagtgttctcaaatgctgccagtttcatgtcaggaccrgcttaatattgaaggtaactgagcattgctaatgtctgactggagctgaaagaggccaaaagcagggttataactttgggaaaactgacctggtgttaacttccatgccttccatttcaaacgggaaggtatcacaattagaagctattaacagtcttatctaataaattgtggataatttcttttttttttttctttttttttaagagtcagggtctcactctgtcacctaggctggagtgcagttgtgcaattgttacggaatctttggggtgtcgattttctggtttggaaactgtggttggtggcatctttgcccgagttcttgtcctgcttccaggaaaaatggtgtaggtagacaagtgaagggttaaaggagaggagctttattaagtgttagaacagctcagaggagacccatagtgggtagctcctccctaggttgttctgtcaagtgttcagctctcaggagaaaggga

SEQ ID NO: 117562 - DNA, 559 bp, Homo sapiens
cacctaggctggagtgcagttgtgcaattgttacggaatctttggggtgtcgattttctggtttggaaactgtggttggtggcatctttgcccgagttcttgtcctgcttccaggaaaaatggtgtaggtagacaagtgaagggttaaaggagaggagctttattaagtgttagaacagctcagaggagacccatagtgggtagctcctccctaggttgttctgtcaagtgttcagctctcaggagaaagggaaaccctggagagggttgctcctgtctgcagctggtagttyccagacatctctgcaggtctctgaagcattcagcagagaaaacagctggccctcccattgtctccagctatcagcagaaaggatagctccttcctgcctctattcttccctcctctgccctctgccctgttctggctgagtcctgggcttttatggatgtcagaggggaggaaatgtatgcccattggtccatgggcagccatgggcgggcccaggaaaaacaccatgagttttgcctccagtctgcaggactggcagcctagcct

SEQ ID NO: 117563 - DNA, 551 bp, Homo sapiens
tggtatatttgtttatttagcactcattttatgttttctaattataaatataacgtattctcatattctgaaggtaataaatttgcaaattttaaattagtaggaagagtaaaaggaactaagatcccactgtccaaaggtaatcattattcaggttctgttcttttccttccatttggttctctgatattttcttcatggttgccattacatcacatattcaatattatgacccastttgtgtttcagtcagtgtctatacatacaactttgaatgatacaaatgtctcatagaaactaagtttaatcaaatcaagaaactaagtttaatgccagtctatatcaatgtaccgtttccttctagctaaatatttaggcttttccaaattttgttaacataaataactccaaagatatttttgttaacattttctcttagtgttactttcctaaggtagactttaacaatttactataacaaattatagaaaatgatcattttaaggttccttattcttgtactatttgtaaataatgttatcacctctttc

SEQ ID NO: 117564 - DNA, 639 bp, Homo sapiens
ttccctttttctttgttcttagtttgtcttccrctattttactgcctttcatggctttaattgagcattttgtatgattccattttctctcccttattattagcatatcagttatgcttcttttttacatttctcagtggttgcactagagtttccaagatacatttataactaattaaaatccatgttcaaacaacattataccacttcacaggtagtgtgtgagtaccttaaaataataaaataatcataattcttccctccttgtcacttttatcattgctatcattcactaatatataagcatatataagtgcttatatataagcactcataaaataacataatagtagcatcaatatattttattacataatcacatgtgtaataaaatgtatatatgtaatatatatgaaatttttatatatattatatataaaagcatatgtaatgaaatacattgttgctactattttgagcacacttctatttgtatatcaattaagaataagaaaaatattttttctttgtgaccccaggtgtcatggataaaagatctatggatataattttcaagtcagtgcaagggtattttttctaacaccgaagtgatattagagtggactgaattctcttggg

SEQ ID NO: 117565 - DNA, 639 bp, Homo sapiens
ttccctttttctttgttcttagtttgtcttccgctattttactgcctttcatggctttaattgagcatttwgtatgattccattttctctcccttattattagcatatcagttatgcttcttttttacatttctcagtggttgcactagagtttccaagatacatttataactaattaaaatccatgttcaaacaacattataccacttcacaggtagtgtgtgagtaccttaaaataataaaataatcataattcttccctccttgtcacttttatcattgctatcattcactaatatataagcatatataagtgcttatatataagcactcataaaataacataatagtagcatcaatatattttattacataatcacatgtgtaataaaatgtatatatgtaatatatatgaaatttttatatatattatatataaaagcatatgtaatgaaatacattgttgctactattttgagcacacttctatttgtatatcaattaagaataagaaaaatattttttctttgtgaccccaggtgtcatggataaaagatctatggatataattttcaagtcagtgcaagggtattttttctaacaccgaagtgatattagagtggactgaattctcttggg

SEQ ID NO: 117566 - DNA, 639 bp, Homo sapiens
ttccctttttctttgttcttagtttgtcttccgctattttactgcctttcatggctttaattgagcattttgtatgattccattttctctcccttattattagcmtatcagttatgcttcttttttacatttctcagtggttgcactagagtttccaagatacatttataactaattaaaatccatgttcaaacaacattataccacttcacaggtagtgtgtgagtaccttaaaataataaaataatcataattcttccctccttgtcacttttatcattgctatcattcactaatatataagcatatataagtgcttatatataagcactcataaaataacataatagtagcatcaatatattttattacataatcacatgtgtaataaaatgtatatatgtaatatatatgaaatttttatatatattatatataaaagcatatgtaatgaaatacattgttgctactattttgagcacacttctatttgtatatcaattaagaataagaaaaatattttttctttgtgaccccaggtgtcatggataaaagatctatggatataattttcaagtcagtgcaagggtattttttctaacaccgaagtgatattagagtggactgaattctcttggg

SEQ ID NO: 117567 - DNA, 639 bp, Homo sapiens
ttccctttttctttgttcttagtttgtcttccgctattttactgcctttcatggctttaattgagcattttgtatgattccattttctctcccttattattagcatatcagttatgcttcttttttacatttctcagtggttgcactagagtttccaagatacatttataactaattaaaatccatgttcaaacaacattataccacttcacaggtagtgtgtgagtaccttaaaataataaaataatcataattcttccctccttgtcacttttatcattgctatcattcactaatatataagcatatataagtgcttatatataagcactcataaaataacataatagtagcatcaatatattttattacataatcacatgtgtaataaaatgtatatatgtaatatatatgaaatttwtatatatattatatataaaagcatatgtaatgaaatacattgttgctactattttgagcacacttctatttgtatatcaattaagaataagaaaaatattttttctttgtgaccccaggtgtcatggataaaagatctatggatataattttcaagtcagtgcaagggtattttttctaacaccgaagtgatattagagtggactgaattctcttggg

SEQ ID NO: 117568 - DNA, 468 bp, Homo sapiens
taggaattccactttagagtccaatctgaccatctgaatctgaatcggactatagtggatggactgatgctaccctgcagccttacttccttaactttgtttccccaggccctaatataaaccccaggaaaacaggcatacagctgtatgcatttggcagattactatccatttcattgttcagttgttctggaaaggcaccgaatgcaactgtagcctggaaacatttggaaaaatggtactgttcctgatatctttgtttcttcctaggtgacagttgaaggtgactktcctttgtacagttctgcctgctgttagcaattttccaaaattaaataccatattttgtgtttgataggcacagctgtgtctgttaccaagggcaagcccacttgcacaacactctgtgttcatttatatactgagaactttatttagaacccagttttacagaaaaaaatcaagttg

SEQ ID NO: 117569 - DNA, 632 bp, Homo sapiens
tgaataacgattttttgtttttgttttgcacttgtataattgatactaaagtggtagtgactactaaaatyaatgaaaaggaatctatagtttttacactataactaggccaagttgggaaggtatcaaaattatagttataaaatgagactgaaagtttaaaacagatcactacctatgacgcacacaattgcaagccctttttcatagatcagtcaatgaagtctttgcaaaaacccaaagagggttattttggattttaggggaggagaaaactgagactcataaagttaaataaactctcctcctttattgtattgttttgttaaatataggtttttattcttatttttaacaacacaaatatttgtagaaaaatttagagaatgcagaataagcaagagaaaaataaacacaatgtattgctatccccccagttttcttaactgtgtattacacatttttgtgtaacctgcttttttgccttaaaatgtcatgatcttttccaaccataagtatgttatttttcatatgtcagttttaatggctataatattctcctcagtgtttttgagggtctttgagagcactcagtaagtagcacctgtcttttctacccaattcaattgaaa

SEQ ID NO: 117570 - DNA, 359 bp, Homo sapiens
taattctaccaattaagacaccaactcttcaggcaaaattaatttaatacttggggtatgatgggttgaccctgaatatttacaagatactaacattggaaaatgttagagtgtgtcacatgggacaagagtctgttaaggtgttctacaagaatgggaggttgtgtggttaaacatttggcatgcttggcacattttttccctcttcctggagagttrtagtttgcattcacatttaaaggatctgagaaatcctgcagaaaagaaaattatgtagctttgtttaacccaatgtttcccaaacttagtggactttatgcattcgacatctttccattgctcttccagattactcttca

SEQ ID NO: 117571 - DNA, 618 bp, Homo sapiens
gaaaagctacactcatacatatttacccctttgctttctccatttggatgttgaataaccatgtagaaaataacaagtccaaaactcaggtcctgatttttcaccttcaaatcagcatctctcatatttttccaactcagtaaatgacagctacattcttccacatgctaaaaactcttggagacatygtcattcaaccctttgtcttgtattctacatctagtttatcaggtaaagcagttacctgtaccttcaaaatacagttaaacaaaatcctaccctttttcttggtcctccctgctatgattctggtccaacccactaaactcttttgtctggattattaaaatagtctccctgattcctttttgccacccacaaagccagagaaatcctgttaaaacacaagattaatgctgcataattccttttctcaaaatactttaaagagtgctgatttctgtaacctggatatgtgtaagacacaattccaaaacagactggcttaaaaaaatatgtatcactccgctcaaggtcctgggaaccaactagactcagctgggttgttttggtttgggatctgtcatgtgattgtagtcagatggaggttgaggctga

SEQ ID NO: 117572 - DNA, 568 bp, Homo sapiens
cttcacaggcatatgttgagggaaacaaatgactggcatgaggttgtgcagctggtgaatttgaaactcaaccatatgagtaaaaacaatttgagtaagacacaatgaatttagacttcatttattctcattttgaaataatttgcaaaagtgttaggctaaggatttatattttcattacctatgaggaaataaagcaaacaaatttggaccaaaactacaaaaactaaagcattcaaagtatcatcaagtgctttaaaagkcacattttcagtattctcatcatcacacaaacacttaaattgaaatgacaaattattcagtatggctggtcagaagagagatttgactcagagacatttgttactagttgttatctgttattataggaattgccataatgagacaagctcactcatcatggatttctattggtaagaagaaaaataagggatttttgtgagaagacaatgctgtccttttaatgttagcatcaaaaggtccaggatgaaacttaattatttttatcttttcatacaaccatttagagagttatcatgaatgagct

SEQ ID NO: 117573 - DNA, 568 bp, Homo sapiens
cttcacaggcatatgttgagggaaacaaatgactggcatgaggttgtgcagctggtgaatttgaaactcaaccatatgagtaaaaacaatttgagtaagacacaatgaatttagacttcatttattctcattttgaaataatttgcaaaagtgttaggctaaggatttatattttcattacctatgaggaaataaagcaaacaaatttggaccaaaactacaaaaactaaagcattcaaagtatcatcaagtgctttaaaagtcacattttcagtattctcatcatcacacaaacacttaaattgaaatgacaaattattcagtatggctggtcagaagagagatttgactcagagacatytgttactagttgttatctgttattataggaattgccataatgagacaagctcactcatcatggatttctattggtaagaagaaaaataagggatttttgtgagaagacaatgctgtccttttaatgttagcatcaaaaggtccaggatgaaacttaattatttttatcttttcatacaaccatttagagagttatcatgaatgagct

SEQ ID NO: 117574 - DNA, 611 bp, Homo sapiens
gttgttggagggttaatgttgagaagtaagaaaggacagaacagtgaatacatcaatttaaccgtaggaaaaaaaatgtttactgctgatgaattaacttggaggccctctatctagaagaggggcattttttccttgcctaataaaagggagtttataaaacttatagcatcattgtaattgagaaatgtattttgaaaaatggaacagaataataggtttttcatagattaaaataaaccacagtgtttaaatattacatgtatttatgtagttttaaagacatggaaaaagtgcatagcaaaattaaagttgacatagaaactatactttacagatcaaacttagaccaactagaatagaagggcaaggagagtctgcaatgagttgattagctctgctgcaggaaattgaccaactgcaagtgaactactkgggggatcgacgttttatatggatctttgtgaagcacaaaacaagatcagcaaatcataaagaaacaaataatgaaagctgacttagttggttcaggctgctataacacattactgggtggcttaaacaacagaaatgtatttcttacagttctggaggctgaaagtctgaaagca

SEQ ID NO: 117575 - DNA, 643 bp, Homo sapiens
gaaacttgtaagcaaagaagttcatccaaaccaaaaaattgatacaggtatgctattaactagactacagatcatactgtgatttcatctacttttsagtcatcttttcttcccttagtatatagttctatagattccatgacatatatagattagtgtatcactacaatcaagatagagtactgttctatcaacataaagaaatttattttttaatagtcacaaccctccacttcctcataccataacccctaataaccactgatctgttctccatccctacatttcatcatatttaggcttttaaataaatagaatcacacagtaagtaaccttttgagataggcttttttcccacttagcctcaatatatattcaagttattgtgtctattaatagcttattctttttcatttctgagtagtattctgttgtaatgatgtaccacagtttgtttattcattcattcattgaacgacaattgagtttttccagattagggctattacaaataaagttcctatgcattttagtgttctggtttttcgtgaatgtaagtttccatttctctgagataaacactaaagattgtgatttatatgtcatgtgataaagatatggttaactttataaaagactgcca

SEQ ID NO: 117576 - DNA, 643 bp, Homo sapiens
gaaacttgtaagcaaagaagttcatccaaaccaaaaaattgatacaggtatgctattaactagactacagatcatactgtgatttcatctacttttcagtcatcttttcttcccttagtatatagttctatagattccatgacatatatagattagtgtatcactacaatcaagatagagtactgttctatcaacataaagaaatttatyttttaatagtcacaaccctccacttcctcataccataacccctaataaccactgatctgttctccatccctacatttcatcatatttaggcttttaaataaatagaatcacacagtaagtaaccttttgagataggcttttttcccacttagcctcaatatatattcaagttattgtgtctattaatagcttattctttttcatttctgagtagtattctgttgtaatgatgtaccacagtttgtttattcattcattcattgaacgacaattgagtttttccagattagggctattacaaataaagttcctatgcattttagtgttctggtttttcgtgaatgtaagtttccatttctctgagataaacactaaagattgtgatttatatgtcatgtgataaagatatggttaactttataaaagactgcca

SEQ ID NO: 117577 - DNA, 566 bp, Homo sapiens
catgtgcaggtttgttacataggtatattgcatartcctgagtttgggggtatggatcctgtcatccagggagttagcataggatccaataggtagtttttcaacccttccccacctctctctcccctctcttagtccccggtgtctattgcttccatctacatgtccatgtaaactcaatgtccagctcttattcattagtgagaacatgtggtatttgattttctgtttctgcattaattcacttaggattatggacttcagcttaatccatgttgcttaaaaggacataatttgattctttattatgactgcatagtgttccttggtacctgtatgtaccacattttctttatccaatccaccactaatggatacctaggttgagttcatgtctttgttattgtgaatagcacagcaaagaaaatataagtgcgtgtacttaactgatgtatttgtacagaccacctcttaacaactccattttgactggcctttttgtatgtcgtctgctctgatgaaacagcgtcaagacaatttaagagtatctttgcacaagttcttcc

SEQ ID NO: 117578 - DNA, 566 bp, Homo sapiens
catgtgcaggtttgttacataggtatattgcataatcctgagtttgggggtatggatcctgtcatccagggagttagcataggatccaataggtagtttttcaacccttccccacctctctctcscctctcttagtccccggtgtctattgcttccatctacatgtccatgtaaactcaatgtccagctcttattcattagtgagaacatgtggtatttgattttctgtttctgcattaattcacttaggattatggacttcagcttaatccatgttgcttaaaaggacataatttgattctttattatgactgcatagtgttccttggtacctgtatgtaccacattttctttatccaatccaccactaatggatacctaggttgagttcatgtctttgttattgtgaatagcacagcaaagaaaatataagtgcgtgtacttaactgatgtatttgtacagaccacctcttaacaactccattttgactggcctttttgtatgtcgtctgctctgatgaaacagcgtcaagacaatttaagagtatctttgcacaagttcttcc

SEQ ID NO: 117579 - DNA, 589 bp, Homo sapiens
cacttaattacatgtgaacatgaacagactcatctagcctgactttgtcatctttttcttatttgtcaaatagagataataacagtagcttttcataaggttgttgggaagattgaatgagttaagataaagcactcaaactatataaatgtcttattgtactcagagctatgttaagtgttaggtattattacatttattatcrgtattcacattttattattgttgtattggtgggcatacaggctgctttggatacccttggaatcatgttaatctttctctacctttttattctcagcatctagttcaatgccacacacacacaaacatgcttcacaaatgtctgttgacaaatcaggtaaatggcatggcttactgatgtctaactgtggagatagttatcactcatgggcccactgagagcaaaaagaaagctgacaatggtaaaataaactcagataggactcagaaggacctgtttttactgacttggttttaggatatatctacacatagagaagggttcggacaattatagttagcaaatcaagcaacaacagtgtttcagacactttgataccaaaat

SEQ ID NO: 117580 - DNA, 589 bp, Homo sapiens
cacttaattacatgtgaacatgaacagactcatctagcctgactttgtcatctttttcttatttgtcaaatagagataataacagtagcttttcataaggttgttgggaagattgaatgagttaagataaagcactcaaactatataaatgtcttattgtactcagagctatgttaagtgttaggtattattacatttattatcggtattcacattttattattgttgtattggtgggcatacaggctgctttggataccctkggaatcatgttaatctttctctacctttttattctcagcatctagttcaatgccacacacacacaaacatgcttcacaaatgtctgttgacaaatcaggtaaatggcatggcttactgatgtctaactgtggagatagttatcactcatgggcccactgagagcaaaaagaaagctgacaatggtaaaataaactcagataggactcagaaggacctgtttttactgacttggttttaggatatatctacacatagagaagggttcggacaattatagttagcaaatcaagcaacaacagtgtttcagacactttgataccaaaat

SEQ ID NO: 117581 - DNA, 589 bp, Homo sapiens
cacttaattacatgtgaacatgaacagactcatctagcctgactttgtcatctttttcttatttgtcaaatagagataataacagtagcttttcataaggttgttgggaagattgaatgagttaagataaagcactcaaactatataaatgtcttattgtactcagagctatgttaagtgttaggtattattacatttattatcggtattcacattttattattgttgtattggtgggcatacaggctgctttggatacccttggaatcatgttaatctttctctacctttwtattctcagcatctagttcaatgccacacacacacaaacatgcttcacaaatgtctgttgacaaatcaggtaaatggcatggcttactgatgtctaactgtggagatagttatcactcatgggcccactgagagcaaaaagaaagctgacaatggtaaaataaactcagataggactcagaaggacctgtttttactgacttggttttaggatatatctacacatagagaagggttcggacaattatagttagcaaatcaagcaacaacagtgtttcagacactttgataccaaaat

SEQ ID NO: 117582 - DNA, 589 bp, Homo sapiens
cacttaattacatgtgaacatgaacagactcatctagcctgactttgtcatctttttcttatttgtcaaatagagataataacagtagcttttcataaggttgttgggaagattgaatgagttaagataaagcactcaaactatataaatgtcttattgtactcagagctatgttaagtgttaggtattattacatttattatcggtattcacattttattattgttgtattggtgggcatacaggctgctttggatacccttggaatcatgttaatctttctctacctttttattctcagcatctagttcaatgccacacacacacaaacatgcttcacaaatgtctgttgacaaatcaggtaaatggcatggcttactgatgtctaactgtggagatagttatcactcatgggcccactgagagcaaaaagaaagctgacaatggtaaaataaactcagataggactcagaaggacctgtttttactgacttggttttaggatatatctacacatagagaagsgttcggacaattatagttagcaaatcaagcaacaacagtgtttcagacactttgataccaaaat

SEQ ID NO: 117583 - DNA, 465 bp, Homo sapiens
taggtgtaagtataaaaatgttgtatttaagagaatcccacaagcttggtataaggcagaaaataaatagatgtgacatgaataagtagtttattacatttgtattctacctgcggactagaggaagcaagaaacacagccactatgcttgattagcattacagmgatggtacaatgatggttgccagaagctggggggaggaagaaatggggaagtattttttaatgggtatagagtttcagttttacaagatgaaacgaattatggagatggatggtagggacggctgcacaatgttatgactctatttagtaccactgaactgtacacttaaaatggttaacagagtacattttatgttatgtgtattttaccacaataaaaaaataaaataccttaggaacattttcatgaaaaagcccacataaaattcactttaatgcacgtgtttatgcatagctttg

SEQ ID NO: 117584 - DNA, 605 bp, Homo sapiens
aactatttataaaagaaaagcttaaaacctgaagcagaaacaaaatcctgaaactgtaaaattsagtcaaactaaaatttaaaaaacaaagtaatgatataaagtatcatttgtccaaatgtgttctacaaaacgcttttttcttaaatatgtctgatgaaaaacaggttctaggagtaaaatatgtttgaaaaatgctgggttaaacaactgaacctatgaaggaaggaatagaacgtctcaagctcttcactctggaatcttttttacacggcaattaacaccatgcttcttcttggatttgtatttcagataaacacaatctgggaaatattttataatacagagggccacaccagattgaatattgcccccaggaatgaaatgaaaacaggaatggattctccagtaagaggtacccagatatcctaattttcagtagctgacctaaaccctggaaaagtgggatcaaaccccataaccaaatacaactttttaggaactaagtggataatcactctgtgttgtatgaacatgtgggcagtgtgtttcctacacagcttaaaagtgcaacaaaaaaagatctaggtgtcatataaagaatt

SEQ ID NO: 117585 - DNA, 419 bp, Homo sapiens
cgaattcattactgaaacaatgtatacatttcagactaggaaagtaactatttataaaagaaaagcttaaaacctgaagcagaaacaaaatcctgaaactgtaaaattgagtcaaactaaaatttaaaaaacaaagtaatgatataaagtatcatttgtccaaatgtgttctacaaaacgcttttttcttaaatatgtctgatgaaaaacaggttctaggagtaaaatatgtttgaaaaatgctgggttaaacaactgaacctatgaaggaaggaatagaacgtctcaagctcttsactctggaatcttttttacacggcaattaacaccatgcttcttcttggatttgtatttcagataaacacaatctgggaaatattttataatacagagggccacaccagattgaatattgcccc

SEQ ID NO: 117586 - DNA, 605 bp, Homo sapiens
aactatttataaaagaaaagcttaaaacctgaagcagaaacaaaatcctgaaactgtaaaattgagtcaaactaaaatttaaaaaacaaagtaatgatataaagtatcatttgtccaaatgtgttctacaaaacgcttttttcttaaatatgtctgatgaaaaacaggttctaggagtaaaatatgtttgaaaaatgctgggttaaacaactgaacctatgaaggaaggaatagaacgtctcaagctcttcactctggaatcttttttacacggcaattaacaccatgcttcttcttggatttgtatttcagataaacacaatctgggaaatattttataatacagagggccacaccagattgaatattgcccccaggaatgaaatgaaaacaggaatggattctccagtaagaggtacccagatatcctaatyttcagtagctgacctaaaccctggaaaagtgggatcaaaccccataaccaaatacaactttttaggaactaagtggataatcactctgtgttgtatgaacatgtgggcagtgtgtttcctacacagcttaaaagtgcaacaaaaaaagatctaggtgtcatataaagaatt

SEQ ID NO: 117587 - DNA, 536 bp, Homo sapiens
ggtgcagcctcgaactcctcggtctcaagctatcttcccacctcagcctcatgttgtagtgaactttgttatgcagtgtctcctattctacatgtgcaggagtatttttacagtatgtacctggagtggaattgcttggtcattgggcatgtgtgtgttcagctctattgagtggcatcataccgttctccaaagcagttgtaccaatctacaccctcaccagcagtgaatagtcttcccattgttcttcctcaatgaaactagatattcacagccttttargtttttcctagagtatgaagtggtatctctttggggttttaatgtttatttccctgattagaattgtagttgagcatcttttattatgtttatggaccatttatgttctctcttctgtgaaattcctattcgggttttttgctcattttaaatgttgttgtttgtgtttttcttatataggaactcttcacgcattcaagatgcacatatgttgttcagaatagtacctgagacatagaaacaactttgtaaga

SEQ ID NO: 117588 - DNA, 567 bp, Homo sapiens
taaaagtttcctgaggcctccccggaagcagaaaccactatgcttcctgtatagcctatggaacggtgagccaactaaaggtatttctcatgtatttctttrtagcaatgcaagaacgtactaatacagctaagcagaggctatcaggaccagcaacagtctgagctggatgagagacaaagctaaacttagagcagcagcaggagctgccagggagacagaaaggaaggacagactcctaaattccaggatgtctcctttaagtctgtaagaagctcagccaccgtctccttacctgactcctctgggaaagagtttccctaggttaagccatacagggatagggtaggagatgccatttggatctaggagcagagggcagagactcagcaggaagagtgtctctttgagaaggagacacagtggagtaggtgtgtaggttcacagggccagctatgggtagagtcgggtgtacatttttagaagccacaattccccaaaatctcctgactataacatcagtgcacagagccagtgaaatggaggaggagtgggttcaggcaattc

SEQ ID NO: 117589 - DNA, 567 bp, Homo sapiens
taaaagtttcctgaggcctccccggaagcagaaaccactatgcttcctgtatagcctatggaacggtgagccaactaaaggtatttctcatgtatttctttgtagcaatgcaagaacrtactaatacagctaagcagaggctatcaggaccagcaacagtctgagctggatgagagacaaagctaaacttagagcagcagcaggagctgccagggagacagaaaggaaggacagactcctaaattccaggatgtctcctttaagtctgtaagaagctcagccaccgtctccttacctgactcctctgggaaagagtttccctaggttaagccatacagggatagggtaggagatgccatttggatctaggagcagagggcagagactcagcaggaagagtgtctctttgagaaggagacacagtggagtaggtgtgtaggttcacagggccagctatgggtagagtcgggtgtacatttttagaagccacaattccccaaaatctcctgactataacatcagtgcacagagccagtgaaatggaggaggagtgggttcaggcaattc

SEQ ID NO: 117590 - DNA, 567 bp, Homo sapiens
taaaagtttcctgaggcctccccggaagcagaaaccactatgcttcctgtatagcctatggaacggtgagccaactaaaggtatttctcatgtatttctttgtagcaatgcaagaacgtactaatacagctaagcagaggctatcaggaccagcaacagtctgagctggatgagagacaaagctaaacttwgagcagcagcaggagctgccagggagacagaaaggaaggacagactcctaaattccaggatgtctcctttaagtctgtaagaagctcagccaccgtctccttacctgactcctctgggaaagagtttccctaggttaagccatacagggatagggtaggagatgccatttggatctaggagcagagggcagagactcagcaggaagagtgtctctttgagaaggagacacagtggagtaggtgtgtaggttcacagggccagctatgggtagagtcgggtgtacatttttagaagccacaattccccaaaatctcctgactataacatcagtgcacagagccagtgaaatggaggaggagtgggttcaggcaattc

SEQ ID NO: 117591 - DNA, 567 bp, Homo sapiens
taaaagtttcctgaggcctccccggaagcagaaaccactatgcttcctgtatagcctatggaacggtgagccaactaaaggtatttctcatgtatttctttgtagcaatgcaagaacgtactaatacagctaagcagaggctatcaggaccagcaacagtctgagctggatgagagacaaagctaaacttagagcagcagcaggagctgccagggagacagaaaggaaggacagactcctaaattccaggatgtctcctttaagtctgtaagaagctcagccaccgtctccttacctgactcctctgggaaagagtttccctaggttaagccatacagggatagggtaggagatgccatttggatctaggagcagagggcagagactcagcaggaagagtgtctctttgagaaggagacacagtggagtaggtgtgtaggttcacagggccagctatgggtagagtcgggtgtacatttttagaagccacaattcccmaaaatctcctgactataacatcagtgcacagagccagtgaaatggaggaggagtgggttcaggcaattc

SEQ ID NO: 117592 - DNA, 599 bp, Homo sapiens
ggaaaaggatagtctcttcaataaatggtgctggaaaaactggatatccatatgcagaagaatgaaactagacctctgcctctcaccctatacaaaratcaactcaaagtacctcaaatacccaaatataagacccaaaatggtaaagctactagaagaaaacataggggagatccttcaggacattgctctgggaaaatattttatgaataaggcatcaaaagcacaggcaacaaaagaaaaaataaacaaatgggatcacatcaagctaaaaatcttctgcacagcaaaggaaataataaagtgagtgaaaagacaacctacagaatgggagaaaatataaactcatctggcaggaaattaatatcaagaatatacaaggaattcaaacatatcaacagcaaagaagcacaacaatctaattaaatataaacaaatgctctgaacagacatttctcaaaagaagacatacaaatgaccaacaaatatatgaaaaaatgttcaacaccactaatcagcaaggaaatgctaatcaaagccacagtgaggcatcatcttactccagttaggatggctattatagaagagacaaaaataac

SEQ ID NO: 117593 - DNA, 599 bp, Homo sapiens
ggaaaaggatagtctcttcaataaatggtgctggaaaaactggatatccatatgcagaagaatgaaactagacctctgcctctcaccctatacaaaaatcaactcaaagtacctcaaatacccaaatataagacccaaaatggtaaagctactagaagaaaacataggggagatccttcaggacattgctctgggaaaatattttatgaataaggcatcaaaagcacaggcaacaaaagaaaaaataaacaaatgggatcacatcaagctaaaaatmttctgcacagcaaaggaaataataaagtgagtgaaaagacaacctacagaatgggagaaaatataaactcatctggcaggaaattaatatcaagaatatacaaggaattcaaacatatcaacagcaaagaagcacaacaatctaattaaatataaacaaatgctctgaacagacatttctcaaaagaagacatacaaatgaccaacaaatatatgaaaaaatgttcaacaccactaatcagcaaggaaatgctaatcaaagccacagtgaggcatcatcttactccagttaggatggctattatagaagagacaaaaataac

SEQ ID NO: 117594 - DNA, 583 bp, Homo sapiens
gtacgtcgtacatctaaatgtatgtttatatattttatttgtgcattttattcctagggttgcttttgctttagtttgtaaaacgttcttatttttatgataatgtagtatatactaaataaagaaaaatcaggaaatagaaaatgaagaagaaaacattagctattgtcaaccaaataaaaatcgtgcaatctctaagtacatgaacgatgtattatttgtacagcatgtacaatgtttatgcttcacagggtgaggtagagactgtaaaacattgaacctgggaaaaataagaaagtaaggamattttcacaacatattaatattatagaaaatgttgaacttaacagttaagatacaagtagtgaaaaatgatagtatttaaggagatctagaaaatttaatctatatcagtaatgtgtgagaagtattagaataatgcttgtatttctggattggcatcgatttctattgagactggaaatgtaacagaagtgagcaaaaaagaatttaaattgtggatacttgagttttatacctaggagttcgagaaatacattttgttactatcaaagcagttggc

SEQ ID NO: 117595 - DNA, 377 bp, Homo sapiens
tagtttgggtaacagatgacctttaagccaattttggcatgcaaggggttgtttattaggcatcagcactgctgaaaatcgtggggatgcaggcttaatttcaacactattctaaatacttgaaagatattatataattctttaataaactcctgtgtatamaaatggttcacattaactcaatatccatgattaaacatttacaaaatcaagacactgttatttagtggagacttgctggctattctatgagaggaggtattgttattgtaatctcatcctctcataaatatgtatcatattactcataaccagcccttcatattctattcctattttggtattttaaaataagatatctttgaaactcttgaatt

SEQ ID NO: 117596 - DNA, 563 bp, Homo sapiens
gataaagaaatgtgacatacatatataatggaatattatttagtcataataaagaacaaaatcctgttatttgtggcaacaagaatgcaagtggagggcattatgttaggtgaaataagcctggcatagaaacataaacaccacataactacgtgttctcacttatgtatggaagctaaaatttttaatctcgtagaaatagatagtagagttttggttaccatatcctggaaagagtaggagacagaagagtataagaaaaatgtggttaatacatacaaaattacagctggagagaaggaagaagttctagttctctacagcactgttgggtgactgtagttaatgggaatttattgtgtgttttcaaayaactaaaataaaagattttgaatattctcactgcaaagaaataatacatgatttagataatggatatgataatgactctgacttgatctttacgcattgcataaatatatcaaaatatcactctgtaacccataacatgtacatttattatatgtcaattaaagtaaatttaaaagaggaaagatgaggta

SEQ ID NO: 117597 - DNA, 563 bp, Homo sapiens
gataaagaaatgtgacatacatatataatggaatattatttagtcataataaagaacaaaatcctgttatttgtggcaacaagaatgcaagtggagggcattatgttaggtgaaataagcctggcatagaaacataaacaccacataactacgtgttctcacttatgtatggaagctaaaatttttaatctcgtagaaatagatagtagagttttggttaccatatcctggaaagagtaggagacagaagagtataagaaaaatgtggttaatacatacaaaattacagctggagagaaggaagaagttctagttctctacagcactgttgggtgactgtagttaatgggaatttattgtgtgttttcaaacaactaaaataaaagattttgaatattctcactgcaaagaaataatacatgatttagataatggatatgataatgactctgacttgatctttacgcattgcataaatatatcaaaatatcactctgtaacccataayatgtacatttattatatgtcaattaaagtaaatttaaaagaggaaagatgaggta

SEQ ID NO: 117598 - DNA, 614 bp, Homo sapiens
ggcagtggcagggtcaggtctgcataagggcaggaccagagccagtgatacagcagggccacggcagggccagcggctgtgccaggacagaacaagagcagagcagggcaggaccacagccaggccatagagagggtagggcaaatgccaaggcaaggccagggtagtgccagggctgaggcaaggtcagggaaggtccagggctgagtcaaggttagaaccaagacaggggcaaaggctggggcagatctagggcacaagcatggcaggctagggcagggcaatggcaagaccaggtcatggcaggccagcccaggatagaacagggcacaggcagggcagggccagggccatggctggggcaggacaaggaccaggactggrgtccaggccagggcaagggtatggccagggcagaggtagggccagagccagggtgtgggcaggaccaaggcaggtctattgcagggccagggttcagaccagggccagagcagggctgggacagggccagggccagaaccaggaaagggcaatgtcaggacaagggccatggcaggaccagcaacggggctagggccaggacagggtcaggaccagggctgggccagggt

SEQ ID NO: 117599 - DNA, 614 bp, Homo sapiens
ggcagtggcagggtcaggtctgcataagggcaggaccagagccagtgatacagcagggccacggcagggccagcggctgtgccaggacagaacaagagcagagcagggcaggaccacagccaggccatagagagggtagggcaaatgccaaggcaaggccagggtagtgccagggctgaggcaaggtcagggaaggtccagggctgagtcaaggttagaaccaagacaggggcaaaggctggggcagatctagggcacaagcatggcaggctagggcagggcaatggcaagaccaggtcatggcaggccagcccaggatagaacagggcacaggcagggcagggccagggccatggctggggcaggacaaggaccaggactggggtccaggccagggcaagggtatggccagggcagaggyagggccagagccagggtgtgggcaggaccaaggcaggtctattgcagggccagggttcagaccagggccagagcagggctgggacagggccagggccagaaccaggaaagggcaatgtcaggacaagggccatggcaggaccagcaacggggctagggccaggacagggtcaggaccagggctgggccagggt

SEQ ID NO: 117600 - DNA, 614 bp, Homo sapiens
ggcagtggcagggtcaggtctgcataagggcaggaccagagccagtgatacagcagggccacggcagggccagcggctgtgccaggacagaacaagagcagagcagggcaggaccacagccaggccatagagagggtagggcaaatgccaaggcaaggccagggtagtgccagggctgaggcaaggtcagggaaggtccagggctgagtcaaggttagaaccaagacaggggcaaaggctggggcagatctagggcacaagcatggcaggctagggcagggcaatggcaagaccaggtcatggcaggccagcccaggatagaacagggcacaggcagggcagggccagggccatggctggggcaggacaaggaccaggactggggtccaggccagggcaagggtatggccagggcagaggtagggccagagccagggtgtgggcaggaccaaggcaggtctattgcarggccagggttcagaccagggccagagcagggctgggacagggccagggccagaaccaggaaagggcaatgtcaggacaagggccatggcaggaccagcaacggggctagggccaggacagggtcaggaccagggctgggccagggt

SEQ ID NO: 117601 - DNA, 594 bp, Homo sapiens
ctcagtggttcctttctgtgatagtcatggattctaagaacgttatgctaacagatacactgaggtgtttgatgagactttctaactaakaataacagatataagttgctgttataggttttcataatgggttgaatactttctccctcaaattcccattccctggaaacctcagaatgtgaccttatttagaaataaggcctttgcaaatgtagctagttaaggccatactggactaaagtagacactaaatccaatgactggttcctttataggaagagaagtgaacacagagaggagaagaccatatgacaacacagcacagattagagggattgtgtacaaactgggaaacacaaacggttactaggagccaacaggagctgggaagaggcaaagaacgattttcccccagagcctgcagatggagcatggccctgccaacaccttgatatcaaatttctacaatccagaactgtgagggaataaatttctgttgttttaagccataaaaaaggaagaaacacccagcacccagggctggaatttatatattaatatgaacatgtcttatggtatcttgcaatgaaaata

SEQ ID NO: 117602 - DNA, 594 bp, Homo sapiens
ctcagtggttcctttctgtgatagtcatggattctaagaacgttatgctaacagatacactgaggtgtttgatgagactttctaactaagaataacagatataagttgctgttataggttttcataatgggttgaatactttctccctcaaattcccattccctggaaacctcagaatgtgaccttatttagaaataaggcctttgcaaatgtagctagttaaggccatactggactaaagtagacactaaatccaatgactggttcctttataggaagagaagtgaacacagagaggagaagaccatatgacaacacagcacagattagagggattgtgtacaaactgggaaacwcaaacggttactaggagccaacaggagctgggaagaggcaaagaacgattttcccccagagcctgcagatggagcatggccctgccaacaccttgatatcaaatttctacaatccagaactgtgagggaataaatttctgttgttttaagccataaaaaaggaagaaacacccagcacccagggctggaatttatatattaatatgaacatgtcttatggtatcttgcaatgaaaata

SEQ ID NO: 117603 - DNA, 455 bp, Homo sapiens
aatagtcctatgagaaatgtcacacttcaggttcttaatgacacaaggtaagtttttgtttccttttttttaacttaaaattactttgattatattaggtattcatttccttttcttcaggatttggaatttagaactatatgttgtctttaaagtaaagcattttactttacagatctggttaaccctcacagatttacataaatgaggaacctacctgtgtgtatcttccacttctctgctgtgttgatgcaggctgctgaaaaagatgactattttgagatgaacttggaagataggttgaggttgttatgtgaaaagcagaattcaaatctatgtatggttactgattcatccacakttcttcttgagctatgtcttttggaagcaaagatatgggtgtggttctacaataaacaaaaccatgcagagtagtagaagtgcttttttttttt

SEQ ID NO: 117604 - DNA, 510 bp, Homo sapiens
attagcgttttatgccatagtcagtagtaatttttatggcagcaatagaaaacacatacaccagtccaggccattcccacttgctgtttctttagcttgaaatgtcttcttttctgttttctggtgaktttttttttttcaaattttaggtctcaagttcactgttgcttccttaaaatgccatctttcccaatggcactattgaagcatcccttctgccaccaactcctgagcaactcttaaataactgactgtttatttctttcatggcatttaattgtctaagatcaccttgtttgtatatttgcctacttgtttattgctgtttttccactcaaggttgtaagctgtgtggaatcagggaccttgtctgtgttgttcacagctatgtatccttagtgccttcattagaacctgacaaataatagaccctcaataaatatttgttaaatgagggaataaattagaccagggaagtggttatttcaggcaaaggtcagagcctgagta

SEQ ID NO: 117605 - DNA, 510 bp, Homo sapiens
attagcgttttatgccatagtcagtagtaatttttatggcagcaatagaaaacacatacaccagtccaggccattcccacttgctgtttctttagcttgaaatgtcttcttttctgttttctggtgattttttttttttcaaattttaggtctcaagttcactgttgcttccttaaaatgccatctttcccaatggcactattgaagcatcccttctgccaccaactcctgagcaactcttaaataactgactgtttatttctttcatggcatttaattgtctaagatcaycttgtttgtatatttgcctacttgtttattgctgtttttccactcaaggttgtaagctgtgtggaatcagggaccttgtctgtgttgttcacagctatgtatccttagtgccttcattagaacctgacaaataatagaccctcaataaatatttgttaaatgagggaataaattagaccagggaagtggttatttcaggcaaaggtcagagcctgagta

SEQ ID NO: 117606 - DNA, 510 bp, Homo sapiens
attagcgttttatgccatagtcagtagtaatttttatggcagcaatagaaaacacatacaccagtccaggccattcccacttgctgtttctttagcttgaaatgtcttcttttctgttttctggtgattttttttttttcaaattttaggtctcaagttcactgttgcttccttaaaatgccatctttcccaatggcactattgaagcatcccttctgccaccaactcctgagcaactcttaaataactgactgtttatttctttcatggcatttaattgtctaagatcaccttgtttgtatatttgcctacttgtttattgctgtttttccactcaaggttgtaagctgtgtggaatcagggaccttgtctgtgttgttcacagctatrtatccttagtgccttcattagaacctgacaaataatagaccctcaataaatatttgttaaatgagggaataaattagaccagggaagtggttatttcaggcaaaggtcagagcctgagta

SEQ ID NO: 117607 - DNA, 499 bp, Homo sapiens
caagacagtggtgcacagcaacatggcaggaaccatttgttgccgatgactaactcactctagccacactgggacaaactataaaagcatttttcaggagaatggcatgaacctgggaggcagagcttgcagtgagccgaaattgcaccactgcactccagcctgggtgacagagtgagactccgtctcaaaaaaaaaaaaaaaaaaaaagcatttttctaggtccaattccacagtctttcttcaaytgtagatacagaattctggattattgtgttttgacattttaggaagtcaaaaaaatagtataatgtctagtttgaaagaagctgacttttgtaatttagaaaacactgtgaagtaagatattaaatacccatactaaaagtttattttacttatacttagcacatccacttatactcattttcatagattacttaagtatttattgagtctacttactgtatgcctgactatataccatggaagaaagata

SEQ ID NO: 117608 - DNA, 587 bp, Homo sapiens
ctttaactttttaaaagcaggacgtggagcatagcacactcatttcttataggaggtctttggtgccattgcgtttctggacaatttcccctttgtagcctgtgcctagtcctgccatttaaaaagcttctctcaggggaagccttgactcatggactctcaatttagctacagagaattgtctattccaatacaaacaatcatccatgtctcaagatttattaggcttaaaaaataactgatggatgaatgattaagaatgaggaaataaattttaaaaatgtaaacataaaagctttaaagaaaggaatgaactgcttatacgtgcaacagcatggatgaatcttggaatcaggcacaaaaagctacatatggtgtgatttcattttcatttgcctttctaacattgtagaaaggcaaaactaaagaaatggaaaayagttcaatggtgccagggatgggaatggaagaaagagattgactccaaatgcgtggaaatttttgcagtgaagaaaatgtcatataatggcagtcacattattgtatacattgtatacatttgctaaaacttaaagaactgtacacct

SEQ ID NO: 117609 - DNA, 443 bp, Homo sapiens
aactaggaagggagccatctactctgctttaagtayttcaacacacatgatttcattcaatccttacacactgcaaagtaatcagagcaagtattctcatcctttacattttttagatatggaacctgacacttacatgtataatttaaaatacaagatgatgcagctcatagatgaaaaatctaggatttaaggtgagagtttctaacttcaagtacaataataggtaaggtcagcactccatgccttccgggctacaagttatgataccaaagagttctaaattgtatctctgtgatgtttcctcagagaaattaagatgtcaaagggcatggacagataatatggtaagttgaaatggccatacacacaatgtatgtgaaagccaacacacaatgtagctcaactcaaaatacagacttcaaaacctttcccagagaatt

SEQ ID NO: 117610 - DNA, 527 bp, Homo sapiens
ctgccaacattacatgcaattctcagatgtcttctgaaaatgtatttttcctaactgggcaaaaaacgtaatgttacttctggaaattggttggaaggagtcagatggagaagaaacctattcttgcatgctcttcacatacattatttcatttggttctcacaacagctatttggtaataatattataacctccattctacagatgaagaaactraacattctagagcttacatgattcagtcaagaccatcctggtagtcaagaatgaactcaagatttgaagacaaatctgcttaaccccagtcatgcatgctgcactaacccataatatctaacaagcatattagccaggaagagttttcccaattaacataatgacatcaatagttacaggaaagataatgaagaaagcacaggaaagtgtaagtggggtgcacaggggtgataagcttgggtgtgcatcctcatacagaggcagatatgcttttactacatgtaattactggggctctaaagtttgttctc

SEQ ID NO: 117611 - DNA, 606 bp, Homo sapiens
ccatcattttattagtattcaagaggtccctaacattaagaaacaatataaaactaaaagaaattagctgagtacaatttaagtcaaatatatgaaccaaatggctactgtgaaattagttcagaaatcaatatgttagaatatacaagagatttaacctctggaaattttactttggttcttaactgtaaaaacaactactctctcaaaawtagttagaaaacaccacagtaccagattcagtatcttttcttcatccttccttggatctctgtgatacaggaactgtcaatctcttctaagagtatctctgataccttccataacactatattctcctatctgcttcctctctgaaatctttcactcatttcccaacaactccaacttttccccttccctgaactgactctagacttattaccaaaactttaatgtctttttgtttggtgcttatatatcctatttcttagcctaattatttcaagtgtttattttgcaactaaatttgaaacttcccaaggtcaggaaccaaggattctgcttctgaatttcttactaaatatatagattgattatttggtgcaccgaagtcacacaaatatt

SEQ ID NO: 117612 - DNA, 688 bp, Homo sapiens
caccctgtctacacctgtgcatagtatgtaggtatcacaaaactctattctggagaaatttgcttayactatttgctcatctgctatggatttggtaactgttttgttgaaaggtttagtttttaattgattgcttttgcatcagataaataacatctcgatgatacctttgagggcagttaatctttagcaagcacaaggaaagaggcctcaagctctatttacaactttgtaaaacagtttctagtttaaactttgtacattatgttcttgctaatgtgcatagcaagcctggaacaatcttcaaaaagtatgttgtaactatttacacttgagcttttcaaagcaaaaataattgccccagatgcaaaaactcattgattaagacccgtacacttgccacattaaaacataaatcaacatgctattaaaatggagtctttggcattttccgattgggggttagaccatgtaatttattaaatgaataatatgtatatccattatatagggctctgtatccttatctgtattttgaccctgaaataagttcttatttttgtcattttgaaatgcaaaatctcttcaataactttatcctgatccaataatgcttaggtaagagtgtcacataacagttttattaggaaaggacttatctttttttttaacatatgaagaatgttac

SEQ ID NO: 117613 - DNA, 674 bp, Homo sapiens
gtgaatagccactgcatgccagcctgggcaatatagtgagacccagtctctaaaaaaaattctaaaaagaaaaaaagaatttgtactcacagatccttgttctacatcttgtcatttgtgaatttttaaatgacagatatctaaatatttcaagatatctattaggtctttgtctcatgctaaattttcttttttccaggttgaaatatcttgatgtcagttatacctgttatttagttattttgccttcattcttgatcttataataagctccactttgcctgtatcattctagaagtccatcattcaaaatgaatctaatggttaagatgtgttctgatcagaaacttgtggagacttcaattatgcctgaaacctccttcaacccagatactttaattctattaatgcaacccaaaatcttatcagctttttgtggcagcattacacattgttggcaaatagtgagctgactataaaatcaaaatgtccaagtattttacaggtacagctttccatattattcaccrtgtattccccatactgatgtcttaaatttgtttatatcagaaactaatacagtactgtcatctcaattgaattgcctatgttggagacagattgttacatcggcatgttatattttgtatcctgactctattattcattctatt

SEQ ID NO: 117614 - DNA, 610 bp, Homo sapiens
tttaatgaccaattttattcttttgctgtctttaaattattcacatctgattttaaagtgtcaataaaatggtaatgctggaaaactgaatacacaatcaatttggctgctttcttctaagaatataggagctcaagagtccaattcaatgccatcagatagtaaccatctctgtcctactggatggtcatatactttccttccatgtgaacttggtatgtgcccagataaataggggctaggttttattttcatttcctttgagttgtaaaataaacattttacaacttaaattatttcctttgttagcaataaactatcagggaatagttagcaaccctccagtcagtactgaaaatcaaacagttcattacatattaaatgcatttaaaatcatacaacttcactccaaaatccatttgatgtgttttctggtaagatttctatgtaagcagaacttaatgattgtacgagaaatcaytttagagtggactttgtactatatccttcctttccctcaccttatacacaaggaatctatagaaacaacttatttttaccctactgaattatttgcagtcatatacgtatagcttcacattacaacatt

SEQ ID NO: 117615 - DNA, 579 bp, Homo sapiens
ttttctttttcaagctccccatgtcattccaacttgcaaacaaggttgagaaccactaacctagaggtcaggttaaacaaaacgacaagctaactagcattacatacttttctttaagattgctattagagaataatcactactttctcgatctctcaaattcctactgctaataaaaatgggaactacttttatctttttaatgttgatctacctatatttctgtctttgtatgaaggcctagaatgaaaatgcattccttgaatttatttggaacattaaagaaaactcttcatccttcatagagaaaaaagtactaacaggtattttggttttctggtaggcaggttggtttgtttagaatggcttataagtggcatttaaaggtgctgaaacagctgcagtgctcaaaaaagtgtgaaattcttttctgctcttgtaaacagtagagaaaatatcaccagcatctgaggctttccactgaatgcccygcaatcagctaaagggaaggcagagcaaaccattgcaaagtggtctgtgagcagacaggaagatgtgagcaatatggcaaaatgctca

SEQ ID NO: 117616 - DNA, 591 bp, Homo sapiens
ttgtcatcaactctatcctggaatttttcagggtcaccaaataacatataagtagactactagaatatgactgagaattcaggattagaagagacagaagtaagtgattctagaaaaagggaatagcacacgcaaaactctggtgtggacaaatgmaaactgcctgctgtcctatggtaatcttcggaatctgtaataagcaccagctcatcaggacagatgtagcaatcaattcggacagataccagctcttcacaaccaatacagccatacctgactaagtgtcatccctgctgtcactgagagagaagggcaagttctttagtttaagaagaacaaaaaggatgaataaaggaagcaaaaaaaaaaaagatgaggtagatttgctgttttaaggcatacggtttatggagtgagaagacctactgtgctataaattcctgccctttgtcctccagagtctatcctttgtctatgtatacatgtgtgtggcgggggaggggggagcctggaagaggaagatgaattaaatatatatttgattttaagctcaagataaagcttaatatgtttgtacttctgggcaaatgc

SEQ ID NO: 117617 - DNA, 583 bp, Homo sapiens
ccagcccttcggggactatttttcaatctccaaaatcttaaaccccatgttgattttgaagtaggaattcagagatgagtagcatacagagagaattttcctgccatggttgaatggttgatgagttcctatggagaggagtttctttagagacttaatttcttaaaataagtatgagaaataacatgggttcttgggactagacatgagtgtaactgagggcatgaatgcatgttaataaatgcagaggatgtgactctcaattctgccactgcatttattctgaccagctgtatattgttaggtctctgtggcaatacataccgtgaggagaatcattgtagtgcaggaaaaatgtattaaaagatacctgtatgtctgtatcttttatatatcgattcatatattttttgaatcaccctgtatagtttatgcagcatggctattctgttttaaaaatcaaagtacttacctacagtaaaatttacsctttttcatgtgctgctttatgagtcttgacaagtacatacagtttgtgactacaaccacaatcaagatgagtaaccatcccatcattccccca

SEQ ID NO: 117618 - DNA, 470 bp, Homo sapiens
cctctgtgcagaagctgctttgcctgggtaggaagtcacatgatgcacaggcatcttggggagactgagtcttacagctggaacctctaaagagaaaggtttccatggtagcaaatcatcttcctggtgtagatgtgtcactgctaatctacagccagggccccgtgaaaggaatgctgcctcgagggaggaaaggtgcaacctctctacctatgcctttccacaagccccaaatccatacactgccgtaggtaattaggttttaactcactgggggtctgacaaatccccgggtggatttacatacaagctaagaaggatcaaagacataagaggaagtcaggctgcatggagttaaagtcatactgggtagacagagaagcttccgtctgtcggggtgctccatggaaggcattggtggaagaggggagcagcaacagyctgcaggactgagggcaggtggcagccta

SEQ ID NO: 117619 - DNA, 490 bp, Homo sapiens
aactgattacccacaaatacrtaagtggtaattctctgtttaactctctttcttttccttttgggtggagccctttgaggaatccccttggcctgcatctcatcatttatgaaatttctaagtgtgtgtcgaatgtaaatatgagccaagtcctgtagattcctgacagtgattccttacagatttgtagtggtgagggttagatttaattttatataaggtttgaataattgttaagcttatgtaacctgatctgaatttgcacttcctctatgaaaacttcacttatctaataaggaaatcaaatactttgtagacctatttaccttacttttgttgcaatcactgttgctgggttgctgtatatatattccgggcaatatatgagtgcaataacaatacaaaatattgaataatttagcttttaaaaatcccacaaattttatgaaattttacagccctgctacttttgcttttgaatctcttgcca

SEQ ID NO: 117620 - DNA, 622 bp, Homo sapiens
gctgtttcacttgagggcgtattttgcccctttgatggggtattttgcccccaattcttccccctgtttgggaaattagctttgataatattttctgatttataagataacattctatatacctagttcccctaacattttactggtagtagaggaatcttgatgtacccacgtggttttttttttatgtcctctataacattgtgtctaggaacyaattttccaacttttccaaaaatgtaaaagatagattctggtttcagagggcagttgagttcttgagaatgttttaaagctatttttcagtctctggcactgttttataattggaattctgccttcaaaatatagactgtagactagcatttcatattatttttaatcatctagcctctatcaatgttgctaagttgaatcttgcaaaatcattggcttgacatttcaacatcaacataggattgttattattctcagtactccttatccaggcaaggagtaggagggttagttagcataatctcaatataaagtaccttttctgcaattgcataatcttaatctcaaatgaaactaaagttccacaattttatttaatacctaatatgtaccaagggcatgagct

SEQ ID NO: 117621 - DNA, 568 bp, Homo sapiens
atactttgtttgattttacaggttcacagctagagaacaattttcatcaaggtgagttgtaccttgagtctcatgtgaatctgatttagatgagactctggacaatgcattttgcatgtgagaagaacataaattttgggggccagggcagaatgctgtggtatgactgtgtccgctcaaattcataggttgaaatttaatcaccaatgtgatagttttaargggtagggccttgaggaggtaattaagtcgtaagagcatgacttaataatctttataaggtcatgaataagaccttataaagagtcttcagagagcttcctggcctgtccttctcttctatcgtgtaatgacacagagttaatttattttgcccttccaccacttgagggcagagcagaaggtctccacactagaagcaaaaagcaactctcaacagacaccatatttgcccatcccttgccccttgactttaagcctctagaaaacaaattttgtgaaaaacacaacttctatggtttataaattagccaggctgatattttgttacagcagtccaaaaggagta

SEQ ID NO: 117622 - DNA, 568 bp, Homo sapiens
atactttgtttgattttacaggttcacagctagagaacaattttcatcaaggtgagttgtaccttgagtctcatgtgaatctgatttagatgagactctggacaatgcattttgcatgtgagaagaacataaattttgggggccagggcagaatgctgtggtatgactgtgtccgctcaaattcataggttgaaatttaatcaccaatgtgatagttttaaagggtagggccttgaggaggtaattaagtcgtaagagcatgacttaataatctttataaggtcatgaataagaccttataaagagtcttcagagagcttcctggcctgtccttctcttctatcgtgtaatgacacagagttaatttattttgcccttccaccacttgagggcagagcagaaggtctccacactagaagcaaaaagcaactctcaacagacaccatatttgcccatcccttgccccttgactttaagcctctagaaaacmaattttgtgaaaaacacaacttctatggtttataaattagccaggctgatattttgttacagcagtccaaaaggagta

SEQ ID NO: 117623 - DNA, 587 bp, Homo sapiens
agtagcttgcaagaagcctgggactagagttcaagaagagacagtttcttctgagaagaactacgaacaaagaacagcttcacaaaccgagaatttggccactggtttctaaggcagagactcatgcaataagataaaagagargcaaggaattaataagtagaatttgtccagcaatttgcattatgtgaagcatcatcacagtgattatatttaatcattcctttaacttaatggttttcaaaatatggtaaacagatccctaggagtccctttttcaatagttctgtaaggtcaaaactattttcataacaacactgaataattatttgcctttttcacttgttgacatttactggtaaaggaaaaacaatttagttaaaagcatgaatcaaggcaatggcgccaaactattctagtagttattgtagtttttcaacaccaaatactcagggggaaaaaaggagacaattttgcttaagaggatctttgatgaaatggcaaaacatattactttcattaactatctcaacccttgggtacatacctgtttaatattctgtgtgattaaatagaaagcacacata

SEQ ID NO: 117624 - DNA, 587 bp, Homo sapiens
agtagcttgcaagaagcctgggactagagttcaagaagagacagtttcttctgagaagaactacgaacaaagaacagcttcacaaaccgagaatttggccactggtttctaaggcagagactcatgcaataagataaaagagaggcaaggaattaataagtagaatttgtccagcaatttgcattatgtgaagcatcatcacagtgattatatttaatcattcctttaacttaatggttttcaaaatatggtaaacagatccctaggagtccctttttcaatagttctgtaaggtcaaaactattttcataacaacactgaataattatttgcctttttcacttgttgacatttactggtaaaggaaaaacaatttagttaaaagcatgaatcaaggcaatggcgccaaactattctagtagttattgtagtttttcaacaccaaatactcaggggraaaaaaggagacaattttgcttaagaggatctttgatgaaatggcaaaacatattactttcattaactatctcaacccttgggtacatacctgtttaatattctgtgtgattaaatagaaagcacacata

SEQ ID NO: 117625 - DNA, 619 bp, Homo sapiens
attggtatattattggtcaggaaaacaaccttattttaatagtactctctaaaacatgatagctctacaatggaggtatcaaaaacacatgaaataagaaacagacacctgcttccttgatgaaactgttcctcgaacacttgacatcctaatgcctaagaaataagtttaagccttaaaacttcttttcctattcctctggatctaaatactaacattcttatttaggtcaaagttactttcatttgtcaactcactaattttctgatttcattattctacagtctgaaatattacaaatgtacctttgcccggtccttcttttattttcatctatttatcccaaaaacagaaatattttgaacaccgagatttagtttaatcccctcacttataggtaataaaataaccccccaaaattaagagtgttttctagattttggctactagaaaaactttagtgtcatcattctctttctaaaacacattttcactgagactggggcttyatgtatttgccagaatcaaagaaaaataccaagctactaatatactggtaccctcaggaactctactgatcaaagtagtctttccatcttttaaatactatttttcacat

SEQ ID NO: 117626 - DNA, 551 bp, Homo sapiens
tctcaaatccatccctctgacctgactaaaattaaggggtttatatagcagggaagacatgtaatcatgtgtgggaaaacaggaagttgggaggagtaaggaaaaggagttggacaacaggaaacaggaggttagttaggccatcataccaggtgaagagtctgacgtcttattgttcataataagtgatctggtgagtttcagctcattgctaccatctgggaggcctgatagttggtttccctagaaaggaactcagataagacaaatgtaactttctcaggttttaagaaggcaaggatcaatttatatgtttattcaaagaaaccacaaacatcaastctatgggatcattggatcagttttacagtaagcatgtgtcagcaccaagggaggggatgacagagagtcaatgcaaggtgtaaccaaaatgtgtatatttttccccattacagttcagcttcttaccctctctgcccaatccaaactgcaacaaggattctcccaattatatttcaaacatcctagcttcctgggatgccctcttctct

SEQ ID NO: 117627 - DNA, 616 bp, Homo sapiens
attgttctgctagttttgacctagctgtgttccggctrgctgacctcatcccctttccagtaacactggcccctggcttcctgtggcatatctggggtttgcagtgttttcttttacccataagttaatatactctcctatgattaagggactcacaatttcattgatggatcaacttcacgaccatttgttcagtgagtactaagctctacactgggtactaagctccctccacgtccagttgaggagtagatccattgtaaaagctacactagaggcataaagaactggagcgtgcagagaatggggctgacttggcctggtgagagctttgtgtaaggtgaggcatggagagcccactcacagaacagtaagaagccagggaagatggcaatccaaatggaggaaacagtaagggaggggaagggagagaacctttttaaagaccatcatttgtttggaggcttgagaagaatgggaacggggacccagttgttcaggctgaggtcaaatggcaaaaggtcttgaatgtcaggccaaagcttcaagagtacgtaggccagagattggtccaatggtgaaatccagcctctttttgtaaataaagttttcttgc

SEQ ID NO: 117628 - DNA, 616 bp, Homo sapiens
attgttctgctagttttgacctagctgtgttccggctagctgacctcatcccctttccagtaacactggcccctggcttcctgtggcatatctggggtttgcagtgttttcttttacccataagttaatatactctcctatgattaagggactcacaatttcattgatggatcaacttcacgaccatttgttcagtgagtactaagctctacactgggtactaagctccctccacgtccagttgaggagtagatccattgtaaaagctacactagaggcataaagaactggagcgtgcagagaatggggctgacttggcctggtgagagctttgtgtaaggtgaggcatggagagcccactcacagaacagtaagaagccagggaagatggcaatccaaatggaggaaacagkaagggaggggaagggagagaacctttttaaagaccatcatttgtttggaggcttgagaagaatgggaacggggacccagttgttcaggctgaggtcaaatggcaaaaggtcttgaatgtcaggccaaagcttcaagagtacgtaggccagagattggtccaatggtgaaatccagcctctttttgtaaataaagttttcttgc

SEQ ID NO: 117629 - DNA, 605 bp, Homo sapiens
ctgtattatcttgtagttatgccccaaaatattacaatatctattttcctattataaacaactctcaactagttcttgatattatagttggagcgttctgtagatttttttggcagcatataggaaaacaagttacattttctatgaatttcatttggagatagtaaagggaatattacaaatgattatttaaaaggagccttgggtgtgagaagactcaggactgtcctggcttcagtttcccctctgycactgagcccagagagtatcctctttattttccctctcaccccatcttgtctgtggctctcctctcctgctcttgccttgaaagcacagacttggctcaggcaaacctcacatgtcaccatgcttcctctgtgcgtcccttcccgtttattttggccccgatcaaggtgcaagatattggtatctgaggctcagctcaactgatggatttcccatctcacagccgagcagtaaaagaacgggttcctttcgtgagtagagaacctgggtcctagataaggaaaactgttgaggctgccctgccacagcctggagctgtgcaggtccactctcctgttggcatattttctttgatc

SEQ ID NO: 117630 - DNA, 483 bp, Homo sapiens
ctatactacagggaagttgaatatatttttagaagacagttgctccctattcagaattacttgactcaaaaatcttcctttctcaaggataagtagaaaatagttgcagtcttccaagagctacccatctacttttaaaactgtgcacatgtctcaaaagttagctaatctgtctccaggcaaatgcttcttactgggagtgtggggctgtggcctgagactagacaccaatgtggtgagtgtgtggttttytcctgaccatagaagattgagctgtccagtgggaaggctgtaaggtcagctccaccttctccatcttccacccctctttctgagatgctcatctgctcagatgggagtcctagaggcatcctgtcctctgcattatgacctagaaatccatcatggaaagggagtggtcattccacttccactttcttccagggcatgctctatcttcagactctggatgctctaaagcaa

SEQ ID NO: 117631 - DNA, 547 bp, Homo sapiens
ggaggagcaggggcgcgaacgcggaccggagacacaggcggcccgggacgcggcggcggggccggggcgcggagcagagccgggcaggggagcgacacggaacggctggttacytgcggtccgggacagggagtctcagaaccccagtcagtcctcagcctcaacaacacaagatggccgacacgtcgccacgcacgtcacgtgaccgcgctcccgctccgccacgccccactgctgcgcccccgccccttcccgcttccccccccactctccagtctcccacgacatccttcctttccgccaccacccgcccctctgcccagacacgcccctgcccgagacccggatgaaaggttggaagagggcggggccgtggcagtgcgcaggctcccgctgaccccttggcagcagccgggtacctgcccttgagttgagtggtgttggtgtccagggttgggcccggaccaggcaccgtgtgactcactgtcctgtacgcccagagctcttttgcagttcaaaagcctctgcatcacttgcgggctggttt

SEQ ID NO: 117632 - DNA, 547 bp, Homo sapiens
ggaggagcaggggcgcgaacgcggaccggagacacaggcggcccgggacgcggcggcggggccggggcgcggagcagagccgggcaggggagcgacacggaacggctggttacctgcggtccgggacagggagtctcagaaccccagtcagtcctcagcctcaacaacacaagatggccgacacgtcgccacgcacgtcacgtgaccgcgctcccgctccgccacgccccactgctgcgcccccgccccttcccgcttcccyccccactctccagtctcccacgacatccttcctttccgccaccacccgcccctctgcccagacacgcccctgcccgagacccggatgaaaggttggaagagggcggggccgtggcagtgcgcaggctcccgctgaccccttggcagcagccgggtacctgcccttgagttgagtggtgttggtgtccagggttgggcccggaccaggcaccgtgtgactcactgtcctgtacgcccagagctcttttgcagttcaaaagcctctgcatcacttgcgggctggttt

SEQ ID NO: 117633 - DNA, 547 bp, Homo sapiens
ggaggagcaggggcgcgaacgcggaccggagacacaggcggcccgggacgcggcggcggggccggggcgcggagcagagccgggcaggggagcgacacggaacggctggttacctgcggtccgggacagggagtctcagaaccccagtcagtcctcagcctcaacaacacaagatggccgacacgtcgccacgcacgtcacgtgaccgcgctcccgctccgccacgccccactgctgcgcccccgccccttcccgcttccccccccactctccagtctcccacgacatccttcctttccgccaccacccgcccctctgcccagacacgcccctgcccgagacccggatgaaaggttggaagagggcggggccgtggcagtgcgcaggctcccgctgaccccttggcagcagccgggtacctgcccttgagttgagtggtgttggtgtccagggttgggcccggaccaggcaccstgtgactcactgtcctgtacgcccagagctcttttgcagttcaaaagcctctgcatcacttgcgggctggttt

SEQ ID NO: 117634 - DNA, 588 bp, Homo sapiens
ctatttggaatcatatagtatgtacccttttgacattggccttttcacttaataatacaaatgtattttaggctctctcatgtattttcatggcttgagagctcattttctttcgcactgaacaatatcccattgtcttgatgtaccgcactttatttatttattcacctactgaaggaaatcttggttgcttcaaagcttttccaattatcaattaagttgctgtaaacacctgtgtgtagatttttgtgtgaacataagctttcaactcctttaggtaaataccaagaagagggattgctggattttatggtaagggcataattagttttataagaaaactgcccaactgtcctccaaagtggttgtagcattttccattctcaccagcaatcagtgagagctcctgttgctccacatccttgctgaagtttggtgtagccagtgctctggattttggccaatctaaaatgtgtgtagtgatatctcattgttgttttaatttgcatttccctgatgacatayaagctgaagcatcttttcatatgcttattcgtcacctatgtatcttctttggtgaggtgtctg

SEQ ID NO: 117635 - DNA, 602 bp, Homo sapiens
taagtcccttaatgagggctttgtgatcgccttgtggacaaggtgaagaaatctactcttggctatgatactaatggattaaggcctaacttaataattgactggcttcaaggtaagttccttaatttctccctcagaatcagattgaagagaggattgtagtagctctgtcctatgcaacataacaataatttggataaagacattgggtacactgccaaaatttgatatgattgatggcagaatcacaatccacagaattactgatggycgaaatattcaaccaaatctaaaaatttgaaattgatattagatagagctatatacagatcattacgttgggctaaaataaacagataagcaaataaaaattccactggtagaagacagtaaaaaatgattggaaagtgcatatgaacaacttttatgcccatggtttctaaaaattgtgccaaggtacctagggcactcaagcagactcccagggttatgcaggatatttaacacatctgagggaaatggtgagaactgcaacctcaaggttattcccaggttcaacatgagattgagctgatttctttccatgttttggtaagtttgtg

SEQ ID NO: 117636 - DNA, 602 bp, Homo sapiens
taagtcccttaatgagggctttgtgatcgccttgtggacaaggtgaagaaatctactcttggctatgatactaatggattaaggcctaacttaataattgactggcttcaaggtaagttccttaatttctccctcagaatcagattgaagagaggattgtagtagctctgtcctatgcaacataacaataatttggataaagacattgggtacactgccaaaatttgatatgattgatggcagaatcacaatccacagaattactgatggtcgaaatattcaaccaaatctaaaaatttgaaattgatattagatagagctatatacagatcattacgttgggctaaaataaacagataagcaaataaaaattccactggtagaagacagtaaaaaatgrttggaaagtgcatatgaacaacttttatgcccatggtttctaaaaattgtgccaaggtacctagggcactcaagcagactcccagggttatgcaggatatttaacacatctgagggaaatggtgagaactgcaacctcaaggttattcccaggttcaacatgagattgagctgatttctttccatgttttggtaagtttgtg

SEQ ID NO: 117637 - DNA, 577 bp, Homo sapiens
tttttccaaacctccagggaatataggagggggcagaaatgtctatccctagcagtttagacagtactttgtaagtaagtggaaaataaatattgaataaaaagcaatatttaatacaaactgagatttgcttaagttttggcaactgattaaaaacagaagtgggactaaaactttgctttccaaactaatgatttcctgcaccccaaacaataatgattctaatcaccaccagtaccaccaggcaggtccaaattattataataccatgcttcttagaggacaaacagctacagaaaccaccaacacaaagattcattctaacacgaagagtgttctttaaagaaaatgcagatttttgcatatatttttaaaattaattaatttttttaatcaccmcaagagaaaacaaaaagtttagcctagtatgtggtctgatgttaaaaaagacaacattgtaactggctctgcagggccatcttatttggttacagagtagtgaagggtaaaagaagtcactccaaggtgaggcatacctttgggttataaagagaagcctcactcacctgaacagggt

SEQ ID NO: 117638 - DNA, 573 bp, Homo sapiens
gcagagttaacattcacactctcagttcagatgctgtgaagaaaaaggttgtttcagccacaggattagaggggcaagtacgtggactaggagtacacacattcttcttgcttcctgagaggctcacttaaaatctcttttgggaagagattccaaatccaaactcccaagcagagcctgtctcctctgggcaataaagggtgggattaactctagccccctcatcctttccccttttatctcatctttggtggcctgtgcstcttgttaccctccctcactcactaagtctgcttttcattaagaaatatgctgtcaaacaattatacctcaagatagagaaatatttgaaccaaagaatctaggagctaaaagaaaaagctggtagtaagatattcaatatattaaaaagaaatagaaactcagtgagatgtggttccattccctgagaatacccaacatgtcagcttaggacagaaatgtgattaaaaggcaaatttcctgagtcccagactagaactctgtattaaagctatgatttacaacaatgagaagtaggtttaatttagtcca

SEQ ID NO: 117639 - DNA, 449 bp, Homo sapiens
atgctggtgccatgtttgtacagcctgcagagctgtgagacaaaataaacctcttttctttataaattacccagcctcaggtattcctttataacaggtattcctttataacaatgcagaacagactaacacaagaagtatgactaatatacatcacacacacacacacacacacacacacacacaaccagccttacctgattacaaagcctttagaagttacatgaaaaagagacattaaatgctaagaatgctctagtttatccctccagattaaatcggcataaactgaagaattgttccattcttccctgrgatagagactttttttaagagaattaattgattgacgtcattaaaaatatttgtgcagggtattattaacacatgattctatatgtataatgaaaattaatcaactctgtttaacttaacaaacaacaaagatg

SEQ ID NO: 117640 - DNA, 594 bp, Homo sapiens
catcacaacctgaataaactgatcatattaaggaataagactttgacaaaatgtgcattcttagacattcctgctcctctctagacctcagtttacttacatattctgcaagaagcttgaactaggagtggcccmtttccatggctgaggcatacttgtgaatagaagcaaacgtggtgagagtcagagaacagagtagaagatctgaaatgctaagataatgaagacagagaaaatgttattatcaaaattgtattttgagaaaatgaacgtgggaataggtatcagatagaagagcgaggaaacaaacaataggaggctgcagagtacagtcatttaagtttgaatctctaagagtcaacacaagaataaacagaaaaaaatttaatttgtaagatagaagtttaagcattcagtttcccttactaataggaacatatgaacttgttttttccttttgtggcacaactaatgggcctgactaatgcaaaataagtttggatgttaatttttcatgcattgtcagcatatttctgaagcaatcttaccacctgattatatatttagaatgtttcaatctaatgtgctcaaagg

SEQ ID NO: 117641 - DNA, 594 bp, Homo sapiens
catcacaacctgaataaactgatcatattaaggaataagactttgacaaaatgtgcattcttagacattcctgctcctctctagacctcagtttacttacatattctgcaagaagcttgaactaggagtggcccatttccatggctgaggcatacttgtgaatagaagcaaacgtggtgagagtcagagaacagagtagaagatctgaaatgctaagataatgaagacagagaaaatgttattatcaaaattgtattttgagaaaatgaacgtgggaataggtatcagatagaagagcgaggaaacaaacaataggaggctgcagagtacagtcatttaagtttgaatctctaagagtcaacacaagaataaacagaaaaaaatttaatttgtargatagaagtttaagcattcagtttcccttactaataggaacatatgaacttgttttttccttttgtggcacaactaatgggcctgactaatgcaaaataagtttggatgttaatttttcatgcattgtcagcatatttctgaagcaatcttaccacctgattatatatttagaatgtttcaatctaatgtgctcaaagg

SEQ ID NO: 117642 - DNA, 569 bp, Homo sapiens
catgagagtgtagcctcacggctcaattgcctttaagtgtcccacctcttaatactattacaatggcaattaaattttaacrtgacttttggagaagacaaacattcaaaccatagcagtgggtactcaatatttattacatgaacaaattcatgaatttttcaagtagaaagcacttaagaaattacaagaagctttgtgaactgctatataattgaatttttataaacaacctgtagaaaaacagtattactatgcacactttgaagacagagttcatagaagtctcttgatgtcgccagggtcacagatcttaataggaagaaggtgtctatagactgtttacatccagtataaatctagaacaacacttagtgcaaaacatgacatatagtacacatcagcaagatgtgctgaatggcttaattatatcatagcaaaaagttgggctcatgccttctttacgtgttactgtaatttgtaacacagtatctgtagttaatagacagtctggtacattttattaaagaattaattggcaagtgaattaataaataagttacttaatt

SEQ ID NO: 117643 - DNA, 545 bp, Homo sapiens
tttatcaaagtattttcataagcacagatcctactgggagattttcaacatctgtagagtgagcagattatcaattaaaaccagagtttgcaaattcatttttggcagagtcacagactatataatctaaagaactattgcmctaaaacaactatatcccagataaaatattatttttaatgcattactaggtcttcaggaaaaaatggaaatctccagggccctcacacctctaccaaagctgaaagcaggtctggaagtaatcagcaggcttttagaatggggttgcctcaagagcaaacattttagcaatactaaagcaatatcttggtacagcagcaaaatggggacctgagtttgaaacactcacaataaagtcagagaccattaaagagggcattgtagctccaaattgtgagaatcccttagcagaagccaatggaatcttctgtgaagaaaaccatggacaatttaggcccacatagttcctagaaagtgaaattaaataaatataatacagtcaaatattacaaaaatacaagaat

SEQ ID NO: 117644 - DNA, 587 bp, Homo sapiens
acgctttattgcgttgtgtaccatgatgggtaactggtgcttaatctcattgcaccttctgaagagccatagaaagtaygtcttaaaactgtcatcttagaactgtctgccgtgagaataaaaagaggaggaatcattcatctgttccaaattctgtagtcaagacaggctctgcaggtactgaccctttctacactatgaactgtataagtgctggctagatgacactgagtattccatgttaagacatcagagaagacctggaatatgtctggagtacaagcctaagggcaagcattgaaacctacgtaaaactggtcaaatcacagtttttcagtaagaagtgaacctgataggacctgaagtgtgcttgtgttctttattaaatcctgaatatcatggagtcccctttatcttggtggccaagcataaactctgtgaggacttataagaagtttactggaagaatagatcccattgctgcagttgattaataagtggtaaataatataattcatctttcttctccattagtcattttagattttcctctccaatgactggcacattgtctggtttaagtattt

SEQ ID NO: 117645 - DNA, 587 bp, Homo sapiens
acgctttattgcgttgtgtaccatgatgggtaactggtgcttaatctcattgcaccttctgaagagccatagaaagtatgtcttaaaactgtcatcttagaactgtctgccgtgagaataaaaagaggaggaatcattcatctgttccaaattctgtagtcaagacaggctctgcaggtactgaccctttytacactatgaactgtataagtgctggctagatgacactgagtattccatgttaagacatcagagaagacctggaatatgtctggagtacaagcctaagggcaagcattgaaacctacgtaaaactggtcaaatcacagtttttcagtaagaagtgaacctgataggacctgaagtgtgcttgtgttctttattaaatcctgaatatcatggagtcccctttatcttggtggccaagcataaactctgtgaggacttataagaagtttactggaagaatagatcccattgctgcagttgattaataagtggtaaataatataattcatctttcttctccattagtcattttagattttcctctccaatgactggcacattgtctggtttaagtattt

SEQ ID NO: 117646 - DNA, 577 bp, Homo sapiens
ttctacacattaaaaataaaggacaacaaattttaactagaatctaattcaactcaatttaatccaagtgtgtcaggaaaaataaaacagcttgtcattgaaaatctgcattatgaatgacagtttcaaaatctgagccaacataactgtaagttaaaattaaattgcctttgagtttaaacaaatgttaatttaaatatgtctcctttttaacttcataaaattctcaggttttcataagtaactacattttaaagaaaataatttttagtctaatatgaattttgtatraatattttggccatataaatcataaatattttttaagtgtttccttggtattttatctctgtatctcactaagtctagtgctttaagtgaacaaactcaaattaaatatggaattgtatggccaatctgggaagatatgaatattgatgaaactcttatgtcagtgtaaaaacattaggttttcagccaagaaatcttaatttatattatagaacatatgtatatgctttatacaatagatcaaaatttatttttagaaactgtgaattgggactcatggtttttc

SEQ ID NO: 117647 - DNA, 516 bp, Homo sapiens
tatcttggcattttgataaactattcatatatatacatagaaaatgcaagtttttctatgtaaatatattacaaatgattcctaattttcagtcaattgtctacttaattttaaaattattctgacataatataagcaactcatttatttaattcattagagtaagactttgtttgcagtgttcaaagatctacactgattctaaatcataaataataaagaataaaggggctaaaatagtctgcctggtgaaatgaaaaattagttccaaacatatatggcagtacatagacaaaataattagatttatttttccattttgttttgtttagtttttatcctttcactgctgtgtttcagtttcaaatctatctaarttggctgagtaaaatgtggtgataatagtaggctacctccacacacaaataaagctgcagagaggaagcttgtccacatcatagcactcggaaaatctctgtaccttcgttgtctcatcttccttttcaaacccacgtg

SEQ ID NO: 117648 - DNA, 545 bp, Homo sapiens
attcttctctcctgtcactcttttcccatcttaaattcatttaatgggatattgccactgggcttaatacctttgggcctccatgttgtgaatggcaaggtgagtgtaatgtaattggcacatttttgtgatgaaagtgagataaaataatctagcataggtgatgatctatggtagataatcaacacagaatttatgaaactgttgatgctcctattgaggctattgctttggctcctgttttggtggtggaggatgaatcctttgaaaagacagctgtacaatggagttttgtgagtagaatgactagggagtgcccttgggatcaatgccaatgaaagaaattgaaggaaacaggatagggcaaatagggcaaagggagaagtggagttctayggtaggtcaatggtagttttagctacccacacctggatctccaaactaagttgaaccctcaatatttttctgcattgggcctaactggccatatcttttaccctttgtatgtgagattcccagggaaaagtgtaacattgaggaagagg

SEQ ID NO: 117649 - DNA, 590 bp, Homo sapiens
tgatgattgatatagtttaatgacaacagtcaaagctgcagtttcagagaagaggcagcaacaatttgcagaaaagaggtcagtcacccatctcctactctgtgactagagatacaaagagagagggtaaaaaaatagtcactacttcagaggacaacagtgtataccatgtttcagtactaaggcaattttaatcaatgtaagaattaggaaagaatttcaacaaaaaaggagtgtgargttattaagacatttgttaatggattgcagagtacagaaaaaagctgtatgttttaagaagggaccacaatataaaatggaaaaggaaatgtacagagcctatatattagaatctggaggctgaaggattgctggtgaattctagatttcttgtggtgactatcaagttcaattcaattcaaaaaatattttttgaggctcaaccacatgctaggcactcttctcatccataagaaaaaccaacacaaattattactttaagaatctacaacccagggctaaaagctaaaatgagattagacttgatctcaagtgaaatggtgatgaggctatgagtttagcggaaagga

SEQ ID NO: 117650 - DNA, 618 bp, Homo sapiens
acagaaaaaagctgtatgttttaagaagggaccacaatataaaatggaaaaggaaatgtacagagcctatatattagaatctggaggctgaaggattgctggtgaattctagatttcttgtggtgactatcaagttcaattcaattcaaaaaatattttttgaggctcaaccacatgctaggcactcttctcatccataagaaaaaccaacacaaattattactttaagaatctacaacccagggctaaaagctaaaatgagattagacttgatctcaagtgaaatggtgatgaggctatgagtttagcggaaaggaagagaggaggatgactacatgaaaatgtagattttgtacccagtgttttactctttctattgttgatgtgaattccaagtgagaggttttctttaccagagtgcctagatatttgaagttctcttctaatttccaactagagctaattctggcatttcttcaaaattccttctaattgagctgtgaagatattttgttctctggaacctgaattctggggggactgtacacatartgtctcaattttaaacaatgttattttagttatcaaattgatttaaaagagtcccttttagattaa

SEQ ID NO: 117651 - DNA, 607 bp, Homo sapiens
tgataaaaatacaaacaaatcaaaaaccctagcagaggaaggtttgtaatgctgaaataattatcattcttcagtaacatgacaaaatcccatgtgatacactcagaatgtatcagtgggtgatacagatacccactgtatggattcagtgggtgcttggtcaatgaaaaacttaagaaaaatcttagaaatagccaaatttatcagctatttttttacatattgaaaactccagtagaagaaaataaaacgctagagcargcaagaccaggagcagcaacaccagcaccggcagcaacaagcactgctattctgaacatggtgcacctgcagtgctctcttgtctttgtttggctgttctggttccttttcaaatccaggttcgactgattctgtgacctactgaataaacttctaatatatatcttttttggcataaattaaccagtgttaatttctgattagtacaataggtaccagttttaatctgttactaattcttggaatactttgtaacataaatggttatgttactatgaataataataaaatttctaatgtgaaatcaagatgcatttgatgttctatagtaataactatagttatt

SEQ ID NO: 117652 - DNA, 607 bp, Homo sapiens
tgataaaaatacaaacaaatcaaaaaccctagcagaggaaggtttgtaatgctgaaataattatcattcttcagtaacatgacaaaatcccatgtgatacactcagaatgtatcagtgggtgatacagatacccactgtatggattcagtgggtgcttggtcaatgaaaaacttaagaaaaatcttagaaatagccaaatttatcagctatttttttacatattgaaaactccagtagaagaaaataaaacgctagagcaagyaagaccaggagcagcaacaccagcaccggcagcaacaagcactgctattctgaacatggtgcacctgcagtgctctcttgtctttgtttggctgttctggttccttttcaaatccaggttcgactgattctgtgacctactgaataaacttctaatatatatcttttttggcataaattaaccagtgttaatttctgattagtacaataggtaccagttttaatctgttactaattcttggaatactttgtaacataaatggttatgttactatgaataataataaaatttctaatgtgaaatcaagatgcatttgatgttctatagtaataactatagttatt

SEQ ID NO: 117653 - DNA, 603 bp, Homo sapiens
taagacttttctagaaggaaattgttttattaataagcttttaaaatggaaaaataatggcaactgctgtatggtgaaataatctgtgattatgcaaaaattaggcacaaatgtaacctttgactatcgtattataattcagcattttaaaacacatatataaaccaattacatgtgtgctagtacatttttatatttctctgcaagttatattaraactgttgtctttaacagacatattaaagcttgttgtcacctctcctaatacagtccccaatacatgtctatcattcaataaatatatattaatgagtaaaatttacctcctgcataatttaaggtttattccctaaattcttcactctgcattgaaaaattgcacttttcctttgatgcattctgttactgaccagtccactacagtcatgaaataatgaggtacttacttcctaggacacacctaagcttgccttccttgggcaagaattgactcatgcactgaagttttttctcaatctctatgctttttcaaaaccaaccagccctgcattccactattcaaaatgttttctcattttaggtgaaaactatctaatcctgtgt

SEQ ID NO: 117654 - DNA, 603 bp, Homo sapiens
taagacttttctagaaggaaattgttttattaataagcttttaaaatggaaaaataatggcaactgctgtatggtgaaataatctgtgattatgcaaaaattaggcacaaatgtaacctttgactatcgtattataattcagcattttaaaacacatatataaaccaattacatgtgtgctagtacatttttatatttctctgcaagttatattaaaactgttgtctttaacagacatattaaagcttgttgtcacctctcctaatacagtccccaatacatgtctatcattcaataaatatatattaatgagtaaaatttacctcctgcrtaatttaaggtttattccctaaattcttcactctgcattgaaaaattgcacttttcctttgatgcattctgttactgaccagtccactacagtcatgaaataatgaggtacttacttcctaggacacacctaagcttgccttccttgggcaagaattgactcatgcactgaagttttttctcaatctctatgctttttcaaaaccaaccagccctgcattccactattcaaaatgttttctcattttaggtgaaaactatctaatcctgtgt

SEQ ID NO: 117655 - DNA, 603 bp, Homo sapiens
taagacttttctagaaggaaattgttttattaataagcttttaaaatggaaaaataatggcaactgctgtatggtgaaataatctgtgattatgcaaaaattaggcacaaatgtaacctttgactatcgtattataattcagcattttaaaacacatatataaaccaattacatgtgtgctagtacatttttatatttctctgcaagttatattaaaactgttgtctttaacagacatattaaagcttgttgtcacctctcctaatacagtccccaatacatgtctatcattcaataaatatatattaatgagtaaaatttacctcctgcataatttaaggtttattccctaaattcttcactctgcattgaaaaattgcacttttcctttgatgcattctgttactgaccagtccactacagtcatgaaataatgaggtacttacttcctaggacacacctaagcttgccttccttgggcaagaattgactcatgcactgaagttttttctcaatctctatgctttttcaaaaccaaccwgccctgcattccactattcaaaatgttttctcattttaggtgaaaactatctaatcctgtgt

SEQ ID NO: 117656 - DNA, 580 bp, Homo sapiens
ggtttggtttgcttgagccagaatggacaagaagaactttgtcatacaaatatcacaattctgggttctgattggagatttctgtttctgatcattgttgtaaaaatgcagaagttctctgtcattgtatcaacccacaatggcttccttggtttttcaagaggtcacatctgttttagtccgtatgttttttaaaaggccaatgcatgcagatgttttagaaaaccatagtgtgcgctgaggaaaacacaaacccttaagaaagaacctgwgaagattttaacctttcatctcaggctgatactggcagagagatatcctaaagcaatcagaaaaaaacagcaaactcagggaacagggagaatataatctccagtgtttctactggattatttttaaaaagccaaaaagaaattctgaagcttgaaagtacaataactataatagaaaataaataagaggagttcaacagatttaagcaagcagacattaatataagacaattgaaattacaaagtctgataaacagaaaaaaagatatgaataaaaatgaagagagcctgagggactcgtgggattc

SEQ ID NO: 117657 - DNA, 554 bp, Homo sapiens
gaaagcagcaagagaaggcacaaatagcatacaacagaggtccaatacattggcagcagacttttcagtggaaaggttacagaccaagagagtggcatgacatatttaaagtgctgaaggaaaaatattttacccaagaatagtatacctgtcaaaaaaaaaagtcctttaaacatgaaaagcaaaataaagattttcccaggcaaacaaaagctgagagatttcatcaataccagacctgtcctacaaaaaaatgctaaagggagtacatcaatcaaaaataaaagaacactgagtaataaataatcttctgaaggtaaaaaacttactggtaatagtaagtacacagaaaaacagagaatagtacaacactataactgtggtatgtaaactacttttatcctaagtggaaagactaaacaataaaccaataaaaacagtaactacaacaacttttcaagacagagtcagtaaataagacataaatagaaacaacaaaaagttraaaacttggaggacatttgactgggtgcagtggctcatgactataatcc

SEQ ID NO: 117658 - DNA, 571 bp, Homo sapiens
gatgacataaattcacactgaggttctcaaattttggatcacatcagaatttctggaagatttgttaaaaagtatcaattactgaaccccacccctagaagctctggctctaaatctgggggagactccaggaatttgcacttaygctaagtatacaggaagtgctgatgtggctggtccagaggctacattttggaagttattcaatgattaaaacaaaacacttagcagagggtgtaaagcatctataggaattcaaatgcttttccccttctcctcttttttgtttttattggtcctcaaggtcttaattatttgaatagctctttaaaaacttctatgccccaaggcttaaccttatttctgattaaccttatttctctgaatttgacttttccatttaccagttcaaaagtccattttatttttattctttaccatcatgacaatctggtcctatagcacccaattcatatggcatctgtatccagagttcaggctctatcctctctgtctctttaatcttcagctacatttggcctctccccaaaaactctctcccataattagt

SEQ ID NO: 117659 - DNA, 573 bp, Homo sapiens
ctataggaattcaaatgcttttccccttctcctcttttttgtttttattggtcctcaaggtcttaattatttgaatagctctttaaaaacttctatgccccaaggcttaaccttatttctgattaaccttatttctctgaatttgacttttccatttaccagttcaaaagtccattttatttttattctttaccatcatgacaatctggtcctatagcacccaattcatatggcatctgtatccagagttcaggctctatcctctctgtctctttaatcttcagctacatttggcctctccccaaaaactctctcccataattagtcacatactttggcagcaatggaagggtgagactagattattctctgctccaggtaaaggcagaagatcatmtgaactctcactgttcaaaatgctttgaatgcagtgttctattaaaacaaacagactgtctggatgcagacagttgcatctgcccctaaaaactttcaacttttgaaaagcaacagcaagataaaagagcatcaaatctatttggaaatttgtcccttggcaatacgcctcttgtt

SEQ ID NO: 117660 - DNA, 658 bp, Homo sapiens
aatcccagggcagagtctcatctgttaatagggggctggtctaagggtccttccagctctcagattaatggtttcccatgttgaactgctcccttccacccatccatccttggttttgtttgtttgtttgtttttacaggacaagatcgcactatattgcccaggctggtcttgaactcctggccttaagtgatcctcctgccttggcctcccaaagtgctggagttacagatgtgagcctctgtgctcagcccatccttggctgttcaattgtggaggtaagtagtagatgctaagtttacctccaggtcagaagggacagatgccccagggcagaatcataaccataaccaggyctcccaatgcatgaagacattatgttctgaagcttaaacctggacaaagttctgaccagtagcagtgtgttcatgaatatcgggtcaaaaatttaaaactgggactatacagaagaacctggtagatgcaggtgcagtccacagtccaatggtcagccatgaaaacaggctacctgttctttctctttatcatggagtcgttgatgtaaaaatcgatgacactttcttccttctggtgtacttccctttcttcttcactttccataagtagtttcctccatcccacctcccaacaggccaca

SEQ ID NO: 117661 - DNA, 658 bp, Homo sapiens
aatcccagggcagagtctcatctgttaatagggggctggtctaagggtccttccagctctcagattaatggtttcccatgttgaactgctcccttccacccatccatccttggttttgtttgtttgtttgtttttacaggacaagatcgcactatattgcccaggctggtcttgaactcctggccttaagtgatcctcctgccttggcctcccaaagtgctggagttacagatgtgagcctctgtgctcagcccatccttggctgttcaattgtggaggtaagtagtagatgctaagtttacctccaggtcagaagggacagatgccccagggcagaatcataaccataaccaggcctcccaatgcatgaagacattatgttctgaagcttaaacctggacaaagttctgaccagtagcastgtgttcatgaatatcgggtcaaaaatttaaaactgggactatacagaagaacctggtagatgcaggtgcagtccacagtccaatggtcagccatgaaaacaggctacctgttctttctctttatcatggagtcgttgatgtaaaaatcgatgacactttcttccttctggtgtacttccctttcttcttcactttccataagtagtttcctccatcccacctcccaacaggccaca

SEQ ID NO: 117662 - DNA, 658 bp, Homo sapiens
aatcccagggcagagtctcatctgttaatagggggctggtctaagggtccttccagctctcagattaatggtttcccatgttgaactgctcccttccacccatccatccttggttttgtttgtttgtttgtttttacaggacaagatcgcactatattgcccaggctggtcttgaactcctggccttaagtgatcctcctgccttggcctcccaaagtgctggagttacagatgtgagcctctgtgctcagcccatccttggctgttcaattgtggaggtaagtagtagatgctaagtttacctccaggtcagaagggacagatgccccagggcagaatcataaccataaccaggcctcccaatgcatgaagacattatgttctgaagcttaaacctggacaaagttctgaccagtagcagtgtgttcatgaatatcgggtcaaaaatttaaaactgggactatmcagaagaacctggtagatgcaggtgcagtccacagtccaatggtcagccatgaaaacaggctacctgttctttctctttatcatggagtcgttgatgtaaaaatcgatgacactttcttccttctggtgtacttccctttcttcttcactttccataagtagtttcctccatcccacctcccaacaggccaca

SEQ ID NO: 117663 - DNA, 406 bp, Homo sapiens
attctatggtagaggctgcctcagaatagagggagccaaaggagtgagtggttaagccactgttggatggaaggatcctcagagaccaggttgtggaagaggcagatgcataagatcatgtgcaacactgccaagaagcttgcctgtgagagcctttctctcccactcctcagaggggtcttagcctcaaatgaaacaaatacgtggattctttcagtgtttatgttaagaaaacaatataacttcaattgtacttgtatcaggtaatggtatcagtttatayaacttgtggtggggaaggagggggattgacagcttgaagaagtgaaaagagttacaaatgaaggcattaaaccaggcttgctctctgcttctcccactggccagctgggtgacattttattta

SEQ ID NO: 117664 - DNA, 482 bp, Homo sapiens
atcacttacatgttgcttttcaatttagaaactacttttatactgtcttattttattttctatttcaagtcagattatttcatgtataaacatgttttgtctcctctaaacattataatcttacagggatgggaatcccttcagttaaggaggaaacgacttcctctctatcacttcatgataatgtgaatgctgaggttattttaagattgcrttgtactgtggatctgtatttgggactaggtcatacccacaccagggacgcagctgcagctgaaaagtaaggttaagcctagtgtctgtcactaagggaaggaacatatgtattagaccagcacagacggcgcaggagagaggaagggagtgctgtcctgggcttgactttgagggagggttgagatatctatggtgtgtagaagtgaaggggaggtggggagattgtggtcgtgaggtgtgttaaagccagtatctgtcacatggag

SEQ ID NO: 117665 - DNA, 552 bp, Homo sapiens
ttatcttctcccgtatctcttttccctatgcatttcttccaagttttttagtctgtctgttgcttgtcctgactccttgctccaggctcctgtggtgaatagctttgtttttggaaacattgcccaagaagcctcctcagccctggggatgctctgcatcaagcaaaacaaaggcaaaccttgtaccttcagagagtcatcaaagaggtcgaaacagacaaccacaattatttgacaataatatccaaattgcccccttttgcagtagcaacctgtacctggagtatgtgctaccatcttcatggctgctgctgactggggaggaggggatggtagatgaacaatccaaaatgccatagtrctctcttaccacggtgcagcaacttctttcatcaagtttgccctggtggttgtaaacttttaattaaattccggagttctgcgaaggttgattctgacagtttttattagcttattggtttcattttttaaattaaaaatttttaaaaatgtattgtgtttttatacatgtatatatataaaattagattt

SEQ ID NO: 117666 - DNA, 478 bp, Homo sapiens
gctgcatctgtgacttggtgtctaccactaatttttaaaagttcttggccattactatttcaaatatttcttcctctccgtttcttctgtttttttgtttgtttgtttcttcttctgatattatgttcacacatatattacatcctctgaaattattgtgaatattcatattcatttttttttcarttccttttctctttgcctttcagtttaggaagcttctattaagttaccttcaagctcactgcttatttccttggctgtgttatgtctactgatgaacccaagaaaggtattctttatttttattgcagttctagagtcttcaaattcctttagtgtctttgtttttagctatgctcttgactttgggcttttcctaagtacctcttctagatagtctgtatgttacagctagttcagctttagaacccacagctatcatatgaaagcaccgttggtatggtaaaatagtgtg

SEQ ID NO: 117667 - DNA, 545 bp, Homo sapiens
gacagggaaaaatgatagtttaggatttgatcactcaggtatggtgacaattcgcattaatttgtgacttttagatactgaaattgattttaccactaaagtagaaaatttcaaactgaataaggtatgcgcacatcaatctaataaatgtggatgatcaaagcaaaccagatgctttacaaacatctcctctcatttatgtgaggggtgtatagcatttcttaaactccttatattatctctaaatcacaacatttagtccatgccacgctcatttgactactagtaaattcagttaagatcatattttayggagtcttctcttctactgagttttaggtaagctggaatatttggtcttgagttcatattgaacactgcttgcccaagccaacatggcttttctgaagtgtttcttttgttcctatgcctattcttttgttcttatacaggaatgctttgctgtggctctcaatgcttttagtattctggtctgctttctcccctctatttgtccacccaatgcccaattctcctgccatcaa

SEQ ID NO: 117668 - DNA, 574 bp, Homo sapiens
aatgtgaatggcctttcctcttgtcttctcacaacctggatgtattttctaaaacaaatgtctcgtagaagttctcttctggaagtagtgcaaatattttgttttgcttccaaacttcctaagtcaaaataactatcttttggggatgagaaagagtttgccacttttttcattcacttgcagcaacataaatctgaaataaactaccttctcacttgtaggtgtactcacgatgcaggggaaaagtacaaaatattttacaaaaccttctacttcaaaatatttatcttctattaaaatgcattttatgtattaaattctcttgaataggttatttataagtaaggtttagatgataggttatatgctcatcatatttatgagtaacttaagttcttttctgtgttactaattatttgtgaagctattacattcagaagcaaaagtatttttcattcaactaagaaataaagctttgatactatcaacctacattaatagctcaggtgacaatgatgaatagagtcttccaaattttcagatttcagtrgactgataaagttcaacgaatttc

SEQ ID NO: 117669 - DNA, 574 bp, Homo sapiens
aatgtgaatggcctttcctcttgtcttctcacaacctggatgtattttctaaaacaaatgtctcgtagaagttctcttctggaagtagtgcaaatattttgttttgcttccaaacttcctaagtcaaaataactatcttttggggatgagaaagagtttgccacttttttcattcacttgcagcaacataaatctgaaataaactaccttctcacttgtaggtgtactcacgatgcaggggaaaagtacaaaatattttacaaaaccttctacttcaaaatatttatcttctattaaaatgcattttatgtattaaattctcttgaataggttatttataagtaaggtttagatgataggttatatgctcatcatatttatgagtaacttaagttcttttctgtgttactaattatttgtgaagctattacattcagaagcaaaagtatttttcattcaactaagaaataaagctttgatactatcaacctacattaatagctcaggtgacaatgatgaatagagtcttccaaattttcagatttcagtgkactgataaagttcaacgaatttc

SEQ ID NO: 117670 - DNA, 547 bp, Homo sapiens
tatccccattatgggtatagatgtgttagaatatttgggcataaagctattaaacattaaaatcctgtaattcactactgttgctctcatttcaggctttccaagcatctgtctgatgactgaggtagcttcctatagagagaggtcaggctagtcaggccttcatgaacrctgagcctggtgacaggacatttcttattttaatgtaataccctagaatcttgatttatacagttcactatcttaaggttgaatctccttgaatcactcaatttcagtgtactggcaaaatagcatttctggatctgctcagctcagctgaggttaggtaaaggatcaggtaaatatcagcatttctggatctgcccagctgaggttaggtaaaggatcaggtaaatatcacttcactccattttataaaatctagacctttctggcaaacctctggcttcactgtccgcctatctttaaaatttcaaaaatgcctacttttttggtttatgatgggtattaaacaggattatatataaaatgaccctggcctggt

SEQ ID NO: 117671 - DNA, 550 bp, Homo sapiens
gctcatgcgtggtgtgctgttcccactgtcctgcacccactgaccagcactccccagtgagatgagactggtaccttagttggtaatgcagaaatcacccatcttctgtgtcactcacgctgggagctgtagactggagctgttcctattcggccctcttggctccactgaccaagactaaatattttatacaaacatattcaaatggccaacagatatgtagaaagatgctaaacattaccattcatgagaaaattgcaaatcaaaagataccactttacagcagtggaatggttaatatcaaaaaaagaaacataacaagttttaacaaggatgtgacaaaatatttctgtacagttttaatgagttgcagactggaagagtcatgaaaattagtacgcagtttattttaaaaaatagactatcgtacaatcctgaaatttcacttctgtaaakaaacaaaataaaatcaacatctcaaaaattatctacactcctgtattcaatgcagcattattcacaactgtcaaggatattttttttaaatgac

SEQ ID NO: 117672 - DNA, 550 bp, Homo sapiens
gctcatgcgtggtgtgctgttcccactgtcctgcacccactgaccagcactccccagtgagatgagactggtaccttagttggtaatgcagaaatcacccatcttctgtgtcactcacgctgggagctgtagactggagctgttcctattcggccctcttggctccactgaccaagactaaatattttatacaaacatattcaaatggccaacagatatgtagaaagatgctaaacattaccattcatgagaaaattgcaaatcaaaagataccactttacagcagtggaatggttaatatcaaaaaaagaaacataacaagttttaacaaggatgtgacaaaatatttctgtacagttttaatgagttgcagactggaagagtcatgaaaattagtacgcagtttattttaaaaaatagactatcgtacaatcctgaaatttcacttctgtaaataaacaaaataaaatcarcatctcaaaaattatctacactcctgtattcaatgcagcattattcacaactgtcaaggatattttttttaaatgac

SEQ ID NO: 117673 - DNA, 550 bp, Homo sapiens
gctcatgcgtggtgtgctgttcccactgtcctgcacccactgaccagcactccccagtgagatgagactggtaccttagttggtaatgcagaaatcacccatcttctgtgtcactcacgctgggagctgtagactggagctgttcctattcggccctcttggctccactgaccaagactaaatattttatacaaacatattcaaatggccaacagatatgtagaaagatgctaaacattaccattcatgagaaaattgcaaatcaaaagataccactttacagcagtggaatggttaatatcaaaaaaagaaacataacaagttttaacaaggatgtgacaaaatatttctgtacagttttaatgagttgcagactggaagagtcatgaaaattagtacgcagtttattttaaaaaatagactatcgtacaatcctgaaatttcacttctgtaaataaacaaaataaaatcaacatctcaaaaattatctrcactcctgtattcaatgcagcattattcacaactgtcaaggatattttttttaaatgac

SEQ ID NO: 117674 - DNA, 558 bp, Homo sapiens
tttatggtaaagaatagatctttgttagacagtactggcaaaatttagaaagaaaaaataaggaatcagaaacataagtagttcagtwttgtgaaaaaattctggatctgagatgcaaaagaacagagattatattgcgtttctactccaaacctgaagagtcaccttaagtgtgttgtgtttctgtgccaaagctgctgaatcaccttaggcaatgcatgccctttccctgaacctgttttcttttctacaaaataaagtgagctagatcatctctgaggtctcccaaatattcacatttttggctctacatgaacttcagttgaattcctaatttcagtgtggataatacatgtgtgctgcaccacaagcagtgtgtctaaatgctcatgttggtcctaaaaactaattatgagcagtttggaaattccgttgttgtagaatctgcaaagggatatttgtgagtgctttgaggccatggtgaaaaaggaaataccttcacataaaaactataaagaaggtttctgagaaactgctctgtgatgtgtgcattcatct

SEQ ID NO: 117675 - DNA, 542 bp, Homo sapiens
ttcagtattgtgaaaaaattctggatctgagatgcaaaagaacagagattatattgcgtttctactccaaacctgaagagtcaccttaagtgtgttgtgtttctgtgccaaagctgctgaatcaccttaggcaatgcatgccctttccctgaacctgttttcttttctacaaaataaagtgagctagatcatctctgaggtctcccaaatattcacatttttggctctacatgaacttcagttgaattcctaatttcagtgtggataatacatgtgtgctgcaccacmagcagtgtgtctaaatgctcatgttggtcctaaaaactaattatgagcagtttggaaattccgttgttgtagaatctgcaaagggatatttgtgagtgctttgaggccatggtgaaaaaggaaataccttcacataaaaactataaagaaggtttctgagaaactgctctgtgatgtgtgcattcatctcactgagttaaacgtttcattcctttgatcagtctggaaactctgttcttgtacaatctgcaaaa

SEQ ID NO: 117676 - DNA, 505 bp, Homo sapiens
gaattctgagaaacttctttgtgatgagtccattcatctcacagagttgaaacattctttgatggaccagtttggaaacagtctttttatagtatctgcagggggatatttttgagcggyttaaagactatggtgaaaaaggaaatatcttcacataataactagacagaagcattctgagaaacttctttgtgatgtgtgcattcatcttacaatgttgaacgtttcttttgattgagcagtttggaaacagaacttttgtagaatctgcaaagggatatttgtgagcccattgattcctatggtgaaataggaattatcttgaaataaaaactaggcagaagatttctgagaaacttctttgtgatgtgtgctttcatctcacagagttgaaaatgtcttttgattgagcagtttggaaacagtctttttgtataatctgcaaatggatatttggagcactttgtggcctaaggtgaaaatggaaatatcttcacataaaaac

SEQ ID NO: 117677 - DNA, 628 bp, Homo sapiens
tttgtgtcctgaaactttgtggaagttgattatcagcttaaggagtttttgggtcacaactatagggtttagatagagaattatgttgtctgcaaacagaggtagttggacttctctttctatttaaatacgctttatttctttctcttgtctgattgctccagaaaggacttctaatactaggttgaataggagtrgtgagagagggcatacttgtcttgtgcgggtttcaaggaggatgcttccagattttgcccatttagtataatgttgtctgtgagtttgtcataggtggcctttattattttgaggtatgttcctttgatacctcatttactgagaagttttaaaatgaagctttgttgaattttactgaaagccttttctgcatctgttgagacaatcacgtggttcttatctttagttttatttatgttacaaatcacattttattaatttgcccatgatggaccaaccttccattccagggaagaagcttacttcactatggtgaattagccttttgatgtgttgctagattcagtttgcaagtattttcttgtggattattgaatggatgttcatcaaggatactggcctgaagttttctttttttgttgtgtcactg

SEQ ID NO: 117678 - DNA, 632 bp, Homo sapiens
ctctgcgttgcacatgatatgccagctcaaccgcagtggggtagagcaccaagcggattcttagagtccctgagtccaggcctagggtcttcttggtcagcatttctgcayttgccctgggccaaaggtcgagtcccaggcattgcagaatttatctcaagataattaaagagtccttgggctttaagtgagaaagtgatgatgatttggtggaaaccccccatgggccagtagtgttggcagtcatagaagaggctcttctgcctgaagacaggggaaggaagagtagaaaatactttgtcttattccctaagtgcaaggttagctacaataaaatagaagagcaggtaaattttgaagatcctatgctttaatctgtggctcccaggtagcatctgtggacccactcatggctaggggaacttgccaccctataggcagagacacaatcctggctgactttgctatctattaatcacagagtcctagggctttgaataaacttatatggtagccaagtagtggttgcagtgggccttgcgtgagaccaagttctgtgcctacttcaggtgtgaaccagcacagtctcagtggtggtggccacaggagtgcttatgttacccaaaccccag

SEQ ID NO: 117679 - DNA, 632 bp, Homo sapiens
ctctgcgttgcacatgatatgccagctcaaccgcagtggggtagagcaccaagcggattcttagagtccctgagtccaggcctagggtcttcttggtcagcatttctgcacttgccctgggccaaaggtcgagtcccaggcattgcagaatttatcwcaagataattaaagagtccttgggctttaagtgagaaagtgatgatgatttggtggaaaccccccatgggccagtagtgttggcagtcatagaagaggctcttctgcctgaagacaggggaaggaagagtagaaaatactttgtcttattccctaagtgcaaggttagctacaataaaatagaagagcaggtaaattttgaagatcctatgctttaatctgtggctcccaggtagcatctgtggacccactcatggctaggggaacttgccaccctataggcagagacacaatcctggctgactttgctatctattaatcacagagtcctagggctttgaataaacttatatggtagccaagtagtggttgcagtgggccttgcgtgagaccaagttctgtgcctacttcaggtgtgaaccagcacagtctcagtggtggtggccacaggagtgcttatgttacccaaaccccag

SEQ ID NO: 117680 - DNA, 632 bp, Homo sapiens
ctctgcgttgcacatgatatgccagctcaaccgcagtggggtagagcaccaagcggattcttagagtccctgagtccaggcctagggtcttcttggtcagcatttctgcacttgccctgggccaaaggtcgagtcccaggcattgcagaatttatctcaagataattaaagagtccttgggctttaagtgagaaagtgatgatgatttggtggaaaccccccatgggccagtagtgttggcagtcatagaagaggctcttctgcctgaagacaggggaaggaagagtagaaaatactttgtcttattccctaagtgcaaggttagctacaataaaatagaagarcaggtaaattttgaagatcctatgctttaatctgtggctcccaggtagcatctgtggacccactcatggctaggggaacttgccaccctataggcagagacacaatcctggctgactttgctatctattaatcacagagtcctagggctttgaataaacttatatggtagccaagtagtggttgcagtgggccttgcgtgagaccaagttctgtgcctacttcaggtgtgaaccagcacagtctcagtggtggtggccacaggagtgcttatgttacccaaaccccag

SEQ ID NO: 117681 - DNA, 603 bp, Homo sapiens
ttagctacaataaaatagaagagcaggtaaattttgaagatcctatgctttaatctgtggctcccaggtagcatctgtggacccactcatggctaggggaacttgccaccctataggcagagacacaatcctggctgactttgcyatctattaatcacagagtcctagggctttgaataaacttatatggtagccaagtagtggttgcagtgggccttgcgtgagaccaagttctgtgcctacttcaggtgtgaaccagcacagtctcagtggtggtggccacaggagtgcttatgttacccaaaccccagctccacatgtctcagcacagaaagagagactgctgatttgagataaagtaaggaaagagaacatgagtctctacttgataaatcaagagaatttttcttgatattaatccaaggccaccaaggcagtacctctacgtgtttgcataaactacagtgctattgggtttgggacccaagtttctttgaatacctggaaagtgttcccaaaattaatgagcactaacaagcccagactgtgaagactacaataaagactgaactcttcaatgcccagatacagatgaacatctac

SEQ ID NO: 117682 - DNA, 449 bp, Homo sapiens
aagatattgttaaagggaaaagcaactttcaggagagtatgtatggactgctatttgtataaaattgcaaaaacagaccaaaaaaatactatccattcttcatggacatgcacactaggtattaaacatggatgggaagacacacattgacttcagaatagtgggagggtggkggtaactggactggaaaaggggcatataacttgagcttcagcttgaatattatggctgaatccgtaatgttttcttcccttaaactctggagcaaatgcatccaaatgttaccacatttgaattttaactgggaggtacaagaaagtttaataccattatcctctacgcagtcctgtgtgtttgtaatattgagccatattttttaaacacttgactcagcatgaaaggaagcttgcctacatggtaacaatggttatctttaggtagcagaattc

SEQ ID NO: 117683 - DNA, 449 bp, Homo sapiens
aagatattgttaaagggaaaagcaactttcaggagagtatgtatggactgctatttgtataaaattgcaaaaacagaccaaaaaaatactatccattcttcatggacatgcacactaggtattaaacatggatgggaagacacacattgacttcagaatagtgggagggtggtggtaactggactggaaaaggggcatataacttgagcttcagcttgaatattatggctgaatccgtaatgttttcttcccttaaactctggagcaaatgcatccaaatgttaccacatttgaaktttaactgggaggtacaagaaagtttaataccattatcctctacgcagtcctgtgtgtttgtaatattgagccatattttttaaacacttgactcagcatgaaaggaagcttgcctacatggtaacaatggttatctttaggtagcagaattc

SEQ ID NO: 117684 - DNA, 208 bp, Homo sapiens
gagtgtcctgcagcccgaagcgtttactttgaaaaaattagagtgttcaaagcaggtccgagccgcctggatacckcagctaggaataatggaataggaccgcggttctattctgttggttttcggaactgaggccatgattaagagggacgggcgggggcattcgtattgcgccgctagaggtgaaattcttgggccggcgcagttc

SEQ ID NO: 117685 - DNA, 223 bp, Homo sapiens
gagtgtcctgcagcccgaagcgtttactttgaaaaaattagagtgttcaaagcaggtccgagccgcctggatacctcagctaggaataatggaataggaccgcggttctattytgttggttttcggaactgaggccatgattaagagggacgggcgggggcattcgtattgcgccgctagaggtgaaattcttgggccggcgcagttcggaccagagtgaaag

SEQ ID NO: 117686 - DNA, 564 bp, Homo sapiens
tggcctctaatctgagtatgataatagtggataatcattcttgcccaccagaatggcttcacgaatctaaaagacagcccacttgccaggtgwcagctgattgattttgtgtggattgttttccttggagtgggggtcttgtcttggtgtccattcatggtgttgctgaaagatgttgctggaaaagagggtcctgatacagaccacaaagtaggattcttagattttctgcaggcaaaaatttgaggtgagtcagagagcacagtgaaagaagcaagtttattagaaattactccattacagagttggacatcctcagaaaacaagagcaggaatgcattgtcttttgttagtgtgtctacttataagtaactataaagagaaagtgttatagttaaacttggaaggtgcagatgtagtcactaaagtcggggctattggttttaacaataaccattaacccattgacctaagctagttcattaataatatccttacaaaaaaattctgcactcctaggacatttatacattttttcaggctttgtggaagatgtcttgtatg

SEQ ID NO: 117687 - DNA, 407 bp, Homo sapiens
ggcaaacatctgtttagccaaatccattcttctcaatattccccagggcctctaactctgtgggcttggcctctaatctgagtatgataatagtggataatcattcttgcccaccagaatggcttcacgaatctaaaagacagcccacttgccaggtgtcagctgattgattytgtgtggattgttttccttggagtgggggtcttgtcttggtgtccattcatggtgttgctgaaagatgttgctggaaaagagggtcctgatacagaccacaaagtaggattcttagattttctgcaggcaaaaatttgaggtgagtcagagagcacagtgaaagaagcaagtttattagaaattactccattacagagttggacatcctcagaaaacaagagcaggaatgcatt

SEQ ID NO: 117688 - DNA, 564 bp, Homo sapiens
tggcctctaatctgagtatgataatagtggataatcattcttgcccaccagaatggcttcacgaatctaaaagacagcccacttgccaggtgtcagctgattgattttgtgtggattgttttccttggagtgggggtcttgtcttggtgtccattcatggtgttgctgaaagatgttgctggaaaagagggtcctgatacagaccacaaagtaggattcttagattttctgcaggcaaaaatttgaggkgagtcagagagcacagtgaaagaagcaagtttattagaaattactccattacagagttggacatcctcagaaaacaagagcaggaatgcattgtcttttgttagtgtgtctacttataagtaactataaagagaaagtgttatagttaaacttggaaggtgcagatgtagtcactaaagtcggggctattggttttaacaataaccattaacccattgacctaagctagttcattaataatatccttacaaaaaaattctgcactcctaggacatttatacattttttcaggctttgtggaagatgtcttgtatg

SEQ ID NO: 117689 - DNA, 564 bp, Homo sapiens
tggcctctaatctgagtatgataatagtggataatcattcttgcccaccagaatggcttcacgaatctaaaagacagcccacttgccaggtgtcagctgattgattttgtgtggattgttttccttggagtgggggtcttgtcttggtgtccattcatggtgttgctgaaagatgttgctggaaaagagggtcctgatacagaccacaaagtaggattcttagattttctgcaggcaaaaatttgaggtgagtcagagagcacagtgaaagaagcaagtttattagaaattactccattacagagttggacatcctcagaaaacaagagcaggaatgcattgtcttttgttagtgtgtctacttataagtaactataaagagaaagtgttatarttaaacttggaaggtgcagatgtagtcactaaagtcggggctattggttttaacaataaccattaacccattgacctaagctagttcattaataatatccttacaaaaaaattctgcactcctaggacatttatacattttttcaggctttgtggaagatgtcttgtatg

SEQ ID NO: 117690 - DNA, 586 bp, Homo sapiens
aattcctccagttttgttttatatactcagcatagtttggctattatggtgtgtgatgtttccatataaatttcagaattttttttctatatctgtgaggaatgtcttcttcttytttttttttagatggcgtcttgctctgtcacctagactggagtgcagtgatgtgacctcgacacactgcaacctccaccacctgggttcaagcaattctttgactcagcctcctgagtagctgggattacaggcacctgccaccatgcctggctaattttttgtacttttagtagaggaggggtttcaccaagttggccaggctgatcttgagctcttgacctcatgatccaccaactttggcctcccaaagtgctgggattacaggcatgagccattgcccctggcctgttattttgatagagatggcatgaaatgtatagattgctatggattgtatggacattttaaaaatactgattcttccaatctgtgaacataaacatatctttccaattttggggtcctttttcatgtcttttatcagtgttttacagttttaattgttgagaacttttatttctttggtaaa

SEQ ID NO: 117691 - DNA, 613 bp, Homo sapiens
ctcagcatagtttggctattatggtgtgtgatgtttccatataaatttcagaattttttttctatatctgtgaggaatgtcttcttcttttttttttttagatggcgtcttgctctgtcacctagactggagtgcagtgatgtgacctcgacacactgcaacctccaccacctgggttcaagcaattctttgactcagcctcctgagtagctgggattacaggcacctgccaccatgcctggctaattttttgtacttttagtagaggaggggtttcaccaagttggccaggctgatcttgagctcttgacctcatgatccaccaactttggcctcccaaagtgctkggattacaggcatgagccattgcccctggcctgttattttgatagagatggcatgaaatgtatagattgctatggattgtatggacattttaaaaatactgattcttccaatctgtgaacataaacatatctttccaattttggggtcctttttcatgtcttttatcagtgttttacagttttaattgttgagaacttttatttctttggtaaattcccacacattttatttgtggctactgcaaatagtattacatttttgaatt

SEQ ID NO: 117692 - DNA, 417 bp, Homo sapiens
tctttgcaaaagctgaaatctgctatctacaatattgtagtagtccccaaaattgtctatgttctttattttttacttttttgtaataggtcattttattataaaattagttgactcctggttcrtagcactgaaatattagagcttagttgtgcaatactgcaatttgcttggtgaacccttatgttcctgttaagccaagaactgtaacaaagctaaagtatcaatttgcaatgctctgtagtttctgaggataccagcaaatcatctatagtttgaataattataaatccctctggttggaaacatttctctaagttctataaatgactagaaaatattgtaggaaaatcccaaaacccttgaggaaacaattgtgataaatattgggttcttccataagtgaaagcaaataag

SEQ ID NO: 117693 - DNA, 586 bp, Homo sapiens
gttgaattctgaacagtacttgtaacaatatattgtttactcaaaagcaaaaaccatgtttgagttaatgatgaatttcatcatttatcaaagtcatctgaaaattattcataaatactcaatttttattccctaccatttttatagctaccacacagtaagagatattaaactttgaggattttttaaaggtagaaactgaaactatgtgaaatacaatgaaagaaaatagaaaagagaaaaaaacataaataatttaaaatttattagacatcctcttctgaatatgtactttcccactttttaaatgataacaatgtgacagacttagatgaagaaatgactttggaatattttggtttcattcttgattatcttactggacacagataggtacattaggatgtgtgtcttaatgtaaataagccaggtaaaaagtagcacaatgaaggtaatgctttcagtrggagctttgatgtgaaagatttttattccttctacatccctgtgtatttgaacatatcacttaaactttccagaagttagttccctcatcaattaaaatggcagaattaacattagttta

SEQ ID NO: 117694 - DNA, 510 bp, Homo sapiens
aagtattttgctaaatgtgttgtcaaaaatgttatgaattaaaatgctgataaatatatttttaaaagttttactccaaatgtttaccaagaatttttaaacatccttgatatgttattatgcattctataatattaagaatgacattaataagtagaaatttcataatttattgtatttttaaatacaaacttcctacaagatgaaatagaataaaatttactggagacaggttgagaaatatctagaatcctaagggtatttttggttttaaaatattaatttttccagtttarcaattgggagattagtcttcatttaggtgatatttttacctgctaatattttatacaacatatttgtcaatgcattttttgaattactgggttttttttagttatttgcttttcttcatgagggagctggctactcatcatgaattgtattggtcgtggtactagtgagaggtgagagaagagaagaaaatgatactggaaatgtcatacatgc

SEQ ID NO: 117695 - DNA, 432 bp, Homo sapiens
tctttatacctctttaaggacaacttatgaattgttggttaagtcaaaaaaaagcttattggtttctgtttttatttgagaagcttttttggttgcttgttttttttaatragctttatgttcaaaatttggcttaattaaaagctgatatttaagctaaatatatttttaaagacctatttgctttttctcttttggatcttatttcttccctgagtatttttttttcagtcaaatgaatcccttttttaagcattgatgttccatttctttgttgcttccttccttgttggcataacttttgttgagaaaaatgtaaaacctcattgacattattgggaagtttaaaatctcctcaaattgtcttctctaatacttattctacaatttacttctactatgccttccttttttgctacctttgatatctca

SEQ ID NO: 117696 - DNA, 649 bp, Homo sapiens
ttggggcaattctttgatgactgggttaaaaaggtagtcttctccaaaacagatttgtatttgaatttgccaaatacttgagggcatccaaaatctcagatccctttttcaccttaaggagtttcaggttacataataggccaatacagtgtttccttagaaattcagattatgcgttcagatttcagtggacaatttttttccttatttcctttttccccagacccagggtcaaagtagtcattatctttttcctatatgtattagtccattttcgtgctgctgacaaagacatatccttacagttctacatgactgaggagacctcacaatcatggcagaaggcaaagaggagcaattcacatcttacatggatggtagcgggcaaagagagagcttgtgcagacaaactcccatttttaaagccttcagatcttgtgagacccattcactctcatgagaacagcacaagaaagacctgcacccatgattcagtcatctcccactgggcccgtcccacaacacgtgggaattaygggagctacaaagtgagatttgggcggggacgcaaaaccaaaccatatcactatatgtttagtttgtttctggttcgtattttggaagcactgtgttgcatggaatctcctgt

SEQ ID NO: 117697 - DNA, 512 bp, Homo sapiens
tctcaaagaagcttcaaataggagcgtgtactaccattaagtcagctcctcagttgtcttctttggattgagaagcacttcatcactttttacacaggtttaattatcaaatatgacttttctagtactacagctaatatatgtcaatgtcaaagggttaacagaatactaggcctatattaaattatacatatgagctttctctttactcctttttatgttcattagcaaacagataaagccataatagattttttaaggaatattttgttttgttttgttttggacttatacatctattaacaataaaccaaacattgcagattaaagcaaatctgccaatctgttttacaaacactatcttctgaagggttcctgggcacaagatactgttctagtaatatttcacagcttttttttttttttcattttagagaaaatattctaagactccaaagttmgatagtatttggtcagtgtcttagtcagtttgagctaatataacaaattat

SEQ ID NO: 117698 - DNA, 552 bp, Homo sapiens
cagttaaacaaaatcctcagctgtacatcatgtacttcccacttcctccgtatggcaagagggctctttcctctttgtactctcaatctgccctcttccctgtatctctttctgttcatgtccaacaggcagcttctggctcactaaygctctcaacaattatatttgagatttgtttatttgggagtgtgttgtttaatttcccaaatatccttctattactcctttctaatttcattccattgttgtcacagaacatagtgtcatttcactcctttttaaggtattgagacttgctttaaggcctgacatatggtctaccctggggaatgttccatgtgcaattgagaagactgtgtgttctgttattgctgggtggactgttctatttctatagatgtctgtaagatttatttggatacaatgtttttccagtcttttttccaggttaatattctatgttattatatccattattaaaattaagattttgaaatatcccacttattgaattgtctatttttccctttaactcattttgttggcttcatg

SEQ ID NO: 117699 - DNA, 527 bp, Homo sapiens
aggatgtggagcaaaaagaactctcattcattgatgatggtaatgcaaaatggtatagctactttggaataaarcttggcagtttctttctttctttctttctttttttaattaattaattattttttgaggcagggtctcactttgtaacccaggctagacctcaacctcccaggcccaagccaccctccaacctcagcctcccaaacagctgggactacaggcgcatgccagcacacccagctaattttattttctattttattttattttagtagacatggggtctcactttgttgcccaggctgatcttgaactcctgagttcaagcgatctcagcttcccaaagcgatgttagagtaggcagttacacagatataagcagggcaggagaggacgcctgccaggaatgtcaggcaaccatcaggtgatggtgaggcagttgctacactgtcgctctcaaatgataattggttgcagctggtgccaggggacagccagtctcccaatagacagaaaacacctgg

SEQ ID NO: 117700 - DNA, 575 bp, Homo sapiens
ggctttttttcagagctgaatttaagtctcagctttgccaacaattgttaggtctgtgactttgagaaagtaaattaatgtttgggtactttggcttctttattttaaaaaagggactaataataccacctacttcataaggttgtcatgagcattgagaaataaaatgtgtatgaatgttccaatacagtgcctggtataccactgatgcttaataaatattatgttctctcccttttgcctttcacagaggagattgtgtgcaaggggctttatttcctcaatcagtcaagttggaggctgtaatttactgaatgtttcctgctagaactaccctcctctaatttttgtgcctcttccactagccagtcacctgagtaagctaggtatttgtttcttttattgttacattgctgtagatttctcttcaatttgcaattaattgaaaagtcagatccttatgtgctgtgstctctccatcctggatacccttctgacccactgtctttattctacagcacttgctctcaaattttttttgttctttttgaacaatacatgttcccttgaaaata

SEQ ID NO: 117701 - DNA, 507 bp, Homo sapiens
ttactttgtgtaattcaggccactgcatgtacactcttcgtggaatctaggtcctgcttcgttgtttcaggacctaattatgagaagtgttcccactttgcctgagcattagccttgccccttactgcggtggaacttgaccaagatagctgtggatctggtgttctttccctttataccgtgggggtgagcagaagcaagacaagttactggkaaggagtaagaagcacaaatgctgaaaagacactgaaagggtgaaggttaagagagattatcagaagacaggtaacaaacagagttacaaagacagactttacagagcagaaaaaccaataaagaaatctgtcaaccaaaaaaaagacattggaaaaaaattatccccaaatatgttgagtttatctggggatgagaagaaagaggattataatctgggatgcatggaatggcaagccacaagtgcatttggttagggaagaggaaagggaagcttttattggcaaaaggaga

SEQ ID NO: 117702 - DNA, 584 bp, Homo sapiens
gggaagcacagacattacaggcctctggccttcccatctttttccactggttatgaaaaaaaaggtgttttatctctctccttcttccaaaaatgcctccttttgtaagttttaaatactaatgayattagttgtttctatactatcatctatttgctggaaatctttgtccatgtgccatatgtgaagtatcaagaagaagatggcactaatgcagagtcatctactgcctcagccaaaagcctcttggacacttcatctgggaggaggagacattcacaggcatggttagccggtcctgagcatgaattagacttggaagaatgacaattcaggttgctattcacatctagcagtgccaggtcatcttacccctgcagattttactggctccattgcaatggaagcattaaattaaaggtgttttctcatccatactcccattttatcctcaaagaacttcatgcattgggattcacaatgatagagacaataaaaatgctatttattcatccatgtatcattataatactattaaaattaatgatgataagttatgtattgaatgaccactgtaatgtagc

SEQ ID NO: 117703 - DNA, 608 bp, Homo sapiens
tggaagaaatttctaagtggcaaagtgttcaagtggaagaagagcataaaagtttgggaaacttgcagcctgacaatgcaatagaaaagaaaaacccattttctggggataaattcaagcctgctgcagaaatttgcataagtaatgagaaacccaatgttaatcaccaacacaatgtggaaaaatcttcagggtatgtcagagaccttcacagcagcccctcccatcacaagcctgggggcctaggaggaaaaaatggtttcatgggctaggcctagagccccccttctgtgtgcagcctagagacttggtgccctgcgtccagcttctccagccatggccaaaagaggccaaggtacagctcaggccatggctccagagaatgcgagccccaagccttggcagctttaatttggtgttgagctgrcaggtgctccaaaagtcaagaattgaggtttaggaacctccacctagatttcagaggatggatggaaactcctggatgtccaggcagaagtttgcagcaagggcagtgacctcatggagaacctctgctaggccagtgcagaagggaaatgtggagttggagcccccacacagagtcccca

SEQ ID NO: 117704 - DNA, 620 bp, Homo sapiens
tatatcgtatgtgaatgatatttcaataaagttaactttttgaaagagttgaagtaaattcctttttagtttaagtagttatggttggggtttcaacactgaggacaatgtggagttatttaattgaagctggaaaaggatccctggagaccaactcaccctctcataagttttctctataactgcatctcctgtgtccaactgcttaagcaaagcaaacaaaacaaatgtgaaactaaaaatatattgagtaacaaaaatataaaataaagctaaaataacatatagcataagaagccaaagcaagattcaaccaactgtatgagttaaaarttaaatcataaaaattataagaaatatatgataaaatcagtaaatataactaagaatatcagatgagatgaaacacagataaaataaatgctaaattgaataatatttgaggtgcattaaaagagcttgaagcaaaaaaagttaaataaatgataaagtcagtcatgttataattagataaaatctaactatatacagtgtattattctgttctcaggctgctaatgaagatatacccaagactgggtaatttataaagaaaagagttttaattgactcacagttcc

SEQ ID NO: 117705 - DNA, 606 bp, Homo sapiens
ttctgtgtagtactaagaaaaaagattgggactttcgtttctagaaaaatggtgggttagattgttcagagtaatcatattaatgtaaatatgaaaatagtttgatgtaactcattttaaaataattttaattaataagacatccaacaagacagtaaatgcatttaagagaattagaaatccagggaggttaagtggaaccattaagacatttgccctaaaggcatttgccaatctgtgaataggtaaaaacttctgttttgatgacttttgatggcaaggggagcagaagttgaagtctttggtttcctagagtggaaacttcaatagaacccataacacatgaattttggattcccagaaaacataccttcagagggaaggagacataactaccaccagaaagtatttttytaaaaagttgctcagaacttggaggaataagggaaaaaaaaaaaaaaactcttaagcagtggggaaaaaaaaagctgtcctgtgcacttgtaattccaaggagacatattctaaccattgtcagatgacagaggtggaacaaccagtctctaaggggatccagactttccctcatctttctgtgcttccctt

SEQ ID NO: 117706 - DNA, 613 bp, Homo sapiens
gctgtttcatctcagtccataacatgtttttgctactgaaaattcctcctgagtcttggtggatttgataaatattgagaatttcaaattctgtcacaatttactttctgaaattcttctctgttcaatgcctacagaatgtatttatctctgtgcttttatagcaattatgacagaacttgtataacatttgtcaaatagtatcacgtttgttcttaaccattttaaagagagaacatgactgtgcagtaatggctgcttgattcagaggcatttggccttactgtatctgattatgcatccataaaagctcgagmttttccaccttatgaccagcccatcatgttttgttaacactattgattgctttggtttggcaccaattgacctagcatgtcatcaccgtcaatgtcagcatctttcacatttaatacacaattgtaaatgtaagacttgctcattactgcagaggatcttaattacacccaaaagatcataaagaaggaggttataagtagtacttggaggtgtttcttttcacataataatttgggaactccttgatgttatgaatcttattcaccttcttatcagcagattgtggcccagggga

SEQ ID NO: 117707 - DNA, 613 bp, Homo sapiens
gctgtttcatctcagtccataacatgtttttgctactgaaaattcctcctgagtcttggtggatttgataaatattgagaatttcaaattctgtcacaatttactttctgaaattcttctctgttcaatgcctacagaatgtatttatctctgtgcttttatagcaattatgacagaacttgtataacatttgtcaaatagtatcacgtttgttcttaaccattttaaagagagaacatgactgtgcagtaatggctgcttgattcagaggcatttggccttactgtatctgattatgcatccataaaagctcgagattttccaccttatgaccagcccatcatgttttgttaacactattgattgctttggtttggcaccaattgacctagcatgtcatcaccgtcaatgtcagcatctttcacatttaatacayaattgtaaatgtaagacttgctcattactgcagaggatcttaattacacccaaaagatcataaagaaggaggttataagtagtacttggaggtgtttcttttcacataataatttgggaactccttgatgttatgaatcttattcaccttcttatcagcagattgtggcccagggga

SEQ ID NO: 117708 - DNA, 644 bp, Homo sapiens
acctaatctttcaagccctttaaaatcctcaggagtttatttactgacaacaaaaaggcttgacgttacatatttttgtggattcttgtgtcctctaaaaatgaaatagtacatttttatgcagctaaaatgatgaatttaactttaaaagtatttgaattttgatgatttgtattgatatattttctatgatattatttgtaagtaaaagatttcttcatacttgtttgttgaacaatgttcaacagcagcctggttatgaatggtataaagttgttcatcagttattttatttctaaggctgtgatgatgatttgatatctgggctggatcctttactcatctatctggtttaagatatagtttccaaacttgcaaaaaacttgtgtagaccatatgtattccatcagagagtttaagcgtttttgtttagcagcttcatcaaggcttttagcatttttatgggttttatgttaacaaacatttattgagtttctgttttctgcaattatttttttctagarcttagtgcattaataaagagagatataacctatttcttgcccacacagattttggagtcttgttagcaaaactaaaccacagtttattacacagtgaatactatctacatttgtgtccag

SEQ ID NO: 117709 - DNA, 621 bp, Homo sapiens
taccaaatgtaagattttgctccttttgtttattttattcttctctctctgtcaacccattagtcccttctgaagcaggtatgaataaattacagaaaaacaaaatamgtcatataaatagttctgaatctggctcctaaaaacacaagaattcttttgataaccacaataataattataacatcagggaaatgtaacattgatacattatttttatctattacatagttcaaattatgtaatattcaaatatccctaattgtctgaatgctttcctttttaaccattttttaaacccaagatctaatagcaagtatgcattgtttcattggcacctctattttatctctttcagtccagaacaaatcagccttctatttgtctgtataacattgacatttttatagagaccaaagcagttgttctgctttatgaatctcaattcggatttttatgattatttcctcaagaaaataaaacattttttaaaagaatatttcttagatgatgttgttatcttctcagtgtgtcactttagaaatgctatgcactattgaaatgccatatcaggtgcgaagtatacaatggagctgtaagttcctgagcactggaaaactggaa

SEQ ID NO: 117710 - DNA, 621 bp, Homo sapiens
taccaaatgtaagattttgctccttttgtttattttattcttctctctctgtcaacccattagtcccttctgaagcaggtatgaataaattacagaaaaacaaaatacgtcatataaatagttctgaatctggctcctaaaaacacaagaattcttttgataaccacaataataattataacatcagggaaatgtaacattgatacattatttttatctattacatagttcaaattatgtaatattcaaatatccctaattgtctgaatgctttcctttttaaccattttttaaacccaagatctaatagcaagtatgcattgtttcattggcacctctattttatctctttcagtccagaacaratcagccttctatttgtctgtataacattgacatttttatagagaccaaagcagttgttctgctttatgaatctcaattcggatttttatgattatttcctcaagaaaataaaacattttttaaaagaatatttcttagatgatgttgttatcttctcagtgtgtcactttagaaatgctatgcactattgaaatgccatatcaggtgcgaagtatacaatggagctgtaagttcctgagcactggaaaactggaa

SEQ ID NO: 117711 - DNA, 621 bp, Homo sapiens
taccaaatgtaagattttgctccttttgtttattttattcttctctctctgtcaacccattagtcccttctgaagcaggtatgaataaattacagaaaaacaaaatacgtcatataaatagttctgaatctggctcctaaaaacacaagaattcttttgataaccacaataataattataacatcagggaaatgtaacattgatacattatttttatctattacatagttcaaattatgtaatattcaaatatccctaattgtctgaatgctttcctttttaaccattttttaaacccaagatctaatagcaagtatgcattgtttcattggcacctctattttatctctttcagtccagaacaaatcagccttctatttgtctgtataacattgacatttttatagagaccaaagcagttgttctgctktatgaatctcaattcggatttttatgattatttcctcaagaaaataaaacattttttaaaagaatatttcttagatgatgttgttatcttctcagtgtgtcactttagaaatgctatgcactattgaaatgccatatcaggtgcgaagtatacaatggagctgtaagttcctgagcactggaaaactggaa

SEQ ID NO: 117712 - DNA, 618 bp, Homo sapiens
tgctcccacaatacatgacctcccccagtatcaacatcctccactagagtggtacatttgttacaattcatgaacctacattgttacatcattatcacccaaagtccatagtttacacgaggatatacwcttggtttcatacattctctgggtttggataaatgtataacgacatgtatccatcattatattatcatacagaatagtttcacttccctaaaaatactctgtgcttcatctgttaattttttcctcccctccactaattcctggcaaccactaacatttttactgtctccatagttttgcctcttgcagaatgccatattgttagaatcatatagtatattgcctttctttcacttagtaacgtgtttatattgcctccatttttatggcttgataggtcatttctgtttagtgttgaataatatgctattatctggatatactagtttatccattcagctatcaatggacatcttagttgcttcaaatttttggcaagtaagaataaagctgctataagcatccatgtgaaggattttttgtgtggacctaagttttcaacatctttgggtaaacaccaaggggccccattgctgggttatatggtaa

SEQ ID NO: 117713 - DNA, 499 bp, Homo sapiens
gaattcagatgagcgagatctctgcggtgggttgatctgagtgattggcgcctgcattcactcgcccattcattcacctcctgtgcttgtcaccaggctacaaaaacgaagccaccacccctctctggtgccaraatgtcagtttggggaaagctggagctcccttctgagagccaaatttatttttttttatggaagagattcccctgtaaattctgggaaagtttgagagaaagctccaggagtagtgacaaagcaaaaggactgggtgaacagaaggggcatcggagattgtcctgtctgcctgcagccagctggggaacagagaaggtgagtggggacagagcccacaggtcctgcaggtgtccaggaaccaaccagtgatgagcagtaaccaatttgggattcctgtcccagactgtagcacactctttggcacaggattttgtcatggggtgtgtcaccctcaacgaaaggaggtttgcatcggtatagcctg

SEQ ID NO: 117714 - DNA, 562 bp, Homo sapiens
tttctaattctttacttaagatattgctgagcaccaaatgaaacactagctgtgaatactttggagaatgaggagcctttcatatgtgtttccaggaacattttatacttggataatattatcattatccaagatttttgatcagaaaactgcttctctggtctccagctagcctcacctcacacggttcctttccgattgcagcacacacttcatcttttgggctcatctaaaaatagattttctccctttatttcttcatctcactgctgaaaacaaccctgatgcattcagctaaatgccaagtcagactgattcagtcccattttattttgatgttaatttaggatataaataaatgttagttcattgtggcagacaaatgctcttctgacatattaaagaggccagcatctcaggcaaagaactggcaagattttaagatttacaaaataatttgctgcagagaccacttgatgtcaacatggggattgtcarggttgacttcttgaaggaaaaataatataattcactctacaaacaataatgatccagaatttat

SEQ ID NO: 117715 - DNA, 535 bp, Homo sapiens
tgtgctcactgtatgtcctctttgtacatttggataattccctcaatatttcagattttattattattaatatctcctgtgatctgtaataaatgatctttgatattactattataattgtttttgggcaccaggaagcatgtccatataaratatcaaatataattaataaacattgtatgtgttctgactgctccattgaccagctgtttcccatctctctccctctcctctggcctccctattccctgagacacaacaatattgatattaggccaattaataagcctgcaatggcctttaaatgtttaagtgaaaggaagagccaaaaatctctcactttaaatcaaaagctagaaatgattaagcttggtgaggtaggcatgttaaatgctgaaataagtcaaaagctaggcctcttgtgccaaaccattagccaagttgtgaatgcataggaaaagtttttgaaggaaaataaaagtgttacctacacaaatgaaaagaaagccaaaaaggctgttgccttattgctgat

SEQ ID NO: 117716 - DNA, 535 bp, Homo sapiens
tgtgctcactgtatgtcctctttgtacatttggataattccctcaatatttcagattttattattattaatatctcctgtgatctgtaataaatgatctttgatattactattataattgtttttgggcaccaggaagcatgtccatataaaatatcaaatataattaataaacattgtatgtgttctgactgctccattgaccagctgtttcccatctctctccctctcctctggcctccctattccctgagacacaacaatattgatattaggccaattaataagcctgcaatggcctttaaatgtttaagtgaaaggaagagccaaaaatctctcactttaaatcaaaagctagaaatgattaagcttggtgaggtaggcatgttaaatgctgaaataagtcaaaagctaggcctcttgtgccaaaccattagccaagttgtgaatgcataggaaaagtttttgaaggaaaataaaagtgwtacctacacaaatgaaaagaaagccaaaaaggctgttgccttattgctgat

SEQ ID NO: 117717 - DNA, 567 bp, Homo sapiens
ttttcccaagttttaatgaccaataataaagggtacttgcaatctggccttctcatttcacaaatctcttctagtccattgtactatgcagaaggtaggatggaaaaatagctctctctgtatttattttaattgttaataatttagtcagaatataatgtaatgaaatttttaattcttctracagtttttaagtactgcaattgtgattaagaataagagcattttggccaggcacagtggctcacgcctgtaatcccagcactttgggaggctgaggcgggtgaatcacctgaggttaggagttcagtaccagcctggccaacatgatgaaactctgtctctactaaaaatacagatattagccaaattagccaggtgtggtggctagtgcctgtaatcccaactactggggaggctgaggcaggaaaattgcttgaagccaggaggtggagagattgtaataagctgacatcatgtcactgcactccagcctagatgacagagctagactccttctgaaaaaaaagaaaaaaaaaagaatgagagcattcttgtgttgttttt

SEQ ID NO: 117718 - DNA, 460 bp, Homo sapiens
aatattgcagacacttttcggagatcagtttgagaaggaatagtataagctcaacctctaaatgttaagcttaagatgtctattaaacatcaagtttagatgtctagtaaatcattgaatacatgagtttgtagtttaggggagaagtccaggctggagatttagatttggaattaatcagcaattatttatttgttaccaattatgtcctttgaatgtaacagacattttagaaagacagatacggttttgccttcaaagactgagagtgaaacttcaaaaatgkaatgtatactagtaaaatagcaagaaagcaattgtacagatcagtgctaaagcatctttatctcaaggagagagatggttgtagctgaaaagagttacataaaagagatcaatcttcagaagccagaaacattttcatcagaaatattgaggaaatagatgttttagaaagaga

SEQ ID NO: 117719 - DNA, 630 bp, Homo sapiens
atagttgaatttacaaaagcaattacaccagtttcctgtgactttgaaggatatatatagttgcgttaattaagtagaagaggagaatgtggattgctggtgattttccagtggaaaaaaacaattgtcgtcgtctgtgcagcattaattgctacatagggtaggagattaatatttttaacattttaagtggttttgcataaatgttagcaataagcaagccattttatgtcttattggtttgcatttttaataatattggaatgctagccttctcataaaggaaagattgcaacaaaacagaaatagtgtttcaaccttgctagttatgtgcaaactgacyccatgtaccctctttggggaacactcaaagacagtggtactgttgaaaccataaaaaggggaagaggtaatttatttttaatttttcttacatttgtgaatttagtgccaggaaaggctaacagcattggctaaggactccaaggaatagatgccatgaacactttctgcatcttttcttttcttatattaggtttggccttcttttaaaaacagatcattaagttgataaaactgcaccgaaatataaattggcatattcacttgtacaaagataaaactcaacca

SEQ ID NO: 117720 - DNA, 651 bp, Homo sapiens
attcagttctcactgacacctaatcgaaaaattttttttttccatttgggcatatgcttgataatgcagcatatccctaataaggtaacatatagcattataaatataccatacatttttctttttgtgatggaaaacatacaaaattgaatttatcagaattcttgagtctgtaggagccaaacccaaggctgtgctgcaagaagcaagtatgtatatgaagttacatcttgtgcatcctaactcgtggtgaaaaaacgaatttcagtcgaccgtgtcagaggaaaggctgacttatcattcttttctctattagaaaagattattaaaaatcataaacatatgaaaagtatatagcaaaactaccatgaaatgcatttcagaggrtatcaggaagttaattaacacatatgtcatttttctagattttgcagtgtttctgacccttgtcaattttttaaaattttgtaacattatgatttctttttaaattctaaatatgcatatgcatacctaaattaggattgataattttgaaatcttttccttaaagagggtcccccaaattatatcaactgaacccccttcactgcaaaatgtggctccctcctgatacacacaccagtgcatgcacacacatacctatgcacc

SEQ ID NO: 117721 - DNA, 473 bp, Homo sapiens
ggaacaaacagcattcaataatctgtgggcataaaaaataagttatccttcctacttgcccttagatctcagaatgcaggactccaaaatagagccccgaagagtgaggctcagacatcagagctccccagagacacacaacaaaaacaggctaagttttcacttgagagaatatgcaacttgttcacttacatgagcacttcaatgttctaaagagcaacaattatattggttgtatgatgctatacaaaatscatcttttcagtcagtctgtgtctgtcttcatctctctcacataccttaccctctcagaacatctcattcatgcacagcaatctaaaagcagcaatcacctctgaaccccgggaaagagtaatattggatgttcataaatacatacaagccatcaatgatattcgagagagtttcaactaattaaaaaaacttttcttaatgggaaatattcagtcaga

SEQ ID NO: 117722 - DNA, 555 bp, Homo sapiens
gtgtcttctttagtttcttttatcaatgttttacagacatcagtgtagacttctttcacctccatggttaaattttcagkatctatccatttttttcctctaaccctacttaattcattattagtttctagtgtatgtgttaattttattcaatctgtcctgttctccatatttttattttgttttaaacagtccctgaagttacttgtttttgcttttttctaatatagtcttcacttatactatggttttatttttgtctttcactgctttactgggctctgtctgccaatttaattttcatctgtttccattgaaacatatttctaatgtcttacctggcccatatctctgtgaactcttatttctttaaatttaggaactctttttaaaaaaatttaagattgttttttaaaattacttaaatccatgaaaatgcatttggacacgagattctctggccctggtaatatttttctgatgtgtagtctctgacttttgtttttctggttctagtcctcctcttttcttataatatatttacacagatgcagt

SEQ ID NO: 117723 - DNA, 572 bp, Homo sapiens
cacccatcgaactgcaacctcccatttctcccgtccccaggccctggtaatcctccttctattgtctgtttctatgagtttgactattttagataccttatataattgaaatcatgcaatatttatctttgtgtgcctggcttattttcttagcaaagtgtccttcaggttcatgcatgttgctgcatatgacaggatttccttgtttttaaggttgaataatattccattgtatgtacatacaacattctctttattcattcatctgtcaatggtcatttaggttgtttttacattttggctattgtgaataatgcttcaataaatatggggattgtagatacctcttcgagatcctgatttcactctctttggttatgtatycaaaagttggattgttagatcttatggtaattctattgttcagtttttttaggaacctccatggcattttccatagtggcgataacattttacattcccaacaactgtttaaaagaattccgattttttcgtattcttgccaacactttctatcttttgttttacaacaatttttgattagcaaaatc

SEQ ID NO: 117724 - DNA, 572 bp, Homo sapiens
cacccatcgaactgcaacctcccatttctcccgtccccaggccctggtaatcctccttctattgtctgtttctatgagtttgactattttagataccttatataattgaaatcatgcaatatttatctttgtgtgcctggcttattttcttagcaaagtgtccttcaggttcatgcatgttgctgcatatgacaggatttccttgtttttaaggttgaataatattccattgtatgtacatacaacattctctttattcattcatctgtcaatggtcatttaggttgtttttacattttggctattgtgaataatgcttcaataaatatggggattgtagatacctcttcgagatcctgatttcactctctttggttatgtatccaaaagttggattgttagatcttatggtaattctattgttcagtttttttaggaacctccatrgcattttccatagtggcgataacattttacattcccaacaactgtttaaaagaattccgattttttcgtattcttgccaacactttctatcttttgttttacaacaatttttgattagcaaaatc

SEQ ID NO: 117725 - DNA, 572 bp, Homo sapiens
cacccatcgaactgcaacctcccatttctcccgtccccaggccctggtaatcctccttctattgtctgtttctatgagtttgactattttagataccttatataattgaaatcatgcaatatttatctttgtgtgcctggcttattttcttagcaaagtgtccttcaggttcatgcatgttgctgcatatgacaggatttccttgtttttaaggttgaataatattccattgtatgtacatacaacattctctttattcattcatctgtcaatggtcatttaggttgtttttacattttggctattgtgaataatgcttcaataaatatggggattgtagatacctcttcgagatcctgatttcactctctttggttatgtatccaaaagttggattgttagatcttatggtaattctattgttcagtttttttaggaacctccatggcattttccatagtggcgataacattttacattcccaacaactgtttaaaagaattccgattttttcgtattcttgccaacactttytatcttttgttttacaacaatttttgattagcaaaatc

SEQ ID NO: 117726 - DNA, 471 bp, Homo sapiens
cataattactgaagccaaacctattcccaactcagtgaaaataaactattattataaataagtacgatataataaaataaaactatgaaaacaaccaaaaacttgctagcagaccataggaaaatcccttaaaatttaaaaaagaaattattgacaaaatttaaacttccagtgttccaattcatgtgtgtatatatgctaattgattattatcatttttcagaatmttaatttattttcctgtttggttactgtgtgatgcaaataaacttcaaggaaaaatgattttgtggtctttaattcaataatagtatcggtatctgattaaaatatgcttaagtggaatggttgagaaggaaacagtctgaagaggatttcatttgaaatatttattaccaccatctgtaagatatgtctttcttcttcctctttgttcactgcctgaaaccaataaatctactggaaacgaga

SEQ ID NO: 117727 - DNA, 466 bp, Homo sapiens
ctgaatgtcatagtcatcaatacaaaatttgcaagaagtttcctagagaactcataaaccatttgacaaaaatcagtatcaagtcaagagagaaatattctggtcatttctttttaggtatgtttcttttattttattagatacttaattctcttgcatgaatttttttggatagtacgygataggattcccatacacatcccgtagaagatatattgcttaggaccatgcaatttagatgtttgttataatttttttcagattacattttttgttccagagaagtaaagggaagaaatgaagaccagcaggttgcatacaacacagaaaagatctgatgaaaattctactatggcctgtttatttagaaacagattggccggataatgctaatactaatcactgtcgtggctaaaatttattaaacactctctctgctatgcatttcaacatacacccctaagag

SEQ ID NO: 117728 - DNA, 466 bp, Homo sapiens
ctgaatgtcatagtcatcaatacaaaatttgcaagaagtttcctagagaactcataaaccatttgacaaaaatcagtatcaagtcaagagagaaatattctggtcatttctttttaggtatgtttcttttattttattagatacttaattctcttgcatgaatttttttggatagtacgcgataggattcccatacacatcccgtagaagatatattgcttaggaccatgcaatttagatgtttgttataatttttttcagattacattttttgttccagagaagtaaagggaagaaatgaagaccagcaggttgcatacaacacagaaaagatctgatgaaaattctactatggcctrtttatttagaaacagattggccggataatgctaatactaatcactgtcgtggctaaaatttattaaacactctctctgctatgcatttcaacatacacccctaagag

SEQ ID NO: 117729 - DNA, 583 bp, Homo sapiens
ttacatacctgtgcagtgccagacactccacctgcaagatgggaatggtcatcttacctatgtcatatggctattttgaggtgtaattgaaagaaggcatgctgcatrgtaactattcagtagatgtctggtattataacttgcccagctccatgtctgcgagatcagaacgctgaggcaatcagattaaataccttggctgaggtcacacacagagtctgtgtcaggacttgtcttctgattctcactaccccacgttggctttccagtacctttatcagccattcgctccaaagttgctcagcaccatagaatcattatttagtgatcggtccttcggaaactaaagtggggaaaagatcttttctattacatgttttctggccagttaaaatgatgatagtgctttgtattagtctgttttcacgcaactgataaagacatacccgagactgggtgatttatagagaaaaagaggtttaatggattcacagttccacatggctgaggaggcctcataatcatggtggaaggcaagaggcatgtcttatgtggcagcagacaagacacaaatgacagccaa

SEQ ID NO: 117730 - DNA, 620 bp, Homo sapiens
  misc_feature (1)...(620): n = A,T,C or G
atgtggctacacagcatggaaaactcaccagcacctccccatcattgaggctgcttaggaaagggactgacatctcagtccttatttatcyacattgttcactagtggctctaggttccattaattgagtcagtttctctcctttccatccccagtaacaaaagaagatgtggagacaccgcgggcgccaggccttggctgcaggccagccccctctggctgctctctggaacagctcactgctggcagcttccgaagcctctttgcatctgtggtttcttctgtatacctganaatggctgcaaatccttgtgcatgatagcaaanaggccaggagctgcctccagggtctattaaaggagcagaagagattggtgacattttatcattcaaattctctcttcaatacagtttctggccccctcccactgtggtgactcaccttggcccatgtggcccaaatgcttaatttattgtcccggaccctgtaccaacccctacccacctcgccaccagcacacccacccgtttgctcctgcgtggctcgtttttattgccttctgcccaaaccctggttctgtagcctttcaatttgtatttctcagttcaggcctgagatt

SEQ ID NO: 117731 - DNA, 621 bp, Homo sapiens
  misc_feature (1)...(621): n = A,T,C or G
aatgtggctacacagcatggaaaactcaccagcacctccccatcattgaggctgcttaggaaagggactgacatctcagtccttatttatccacattgttcactagtggctctaggttccattaattgagtcagtttctctcctttccatccccagtaacaaaagaagatgtggagacaccgcgggcrccaggccttggctgcaggccagccccctctggctgctctctggaacagctcactgctggcagcttccgaagcctctttgcatctgtggtttcttctgtatacctganaatggctgcaaatccttgtgcatgatagcaaanaggccaggagctgcctccagggtctattaaaggagcagaagagattggtgacattttatcattcaaattctctcttcaatacagtttctggccccctcccactgtggtgactcaccttggcccatgtggcccaaatgcttaatttattgtcccggaccctgtaccaacccctacccacctcgccaccagcacacccacccgtttgctcctgcgtggctcgtttttattgccttctgcccaaaccctggttctgtagcctttcaatttgtatttctcagttcaggcctgagatt

SEQ ID NO: 117732 - DNA, 482 bp, Homo sapiens
ggaaaaatacttaaatactgactttgggcaccgtttgtctgcctcaaatgtttgatttgtgtccgatattgccattgcattgggatggaaaacacttaattagacctgtaaaaatttagccaattacattttcaaatacttgggcaaattctctgcatgcagacaattgacagatggtctccattttcattaggctgtttgtttttgtgtttagagacataaggcccagaacatgtgggttgaagtttacacagagctagtaccagcccaaaggtgttcacagagacctttctgctctatttatttcatttgaatatgtgttgtytttaaatggatttttcatggcataaaaagaaaaataaatttttcataaactgaaaggatatgatgcatttggatagtatttttaaagaaacttttaagtccatgcttgtatataaataattcagtctgttcatgatcatattgataagttcattgta

SEQ ID NO: 117733 - DNA, 522 bp, Homo sapiens
gtctaggacatgcagactggcatccaccacgtgtgtgcacacacgtgtgtgtactcagtgcaacacaactggcttgtccaccccaggattggttctcctggctgttccctggtattagatacagcctcagacaccttatctcatggttaacaggaaggccacagsagccccaagtccccgactctcaccccacatcattgaagggaagagggggaacatctcttcctaggtaggtcaacggcccctccctgtctcactgctgtgggcatgccaccttggagcacttgcatagccagaggggtgggacatttttttccgacccacgtgactcaacaaaggcacatctaggcattgggaatgggatgaggggaccttgacactgaggagatacccttgacttctttattgttgcctaatttccaaaggcccaggggctggctcttctattgcccaccacacaacaatggtggtcatggatagtacatgctgcatgatgactcatggaatgctattctgcacagt

SEQ ID NO: 117734 - DNA, 487 bp, Homo sapiens
ccaggtccggcccagcccaggtcccagagccaacaccagrgccctccatgtgagtccatagcctgatgtctagtctttcctccatacccaccagctgttaggacactgtcattactggctgctccaagtgacctggaagggtcagccacacgggatgagctgggagccaacaagagacccacacccagatactggcatggagaactgtctctcgctgaccttgcctcagcctggctcagctcctgtgtgtgaggctggctgggaagagggcaggacaagctctgggtagtggcagaggtggcagatgtcatcacctcccacagccaggctgccccagtagagtttgatccaagacccaagcaagtgcccccaaggggacacctctgaatgccagagttccttcctctaacaaggcttcctggctcagagccagccagctctgccatcctctgccagtaccccaaatatatctcatccttatgacctg

SEQ ID NO: 117735 - DNA, 587 bp, Homo sapiens
atatatatatgtaaagttatatatatatgtatttgagacagggtctcactctgtcacccatggagtgcagtggtgcaatcacagctcactgcagcctccacctccccaggctcaagtgattctcccacctcagcctcctgagtagctgggactagaggtgtgtgccaccatgcccaactaattttttttttttttttgtagagatggggttttgccatgttggccaggctggtctcgaacttctgggctcatggaatctgcccacctaggcctcccagaatgctgggattacaggcatgagtcactgtgctcggccaaactatcattytattttttttaaaaaatcatattatctatcatgtagtaaagcctcaataattgttactttcattatggatattattatttgtattgtttcatgagtttgaaatatttaccaaatgtctttagaaaacttctgaaaataaaagccttccaggaaattatttttattttctagttaataaaattttatgtttgaggattttttaaggtaaataaaataaaaacagttattagtttcttttttttttttttggcttagaact

SEQ ID NO: 117736 - DNA, 518 bp, Homo sapiens
ctttcctgcctctgcttctacatctgtgaagtaggcatggaaacagttctcacctcagagtgccatgaagttccatatgcagttcccagctagagtctggatagggcctggcccttagtaccacctggtcagcatcagcctttatcagtctcctcccacccagcacagggcyaatcgggacccctgcctgctaccccatgtccttttccctgacaccctgtctgaacctcaaggggccaccctgccccccatccaggctgtgccactgatactggggatgctctggtcactctgcccggccaaggctctgcctttccccctgcctggataccccaccccagcccagcctcatctcggggcagcccatccccataagcgctccaaaagcaccccaggcctggaagacaccccatccacccactgccctgccagggccccctcccactgtgcagcagagccaccatcacagcccagctgtgcctgcccacccattcccaggctgtcccagaccccagccc

SEQ ID NO: 117737 - DNA, 504 bp, Homo sapiens
ttatgaaccatgagctcagtggcttgtgtgccctccaagtggaagctttaagagccagtgtgcgattctccacacccctttgccacagcgatggagggagcacatttcaagctgtagcccccgacagtctgggtccctgaaatcccagatgactcaggtctcccagtcaaaccagggctgacatccagtgtgagcgataaataaaccttgattgtttaagctcctgatgcttaagggtggtttgtttctgcagcataaccttactgatatcagcytggctgatacactttccatttccctgatcatagggatggtttagagatatcatgtgactcaagagtccttacattacttttacattttgagtggaagaggaaggactttatcttctgagttatcaagttttagagaagccatatttcccaccacaaacagaaagcctgtctgaggtatgaaatagtaaaacgaagggagaaaaagaaaaaacatgatggaaaagaggga

SEQ ID NO: 117738 - DNA, 550 bp, Homo sapiens
cttccatctcctgaaaggggtctctaacatacattcaaggtctttctagaaaaacgagtggtgggaaacttacgttaaatgatgtgagggccacattgtgagtaaaggcagttaatagcagaaagtcagagacctggatttgttggataagcatatacagtgcttatatcagaacagagaaggcaagggggctggaacttaacattcacttgtaaaactcaaggtagtaactgagacccagtattccaggggtgtgggtctgcattctcggttctagaaaaagactgggactaggtgttgagacgtctcagcttccctgtggccaggttgctaaataaataggcccatgcttattatttgacttgttgccttgttactaaatatgaaggggttctcttcccttctgtgggttttcagaaagcaaatattgtaatcatattaggacgtttctgcagaaacttgacatgcatcaccagacatggggctggcmctatgtgatgtcagccttctgtgatggtactgattgatcagcatctctccccgactcccc

SEQ ID NO: 117739 - DNA, 550 bp, Homo sapiens
cttccatctcctgaaaggggtctctaacatacattcaaggtctttctagaaaaacgagtggtgggaaacttacgttaaatgatgtgagggccacattgtgagtaaaggcagttaatagcagaaagtcagagacctggatttgttggataagcatatacagtgcttatatcagaacagagaaggcaagggggctggaacttaacattcacttgtaaaactcaaggtagtaactgagacccagtattccaggggtgtgggtctgcattctcggttctagaaaaagactgggactaggtgttgagacgtctcagcttccctgtggccaggttgctaaataaataggcccatgcttattatttgacttgttgccttgttactaaatatgaaggggttctcttcccttctgtgggttttcagaaagcaaatattgtaatcatattaggacgtttctgcagaaacttgacatgcatcaccagacatggggctggccctatgygatgtcagccttctgtgatggtactgattgatcagcatctctccccgactcccc

SEQ ID NO: 117740 - DNA, 622 bp, Homo sapiens
gaaatcaggtcttgatttatatacaaccctttaaatctaacttttcatagtctgaggttgcataatattctgtatgtaacttaaatctctcatattgactgttcatcaaggatctactctttggttaaaccaaaaaargtaaaatgaatgctcttaaaaaggccactgttttgttttgtgtttcttcagagcagactctgagaaaagaactggagggcacataatttatttgggaggggatccccggaaacaagacaagataaaggtgggatgagacagggaaaggaaaaatgccgataaaaggacttttaataagcaaatgatgactgaggacatgcggaactgagtctccttgggaactctgggaggctgggtaggaaatgcctccaggaaaggaggatgcttagtggtctcagtagtagaggcgcatgcagtgggctatatagcctggaggagggagaaaccatttctgtagagagagcttctggagacatccaaaggaggtgattctcaagagatatgccagagatgacggagcagggcagtcaggccctggaggaagcacaaacggccattagagatgtcaactcacatacctggctattctagacatgggactatt

SEQ ID NO: 117741 - DNA, 642 bp, Homo sapiens
tgctgtataccttatttaaaataatttatgtgaggagtctaaacttatgcaatggatatattatgaccctctccactataaaagtcttagatactgacattgtctattacagagaagtatgtgtagtttctgacgctgccagagagagacaaacagccagtgaaacttcatgttcaaacattagtaggaactactcactgtcagtagtacaaataagacagtgagaaatcaggtcttgatttatatacaaccctttaaatctaacttttcatagtctgaggttgcataatattctgtatgtaacttaaatctctcatattgactgttcatcaaggatctactctttggttaaaccaaaaaaggtaaaatgaatgctcttaaaaaggccactgttttgttttgtgtttcttcagagcagactctgagaaaagaactggagggcacataatttatttgggaggggatccccggaaacaagacaagataaaggtgrgatgagacagggaaaggaaaaatgccgataaaaggacttttaataagcaaatgatgactgaggacatgcggaactgagtctccttgggaactctgggaggctgggtaggaaatgcctccaggaaaggaggatgcttagtggtctcagta

SEQ ID NO: 117742 - DNA, 602 bp, Homo sapiens
ctgcatcctctccatgaggaaagaagtcatgaagctttgtacaaatagatgtagcaagggaatacagttggaaaattaactgttttatttatycatttcttgtacgcttctcttgaaagaataagagccatgctttctttcttcttcccaagagcttcccaggggaaagttaaattaaatattcttttgcctgagaaagtggcggctaaaagtagttttaaagcctcattttaggagtcactcttatgagctattgacttgagctcaatttggtttccagggtgtggtttgtacgtatgatgtacagcctgcaagaaacatagggctagttttgttttaggaaatgaagattaataaccaccagctgggccattaataactttggttgtgtgggacaaaaacaaattcttagataaatttgttatcccataaatattggtgaagcagtaaacttctgagtccaaattagttaagtttctaaggccataaaacactttcacttctgcctttctctttccaaaatatccagctgggacctttctcatgtgttcaaagaacaatatccacttttttcttttgaaagcaatttgattcttatagta

SEQ ID NO: 117743 - DNA, 602 bp, Homo sapiens
ctgcatcctctccatgaggaaagaagtcatgaagctttgtacaaatagatgtagcaagggaatacagttggaaaattaactgttttatttattcatttcttgtaygcttctcttgaaagaataagagccatgctttctttcttcttcccaagagcttcccaggggaaagttaaattaaatattcttttgcctgagaaagtggcggctaaaagtagttttaaagcctcattttaggagtcactcttatgagctattgacttgagctcaatttggtttccagggtgtggtttgtacgtatgatgtacagcctgcaagaaacatagggctagttttgttttaggaaatgaagattaataaccaccagctgggccattaataactttggttgtgtgggacaaaaacaaattcttagataaatttgttatcccataaatattggtgaagcagtaaacttctgagtccaaattagttaagtttctaaggccataaaacactttcacttctgcctttctctttccaaaatatccagctgggacctttctcatgtgttcaaagaacaatatccacttttttcttttgaaagcaatttgattcttatagta

SEQ ID NO: 117744 - DNA, 602 bp, Homo sapiens
ctgcatcctctccatgaggaaagaagtcatgaagctttgtacaaatagatgtagcaagggaatacagttggaaaattaactgttttatttattcatttcttgtacgcttctcttgaaagaataagagccatgctttctttcttcttcccaagagcttcccaggggaaagttaaattaaatattcttttgcctgagaaagtggcggctaaaagtagttttaaagcctcattttaggagtcactcttatgagctattgacttgagctcaatttggtttccagggtgtggtttgtacgtatgatgtacagcctgcaagaaacatagggctagttttgttttaggaaatgaagattaataaccaccagctgggcmattaataactttggttgtgtgggacaaaaacaaattcttagataaatttgttatcccataaatattggtgaagcagtaaacttctgagtccaaattagttaagtttctaaggccataaaacactttcacttctgcctttctctttccaaaatatccagctgggacctttctcatgtgttcaaagaacaatatccacttttttcttttgaaagcaatttgattcttatagta

SEQ ID NO: 117745 - DNA, 539 bp, Homo sapiens
cagataaaggcaaagcaagataatgagagcacacataggaggaaagcraagggaagactgttggcaagtcagattgctgacaacccccacaagcaggaagaggcagagaataattttcctctgagcctccagaggagcatggtccttccgacaccttgatttaggacctgtagcctccagaactttgagagaatagtctcttccttttaaaccaccttaggaaactcatacgcatggcaacagtattttctttactctcatgagcctaaaaatgcacatttgatgttgaacctgcggaaagtgaaagttgggatagaaagacaggaagtggagcccatgggactatcatctcaattcatccacctcctgcgggagatttttctatgtcctttctagtgattcctgcacaccctcacacccaccccaccccacccctaaatactgcctttacaggagcagatatagttccttggttgtataactcttgatggaaacttaaattcaagtgtaaggaaaacagcaaatttggagccagaacg

SEQ ID NO: 117746 - DNA, 539 bp, Homo sapiens
cagataaaggcaaagcaagataatgagagcacacataggaggaaagcgaagggaagactgttggcaagtcagattgctgacaacccccacaagcaggaagaggcagagaataattttcctctgagcctccagaggagcatggtccttccgacaccttgatttaggacctgtagcctccagaactttgagagaatagtctcttccttttaaaccaccttaggaaactcatacgcatggcaacagtattytctttactctcatgagcctaaaaatgcacatttgatgttgaacctgcggaaagtgaaagttgggatagaaagacaggaagtggagcccatgggactatcatctcaattcatccacctcctgcgggagatttttctatgtcctttctagtgattcctgcacaccctcacacccaccccaccccacccctaaatactgcctttacaggagcagatatagttccttggttgtataactcttgatggaaacttaaattcaagtgtaaggaaaacagcaaatttggagccagaacg

SEQ ID NO: 117747 - DNA, 563 bp, Homo sapiens
ttactttttaaaagaaatctattcctttaaccttgaaatcctaatttacataatccattagaayccaatcataaatttcattcatcacaactgtgtccattgaagtaaactggagttgtacatttagaaggagtgctggcttgcagagacagtgaacaaattctcagggtagcaagagaagaaggtacatgaatgtctttctcatatttgggtactaatgttagagagctgtcatagctacctcagtttgcagtaagtggagaaggaagaaacataatccttaaatcagccaccttttgtttttaaaagtcctttcatcttttcaaaaagcatactctggtttgcgtgaaatgataagaactgggcttcaaacacctaaaactgaagcatcttggcatttcccaggtgttccctagtgtatgtgctgatttgagggaatgagaggatgtgtaaattccacactacttcacaaagtagagattctttggatatttctgaaatgctacgttatcaactgcaactgtcttcccagctgtgcctgccatatggatttgtgaagtcct

SEQ ID NO: 117748 - DNA, 454 bp, Homo sapiens
cccattccaggtattcaaatggagctactctccattttctatatatactttatacactttgcttctgtattgttacctaaaattgcctttgtttttagcctagtgcatgtccaaattctaactactcattgaagtgggggtctgtaaactaaatgcacgtggattaccttagaaagaatccataaattactgaaattaaatacaagatgctgggcttgtaaattttgcaggtaagaaacaattattttcatcacatgactaaaggggtctctgacatcctcagtaaaaaaaasttaagaacaattgtaacctagagcctagtgaacgagccaccttttccatgaagaggtccttgatctcttcagcccacaggtagaaaaggttgacagaaccgccttgagggcaaaatcaacacctttcctcacaagattcctccaagagatcataaatgttt

SEQ ID NO: 117749 - DNA, 573 bp, Homo sapiens
atgaggcattaaattcactgctatttcttcaaaccaccacgaaacataactacatgtcaaaaaaataatcagataatgatagctgttttatgggtggtatttttaatatcattattgccattgcaaacccaagcaaaatgaatatgatcatttcagcaaaatccctggtgagtaatagtgtccattcagaggcaaagctcacatcttagaatgtctgtctgtccatggctgttttaaaaggggcttatggctgtgtaagttatgtttcgcagattgaggagggcttttctgagttaaaatgtctgatttggccattcagggttaactggtaaatgaaaatgaagctgaaaaacttggtttgaggatccaaagtgttcctctacctttttctctaagagagttgtsagctctgcctattctgagagtcaacttaaacttattttattatctgtcttgtttggcgtcatttctgggtgctctcactctctctctagccatatataaacttgtgacctgatttcacactatcttcctagttctgaccttgaactccaatagaatcttggtcccagt

SEQ ID NO: 117750 - DNA, 573 bp, Homo sapiens
atgaggcattaaattcactgctatttcttcaaaccaccacgaaacataactacatgtcaaaaaaataatcagataatgatagctgttttatgggtggtatttttaatatcattattgccattgcaaacccaagcaaaatgaatatgatcatttcagcaaaatccctggtgagtaatagtgtccattcagaggcaaagctcacatcttagaatgtctgtctgtccatggctgttttaaaaggggcttatggctgtgtaagttatgtttcgcagattgaggagggcttttctgagttaaaatgtctgatttggccattcagggttaactggtaaatgaaaatgaagctgaaaaacttggtttgaggatccaaagtgttcctctacctttttctctaagagagttgtgagctctgcctattctgagagtcaacttaaacttattttattatctgtcttgtttggcstcatttctgggtgctctcactctctctctagccatatataaacttgtgacctgatttcacactatcttcctagttctgaccttgaactccaatagaatcttggtcccagt

SEQ ID NO: 117751 - DNA, 497 bp, Homo sapiens
gggccttgtcttcatgaagaagctcagtgaaaaagcaaaacaagcctgcaatagcataaattaggtcacaattaagccaaatgttctaaatatatggatactgttgagtacaatggaattttatttattacaagttgctgcaataaacacgactactgatttgataacacatgcaatgtatttataaaccataaatgcaataaacaaaatatatatttacaaatcacacataagatatgtttgttggcacaggggagtgggcctagacactgtttctaaacctctgttaccagacaagaaagcaatgcagaggctgagactgtgctacttcacacatttggtacgtgacacaayggtgtcccacccaaggtccagtcagcattagtagtgttcagacctggcacactcctccacttattttaatggagtgtgcatagcactgatgtttgtaacctgaagaccacacggacaaactttagagaagactagtaacatga

SEQ ID NO: 117752 - DNA, 584 bp, Homo sapiens
aaaagcaaaacaagcctgcaatagcataaattaggtcacaattaagccaaatgttctaaatatatggatactgttgagtacaatggaattttatttattacaagttgctgcaataaacacgactactgatttgataacacatgcaatgtatttataaaccataaatgcaataaacaaaatatatatttacaaatcacacataagatatgtttgttggcacaggggagtgggcctagacactgtttctaaacctctgttaccagacaagaaagcaatgcagaggctgagactgtgctacttcacacatttggtacgtgacacaatggtgtcccacccaaggtccagtcagcattagtagtgttcagacctggcacactcctccacttattttaatggagtgtgcatagcactgatgtttgtaacctgaagaccacacggacaaactttasagaagactagtaacatgattctggtttaaatattccttctagattgtttcaccaactctctcaggacacagatatgacttctctgttctatcaaagtgccagcatagttagaatttactacgtttctaaaacctt

SEQ ID NO: 117753 - DNA, 627 bp, Homo sapiens
gaactttcatgtattccctactcttcatttctatcattctgcaattaatttagagataaaacttctaggttactataatagctgtctaatactctttctgtttctgttattgcctccctttaattcatttctcatattgccaattttgtgatcttctaaaattcaaatctgttcaaacttctacctggcttaaatctgttcatgaattccccacagctagagaatgaaatctagacatttaaagcatttctgataaatgttatgatctcagccctcrctctttctccttttgtttcatcctgtgatcaccctatgtgaatggctttgaaattccataaatacaccatgctttgctaaacttccgtggtttgctccccatgcttggagcagtcttctctcacatctgcctctgcataattcctacatctcctgtatgttttagctcagtccttgtttcctctagtaggccttctcagaacatctcagcccttgctttcaatctggattaataattgcttctctctgtgctttcacagtagcttgtgtttaacctctatattgacactaatcaaattatattgtaattgtctgcttggtagaatattgttttgaaatattaatccagat

SEQ ID NO: 117754 - DNA, 627 bp, Homo sapiens
gaactttcatgtattccctactcttcatttctatcattctgcaattaatttagagataaaacttctaggttactataatagctgtctaatactctttctgtttctgttattgcctccctttaattcatttctcatattgccaattttgtgatcttctaaaattcaaatctgttcaaacttctacctggcttaaatctgttcatgaattccccacagctagagaatgaaatctagacatttaaagcatttctgataaatgttatgatctcagccctcactctttctccttttgtttcatcctgtgatcaccctatgtgaatggctttgaaattccataaatacaccatgctttgctaaacttccgtggtttgctccccatgcttggagcagtcttctctcacatctgcctctgcataattcctacatctcctgtatgttttagctcagtccttgtttcctctagtaggccttctcagaacatcycagcccttgctttcaatctggattaataattgcttctctctgtgctttcacagtagcttgtgtttaacctctatattgacactaatcaaattatattgtaattgtctgcttggtagaatattgttttgaaatattaatccagat

SEQ ID NO: 117755 - DNA, 428 bp, Homo sapiens
caagcagtatcttggattgctcttgggaaaaatctctctacattcttcacccttaggttactgtcacccttcattactactacaaatcttcctcaagacaagtttcaggctggggatatacattgaagaacttcaactctttcttaagttcttaagtgagagagcaatctcatcagcatattttttgaaagccactgctcagatcaaaagcaggcctgggaatgattcaggaagaaacacttggctcttgtaccatgagacctgaacctggaatttctcttgaggtcttccttgatggacggaaygcttttattcttcttattcaagaaaacgagttcacataggtcatggtactagtaaccttagcataacaagaaggaaggatggaattataaaatgctcttgggtatgttttttcttctccttca

SEQ ID NO: 117756 - DNA, 396 bp, Homo sapiens
tgggagatttggcatatgcctcattatatccccaccctcgctaacagtcgttaggttttcttccttaacagctaaacagaaaccagcctttccaaaagactactagcttatcttcccagatacgtaacagtccagatgagattcattatgytcaccttattttatgtaagatgtagatttaccaggcactaactaaagttttacaagtatgtaatcatttgtctcactgctgccccaccacctcccctgccttttaaggaaaatatataaatactaaacctcctaagaacctctttggaaaaaacagtcacacatgcttctgtgactctctattttcccaggtatgccttcaagctggctcaacaaagcttgatgctttgaaacttatgcttcaat

SEQ ID NO: 117757 - DNA, 423 bp, Homo sapiens
agaaacatgcgatggtgaccacaaaaggaatctggcagctgaaaattctgagtcactatcatgtcaaactataaaaattttatacaacttaaaaaaaaaacctgcactaatcattaatttatattattgttaaaattatcatacagtaaaattgattttttttccttttgatgtacagttctgaaaccacctttgcaaaaattgcaacactgagaaaactttgacagtgaaagaaatttgacctaaccaactccacmttgcctttaacctccaaactgcccttcattcctgggcatggcctaagctaactttgggagaaatttaggttatagtttaaatgataatagctctttccaaaactaaactgcctttgtaaaactaatgaaaggccaccagtttacgaagataggagggcctgaattc

SEQ ID NO: 117758 - DNA, 637 bp, Homo sapiens
agacacatatttggcatggttctggcttccagacatctctatccgcataggactgaccaagatgggaacatcctccttcaacagctgaaaaacaagttagatgacgtgaagtttccttaggttttgctgaaaggtgatttttgttactctgttaggactattaacaatagccaaagttgaaaaggtttgaaacaaataatttcttcctttcattagaaaattatacttgccctatgtaatttgctaagtagcaagaaattaattaaaatatcatatctgcttgttaacataaaattggcacaccatagtcaattttccttaagaccagcagatattttaatttcatctatagtaagaattaacatcaatgtatatcacacaagcatttaaacatttatttattaaaggaacattgaaaataagctcttctacccaattgctattctttgccttaacagcagatgggagcattaaactaaagagatgattttgtcactaactctgaagactttctggattttatyaacctagttgagaaattcaggggaaaactgagctaatcttggcagcataaaactctaccagattttcctgggaaagttttaacagaacttattatgtgtattgaatgtcactg

SEQ ID NO: 117759 - DNA, 623 bp, Homo sapiens
tgaataagtatggacatatactttccttgctgttgagtaaatactaaacatagaatgacggggtcatgtggtatatgtttaacttcttaagaaactgaaaagctgtttttcaaagcagttgtatcattttacacattttacatttgtactaatagcatataagagtttcagttgcaatgcatcctcatcaacactttacactttaattttagactttctaataagtgtgtagtgttatgaaattgctgttctaatttgcatttctccagtgattaatgatgttgaagatcatttcaatatacttattaccatcaatttatattctttaataaaagtgttcaaatmttttgcttttttttaattgggctctttgttgtcttactgagttttgagagttctatatatactctggatacaagggttttttttattagatatacaatttgcaaatattttctttcgatgtgtgacttctcttttcaattccttaacaatgttgttcaagagccagttttttacttagataaccttccattttacaacactttcttttatgtattatgattctggtgttgtctatttagtcaacccaaggttaaaacaatgtgttctcatattttcct

SEQ ID NO: 117760 - DNA, 623 bp, Homo sapiens
tgaataagtatggacatatactttccttgctgttgagtaaatactaaacatagaatgacggggtcatgtggtatatgtttaacttcttaagaaactgaaaagctgtttttcaaagcagttgtatcattttacacattttacatttgtactaatagcatataagagtttcagttgcaatgcatcctcatcaacactttacactttaattttagactttctaataagtgtgtagtgttatgaaattgctgttctaatttgcatttctccagtgattaatgatgttgaagatcatttcaatatacttattaccatcaatttatattctttaataaaagtgttcaaatattttgmttttttttaattgggctctttgttgtcttactgagttttgagagttctatatatactctggatacaagggttttttttattagatatacaatttgcaaatattttctttcgatgtgtgacttctcttttcaattccttaacaatgttgttcaagagccagttttttacttagataaccttccattttacaacactttcttttatgtattatgattctggtgttgtctatttagtcaacccaaggttaaaacaatgtgttctcatattttcct

SEQ ID NO: 117761 - DNA, 543 bp, Homo sapiens
tttgcatccttcaatccaatcaagttgacactccgtattagccatcacaggggcatgctaagcaagaattgtgtctatggctgtaatcacaaagttacgattattggagtaagctccacaaaccagagtcccttgtccaggcctccagagatccaccagacacttgagtatctcgaaaagccagatgggagaagcacgttcacccacgcaaacctgcgcagccaagaaaatcaagtttctttgttttatgctaaacttttatcaactgactgtggtagtcgtggcattctcatgccattcagaccctctgattggcaacagtatctttgttcatttgataacaaataactcaaattttaaattaaagwtagtcgacaacatctttcaaaatcttggaatcgtgtcgggggaaacaaaatacaagagatatgatttgatgtgaaagaatttaggacctcttggctttgattaaattagggtgtgcttctgttgtttcactgggattgtgaaatgttgggatgaggagatatgaaaaatctatag

SEQ ID NO: 117762 - DNA, 463 bp, Homo sapiens
ctatggtccttcactttagcacagggcgctgcccatgcaaactctggactttccattcaaattcattattagtctttgctgtcaatgagttgaaccctttttttcctgaacgccgtgagtcacctcccataactagccttccataaaggtatttaacttgagtgtataaattgagtctatctcagggcaaccacaattgtataaggctgtgtgctgtgtttccaggagaatctttgggtccttatgtctttccaatagggttggttccaccktcactttaatgttcctcaagaacaaagacaatgtgttctacttccacaataatttgcataaatacatatgcaatatcttttgcaatatgaaccctcaggatgtcaattcaggtatttttcttttttgtattctgacttctctaggaaactaaagtgacacatttcaggtaagtaaggccaagacttaagtg

SEQ ID NO: 117763 - DNA, 584 bp, Homo sapiens
atttttagtcctatttaactttttgaaataaaagtacattaaaacattttttggaattcttagtttgtcataactgctttttatctttttcataatgtatggttcttgcttattggaagaagtcacttcctttgactcttcaagattatgaaatatttcaatatttcatatttttaccttgtattattatcccaactttcttggccgtaagttctcttaatgtttgagtttattgtgcctctggaaagatttggtattacctaattatttctgtttcttagttttttgcagaggaagtcttattttcacaccttatgatgggaatttcctgtagtgagatgtcataatagcaccaacattagccttgaaggtagcttagctttagacttgtctactgggcaagraagcctcagaatttgtttctaaacaatgcagctccagtttcagattcatgatagtaaagaagcagcctttgctgtggtgtttcctttgctttactattttagaaatgcctctccaattcttctttatgaagagctttcttatatgtttttgagtgtggttaagaattttttcattttatt

SEQ ID NO: 117764 - DNA, 652 bp, Homo sapiens
ctgtggcttttccaggtgcacgggtgcaagctgttggtggacctaccattctggggtctggtggatgatggccgtcttctcacagctccaccaggtagtgccccagtgtgggtgmcctgaccccacacttcccttctgcactgccctagcagaggttatccattagtgcttctcccctgcagcagacttctgcctgggcatccaggtgtttacatacattctctgatatctaggtggaggctcccaaacctcaattctatttttttgttttgcttttattatactttatgttctagggtacatgtgcacaatgtgcaggtttgttacatatgtatacatgtgctgtattggtttgctgcacccattgactcatcatttacattaggtatttctcctaatgctatccttcccccaacccccaccccacatctcagttcttaagttctgtgcacctgcaggctaaacaccatgtagaaactgccaagacgtggggcttgcaacctctgaagccatggcccaagctgtaccttgaccccttttagccacagtgagagcagttgggatgcaaggcaccaagtccctaggctgcacacagcagaggggccatgggcccagccctcaaaaccattttttcctcctaggcttctgggct

SEQ ID NO: 117765 - DNA, 652 bp, Homo sapiens
ctgtggcttttccaggtgcacgggtgcaagctgttggtggacctaccattctggggtctggtggatgatggccgtcttctcacagctccaccaggtagtgccccagtgtgggtgacctgaccccacacttcccttctgcactgccctagcagaggttatccattagtgcttctcccctgcagcagacttctgcctgggcatccaggtgtttacatacattctctgatatctaggtggaggctcccaaacctcaattctatttttttgttttgcttttattatactttatgttctagggtacatgtgcacaatgtgcaggtttgttacatatgtatacatgtgctgtattggtttgctgcacccattractcatcatttacattaggtatttctcctaatgctatccttcccccaacccccaccccacatctcagttcttaagttctgtgcacctgcaggctaaacaccatgtagaaactgccaagacgtggggcttgcaacctctgaagccatggcccaagctgtaccttgaccccttttagccacagtgagagcagttgggatgcaaggcaccaagtccctaggctgcacacagcagaggggccatgggcccagccctcaaaaccattttttcctcctaggcttctgggct

SEQ ID NO: 117766 - DNA, 596 bp, Homo sapiens
atctatttctggactctgttttttcttccattgatacatttgtctattctttcaccaacaccacattgtcttgattaatatagctttgtatttaagtctttaagtcaggtagtagcaatcctctgactttgatccccttctttagccttgtgtattctatctgggtctttcgcctttagaatcagctttwcaacatgcgcaaaatgatatgctgatattttgaatgtcattatttgaattcatagatcaaattcggaatagtagacacgatattgagcaatagacatgatttttcactttgcctagaagctaggatacagatttacactgaataaataggtggtggctaatagtttagggctgatggtcagaaacttggaagaagtacagtgggaaaactagtgaaaagatctgagaaagaagtatgtaaatgggcctttcaaatagtcacagattttgaaggtatttgtgcccttgtgaattctcatcaaaaaaacaacttctgcagtagaaggtaataagatggatagaattactcactctgataacatctgtcaacctgttttcttggctaagctgtttattatgagcccgag

SEQ ID NO: 117767 - DNA, 554 bp, Homo sapiens
cagtactccacaagctgatggctttttgtctaaagacaygagaatatgctcagatagaagtctgctagagatttaatgcccacagactagcctacagtcattgagggctagaagttggtgggtaacaaagtttgaatatttgtccctgccaaaatctcctgttgaattgtaatccccagtgctggaggtggggcctggtgggaaatgttttggtcatgggggtggatccctaatgacttggtgctgtcttcatgatagcgagtgagttcttaacaagatctggtcgtttaaacgtgtgtggcacctcccctcccctctctcttgctcccactctggccatgtgatgtttctgctcctgctttgcctgccaggattgaagcctccctgagccttcaaccaaagctgagcagatgccagcaccatgcttcctgtaaagcctgaagaactgttagccaattaaacctcttttctttataaattatccagtgtcaggttcttcatagcaatgcaagaatggcctaatagagtgggcaaatgccctagaatatttgccc

SEQ ID NO: 117768 - DNA, 521 bp, Homo sapiens
cttatgcaataacacataaactactactgtcaaaaaggaatacacaggccggacatagttgctcacgtttgttatcccagcactttgggaggccaaggtgggaggatcatctgaggtcaggagttcgagaccagcctggccaacatggtgaaaccctgtctctactaaaaaaaaaagaaaaaaaaaacaaaaagaaaaggaaaatcactcggacatggtggtgcaygcgtgtaatcccagctactagggaggctgaggcaggagaaacgtttgaacctgggaggctgatgatgttgcagtgagctgagattacaccactgcactccagcctgggtgacaaaagcaaaactccatagataaaattgcatctatttgcatgtgaataccttgaagaatccactaaaaacattttaggattagtaagataaacttctatggatgccaaataaattcccagatacttcacttaatcctctgacaagattattttggtaaaactttttttttggaataacattcat

SEQ ID NO: 117769 - DNA, 554 bp, Homo sapiens
cagtactccacaagctgatggctttttgtctaaagacatgagaatatgctcagatagaagtctgctagagatttaatgcccacagactagcctacagtcattgagggctagaagttggtgggtaacaaagtttgaatatttgtccctgccaaaatctcctgttgaattgtaatccccagtgctggaggtggggcctggtgggaaatgttttggtcatgggggtggatccctaatgacttggtgctgtcttcatgatagcgagtgagttcttaacaagatctggtcgtttaaacgtgtgtggcacctcccctcccctctctcttgctcccactctggccatgtgatgtttctgctcctgctttgcctgccaggattgaagcctccctgagccttcaaccaaagctgagcagatgccagcaccatgcttcctgtaaagcctgaagaactgttagccaattaaacctcttttctytataaattatccagtgtcaggttcttcatagcaatgcaagaatggcctaatagagtgggcaaatgccctagaatatttgccc

SEQ ID NO: 117770 - DNA, 429 bp, Homo sapiens
gagcattgacataaagcatttacttttatatatatatatatatatatatatatatatatatatatataggaaaaaaacttgctgtcaaaatatgcattcagttcttttcagtcattctaaatcatttctacagatcaactcatttttattttttattttttccttgaagttttgaaatagttctaaaatgcaattgggagattccttgaaacacatgctctgacacrtccataactatccatgcattcactagtttcattatacatatattgagcacatttatatacaactctctttggccatataaagaagaagaatgaaatgtgattcctgctcctgcatacgttatgatccagtaatgataaactggcacatgaaaagctactctaagtactgctgtgtacaaacaaaagaacctgaatatgccaa

SEQ ID NO: 117771 - DNA, 601 bp, Homo sapiens
tttaatctgtgtcttttttgacagtatttcactgatgtatttatataaagtatctgctataaccttgtatagtacattacatgataatcatatttgaaccttccttctggggacactrtctctcaagacgttttatgcaccatgtcaacaaggtaaggcacggacatttcatatttatcctgaagagtgatacttccaattctgttcattcttctacttgagaatttattatagcacacatggaacttttgattgtcatcaaacatcttgcaaaataattgatgtgaaagttacagaaaaggacacagaaaaagatggatcaatgtgactgataaagagggactatgaaaataacacctgtcaaaattcccaagattctctttaataaaaaaattgcagctagttaaatatgtttttagagctcattttaccactcttgcaaaaagaaatagtcttaaaataaagacaagatattattaaaattctaagcccagaatccaatcctaaggcatgttgatccattagtagcttaaattatgtaatactctttttagctgcaaatgctacaaatagtggacacttaatatccctcaggaagatg

SEQ ID NO: 117772 - DNA, 601 bp, Homo sapiens
tttaatctgtgtcttttttgacagtatttcactgatgtatttatataaagtatctgctataaccttgtatagtacattacatgataatcatatttgaaccttccttctggggacactatctctcaagacgttttatgcaccatgtcaacaaggtaaggcacggacatttcatatttatcctgaagagtgatacttccaattctgttcattcttctacttgagaatttattatagcacacatggaacttttgattgtcatcaaacatcttgcaaaataattgatgtgaaagttacagaaaaggacacagaaaaagatggatcaatgtgactgataaagagggactatgaaaataacacctgtcaaaattcccaagattctctttaataaaraaattgcagctagttaaatatgtttttagagctcattttaccactcttgcaaaaagaaatagtcttaaaataaagacaagatattattaaaattctaagcccagaatccaatcctaaggcatgttgatccattagtagcttaaattatgtaatactctttttagctgcaaatgctacaaatagtggacacttaatatccctcaggaagatg

SEQ ID NO: 117773 - DNA, 601 bp, Homo sapiens
tttaatctgtgtcttttttgacagtatttcactgatgtatttatataaagtatctgctataaccttgtatagtacattacatgataatcatatttgaaccttccttctggggacactatctctcaagacgttttatgcaccatgtcaacaaggtaaggcacggacatttcatatttatcctgaagagtgatacttccaattctgttcattcttctacttgagaatttattatagcacacatggaacttttgattgtcatcaaacatcttgcaaaataattgatgtgaaagttacagaaaaggacacagaaaaagatggatcaatgtgactgataaagagggactatgaaaataacacctgtcaaaattcccaagattctctttaataaaaaaattgcagctagttaaataygtttttagagctcattttaccactcttgcaaaaagaaatagtcttaaaataaagacaagatattattaaaattctaagcccagaatccaatcctaaggcatgttgatccattagtagcttaaattatgtaatactctttttagctgcaaatgctacaaatagtggacacttaatatccctcaggaagatg

SEQ ID NO: 117774 - DNA, 548 bp, Homo sapiens
tctcatgagatttattcactaccatgagaacagtatggtggaaattgcccccatgattcaattagctctacccggccccacccttgacacctggtgattattacaattccaggtgagatttgggtggggacacagtaaaaccatatcagtaaataaaatagaaataatattattcttaaaataacacgaccctcaaaaagatacattccggtagagtttctagaatggaagtgagtctatgaagttatctgaactacagggaaacagtttctagttgcctctccacctagccattgaactatagcttttatctacatcagtggttgccgaagtgaaatctcctgaccagaggcatcagcatcccctgggaccttgttastaatgcaaaccaaatgaataaaaactttaggggtggggccaaaaatctttgttgtaataaatcctacaggtgatcttgatcacactaaaaattttaaggaccactaatctataagtctgtaatgactgcccagtgtggatgaacttttaatatttacacatttacaaag

SEQ ID NO: 117775 - DNA, 578 bp, Homo sapiens
agagtcccacactgttgtctacactgaactgtacatcttgtactgcagaggatgcggtcagctttattttcctatttgggtcacactcaatgtaactttaattcctcatttggtagcttaatatattgtctgttgaggttacagatttagatgagtgtttataaataaggcgaattaacattgaacttgtaactctttttttctttccwtttgataaaagatattcctaggaagtaggaatagagtataaaaatgtcttaggccattgtaaatttcttgtgtaaatagctctgtgatatgttgcatgtttaaattagcacaatatgtattcattttaaatattgatctttaaggaagtcctacaataaatctgaatactcttttgcattactgtttacattaggtctactatagattaagagacacagttcccttgtaaatttgcttgcagagtaggcaggggcatataaataattctgtttccaattatacaaaacaatgatgataaactattgggagctgtgggacaattgtgcagagcttggctgaatcacagactcagaccaggcttgtgagta

SEQ ID NO: 117776 - DNA, 460 bp, Homo sapiens
gagttagtttccaggcatccatttccaggtaaaaattagaactgaattttgtttgattcatctttagaccttcatgttgaagaaaaatcarttcagacaattctgaaataatctgtcatctcagggaatatgtaacatgagagaaaggaaaggatggttagggaataattgaaatcttttgagtatctactgtatttacttcattttattaaatactcattttccattgtatctgcatttaagtgttacattatccttgggagtctggcatctgatgttgccatcagatgagaaaaccaagacataaagatattttaataatattgccacacagtcctagtagtagagctaggatttgttatattatttgtaccataccgcagtgcgttccatggaagatgtgaggatttaaatttagctctttaaaatccttgtcctatgtctgacttgtttgaatgga

SEQ ID NO: 117777 - DNA, 631 bp, Homo sapiens
tttgtttttttttcttgtaaatttgtttcagttccttgtaagatgctggatattagacctttgttggatgcatagtttgcaaaactttctctcattctgcaggttttytgtttattctattgatagtttcgtttgctgtgcagaagctctttagtttaattaaatctcatttgtcaatttttccttttgctgcaattgcttttggcatctttgtcataaaatttttgtccgttcctatgttcaaaatggtgttgcctaggtggtacccaatctttttaatagatgatgaataaagttataaaaatagctaaccactcatgtagcaaggcatagggacaatgtgtcaacataagatgaggaagaaaggcttcgggtctggagcacagcagggatggaggaaggtgtaaagaacctgttttcaagatagtaggggctagcttcagagtaacaggcatttccattgaggaaagaggatggagagtggactaaaaagaaggaggccagttgaaatggaagagtgaagtcttgaaaagtttttccatcatattcatttaattattttcccataatattttctactccttatgtttgcatttttgaataaaaaagacttttctcattccccctactc

SEQ ID NO: 117778 - DNA, 598 bp, Homo sapiens
ctgcttttggggtatgatgggttatatagtatattttttgataaaagggaacatattagttcattaggagaatatagtattttctggataatagtatctgagaggaaattatgcttttatggagaatattgaataatgattaaagagtattcaacaatggtttgatataagatacagaaaayttattcatttaaaaaaatttcaactttaatacattgtgacattaatacatgtctaaatgaagatctttatactaagcagatgagaagtacaaatatagcttttgggttagataagtctatataagacagatctaggagacccaaagggatatatttgtaatgtccattaaaaaatgccaagatatactgcccaaagcaatctacagattcaatgctattcctgtcaagctaccaatttcatttttcatggatctagaaaaaactattctaaaattcatatggaaccaaaaaagaacccaaatagccaaagcattcctaaacaaaaagaacaaagccagatgcattacattaccagatttcaaactatactataaagctatagtaaccaaaacagcaaggtactggtacaaaaacag

SEQ ID NO: 117779 - DNA, 436 bp, Homo sapiens
accgttaaattcctcccaatattatgatttcacttaaagaagttttcttcatcatcacaaatattgccatgctaaataatgaattctaattaagaaaagagaatttttagtaaagaaaaaaattaaatagatgtttgtattaattctttaatgattgcaacctttaaaatttaattatttcagatttcacttttaaaagtttaatayaaaaagttagagtagaagcacagcatttggggctagtttttaaatataacaaaataaaatatggaaaagtttgcttctaccctgaagaaacttccactgagaacagtaatgttggttaaaatgaaaacatgcatttcaagctgaggctcaggcttctatctgtgccgtcggtgcccttgctttttgcggttgctgctcagtcacatgctcaaacaaacaaacaaaaatg

SEQ ID NO: 117780 - DNA, 515 bp, Homo sapiens
ataaagaaattatgctatagggaagtaaaagtcttaataaaaagactagaatgattttgttatcccttagatagctcaaagttgcattaactcatgatgtttcttcttttttcttttgggtaatattacttcctagaacaactacaaagtaatattacttaaaagaaaatggactgtggctctcaggtttgcttggtctatgtgggcctggaaattctagtaratctatttgctcaatagggtttcctatctattattcatcatgggtctctcctattttggagaaatacttaaaaatcatggatattttcatgctgtcaatatctaggattcatttggcctaagaaaagctgaaagctgtgtagtttgacaaaagacttgccaagaaagttaaatatatctagttctccttttcccatgtttgacatttccatggaggaagggagacaaggaaagaagttgcaaatatattagcattctttctgtttttctctgcctgatatactccatggaat

SEQ ID NO: 117781 - DNA, 595 bp, Homo sapiens
ttcagataacttccttaaagaccagaaagaaagatttaaaaaaaattccagctccttccttttggctcgggtcttccaggtctttatcttgatgaaaactggaggcaaagatgttatctctggattgtagtcagagaacaacaaaaacccccatcttttctttcccaggaaaatattaatcaaaatagaaataaggtgagattagaaccttagaaggttttgcataatacttttcttgtttgactgtttctggcctgtcttaatccaataatctattaaactctagctagtactttctttcttcatccccagcaaatttgcaatcctccagaatccttttgggaattccaaggcaaacggccttaaacaagaacataattgtctgagagattttktttgcttatcggaactgtttggtccacagcattatctgcatgggggcataattcccttagctgcagtcagttttacaggtctttgctcataggattacagttcttttacataaaaggatgcttggaatgggggccaccaagagtgccaatatttagtatctttaactgagctcaaagtaataactacttaactagaatca

SEQ ID NO: 117782 - DNA, 625 bp, Homo sapiens
tgtgggactttgttgactaggtgacatcaagggaaacagaggcaggcttcttctgtggaataattgtgcatccttcctgcccttctaggggtcctgactatctccccagcccccagcctcccaggctccaatctgcaacaacaaagagatagaagctctgataagaaacacaggtggctgggcgggtggtgtgctctgtagtcccagctactcacaaggatccccttgagcccaggagttcaaattcagccggggcaacatagcaagaccccatctctaaaacaaacaatcaaaacagaatttctttgctaattacttttgacataaaaaaacaaaagaaagaaacacaagtgattgtagcaccaggacccctgaagctagctgaatatgttcctgcctctggcagagtaaatgttctctacttttgagtcagaccagtgaaggccaaccttcgtcttaggaagaagttgtggtgccaacataagctttggagccaaacagacttagttyaactaccagcctttacctagtttttggtgctcccattgactagtctgcggcaacagatgagttaaaggagatgttgggtgtgtatcctaacacactgcacaggctgtgttgcaga

SEQ ID NO: 117783 - DNA, 520 bp, Homo sapiens
gcaacagatgagttaaaggagatgttgggtgtgtatcctaacacactgcacaggctgtgttgcagaatagtcagtaaatgtccattttctttcttcacatacaccttcttctttctgcaccaataatttaagtaagaactttctattttctcctctaccaatctcagaactgtctagatagaagttaaaaccacctcactctggctcgaggaggagggagaaggaggcagggtttcatttcaagatcagtcagcccattgcagctggctgtcctgcagcttcaggagaaacaccagtggtcccacagctaaccragatggtgcctgtcaggcacaacagcttgatagggacagccgcattccctgtcagattcttgataaagtacagcacatgccaggaattctgtgggcccttcaggcacttgtgctgttgacacccctatggctcaaaatcagaagctgtctctgaatttgatgaggtggtagagttggatcctttggcattgagggaagaatggcag

SEQ ID NO: 117784 - DNA, 538 bp, Homo sapiens
gggaaagggatgggaagaagaggagaaagagagaacagcatgtgcaaacagagggaacagcacatgcaaagcccagtggcaagaaagactatggcgtggtgaaaaattgggctaaagacaatatgaccagggctggacactgagggtgagagtgaaatgcagcattggggaagagaaagtcaattcctaattgttcaggaaaggtgactgggtgataggcatgaccagaagaagagaggtttcctatgaaactctgtactggaaatagagctgccacaataggcaacaagaactaaggtacctagaacaaaatgctctgtcattttgttccctgggagagtagagtaaaattcaattgaacagaggttgagacagcctattgataatttaaagaaaaaaawtttaatgggctaggtcatcatacaggcatattaaaatgtaaaacagcagaaccaaatcaaatttctctttgacaggcttgccctggttttataatccctctttcaggggagactctgttgttgttattattattatt

SEQ ID NO: 117785 - DNA, 538 bp, Homo sapiens
gggaaagggatgggaagaagaggagaaagagagaacagcatgtgcaaacagagggaacagcacatgcaaagcccagtggcaagaaagactatggcgtggtgaaaaattgggctaaagacaatatgaccagggctggacactgagggtgagagtgaaatgcagcattggggaagagaaagtcaattcctaattgttcaggaaaggtgactgggtgataggcatgaccagaagaagagaggtttcctatgaaactctgtactggaaatagagctgccacaataggcaacaagaactaaggtacctagaacaaaatgctctgtcattttgttccctgggagagtagagtaaaattcaattgaacagaggttgagacagcctattgataatttaaagaaaaaaaattyaatgggctaggtcatcatacaggcatattaaaatgtaaaacagcagaaccaaatcaaatttctctttgacaggcttgccctggttttataatccctctttcaggggagactctgttgttgttattattattatt

SEQ ID NO: 117786 - DNA, 671 bp, Homo sapiens
ctttcacaaaccatgaatgagttgagattgcagttttcagaagcacaggtctcgtccattattctgataaccgatctctttactgccttacaatacatcttattttgtttcttaacttcactgtgtttatatctcatctctctcaagacctgattaaaagtttcaaaacagacctcaaaaagaacaataccaataatatctaatactttttttggtcatgttcaagctgggcactgtactaagagcctttccatgcagtgtctaattgtttccacacactactatcaggtaggtattatccactatgacatctctcatcaccactttcaccccatgtgacaaaggaaagacttcatagcttggaaaggttaactggcttgcccaggacagctacaaagtagtagagccaagtaagccaagaaggtctggtctgattccaaaccctggtgttcaccactaggctccttcctccccactttctttttgcaaaattgtttttttaaagacagggtctcactctgtcmctcaggctggaacacagtggtgcaaccagggctcacttctgcctcaaactcctgtgctgaagccatgctcccacctcaggctcttgagtagctgagactataggcacataccaccatgaccagctaatctttaaaacattttccagg

SEQ ID NO: 117787 - DNA, 554 bp, Homo sapiens
gtatctaccttatagcatggttgtgtgcttatatttataaggcagttgtgacaaaatcgtgtagtaagtgctgtataatcgtttgtggtttcgttcttattgttgttgttgcttttattatttacataaagcatagattaggagaccatggaatttggcatttttccttgttatcctatctccaattgggtatgtttgtaaacagttttggaaaaattcacataccaggggatgcttccatcatacctgcaaaccatcatagttttacacacacacacacacacacactcacacataatccatctgcataygcactctcaaaatttttaagtgactgacaattacagtcacaccagtttctcttttgaacatcattgtttaagtatgtagtcttaaatccaaaagtccctgtagtgaaaaatactattttttcactttaatggaatatgagcagaactatacaaatggagaaaatggaacaagcaaagcagagatgataagctcttctgccagaccactgatttcctcctccccaatcctctcttttatgaaca

SEQ ID NO: 117788 - DNA, 414 bp, Homo sapiens
tagaattcctttcttccatctccagctgaaaacacactagcctttcttcaaggctctcctccaataccatctcctccatcatgaaggcagtatttgagctggcactgggcatgaaaggccatactcctcatcaagaataatctcttttttcttttaaatcttggtaaaatattgtaccttttctatggtacttagcatattctgctctgcctctattgacttataccttgacttctgcctcctaaattgtaagttactgaagacaccagtggcatcttctgcatttttgtaccctgcaacaattactctccccrgtgccaagaaatgtgtcttgtaaatattaaaggtttaataaatatttggtgaccaatttaagagccaacactatctcttcatcaaaatatcccttctctc

SEQ ID NO: 117789 - DNA, 595 bp, Homo sapiens
gaataattaattgcattaattgtccactaggtggtagcagtgcagctgctacaatgtgtcacacactcatcttcaaactcatttagtaatacatcatttaaatagacagagaaccatatgtgaaaaaaaaaaatcccattaatttgtcagcaacattggtggtaatttaaaaatagatgtaatttagctaaatattcttcctcctactctttaagttatatccactttgtgtattggagggctaacatagccatagttacctgagtgaggtaatcttgctggaggtgtatcattaaactcctgttccacaggatactcccttgctatctctggcaagtaacaccaacccctgactaagggaagctgtggcccaaagtatggaaatcttggcaaaccacaaagaactctcctaattccctaaattgaatgctttaaaatagaaattaggaataatatatgtggactgcttktttaaaattccaaggaatttttaagggtaagaacaaagaataggaaagcaaatatgcaaatattcttatttgaaatcccatgtatctgagatgtcctgcacctgagaaatttttactatgaccac

SEQ ID NO: 117790 - DNA, 598 bp, Homo sapiens
acttacatgctttgaatgccttaaaaataatgtacagggcatttgtttggcagtgtgcttttatttatttccttacttattcctgtttcttttgcagaatgccctggctaaagctactgtgaaagaacttgcctcactgcacggcaccaagtacacatatggcccgggagctacaacaatctgtgagtcttggcttcagaactgtgcaaagaaccatgtgcctaaaaagccaacgaaaggttcctggggcctttcttttctgatagtttaaagcatgtggcttttgcctcacagyaaatttttctaaaatatgtaatcagttttctgttcaaaaaaaaaaaaaggagggaaagcctggacaacatagcaaacttttctctaaaaaaaattaaaaaattagctggtcatgcacacctgtaatcccagctactcaggaggctgaagcgggagagtcacttgagcccaggagttctaggttacagtgagctataattgcaccattgcactccagcccgggtgacagagcaggaccctatctcaaaataaaaagggaggaggagaaaaatatccttttcaacccacagagacatttcctccc

SEQ ID NO: 117791 - DNA, 590 bp, Homo sapiens
  misc_feature (1)...(590): n = A,T,C or G
tatgttataacaaaatgacattaaagaaattaatgctatctctagactttctatactgcaaatgtggtgtgtaaactgcttatatctttaatatgataaaaattactttcactgtaacttgttttacttgaagttgcagctaccaagaccttacaactattttaagataggacttatgtatcagagtattcttagtttccctgtaaatttgctcttaccagtgagctgtataccttcagatgttttcttgtcrcacattagcatctctttctttcagtttgaagatctcactttagcattttttgtaagacaggtctgatggtgatgagttatctcagcttntatttttattttttggtctgggaaactatcttcatttctgaaagataacttttttggatacagaatgcttagttggcaatagttgtcctgcagcgttttgaatatatcattccaccccctctgatctatatattttctatgaacagtatatgaccaggtgaattagaattctcatatataaaatgtacttattttcccttgctaatttcagaatcctctctttgtctttgaaatttgagaccctgatt

SEQ ID NO: 117792 - DNA, 595 bp, Homo sapiens
  misc_feature (1)...(595): n = A,T,C or G
tcaaaaccaatcacagggccatccagatctgtgagaaggggggataggctatattgctcagtagaagaaatagcaaaggatgtgtagcccctttcgatctaacataagtgtcttcaggagaatggaaggagacgtcttctataaaactgatacagaaagaaataaaaaaagattcagaaaaaatagaaactcgaagaaaaaatttaagaatggattataaaaatatattttataagtttctgtccttttcataytttaagtaatgccttttgtcagattatcagtgtgcagtgtctttttatgatacttacaagatattgtgaatattaataatgaaatctaaaatatgtaagtgttctgaatgtctttgtttgctagcgttttntgtttgctctctgttaacttcttagctgtggatttgggttgaactggttggtagggttaatgaatctcaatcaattttagatggaagaaatttaagtattgtacacacctctgctaaatttcaagtttaaagaatactaacttaaggtaaatacaaaatgtcaacaacaaaaactaatcatttagctagtctttttcctggcaagtccta

SEQ ID NO: 117793 - DNA, 595 bp, Homo sapiens
  misc_feature (1)...(595): n = A,T,C or G
tcaaaaccaatcacagggccatccagatctgtgagaaggggggataggctatattgctcagtagaagaaatagcaaaggatgtgtagcccctttcgatctaacataagtgtcttcaggagaatggaaggagacgtcttctataaaactgatacagaaagaaataaaaaaagattcagaaaaaatagaaactcgaagaaaaaatttaagaatggattataaaaatatattttataagtttctgtccttttcatactttaagtaatgccttttgtcagattatcagtgtgcagtgtctttttatgatacttacaagatattgtgaatattaataatgaaatctaaaatatgtaagtgttctgaatgtctttgtttgctagcgttttntgtttgctctctgttaacttcttagctgtggatttgggttgaactggttggtagggttaatgaatctcaatcaattttagatggaagaaatttaagtattgtacacacctctgctaaatttcaagtttaaagaatactaacttaaggtaaatacaaaatgwcaacaacaaaaactaatcatttagctagtctttttcctggcaagtccta

SEQ ID NO: 117794 - DNA, 573 bp, Homo sapiens
cccctctaggtttccaaggagatttctaacataaagattaatacaataccaacaatcttgacagcaatagggtttttttttatttgttgcttaaatatgagcattatggtatgttccaggccttcccagtctgctgggaagggccaaagctattgaaaactataaaaatagtgacacgggaatctggaggctaaacttccactggaaaaatgtcctcacctagggatttttaaatgctactttagttttattttcaaataatgctttcctttctctgaggaaaattagaaaccaagactaagtaaataattacagaaatattatctaaatattctttgcgtctctccagaaaaaaaaaaaaaagaaaaggactacaaaacacaaaacagtaggtttttggtattgatatgaaaggccatgagrgcagcaatgaagattctcatgtgttttctcaaactgatgctatctttgggtcctattaggttctttaagccaaaggccattgggagccaaaactcatagtcccagcctgtgctcagccacctccaactcttcaaagtagacacacgaaag

SEQ ID NO: 117795 - DNA, 573 bp, Homo sapiens
cccctctaggtttccaaggagatttctaacataaagattaatacaataccaacaatcttgacagcaatagggtttttttttatttgttgcttaaatatgagcattatggtatgttccaggccttcccagtctgctgggaagggccaaagctattgaaaactataaaaatagtgacacgggaatctggaggctaaacttccactggaaaaatgtcctcacctagggatttttaaatgctactttagttttattttcaaataatgctttcctttctctgaggaaaattagaaaccaagactaagtaaataattacagaaatattatctaaatattctttgcgtctctccagaaaaaaaaaaaaaagaaaaggactacaaaacacaaaacagtaggtttttggtattgatatgaaaggccatgagggcagcaatgaagattctcatgtgttttctcaaactgatgctatctttgggtcctattaggttctttaagccaaaggccattgggagccwaaactcatagtcccagcctgtgctcagccacctccaactcttcaaagtagacacacgaaag

SEQ ID NO: 117796 - DNA, 609 bp, Homo sapiens
tagtaagggaattgtttagaactgtatgttgaattggtcccatgctatatcctgagtctataaaaaaagagatatctgtattttatataggtatttctcctaatttttagtttgacccttcacagtttgttgacatccacgactagctatggtgtggggaaaatggcttctattttatmgtagcattactctcactcaccacttacgacagctaacattttctgtcactaagtgaggaatgaacactaaagataaaaataatgtaccctaattagcataacaatataatcaacatggtctgtcttatagtttctaaaacatgcccttgaatcctatattctatcccaggacctaaactccttttcctcttctacctctcccaaattatatgctaatgatagcacaaaagtatcctgaattctagaaatgtgagccctatgcttgcattccttgacccagaggccatagggaaaagaattctaaagaatacaaaaggaaagacatctagcagaatgaggtgacttacctaccaaggcaagagtgacatacatgctaatagcaaaacccccatttcaagttctagatacgtgctgcccaatagaaaaatca

SEQ ID NO: 117797 - DNA, 495 bp, Homo sapiens
aattatcaatcatttataagaataaaggctttttaggcattcgaggactcaaaactgattctttaacatatgctttcttagaatactgctgaaggatgtgctccactaaaagcaatagagtaataggaggatacagaattcaggaaacatgaactccatccagcaaaggagagtagtgaaggatgacagcagagcaattggtccagattgaggcaggagatrgggcagagagaggttctcaaagaccaaaaaaaaaaaaaaaggaactgataaattatctgatacatttaaccatatggaaatagcattgtgaggcatttttaaaatatatggagtataagaaacaaaattgttaaaaaatggaggcaattttttactccaaaaaagcaaaaagttgtacaggaaggaaacataatcaaggtacattacctaatggggcaataaacagtatctatattatgattataacataagcattgaatattaatttacctt

SEQ ID NO: 117798 - DNA, 550 bp, Homo sapiens
ctactgtgtgcaaggggtttgagcatatagtcagagtagtggccacaatacctcttttatatcaagcctacctcaagcaattcaaaggcaaatggctttctattgtctcttatgattagaaaaatggaataaaaggtctaacattgagcacttcagttagatatactgcacactcttcaatgcaccaagttcctttttgacaccatgctatttattgcttctgttattgccctgactttaggggatatccactccccaacctgctgtactattcaattctgatccttcttttttgatcaaatttgaccttttccaaaaagtttttgctcccaaccttcaggcaatcatgataatgacaatatctttctttcatagcctttactattagtaccatgccctttggatcttcaactgagtaacagcatatactgtcttgtattggtcttgaatcttgcaggtttctaacacttgaatatacaacratacagtaagccctttaaggataaaggtcaatttatatttgttcagttaatatttgctcagtactggc

SEQ ID NO: 117799 - DNA, 557 bp, Homo sapiens
tgttggctctagccaggctgctcatttgtcagcactgaagtgacatcatccaaattcacaggcagatgcccaacttgatgaaaactcatgattcacccagaatctgttgggcatacacagctgactgggtgacctctaaggccccttctggttttttaattctaaagttctgtgatcccaagttgctgccatgaacctggcatgtcccagaaagtgcactcaggggtatttccaaggagttttgtgtctaggtgccagtgcattttatgtgaaaaatgaaggctcactatgccaagggaaagaaattgccaaaaggcaatttccaacaaaggaatggctgtttctatgygcccatttttcctaagcagtcctctaaatggtatacaaacacagggccattatctcaaccagtttctacccaggcaatgagatatttgtatggcagagatcttactcttccttcttcctggttgcccatagatagaattcccttaggaccatactacagaagccacgccccacccctttgctattagcaatctgtctccccttctgcg

SEQ ID NO: 117800 - DNA, 572 bp, Homo sapiens
aagtgctgcttgtgaccagccagaaaatgtgtgtcataatgatatcccagawaagtcttggaatcagggcatgatgtttctgagccaaaagtctacctgtgatatctaaggatgaaacaaaataaatatgcatacttaacataatctaaatatcattgtattttattcatctatttgcatgttggttaccttcactagtctatgagctctttgggaacaataaatgtctttttaattaatgaaaacagtgttaccctgacatgacaaaaattttaaattgtatcctgaatttgagacgtagttgaatattagtatcaagacaaaggtgcatttatctcagaaatataaaactaatttatcattaaaaaaatcaagcaacatgattcatatattaatatattttaaaagaagaatataactatctcaagagatataaaaaagtgataaattcaacttgattattgataaaaaatttcttaaatagtaataaaataaaataaaattttcttaaccttattaagattagctacaaaaatatctatagtacatttcatacattactgtgaaatatt

SEQ ID NO: 117801 - DNA, 592 bp, Homo sapiens
tctcctttcccacattgcagtttttatactcatagtaatcttgaggactgttgaaaatatataagaaatgtcttcatattttaggaccttgtgtatagtaggatgctattagtgtgattaagatcctacagaatatgatttagtcctatcygtaatctaatcgacatccaactcatttcaagtgtttagcacagagatgaagaatggggagttattacgaagaggagttgaatttcaatttcaaaaaagtacagcagttagggacgctaggcatatactaagaaacagttcatgaaatataggtaggccttggagatattgtgggttaggttccaaaccactgcaataaagcaaatatcacaataaagagagccacatgaatttttttgttttccagagcatacaaaagttatgtttacactatactataggttatgaagtatgcaatagtgttatgtctaaaaaaataagttattaattaacaacactttattgctaaaaaaatgctatcatctgaaccttcataaagttgtaatctttttgctggtcttgcttcaaggttgatggctgctgactgatcaaggtggtggtt

SEQ ID NO: 117802 - DNA, 592 bp, Homo sapiens
tctcctttcccacattgcagtttttatactcatagtaatcttgaggactgttgaaaatatataagaaatgtcttcatattttaggaccttgtgtatagtaggatgctattagtgtgattaagatcctacagaatatgatttagtcctatctgtaatctaatcgacatccaactcatttcaagtgtttagcacagagatgaagaatggggagttattacgaagaggagttgaatttcaatttcaaaaaagtacagcagttagggacrctaggcatatactaagaaacagttcatgaaatataggtaggccttggagatattgtgggttaggttccaaaccactgcaataaagcaaatatcacaataaagagagccacatgaatttttttgttttccagagcatacaaaagttatgtttacactatactataggttatgaagtatgcaatagtgttatgtctaaaaaaataagttattaattaacaacactttattgctaaaaaaatgctatcatctgaaccttcataaagttgtaatctttttgctggtcttgcttcaaggttgatggctgctgactgatcaaggtggtggtt

SEQ ID NO: 117803 - DNA, 593 bp, Homo sapiens
atagtattaattgagttgaaaaaaaatcaattgtaaaaaggcaggatgaaggagacatagcgaagcaattgcctatgcctgtttcattcagtggtttttttaggacttgtagaactgtaggtaggatgggctgctactgagattttgtttccattgttgttttgttggttttggggccgagatgagagcctttgagtcagggcacacttctgttctactcacttctgataaggatgaaacatacatattaggaagtcattttcattctcctgtatctcagctgatcatttatgctgacctacatattcccatttggattagttccttcttctgtttaaattctgttattgagtctgcaaatctcagattactcctaggtacttctgaattgtccaatggtccaaagaaattacagaagatattgcttaaaatctggaggaagaaaaaaaccaaccttgccaatctagccttacctttacaagcatgttattgttttcattgtcatagcctatgtattatttyatgcatcttaaagagagctggctcaagacaaccttgcatatagataaagattttcttttgaaatgttgaaa

SEQ ID NO: 117804 - DNA, 615 bp, Homo sapiens
atttcccagtaagattaatcacaagaccaccatttgatttaagatttctagcttcacgaaatctctctttccagtatagggaataatgtaacattacacggagtgattctacagcagggtaggtcagccatgatcatctcaagccaygctacattcagtaaaaatcttcaagggaagaagaatggcctggactaccctgcaagccaaggtctttctgccgattggtaggggaggacatttggtatctctggtgttcaccatgacgcttagaaacttagaaacaaacatacccatagacatgtgctttgcagacattttgacccaacaaccacgtttctaggactcatggcaatcatagtaatgcacgtagatttatctgtgaggatctcagtgatatttattaacagctaaaaaagtcaaacaatatccaaatatagaaattaatttaaaattgcccatggagatcacagaataacagtacttttacaagattacaatttttacaagattacaaaggtctattattgatataaccaaatgacagattacaaatcattgtttattgcattatcttattttgtaaaaaataaataaaaatgggttggtggaaaagta

SEQ ID NO: 117805 - DNA, 615 bp, Homo sapiens
atttcccagtaagattaatcacaagaccaccatttgatttaagatttctagcttcacgaaatctctctttccagtatagggaataatgtaacattacacggagtgattctacagcagggtaggtcagccatgatcatctcaagccatgctacattcagtaaaaatcttcaagggaagaagaatggcctggactaccctgcaagccaaggtctttctgccgattggtaggggaggacatttggtatctctggtgttcaccatgacgcttagaaacttagaarcaaacatacccatagacatgtgctttgcagacattttgacccaacaaccacgtttctaggactcatggcaatcatagtaatgcacgtagatttatctgtgaggatctcagtgatatttattaacagctaaaaaagtcaaacaatatccaaatatagaaattaatttaaaattgcccatggagatcacagaataacagtacttttacaagattacaatttttacaagattacaaaggtctattattgatataaccaaatgacagattacaaatcattgtttattgcattatcttattttgtaaaaaataaataaaaatgggttggtggaaaagta

SEQ ID NO: 117806 - DNA, 559 bp, Homo sapiens
tgagaggagaaggtgaggaaagaaaactcttggaagttttgttgacgacaaactcaggtagtatagctaataaaacagttaaattgagtatcagtatccatgggttatrccagccaaagaaagtcatattttaaggggatatgaataagtttgaatatttataaaaaagtagcttaggctggccacggtggctcacacctgtaatcctagcactttggcagcccgaggcgggtggatcacgaggtcaggagttcaagagaagcctggccaagatggtgaaacctagtctctactaaaagtacaaaaattagctgggcatggtggtgggtgcctgtaatcccagctactcgggaggctgaggcaggaaaatcgcttgaacctgggaggcagaggtagcagtgagccaagatcattccactgcactctagcctggatggcaaagaaagactccatcatctcaaaataaaaaaaaaagaagaagaagcagcttagtgaggagtgggaaaagcaacatacaatagttgaatattaggcaacatggatttagtgtggaaaaatt

SEQ ID NO: 117807 - DNA, 559 bp, Homo sapiens
tgagaggagaaggtgaggaaagaaaactcttggaagttttgttgacgacaaactcaggtagtatagctaataaaacagttaaattgagtatcagtatccatgggttataccagccaaagaaagtcatattttaaggggatatgaataagtttgaatatttataaaaaagtagcttaggctggccacggtggctcacacctgtaatcctagcactttggcagcccgaggcgggtggatcacgaggtcaggagttcaagagaagcctggccaagatggtgaaacctagtctctactaaaagtacaaaaattagctgggcatggtggtgggtgcctgtaatcccagctactcgggaggctgaggcaggaaaatcgcttgaacctgggaggcagaggtagcagtgagccaagatcattccactgcactctagcctggatggcaaagaaagactccatcatctcaaaataaaaaaaaaagaagaagmagcagcttagtgaggagtgggaaaagcaacatacaatagttgaatattaggcaacatggatttagtgtggaaaaatt

SEQ ID NO: 117808 - DNA, 642 bp, Homo sapiens
caggaaacattaattaactagaatttatggagcttgatttctaactggacataaatattctatgggagcaaagagtttcagggattcccaggtatttaacttaagtaactgggtggatgttgatgctagtctcatacytggaaacaaaaaatcacttaaactggtttattttttacagagaaattgaatgttattgttagagatagagtgaaacactgcagggcaaattctcctaattttcttctttttagtatgatagtagtagcagtattactacagacgaccaggaacttatctctgattctttcccttggaaccatatttggtaatattttcaacaataaacctcaacaatcaatgaatcttctgctttaatattacttcaaaaatcattgcttagtaactgctcctataaatgcagtttgaccctgtgcaactgccaataattgatacatattcatatcctcactttgcctaccgttaatgttcttttcaagttgtatttttcaaggtttttttgttcttggattgtttgccaggttgtctcttacataatgtattctctttgcataaccacattaacattaattatagtaacaagctctggcctgtttcattcactcgttaagtcattaatttagt

SEQ ID NO: 117809 - DNA, 642 bp, Homo sapiens
caggaaacattaattaactagaatttatggagcttgatttctaactggacataaatattctatgggagcaaagagtttcagggattcccaggtatttaacttaagtaactgggtggatgttgatgctagtctcatacctggaaacaaaaaatcacttaaactggtttattttttacagagaaattgaatgttattgttagagatagagtgaaacactgcagggcaaattctcctaattttcttctttttagtatgatagtagtagcagtattactacagacgaccaggaacttatctctgattctttcccttggaaccatatttggtaatattttcaacaataaacctcaacaatcaatgaatcttctgctttaatattacttcaaaaatcattgcttagtaactgctcctataaatgcagtttgaccctgtgcaactgccaataattgatacatattcatatcctcactttgcctaccgttaatgttcttttcaagttgtatttttcaagstttttttgttcttggattgtttgccaggttgtctcttacataatgtattctctttgcataaccacattaacattaattatagtaacaagctctggcctgtttcattcactcgttaagtcattaatttagt

SEQ ID NO: 117810 - DNA, 455 bp, Homo sapiens
gaatgatttggcaccattccgtccttagtactgcatagtgagtgagttctcacgagatctggttgtttaaaagyatgtggcacctcccctttctctctcttcttggtcttgctcctgccatgtaagatgcctgttctggctttgccttccattatgagtaaaaactcccagaggcctctacagctatgctttctgtacagcctgtgaaactgtgagccaattaaacctcttttctttttaaattacccagtctcaggtatttatagcagtgtgagaataaactagtaccaaaggatacaaggaaaatactcagcataccacttcagtgattctgtttgataatcttccagctaaactatgttttcttcattctaaataaactaagggcaaagtaattgtatttttaatgattaataaacagatacaattacgttatatgagaatgaagacttaat

SEQ ID NO: 117811 - DNA, 455 bp, Homo sapiens
gaatgatttggcaccattccgtccttagtactgcatagtgagtgagttctcacgagatctggttgtttaaaagcatgtggcacctcccctttctctctcttcttggtcttgctcctgccatgtaagatgcctgttctggctttgccttccattatgagtaaaaactcccagaggcctctacagctatgctttctgtacagcctgtgaaactgtgagccaattaaacctcttttctttttaaattacccagtmtcaggtatttatagcagtgtgagaataaactagtaccaaaggatacaaggaaaatactcagcataccacttcagtgattctgtttgataatcttccagctaaactatgttttcttcattctaaataaactaagggcaaagtaattgtatttttaatgattaataaacagatacaattacgttatatgagaatgaagacttaat

SEQ ID NO: 117812 - DNA, 455 bp, Homo sapiens
gaatgatttggcaccattccgtccttagtactgcatagtgagtgagttctcacgagatctggttgtttaaaagcatgtggcacctcccctttctctctcttcttggtcttgctcctgccatgtaagatgcctgttctggctttgccttccattatgagtaaaaactcccagaggcctctacagctatgctttctgtacagcctgtgaaactgtgagccaattaaacctcttttctttttaaattacccagtctcaggtatttatagcagtgtgagaataaactagtaccaaaggatacawggaaaatactcagcataccacttcagtgattctgtttgataatcttccagctaaactatgttttcttcattctaaataaactaagggcaaagtaattgtatttttaatgattaataaacagatacaattacgttatatgagaatgaagacttaat

SEQ ID NO: 117813 - DNA, 596 bp, Homo sapiens
tattctcactctttctctttaaaaactatatttgtattttctttatattttcagtttattacctacatagcctctttaatcatcttaattgccaagtttttgtcttatatgcatgtaatattcttcttagctgcataacaaagtatcacacgtttaacagtttaatataacaacaatttcctatctcacagtttctaagagtcaggaggcccagcttggcctagctgaatcctttgctcagggtcttacatacggtgaatgaaggcagaagcagggattagagtttccgctgaggcttggtgtcttgtcttgcttcacactgtaaaatttatttcttgctgctggatgaagtgacttgcttctttaaagccagcaagaaagaatctgacttcttctgtctctgactcctaagacctctctgaaagggctcacctgatttgatcagactcatcaaaaatcatcttcctttcactaaggtcaacttattacagggcytaatgacatctgcaaatttccttcaccttagccatacaacagaacagaagcagaggagtaatgttcctaaactttgccacattctaatggttagaagcaag

SEQ ID NO: 117814 - DNA, 577 bp, Homo sapiens
ctttatgtcaaaatataaacatggtagaaaatgattttagctttccaatcaatcaatgaaaataagttttttatgttggttggatttaatctgatcacaccgcatctttgtttaatgattataaattattgtaaacatatacaattaggagacagttctttcaatgttaaccaaaatacttggtttagtaagttttatgtttttctattatttatgtattatactatgcttgtccagatttgtatcaactttatactaagaatttttgggttaattttcttttcctcttttagcaaactttgagaataagaaagttatcatattttcttgaagttttataaagcccttgcatwtgaagccttttgccaaaagagagtattattagataaattttaatatttaagccatattttaaactttattgagtcactgttataccattaaatatctagatatttattaatataaaataaatgtttcaactttaatttttatatatcatttctttctaaagttctatttcaaacctgaatagtccaggcaattatgagcaaaaaaaaaaaaaaaaaaaaaaaga

SEQ ID NO: 117815 - DNA, 522 bp, Homo sapiens
tctaaaaacataatatacacaccttaactaaaaatactttattgtgggccaggcacaatggttcatgcctgtaaacccagcactttgggaggctgaggcaggaggattgcttgaggtcaagagttagagaccagcctggcaaacatggagaaacccagtctttactaaaaatacagaaattagctgggtgtgccatacctgtcattccagctacttgggaggctgagacactagaattgcttgaacctgggaaggagaggttgcagtgagccgagattggaccattgcaatcctgcctgcatgacaaaaacaaaactaaacaaaaaaaagttattgctaaaaatgataggatcattttagccttcggtgagttgtaatctttttgctggtattcacaccatggtgtagcctactaagtgtgtaatacmaatgtatctaaaaaaaatacacatcttaatttaaatactttatgctaaaaaatgctaacaatcattcgcgcctttagggagtcataatttcttt

SEQ ID NO: 117816 - DNA, 557 bp, Homo sapiens
tccatacaaatattattgagtttggggatactgacttatcaaatagcaaagttctataaacttgtcatttgtgaaattctatgagaggaaagagccaaggtggccgactagaagcagccaggaagagcttcttacactgagagagactagaccaacaagtagaccagcacactctgaacagactttcagaaagaaggaaatgggagttaacagagagaggacagggaccctgggctgaaagaagaggaagctgggaaccctacacaaggttgctgagcacccagcaccacaactcattcctggccctgactggctcctggaagagcaagtgaaatgggcrtatagtggcctgctatcaccacagaccctcaggatcctagtttcaggggactctacaaccccacaggcatctgagatggcaggaaaattgcatggacagtggatgagacagaactccagcctgtacagagtccagaaagtttggcctgggaacagctgcagtagagcgtaaccatgaaccatgaacatctattccccaaggctggccatactcccct

SEQ ID NO: 117817 - DNA, 599 bp, Homo sapiens
acaggcatgtgccatgatgcctggctatgtttttgtttgtttgtttgtttgtttgttttcttttagagatggggtttcaccattttggccaggctggtctcaaactcctgacctcaagtgatctgcctgccttggcctcctgaagtcctaggattacaggcatgagcmacgacacccggcctctccctttctctctttcttttttctttctttctttccttccttccttcctttcgtccttccttccttctgtctctttctttttctttcttctttcttctctctccatctttctctctcttttctttctttctctttctttctttctttccttttctttctctttctctttcttttctgaagtgttcttgtctgtctttggtatcaggttaatgttggcctcacagaatatattacaaaattttccatcacctgaaaatttttggtagaagtttgagagaaattaattttatttctcttttaatgtttggaaaaaattaccagtgaagtcaccagctcctggtcttttctttgccagaagatattaatttactgattcaatcactttgctacagttctattcagattttttttatttc

SEQ ID NO: 117818 - DNA, 599 bp, Homo sapiens
acaggcatgtgccatgatgcctggctatgtttttgtttgtttgtttgtttgtttgttttcttttagagatggggtttcaccattttggccaggctggtctcaaactcctgacctcaagtgatctgcctgccttggcctcctgaagtcctaggattacaggcatgagcaacgacacccggcctctccctttctctctttcttttttctttctttctttccttccttccttcctttcgtccttccttccttctgtctctttctttttctttcttctttcttctctctccatctttctctctcttttctttctytctctttctttctttctttccttttctttctctttctctttcttttctgaagtgttcttgtctgtctttggtatcaggttaatgttggcctcacagaatatattacaaaattttccatcacctgaaaatttttggtagaagtttgagagaaattaattttatttctcttttaatgtttggaaaaaattaccagtgaagtcaccagctcctggtcttttctttgccagaagatattaatttactgattcaatcactttgctacagttctattcagattttttttatttc

SEQ ID NO: 117819 - DNA, 521 bp, Homo sapiens
ggaagcttggcttaattggtaggagcttaatcatgctcacctgcactgtgccttttaacttcctttatcatcagcctctggatccctcagatccagttttctgtcctagggcttcaacctgaaacttggaattgagattgggacaaaaatgtgtctcgggaaggttgcatggactcattactgtaagccaaatgctaagttgaacctgtyaaattgagttctcctccaacgagtgagagaaaaggatgtcctgtgacatgcccagataactggtggctatagttatgtctgctaatatttggatgcatggagcttggctttggttagctcccttggttttactttcccaaaaaggaaacctccaggtgatgggcaccctatttattctcattgcctgacagcttttgcaggataatggctcaaaactagaatattgatctagacttttacattacccatcccctctgttccttctgaatgcccttaaaaattactggatggttcacaggcacaagcagggt

SEQ ID NO: 117820 - DNA, 535 bp, Homo sapiens
acatccaaaagccaggtgtcaggaaagacaattttgaaaccaaagtttgattttgggaagcctattaaatgttagagatttaaaacatgtaatattatgaaatagaatttcagactaccataagtcatttattttgctgaaatgaggactcagaaatttwaaaaaagcaaaaaccttttagaaccctttacaaattttgctaaagaacagattagtgccttaagagtaccttgttgtggttgtatttcaatgctcaatttacagaaaaaccatataatagctttttgaagttagtcaatatgttcacacagaacttcctttgcaagattaaattttacaaccctttcacaacttgtttgaacttttagctttattttatgtaattcaaaacaattctttaaacctagtaaaaaatttgcagtttgacatctgcattttacctataatctttaaggcctctgggatggagctctttaagagacaggactaggaaaacatgcacttcctaaggcctaaaaacaggcatagctgggag

SEQ ID NO: 117821 - DNA, 610 bp, Homo sapiens
aaaacataaaggccttttaaatatacctataacttggatatccacttttaattaagcagagcactctttcagaatatccttttaaatcccttgttatctggctttagtcaagtaaagtgaccaatatttctggctttcaaccttcactaaaggctcagagaagggaaaattcaaggtggtttgtggagaggaaaagaatcaacaaatgtcaaaakgtcatgcagatatcaaaccagaaaggactcattccctaagttaggatttaaccagggctgccattgtgaaatggcagaggttacaacaaagcatttccacgtagttacaggtcacactttcaaggacgtaacacaagatggaggcctgcagcaaagtttgctactgaccaaacagaaacacatgcaaagcacacgagattggctacagcttaaggccaacctcacaaatcctttttcataattcaaactttacagataatataaacagtgatccttatcactcctggcatagtataacatcttttaaaaagaaaaaaaaaatgcttcttttaaaaaagttaactcctgacctggtggagaaaaaaaaaaacaacaaaaaataaacagcttaaacg

SEQ ID NO: 117822 - DNA, 644 bp, Homo sapiens
gcacacacgcaaacacacacatactaagtaccaaacagcagaaaatataagccagcaaatagggtttcattggtatgcatgttttgtgcacttacacatacacatgtgcactcacacacacacgagtgtgwtaattttgaatattatatagtagatattgtttctggatgtcctttttcactagaaattttgagattactttgaagtagttatttcactggcaacatggtttttgccacccttaaagggaaatgcaagttatttttaggtagctgtagaacattcctgaatatttttgagttccctacatattattgtataaatatattagaggcagagtttaaatgtgggtaaagcagactttctatgtaatatctatgttttgatttagaaagcaattttctcctttcctaatcatctacataaggggagtccaatcttttggcttccctgggccacggtggaagtagaggaattatcttggaccacacaaaaaatactctaacactaacaatacctgatgagctaaaacaaaaaaaaatcacaaaaaaatcattctcataatgttttaagaaagtttatgaatttgtgttgggctgcattcaaagacatcctgggccacaagagacccacaggctgtgagg

SEQ ID NO: 117823 - DNA, 644 bp, Homo sapiens
gcacacacgcaaacacacacatactaagtaccaaacagcagaaaatataagccagcaaatagggtttcattggtatgcatgttttgtgcacttacacatacacatgtgcactcacacacacacgagtgtgttaattttgaatattatatagtagatattgtttctggatgtcctttttcactwgaaattttgagattactttgaagtagttatttcactggcaacatggtttttgccacccttaaagggaaatgcaagttatttttaggtagctgtagaacattcctgaatatttttgagttccctacatattattgtataaatatattagaggcagagtttaaatgtgggtaaagcagactttctatgtaatatctatgttttgatttagaaagcaattttctcctttcctaatcatctacataaggggagtccaatcttttggcttccctgggccacggtggaagtagaggaattatcttggaccacacaaaaaatactctaacactaacaatacctgatgagctaaaacaaaaaaaaatcacaaaaaaatcattctcataatgttttaagaaagtttatgaatttgtgttgggctgcattcaaagacatcctgggccacaagagacccacaggctgtgagg

SEQ ID NO: 117824 - DNA, 386 bp, Homo sapiens
tattccattccattccattagatgattccattcgggtccgttcgaagattctcttcgattccattcgaaaattccgtttttttccgtttggtgttgataccattcgattccattcgatgataattccattcgattctatgcgatgattccattcctttccattagaagatgattccattcgagaccattcgatgattgcattcaattcattcgatgacsattccattcaattctgttcaatgattccattagattccatttgatgatgattccattcgattccatttgatgatgattccatgcgattccattagatgatgacccctttcatttccattcaatgaggattccattcggttccatttgatgatgattcctttgaattc

SEQ ID NO: 117825 - DNA, 612 bp, Homo sapiens
acctgttcaacatagaccaatacaatgctgcccacactcattttgaccaaataactttcttctttaacccaaaatatctgccagtgtccaagggcagccccactgaaaagtgatgcagtgaggagagacggcagaatttagaggaatgggtctcaaactttagtgtgcakcagagtcaccaggaaggcttattaaaataagaaactaccccagcccagagtttccaattcagtaggcttaggttggagcataagaatttacatgccttacatgtttctcagctgacgctaatgctgatggctaggggaaccccgttttgagaaacactgatctgcagaataaatgatttcaaggcttcggtcctctagctggagtttgctcctccatccaaggatcttattcccaggtgaactccaacttgtccactttctcacactggcagtagcagctctgacccatctttctagtcttaggcacctgtaatgggttgcagtgtttttttccaaaagatttgtttcaatagtaatccccagttcctgtgaaggtaagccttatttggaaagaaggtctttgcagatgtaatcaagttaaaatgaggtcatactggagtag

SEQ ID NO: 117826 - DNA, 614 bp, Homo sapiens
caggatccttttgcctagtgggtggttatcacttagatgtgcccatccccaaacctcacttgatatagtgatttctggagaccctaagaggactcagggaccaggcacggtggctcatgcctgtaatcccagcactttgggaggtcgaggcaggtagatcacctgaggtcaggagtttcagaccagcctggccaacatggcaaaacctatctctactaaaaatacaaaaattagccaggcgtggtggcaggtccctgtaatcccagctgctcaggaggctgaggcaggagaatcacttgaacccaggaggcggaggttgcagtgagccaagatcatgtcactgcactactccagcctgggtgacagagcaagactccatctcaaaataaataaataaataaataaataaataagactcaggggacttcctgcacattcccatgagcyatgagccatctccaacaccttggggcagagtaggggactctatgactccactggggaaggggtcctgcaatggggcctgagatgtgctttcccccagctgacactcttttccttatttaactttttcaaaaactcccccaaatgttttgccttttcatttgcctcgc

SEQ ID NO: 117827 - DNA, 644 bp, Homo sapiens
atctatctttatatatccaaatgaaatctggtttttttttctgcatatatttcaatccctcagagactcttaaattccatcaggatttctgtttacttccttcttctgaccaattataagagagtttaaagaaagagcacgtctgtatcctatgccacagaccagatgcccctttattgccagggaaacagccagcgatgtttatcctttatttaatctctctgctgactttcagtgctggtaaatgtttattccaccgaagtatgcttttaagatgtcagtcagcaacctttattgaccaatggatcacatttggtaaaggctcctgcttattacatagagaattagactgctcaaagaggattttgcaggggacargcaccatttattcattcagtcattgatttgattgattaacttcttatgcatttgttcaactaagcatttactgaatgtctagtatgtgccaagcactctggtgagatatttgagaaaatcaagaagaaaaaggcccaagccttgcccctgaagaactcagactaatagggtgacagaatgttgaaaattatagtaattcagtgtgattatatctttgtaattacagaacaaaagaacaagcagctgatttgagggaagctactagc

SEQ ID NO: 117828 - DNA, 208 bp, Homo sapiens
ctgtgtgtgtgtgtgtgtgtatgtcagagagagagagagagagagagaaagagagagagattttcccattttttgaagggttggaatggtggctaacaaatataaggtmaattataagattctatttataaatcacagccataaaatgaaaacaaatttttctaaatgcacaatgaaaaccacaaactaagtgctttgtttagttatg

SEQ ID NO: 117829 - DNA, 517 bp, Homo sapiens
attagacgaatttcccagattacacagcagtcaaggcagagttgatcttttctgttgaacttatgtggctctaactcctacatccatgctggtacccagtgttctgtgttggggatgggaacatagatcaattgagtggtatgaaagatggaagggtatgactctaagatactkctgataatgtctggatttctgttggaattagtaggacaagctctgcagccaggctgcctggtttcaaacctgtactctgccacttgacagcaaggtgacggtgtctatgctatttcacctgtctaagtttcacttttcccctctacatatagagatataaatagcacctatatcatcagttattgtgttggtgaaataagatgatactttgaagtcttattctccatggcctccaaaatctctccatgatctgctatcctgtttcctcctcaactttctatctgtactatttacttcaccattgtgcatcttgctcaaagatgcttgcttctttttattccac

SEQ ID NO: 117830 - DNA, 517 bp, Homo sapiens
attagacgaatttcccagattacacagcagtcaaggcagagttgatcttttctgttgaacttatgtggctctaactcctacatccatgctggtacccagtgttctgtgttggggatgggaacatagatcaattgagtggtatgaaagatggaagggtatgactctaagatacttctgataatgtctggatttctgttggaattagtaggacaagctctgcagccaggctgcctggtttcaaacctgtactctgccacttgacagcaaggtgacrgtgtctatgctatttcacctgtctaagtttcacttttcccctctacatatagagatataaatagcacctatatcatcagttattgtgttggtgaaataagatgatactttgaagtcttattctccatggcctccaaaatctctccatgatctgctatcctgtttcctcctcaactttctatctgtactatttacttcaccattgtgcatcttgctcaaagatgcttgcttctttttattccac

SEQ ID NO: 117831 - DNA, 610 bp, Homo sapiens
aggtttcaaaaggaactaattccccaacagcttgaaaggatagtaaaagaggttgtcagatgataaagttgtttggcttgacataaaagattctgaaactcartatgaaaagaaatgcttctaacatgacctcctcaatgacaaaaattggcatgttttaaaattgccacaatgttttatacaaagttttttataaacaaaccaatggtctaatgttgtctttattataaatttggtgatgatggtattagaaaacttgtaatttaaacccagtaaggaatgaaatagaattactaaattaagtattcgaagtaaagaccttagagattaacttgtttgttgtctttcattcaaagaagaagaaatcagtccagagagagaaagtgacttacaccaggtcatgtggtagattagcgtcagagcccaagttagaaatcttgtctcaaacattattttaaaataagctggatttggcagacatggatctggatattttatttttttaatatgcaagcttttgttttaaaatccttactataatcatccatgaaaatatagagttttcgtattttgaggagcttaatactatccctttaagaataataatgtg

SEQ ID NO: 117832 - DNA, 610 bp, Homo sapiens
cacgtgcgctcatgttttgctcagaaccactattgtctgtaaaaggtatggttaccctactaaagctgtacatatggctcacccccaggctcactcatgcccagactcactcgcacttagagagagtaaagccawgtcaaaactgtctacgattccttgagtgtttctccagctacccgccactcaccccaccaactcccctcggaccccagttaaaacctgacaccacccctttccctgtaagaggagtgcattcctgcccactgccatgcagctttctatgtccccagtgggaggcccatgcatccctgtcccatcggcttttggctttgaccaaaggaacaaaagcagacatgacagaggccacatccaagtagaaactctaagaggcaggacaggtgtccacagtactcctggtctttctttctgctatgagaatagcatatcccacttaggaagctgttccttcagcttaagtccctgaatgggaaactgctgcagccaaagaaagcttcagtcaatgcatagtctccctttaataaaccttgtggtagaaatttctgagatttggagatcatttgttactgcaacaatactgaccactacacag

SEQ ID NO: 117833 - DNA, 538 bp, Homo sapiens
gtctgtgctggtgcagtaacagttcaatgacatcatttctaaggcctcttatagctggaatatctttgaggccaaggctgtctcctctgacaaagctcatttgtgagttaaagggaggagggagatgctggagtcagctgcagaattcctgaggggagggtagaagagtgagttggaaacaatgtgaaatagctggtccccaactcaactcgggctggtrataaagaatttagatctattctgaggcagtatttctccaagtacaggtgcaagacaatccaaatcagaatcgcctcaaagaatttttttttaatatgaattcctgggctctctcggaattgagaattgtgtgcagaaatctgtatttttcatattccagataagacttatgaatcctaaaatctggcaatttctggaagaaagtaatactaacttgccagggtagggaaataaaatcccaaatccttagatttggtacctgaataagtgttctttttcaaggatatttaagtcaccattaagatcacctgtggattca

SEQ ID NO: 117834 - DNA, 590 bp, Homo sapiens
ctagtcttcatttgcagattttaggaaatgctttttttgaaagaataaattttgaattagaagccaactcagagccctaacaattttctgggaagctaggggcccataagcaatgttgtattatgaaaagagaattacattaagtttctgaagacccgggcttgaatcctggcggtaattaccaggaattcttttccaacttcttgtgccacgatagagataatagcaatatcagcastgaacttttactgagaatttactaagtcttaagagtcttccttggataatctcatgtagattatccagtgcctactatcatgcctactatctgtttttggaaattgaaaatgtgagatttaaaagttccaaggtcaccaggtggtaagtgatagaacccagattagaatgcaaactggttgattcagagcacgtgctctcatccaccaggtgcaatgccttctactgggctatattacctggcaatccttatggatacatcagttgacattaccaggcatctgcttttcacaggatgttatctgatgagatgaggcctatgaaggtacttggaaactgtgcacttttattca

SEQ ID NO: 117835 - DNA, 553 bp, Homo sapiens
caccatgtgacctgaattgcctgtcatgaactgggtgctttctgacccatccagccataaagtgggtcatgcacagcagcattccatcaaatgaaagtggtatatacgtgatcaggctcaagcaggtcctgaaggcacaagtaagttacataagaaagtggctcaaatgcccatagtctccatttctgccaccctgccttctctcctcctgmctgcactgatggcctcatggcaagttccttatgatcatttgacagaggaagagaggacttgggcctggttcacagatggtactgcgcaatatgcaagcaccaccccaaagtggacagctgcagcactataacccctttcaaggacatccctgaaggacagcagtgaagggaaagcttcccagtgggcggaactttgagcagtgcatctggttgtgcactttgcatagaaggagaaatggccagatatgcaattatatactggttcatggcctgtagccaatggtttggctggatggtcagagacttggaagaagcatgattggaaaattggtgacaaagaa

SEQ ID NO: 117836 - DNA, 576 bp, Homo sapiens
taagaaagtgctttgtgacgtgtgcattcatctcacartgttgaacctttcttttgattgagcagttttgaaacactcttattgtagaatctgcaagtggatatttggagagtttgaggccactggtggaaaagcaaatatcttcacatcaaaactagacagaatcattatgagtaatctctttgagatgcgtgcattcaactcacagagttggacatttcctttgattgagcagtttggaaacagtctttttgcagtatctgcaaacggatatttggagcactttcaggcctatagtgggaaaggaaatatcttcacataaaaactagacagaaaattactgaaaaacttcttattgatgagtgcattcatctcacagagttgaaacttcttttgattgagcagtttggaaacactcttttagtagaaactgcaaggggatatttggagcgttttgtggtctatggtagaaaaggctatatcttcacaaaataatagaagcattctgaggaacttcctgatgtgtacattcatctcaaagagttgaacttttcttttgatggagcagctttgaaa

SEQ ID NO: 117837 - DNA, 576 bp, Homo sapiens
taagaaagtgctttgtgacgtgtgcattcatctcacagtgttgaacctttcytttgattgagcagttttgaaacactcttattgtagaatctgcaagtggatatttggagagtttgaggccactggtggaaaagcaaatatcttcacatcaaaactagacagaatcattatgagtaatctctttgagatgcgtgcattcaactcacagagttggacatttcctttgattgagcagtttggaaacagtctttttgcagtatctgcaaacggatatttggagcactttcaggcctatagtgggaaaggaaatatcttcacataaaaactagacagaaaattactgaaaaacttcttattgatgagtgcattcatctcacagagttgaaacttcttttgattgagcagtttggaaacactcttttagtagaaactgcaaggggatatttggagcgttttgtggtctatggtagaaaaggctatatcttcacaaaataatagaagcattctgaggaacttcctgatgtgtacattcatctcaaagagttgaacttttcttttgatggagcagctttgaaa

SEQ ID NO: 117838 - DNA, 576 bp, Homo sapiens
taagaaagtgctttgtgacgtgtgcattcatctcacagtgttgaacctttcttttgattgagcagttttgaaacactcttattgtagaatctgcaagtggatatttggagagtttgaggccactggtggaaaagcaaatrtcttcacatcaaaactagacagaatcattatgagtaatctctttgagatgcgtgcattcaactcacagagttggacatttcctttgattgagcagtttggaaacagtctttttgcagtatctgcaaacggatatttggagcactttcaggcctatagtgggaaaggaaatatcttcacataaaaactagacagaaaattactgaaaaacttcttattgatgagtgcattcatctcacagagttgaaacttcttttgattgagcagtttggaaacactcttttagtagaaactgcaaggggatatttggagcgttttgtggtctatggtagaaaaggctatatcttcacaaaataatagaagcattctgaggaacttcctgatgtgtacattcatctcaaagagttgaacttttcttttgatggagcagctttgaaa

SEQ ID NO: 117839 - DNA, 557 bp, Homo sapiens
acacaggacacctagttaaatctgaattttagataaacaatgaattattactttttagtgtaagcatatctcaaatattgactaggacatactacattaacaatttttgtgttgtggccaggtgcagtagctcacgcctgtaatcccaacaytttgggaagccgaggagggtggatcacttgagaccagaagtttgagaccagcctgggcaacatggagagatctcgtccctacaaaaaatacaaaagttagctgggtgtggtagcacgtgcctgtagtcccagctacttaggaggctgaggtgagagaatcacctgagcctaggaggttgaagctgcagtgagccatgatcttagccactgtactccagcctgagtgacagagtaagacctcatctaaaaaaagaaattatttgttgttatatgaatacactcagtgctactaaactataattcacttaaaagtggctaagatagtttaaaaaaaggagttttgttttgttttttgttatctgggagtctaatttaaccaagtgtcctgtatttttatttgctaaa

SEQ ID NO: 117840 - DNA, 574 bp, Homo sapiens
gaccccaagagcaatagtgggtgcaagcaatgagtgtgaattcatgttgtgcttaggcaatggggccctgagtggctgtgctctacgctctggaggagaaggattaaggaaagtctacatcatcctcctccttagtaccctggactcttaaccacttgcactgacaggttttccactcgggcttcttggatttcccctaaggaaatttttcaacagcaccacctactcccagtgtcccattttggttctcacacaggctcatccattcacacatacttatccagcmcctgccacgtgcaaagctctctcccaggaacgggcatggtgcaaaccaggcagggtccctgccttcatagaacttacagtctacagcaaggaaaacagagaacaaagaaggagagggaaggaaagaaggaaggagagaaaaggaaggaaggaaggaaggaagaggatgggaaggaaggaggaagggagggagggagggagggattaattgctggtgtttgctggtatgaaaggcacaataaagaacatcagccaggacagcatgacagagcatgtaataacgtgcgtg

SEQ ID NO: 117841 - DNA, 574 bp, Homo sapiens
gaccccaagagcaatagtgggtgcaagcaatgagtgtgaattcatgttgtgcttaggcaatggggccctgagtggctgtgctctacgctctggaggagaaggattaaggaaagtctacatcatcctcctccttagtaccctggactcttaaccacttgcactgacaggttttccactcgggcttcttggatttcccctaaggaaatttttcaacagcaccacctactcccagtgtcccattttggttctcacacaggctcatccattcacacatacttatccagcacctgccacgtgcaaagctctctcccaggaacgggcatggtgcaaaccaggcagggtccctgccttcatagaacttmcagtctacagcaaggaaaacagagaacaaagaaggagagggaaggaaagaaggaaggagagaaaaggaaggaaggaaggaaggaagaggatgggaaggaaggaggaagggagggagggagggagggattaattgctggtgtttgctggtatgaaaggcacaataaagaacatcagccaggacagcatgacagagcatgtaataacgtgcgtg

SEQ ID NO: 117842 - DNA, 574 bp, Homo sapiens
gaccccaagagcaatagtgggtgcaagcaatgagtgtgaattcatgttgtgcttaggcaatggggccctgagtggctgtgctctacgctctggaggagaaggattaaggaaagtctacatcatcctcctccttagtaccctggactcttaaccacttgcactgacaggttttccactcgggcttcttggatttcccctaaggaaatttttcaacagcaccacctactcccagtgtcccattttggttctcacacaggctcatccattcacacatacttatccagcacctgccacgtgcaaagctctctcccaggaacgggcatggtgcaaaccaggcagggtccctgccttcatagaacttacagtctacagcaaggaaaacagagamcaaagaaggagagggaaggaaagaaggaaggagagaaaaggaaggaaggaaggaaggaagaggatgggaaggaaggaggaagggagggagggagggagggattaattgctggtgtttgctggtatgaaaggcacaataaagaacatcagccaggacagcatgacagagcatgtaataacgtgcgtg

SEQ ID NO: 117843 - DNA, 448 bp, Homo sapiens
gccttgatggaattggaaagagattaatgatatagctcaggggaaaccagaacacacactcccaggctagaaagacaagcttgtccttctgaaccttccccaaactcaggtgtcactggaaagtcagccacccccctgggatgcccatgaaagcattgcctatgaagcattgggtctcagccctgayggggcagaatgggggccggctgaggtgagcggtgactccaagggctcagtgatgggcagtccaagtccccgcccagaggagaaacagaatcactccacactggcttgttctctccctgggtgttgggaggaggctgtccatcataggacctgctccagagtaagcagaagagagatcacttctctcaatattcagcagaccctgcaccatcacagtttccaatattcaaggggaagtagagctctgggacaggtaggaatt

SEQ ID NO: 117844 - DNA, 550 bp, Homo sapiens
ccagttccttcttcctcgagtatttccataggaatttttcaaaacttcatcacatttttctaaaattaattacrtgcagaaaaacattgtaatatgagctgatgcctcaaaatgattattattgaaataagtctccctccttttcttttctacaaaacaaagacccactaggcgtccttaaactcagtgatttcagagggaaggattttgctactcaggcctttcctttttattgtcttgatgtctgtgatgtcatctttcctttttattgtcttgatgtttgtgatgtcatctttacttatttatatttttgtgataagctacttacagcagacccccctctgtgaattctaatatgctgttttaacttttccttagatttggagtagacataggtaggttggtaatttggtgtagaaaggaaacattgtaagactcacaagagatgcctcagactttttaggagtaaaaggaataaactattttgattccattttcgtcatttgggaacttgtctagctcactttcttcttcttggctctttcccaat

SEQ ID NO: 117845 - DNA, 529 bp, Homo sapiens
ataaataaccaattggtgkaagagattatatgcgaggcagtttgagattaatctaaatgaaaatacaatgaaccaaaatggatttgttacagctgaaacagtgtttacagagatatctgcagctgtaaatgtctatcctaaagaggaaaatatatttgcatcaatacataacaattcacataaagaagctaaaaaaaagaacataaaactaaacccaaagcaagcagaaggaagaaaataatgaaaactacagaggaaataaataaaatagaaagagaaaagcaacagtaaaaataagcaaatccgaaatttgttttttgaaaagattaataaaattgactaacttttagctagaatgactagaaagagagaacacacaaattactaaaatcataagtgaaaaagggggcatgacaataaatcttacagaaataaaattgatcaaagggatcaaggggaaatattatgaatcaccatataccaatattaggtaatatagctaaaatggacaaactccccaaaagataca

SEQ ID NO: 117846 - DNA, 529 bp, Homo sapiens
ataaataaccaattggtggaagagattatatgcgaggcagtttgagattaatctaaatgaaaatacaatgaaccaaaatggatttgttacagctgaaacagtgtttacagagatatctgcagctgtaaatgtctatcctaaagaggaaaatatatttgcatcartacataacaattcacataaagaagctaaaaaaaagaacataaaactaaacccaaagcaagcagaaggaagaaaataatgaaaactacagaggaaataaataaaatagaaagagaaaagcaacagtaaaaataagcaaatccgaaatttgttttttgaaaagattaataaaattgactaacttttagctagaatgactagaaagagagaacacacaaattactaaaatcataagtgaaaaagggggcatgacaataaatcttacagaaataaaattgatcaaagggatcaaggggaaatattatgaatcaccatataccaatattaggtaatatagctaaaatggacaaactccccaaaagataca

SEQ ID NO: 117847 - DNA, 492 bp, Homo sapiens
tgagttgaagatgaaggaaaatgatggataaatcttaaggctgtccagtggatacccttctccctccatattatgtgctagacttctcctttcatggaaacgatttcatacttttattactacatctgtcttctaacatttgaatggtacaaagatagatatgtgacctgatcaacaaggacattttcttgggatgtttaaaaattggaattgggacagagaacctctcttctgatttgagatttaaatatgaaattcagagctaagtgtagccatgtttcctgtcctgtgtaggaaacaggtataaaatagaggacaataaagctgaaatctagattaaaacasagattggcaatgaagaaaagctttcacgcttttggaatcctgcttactagttgctcctgaggctcagctgaagtcctccatgttccagaatttaaatactcaatccttccttcaagtatgtgagatacccccggaatccacttatta

SEQ ID NO: 117848 - DNA, 258 bp, Homo sapiens
tggaatccaatgtgtgggataaacattcagacaatagtagcagtgttctgtaatccaatgtgagggacacacattcagrccctcgtcggaatgctttgaattctatgtgagggacaaacactgagacaatcttagtactattcaggaatcctctgtgaggtacaaatttttagaccacagcagaagtgttctgcaatcctatttgagggacaaacattcaaacaacagagggaatcttctggaatcctatgttacgga

SEQ ID NO: 117849 - DNA, 511 bp, Homo sapiens
gaattctgtgtgagggacaaatattcaagctgtcattgcagtgttctggaatcccgtgtgagggacaaacattcagacactggtagcagtgttctggaatccaamgtgagggacaaacattcagacaacagcaggattgttctggaatcctatgtgagggacaagcattcagacaatcgtagcagtgttctggaatcccatgtgagggacaaacattcagaccttcatagcagtgttctggaatggtatgtgatggacaaacattcagacaatcatagcattgttctggaatcctatgtgagggacaagcattcagacaatcgtagcagtgttctgtaatcccctgtgaggaacaaacgttcagacagtcgtagcattgttctggaatattatgtgagggacaaacattcagacaattgtagcagtgttccggaatcctatgtgagggacaaacattcaaacaacagcgggattgttcaggaatcctatgttatggacaaacattctgacc

SEQ ID NO: 117850 - DNA, 492 bp, Homo sapiens
gttctggaatcccgtgtgagggacaaacattcagacactggtagcagtgttctggaatccaacgtgagggacaaacattcagacaacagcaggattgttctggaatcctatgtgagggacaagcattcagacaatcgtagcagtgttctggaatcccatgtgagggacaaacattcagacyttcatagcagtgttctggaatggtatgtgatggacaaacattcagacaatcatagcattgttctggaatcctatgtgagggacaagcattcagacaatcgtagcagtgttctgtaatcccctgtgaggaacaaacgttcagacagtcgtagcattgttctggaatattatgtgagggacaaacattcagacaattgtagcagtgttccggaatcctatgtgagggacaaacattcaaacaacagcgggattgttcaggaatcctatgttatggacaaacattctgaccctcgtagcggtgttctggaattc

SEQ ID NO: 117851 - DNA, 526 bp, Homo sapiens
ttctggaaacctatgtgagggacaaacattcagaccacagcaggcatgttgtggaatcctctgtgaggaagaaacattcagaccctcgtagcagtgttctggaatcctatatgacagacaaacatttagaccccagcagcagtgttctggaatcctgtgtgagggacaaacattcacaccctcggagcagtgttctagaatcctataaagggacaaacactcagaacccagcagccgtgttctggaaccatatgtgagggacaaacactgagaacacagcaggattgttttggaatgctatgtgatggagaaacattcaggcactcgtagcagtgttctggaatcctaagtgaggracaaacattcagacaatcgtagcagtgttctggaatcctatgctagggaaaaacattcagaccccagtagcagtgttctggaatcctatgtgagggaaaaacattcaaacaacagcgggagtgttctgaaatagtatgttactgacaaacattcagacccttgtcacagt

SEQ ID NO: 117852 - DNA, 606 bp, Homo sapiens
tcgaattctgtgtgaaggacaaagattcagaccatcagagcagtgttctggaatcctttgtgagggacaaacattcagaccacagcaagagtcttctggaatccwctgtgaggaacaaacattcagaacctcatagcagtgttctggaatcctatgtgatggacaaacatttagacctcagaagcagtgttctgtaatcctgtgagagacaaacattcagacactcgttgcagtgtacaggaatcctgtgtgagggaaaagaactcagaacccagcaacagtgtcctggaaccctatgtgagggacaaacattcaggccacagcaggattgttctggaatcctacgtgagggacaaacactcaaacacagcgggagtgttttggaatccaatatgagggagaaacattcagaccctcatagcagtgttctggaatcctatgtgagggacaaacattcagaaaatcgtagccatgttctggaatctcaagaaagggaaataaattcagaccccagcagcagtgttttgtaatcctatgtgagggagaaacattgaaccaagatcgggagtgttctgcaatccctggttatggacaaatattcagaac

SEQ ID NO: 117853 - DNA, 605 bp, Homo sapiens
cgaattctgtgtgaaggacaaagattcagaccatcagagcagtgttctggaatcctttgtgagggacaaacattcagaccacagcaagagtcttctggaatccactgtgaggaacaaacattcagaacctcatagcagtgttctggaatcctatgtgatggacaaacatttagacctcagaagcagtgttctgtaatcctgtgagagacaaacattcagacactcgttgcagtgtacaggaatcctgtgtgagggaaaagaactcagaacccagcaacagtgtcctggaaccctatgtgagggacaaacattcaggccacagcaggattgttctggaatcctacgtgagggacaaacactcaaacacagcgggagtgttttggaatccaatatgagggagaaacattcagaccctcatagcagtgttctggaatcctatgtgagggacaaacwttcagaaaatcgtagccatgttctggaatctcaagaaagggaaataaattcagaccccagcagcagtgttttgtaatcctatgtgagggagaaacattgaaccaagatcgggagtgttctgcaatccctggttatggacaaatattcagaac

SEQ ID NO: 117854 - DNA, 494 bp, Homo sapiens
agtgttctggagccctgtgtgagggacaaacattcagaccacagcaggagtgttctkgaatccaccgtgaggaacaaacattccgaccctcgtagcagtgttctggaatcctaagtgatggataaacatttagacccagtagcagtgttctggaatccccagtgaggaacaaacattcagacaatcgtagcagttttctggtattctatgtgagggacaaacattcagaccccagcagcagtgttctggaatcctatgtgtgggacatacattcagaccctcgtaggaatgttctggaatcctttgtgagggacatgtattaagataatcatagcagtgttccagaatcctatgtgagggacaaacattcagaccccaggagcagtgttctggaatcctatgtaagggagaaacattcaaccaacagcgggagtgttctgaaatcctatgttaaggacaaacattcagaccctagttgcagtgttctagaattc

SEQ ID NO: 117855 - DNA, 482 bp, Homo sapiens
gaattctgtgtgagtgagaaacattcagacccttgtagaagtgttctggagccctgtgtgagggacaaacattcagaccacagcaggagtgttctggaatccaccgtgaggaacaaacattccgaccctcgtagcagtgttctggaatcctaagtgatggataaacatttagacccagtagcagtgttctggaatccccagtgaggaacaaacattcagacaatcgtagcagttttctggtattctrtgtgagggacaaacattcagaccccagcagcagtgttctggaatcctatgtgtgggacatacattcagaccctcgtaggaatgttctggaatcctttgtgagggacatgtattaagataatcatagcagtgttccagaatcctatgtgagggacaaacattcagaccccaggagcagtgttctggaatcctatgtaagggagaaacattcaaccaacagcgggagtgttctgaaa

SEQ ID NO: 117856 - DNA, 576 bp, Homo sapiens
actacattttccgtcttttttagcatgtacttctctttttaaaattttttttaactatttgccacagaatttgcaatatacatttacaacaaattcaagtccactttcaaataacactatcccactawcccacaaataggactacctgcttaacaaacaaaacacctaattcctcaatatacatttacaaccaattcaagtccactttcagataacactatcccacttcacgggtgactacctgcttaacaaagaaaacacctgattcctccctcccatccttccattccattccttgtattattgttccttatttcccttgtgtataagcatacataatctatctgtgtgtatttattgttatctacaaacttattggtcagatcaattatgaataaatacatgtttttattttaccacaattcctccctcccatccttccattgcattccttgtattagtgttactcatttcacttgtgtataagcatacataatctatctgtgtgtatttgttattgtctgtgaacttcttggtcagatcaattaagaataaatatataggtttttattgtac

SEQ ID NO: 117857 - DNA, 636 bp, Homo sapiens
atttttttctagacatacccccccacccccaaatgaaactcatttcaggacgggtaagtgtgtgagtctggggaaaaagggtggggttagaagggagaaaacttctcctaacgtgagtggaataaagtaacaatttyagggaggtaccatcttcctaaacacttttattcttcaaataaaaacaccgttaagtcaacaaaaggtggaaaaacattaatttcactcactccagctctaagcaattcaaaatgcttaaaggtcaacttgttttgtttgacatatacacaattttaaacaggaaacttttcccccggtgagcaattccatccaatttgtttttcacactgtgtgtagcatatcaaatttttcataagtgggcaggatacaaggacacccttcacagccagcatcctccgcagcactttggcccaaggaatcagatattttcaaagtcaaaggaaagagaggagcaaaatagcacacagttcataacttcctagaaaaacactcgcgccagcctgcctgcgtgccccgtccaaacaccacaagaaatgttcagaataacgcctctctcaaatgccaccaaaccgtatacaaaatctgagaaacctcagcagtgagttgaggggcatgaaa

SEQ ID NO: 117858 - DNA, 636 bp, Homo sapiens
atttttttctagacatacccccccacccccaaatgaaactcatttcaggacgggtaagtgtgtgagtctggggaaaaagggtggggttagaagggagaaaacttctcctaacgtgagtggaataaagtaacaatttcagggaggtaccatcttcctaaacacttttattcttcaaataaaaacaccgttaagtcaacaaaaggtggaaaaacattaatttcactcactccagctctaagcaattcaaaatgcttaaaggtcaacttgttttgtttgacatatacacaattttaaacaggaaacttttcccccggtgagcaattccatccaatttgtttttcacactgtgtgtagcatatcaaatttttcataagtgggcaggatacaaggacaccyttcacagccagcatcctccgcagcactttggcccaaggaatcagatattttcaaagtcaaaggaaagagaggagcaaaatagcacacagttcataacttcctagaaaaacactcgcgccagcctgcctgcgtgccccgtccaaacaccacaagaaatgttcagaataacgcctctctcaaatgccaccaaaccgtatacaaaatctgagaaacctcagcagtgagttgaggggcatgaaa

SEQ ID NO: 117859 - DNA, 424 bp, Homo sapiens
ttggagagattggccattttagatatgcctgaaccattagcttgaagctggagtgtgtaccaagggtggtcatgctgttcactgatgagtaagcagcctcatgatctcaggtaggctcagcagcaatctcagtgaatacacagtcacgtttagagaagtacagacatggctagacctggatgtctaacacaagatgaagaactagcaccatccccatttcactacctatttacttaacatttcaaaatgttaayggaaagaattaatctgaagtgcaccatcacaagtctacttttttcacgcatttaaaaaatttttttccaagctactcataaagattgtttggggttttgttggtgtttttgttgctaatgggttttcggaaacgcagcaacccagctaggtaaggaacacagttagttta

SEQ ID NO: 117860 - DNA, 608 bp, Homo sapiens
ctcactgcaaagtgtttttcaaacgctgatgcctttcccgggacattctttgcccagactgtcttccttcaattccctttaatttaatttaatgtttcttttttttttttktttgtttaacagatgggatctcactatgttacccaagctggtcttaaactgctgggtccaagtgatcctcctgcctcagcctctcaatttgctgggattacaggcatgatccatgcatagtcaatgtttcttaaagtctctctgggaaggaagtctcacctgagtattctagatacaagtgcccttgataaaggtttacattatatcctcttacttctcccaacagagtgattgacggaactgttataataacttaattcatttcttctacattgacagaactgttataataacttgattcatttcttccccgttgtactgtaagcttcatgaaagtaggactgtgtcattcttgctcattgttttatcttaagcatgtaataccatttctgttatccattagcagctcacagtatttgttgaattaattaaggctgcagagctccacatctacatcttgtgtgaatctttcctatcttttgagcccttatctatct

SEQ ID NO: 117861 - DNA, 596 bp, Homo sapiens
gagctattgcccttttatggaagtctttttcctcttgatatttgtgtattgagctctcttctcatttacctcttagcctaagcctcagagaggctttccatgatcaatataaatagccactctgttgttttctgtcataccacctgattttagttctctgagtaatacatattattatctggaattttcttatgtataaatgattcttttatctgtctctttccactagaatgtaaactcttgagrgcaggggcctttttccttttgttctctactataccttgactacttagaacattacctggcacaaagcagtgctcaataaacatttgttgaatgaaataatgcataaagctacttgactttgggcaaatttttcacttttgaaaacctcatttataaaatattgctcacatctgtcgtacccacaggttatagtgaacgtcaactaatatatgtgaaagtatttatcatagcacttttatcagtaaggataggatgttctgtaggatgttcagaacattctattggatgttctaaatataagtgacttaagataaattttattttttgcttatgctatttgtctatctctg

SEQ ID NO: 117862 - DNA, 627 bp, Homo sapiens
attgattgactgcttaatatatggcaggtgccatactatacatacataatctaatttaacccttatgataactttgtgttcagtttattatctctattttctagagatagaaatataggaggcatgttgccaaggtcacaaaaaagtaaatgatgaactcagacttgaaactaggattgtccaactctcaactctctctcctcctgtctggatactgagaaagatgaactcttccaagttcttgccatcaaggctgttcttgaaatccttttagcgtcaagagttttactgtagatcactctggggaaattggaaagagaaaattaaagcaactgatgcaactttggacttagtcccattttcaaggtttagcaacccaatttagtagctgtgtaacctgacctttggtaaattacttgaacttctgagcctaatttccttttatgcaattacraagttttgagcatctcccccaaaactagagtacctatacaatttaccattagaatcagtagagtttgaaagtgaaacagggttctgttaataattttggtggtacaacaggtgtgaaacaggagttgcctgagcaaatcagtacctatggtcctttaaaggtaacgccaaaga

SEQ ID NO: 117863 - DNA, 597 bp, Homo sapiens
aattatctatctcataacggattaatatctagaatatgtaaaggaaaactacaactcagcagcttaaaaaacccaattcaaaaatgagaaaagaacttgaattgacattttttccaaagaagatatataaatggccaaaaagcacataaaaagatgcttgacatcattggttactagggaatcgaagatcaaaaccacaaaaagacatgactttatccccactaggatgtctgtaatgaaaggaaaaataactactgtaggctacaatgtggagaaatgggaactattgtgcattgctggtgttgttggtgacaacatgaaatcatgcaactgttgtgaaaacagtacggtwgctcctcaaaaagttaaacatagcattacaatatcatccagcaactccacttttaggtatatactccagttttaggtaataaccaaaagcaaggactcaaacaaatacttgcataccaatgttcatagcaacattattgataatagctcaaaggtagaaacaatccacaggtttatcaacagatgaatgggtgaagaatgaaatactatccagcattaaaaagaatcaaattctaatacgtgtta

SEQ ID NO: 117864 - DNA, 517 bp, Homo sapiens
ttgtgcattgctggtgttgttggtgacaacatgaaatcatgcaactgttgtgaaaacagtacggttgctcctcaaaaagttaaacatagcattacaatatcatccagcaactccacttttaggtatatactccagttttaggtaataaccaaaagcaaggactcaaacaaatacttgcataccaatgttcatagcaacattattgataatagctcaaaggtagaaacaatccacaggtttatcaacagatgaatgggtgaagaatgaaatactatccagcattaaaaagaatcaaattctaatacgtgttacaacrtggatgaatcttgaaaacactgagctacatgaaataaaccagatgcaaaagcacacattttctgtgcttccacttatattaggtacctagaatagccaaattcatagagatagtataatagaggttgccagaagctaggggaagtggggagtagggagttactgtttaagtggtacagagattctgtttgagatgatgaaa

SEQ ID NO: 117865 - DNA, 635 bp, Homo sapiens
  misc_feature (1)...(635): n = A,T,C or G
gtcgtacccatgctcacttgaggcatatccttcccttaccagtggaatgttcctagaaggtcatgtaccagttaaactctgccattttgcctcttagtgcgcatgcttgaacccactcacctaactcctgagatcttttcaggaagctgctgatcaccagtttcaggtgtttctatctgttgggagactgcctttccctggcacaggctgcagccaattactatcttagagaaataactgcctgaccattacctgatggtcacctgacattcctgctggggggtgnnggaagaaccctgccctgccctgctcatgtctgacaagctacctactataacaatttgactctgttgctctcattgaacacaactaaaacaatgggcagaattcatgagcagctgtctcaggaatatgaaaagtaaataagagataacagaaagattgaggaaggatgccaaaattttaagaattgatctgatagtgagttcccctytttttttttcctttctaatatctcctggcctagattcaaaagcaacacaaaactgggtgaggaaaggaagagctccaagagaacccctctccttctggtctaaggagtgggaaaggagatttctaaaggtcagagaaagtag

SEQ ID NO: 117866 - DNA, 492 bp, Homo sapiens
cagccactcattctcctaatgttagtaatagcgggctwggaggagatgtattctaagaagagagaaaagggaagattggctattagccagtcagggaacgttgatcagaaaaaccttctcaaagataaatattttggtaaaagttggaaaaaaaaaatacagcttaaattctgttctaaacctgaagacacagctgttttatgttatacacagcaaaaaacagcaatatatataatgtgggtcttcctttgccacaccacttttgctattatctaaatgtgttgtgagagtttttcaaaattctcctaaagaatgttatctctatggacatgaatttataatgatgtccattttgtttgtgctttctctagcaaaatgttgcagatactttttccctatcaagctgagagtttcacatacacaaagaaaagtcccttagtcaccaattctttgtcgcaactggtttaattaacacttacattgttcaccagt

SEQ ID NO: 117867 - DNA, 492 bp, Homo sapiens
cagccactcattctcctaatgttagtaatagcgggctaggaggagatgtattctaagaagagagaaaagggaagattggctattagccagtcagggaacgttgatcagaaaaaccttctcaaagataaatattttggtaaaagttggaaaaaaaaaatacagcttaaattctgttctaaacctgaagacacagctgttttatgttatacacagcaaaaaacagcaatatatataatgtgggtcttcctttgccacaccacttttgctattatctaaatgtgttgtgagagtttttcaaaattctcctaaagaatrttatctctatggacatgaatttataatgatgtccattttgtttgtgctttctctagcaaaatgttgcagatactttttccctatcaagctgagagtttcacatacacaaagaaaagtcccttagtcaccaattctttgtcgcaactggtttaattaacacttacattgttcaccagt

SEQ ID NO: 117868 - DNA, 668 bp, Homo sapiens
atttataattgtgaaacttggaagcaaccaagatgtccaccaagtgaatgagttagtgaactgtggtaccttcaacagtgaaatattgttcagtgctgaaaaacaatgagctatcaaaccaagaaaagacatgaaggaaacttacatgcatattagtaagtgaaagaaaccaatctacaaagcctactatattagcccattctcacactgctataaaggaccacctgagactgagtaatttataaagaaaggtctaattcactttcagttctgcaggctatacaggaagcacagctgggggaggcctcaggaaacctacaatggtggcagaaggcaaagtggaagccggcatgtcctactcagytggagcagggggaagagatagaaaggggaggtgtcacacacttttaaacaaccagatctcgtgagaactcacttaccgtcaattacctcccattaggcccctccttcaacatgtgggaattacaatttgacatgagatttgggtggggacacatagccaaaccataacagctacatatggtatgattctaactctatgatattctggaaaaggcaaaactatggagacagtaaaaatatcagtggttgcaagggattgtggggagggaggaatgagtaagaggatcacagaagatttttagatc

SEQ ID NO: 117869 - DNA, 633 bp, Homo sapiens
tacatccctaatttatgatttatctgctttatgatggtatgaaagtgataggcattcagtgtgctccccaacttaccatggggttacatcctgatcagcccatcataagtggaaaatataataactgaaaaaatactcttttgacttacgatattttcaactgaataatgggtttatccagaggtaacrcatcataagttgaggggcatctgtctatatgctttgtgagagtatcttaaataactctatatgagaagctggtataaaagaaattgtggttgtgacagctctcacccttccattgatctccagcgttggtcaaatttagccatcatgtttttcctggattctggtgattatcctggagttcctcagtcaacaatgtaccttccttttttctcctgttgctacaaatgacattcattcatttataatccctccatgtgaaagtgtattcttattttatactccacagataatctaatctgatgttaatttttactagaaattgggtaattctttagccaagtatgaaaagagcatcctgtaatctttattttatgcctccaattctttctctcatacttaaaaaaattcacatacatgcataaagtatttttcacataagttaca

SEQ ID NO: 117870 - DNA, 526 bp, Homo sapiens
aggaattatcaaaagtaaacatatacttggaaactaaatgacttattcttgaatgatctttggataatcaatgaaattaggatagaaattttaaaaaaatttaaaatgaatgaaaatagagacatgatataccaaaacctctgggatatgtagcaaaagtagcgctaagaggaaattttataacattaaatccctacatcaaaaagatataaaaatattagatcaacaacttaatattccacctcaaggaactagaagaacaaaaataaaccaaacccaaactttgcagaagaaaagacgttaaaaaaaatcagagcagaactaaatgagattgagacccccaaaataatacaatgatcaatgaagtgaaaaactrtttgaaaagataaataaagttgatagaccactagctaaattaaagggaaaaaagcaagaagatttagataagcacaatcagaaattataaaagtgattttacaactattaccacaaaaatacaaaaagatcatcagagattaataggaac

SEQ ID NO: 117871 - DNA, 526 bp, Homo sapiens
aggaattatcaaaagtaaacatatacttggaaactaaatgacttattcttgaatgatctttggataatcaatgaaattaggatagaaattttaaaaaaatttaaaatgaatgaaaatagagacatgatataccaaaacctctgggatatgtagcaaaagtagcgctaagaggaaattttataacattaaatccctacatcaaaaagatataaaaatattagatcaacaacttaatattccacctcaaggaactagaagaacaaaaataaaccaaacccaaactttgcagaagaaaagacgttaaaaaaaatcagagcagaactaaatgagattgagacccccaaaataatacaatgatcaatgaagtgaaaaactgtttgaaaagataaataaarttgatagaccactagctaaattaaagggaaaaaagcaagaagatttagataagcacaatcagaaattataaaagtgattttacaactattaccacaaaaatacaaaaagatcatcagagattaataggaac

SEQ ID NO: 117872 - DNA, 629 bp, Homo sapiens
ggagtttgttatcctccttaagaaatttttgagttttgttttggcagtcagctaaatagtatgtagattagctgatccttttgtgtcttgttttaagcattttatgttggatctagagtaagcctagctctgggctagattagctgtactatgaaggcatgatccccattaatgctcccatatattcaacatggtctccctggcttgactcatcagaactcaygcatttccaattttgcatgagctaggggaattgttgagttcataggcaacttatggggtttcaccttacatgtggtacagctgagtactcagccaaacactcagggaacagcatgaagacttctggactgctctctctgcatagttttcttttccaggatgactttcttcacctcccactgttctcatttctgttatgttagttgactgagaatattgttttctgaatagtcccctatccctacactacaatccagaaagtgactccagatcgaaaactgaagtaattatagggttaatctaatttatttcctttttatcagagactacagtcttgtgctcccttttgtacaatgtttgaaaatagttatttcctatatatttttcccctgatctagttgtttatg

SEQ ID NO: 117873 - DNA, 625 bp, Homo sapiens
gccacgatgagtgtgggactttcttattttagtcatcgatgctggaggagattttgcgtcttcaatcaatgctaaactaacgtctcagttggttgttgacaaggctgctgacagcagaaaagccctgaagttgttctaatcctctcaggactatgccctaatgaaacactctattttggtgatggcagacaccatagaagaaatagctcagtaagtaaaagaggaaraattcagtcatatgatttcagatggaaaacctgtagaaattacctgtccccaaaccctaatgctgcagtgggaaactgtgagagacagggaggttcagtgctataaataaagtcacacagccattcagcaatggcagagccaagaaccctgggaacgtgcgaatcccacgtttgcgattcccagagtcctgttcttgcagatgcaccaggcggcctctcctcaccatgagctgcatgaagtctaacacaattcaatatgactgaggattatttccttcttgacaaaagaatacagccacgtgattccacaaacaaaattaatatacataaaaaagaaccattttttccactttactcaagatgaacagaaatgtcttctttcaaaggcactgatatga

SEQ ID NO: 117874 - DNA, 580 bp, Homo sapiens
tattatctctgtttttaatcttagcccttctttcctctactatttttcttcckcttaatgctccatgctgggttctctgccttatcagacttaatcttgaaaagtacgttacttccttcccattatctccaaggttgttatagtccattctaggtgtctccaatttctcaactcttactcaattactttctgaagtttgactattatttctactagtgttcagctttcttaagtgtaagtaaacacatttcttacttaactaggtagataaacattagctggacggatctggccgtaaacatgctattatttccaagataaaactgagttccaaatggctaaatctttgtcttttcacttttcatccattcctgtcttttttagcatttgtttttttgctgcttaacattcacttctcctttgtcttctgtaataaaccttaatggtttttctcctctctctggctaaatgtttgttttctttgttactgctttcttcttttatataccacttatatataaattgggttgaagctttgctcttagctctttttcattacacatcattttgaggagatggt

SEQ ID NO: 117875 - DNA, 558 bp, Homo sapiens
caggtaaaatcaaaatgcacatgctctctggaacagaaagtccttaatgaagatagctttgcttgaatgagccgaattacaatgygaatgctaaggctcattgtcttggctgtacagttaccacagtttcaatgaaggggtggcctgcccctccacacctgtgggtgtttctcatcaggtggaatgagagactgagaaaagaaagagacacagagacaaagtatagagaaagaaaagtgagcccaggggactggcgctcagcatacagaggaccaacgctggcgctggtctgagttccctcagtatttattgatcactatttctaccatctttgagagggggatgtggcaggacaatagggtaatagtggggagagggtcagcaggaaaacatgtgaacaaatgtctctgtgtcataaacaaggttagaaaagttgctgtgccttgatgtgcatgtatacaaacatctccatccattaaaaacagtattgccaccagcatgtctcaactccagccctaaggcagttttctcctatctcagtaaatagaacatacaatc

SEQ ID NO: 117876 - DNA, 574 bp, Homo sapiens
attactgcatccacatggggcttttactggaaccagtaagtctctgccagcccctcacaggctcctgggatgccactcgttctgggtctgtggacagacaaccaggacacttgctcagtgcccacccactccttgtggcccacagcccatcactcaaccccagccccaccatcccctgcttcctaagccgttcctcatgccagaagaaaaggcaatgcctttgtcccacagcctctgccttgtgtcatgtcatgtgggggtatggaatgaaccggccagcctaaactccagtgcttctgcctgaagaatctgtccccactgtctgagtcsccctctagggagctgtcagtgggggagagagcagccctggaagagaggcccacctgcttctgtctgacttcagggcagcctctcagggcaagaacccagagcagatggaggcctcacagaagcctgtggcagggctctgggcttggtggctgaacatctccctctctgctgccagccatggggcccagaaccacccattcaagagggtcaccaccacattgcaggtgtgcagctggacggctcc

SEQ ID NO: 117877 - DNA, 591 bp, Homo sapiens
aacctttttgttgtttctcttcattccctattttactgtctatgtcttggaaatatgttgtagttattattttcattggtttattgtttactctttctagttgagatttttgcacccaataattaccatgttataatattcagtgtttttccatgtgctattgctagtgcgttctgtaccttcagatgatttcttattgctcactaacttttttcttttaggtctagaagtccctttrgcatttcctgtagtacaggtctggtgttaatgaaatccctcagtttttgtttgtcgggaaacgttcttatttctccgtcaagtttaaaggacgtatttgccagatacattattctaaagtaaaagtcttttttttcttgagcttttttaatatgtcacgccagtctcccagcctgtaaattttcccctgaaaagtctgctgtcagatgtattggagttccactgaatgttatttttttctcttctctggatgcttttagaatcatttctttatccttaacctttgggatttcagttaagtgccttgaggtggtcttctttgggttaaatctgctttatgttttgtaagtttct

SEQ ID NO: 117878 - DNA, 591 bp, Homo sapiens
aacctttttgttgtttctcttcattccctattttactgtctatgtcttggaaatatgttgtagttattattttcattggtttattgtttactctttctagttgagatttttgcacccaataattaccatgttataatattcagtgtttttccatgtgctattgctagtgcgttctgtaccttcagatgatttcttattgctcactaacttttttcttttaggtctagaagtccctttagcatttcctgtagtamaggtctggtgttaatgaaatccctcagtttttgtttgtcgggaaacgttcttatttctccgtcaagtttaaaggacgtatttgccagatacattattctaaagtaaaagtcttttttttcttgagcttttttaatatgtcacgccagtctcccagcctgtaaattttcccctgaaaagtctgctgtcagatgtattggagttccactgaatgttatttttttctcttctctggatgcttttagaatcatttctttatccttaacctttgggatttcagttaagtgccttgaggtggtcttctttgggttaaatctgctttatgttttgtaagtttct

SEQ ID NO: 117879 - DNA, 591 bp, Homo sapiens
aacctttttgttgtttctcttcattccctattttactgtctatgtcttggaaatatgttgtagttattattttcattggtttattgtttactctttctagttgagatttttgcacccaataattaccatgttataatattcagtgtttttccatgtgctattgctagtgcgttctgtaccttcagatgatttcttattgctcactaacttttttcttttaggtctagaagtccctttagcatttcctgtagtacaggtctggtgttaatgaaatccctcagtttttgtttgtcgggaaacgttcttatttctccgtcaagtttaaaggacgtatttgccagatacattattctaaagtaaaagtcttttttttcttgagcttttttaatatgtcacgccagtctcccagcctgtaaattttcccctgaaaagtctgctgtcagatgtattggagttccactgaatgttatttttttctcttctctggatgcttttagaatcatttctttatccttaacctttgggakttcagttaagtgccttgaggtggtcttctttgggttaaatctgctttatgttttgtaagtttct

SEQ ID NO: 117880 - DNA, 238 bp, Homo sapiens
actttccccactgcttttctcaaacataagaagtctttmaccatagctaccacagctagaaatgcactgggtctcacctgaagttagcacttctcagcccaatgcccatggtgtattacctggttgtcactgttttttattctgggtacaggggttctttagtcagcaggtgatgaattctgccaggtctttactgacatggcagcactgagtttaatgtaaagtcctccagtccttg

SEQ ID NO: 117881 - DNA, 590 bp, Homo sapiens
ctttgttccaaattattgttttagtgatgtctgtatggccaacagccctggaaaatagagtgtctttctgtggaacagagggaagatttgtgcaggcttcacctagcccttttgcatctccctctgggaactcgagcaagtggagtcaattcaaatatgctgactactatgccatgaataataaagccctttgtctctgatgcaggagtctcatgycttctgccagcatccacagaacagtggcgagctaacttgttaggatgtttcacagttattgacacacctttcattacaggattcagacagaagttcatgacaagaaccactgtctacgacagacactgttgaccttggctcctcttcctgggtattccccaactagtctgagaagagtgggggtactagggcctggccatttctgcttattagtgagctcaatctcatggacaatctttgctccaaagctccctgttggattttctgagactttgtctaatctgtaggcatttcctgcccaatacaatttctctgccttttgtatttcataggtgttatctctaataaactgcttgtactcccaactctgtctc

SEQ ID NO: 117882 - DNA, 562 bp, Homo sapiens
gggacacaaatcaagtcccatttagaaaaagacattgctttcctaaaagtaatgtttcaaggttaattcatcaagacagaaaaatatagttttttctaaatgcttctacacaccttcaaaatgtagactgtcactaacatatcagtggattaygctctgaaactttatttgtaaatcctttaaaactcagaatgcatactacaaagaaatagtattagagttggatttttgaccaacctgtaaaagctgactgaactacaatgtggctgagataatggcattaataaaactctaaagccaagttttcgtatattcccatgctaaagtgtattcagggaaaataactgcaatagtggtaatcctgacagctggaccagtgcccccacgctccttattctctcttctatctgatagtggagtgaaaatttcatagattgacggccctagtggaggacaccatggagaacagggaacaaagaacagcaactaagtgggggccaagacaggtgctccagggatgggaagccaaggtggaaattcttgggtgaggaaagagacaaag

SEQ ID NO: 117883 - DNA, 562 bp, Homo sapiens
gggacacaaatcaagtcccatttagaaaaagacattgctttcctaaaagtaatgtttcaaggttaattcatcaagacagaaaaatatagttttttctaaatgcttctacacaccttcaaaatgtagactgtcactaacatatcagtggattacgctctgaaactttatttgtaaatcctttaaaactcagaatgcrtactacaaagaaatagtattagagttggatttttgaccaacctgtaaaagctgactgaactacaatgtggctgagataatggcattaataaaactctaaagccaagttttcgtatattcccatgctaaagtgtattcagggaaaataactgcaatagtggtaatcctgacagctggaccagtgcccccacgctccttattctctcttctatctgatagtggagtgaaaatttcatagattgacggccctagtggaggacaccatggagaacagggaacaaagaacagcaactaagtgggggccaagacaggtgctccagggatgggaagccaaggtggaaattcttgggtgaggaaagagacaaag

SEQ ID NO: 117884 - DNA, 641 bp, Homo sapiens
aggtgctttagggatggagagaagattttcaggaaaattcagcggtttcattattaccaacttccctgaagttgttagatgcctacatctagtttattcttttaagtaaataggtcagaggattaaggatactatctgttttctcacagggcttttccagatctcctgacattctacacatgaaaaaagatccaaaaataaataaatctatatacataaatagccatattactcaggtgcatcccctggagtcagtaaagtgatgttactgaaatgatggataaaatgtgtaacttatgaattcagatgccaccatccccaatatcactagtgctatctacataatgaaagtaatgtaaatctaaatctaaatcattctaaatcttaagattgacttaagaataacctatagakataaaacacacccaggaaattattatatgcttatgagtgaaacagggatgtaaactcaggacctagtgatttgtctgttggaggttttaagaattctgttcttcaccagaaattcttactatgtagtgacgtcaatggattcaggaggcaatgaacacaaagcacaactactttgtggttgttttcagaatctctctcagtaactgtttttgttgccttaatgaagg

SEQ ID NO: 117885 - DNA, 631 bp, Homo sapiens
atcacccttcccctaaccacaggctgcacagactatggctccaaaagagacccctttcttcacttgagaaggaagagtaggaaggactttgtcttgcatcttggataccagctcagccacaacaggatagtgtattagtcagagtcttgaggctccctttccaggccctagctcctggacatcatttctagatatacactgggccagaagggaacctgctgccttgaagggaaggatccagtcctgccagaattcatcacctggtaagtggatagccttgggctctgaataaccagcagtgatacccaggtactatgtcaaaggccttggatgagactctgagacttcccagcttccagtgagactcagcacattcccagctgtggtgcctatggtgtgggayaccttctgcttgagaaaagcagagggaaagtagagggggctttttcttgcaccttggccacagggtagagtaccaagcaggctcttggggtctccaattccaggacttggctcttggatggcattttgcacctttcctaggccagaggggactgccctgaaggatgagtcccaggccaggcagcattcactgcaaactgattgaagagcacttggaccttaaggaaac

SEQ ID NO: 117886 - DNA, 501 bp, Homo sapiens
ataggagcaggttctctcatcaagttgtgactttaaaatgtgtagtgttaggaagataagaacactccaccctacctttcctccctcctccctaagccagaatgccttttcccctctccctacttcaaggaaaattaaatgaagacagctaacgagcagttttattttctttcagcaaaggtcagcaatcccacagcagcaaattaatcccaattagtaatgatattttgtcttgataaatgatgacacatttgatttactgtgtttccaggatgcaggcagcaaatgttaatgatttggtttgctgggaatttatactcttgctcayttcccatttgctgatcagttgcggctcgtgaagacttggctgcttcaactaatgaactgagggcctcgcaggaataatggtgtgttctgcaggcctcatttttttatgccatctgtagaaatgcaggctcctctcagaaaatatctctggaagccaggaaggagtgattatga

SEQ ID NO: 117887 - DNA, 562 bp, Homo sapiens
tgtcatgcattattatgcctgcccaggacttcatgtaaatgagtcatatattatggattcctgtgtctattgatgtggcttctttcactcagcataatkattttgtgatttatccgtgttgttgagtacatgagtcatttgttcctttttctaaatatatcacaatttgtttatctaaatttctgtttatagatatttgggttgtttccagtttcagctgtcattaataaagctactataaacattcatgtacaaatctttttgtaaacatgttttcatttctcttgggtaaatatctagtaaaggaatttctagaccataatgtaaatacatttttacctctatttaaaaaaacaccaaacagtttctaaaactgtttgcttttctgtttaatgattactttttcactagtatttttggtgatttaaaagtttagtttataagcaaagtttaccataatagaaaaattctgcatgattggaaatggtttagtgtatattaaaagctggtgaagagaattagaagcctattatagtaacagaataatggatctctaaagata

SEQ ID NO: 117888 - DNA, 542 bp, Homo sapiens
gtgccgattttggttcttagagaaaagaatgtgccaagacagattggatcacaagagagttactgggagaaacacctaatgtgratgaagaaggaacaaatataaagctagaaaagccttcagaatatcatacaggtctggcatctgtgaaagaagagagaaagcggggagaattgggcaggaggagcttcagactgagtgcttttctgagaaagccttggccaggctgatgaggaattctagatcaaggtgatatttgaggagacctgcatggggcagaaatgacctagccctggtgcctcttctctgctgagtcccagcctcagtgctgacactgcaacagagctgaaggtgccacagacagaggccacttgtcagtatgccctgtagcaggtacttgcagtgagatctgtgtagtacacctctaggcctgccaaacttacatcccccttcgctatccactggatttcttacccttgacccttcaaaattttaatggcctagtgctatgcagttatctatattcatctataatgcctccc

SEQ ID NO: 117889 - DNA, 567 bp, Homo sapiens
ttcaaatatgagttcttactgcttgagtgctttttttgcggtctgaagtctgaattaagacactgattctttgagttgttctatttgctttatttgttagccttataggttcatagcagaaaactacaaagcctagcagctacacaaccctttggaaactaaccttccagcatcattttccaagcttttcattgagaggactcggtgtctaaataatgcgtatttccacccccaatcatacctctttgtgccgattttggttcttagagaaaagaatgtgccaagacagattggatcacaagagagttactgggagaaacacctaatgtgaatgaagaaggaacaaatataaagctagaaaagccttcagaatatcatacaggtctggcatctgtgaaagaagagagaaagcggggagaattgggcaggaggagcttcagactgartgcttttctgagaaagccttggccaggctgatgaggaattctagatcaaggtgatatttgaggagacctgcatggggcagaaatgacctagccctggtgcctcttctctgctgagtcccag

SEQ ID NO: 117890 - DNA, 495 bp, Homo sapiens
gtgccatacaatcaggaaggaatcctcaacactcagtgtcttactgagaagggagaatttrggctatatatatagtgctctaactctaatgttctttatggtttgctagtttttgacctaactgggagaagaaggggccaggcatatagaaatctctctagatcacagaaaaagcactggttttatatgagtgtgcaagcacttttaggggcttcgatctgtgggatcagggcagaaaaggggctaaaaggcacagctcgcagtctctccccagaaggaatttgtcagcacactctaccagctgctgctgacagttggacttctaactaacctgtattagagagttaataaggcagacaaaaagtcctgaacaggagctcacgcacttcccaaggtttttccccagcccactccagtgataaatccaattcttgctgggaagagtgtccatgcactgaatgtcccaaattccacagctcccacattagagactgc

SEQ ID NO: 117891 - DNA, 495 bp, Homo sapiens
gtgccatacaatcaggaaggaatcctcaacactcagtgtcttactgagaagggagaatttaggctatatatatagtgctctaactctaatgttctttatggtttgctagtttttgacctaactgggagaagaaggggccaggcatatagaaatctctctagaycacagaaaaagcactggttttatatgagtgtgcaagcacttttaggggcttcgatctgtgggatcagggcagaaaaggggctaaaaggcacagctcgcagtctctccccagaaggaatttgtcagcacactctaccagctgctgctgacagttggacttctaactaacctgtattagagagttaataaggcagacaaaaagtcctgaacaggagctcacgcacttcccaaggtttttccccagcccactccagtgataaatccaattcttgctgggaagagtgtccatgcactgaatgtcccaaattccacagctcccacattagagactgc

SEQ ID NO: 117892 - DNA, 495 bp, Homo sapiens
gtgccatacaatcaggaaggaatcctcaacactcagtgtcttactgagaagggagaatttaggctatatatatagtgctctaactctaatgttctttatggtttgctagtttttgacctaactgggagaagaaggggccaggcatatagaaatctctctagatcacagaaaaagcactggttttatatgagtgtgcaagcacttttaggggcttcgatctgtgggatcagggcagaaaaggggctaaaaggcacagctcgcagtctctccccagaaggaatttgtcagcacactctaccagctgctgctgacagttggacttctaactaacctgtattagagagttaataaggcagacaaaaartcctgaacaggagctcacgcacttcccaaggtttttccccagcccactccagtgataaatccaattcttgctgggaagagtgtccatgcactgaatgtcccaaattccacagctcccacattagagactgc

SEQ ID NO: 117893 - DNA, 585 bp, Homo sapiens
aactcatttttgttggtttataataggcctgccacaccccatgtgagataaaaattattgattattgaatcatctgtataatttttagacatcagataaaaatatttgctgtggstttgcatatgcctcaaattattgataataatttttgcttattgtaggaatatagtagaaaaaggtagttatattgttgggaattttcacaggggctttatatacagtcatttaaaaaattattaaattcagtcaaccactaaatattttgcaatttgtctataaactagatgttttgaatcacaaatttttccccaaaattttgttagctgtttgttgttgttaatagagcctttttcaaataacacatagagagagaagcaatgcattttgctgaacttttattcttagactgcagtttacttgaaagttttgatttagatctttattttttgccttttaatttaaatgtcttgttggttgagtgctcatcaattagcccattttaggtttctttactggctatagctgtttttaacacttgaaaaataccagaatgacagttttcctttcaatgtggtagaagtcaat

SEQ ID NO: 117894 - DNA, 585 bp, Homo sapiens
aactcatttttgttggtttataataggcctgccacaccccatgtgagataaaaattattgattattgaatcatctgtataatttttagacatcagataaaaatatttgctgtgggtttgcatatgcctcaaattattgataataatttttgcttattgtaggaatatagtagaaaaagrtagttatattgttgggaattttcacaggggctttatatacagtcatttaaaaaattattaaattcagtcaaccactaaatattttgcaatttgtctataaactagatgttttgaatcacaaatttttccccaaaattttgttagctgtttgttgttgttaatagagcctttttcaaataacacatagagagagaagcaatgcattttgctgaacttttattcttagactgcagtttacttgaaagttttgatttagatctttattttttgccttttaatttaaatgtcttgttggttgagtgctcatcaattagcccattttaggtttctttactggctatagctgtttttaacacttgaaaaataccagaatgacagttttcctttcaatgtggtagaagtcaat

SEQ ID NO: 117895 - DNA, 548 bp, Homo sapiens
aggtttcctgactaatggagttggatagaactttctttttttttttttttgagacggagtctcactctgtcacccaggctggagtgcagtggcgacatcttggctcactgcaacctctgcctcccaggttcaagtgattctcctgcctcagcctcccgagtagctgggattacagacatgtgcccctatgcccagctaatttttatatttttaataagtagagacaggttttcagtatgttggccagactggtctagaactcctgacctcaggtgatccacctgcctcagcctcccaaagtgctgggataataggtgtgagccatcatgcctggccgccttctattatttattagagacattagtctgtaacttctccttttttaataactttgatatatttttayattaaagttatgctggcctgaaagttgagatattttcccttttttctctagtattttctttgagggaaggtttctaattatggattaaagtttttaaagtagatgtaggtatatgtacattttgtacttatgttcattttgg

SEQ ID NO: 117896 - DNA, 553 bp, Homo sapiens
ttttttaagtacattcctctcgccctcccatttcaacacatttctcacacgaggtggaacagatgctggggtaacgccggctaaaaataaaagcaacaggaggggaaaaaaaaaaaactattttacaataaatatctcagcaaaattttatatcctgaatggattcagcagcaaaagagcagctgccacctcttttgtggttcttccttctctcacttttataacttaattaatatgccaatcagatttttgtaatcaggagcaggggacattaacctcgtaaagcatgtaaagtgtatcttatctgaataaagaaggaagtattgtgtgaattggtctcttttgctcctttttatttctacttgtattgagaatctagcttgtcagagaggaccagaaatcttttctatctgtcagcgctccaggcccttgaaggaacacactggtattttcaccctcactcctccaatggagasatgatagcagcatcacaatgacctctactgtgctagggggcaatggcacccactgtggccgtcccagaggaccccag

SEQ ID NO: 117897 - DNA, 585 bp, Homo sapiens
gtaaggagtccaatccagaccccaagagaggattcttggatcttgtgtaagaaagaattcagggcaagtccatagagtaaagtgaaagcaagtttattaagaaagtaaaggaataagagaatggctactccayagaccagccccaagggctgctggttgcccttttttatggttatttcttgatgacatggtaaacaaggggtggattattcatgcctcccctttttagaccatatagggtaagttcttgacattgccatggcatttgtaaactgtcatggcgctgatgggagtacagcagtgaggacaaccagaggtcactctcatcgccatcttggttttggcgggttttaaccagtttctttactgcaacctgttttatcagccaggcctttggacccgtatttcatgctgacctcctatctcatcctgtgacttagaatgccttcactgcctgggaatgaagcccagcaggtctgagcctcattttacccagctcctgtttaagatggagttgctctggttcacatgcctctgacgcattcagagaatatggtaatagatcttaatttgtattaatttgct

SEQ ID NO: 117898 - DNA, 597 bp, Homo sapiens
ctgtgacttagaatgccttcactgcctgggaatgaagcccagcaggtctgagcctcattttacccagctcctgtttaagatggagttgctctggttcacatgcctctgacgcattcagagaatatggtaatagatcttaatttgtattaatttgctgcgtttttcttaaagaatgaaaatctggtcaatttttgttaatcctcatgtggacttgagaagaatgtatgtyctacaaattgtagaatacagattttgataactgttgagtacagcttattaatcttgtggtttaaattttgtttgtatccttcctatttttctgtctgctttattagatagaagtgttaaaaatctcccatgatggtagttaatttatcaaatttctttagatatagtggcgtgttttacaggtttaaaatttaaattttttgtgaattgttccttttaacattaagctgggatcatctagagtcatgtgttacttaacaatgaggatacattctgagaagtgtgtcctttggagatttttattgtgtgaacatcatagagtgcatttacacaagccaaggtggtatagcccactacacacccaaacta

SEQ ID NO: 117899 - DNA, 608 bp, Homo sapiens
tcagaaaaaaaatcaaaggtgtcttttgcaactgaaccatcttccatgtttcccagagagcctgtgaaaaacacagaaacttgttgttttaccttataattatgtttgttatatatgcttcatgtttttaagatggctcaacattatggaaatgctgcagggtgaatgtcaagtgaaaaagtgaagattctctttccatatgtaactgctggttaattttgttcagataaaagttaattaatgtaaatatattagagactgtaccattttcaggaagaatcaaaaggtcctggagatttgtcaagccatccagggttcatatatgtcttctcccacaggataaatattaatcaaattcttatggaatagttgtgtatggtatactctgaaagataattttactctcattctgatccttttggttactgtgctatttattcttatcwtcaactagttgtactttcctgtcatgcttgtctgaggctctcttataagctatagaatagaaatgaaatcttcagttgtccaaagatggacagttttagagtcttctggtaaggaccatgtcaaatactcttaactatttatacttcaaagaatagatgtgg

SEQ ID NO: 117900 - DNA, 362 bp, Homo sapiens
catggcactggttgttcatacatttgtcatgtgatttcctttaggatagaaactatctatcgttcatgtaaaattgaccttgaactctgtaaggaaggtggatgatgtcatctgtcatatcataactcattacaaaatattagtttcaggctttgtgttaagtgttagggagcaacaatggttgagatagattcaaatatgttcttcactctcatagaatttacttagataagcaagtatgagtatgtgcatatgtgtgtgtacactcatacatatatatgtttacatgcayaaatgtgagcttagtaagtgcatagctttcaaccaaatgatgtgttgggagaccagcccaaagatttcag

SEQ ID NO: 117901 - DNA, 579 bp, Homo sapiens
ttttgtcatgtaatttgttaactattacagaaacgcaactaagaatatcaagtatttctctggctcttgacagaaaaaaatcagttgacttaaccctttgctgtcaaaagagttggcgwttcctgttctgggtgctactgctaagctctgtttttaatgatctcatcagaaaaatgagaacactatcttggaatgtgtacttgagtgagagcagatagaggaagaaacattcagaaaactgcatttttatatgccttagagattgcaaattaccttgttttagtaacatattaaatttcaaacatcagcaacattgctgtttttataaacttgatattacagcttttgtatttatgccatgttataaagacacgaaaacgtaacaccaaattgattctaacctccaacgtactttttatgaaaatttaaatttggattaacagcaaagagtgagttttttttttctttaggatcagattgaataattagtttagtaataaacttaaagcagaaaaacagagagcactttccttatgttggcaattcagtttcctcaaaactgttttactaaaaattatg

SEQ ID NO: 117902 - DNA, 579 bp, Homo sapiens
ttttgtcatgtaatttgttaactattacagaaacgcaactaagaatatcaagtatttctctggctcttgacagaaaaaaatcagttgacttaaccctttgctgtcaaaagagttggcgtttcctgttctgggtgctactgctaagctctgtttttaatgatctcatcagaaaaatgagaacactatcttggaatgtgtacttgagtgagagcagatagaggaagaaacattcagaaaactgcatttttatatgccttagagattgcaaattaccttgttttagtaacatattaaatttcaaacatcagcaacattgctgtttttataaacttgatattacagcttttgtatttatgccatgttataaagacacraaaacgtaacaccaaattgattctaacctccaacgtactttttatgaaaatttaaatttggattaacagcaaagagtgagttttttttttctttaggatcagattgaataattagtttagtaataaacttaaagcagaaaaacagagagcactttccttatgttggcaattcagtttcctcaaaactgttttactaaaaattatg

SEQ ID NO: 117903 - DNA, 600 bp, Homo sapiens
gtaaaggcctcaggaagcatacaatcatggtggaaaatgaaaggggagcaggtgtgtcacatggtgaaggcaggagcaagagaaagaggaaggctcttttaaaagaaaagcactgcccggctcttttaaaccatcagctattttttgaactaatggagtgagaactcactaatcaccaaggaccgtggtgctaaaccgttcatgagggatctgcccccgcgatccaacacctcccagcaggccccaccttcaacattggaagtcacatttcaccatgagatttggaggtggcgaacatccaaacaataccatgttacctttgcctcatgacctaattcctagtcaatctctgtttttcttagtccagcctcaggataagcaaccaagccagaattaattcctgcttcctttagatctcccttaaagcctttcatcaggatctcamaccttaaaaaagacgttttcctcctccctcatggtatctggattgccctccctcactgttgaatcaattaatctgatctgccagacagcagatttgtggctggtagtctctggctgctaaggtttggcactacggctgttgttattgttgtagtg

SEQ ID NO: 117904 - DNA, 600 bp, Homo sapiens
gtaaaggcctcaggaagcatacaatcatggtggaaaatgaaaggggagcaggtgtgtcacatggtgaaggcaggagcaagagaaagaggaaggctcttttaaaagaaaagcactgcccggctcttttaaaccatcagctattttttgaactaatggagtgagaactcactaatcaccaaggaccgtggtgctaaaccgttcatgagggatctgcccccgcgatccaacacctcccagcaggccccaccttcaacattggaagtcacatttcaccatgagatttggaggtggcgaacatccaaacaataccatgttacctttgcctcatgacctaattcctagtcaatctctgtttttcttagtccagcctcaggataagcaaccaagccagaattaattcctgcttcctttagatctcccttaaagcctttcatcaggatctcacaccttaaaaaagacgttttcctcctccctcatggtatctggattgccctccctcactgttgaatcaattaatctgatctgccagacagcagatttgtggctggtagtctctggctgctaaggtttggcactayggctgttgttattgttgtagtg

SEQ ID NO: 117905 - DNA, 539 bp, Homo sapiens
attgactcacagttacacaggctgtaccggaagcatggctggggggcctcaggaaacttacaatcatggcagaaggtgaagaggaagcagacatgtcctacatggctggagaaggaggaagagggtgaagaggaaggtgttacacacttttaaacyaccaggtctcatgagaactctctcattatcatgagaacgccctgcagggtagggcttttagccagagcctctaggaatcaatgtaatggtacaatcaccacattaaataaataaaccatcattaaccatgattctcaggggatggtttgcattctggaaaattaatttactttcttcattcactcagtagatgtgtatggaatgccagctatataccaggcatgttataagtgagacagaacagtgataaaaatggccaaaacctctgccctcatggagctcacattcttggagtctggagcagacaatagaaaggtgaacacataaaatattcagaatataagaaagtgataagtgctatggagaaaaatggaggaaggcag

SEQ ID NO: 117906 - DNA, 539 bp, Homo sapiens
attgactcacagttacacaggctgtaccggaagcatggctggggggcctcaggaaacttacaatcatggcagaaggtgaagaggaagcagacatgtcctacatggctggagaaggaggaagagggtgaagaggaaggtgttacacacttttaaactaccaggtctcaygagaactctctcattatcatgagaacgccctgcagggtagggcttttagccagagcctctaggaatcaatgtaatggtacaatcaccacattaaataaataaaccatcattaaccatgattctcaggggatggtttgcattctggaaaattaatttactttcttcattcactcagtagatgtgtatggaatgccagctatataccaggcatgttataagtgagacagaacagtgataaaaatggccaaaacctctgccctcatggagctcacattcttggagtctggagcagacaatagaaaggtgaacacataaaatattcagaatataagaaagtgataagtgctatggagaaaaatggaggaaggcag

SEQ ID NO: 117907 - DNA, 539 bp, Homo sapiens
attgactcacagttacacaggctgtaccggaagcatggctggggggcctcaggaaacttacaatcatggcagaaggtgaagaggaagcagacatgtcctacatggctggagaaggaggaagagggtgaagaggaaggtgttacacacttttaaactaccaggtctcatgagaactctctcattatcatgagaacrccctgcagggtagggcttttagccagagcctctaggaatcaatgtaatggtacaatcaccacattaaataaataaaccatcattaaccatgattctcaggggatggtttgcattctggaaaattaatttactttcttcattcactcagtagatgtgtatggaatgccagctatataccaggcatgttataagtgagacagaacagtgataaaaatggccaaaacctctgccctcatggagctcacattcttggagtctggagcagacaatagaaaggtgaacacataaaatattcagaatataagaaagtgataagtgctatggagaaaaatggaggaaggcag

SEQ ID NO: 117908 - DNA, 711 bp, Homo sapiens
tgacctaaactgagccagttccttcttcacccaactttacagtttcatccatgtcccctatctctctggatagaattaatatccaccaaatgcctcagccagaaatttaaagctacatttcaccgctcccactcccttactgtcaatattgaataacagcaaacactctgctgtctgtactgcccagactgcccttcaggacttaagtgcatatttctccaagtggtaagaatgctgccagctgagagcttgcagccatctgccctctccgggatttccccaaccctagagcactacctcatccaagagtacagcgcatgcccagtgactagttcttggagaatttaaaggcccaactctagacaactctaccggaccgtcctagytccagagctcccagtgaatgccttatgtcttcattacaaccccatttctccctctccatagttctgcttccttctctttcccctcagacattgatcccaagagcactttcaaatgacattctgcacactcatggtctatgccatcaaccatcctccaagtgtcagtgggatatattcattctctccatccttgctattacttccatatttatgtcatcctaatccctcacctggatgatagctgctgcctttatcttctcatctgtaattttctctgcttgtaatccactgtctacactgtcagagtaatgatttgatcatacac

SEQ ID NO: 117909 - DNA, 524 bp, Homo sapiens
acacacacacacttttttagccagttggagcaaggctgctcctttccattgctcctgtaaacatcattcccttccactctgggctggcaaagtggaagtgaaagttgctgagctctggagatgggttcatcttgatttcaatctggacaatcagtcaaatggatataatgatatctggtttgcaagattattataaaaatagtaataaaatgtgtaaagtaaaatatctataatatatamaataaactataaaagtgcctggtacatgtgttcaacaaacactagcttctattattgtttcaccatcatactcttcaaataactcactcctctaaatcaaaaagctagttagtttttatgcaaacaagaaatcagagacctctgatatacactaattagttaatacataaaagatgaggactcagtactttcaggtatagaaaagctttccaaaatgtatcctttttaatgatgtttctcaaatgtactttgaaattctaatgtcctatcatgactaaaactta

SEQ ID NO: 117910 - DNA, 524 bp, Homo sapiens
acacacacacacttttttagccagttggagcaaggctgctcctttccattgctcctgtaaacatcattcccttccactctgggctggcaaagtggaagtgaaagttgctgagctctggagatgggttcatcttgatttcaatctggacaatcagtcaaatggatataatgatatctggtttgcaagattattataaaaatagtaataaaatgtgtaaagtaaaatatctataatatatacaataaactataaaagtgcctggtacatgtgttcaacaaacactagcttctattattgtttcaccatcatactcttcaaataactcactcctctaaatcaaaaagytagttagtttttatgcaaacaagaaatcagagacctctgatatacactaattagttaatacataaaagatgaggactcagtactttcaggtatagaaaagctttccaaaatgtatcctttttaatgatgtttctcaaatgtactttgaaattctaatgtcctatcatgactaaaactta

SEQ ID NO: 117911 - DNA, 595 bp, Homo sapiens
catgaacccgctgcaacagtatacaaactatagataattacacgtcgtttctgtttgttttgttttttttttgagagggaacctcactctgtcatccagactggagtgcagcggcacgatctcagctcactgtaacctccacctcccaggttcaagcaattcttcttcctcagcctcccaagtagctgggattacaggcgcctgccaccacgcctggctaatttttgtatttttagtagagacagggtttctccatgttggccaggctggtctcgaactcctgacctcaggtgatctgcacggctaggcctcccaaagtgctgagattacaggcgtgagccactgtgcccggactacatgtgttttctcatctgctaaaccttaaccagattttcaaaaggatctatgaccccagagacttaagagccattggtatctgactgtctgattcctttttaattcatccattccaaaatctaaacaatgagtgtaccacagaggaagtgyggagggtgtacccaccaacaacctcacaacaatctcaggggagggcttaagtgtccccacacacgagagtggagatttgagccaagcg

SEQ ID NO: 117912 - DNA, 585 bp, Homo sapiens
ctttggtttgaggtattcagggcacagatcatagtagaaaaaagaaaaaaaaaaagagaaagagagagagagaaaagtcttggaaggcattaaagattgggactcaaggctgagaggtgagcwtttcttaggggtggaggggagggtatcaatttcaagaagacacttgtagcaagagggagcagagtgcttacaatagatcagaccagcctctctgctcattcacattctgtctggttggcccttaggagttaagggtccattcagtcctttgagtgcattttttcactctcctcatcctgcagaaagtggctgctcagtgacattgctgcattcttaggaaaccaaaatccagaccctagctgcctccttcaccattcctggtgccaccccatgaagctctaacaaaacctgtagaaaggagcctaaaggctccattgagactatcaaaacttcacaagacaaaaatagtacacccaacctttagatgtgaaatattgatagaaatggcatgatttctgcattggcatcatttggacaaaagcacgcttgctgagagatcaagccctctttgcgttgtaagaa

SEQ ID NO: 117913 - DNA, 402 bp, Homo sapiens
ttcttctggagatctgctggctacaactccatgttcttcatgtcattatctctctcagggaggagcacagagccccaatgaatgggattagaaaaggtgctgtctgcttcattgttccacgtgcccctcatctattagcacaaagccagcactctgggtgggcaagtaamtttgctctgtttccaaacagctagaaacatccttttccctgaataatatccatgttaggctttcagagctgagtgagtaataagatactagggagagtcctggataacaggtaagtggagttggaaccacttccagagcaaaggataaatgctcttacttggctcataggcctgacatgacatgaacaaaaaaccagagttttctaattgaacctagaaatcaacaactgct

SEQ ID NO: 117914 - DNA, 402 bp, Homo sapiens
ttcttctggagatctgctggctacaactccatgttcttcatgtcattatctctctcagggaggagcacagagccccaatgaatgggattagaaaaggtgctgtctgcttcattgttccacgtgcccctcatctattagcacaaagccagcactctgggtgggcaagtaactttgctctgtttccaaacagctagaaayatccttttccctgaataatatccatgttaggctttcagagctgagtgagtaataagatactagggagagtcctggataacaggtaagtggagttggaaccacttccagagcaaaggataaatgctcttacttggctcataggcctgacatgacatgaacaaaaaaccagagttttctaattgaacctagaaatcaacaactgct

SEQ ID NO: 117915 - DNA, 607 bp, Homo sapiens
atgtgtacatgtgttcaagaagttttggatttctgctggtttgttagccaataaagatctggcactgatcttccccatcctgggagcaatgaggacccaccctggcatcagtgaaggagcaccatttcctgcagggattggctctggtgtgctaggaacaaacagtgctaggaatcaacagcaaaatatgtgcaaatgagatggaaataatggaagtcagtgatgtgggtggcagagggccattgttttagacagagttgcaagtgattgaacaaatctagggtgtgagccatggagatgtctgggaaaacagtattcttggtagaaagaatgttatgtgtaagaaactcaaggtgagggtggtcatggttgaaataatagtgatctcacaatcttatggggctactgtgaggatagcatgtagcaacatatgtgaaagggccrggacaatggggcttagtcatttcttaataaatgaatgtggaaaaatgagaattcacacttgctgatttttgaagaagtaaaacataataaatatatacctacagccagattatatgaaaaacaattgaatccttcaatgattcaaaagctgtacacttcagaa

SEQ ID NO: 117916 - DNA, 553 bp, Homo sapiens
caaacatccagcatttccttcctttccttaagccctgctattctctctagagtcaaggaatcatgtagctccccattctcactcactggtctttactctttgaatttcacttcttgtcttcttggtgtatttgggtacccacaggacaccgggacacttagagcatattcgttcttttacataagattctttttcctgactgaaatctcctcttcactctggttattcttggagaactgctagatgtttaccacctccgtgaagttttctccaaccagacagccaagtagtattgactactcctttccttgtatccccagctttattagacctttcatttcctaattgccagtcacatatttgtcttccctcaaaaagatggcacattccagaggggcatggtatacgtaggaatggtagtcaggtarataggagtggaggagggaggcaggaaccataatgatgagtgtgcccttgtgagggtgaatgaatgctctgggtgagaggactggaaagatggttggacaagtttgcatcagaaatggtggcattt

SEQ ID NO: 117917 - DNA, 582 bp, Homo sapiens
gagctaaattataaattgttataatttcaaactgtttcttgccttgaaataggcaacattttaatttgcagttgtttgtacatgaagaaawgctacagttctgtctggtgagtggcctcaggtgactatcctaagaatacatttgtgtatgggttaggggcattctgaaatataattctatctatggacatacagggcttcagtcagagagagaaataaagacctggtaactgggtatacaatggaagccaaatttcaatgataaactgttgatcactcagaaaaaaatccttcagtgcttaaggggcaaaactagcaaaatggatttagcagctcaatgcaaacattagagggagtgggagtcttggtgctgtttcagtgcagtgactataatatttaaacaaccaggttggaaaggtacttgcatatgggaagaaaatggtttcaaatcactctgaaggtctgagcaatcctgttgtgggaccttctttgaaaagaaaatcatgggagcaaaaagtatttccttacaagagaagaaagagcacaacattgtctgagcagcagtagctctggagtgagcca

SEQ ID NO: 117918 - DNA, 634 bp, Homo sapiens
ctattgttataattattattactgttttgattcttaaaagtgtcccatttgggacaataattttttttgctggaattaatgaatgcatatgaaccctrtgattctttgagaagcagtttaccaactgtttgtatacagaatatgtcttggattggaaattgtaaatcctttgttccggttccaaatccagtcatttagtaggtataatatccctagatgatccgcaaggcaggtacaagctttaacaggcaacatccccaaatatctttattagcacgcattctagtatatcagaccaataaccgaatatttcagacaaaacgattccgtctctagagatttgcaaagaagttcaaagttagttaatagtctaaagttttcattggcacaggggcaggttttggcttacaataagaaaaattacgagaaccatgcaaacctcctgagtcagtgagcacctgttgctggaaacacacaaccaactccccagtgtattcccatggaaagagtgctgagttgtaaaatccgatcttaacttatcagttaatacctggaatacttaatccctctgggacaaggtcctttcatgtttaaactttagaatacacttttaattcttcctcatattttctct

SEQ ID NO: 117919 - DNA, 622 bp, Homo sapiens
tctcagggcgcattgatcgggagaaatatgaagcattgcatataaatgggaaaaggggatattaaakgagccctgaagttggagccctcagagaccactcagggattcttggggaagatgtgcacacactctgcagtttgtgttcattttatgttggcacctaatgactgtcacctgaaaagttgaaagtcctttaggaatctatgttttcatccctgtttaatgaatggacaaaggaagtgcagagaggcaagtggaagtacgcagaggcacgcagtaaagaaacttggtacccaaggcagtgcttaccagtcacaatttccaccctggtgtccccccaataccaatatatcatcacaagaaatctatttcatatacagtgcttggctcagagcaaatattccaatcctcttggtttcattcaacaaatctttagctcatgtttataatgaggtctgtagctcagggagctcctgaacttgcaaacaaactcctcccttggctatggaaggtctacactgtcgttgggggcttctggatgaggaggtggctgctggagatagggataccctccacttcagctgcctgtcttcccaacagatacttaaaaccaagtttcagc

SEQ ID NO: 117920 - DNA, 622 bp, Homo sapiens
tctcagggcgcattgatcgggagaaatatgaagcattgcatataaatgggaaaaggggatattaaatgagccctgaagttggagccctcagagaccactcagggattcttggggaagatgtgcacacactctgcagtttgtgttcattttatgttggcacctaatgactgtcacctgaaaagttgaaagtcctttaggaatctatgttttcatccctgtttaatgaatggacaaaggaagtgcagagaggcaagtggaagtacgcagaggcacgcagtaaagaaacttggtacccaaggcagtgcttaccagtcacaatttccaccctggtgtccccccaataccaatatatcrtcacaagaaatctatttcatatacagtgcttggctcagagcaaatattccaatcctcttggtttcattcaacaaatctttagctcatgtttataatgaggtctgtagctcagggagctcctgaacttgcaaacaaactcctcccttggctatggaaggtctacactgtcgttgggggcttctggatgaggaggtggctgctggagatagggataccctccacttcagctgcctgtcttcccaacagatacttaaaaccaagtttcagc

SEQ ID NO: 117921 - DNA, 622 bp, Homo sapiens
tctcagggcgcattgatcgggagaaatatgaagcattgcatataaatgggaaaaggggatattaaatgagccctgaagttggagccctcagagaccactcagggattcttggggaagatgtgcacacactctgcagtttgtgttcattttatgttggcacctaatgactgtcacctgaaaagttgaaagtcctttaggaatctatgttttcatccctgtttaatgaatggacaaaggaagtgcagagaggcaagtggaagtacgcagaggcacgcagtaaagaaacttggtacccaaggcagtgcttaccagtcacaatttccaccctggtgtccccccaataccaatatatcatcacaagaaatctatttcatatacagtgcttggctcagagcaaatattccaatcctcttggtttcattcaacaaatctttagctcakgtttataatgaggtctgtagctcagggagctcctgaacttgcaaacaaactcctcccttggctatggaaggtctacactgtcgttgggggcttctggatgaggaggtggctgctggagatagggataccctccacttcagctgcctgtcttcccaacagatacttaaaaccaagtttcagc

SEQ ID NO: 117922 - DNA, 553 bp, Homo sapiens
tcaagatattctactaaggtgctttatacttctcaaggctctctctagcttcacttaaacacttaacagaaaaaaaaaaaaaaagatttggggctttccttccacttacttattccccaggtcagatttttacccaacacaatctttttcaatcaaaaaagagagttaatagttccaactagtacttgaagggatgtcactgcaggaaattcaattttacttctttgggccaactcaattcattctgaccagaaaaggagaaagacagagagagagcaagagtagggagaataaatacatatataatttttttttcacttgcaccaattcttactaagtggctagtacctttcttaactttgcttctataattacatcagaggataagttgtgaaccaatgaatacagtaaaggtaaccatgggtccttagatgaatttgaatgaggtgcagggtctcagcaaatactagccaaccccagaagttgactgtagtcrgattgtagcaaagatttcatcaggtgcaattaattgcagtgggttcataccacttag

SEQ ID NO: 117923 - DNA, 613 bp, Homo sapiens
tgtgaggtatatatgatcattggccttaatttaccaatgaaaaaatagaggccacagctctgctttaagccagctagtggcagagctcagataagaacctaggcagcctgctccgtggctcgtgcttttagccactaggctttgctgtgtaaatatgacacaaactgataaacaagagggcaaaaagaaagcgttgcaggctgggcgtggtggctcatgcctgtaatcccagcactttgggaggccaaggtgggcggagaatcacttgagctcaggagttckagaccagcctggccaacatggtgaaaccccgtctctactaaaaaaatacaaaaaattatccaggtatggtggctcatgcctgaagtcccagcttcttgggaggctgaggcagcataattgcttgaacctgggaggtggggggttgcagtgagcctagatagtgccactacactccagcctgggtgacagagtgagactctatctcaaaaaaaaaaaaaaagaaagaaagaaaagaaagcattgccatttctatggattggattaaatgctttgaaaggactcactgaagccattccgttaaaaaaaaaaaaaaaaaaaaaaggacttcaca

SEQ ID NO: 117924 - DNA, 613 bp, Homo sapiens
tgtgaggtatatatgatcattggccttaatttaccaatgaaaaaatagaggccacagctctgctttaagccagctagtggcagagctcagataagaacctaggcagcctgctccgtggctcgtgcttttagccactaggctttgctgtgtaaatatgacacaaactgataaacaagagggcaaaaagaaagcgttgcaggctgggcgtggtggctcatgcctgtaatcccagcactttgggaggccaaggtgggcggagaatcacttgagctcaggagttcgagaccagcctggccaacatggtgaaaccccgtctctactaaaaaaatacaaaaaattatccaggtrtggtggctcatgcctgaagtcccagcttcttgggaggctgaggcagcataattgcttgaacctgggaggtggggggttgcagtgagcctagatagtgccactacactccagcctgggtgacagagtgagactctatctcaaaaaaaaaaaaaaagaaagaaagaaaagaaagcattgccatttctatggattggattaaatgctttgaaaggactcactgaagccattccgttaaaaaaaaaaaaaaaaaaaaaaggacttcaca

SEQ ID NO: 117925 - DNA, 587 bp, Homo sapiens
cttactggattatcacatttaatttccttcaaaaactttcctttgaattcacaacttgactaactggcacaaaaagcctacctttcagcctgtgttggctttcaacatgccttcctcactaagcttaatcatttcttgcttcttttttgtttttttttttagacagagtttcactcttgttgcctccccaggctggagtgcaatggcgtgatcttggctgactgcaacctcctcctcccaggctcaagcaattctcctgcctcagcatcccaagtagctgggattataggcatgtgccaccacatctggctaactttgtacttttagtagagatgrggtttcaccatgttggtcaggctggtctcgaactcctgacctcaggtgatcctcccacctcaagtgagagaagtccaactcctcctttcacttgaatacttacaggccatgataacattattaattgacctagtttttatttgctacatattagtgaatgggaggattgaggaaagggagagagacaggggaataatagctggttggtggagcagtcagaacacaaacaacatgtatgaagtaagttcgct

SEQ ID NO: 117926 - DNA, 587 bp, Homo sapiens
cttactggattatcacatttaatttccttcaaaaactttcctttgaattcacaacttgactaactggcacaaaaagcctacctttcagcctgtgttggctttcaacatgccttcctcactaagcttaatcatttcttgcttcttttttgtttttttttttagacagagtttcactcttgttgcctccccaggctggagtgcaatggcgtgatcttggctgactgcaacctcctcctcccaggctcaagcaattctcctgcctcagcatcccaagtagctgggattataggcatgtgccaccacatctggctaactttgtacttttagtagagatgaggtttcaccatgttggtcaggctggtctcgaactcctgacctcaggtgatcctcccacctcaagtgagagaagtccaactcctcctttcacttgaatacttacaggccatgataacattattaattgacctagtttttatttgctacatattagtgaatgggaggattgaggaaagggagagrgacaggggaataatagctggttggtggagcagtcagaacacaaacaacatgtatgaagtaagttcgct

SEQ ID NO: 117927 - DNA, 491 bp, Homo sapiens
atgttggtggggaagattcccgtaaattttggctacattttgaaacttacatagggtggaatcacatggcagagctggaccacagaactatggttttatttttattttttsttctatttcaatatagataacaataaggtaatcagacaaagtacagtgtactgttaaacagtatattgccaaatatgctgtacaatatattgctgtatatgctgataggaagaaatccaatgcgaaactgtatcattactaaacaaatgcaaaatcctgagcctgcttgacagggacactaattcttttttaaaagattaagatctatggaaacatagataattagagcatcaaatttataaagcacacattcattatgttgtagttttccccctgagtctttagtctaaatatagatgttgtcttttgggctgaatcacaaattacaaagccttagcccagggaagacagcagaggctgagtgaaagcacatcacagcc

SEQ ID NO: 117928 - DNA, 615 bp, Homo sapiens
gtttgttatgaaactgttgttacttgatgtttccaaggtttcctatctttagaataccagagaagggctgaggctgtggggactaaaaacagactagggtggctgtgctacaaaaattaaactgttggatagcccaaattatattgtagaggtagacacaaccttgtagaacatactaaggaagcttattgggaaactctggaaagattttcagtaaaaaaaagtgagatcttccaatgtgctatggtcgaatgtgacccaacagttgaagaatatacaagatttttattcaaggtccactatttttaaagatgtattctctttccacaaggaaggctctctaagtgcaatgcagtattcataaacctagtaataaggcaggagtgcatttggaaagactattaggacaattaccatggagatccarctgtcctgttaatattattttgactcctttcagcccaacctcttcagttcataaaaagactaaactttgcaatgtttgagcataaaatcagcccatattaaaacacaagcaccactgcatgtctatccaatctgtttcccttgcagttcttttcatgcagctttcaaactgaagaaaaatatattctg

SEQ ID NO: 117929 - DNA, 549 bp, Homo sapiens
gtcactgacacccatcctgtttcctgtgctaacagaccaacagctttgctcttatcttcaccccctggcagcatgactctgagctgtgtccctagatagcatgtaattcycaccagtgtttatggaatattccatctagcgcatctcctccgctgactcatcatgttcagtttgagaacttcaaactggccagtgttggtggacggggcaagtgtgacccaagagccacccacaggcaagtagcccccgctccaggctcacctcttcttcccttttgcataactccattccaatcctccatctgtcagtctcttccactcagctctcccaatagctgggctgtttagttgacatcaactcccaacagctgggctgtgtggttgtcctgatgttgacatccttgggctgtttgtaaaggagaagcctctagcattcttactgcatttttgtttttgtttttgttgttgttttcttttaagatacggtctcgctctgttgcccaggctggagtgcagtggctccatcatagttcgctgcagccttggactc

SEQ ID NO: 117930 - DNA, 549 bp, Homo sapiens
gtcactgacacccatcctgtttcctgtgctaacagaccaacagctttgctcttatcttcaccccctggcagcatgactctgagctgtgtccctagatagcatgtaattcccaccagtgtttatggaatattccatctagcgcatctcctccgctgactcatcatgttcagtttgagaacttcaaactggccagtgttggtggacggggcaagtgtgacccaagagccacccacaggcaagtagcccccgctccaggctcacctcttcttcccttttgcataactccattccaatcctccatctgtcagtctcttccactcagctctcccaatagctgggctgtttagttgacatcawctcccaacagctgggctgtgtggttgtcctgatgttgacatccttgggctgtttgtaaaggagaagcctctagcattcttactgcatttttgtttttgtttttgttgttgttttcttttaagatacggtctcgctctgttgcccaggctggagtgcagtggctccatcatagttcgctgcagccttggactc

SEQ ID NO: 117931 - DNA, 559 bp, Homo sapiens
ttactctcaaaagaagacgtctgcagagggtggtcaaaggcttaaagcacagactggttctgaatttscaactgtctctcatttctcaggtgaaccagtcaatctaaagcatttattttatgcacaatctgggcaaaatggaggtgtgtgagttagggggaagcttcctagctgaatggtttattgtgttctggtttactatgtattatgtttattgtgtagcttgcagtataatttgaagtcagatgatgtgacagtggggctgcaaatagcttagcaggcaagctctgcgtcaaactgctaccttgaatctgagggaccctggttactatccagagttactgtcctcctcatacctcagttgcctcatttgtaaaataaagataataatatctacttacacagttgtgagggtccacaagtcataagctatataaagccctttgcaagtctctggcatatagtgactgctctataaatgattgttattagaaaacaattagtggggggaggaggggaagtattcacattcatgcagaaagttccagagaatcagatt

SEQ ID NO: 117932 - DNA, 574 bp, Homo sapiens
actggtaagctattagcaaagataaagagcaaatgataatttgttgacatatgctgttatgtaattgtgtcacattaaaatgggatagaatggttagtgatctgataaagccaccagctgaaaaacgaaacctctcttcttcagtgggtgcctgtgacatcaaggcactgatcaggacagaaggtatttgaaactctggaaaaaggaaatctaagttatctctaagtaacttaaatcaatgaaatactatcatatctattaatatatttcacatatatggtacacatgtgaaatatatgtggtatatatgtgaaatattaatatataagatatacaacattgacatttaacacatgacatgtataacaatgtatcacatatgtattacatagaataaagtagtatttcaatttataacaaattactttctttgttatgcctcctttatgtaagttrgatatatcagtttatgttatcaaagtaacacctgtacaataattccagtaatgtaggttgatgggtttgacacacagaaatcacttcaggaaatgtattgccacaaagggaatggaag

SEQ ID NO: 117933 - DNA, 414 bp, Homo sapiens
gccctttgcttctctgggccctcatgcacccagcccatttcttcctccaggccatttttcttgctgtgccctatcatcccagtcctgaaagcctgcctccttcctttggctcctctgaatcctgcccaccattcaacatccagttgtggccccctcctcagtgaagccctcgctgactgctgaagttgtcctgactcttctttccttcactgagccatgaggctgtactggcttctcacttgctgcatattttgtaattaatgagtcactagacaagtttatcaaaatgttgacattggtttctgcataaaaccacaacataaatcaagtcattcatgtagcaagtatttactgagcacytagtccacagtcagccctgtaagcaacattccacaccagaaaatgcaggaattc

SEQ ID NO: 117934 - DNA, 481 bp, Homo sapiens
agcaaaaggcagccccagaagacgtggggaagaaaagagccccaggagaaggccgcatccaaggggtaagaagggagaatcctggagaaaagtcatggggtcctttggccatcaggcagttcagaagcagggatgactaagagactgtgggactagattgaggtgaaaatctgatgtgagaaaaagcatttgagttgcataaataaggccagtgaaaactgcaagaaatcamgttttccagaatagtgacatttgggaccaaatgtcagccttggtgccaagaagggtttctacatccattgcaagacctttgaaagttaatcctattgtggtggggaaagctgtccctttatttgtacagtctgttattttgccctttggggaaaacacagtgatgtgaatcacactgtgacttccatctctggtgaagaaggttgtgtttgggggagctggtagacatgaaagccatgaacattcaaaa

SEQ ID NO: 117935 - DNA, 481 bp, Homo sapiens
agcaaaaggcagccccagaagacgtggggaagaaaagagccccaggagaaggccgcatccaaggggtaagaagggagaatcctggagaaaagtcatggggtcctttggccatcaggcagttcagaagcagggatgactaagagactgtgggactagattgaggtgaaaatctgatgtgagaaaaagcatttgagttgcataaataaggccagtgaaaactgcaagaaatcacgttttccagaatagtgacatttgggaccaaatgtcagccttggtgccaagaagggtttctacatccattgcaagacctttgaaagttaatcctattgtggtggggaaagctgtccctttatttgtacagtctgttattttgccctttggggaaaacacagtgatgtgaatcacactgtgacttccatctctgrtgaagaaggttgtgtttgggggagctggtagacatgaaagccatgaacattcaaaa

SEQ ID NO: 117936 - DNA, 471 bp, Homo sapiens
tctgcagcgcttgaagaagctttgggatggtttcctccttcaagggtgactctgaggttcgttttatccttgtgcttcttgctcagggaagggagagcagtgcaattctacgttgccttatggagaggatcttgattgccctaacttttatcaaagtggttctcaaagtagttctcaaagtgggttctccaggacaacagcatcaacatcttttgggactttgctagagatgcacgtgctgggaccctactcagacccactgaatcagaaactcagggctcgggcctcgcaatctgtgatttaacaagtcttccaggtgattctggggcttgctgaagtttgagaacccctgctctacatttcttgaagacaagggctgtaacttactcatctttctgtctcataacccagcaargtttctggcatgtagacacagacaattatatgtttactgaatagccgggcatggtg

SEQ ID NO: 117937 - DNA, 503 bp, Homo sapiens
gaaacttgcatgttatttttttaarttgaggatgaagcaaaatatagccaaggaaggaatacatctgcatatttaatggccaaataaataaatataatacaaccactaagattttcaggagtttacagttactgcaatgataaaatttggtttgtttttctttcaggttattcttttctactttttcctctgatagagcagttgaagcagttaaaaggatttcttaaaaaatctgacaacactgcaaatttatgctgaatacatacagtatctaatttaaagtaaaaggaactaaactttttcccctcacttttgattcttaatattctttatcagctggttgaagagttcctagctctgactgttcatgcttgcaaatacgagttaaaaatactgtgagagttcatttaatttccacttaaaattcacaggaagtcatacttgttaccaggaaacactgtacttcttttagagaatatctaatccagataggctaaattata

SEQ ID NO: 117938 - DNA, 503 bp, Homo sapiens
gaaacttgcatgttatttttttaaattgaggatgaagcaaaatatagccaaggaaggaatacatctgcatatttaatggccaaataaataaatataatacaaccactaagattttcaggagtttacagttactgcaatgataaaatttggtttgtttttctttcaggttattcttttctactttttcctctgatagagcagttgaagcagttaaaaggatttcttaaaaaatctgacaacactgcamatttatgctgaatacatacagtatctaatttaaagtaaaaggaactaaactttttcccctcacttttgattcttaatattctttatcagctggttgaagagttcctagctctgactgttcatgcttgcaaatacgagttaaaaatactgtgagagttcatttaatttccacttaaaattcacaggaagtcatacttgttaccaggaaacactgtacttcttttagagaatatctaatccagataggctaaattata

SEQ ID NO: 117939 - DNA, 582 bp, Homo sapiens
gataaattaaaatataaaaatttatcaacaaattatatttacactagacattcttacttactctgaagagaaaaaattaggaacaaaatatttcttacacattaatagaaaattcttcttacctaaggtggcattttatttgaatacttgaaaggatgttataaagaatattaggaatttgactttgggaaagttgtaatccatcaaatagctgctggttttcttatttctgtggtatactttgttgaatccatatagattctgatattttgttatttttattcctactctatattttattacttgttttttctttagcttttataaagtctcctctatgtaggttttcttaaaatttcttatggttgataaaatagaatgagtgcaatcttygaagtcagacagaactaggtttgaatttcagctgtactacttactaccagtgtggtcttcaacaggtcacttaatttaccaaagcctgtttctttatattataatatggagacaaaagcagttaccttacacgattgttgcaagcatcctagatagcacattaaaatcatggtgagagatcttacatgg

SEQ ID NO: 117940 - DNA, 604 bp, Homo sapiens
ttcttcagctttgattactatgcagtgctcaaaactgtgtcctgcatatactgatgctccctaaatattaattctgaaataacaattacctttgtagagcactttacattttatccagctctcctgcatggattaactcactgagcctcacaatgagcccctaagataagtccctattgggcaaaaaaggaaacaggctcagtagtgttacaaggctaatgaaaggaacaagggctcaagtctaagtttcctgattttagatgccccctgctttctctactgtacccttctgcctatagaacagaatgtaatgtcatttcatgtaaatagttcttcctatgattgagcagaacggagaatatctggctggaggtaccagatcagctttgtggaagaggtgggggcttgtttgagaagggcttggaaacattgggcatgcagcatgctagagagaagataagtgatcttttgkaactatagtacaaggagagacaagtcttgcattaaaattagtttcactatttctcatttgagaaaacagtagtacttgggtttcacataaagtgtttatttttaaaggtaacacatgaattgcaactgtaca

SEQ ID NO: 117941 - DNA, 604 bp, Homo sapiens
ttcttcagctttgattactatgcagtgctcaaaactgtgtcctgcatatactgatgctccctaaatattaattctgaaataacaattacctttgtagagcactttacattttatccagctctcctgcatggattaactcactgagcctcacaatgagcccctaagataagtccctattgggcaaaaaaggaaacaggctcagtagtgttacaaggctaatgaaaggaacaagggctcaagtctaagtttcctgattttagatgccccctgctttctctactgtacccttctgcctatagaacagaatgtaatgtcatttcatgtaaatagttcttcctatgattgagcagaacggagaatatctggctggaggtaccagatcagctttgtggaagaggtgggggcttgtttgagaagggcttggaaacattgggcatgcagcatgctagagagaagataagtgatcttttggaactatagtacamggagagacaagtcttgcattaaaattagtttcactatttctcatttgagaaaacagtagtacttgggtttcacataaagtgtttatttttaaaggtaacacatgaattgcaactgtaca

SEQ ID NO: 117942 - DNA, 606 bp, Homo sapiens
aaggcttaggtttctatacttcattctgccatgtaaatttccttaattaatgtctagtaaggaaatcaatacaatttcctttcatgagatcaaaagttctcagtaggagttatgggttcaactgataattattttaaaattttattaaacaaatactcatacacttacagtctacaagtcaatgccaattgtaacaaaggagaggtagcctaacggtgttgaaaacatgacctatatgggcagcacttctcagtggatcagcaggagattggcatcacctgggagcttgctagaaatgcaaattctcagactgatcttcaatatcctgaaccagaacctctgggggtaatgcccaggagtatgtttttaacaagccatgaaattgtggtaagaaayggtcttggaaaaccatagagcattatgaaagggaaggtattattgatgagacaagattcagggctttacagtaggtaaagaaacatactgattgggccaataagtgtgtttcattgaagggagcaaaagaggcttaggacatgaatcagctgctgtagacctaagactcacaaggcagcaaatgcagcaacagctcctggaagcacgtgt

SEQ ID NO: 117943 - DNA, 564 bp, Homo sapiens
gctgaagtttgcccacccctgatctcaatgaccatcccagcccctgtgctcatttggttttctacctcttctttgggcatttccttctcctaaacttgatttgattttaaggcacacctggtatgtctcagtggkaacattcctagtgataaggtgcatgaaaatcggatttagatctggctcatcttttaaaccttaaaaaaatcaacttcacctttaactgcatctggtgttaaggatcttaacaggtgctgctaagggcatagttctgctacagctttatctatagatgctgtggattagggagaagctttctcagggacctcatcattaaaagaaaacacataatgatctgcttcatacttactaggtatagttgaatgaaagtatatgggataaattagggaaaattacttatatctctgcttatctatagctttgagatggataaattcaaagataattattctcccttaaaacttattaatatattgccctatgacattgctttgtgtggatcgaagtgtatgcaccagaggaagagtgagatgttatgtaaagcag

SEQ ID NO: 117944 - DNA, 596 bp, Homo sapiens
catagttctgctacagctttatctatagatgctgtggattagggagaagctttctcagggacctcatcattaaaagaaaacacataatgatctgcttcatacttactaggtatagttgaatgaaagtatatgggataaattagggaaaattacttatatctctgcttatctatagctttgagatggataaattcaaagataattattctcccttaaaacttattaatatattgccctatgacattgctttgtgtggatcgaagtgtatgcaccagaggaagartgagatgttatgtaaagcaggatctctaacctaccttccttctaaaaatatgtgagatatatgtaataagaccactgaataagaccatattactacagtaagaccaacaaaagacatataaaaagacaactgaaatagaaaaagaaaagtaaaaaccacagagaaagaaggagagtaaccaaatataagcaaatatgtagttgaacatgtagatttggcttccggctttttggctgaaagaccaggttaagatggctgagatggaatgaggatccctatattattttggcatacacaatttgttttacactga

SEQ ID NO: 117945 - DNA, 579 bp, Homo sapiens
tgctactttaatgacatcaatgaagtctttagttatgaaattaattctcaaataataatttggatttggtaaagctttcctttggatctgataagtgttattgatattagatggggtgaagctagtgtgtagatggaaaaatagcaaactgagtagctaattgacaactgaactcgttacagcttttttattttccataaaactaaagtaaataatagttttaatgaaagcaagcataatcatttctgtgacctattttaatgtccccttacatacttatagttaaattagtcaatatttttattctacatgttcaaaagatcattactcttgcttaaaagattaagcactttgagtgtcttccaaaaagcttttcctatccttgtctcattggatatagagttagaataaaatgatctacaactaatgatttgtagttctcatttggycaattagaagatcccttgaattgctctgaacaacagagtgactcaactcctttttaagagccaatgtgatattttagataaagctgacaatgctaaaaatactaacgactatatatatgggataataaaa

SEQ ID NO: 117946 - DNA, 566 bp, Homo sapiens
gggcactttcttccaatagccctcttctgataattgattcaattttaagtagattgtggaagagaaatacttactggaaagaaatcccttaatatatctgccatctccccaacaaaaaaaaaaggaactgtttatttgctttaaacgtcttaggcaattattttgcaggagatatgttttgtcataaggctgcttattaggaggaatgtatcaggaggttatgctcagcatggaaggagatcatgtcctccagccgcctaaaggacgataattgttctcagcatctttctgaaccatggagcctctgtaaaagttctgccaaattcaattagatgccctttattgctgggcattttctcctgtcatgtctttttcaagcatatccttcatgtttcatttgtatatattttaacctttgggtatatacttgaaactcaaatgtacctaaagctgaaataaattttcaaamcactttccattgccatgtgaaaaaaaatttaaagccttttcattatagtacagtttgttaaaactcaatgaataaattttaaaccagcaaaaaaaaa

SEQ ID NO: 117947 - DNA, 517 bp, Homo sapiens
taaaatactgtgaattagatttgatctcataattaatcatattgaaaaaaatcaataatagttacagcctcaaatcagaaatattccatttttactagaagccacaaatataaatcaatctattttaatgaaacacagatgtaaatcagtctacattaaagtttgagattatactacagaagctttttctttttctttaaatctgacttggtgtataaattctttcagcaaataccaagaactcttgccaggagcagtggctcgtgcctgtaatcccagcactttgggaggctgaggcgggcagatcacttgaggtcaggagttcaagaccagcctggccaacatggcgaaaacctgtctctactgaaaatacaaaaactagccgggcrtgttggcgcattcctgtaatcccagctcagctacttgggaggctgaggcaggagaatcacttgaacccaggaggcagaggttgcagtgagctgatatcacgccattgcacacccgcctgggggacaaa

SEQ ID NO: 117948 - DNA, 517 bp, Homo sapiens
taaaatactgtgaattagatttgatctcataattaatcatattgaaaaaaatcaataatagttacagcctcaaatcagaaatattccatttttactagaagccacaaatataaatcaatctattttaatgaaacacagatgtaaatcagtctacattaaagtttgagattatactacagaagctttttctttttctttaaatctgacttggtgtataaattctttcagcaaataccaagaactcttgccaggagcagtggctcgtgcctgtaatcccagcactttgggaggctgaggcgggcagatcacttgaggtcaggagttcaagaccagcctggccaacatggcgaaaacctgtctctactgaaaatacaaaaactagccgggcatgttggygcattcctgtaatcccagctcagctacttgggaggctgaggcaggagaatcacttgaacccaggaggcagaggttgcagtgagctgatatcacgccattgcacacccgcctgggggacaaa

SEQ ID NO: 117949 - DNA, 616 bp, Homo sapiens
caaatcaagtgatcttaaaggaaacctcataaaaccatgtgaagagttccacaaatagtatggagaggctaaggccctgggacagatgactctcttcaactgaaacaattcctaaagagtgctgagagtagaggactgaacaataaatcttatttctgaagagtatctctgagtatcacagcatccatgaatttatagtagatctttctcttgctaactctgtctttctcttaaaaactagtcttccccaccccaattgcactttgcatttagaaataaaaatcctaaaaacacaaatcacctcaaagtacgaaaatagaggcatgacaaaatgcctgaacaagaaaaaagaatgaaaacaatagcctggcttgaatatgagaagaaaatgaaataaatacaggtagaataccaaagttaagatatacatatctgccatatatgttacaaatccagattatattaaaggcaggcaattgamattctcttacgctaaaaacaaagttgcattattttccaagagcatgttcagggaactttacataattaatgcagtcattaattatttcattacaatgtttgactacctattctgtgtctgaccatgaattaagtg

SEQ ID NO: 117950 - DNA, 556 bp, Homo sapiens
atcatttttattattgtaaattctaccctctccctccaaatatgtggatagctatattacaggacaactgtttttttttaatttttttaaaataaatattaagtaataaatcatggcacaaaaactgtgctgatacttcttagaacttcccagtttataaagttgccatgcataacaaaaatgtttaaagtgtcatgcttttaaagatattttatttgtttatctaaaacatagtttccatagaccacaaagaaaactatgtttttaataaattaataaaatattgtccactgagtaccggaaattgagaaagcacaytgacaacaaacaagaagccagcatgacatatacattcttacaaataaataagataatttcagataaccattatgttccaagcacaaaaatgatactgtgagacagactaactttattaggatgttctttaatataaagggatcaaggaaaacctcttagattttacatgttttgacctctgaattaaaacctaaacaagtggtagtaatccatgaaaaaacttgtgtatactgaattc

SEQ ID NO: 117951 - DNA, 614 bp, Homo sapiens
ttttattttcacctactccataaaagagttatagggagccctcaagggtctatgaacrcacattttggaaaccacaaaggtattacaacacttatatgccataattagtcaagggatatggctttattcaaaaaatcttgacaattttttattaaaactcaaatgcaaacagttactccatgcgatatataattctatatttatttaatgttaaaataaataaaagtaatcaacttatcttttaatcatttctccactaatcatcagtcctccaaaatgtccttccagacaatattaactctaaatcatttgtccattattttttcttaaataatgtgggtttatatttcagttctgataatttttacagtttttcttaatctatgaaatgacaggaatctaagaagaaaataaagcctcttcaatatttcttccctgcttccttcccaacagaaccccaattttttgaaaaacagtggacagagagactattcctttgggagaggtagttttttcccacaactttaaaagtagaatcattctttgcttaaacctgttactatacattctattttgtttatattcctctttctttttttcaggcttctttgcaa

SEQ ID NO: 117952 - DNA, 614 bp, Homo sapiens
ttttattttcacctactccataaaagagttatagggagccctcaagggtctatgaacgcacattttggaaaccacaaaggtattacaacacttatatgccatarttagtcaagggatatggctttattcaaaaaatcttgacaattttttattaaaactcaaatgcaaacagttactccatgcgatatataattctatatttatttaatgttaaaataaataaaagtaatcaacttatcttttaatcatttctccactaatcatcagtcctccaaaatgtccttccagacaatattaactctaaatcatttgtccattattttttcttaaataatgtgggtttatatttcagttctgataatttttacagtttttcttaatctatgaaatgacaggaatctaagaagaaaataaagcctcttcaatatttcttccctgcttccttcccaacagaaccccaattttttgaaaaacagtggacagagagactattcctttgggagaggtagttttttcccacaactttaaaagtagaatcattctttgcttaaacctgttactatacattctattttgtttatattcctctttctttttttcaggcttctttgcaa

SEQ ID NO: 117953 - DNA, 670 bp, Homo sapiens
acacttaaaaaccagcattaacaattctgaacttagaaaaatctcctatatcatgcccagtctatgcagtattatgttttctttcaactatttaatttctactatttgctagaccacattatttttgtattttctctcagtagattgtaattccttttcaggaatatatattgtagtacttcgtctgttgcatatgttcaatcgactatttgtttaacaatctgaaaaaaagacaaagcaaggtaattggaactatggttcaatgtaactgatttggtcctcttttttggtagtgtaaatttatttagcaaatatttattgagcgcttatctttctattagatgtcaggcattgtattaggtataaggtttccatgtagcaaaaatttatgatggagtaaagtcaaggtagtttttatagcaaaaatyaatattaaaaaagcaaaccatgtcttatgtaaaagtttccatcccttgcctttttagtgcatatcaaaacacacttcttattatactgtttctatggaaaaatgcattctaagtattaaccaacttttaagtggatgcttggctttcaatctgtttaaattgaaaactgtttttctgtgaccccttttaacatcttgaagaagatgctctgaaagcttataaatctaggttaacaatcagaa

SEQ ID NO: 117954 - DNA, 597 bp, Homo sapiens
tgagtttaaattttcaggccataggttctgattaacaacattttgatgaggttgagaccaatatatagttctttctcagtctctctctytctctctctctctctctctttctctttctctcactgagaggatatggcaatactaaaccctgggatcaaagaataatattttacctgggataaatgtcccagctaggactcagggatttgcatgatttttctacttgattgctgtggaattttgttaactctcaagctctttaaattgtaggcttaggagactcttggttccgaagtaattggactaatttgaagtcttcctctgacaaagattctttgctaggctggacattagtcaggctcttgaaacttctcctaggaccatctgtgaacttgcttttaaaaagcaatattagcaaataacctttctacggcagtttagcaagaacctttcactcttgatgtcgtctcatccttgttgcaatctaatcaggttcctcatgttccaccatccccccagtgattgatgtcagatcattctcatctgtcttcagcaagaatcctgttaggtgggtttagtcagaatctcccttacccg

SEQ ID NO: 117955 - DNA, 501 bp, Homo sapiens
aaaaggttcacaagagaaaaagttcacaagagtaaaatgtgtaaaagatggccagaataaaactttactagcacttctgctttacagtaaagtgtgctgaaagtgatgaaaggacaaaggaaaataattagcacaaggacataaaatttcaaaatgctcaaaggatagatctggaagttttaatgtatgctaggaatagcttcaggcttaggtagggagagcagatagagaaataaaaagaaaaaacagtctttaaaatgtctaggcaaattttccaagcaaacaaaacattgtctttttaaataaaatattatgttatcactaatttttaaccactatttaatgcttacacacaactgataatgttttggtctcttagatcatagaagtaaacaagacatgtcctttgctttaggtggtasagtaaggaacttacaatactgaaaaaaaattactgtgctgtttaatagctgtgaaatgttgaacaacttcactgtatta

SEQ ID NO: 117956 - DNA, 577 bp, Homo sapiens
acaactgtgctctttccatggaatcaaaaacaagatggcatttatcccaaaaaagatagtagggaaaacttatgttgaacatatatatatatatataatggcggagataagactaaacaaggtggggtcatggattgaaaatatatgtaagcawtgtgtagtctgacagactagaatgatataaataaaagtggtagaaaggaggagagtaacaggggaaaggctaataagcttattgactgctctttagataacatttgggagtcaaaggcttccttttgaaactgacagatagtaaaagcttaagtgagaaaattagattaaggtaaaattaaaaattattacaaaaaatagaaaactcatagaataaaaatacataccttcccatataagtaacagttttagaaaacaaacagaacacaccaaatggtgaaagaaacacagcacatcgtatatggtactgagaccaacataatagtcatcaataaatatgaatgagcatacatggttttcaaagagaaaaatattttcaagtatgctcagaaatgaattaaaaatacattgattaaaaaactaa

SEQ ID NO: 117957 - DNA, 630 bp, Homo sapiens
tatcttctaatttgataattttgtttggaatccattttgttataattagtttttaagcttttatgattcacttatttttcatctttcatttgcaggartgtgtaggtttaatattactgcaagttacatagaactctgggaagacaatattttacaaaactttagtcacttaaaaacatacaaatctatgcagagaccataaacaaaaaatgctctaaaatgatatgagctacacttttttatattaaggatgtttatatttgacattcacttcagaaagaggagataggaaggtttaaacagccagcatgccgaaactagtttttcctgaaatggcttttaccatattcacatctggttcatctaattaggtttgcaattgttataccttcaatattcacattttataggcgtgcacttatcaacatagtcagaacaggatatcttttatttttttaagtgataacaatatataacccttagtatttttgttgttgttgttgttctatttgctttattttgtgttttacatttttctaaacactaacatttttcttcatatttatttggatgtagaatctctagctagagtttcttgcttctggtttgtaattctaatttcaatgttca

SEQ ID NO: 117958 - DNA, 630 bp, Homo sapiens
tatcttctaatttgataattttgtttggaatccattttgttataattagtttttaagcttttatgattcacttatttttcatctttcatttgcaggagtgtgtaggtttaatattactgcaagttacatagaactctgggaagacaatattttacaaaacttyagtcacttaaaaacatacaaatctatgcagagaccataaacaaaaaatgctctaaaatgatatgagctacacttttttatattaaggatgtttatatttgacattcacttcagaaagaggagataggaaggtttaaacagccagcatgccgaaactagtttttcctgaaatggcttttaccatattcacatctggttcatctaattaggtttgcaattgttataccttcaatattcacattttataggcgtgcacttatcaacatagtcagaacaggatatcttttatttttttaagtgataacaatatataacccttagtatttttgttgttgttgttgttctatttgctttattttgtgttttacatttttctaaacactaacatttttcttcatatttatttggatgtagaatctctagctagagtttcttgcttctggtttgtaattctaatttcaatgttca

SEQ ID NO: 117959 - DNA, 640 bp, Homo sapiens
gtgttgcagctgtggcagaagatcattcgyggtgcaggccctggtgctgccaccaagagctcttcacatttcctggctcctgtgacaccaccctgcgccctcgattccaagaaaagctttcctgaaagaaggtaacaaacatatcttcttgtctttccttctttatgttttttacttgccatatatgagtctgctttgtgtatcttgcaaattagctattctgctttacttttctccatgtcatggatctgtttttacagcagtacacactaagcaatgtttccccactggtgtctcctttcatctatatgatattcacatggatctatttctgaaacctctgttctgttccatttatttgtttggggctagagcatcatagtttgataactattgtttagttgcatttcttaaaatctggcaggataagtcccctcctcttttaaacaaaattgatttagatattttgacatttaatctttcataaaatttttactccttgaaccatcttgctgaaatttatcttgacattgcagtggttttataaataatctgggtgcaattatgtttttaaagaagacaaattttgtctttaaccttattcttcttttatctattttggtttagatttttattcttt

SEQ ID NO: 117960 - DNA, 640 bp, Homo sapiens
gtgttgcagctgtggcagaagatcattcgtggtgcaggccctggtgctgccaccaagagctcttcacatttcctggctcctgtgacaccaccctgcgccctcgattccaagaaaagctttcctgaaagaaggtaacaaacatatcttcttgtctttccttctttatgttttttacttgccatatatgagtctgctttgtgtatcttgcaaattagctattctgctttacttttctccatgtcatggatctgtttttacagcagtacrcactaagcaatgtttccccactggtgtctcctttcatctatatgatattcacatggatctatttctgaaacctctgttctgttccatttatttgtttggggctagagcatcatagtttgataactattgtttagttgcatttcttaaaatctggcaggataagtcccctcctcttttaaacaaaattgatttagatattttgacatttaatctttcataaaatttttactccttgaaccatcttgctgaaatttatcttgacattgcagtggttttataaataatctgggtgcaattatgtttttaaagaagacaaattttgtctttaaccttattcttcttttatctattttggtttagatttttattcttt

SEQ ID NO: 117961 - DNA, 520 bp, Homo sapiens
cattttccaatgaaacaaatgtgcacatcctgcacatgtaccccggaacaaaaagaaagaaaggaagagagaaagagagagagagagagagagagaaagaagaaagaaagagagagagagagagagagagagaaagaaagaaagaaagaaagaaagaaagaaagaaagaaagaaagaaagagaaagaaagaaagagagagagagagaaagaaagaaaaagaaaggaaagaaagaaagaaagagagggaaagaaagaattgaatgtaacagacaacataaaaatgggagaaaatatgcaccaattatgcatctgaaaagcagtaatatccagaatttacaaggaactcaaaccactcaaaagataaaaagaaaatctcaattaaaaaatctgccaaagacatgaacagacacttctaaaaggaagacataaaagtgtaaagcaaacatatgaaaaaattttstacattgctaatcatcagagaaatacaaattaaaatcacaatgagatacctactcacag

SEQ ID NO: 117962 - DNA, 600 bp, Homo sapiens
aggaatccattaatgtgtaatggtgtatgttagttatttataagtgagtagccagagaaaagacttatgaggcatccataaagctagggtggtttttaaatttgtaaattaagacaagaaggcataaagaaaccctacagaatgccacatagattagaggaatggaagatgaagaaggaataaatgagttgaagaaagagttatcaggtgatatggggatgaggaaaaagattgttctgtrtaaaaacatgaaattcttgtaaaagaagtcaagagggatgaactcttgaaacaccctttaattgtggaatgggcaagacagtgaccaccttctaaggggaatttcaaagtaacaatgttggttgatttaaatttatctttcttgcaagagaagataaattgatttgggtgaatatcaatgattttacttgtcatgatagataaggtggcatcaagtgagtgaaatttactgaaatgtttatttttatttacaacagaataccatgctttattccatgacattcatagaatgttattttaattgatcggaacccccgcctgaaaaacatttcaaattaatttcctgttttttctttttga

SEQ ID NO: 117963 - DNA, 552 bp, Homo sapiens
tctctttcttgtgaaatacaatactaaggtcccaatgacaatttccctggctcctaaccatgatgtgctgccaaaattagatttatttctaataaatataaattttcagawtgatggaaacagttttcctaaaagctgactgcagcagtatatatttttttctttctttcttcactgtgttctggatttctgttactcatagtttctttattggtgttcatgttttccttctgtattttaaatatgtggaaacatgtaatagataagtgtggaatatcccaggaactattattaatttcatgcattaagacataagaaatctgctagaatagctaggagcttaaccatccctgataacctgaaatggacttgatccagagtggaaagatgtccacattaatacttttacaatcggactcatatgatctgcctagggagggttaagttaaatagcagtgaggtgtccagggttgcctcgtgctttccattttggttcgaaggtatatttacttatgtattttttaatgtgtccaggagaaattaaatacacag

SEQ ID NO: 117964 - DNA, 609 bp, Homo sapiens
ataggtagcttgaaattagccatagtgggaatatttacatcatggaaattgacaaatgctgaaaatcagggcttattttcagagttagcttactggcatgccactgagtataaagagtaatgttaaagaaaatacctgtgtaagtaaaacttttatcaataaatgggtgatcaacaacctctgacaattagtcaactaaaacaccctttagactgggcacagtggctcatacctgtaatcttaacactttgggaagccgaggtgggaggatcacttgaactcaggagttcgagaccagcctgggcaacatagtgagaccttgtctctacttatattttaaaataaattttaaaaaacaccctttatayagactgctaattgcttttagagcaaagagcattcctgctagaagttgaggaattcaatcctcaactggtgtattagtttgttttcacatggctgataaagacatacctgaaactgggaacaaaaagaggtttaattggacttacagttccacacacgtggggaggccccagaatcatggtgggagacaaaaggcaattcttagaaggcagaggcaagaggaaatgagaaagaagcaaaaac

SEQ ID NO: 117965 - DNA, 638 bp, Homo sapiens
ctcaacctcctgggttcatgtgatccttccatataagcctcctgagtagctgggactgcaggtgtgtaccactacaactggctaaatttttcytttatgtggagacaaaatcttgctatgttgcccaggctggtctcaaactcctgggatcaagtgattctcccacctcggcctcccaaactgctgggattataggtatgggccatcatgcccatccttgttaattcttaaaataacatctttgttgagatatacttcacataccagacaagtcacctatttaaagtgtacaattgaatagcttttagtatattcacagagttgtgcaaccttcagcaaaataaattttagaacattttcatcacaccaaaaagaaactgtaagcccattagtggtcatttccattcctccccctgttactgtcctgccctcacacctgtcaccctgcaacactttcctgccttcctaccagccctaggcaaccactaatctactttctgtctctgcagacttgcctactgtggttattttatatcaatggaatcatacaatacatggtgtttttgtgactggtttctttgacttggtataatgttttcaaggttcatccatggtgtagcatgtattggtactacatt

SEQ ID NO: 117966 - DNA, 664 bp, Homo sapiens
taccctgtaccctttactcagcatataatgccttttctctttcattaaaaaatatgtttgtatctcaactcttgaagatttttgtaattcaggttcttatcagcctgaatgtagagaaagaagtaactactacttaaaggaaaaactgacatagcctcatccatattatgatgtagatataagtatagctatgtatagagatgagtgagagagacaaagctagagagatagggagatggagatagagctagagatggaaatagagacagagatagatagctatagagacggaaatggagacagagacagagacrgagatgacagagatgatggagatgatggagatggagatggagactgacatagaggagatagagcttgccctaatagagcttcagtttttttctggttttgctctgtcatagggtaacctgatatacatatatcttatctaatcaccaaatatatcctgcattttaattgaatcaataaataatcattgactatgatctttttggcaactgggttttggaacaaaaattatttttccttttgtttcaggtgaaaaaaaagtgaaggtgtaaaagcagcacaagtgcaataagagatatttcctcaaatttgcctcaagatggaaaccctttgcctcagggcatccttttgg

SEQ ID NO: 117967 - DNA, 621 bp, Homo sapiens
taaggagctctgatgaccatgcctaacccctggttagaattgcttcttttgaatgctaccatgcctgtcaggcgtagagatggttcttagattcattatctgtagaaaagaaaagtgtgcctctttgtaggtattgaccccctcttgctcacttgcttccagtgatcacaatggacttgccagtgctaactaactgtgccccatctaaaaggtttaactgtgatgaattgagctaataaacatttaactgaatgatgcagctactgtttgaattgtcttgatgggacattcctgctttcccatatatctccacttcttaacataaaacactgaacacccccagagacccaactcctgttacttttggttagttgacagtttttcttctgaaatctggatttctgtgtgtcttatagcaaagaacattgagagggagatcatctaaaatgaatagtaaatatctagctactcatgccttaccatagaagccattaccaattgattattgtactcttttttgctgacctacaaatccttctsatcttcttgctccagacagcactatcgatgacagagaattagcaggtgagatgaaacctgttggtcctatgcaccattgtc

SEQ ID NO: 117968 - DNA, 651 bp, Homo sapiens
gtttgtttttctcttgtaaatttatttttatcgatgctggatattagacctttgtcagatgcatagattagaaatattttctcccattctgcatgttgtctctttactctgttgatatccttttgcagtatagaagctcttaagtttaatcagatcctacttctcaatttttgcttttgttgcaattgcttttgttatatttgaaatgaaatctttgtttgtttctatgtccaggatagtattgcctagattatcttccagggtttttataatttggagttttacatttaaatctttaatccatctttttttaaaaaatttttttgagatagagtttcactctgccacccaggctggagtgcagcggcgctatytcagctccctacaccttccacctcccaggctcaaacaattctcatacctcagcctcctgagtagctgggattacagctacctgctatcatgcccacctaatttttgtatttttagtgtagacggggtttcaccatgttggccagactggtcttgaactcctgaccataagtgatccacgctcctcagcctcccacagtgctgggattacaggcatgagccactgcacccagcctttaatccatcttgagttgatttttgtatatggtttaaggaatg

SEQ ID NO: 117969 - DNA, 615 bp, Homo sapiens
ccagccttgccaatatggcaaaaccccatctgtactaaaaatacaaaaagtagctgggcatggtggtacacacctgtaatctcagttactcaggaggctgaggcacaagaatcacttgaacacgggaggtggaggttgcagtaaactaagatggtatgggtggcagagttagactctatctcaaaaaaaaaaatcactgaatttatcactgaatcaatctcttactcttttttttttcctacctctttctctccctttttctctgggtttatggtattagttgaaggactttgatgttttgtaggttcctggacctaacttctattttaggagttattatcattgtttttgtcttgagcatagcagyagattcatgcaaatatattgccattttttctttccactcatttcagtaaccatgccttcaatggagctttccagctcttccctttaagatatggagtctctcctgaccctggactggctgtgagacttgctttggtaggtaaaagtgatagtacgctacttcagagtctaggactcaagaaaccatgcatgtgtctattttctctcctggaatactgccactttcttgagaacaagccaggctagctt

SEQ ID NO: 117970 - DNA, 603 bp, Homo sapiens
ccacgctgcggttacctaagcctgcaaagaaccaatagctcctcaccacaggttattccagtgtctaacccaaacaaatgccctggatttttgttacaacttctctcattaaagtttagtgttgtcttttcctttttagttttattttaataaaacagggacaagggattgtgctgtaaggcacatttccagttgtaaatatttttagcaactccctaacatttttctctcccttcttttccctttccttcccttcctgccctcccttttttctttatcttattgtgtgtgcacacacacatgtgggcttgaaaaaaaatcaatgttctcccagtggatttatttctgagcagacagtttcattcttttagtctttgggtctacacaataagaactaaaatggaaaggtgaagataatcaggagaggaaaaaagtgaaatgtaaaaayatgagcaaagctaatttaaaaattacatagagtgttatcaatatgacatgaatttgtcaagttttaaacatgatgctaacacagtgcctttcaagcagttcaggcacacaaaatgatctctccaagtttatggatgcacagcattaattttataa

SEQ ID NO: 117971 - DNA, 548 bp, Homo sapiens
cttacatcttttgcaattatttaaacttttaatgagatttttagataactgagaaatgggatacagggcatgtaatttttcaaaattcttctaggcatatgtgaacagtttgaagaccttggctcaatggtagttttcctaagcttccttttttacatcatggaggccacttttagtgaaaggagctgctcagaattcacaactcttgctgcccccaactctgctcaattttcccaaaggccaagagaataaatactctgcacayctgtatctctttcattgtatagcacatctaagcctataattttttcccctaacataaatctccaagactaaatagacaaggcagataataacatggttgacttcatttaaggtgggttaacaaactttatcaattaaaattattttgctactcataacagaacatccaactgacagtggcttctaatggtaaggtttatattaactgccttaataaaaagcctggatgtaggggtgcacatttatatttgtcaaagatggctgcaataacaccacgcattcca

SEQ ID NO: 117972 - DNA, 548 bp, Homo sapiens
cttacatcttttgcaattatttaaacttttaatgagatttttagataactgagaaatgggatacagggcatgtaatttttcaaaattcttctaggcatatgtgaacagtttgaagaccttggctcaatggtagttttcctaagcttccttttttacatcatggaggccacttttagtgaaaggagctgctcagaattcacaactcttgctgcccccaactctgctcaattttcccaaaggccaagagaataaatactctgcacacctgtatctctttcattgtatagcacatctaagcctataattttttcccctaacataartctccaagactaaatagacaaggcagataataacatggttgacttcatttaaggtgggttaacaaactttatcaattaaaattattttgctactcataacagaacatccaactgacagtggcttctaatggtaaggtttatattaactgccttaataaaaagcctggatgtaggggtgcacatttatatttgtcaaagatggctgcaataacaccacgcattcca

SEQ ID NO: 117973 - DNA, 518 bp, Homo sapiens
ttcctttgtcttcagctacccaggcaagtagacaaagaccatcaggtgggggcagggttaggtgtatctgagctcagactctccctgggtggggtttgttgtggctgctctgggggttgggggtgtggttcccaggccaatggagttatgttcccaggggattatggctgcctccactgcatcacaaaggtatccagggwaggtggggggaaagccagcagccacaggcctcatctagctcccaagcagcctacagccttttgaaaggccagtcttactctcccaacagcactgagtttattcccaggcagccagtgagcagggctgtgaatttaccccaggctacaagcctcctagttgagaaagcaagctgactcacagttccttggctgtccaatggagcctgcagtggcaatccacctccttcaaagggtctgtggcttctcttggctttcctggtatgttcctgtggtagttcatggagaaaatgttcatgatgtaaatctctacatgctgct

SEQ ID NO: 117974 - DNA, 554 bp, Homo sapiens
tgttaacagaatgtaagaattgtcttttaaaacactaaaatttttaattggctctttttaaaatgattggttaatcaccttaaataataaatgcaactgaaaaaattatttagattgaaatccattcataggactgatatatgtttatggctaaataaaatattaagacaaattaagttattagcagatgctattttagtcccagatggtgatctttgtttgcacacttattaaccaattcattttgcaaggctttgttttctcatcctatacaaacctaaatacaggaacccaggaaaggaccatttctagaaaaccagtrtgccagtgtaatgactttgatgatgaaacactgtatatctttgtactttcatttcctatacatataagcatgggtttcccaataactttcaaatctgaggtaaatcatttccaaggtcccatcttctgatgaaaggttgatcactgttggcaaatactaacagctggccacatagacatagctccaagggccacatttcaaagaggaaaaatacccttgtctaaatttcata

SEQ ID NO: 117975 - DNA, 569 bp, Homo sapiens
cctctctccccccaaaaatctttaggcccagatagtttcactggaagattctaccaaattttaaaagaagagttaagaacaattctgcacaatctcttttataaaacagaagacggaaacatttctcaatcgattttatgagactatattatcctgacatggaaacaagatgaagagagtaccaaaacataaaagaaaaataacacaataatgaccatggagcaatatccttcattaatatagaagcaaaaatccttaataaaatattaggaaataaaattcagcaatatagaaaaagaattatacaaaatgaccaagtggggtttataacaggaatgaaaagctgacttaatgtttgaaatccaattaaggtaatccaccatataaacaggaaaaawccggggtcggggggtggggggaatcacatgatcaaatcaatgcaggaaaagcttttgataaaattcaatacacatttatggttgaaactcttagaaaaaaatgagaaaagaaggactttttcaactacataacaaccatctacaaaaaacctatagttaacgtcattctta

SEQ ID NO: 117976 - DNA, 617 bp, Homo sapiens
cggttacagttttaaaaattcataatgggagctgtttcttgggatggtcacactgtcatctttggacattccattctctaaacaaattagctttctttgtaaacaatctgtgctatggtggacatatttgtctaatactactattctaaaaaagctttcttaatccaggcaccaaccataacttatttygaccactagataatcttgaaaacaattaactcagtgctgaataaaactttgaaattaacttaaaataaaaagataattgtctttcagagttttttttaattactaagatagcctgcggtttgttctttccataaaatattaatatttcactttttttcttctttttggaatgactaataagtaccccacatttttctaacagctttgtctgcaatctatcttgtgagtccaaaaattaatgattttcgaaaacaagtggaccctacaaaaagagaaatattgtcaataggtactgctaacctaactttgagggtatatcattatataggcatatgattatgcctgtataacaacaaaaacccagagacttcattaattttcttccaatgctgtaagttaccacaaacttagtggcttagagcaacaca

SEQ ID NO: 117977 - DNA, 587 bp, Homo sapiens
ccctagaggcggggttggtgctgtcttcctgtgcagggtggccctgtcccatgttctgagttcattgacatacatgggggtatgctttacacccagtggcattttggcaaaatcagccttgcaaatggcccctcaccctggatccttggcatatttcactgcaatttacacagtgctgggggtagggggcagggaatggaagctgggkttttttttttttttcatatgtatattctgaaggaaagaaaggcaaataaagaaaataaaggagatggataaagtcttttctctttcacttcttcctgaatttcccctccttttgttttgtccttgcatctacctcgttcctgttctgatgaaactctatcctttattaaacaaacttacaatatttagatgtggcaattcagacatccaccattgaaaatatagaagcagaggtggttaaaaaaaattccagccaactcactgtgcaaaaggggatggtcaactgattttgaaaacttcagaagaaaagcaaatgaaagtttcaaaatctgtcatttcagtttgtaaactcttccagtaaatagtagccttattattag

SEQ ID NO: 117978 - DNA, 654 bp, Homo sapiens
ttttttaaatagttgttgtaagtgacattttttgcttgatttctttttcagatagtttgttgttagcrtatagaaacacacctgatatttgcatgtttattttgtatcctgcaactttactgaatttgtttattctaacagtttttggtggaatttttagagttctgtctatataagatcatatatatttttcaaacaattagtgaacaatttaacttcattttcaatttggatgctttttatttctttctcttgactaactaccgtgactagcacttccagaactgtgtagattagaaatgatgagagtacacacccttgtcttgttcctaatcttaaaaaaaaagatttcagcttttcacttttgtgtatgacattagctataggattgtcatatatggcttttaatgtattaagttacattccttctatacctaattcgttgagagcttttttttaatcatgaaaggaggctgagttttttcaaatgccttttctgcatctattgagatgatcatatagtcttgcttcattcattcactctatttccactctcattgttgaaaagctatagagtctcacaccttttgttttgctttgttttcattttttgtttgtttgttttcttttaacttttaggttcaggagtatatg

SEQ ID NO: 117979 - DNA, 557 bp, Homo sapiens
ttttattcatttcagtattttcaaattacttttgtgttttcttttacttgtgggttatttggaaatgtgttgtttacttcccaaatatttagaaaatttttagatacattaatacttctgttttaggtttttaatttactttcattttgatcagagagcatactttatataatttcagttcttctaaatttgttgagacttgttttatgacccagtatatggtctagtcaaatgttccatttgcacttagaaagaatgtgttttctgctgttactgtgtggagtagcctatagacatcacatgggtaaagttgattgacagtgttattcaaatctcctgtattcctactgatttttttrtacttgttttatcaattactgagaggagttgaaatctccagttatatttatcaatatcaatcctgtcagtttccattttatcaggttaatgcattttgaagctctgttattgggtgcatactacttagaactgatatgtccctatgatgcactgattattattatgatgaaatgaccctctttatccctagtaatatg

SEQ ID NO: 117980 - DNA, 594 bp, Homo sapiens
tgttaatgtcagccataactatgattatctagaccatacttaagaactgttgactgtgatgggggttcaacttaggaaatagtgatttacatgtacaaaacataaggaagggtttagagacacagttgtagttgtttcattttgtttcgttttgtttaaacacccaaaaactcgcactggtatttattttttcaaagaaaatagagaagggaaaccaaacatatcataaacactcattctcaagagcatgttataaaccatcttacagaaacaaggccatgttaggtagaacgtcccagactgtgtacaccagaagcagttccacagtactgtagggccctctcaccttaaaagttgtggtgccatagagcttggtagtgtgaactgtctctggaagcacattagtgatgttggtgataaattcttccaagtacttacaggatttctccaaatgtgttgtattgataataatctgracaagctagaaaacaacaaacacatgtaaaagtcatttaactactcaccccaggatgaatggctcaatatgaatctgccggtacaaaacaaatgtaaggcataatggaaaaggccatc

SEQ ID NO: 117981 - DNA, 600 bp, Homo sapiens
tcttcaaaaagatgaagaggatcaaaaaattatataacagtttggtagcatggtaggcatctggtagaagagaaaggaaaaaacactaggcagagggtatagtatatgtaaagaaacaggggaatgaaattattcatggaacttttagaatataaggggatattttttgggctattgtagaatatgaagttagtatcgtagatagtgtcttgaacatgaatgccttaaatggcacataaggaaattggactctactgaaaatggtgaagaagcataaatgaatacgggaagttactgattaaattgcatttaggggcagtcattttgcagtttaatgagtggattagagtatagtatgaatgatggccaagaaatcatttagcaaatgttctaatatttctggtgagagacaatgaatggttattaccatgtcagtggcattggtattttagaggagaggactaatgcaagtaagattgcatataataagtataaccataattggatyccccaattcatctatgcaagtacaaagtacaagtacaaggaaagacacagcttagcatcaaatcccatgaccaaagtttggagagtgtagag

SEQ ID NO: 117982 - DNA, 363 bp, Homo sapiens
tccattgctttcttcataatattcctgttcctctaccttgttaacatatggaacattcttataatagctatgtaacagtcctgttctaccagttccatcatgcgtatattttccaggttattgatattattcacctgattataggtcatattgtcctgtttctttgcatcctggtcattgtttactggattcgtgaaattttacatttcatattgttggatgctgtgttgtattcctttaaataatattatattttgttygcacatggattttagttatttgcaattggattcattcaagacttgctcttaagtatctagtgggtccatagcagctttttgtctaggtctaatttgtcaccag

SEQ ID NO: 117983 - DNA, 580 bp, Homo sapiens
gacaaggatgcccactgtcagcacttttattcaacataatactggaagccttggaaagagcattttgtctaaagaaataaaggacatccaaagttgaaaggaagaagacaaattagccttgttagcaaatgacataatcttaaacttagaaaaacctaaagactctactaagaaaactattagaactgataaattctgtaagtttgcaggttacaaaatcaacatacaaaaatcaatagtacaattggaaaatgaaataaaaaaagcaatcccatttataatagctacaaagaacataaaaaacctagaaagcaatttaaccaaagaartgaaagatttatgcaagggaaactacaaaaaactttgatgcaagaaattgaagaggatatacaaaatatggaatgatatttcatgctcatgaggtggtaaaattaatattgttaaaatgacaattctatccaaagcaatctatagattcaatgcaattgctattaaataccaatgtcattcttcacagcagaaaaaaacattcctaaaatttgtatggaatcactaaagttaccaaattagccaaagcaat

SEQ ID NO: 117984 - DNA, 636 bp, Homo sapiens
gttccctgaatatcgctcttttctctgagtcaatttttctatttatcttgttctgtctcttccatgtcatttgttttggcaggtttgccttctcctaaaaataaaaaaaagaggcggggaaaaaagcacgggcattttctatttaagaccaagaaaatatgaatatttacttcgactgttttgtcaatgggtggttcttgataaytggcaggctttgtttcagggcaagagttcacaaactggggtccacagatgctcaaacatgccatcatgaatagaattcaggggatcccatgaccttggacagttaaaaaatacatcttatattcttttatatctacctgaaatttagtgtttctttccattgtgaatggataaagcaataaaccaaaataatacaatacttgtgactttttcttaccaaagttacaaatattttcatattatattacagttactgaaaacgctttaaaatatcatttagattcacagctatttcaaaattacacttattaggcttgctggtagattttgttattggattgcaattttttttagtattttgataactatttcaagataaatgatttcctttgtaatcccatgtattttatttcatgcatttaaaaatattat

SEQ ID NO: 117985 - DNA, 557 bp, Homo sapiens
ggcaggtttgccttctcctaaaaataaaaaaaagaggcggggaaaaaagcacgggcattttctatttaagaccaagaaaatatgaatatttacttcgactgttttgtcaatgggtggttcttgataactggcaggctttgtttcagggcaagagttcacaaactggggtccacagatgctcaaacatgccatcatgaatagaattcaggggatcccatgaccttggacagttaaaaaatacatcttatattcttttatatctacctgaaatttagtgtttctttccattgtgaatggataaagcaataaaccaaaataatacaatacttgtgactttttcttaccaaagttacaaatattttcatattatattacagttactgaaaacgctttaaaatatcatttagattcacagctatttcaaaattacacttattaggcttgctggtagattttgttattggattgcmattttttttagtattttgataactatttcaagataaatgatttcctttgtaatcccatgtattttatttcatgcatttaaaaatatt

SEQ ID NO: 117986 - DNA, 645 bp, Homo sapiens
ttaacttttaggccatgagctcaattagtaaatccataatctggaatattagatcataattatcagcaatatctatgaaattcttttatagtctacatattattattacattatatgaagtaacatgagtatactctgtgatcattagtgtgttgaaaaaattcagcatactttgaaagtatttgtcttatatccagggagtagtctcttaagaagaagtaaagtctagtcaggtatttcaaaaaaagcttttcaatgttataaaattttacatccttcctataatatagagattttattaacaaaatttccctggttcatggggaccatacttgctggcatcagttttaatatacatttaaattatacctaacataggtatggtgtggaaatcttgttatttcattaatgaataccaactgggtataagaaataaaaaaattgatgtctttaagggatgcatgtgcagataaatcattctgtgatgctgtttcctgtaytagaaggaggcatgggggaggagaataaaaaaaaatttatcttcttagtgttgactcttaattttaccctgtatttttacagccccaatctaaatcagagtcctgcccagtttaaacaggaaattacttaactgattgatgcctg

SEQ ID NO: 117987 - DNA, 489 bp, Homo sapiens
atggaatatgcagtattccttggtatttattgtattccccaagtacattttaaatatcatttaattgaattacttatcaaacaaagtttgttgccagctatgtgctaggaactatacacaaagtcaggatctagtccttgaggaatgtagaatttctgaagggattaaaatgtgatttatgcgcaacatttctagctacttttattgtgtaaagtgagctatacttctgtttaaatctgtaataacacttctactaaaccagaatactttatgaatgaagtgttctggttatttggttgtttgaatcttttggtaaacttgcagctaaacagaaaatctgttttagttcaactcttctcactaaacatctttttaaatattctcaatatattcctgccttatatgccatctagtgaacataattaaatctccctttaatagaaaactctgtagsaccatgagacaatcattttttttaaccatgaaatc

SEQ ID NO: 117988 - DNA, 567 bp, Homo sapiens
agtgggccaagatcacaggagtgaggtgggtaccactgcagcctgctagtctgtggagccttagccacccctctttcttcatgctggctctttggtgtggcagtggttgctccactcctccctggagaactggcccagtgacctgagaactgtcttctgacccccatcagggtaagcccttgtgttagctcttagggatcccaagcatgggctttcctggctcagccctgcttggcttgccccctacacctgtctcagaagcagagcatgggacaaggacctctgggagttccacagtcaaattcattgcctaagacatctgacatctcctggttaaaaaagttgaagcatacatggaatactatgcagccataaaaaaggatgagttcacgtcctttgtagggacatggatgaagctggaatccattattctgagcaaactatcggaaggacagaaaaccaaacaycgcatgttctcactcataggtgggaattgaacaatgagaacacatggacacagggtgggaaacatcacacaccagggcttgtcatggggtgcggggaggg

SEQ ID NO: 117989 - DNA, 549 bp, Homo sapiens
ggctatgggtcatcaatgtgacctgaactgcctatgtgacccgaactgcctatcatgaactgggtgctttctgacccatgtagccataaagtgagtcgtgcacagcagcatttcatcaycaaatggaagtggcatatacgggattgggcttgagcaggtcctgaaggcacaagtaagttacatgaggaagtggctcaaatgcccatgatctccactcctgccatcctgccttctcttccccagcctacaccgatggcctcatggggagctccctatgatcagttgacaggaagagaagaccagggcctggttcacagatggttctgcacaatacgcgggcaccacccgaaagtgcacagctgcagcactacagcccctttctaggacatccctgaaggacagtggtgaagggaaatcttcccagtgggcagaacttcgagcagtgcacctggttgtggactttgcctggaaggagaaagaccagatgtgtgattatatactgatttgtgggctgtagccagtggtttggctggatggtcagggacttgg

SEQ ID NO: 117990 - DNA, 549 bp, Homo sapiens
ggctatgggtcatcaatgtgacctgaactgcctatgtgacccgaactgcctatcatgaactgggtgctttctgacccatgtagccataaagtgagtcgtgcacagcagcatttcatcatcaaatggaagtggcatatacgggattgggcttgagcaggtcctgaaggcacaagtaagttacatgargaagtggctcaaatgcccatgatctccactcctgccatcctgccttctcttccccagcctacaccgatggcctcatggggagctccctatgatcagttgacaggaagagaagaccagggcctggttcacagatggttctgcacaatacgcgggcaccacccgaaagtgcacagctgcagcactacagcccctttctaggacatccctgaaggacagtggtgaagggaaatcttcccagtgggcagaacttcgagcagtgcacctggttgtggactttgcctggaaggagaaagaccagatgtgtgattatatactgatttgtgggctgtagccagtggtttggctggatggtcagggacttgg

SEQ ID NO: 117991 - DNA, 604 bp, Homo sapiens
caatcaatttggaaaaaaagagaagaaaaagatcagcaaaagtcactataagtagctgtccagcccacaaggcctatgaggaattgcrttttctccattcacatatttgagagtttaagttatttcgcatggctgttcaataactaaataacttcagaaggctacagaacttgggatgctgggttcctatgcctgctcttttctctggagatgtgaggcaccatccagatatcccttccaagtacctgcccttgactaaagaaaacagccttgcccaaaatcactctctccttggggtcagcccactactaaatactggtcagtgaggtcatataaagacctgtgccttttgtcccaattcagaacaactctgcattgccagctcagctcctgagcacactgtgaggttggatgaggtctttactgagactgtatcacagcccaacttctccttctgcccaaccttgcttcctttactccccttgttgttgattccaacagtgttccctaacaaccttctgatatgctcatttctttctcagattctgcttcctaggaaacaacttgaaatatctggcaattcttggatagaaagccaggctcc

SEQ ID NO: 117992 - DNA, 604 bp, Homo sapiens
caatcaatttggaaaaaaagagaagaaaaagatcagcaaaagtcactataagtagctgtccagcccacaaggcctatgaggaattgcgttttctccattcacatatttgagagtttaagttatttcrcatggctgttcaataactaaataacttcagaaggctacagaacttgggatgctgggttcctatgcctgctcttttctctggagatgtgaggcaccatccagatatcccttccaagtacctgcccttgactaaagaaaacagccttgcccaaaatcactctctccttggggtcagcccactactaaatactggtcagtgaggtcatataaagacctgtgccttttgtcccaattcagaacaactctgcattgccagctcagctcctgagcacactgtgaggttggatgaggtctttactgagactgtatcacagcccaacttctccttctgcccaaccttgcttcctttactccccttgttgttgattccaacagtgttccctaacaaccttctgatatgctcatttctttctcagattctgcttcctaggaaacaacttgaaatatctggcaattcttggatagaaagccaggctcc

SEQ ID NO: 117993 - DNA, 559 bp, Homo sapiens
gaacatgtccatctccccaagaagacactttgcacaaaagttactcactattcccaacyctagccccagacaaccattaatctactatctgtctccatatatttgcctttgctggatatttcaaacaaacgaaaccctacagtgtgtggtcttttacatctgccttctttaatttatcatagttgatctttaatgtaggtattattagcctcactttagagatgagaaaatggagaattggagagattaaaagacttgcctgaggttaatcagctggtgaaagataaggacaccaagatctgaacccacgtctaaaagctttttctccctacaaaaccaccttcatcatatgtgagcttcctgggagtcagagtcatattccatgggctcctagaccctgggtggtgagcaaagggtctgccccattgtggatatacaggagttatttgttaaactgaaacaaatttatcctatattagttcctgcttctatctcaattcaccatccccaaacaccattctgagtgacctcctgttgcctgccattagttgatgtttgc

SEQ ID NO: 117994 - DNA, 601 bp, Homo sapiens
agaattattcaaatcctgaataatattgttatttggaataaataacaaaagatatattagaagtccttatatataaaaaaattcaagatatcttgaatttgatgatatatgttcaacaaatttttccatcactttcttatgttttgaagattatatatttaaatgacaattagtataaagttgtaaaacatctgtcattgtatagtgcattcaagatgaaaacagctgccaacctgtgccacagattttatccagaacacttccagataaaaactgagtgacttggtctttatgattaggccaattttcagtaagctgcattaaacaagtaaggtaatctaaatctctggcccctttccttaacttctttcctgtctcaatgccatccatgtgttkctcagattccaaatcttggctccttttgatcaattctacaccacaataaactaactgcaagtatttttggctctactttcaaaacgtactatgaatataccttactcctcttcacttcctataactttccttatccaggccatcaacatctttacctggactactgcaatagccttccaactcatctccaatttccacagctccc

SEQ ID NO: 117995 - DNA, 591 bp, Homo sapiens
agagacatggtttcactgtgttgcctaggctggtcatatatatgatcttatttcctccaacagtcctatgatgatgaaagctttattgtaatctattttgactccttcaaaatcatttacccaggcagcaaacagtaaatttggggttcaaattcatgtcatctgtcttcaaattctgtggactttttctctttaccacttttaattaattttttagaggcagggtctcactgtgccatcatgcccggctaatgattttacttttggtagagatggggtcttgctttgttgcctaggatggtctcaaactcctgggctcaagtgaccatcccactcagccttcttaagtgctaggatcacaggcatgagccagtatgcccagactaattattgaatctagttatttttataagaaagagtagcataagatttttctttagaaaggcatttttaatcgtagttaactackttaaaaattgaatgctgcttcttcttttttttttttttttgagacggagtctcgctctgattctgtatttcatccagaaagcagctcattgccattagagaaatcatgtaaccaacctcctt

SEQ ID NO: 117996 - DNA, 606 bp, Homo sapiens
tacaacatgccacattacagaaagatctcacacatttaatgttggtcaaaataagccagacacaaaaagagtacacagtgtatgattccatttatataaatgtgcaaaggagtaactgcgagggggcttgaaagcagcatctagagtgctggtgaatttcttgatttgggtgttggatatacaaagtgtgttcactttgtgaatattcattgagttktacactatgatctgtgtacttgtctgtaagtttcaatggagcactaaaaccaaacaaaacaggagccctgtgaaagttaaaagcagatattggacaaaatggaattttcttccaagcaaccttcatataattcactttttatactcctgaaaaccagatttcctttctggcttgtcattgccaccagatgcccacccaggctggcctgttttcccaatcaccccaacttcaatttccttgctcccagttttattctctccccaccttcaggttcctttctgttcttccttaagcctaccaacatcctagaggggtttttgaaaaaaaagtttagacaatctgggagaaggcatggagtaaagaaataaagttaaaaatttcatccatta

SEQ ID NO: 117997 - DNA, 606 bp, Homo sapiens
tacaacatgccacattacagaaagatctcacacatttaatgttggtcaaaataagccagacacaaaaagagtacacagtgtatgattccatttatataaatgtgcaaaggagtaactgcgagggggcttgaaagcagcatctagagtgctggtgaatttcttgatttgggtgttggatatacaaagtgtgttcactttgtgaatattcattgagttttacactatgatctgtgtacttgtctgtaagtttcaatggagcactaaaaccaaacaaaacaggagccctgtgaaagttaaaagcagatattggacaaaatggaattttcttccaagcaaccttcatataattcactttttatactcctgaaaaccagatttcctttctggcttgtcattgccaccagatgcccacccaggctggcctgttttcccaatcaccccaacttcaatttccttgctcccagttttattctctccccaccttcaggttcctttctgttcttcctyaagcctaccaacatcctagaggggtttttgaaaaaaaagtttagacaatctgggagaaggcatggagtaaagaaataaagttaaaaatttcatccatta

SEQ ID NO: 117998 - DNA, 652 bp, Homo sapiens
accgtgcccggccatagtagactacccttgcattatgggtacaattgcctcttggtctctctgaggacactatttacaattttttaaaatgttcttactagtttctcgaattatgtctgattcttccagggctagctggcttttatttacgattttagtgtccctcaaatgtcaagagaargtaggcagaagggtgtgagttcagaaaacacacttgaatttcaaaacaggggcacatgtacagtttggaaactatatgtatccatgaagagataaacataccccacagtttgaggaaactccaaaggtgattctgttgcaagtcatgccctaccccctaccaacactccatctccatccacacactttgagaatcagtggcccaaatcggtgatctgaaagaacattgaaatccactagagaaattttataaagtatctgggcctaggcatcccgaggtaaagctagtgcatgctcaagattgtgaatccctggaagagactctccgtgaggccttgtctttgtaactgtggtccatggaccagcagtgtcggcatggccgtggaatgcattagatgtacagaatctcagccacctcccctgaccaatgttccaaatcagactctgcgtttaaaagagttctcagcgactg

SEQ ID NO: 117999 - DNA, 638 bp, Homo sapiens
gatccccaacaaatattctagttgtcaaagcaacccctgcaggcaccaaagcactccaacctagacacaacctgggtaagaatgatttactgttgtacagagaaatagtttaaacacacagaagcaaaagaatgtcttgtctaccgtggtacagagtcctgatgtatgaatccaaaatatggcccttatagcatcgggaagtaaccagtttcgtggcccagctggaccaaatgctggtatcgactgggtgtgttataggcagaacgcatgattctcaggtggcagctagcctccacgatggcccctaatgattctaatgtcctggcattcaaaccctatgtggtctcccttctcrcgttgaatcagagctgctctggatgacaaacagaaatgacagaagctacagtgcatggcgtccaacgctaggtcataaaaggtactgcagcttcctccttggcctttggatggctcacccagtatggggaaagctggccactgtactgggaagacactcaagcagccctgcaggctggagaggaactgaggctcccaccaacagccagtccccagtcccccgccatgacagtgagccacactgtcctccagcatcagaaaagcctgtagaggactgcagccct

SEQ ID NO: 118000 - DNA, 638 bp, Homo sapiens
gatccccaacaaatattctagttgtcaaagcaacccctgcaggcaccaaagcactccaacctagacacaacctgggtaagaatgatttactgttgtacagagaaatagtttaaacacacagaagcaaaagaatgtcttgtctaccgtggtacagagtcctgatgtatgaatccaaaatatggcccttatagcatcgggaagtaaccagtttcgtggcccagctggaccaaatgctggtatcgactgggtgtgttataggcagaacgcatgattctcaggtggcagctagcctccacgatggcccctaatgattctaatgtcctggcattcaaaccctatgtggtctcccttctcgcgttgaatcagagctgctctggatgacaaacagaaatgacagaagctacagtgcatggcgtccaacrctaggtcataaaaggtactgcagcttcctccttggcctttggatggctcacccagtatggggaaagctggccactgtactgggaagacactcaagcagccctgcaggctggagaggaactgaggctcccaccaacagccagtccccagtcccccgccatgacagtgagccacactgtcctccagcatcagaaaagcctgtagaggactgcagccct

SEQ ID NO: 118001 - DNA, 504 bp, Homo sapiens
ggaggtggggaggcttgctgagatggggcccaggtgtcctgactcccagtgagcagcgtttcccagcaccccaccgctctccctctctctgtttccccaggttggggctggcagccctccactactttctgttccttcgtcaacgttgactcttgccttggacagaccgagctgctgactggccccttctctccactctctggctagaagatgactgaagcccctccggggatctgcaaaacctgccagacagagggcctggagttaaggtcagcacacccgaggaaggcttgtggtcttggtcaaccagatgcaggcttaatcggctgtgagaggagccagytggagcacctggggcccaggagaggaatggtggctgtggtaaagggagcagcttgctgtcttccatccacacctggcctatcaggagggtcaggtgaggctctccgcatcacccggtagtagggacaataacatgccgggttgtttccaggtgatgacagg

SEQ ID NO: 118002 - DNA, 592 bp, Homo sapiens
tacagagaattgtttcacttttaacttccagtgtttttctgcatttcactgaattttaagcatgcccttcctaaattgctgccacattttttccttcastatgaaggaaaagtgttaaacttcactgcaattgcttttaagagctttctagcattttatcttaacaacatgatctggaaaaaaatctttattcccaatataggactttctttacaagtagaatcacagttcgctttagtagaaattgagttatctaggttaggttacattggctcccagccaaaatggacaaacaactcaaattttaccctgactgaggacttttcctcaaactgcttgcttaaatgtctactttgactataatataaataccagctatcatacaagaagatgatattctcacttactttcctttttaaattatgatcctcttccagggttctccctcccactatatctccagatccagttcacctgtcacctctggtgttttctcttcaaattactgagtcccacttagctaaagtcctcttggctccctcagaacttctatttccaccatagcccttaccactttacaaagcaattgtca

SEQ ID NO: 118003 - DNA, 592 bp, Homo sapiens
tacagagaattgtttcacttttaacttccagtgtttttctgcatttcactgaattttaagcatgcccttcctaaattgctgccacattttttccttcagtatgaaggaaaagtgttaaacttcactgcaattgcttttaagagctttctagcattttatcttaacaacatgatctggaaaaaaatctttattcccaatataggactttctttacaagtagaatcacagttcgctttagtagaaattgagttatctaggttaggttacattggctcccagccaaaatggacaaacaactcaaattttaccctgactgaggacttttcctcaaactgcttgcttaaatgtctactttgactataatataaataccagctatcatacaagaagatgatattctcacttactttcctttttaaattatgatcctcttccagggttctccctcccactatatctccagatccagytcacctgtcacctctggtgttttctcttcaaattactgagtcccacttagctaaagtcctcttggctccctcagaacttctatttccaccatagcccttaccactttacaaagcaattgtca

SEQ ID NO: 118004 - DNA, 554 bp, Homo sapiens
tccaacttgctgagttgtcccatttggaatagagaagggatatagggaagctgagaatacgtactattttcatgtaaagacaaatctcaatttcaaaatcactaattgtataaagaagaaacacttacaccattatgtaaacagacacagagcacatatacttccagaatgcctggccatgtttacatttagaattcagaattactgaaacctgaagacatgcatggagtcagtgctcatcacatcacatccacatcaggtttaccatgttaattcctgaaggtgactgcaatgttctataatgttttattccataatatttcagaccacaaatttgctgcacagaaacatgtttccacctctgctacagtttttatattggatctctaacasgctgctcccagcctgtatctcttatgtaaaacaatctgtttagcactttggggcttctaagccccgctaagcatgttttcggtttgttgttggtggtggtggtgattgcatttctcccctttgaactaatgctctgctaagaattgcagctaaacctacac

SEQ ID NO: 118005 - DNA, 489 bp, Homo sapiens
ggaacatcatgaaaatctggaagaattatgccattgaaagtgcaccatcattgttagtgaaacaatgatgtgaaagtgatttcacgattgtgaaagttatcaatcctgaaacaacaaatttttactggagaatactgtgtccagatgttgtgcatgacttcataggatttttgaaacagccaatcgaggagatcatgacagagattgtggatatasaagaaaacaaaaagtggttaggtgaacgatttctagataagcattttggagaaattcaagagctaataggcaccacatcagatgaattaacagaagatgacttgggcaatctggcagaaggattcttattatttaagactacttttgatttattttataacatggactcttccatgatatgggcatcaaaactgaagcaaatggtggaaggaggaactatattgtatagaaacatttttagataaatgaaaaagcttaagtcagacagaaatt

SEQ ID NO: 118006 - DNA, 489 bp, Homo sapiens
ggaacatcatgaaaatctggaagaattatgccattgaaagtgcaccatcattgttagtgaaacaatgatgtgaaagtgatttcacgattgtgaaagttatcaatcctgaaacaacaaatttttactggagaatactgtgtccagatgttgtgcatgacttcataggatttttgaaacagccaatcgaggagatcatgacagagattgtggatatagaaraaaacaaaaagtggttaggtgaacgatttctagataagcattttggagaaattcaagagctaataggcaccacatcagatgaattaacagaagatgacttgggcaatctggcagaaggattcttattatttaagactacttttgatttattttataacatggactcttccatgatatgggcatcaaaactgaagcaaatggtggaaggaggaactatattgtatagaaacatttttagataaatgaaaaagcttaagtcagacagaaatt

SEQ ID NO: 118007 - DNA, 555 bp, Homo sapiens
tttccccttgctgcgctcatgatagtgagtgagttctcacaagatctggttgtttaaaaatgtgttgcacctcctccttttctttcttcctcctgctcaggccatgtaagatgtacctgcttcctctttgccttctgccatgattgtaagttttctgagccttccccagtcacccttcctgtacaacctgcaaaatcgagtcaattaaacctcccttcttagtaaaataatcagtttttggtagttctttatagcaatcagagaacagattaatacaggaaattggtaccaagagtaggatattgctacaaaaatatctaaaaatgtggaaacaactttgaaactaggtaatgggcagaggttggaagagtctggagggctcagaagaagasaggaagatgagggaaagtttgaaacttcctagaggctgtttaattgttgtgaacaaaatgctgatagtgatatggacagtgaagtccaggatgaggaggtctcagatggaaataagaaacttattgggaactggagcaaagaattaactaatacatatacctt

SEQ ID NO: 118008 - DNA, 540 bp, Homo sapiens
gtacaccccttgtgatattgggagtaatatmatcctctctccacttggatattaggaacaatatcacaggggtgtgtacactttctgtgataatgggagtaatgtcgtcctcttcccccctggatatcaggcacaatattacagggtgtgtgtacactccctgcgatattaaaagcaatatcatcctcttcccccctggttattataaacagtatcacaggggatgttgtacaccccctgcaatattgaaagttatattatcctctacgcctctgaatattaaaaatattatcacagaaaaagtgtacacctctgcaatattaggagtaataccatcctcttgtctaatggatattaggaacaatatcgcagtggaagtgtacacccctgcgacattggaagtaatatcatcctctttccctctgaatattagaaacaatatcaaaaagaggtgtacaccccctgcaatattgggagtgatatcatttgttccccttatatatattagaaacaatatcacagggacagtgatattaagag

SEQ ID NO: 118009 - DNA, 564 bp, Homo sapiens
cttttatttccaagggactagttccctttacaggaactgaacaccagtgcatggtggtgaatgcatggaattttaattccttgactagaagacaatatggccttcattgcaaatcccacaggggatccaaagcaggcagttcgagtgtatgaataattttgctttcttttaaagctgattgctgttttcttttaaaaacaatctgtcaagggagtttctaaggccatacttattttttaagtcttttcctargtaccattaacatggctggctgtttaagacaagagtgctctaaaaagctttcctttaaatacagccaattcattcatttactaagtgaactagttcaagtatatttttgtcctgttaatccaatttggggaaagaaaaaagacaaggctcttaccaccctcatttgacctggggtcctaagcagagatctgggagaactgacttggtaaaaaaaattcttattttctttgttggctttgtgtcagttgtcccaagatcccatctgtaggctccagaataaagtttcctacagtgggtaatattaactagtaa

SEQ ID NO: 118010 - DNA, 636 bp, Homo sapiens
tttgatgatgagttcagaaaaaaattgccttcagaagcaaaaattcactaaagtaaatacataatattgaagattagttgtttaatccaatcagagtaatttgttaatggcttttgaggtgtgtgtgtgggggtagttttatcagtatcagtatttgtttttctattcattaaatacacttcctcttcaracaaccatagaccatacttctgaagtagacagctctgttttggcatgctatctgcagtcatgaaacaagataaagatcattggtctgacctttggcctcattagacaataaaattggactgattgacaaaactcaataaagaatagatttaagcacagtgctaatgaggccatgatcacaaattttacacaggaccactgattttattttatcttatggccacaggatgttccccaacactcaaagtgtttcctcttggccataaaaaaaagcctgcataatgagcaggaacagaccacagcaaatccatcacatctactggaaacatgctcggttattggccaaattattggccatcttcatctataagaaacaatgcaaattcaaaggatactagcagataaagtgaagtcagctccaaagccattcactgtgagaaagaacca

SEQ ID NO: 118011 - DNA, 636 bp, Homo sapiens
tttgatgatgagttcagaaaaaaattgccttcagaagcaaaaattcactaaagtaaatacataatattgaagattagttgtttaatccaatcagagtaatttgttaatggcttttgaggtgtgtgtgtgggggtagttttatcagtatcagtatttgtttttctattcattaaatacacttcctcttcagacaaccatagaccatacttctgaagtagacagctctgttttggcatgctatctgcagtcatgaaacaagataaagatcattggtctgacctttggcctcattagacaataaaattggactgattgacaaaactcaataaagaatagatttaagcacagtgctaatgaggccatgatcacaaattttacacaggaccactgattttattttatcttatggccacaggatgttccccaacactcaaagtgtttcctcttggccataaaaaaaagcctgcataatgagcaggaacagaccacagcaaatccatcacatctactggaaacatgcycggttattggccaaattattggccatcttcatctataagaaacaatgcaaattcaaaggatactagcagataaagtgaagtcagctccaaagccattcactgtgagaaagaacca

SEQ ID NO: 118012 - DNA, 636 bp, Homo sapiens
tttgatgatgagttcagaaaaaaattgccttcagaagcaaaaattcactaaagtaaatacataatattgaagattagttgtttaatccaatcagagtaatttgttaatggcttttgaggtgtgtgtgtgggggtagttttatcagtatcagtatttgtttttctattcattaaatacacttcctcttcagacaaccatagaccatacttctgaagtagacagctctgttttggcatgctatctgcagtcatgaaacaagataaagatcattggtctgacctttggcctcattagacaataaaattggactgattgacaaaactcaataaagaatagatttaagcacagtgctaatgaggccatgatcacaaattttacacaggaccactgattttattttatcttatggccacaggatgttccccaacactcaaagtgtttcctcttggccataaaaaaaagcctgcataatgagcaggaacagaccacagcaaatccatcacatctactggaaacatgctcrgttattggccaaattattggccatcttcatctataagaaacaatgcaaattcaaaggatactagcagataaagtgaagtcagctccaaagccattcactgtgagaaagaacca

SEQ ID NO: 118013 - DNA, 614 bp, Homo sapiens
atatgggggatgtgcataatttctatgcaaaaaaagagataaaagaaagaaattaaatggagagaaaaaagtacctatttaaatttgccaggaaagtgcttttaagagaccaaataatccccttcaaagcattctaagtttcaaaagggaagaaaattgttagttgaatgtttaattaacatttatttcaagcatattagttttacatgactcacatttagtaatacagtagggttgtgttcttgctaccatatgtgcactttatagcatattcagtcccygtatataattaacacatacggttcatttatgcccattttgtaacacttggaatataatttccctatttcaaatgattatagggtttatagttctatcagtgcttccactgaattcagcaacaatttattgaggaaacaaagtgtaaagtacttcgcaaatgatgctgtgagaggcataaagatgaaataggtatgctttctatgcttaaagaatttggaatctgaaggggagagtgggtacaattatgcacctgtatgtaccttgtgctgtactgggcaaacagataacaaaaaagagtatgggtggttgctacttttcagcagtttaacttt

SEQ ID NO: 118014 - DNA, 593 bp, Homo sapiens
atacagtagggttgtgttcttgctaccatatgtgcactttatagcatattcagtccctgtatataattaacacatacggttcatttatgcccattttgtaacacttggaatataatttccctatttcaaatgattatagggtttatagttctatcagtgcttccactgaattcagcaacaatttattgaggaaacaaagtgtaaagtacttcgcaaatgatgctgtgagaggcataaagatgaaataggtatgctttctatgcttaaagaatttggaatctgaaggggagagtgggtacrattatgcacctgtatgtaccttgtgctgtactgggcaaacagataacaaaaaagagtatgggtggttgctacttttcagcagtttaactttagtcgggcattggaaataaatacaagggtgttgaaaggttcagaggcaaaagagatcaggcaaatttgcaggaatggaagtgtgttcaatatgtattaagaagagaatgcaaaaggtgagggaaatgactagaaattaaatcacagaagtaggcaaggatctgacagctatagacatcacacgttatgaaatttggaaaaga

SEQ ID NO: 118015 - DNA, 627 bp, Homo sapiens
tgactattattctttgaaataccttttcatattaaaaaaaataaactagtgttttcacattttcaagttgaagaacactgtggatgaagcaacagtaatcatcagagcattatcccatgaatcagaatggagaatgagtttccatttctttgaagaccgtgctgtgtttcagtgaaaatagttttaggtctataactttatcgcagatcccatgataaccaggacccatgattattcattcataaatgtatttattttaaaaattattaracactgataagagactaagaatgatctatgagttactgaaaccaattggaaaactacttattaagatctaagtctttgagaatgtgcgatacatattttcaatacatatttaaagatgtgctgtttagaatacaaaaaaagttctgttgataggagagcaacatagagttcagaataagaaaatgtctatgactgaaaaaataaccaggcatcaacttacctataacttattccagtttcctttcaaaagaagggctatgcagtcaagacaccgaagattatcatcaagcctttgggcactttcttgctgcatcacctcgctgaccattccagagatgtctttaatcacttgttctc

SEQ ID NO: 118016 - DNA, 578 bp, Homo sapiens
gtaagcccaaaattcatctgtcttgcttttmacaatttaagtagctttgttcccattttacagacaagatcattaaagtctaaagagatttctgagtgaaaaaaagctagtgcagtttttcaatgtagtaatttttacttctacctctaatttgaattttatttaaaaatttgttatcaaaatataattgtgaggagccattaaaaaaatcaggagacactttaggggtctatcagatatctctatctatatctctatctatctatctatctatctatctatctatctatctatctatctatcatttctatctatctatctggagattgtttgcttaatatttttttcagctcttctaaacacatttagcttaatgttataaaataccgtaatatgttcctggtggttatctgtcattttatagaagtgggatgctctagactattcactgcatctttctgtgacccctccctgtccttttaggagtctcctgcaatgcctgtaccctcacatagtatgtggtgttagtggcagttggtgtcagcctcccactggacagcccatgtgtgagacctccc

SEQ ID NO: 118017 - DNA, 533 bp, Homo sapiens
gtattcatgcttctcaggtgaactcactcagatttatggctttagtggtagatatactcttactgccaaattaatatctgcatcgctgacccaattcctgagttttgggtttatatgtttaactgcttactgaacgtccctactttacggtttccaatcttttcagtatctaatagatactgtgttacatgtatctattagatacaagtgttacatgttcagagaactcttgagtgtaaacttgatgatgtttggggaagatttttttctagagaagtgctagagatgtagtcaaaacttgctacatatgtggtgaattaataaatatcctgatttactcccaaacctgtcttttgtccagtattttttaaattttagttaattttacagctgtatatctagctgcytaagctagaaaacttggaggcattctcaactcttcctgtacctcaccttccatgtcagatcaatcattaaattatcttaatctacattagaaaattatctgtaatccatttttttcctatcaccac

SEQ ID NO: 118018 - DNA, 633 bp, Homo sapiens
cttcatatagagatgaaagggtccttcttcttttaatgccaatcctagaactgatttttattgacccatctagtgttatgtctcccctgcttggccccagttagtgtggtgggctggagrataagaagatagaaggaactgacagatttgatccatccacatagtagcccctgttagaaccacactgttggcatggtggagggcaagtatttaatccctaaatggagaagttggttttatcagaagaatcagagaaaggggtgctgcacaggaaatcctacacgtccattacaaattaatttctccctctctaaccttatgcttctcttgtctttcttttcgcaactaaagtaccattagaactttctttcttaactgcctgagtccaagtcttttcctctctaaatatattaacacagagatctgatttcataaaaatgaataaataagatttgtgtgtgtgaaatcattacccatctacacaacactcttccaatggctccattcacttcctggttaaagtgcatatttcttcttcctccaagaagcctagactcatacttagcaattcaacctgaagaagagctttcatttcaggtccaatattttaccctgtagtaatatcaataggtt

SEQ ID NO: 118019 - DNA, 596 bp, Homo sapiens
ttgaaaatcagtgatttgcttgttttaatgtttcatttggtattttggtaaagtacaatagacattgacagtaaaaagcatcagaatatgccacsacaaattatgccatttttgcataaggatcattttaaactgaaagcaattgagacacagcagacagaaaaatgtatcttaccttcccaacctgtgtaaaaataaggaataaatttctattggtagagaaaagtatcatttgaaaatgtctttccttctcctgcaggaaaatgaggaagactctttatcactgtggattactcttgccaaaaaaaggcaatatcttgagtctgaataataaaacttactaaaaaaccctcttattttctattagttttttctatttacattcccacaatttgccatccccagatatccaaactttcttcttttgtctagttacttctccacaatttatcaccctttcttaaaatgttatataaacttcaaattctacccgctttattgagtgacatttctttgtgaactccatgtgtatgaacataattaaatattttttatccttttaatttgccctatattgtcagaggtgttcaaacaag

SEQ ID NO: 118020 - DNA, 634 bp, Homo sapiens
tggcagcattcaccacaagttgactgaagagcctttgggcattaaatgaatgtgagtggtagcctgacggtaatccccatggacctgtgctgatgatggacattaggagagtcttctctgcctgtgtaaaggggaggaaagagtaggaaggacttwgtcctgtggatttagtgctagcttagccacagtagaaaggagcatcaggtagattcctaaggtttccaactacagaacctgagtccttaacaacatatctagatctgcctgagaaacagggtaactaaccaccctgaagacaaggacataagactggctgactttgccaccttctgattgtagagccttagggccttgagcgaacagaagagacagctaagtagtggttacagtcggccttgggagagacctagtgctgtgttcacttcaggtctgacccagcacagtttcagtggttgtggccataggggtgtttgtgttaccctacccttgttccagccagctcagaacatagagaaagggggagactcaatttgtttgggagaaagtaagggaagagaacaagagtccctgcctggtaatccagagaatttttccaaatgttatcaaggaccataaaggtgataacactgagtct

SEQ ID NO: 118021 - DNA, 634 bp, Homo sapiens
tggcagcattcaccacaagttgactgaagagcctttgggcattaaatgaatgtgagtggtagcctgacggtaatccccatggacctgtgctgatgatggacattaggagagtcttctctgcctgtgtaaaggggaggaaagagtaggaaggacttagtcctgtggatttagtgctagcttagccacagtagaaaggagcatcaggtagattcctaaggtttccaactacagaacctgagtccttaacaacatatctagatctgcctgagaaacagggtaactaaccaccctgaagacaaggacataagactggctgactttgccaccttctgattgtagagscttagggccttgagcgaacagaagagacagctaagtagtggttacagtcggccttgggagagacctagtgctgtgttcacttcaggtctgacccagcacagtttcagtggttgtggccataggggtgtttgtgttaccctacccttgttccagccagctcagaacatagagaaagggggagactcaatttgtttgggagaaagtaagggaagagaacaagagtccctgcctggtaatccagagaatttttccaaatgttatcaaggaccataaaggtgataacactgagtct

SEQ ID NO: 118022 - DNA, 634 bp, Homo sapiens
tggcagcattcaccacaagttgactgaagagcctttgggcattaaatgaatgtgagtggtagcctgacggtaatccccatggacctgtgctgatgatggacattaggagagtcttctctgcctgtgtaaaggggaggaaagagtaggaaggacttagtcctgtggatttagtgctagcttagccacagtagaaaggagcatcaggtagattcctaaggtttccaactacagaacctgagtccttaacaacatatctagatctgcctgagaaacagggtaactaaccaccctgaagacaaggacataagactggctgactttgccaccttctgattgtagagccttagggccttgagcgaacagargagacagctaagtagtggttacagtcggccttgggagagacctagtgctgtgttcacttcaggtctgacccagcacagtttcagtggttgtggccataggggtgtttgtgttaccctacccttgttccagccagctcagaacatagagaaagggggagactcaatttgtttgggagaaagtaagggaagagaacaagagtccctgcctggtaatccagagaatttttccaaatgttatcaaggaccataaaggtgataacactgagtct

SEQ ID NO: 118023 - DNA, 560 bp, Homo sapiens
aaaccagtgtatttttttctgtcactaagtgcaaatacttatggaagccaaaggactacattctttccataagactctgaatgttgatacagaggttgactcaggaagtatagcgtttaggaaagacagttccaagaactaacgttagctaattagaaggcccttgatataagagttggtttacataagaaactgaaatatttgtccaagccgtatcttcaatagatgactgttcattatggtatggtctttaggatgcacatgcagttatgggacytgatggtacacgtaaatagcagctgaatatggaagaaaataccttcagtacttgtttcagacgtgaattattttctaaaacaattgatgcctatttagacatttgttgcccaactgggatctttcaacaccaccttacgtttattattgaaaaagggattcaacaaaattgtcagaaatataacctaggctatacaaactatgcaagtagaatatgagttttaacagaaataaattaggttttacattcatgtgaacttaactttttctgaaatatttttagc

SEQ ID NO: 118024 - DNA, 621 bp, Homo sapiens
ggaaaagatccccacacccatgattcaattacctcccactaggtccctcccgcaacagccaaaccatatcatagcctaacagatggattctagtttgacctgagttaatctgatcaccttttaacaccatgcagttgtttttattgcctgggcataatccatccatatcatcagagaaagattatccaaaacttagtttgggactctgtactttaacttccatcatttgcaagtatcctattttcatatttttcattttttctcaagaggcatgtgaatgaggtttaactatagcttaagaatttttcatttttttttatgaaggagtcactgaaataattaaaatataacatccacttctttttcttggaacttaggtagcaatgtgagtaartgttcagtaaaacttcatttttttaataaagcctcaacttgtgttcttttccatttggaatgcagcagccaaaaactataaacaggaaacagcctggaagatatcacctggacagctatgagcaatcaacacggcgtctacgtcccgcagaaacagaggacattgcaataaaggttatttttatttcctggattcttacatgaatagaaacatttatgttactattt

SEQ ID NO: 118025 - DNA, 548 bp, Homo sapiens
caaaggcctccatccatgggagctgccagagtcctggaaacttagcaaactggctgcattggctactggaggatatccaattctcctgcacagcctaggccagtcacagagacggggaggctcagtatggggtttatagtagagccaagagctatgtttaggtctctctctccttgacacctgacacaataccttaccacaatagccacttcataatcagaacaaacatgtgattgagtggaacaagctagtgctagccctcccttttccactaatttgatgcatgatatttgggcaaattactatgcctcattgagccatggtttgcccatcttgaggtggacatgccattttagtgtggttgttttggggttaaaaggatatgtcacatatgaattttaaagagagctctagtgattcttgactttggctatgcattagaatcacytacaaagctttaaaaaatgtgtgtgtgtgtgtgtgtgtgtgtgttgttccctaggcgattataatgttcaggcagtgtgtgaactaggggctatgaaaag

SEQ ID NO: 118026 - DNA, 460 bp, Homo sapiens
tcctttgacagcactcccaacttgatagtcttcagtgatttctccattctcattaattcattcaatgcatctgtgattgctggtccagctacttggatgcaaccatgaagaaaacaagacgtaacatctgtagtaaaaaaatctagtatattgaggataccaatagcaaataggaaattacaacacagctgaagggacagtgtgaraacatagagtgcacgtctgggacaaagaaagctttgagaaggaagtgacttctaaactgacacttcaagaatcaggaatggctactcagaggaagaagagaggaagacagttccaggcagaggggccaatgtgttcaagggtattgcaagcaattcagcatgactgcaaggagaatagacttcactctgaaggcaacagagatcaccaggtgacccagtgattccagaccagatgtgcatagtagacagccctc

SEQ ID NO: 118027 - DNA, 510 bp, Homo sapiens
gaattcttaatccatatctctgcgttgggctgacattctcaaatgtccaacaggtatttacacatgtctaatgggcatttccacttgaatggccagaatacaaattaacacattcatttctgccacatactcactcttctctcttccctgtcttcctcaaattagttaaaactagtgaggtcacccattggatttataccacagaaaacaaagtccaaatttcttgttatctaaagcatattgygtggaaaatattattcataaaaatgatcatttccctattttttatcagtaacttaaatcagggaacaattattattgggaggaaatttttagtctgaggttgccttttttgcctctgtcagccatcccaagatgtcattagcagtgtgcagtagtgaaaatgatccttagtaactctaaaccaaatatcattaggtagcataattaggtaaattttctccacaaaaacatacaacattttgcaaagtcaaatagaatcaatttttg

SEQ ID NO: 118028 - DNA, 675 bp, Homo sapiens
caactgttttcctctcactgagtcacacgtgtcccaactttggctgaaactcaaactatcctcagtaaactgggtttgggatttcataaaataaaaatgtaagaattaatacatatattgattatgagttraacagtgatgggatccatctgtaaggtagagatgaagagccaagtgctttatctacttaaaaggaaaaacaaaaacaaaaaccttaaagagctgagtggggtgggggggaaagcaggcatgtcagaggttgggaaccattgttttactctgcatatgattatctcagagactgctagcatactatatagtatcatgtcttctacactcctaagacgtaatgttttagaaagatcattgaacatttctagctactctcttttttaaccttgctctcttttaaccctatttccttcatcagtactttacagatcatgaactaactgtggaaatctgacttttaaactgacctgcccttcccatcattctcttcagctcacatgtattttcctaactattggaaattaaagtctgatgtatagacatctggtagaatttgcaagtcaaaaggggggaggtagttatttttaaaatataagcgatttcaatatattttgaaatatgcagtttttacatgcacgatttcaatattgaaagtttcaggga

SEQ ID NO: 118029 - DNA, 675 bp, Homo sapiens
caactgttttcctctcactgagtcacacgtgtcccaactttggctgaaactcaaactatcctcagtaaactgggtttgggatttcataaaataaaaatgtaagaattaatacatatattgattatgagttgaacagtgatgggatccatctgtaaggtagagatgaagagccaagtgctttatctacttaaaaggaaaaacaaaaacaaaaaccttaaagagctgagtggggtgggggggaaagcaggcatgtcagaggttgggaaccattgttttactctgcatatgattatctcagagactgctagcatactatatagtatcatgtcttctacactcctaagacgtaatgttttagaaagatcattgaacatttctagctactctcttttttaaccttgctctcttttaaccctatttccttcatyagtactttacagatcatgaactaactgtggaaatctgacttttaaactgacctgcccttcccatcattctcttcagctcacatgtattttcctaactattggaaattaaagtctgatgtatagacatctggtagaatttgcaagtcaaaaggggggaggtagttatttttaaaatataagcgatttcaatatattttgaaatatgcagtttttacatgcacgatttcaatattgaaagtttcaggga

SEQ ID NO: 118030 - DNA, 450 bp, Homo sapiens
cccttgcctgacccagaagccccttgagaatctgtctcacagcccaccacaccgacggctcttctctctcccaggcccttgctaatggccccctcactgcactgagctctactcttcagacctgcccatcactcctgcctcagcgcctccatctttctgttccctctaccagaaatccctacacacaactttgtytttttttttttttttttttgagagagagtcttgctctgtcacccaggctggagtgcgatcttggctcactgcagcctccacctcctgggttcaagtgatcccccggcctcagtctcccgagttgctgggactacaggcacccaccaccatgcccggctatttttttttttttttttaagtagagacagggtttcactatgttgccaggctggtgtcgaactcctgacctcaagtgattcgcccacatcggccttg

SEQ ID NO: 118031 - DNA, 581 bp, Homo sapiens
ggagctgcttagagcaaacctgcctctcattctattcaaagtcacccctctgctcactgagatagytgcatatctgatttgcctccttaggaaaggctaatcagaaactcaaaagaatgcaacctcacctatctgtgacctagaagcaagccccttcctccctttgagtcttcctgcctttgctttaagttgtcccacctttccagactgaaacaatgtacttcttacacatattgattgatgtctcatgtctccctaaaatgtataaaactaagctgtgctccaaccacctgggcacatgtcaggacctcctgaggctgtgtcatgggcatgtcctcaaccttggcaaaataaactctaaattaactgagacctgtctcaaattttcggggttcacagtggttaccaggaagctgatgtataatatcttagtaataacagtctcttttaagctgataacaacttaacttcaattgcatgcaaacagtcttcctttttgcccccaacatgtacattttctgtttttgatgcctcactttatgtgaagcacaagcacatgcagatcagtgaagctgcggggc

SEQ ID NO: 118032 - DNA, 524 bp, Homo sapiens
aatttcctatgtttaagaaagctttttaacttttttttttttttttgagacagagtcttgctctgttgccgaggygggagtgcagtggcgcaatctcggtttgctgcaccctccgcctcctgggttcaagtgattctcctgcctcagcctcccgagtagctggaattacaggcgcgcaccaccatgcctggctaatttttgtgtttttagtagagatgggttttcaccatgttggccaggctggtcttgaactcctgatctcgggtgatctgcccatctcagcctcccaaagtgctgggattacaggcatgagccactgcgcccagcccttaactttaactttttaatagaaacccaaaattgtaattccttatatgctaaaatgtgggcacatgctggacaaacaccactgcactttctcgaggttttcagggaaaggcggcagcttataattaagatcagcacaaaactagattagattgcaattatatttatttggagagtgaagcaaagtattaaaaata

SEQ ID NO: 118033 - DNA, 585 bp, Homo sapiens
atttattaatgatatcatctattttaaaagacgtatgtaaaacccaacccttaagaaaggattcctatcactgttcccacaggcaccctcctcagtcttatacctttccattccaccccccaaaacaaatcattcagcatatttatttcatactgtaatakaggaagtagcttctttttagattttcttagattattaacattgatcatacaaacatggaatagaaattccttatgttttatctggatttaaggtgctacataatggaatctatttctatcaagccatacacattggagataatgaaatcacttgtgttctagcctaaacgttatgggaatttcagaactgcaacataacagataatccttggacgaaaactaaatctctcctctggtcaggcatctatgtgcatcagtgaagagaagacggggactgtggaagggaaaacagtgagtcaggaaggactgtggccacatctgttccccggaccctcacgtagttaaatcctgacctcctctaccccagactgtcctggggaatggccaacactggcttttcacaactgtgtgttaccagaaatgc

SEQ ID NO: 118034 - DNA, 630 bp, Homo sapiens
taatagaggaagtagcttctttttagattttcttagattattaacattgatcatacaaacatggaatagaaattccttatgttttatctggatttaaggtgctacataatggaatctatttctatcaagccatacacattggagataatgaaatcacttgtgttctagcctaaacgttatgggaatttcagaactgcaacataacagataatccttggacgaaaactaaatctctcctctggtcaggcatctatgtgcatcagtgaagagaagacggggactgtggaagggaaaacagtgagtcaggaaggactgtggccacatctgttccccggaccctcacgtagttaaatcctgacctcctctaccccagactgtcctggggaatggccaacactggcttttcacaactgtgtgttaccagaaatgcaacagaaacccagctgaatccccagggtttcccttcygcccttctcaatggaaagatctgtcccaggaccatttattccaacattttcaattatgagaaatctgggaagataaagttattttcacatttctcaagaaatacatacttattcatactcattacaggaaagtcagaatctacagaaaaccaagaagattttt

SEQ ID NO: 118035 - DNA, 630 bp, Homo sapiens
taatagaggaagtagcttctttttagattttcttagattattaacattgatcatacaaacatggaatagaaattccttatgttttatctggatttaaggtgctacataatggaatctatttctatcaagccatacacattggagataatgaaatcacttgtgttctagcctaaacgttatgggaatttcagaactgcaacataacagataatccttggacgaaaactaaatctctcctctggtcaggcatctatgtgcatcagtgaagagaagacggggactgtggaagggaaaacagtgagtcaggaaggactgtggccacatctgttccccggaccctcacgtagttaaatcctgacctcctctaccccagactgtcctggggaatggccaacactggcttttcacaactgtgtgttaccagaaatgcaacagaaacccagctgaatccccagggtttcccttccgcccttctcaatggaaagatctgtcccaggaccatttattccaacattttcaattatgagaaatctgggaagataaagttattttcacatttctcaagaaatacatacttattcatactcatkacaggaaagtcagaatctacagaaaaccaagaagattttt

SEQ ID NO: 118036 - DNA, 465 bp, Homo sapiens
cctgaacctcccgcctcgacctctcaaattgctgggattacaggtgtgagccaccacacccggcctaaatttcttatgtgccatgggactgcaaaacatcattattaggggcagctggatggaaggtataggaggatactatagtgccttttcaatatttctgtctaaaatctaaaatcatttcaacaggaaacatttatttcaaaacatgaaggtggttatccttccatgagtttgaagtacaaaggcaggctcacggtgtcgtcagaattcagaacgatggtcgtggggctgggggtgctgggaggggcygggcatggttggctttgtgatctggggtctggtgtgttccatctctgaatctctctcgagctgcactctttcttaatacattttcataagtttaaccaaaaataaaacgaggatgcgaagcttgcttgggttgttaagcctagggaaattatc

SEQ ID NO: 118037 - DNA, 591 bp, Homo sapiens
tattctcctatccaatcactgtattttaaatggcattcctccarcaaatatttgttgagcccccactatgtgccaggattgaaatgtcaaattgaaggaggcaatagctactgaagtaaagcaaaaaaaagtactggttatttttccttctataaaatgacctagtaataaccgctttacccaggagagttgctgtaaagatctaataacatgacacatataaccacacccctaaagaatgaggtgttactgcatgttctcactcataggtgggaattgaacaatgagaacacatggacacaggaaggggaacatcacactctggggactgttgcggggtgtggggaggggggagggatagcattaggagatatacctaatgctaaatgacgagttaatgggtgcagcacaccagcatggcacatgtatacatatgtaactaacctgcacattgtgcacatgtaccctacaacttaaagtgtaataataataaaataataaaataaaaaaaagaaattttgcttaaataaatattataataaaaaaaacaaatgaggtgttattaaaatgtttgcaagagaaaccctagta

SEQ ID NO: 118038 - DNA, 615 bp, Homo sapiens
atctctgccctaaatcgtgcatttggagcccaggaatctgtattacaacaactaccacaggttgattctgatgctaatgatttatggaccacactttaagaaataatatttttgtgtacaaatgcatttaaatatagaactggtaaattgtggcaatggaattaatcctttaacaaaaataaattttgttcaacgcagccaaaataggagctgctgtcccatcccctaggccctgtgtcccaaagtgtggcaacggtggggtttgcaatgaccttactgtcctgcagtgagacagtgctgctttccgaacaccagcagctggaagcttagttgctacatcaggaggaaattcatggcttcacaatttccatatggatctattttagatatgaaaatcccatccatatggaaaacgttataacagagaatacaagtgaattagtaatytcacagctttacacacctaaacctttagcattaaggtaattttcactggttaaatttggaaaataaaagagtaaatctgccttgctcttgagggtcactattttcttttaagtaaaaatagacatggtgccataatcatgttaaaggtaaagagataactattaaatt

SEQ ID NO: 118039 - DNA, 516 bp, Homo sapiens
atacacaatagacctaacaatgactttaaagcaaatattacaaatatattataagaattaaagcccatttttaaaaaattaaagtatgactataatgactcaactaacagaaaatctcaataaaaatgaagcaattgttttaaaaatttaagtggaaattctgaagtataacatttaataactgaaatttaaaactcactagagagactcaacaacagttctgaaatgtcagaagaaattatcagtaaacytgaagattagaaatgatctaacctgaagaacaaagagaaaatgaagaaaaattaacagagccttggagacctctaggacaacatcaaacacaccaacacaagtaacgggagtcccaaaaggtgaaaacactgggaaacagacagtaaaaataagccccaagcttttaaaatttgataaaaactgctaatctatagatccatgaaactgaacaaaaccagaatagaaaaaatgcaaagcaatatccatctaaatacatcatagaaa

SEQ ID NO: 118040 - DNA, 387 bp, Homo sapiens
ccagctctaggtttcatacgaagtcactatgaaatccaaaagtcactactctgttcaaacacatccacaaacagtaagaaagttactgactcttaacttctctctgtgccaraactttttgtaaaacaatttttcttttttatttatttatttttttgagacggagtctcacagtgcagtggcacaatctcagctcactgcaagctccacctcccaggttcacgccattctcctgcctcagcctcccgagtagctgagactacaggcacccaccaccactctcggctaattttttgtatttttagtagagatggggtttcaccgtgttagccaggatggtcttgatctcctgacctaatgatccgccctcctcagcctcccaaagtg

SEQ ID NO: 118041 - DNA, 472 bp, Homo sapiens
tatgtggctcccaacaaaaacatcacattttggccaaacatgagtatgacgggcctctgcttctctcctgctaaagggcagcactggtgggctccatggggctttctaagaacagccacaataccagcccctcttctcctttaaatatgaaaattgttcacattaaagaaaaatgcacattgaaaattatctcttaatgttggttagcagaagagaggagaagagaatgctgtttatgacagcaaawttctaatcaacatggttgcctccatgcccaagagccctgcccacaggcccaggtatcatttaaacactcatgtgtcaatggactgtctgtttctctttgaaaaacagcgaactgataagacaaaaatcaatggatcaacatcaacgagtagcctctgaggagcaatctataccacagaagccagagcaagatcaactgggaggcgccacagtgaagaggagaatg

SEQ ID NO: 118042 - DNA, 468 bp, Homo sapiens
agcagggacagcttttctctgaagtctggggtctctactagagagcttgaaggctggacgctggaagcatctgaagaccagcctattcttgtgtctggaggtcaaggctggctgtcagcttgaggccttagtttttctccatatgggtgaatctgggcttctcacagtgtggtagctgacttccccagagcaattgtctaaccccagctcttgaaaaaagtgagtcagctagaagctgtatcataacctagcttaraaagttacaaaccatggcctctgttgtccttgtttggttggagcagtcgtaagtcccacccagtctcatagaatggaacataggccccacctcttggtgagaggactgcaaaagtcacattgtaagaaaagcatgtaggggtgacatccatgaacagggaagaataaggaacatcaaaagtccctccaaaaaagcaataaataaactggcaa

SEQ ID NO: 118043 - DNA, 564 bp, Homo sapiens
tgtgccacactgatcttactggttattacaatgatgcatacaccccaaattarggcagttgagagccactacccctcctgtcctggtgtggggtctcattgtacccattgtcagtaataagccaagctctgtgtattttctcatatcatcagtcctgacctgaaaagccaccactgatgttgctgatgcttctcttgccagtgctttcttgatggctttggttaatggtatgtcttctgggtctttctgtgtaatataacactggagtgtgtctttggttctcatgtaatatatccacttcagcatgctcccttacctgacccttttattctttccatcactttctgctatagcaattgaagcaattgcaacaccactctgaaggagtcctcactttatgcagccttccaggaaccaccctagcagtaaggtggaaccatctactgagatatttgcaagatattcaatattacatcctgggaaaatgccttcaagcccataaagtctccctttatcagtcttttcttttcttttttttcttatttttcattttttaaattttat

SEQ ID NO: 118044 - DNA, 610 bp, Homo sapiens
aaatgacaaatgtcctaggtgatgggtgatgggtatcctttaagtgtttttctgctagatgcatgaatgccacaaacaatactatcaaaaaagtagtactctatgtatatgtgcaggtggttcatatagtctatactgaagagttttatccattggtgataatagaaatattatttttgtatcatcaaattaatattcatgctaatgataacactacatttatatatgattaacaacctaagcacttttctgtaatcattgtctgagaattgctacctcctcttaataaaatgatcccactcacagaattatatagcacagattttgatttagtataagctttaaatgggatttgttgtccatttttggtgcttatggctaagcaaaattctaaaatcttgttgtatgccatagcagtgttaatacagaagttsaaattctgtaatatacctctaattgacacctctttgaatctgggttggcttgcaactgcttcagccaacctaaaatggcaaataataataataatgctttgtgacttttgcagatagatgataaaaggccgcaaagcctccactttgttctctggaacacttgctcttggactgcc

SEQ ID NO: 118045 - DNA, 480 bp, Homo sapiens
taagctaccataagaaaagaaacaggaggattctcttcttttggatcgtatggtacaggtaggacatttcctctgtatcagtcaaaatttgatcagaaaaagagacctcattctaagtgtttcaccaggaagagatttaataaaaagaactaggggcttatgaaacaactgaaagagcttctagcatgcagatttttgctagtgttcaaatactctggatgtaactaatgctgctttagtcaaacatgttagaaggatatttattaccaatgacaacatttgcctgtcagcacctaagtaggtgatttgtatgagaattcccagctactgctgcaaatcttcatgttgggcaaawgctttgagttcacttgccaatgctgaatgcttcctgtccactttccagatgccgtgtgaatgcctaatgagtgggatctgaacacaactctgctaataaggaagtctccaaaatgtagttcctag

SEQ ID NO: 118046 - DNA, 480 bp, Homo sapiens
taagctaccataagaaaagaaacaggaggattctcttcttttggatcgtatggtacaggtaggacatttcctctgtatcagtcaaaatttgatcagaaaaagagacctcattctaagtgtttcaccaggaagagatttaataaaaagaactaggggcttatgaaacaactgaaagagcttctagcatgcagatttttgctagtgttcaaatactctggatgtaactaatgctgctttagtcaaacatgttagaaggatatttattaccaatgacaacatttgcctgtcagcacctaagtaggtgatttgtatgagaattcccagctactgctgcaaatcttcatgttgggcaaatgctttgagttcacttgccaatgctgaatgcttcctgtccactttccagatgccrtgtgaatgcctaatgagtgggatctgaacacaactctgctaataaggaagtctccaaaatgtagttcctag

SEQ ID NO: 118047 - DNA, 570 bp, Homo sapiens
tctttcataaaaggaagaggctgtcaatgtggcaaacttcactgctgtcttctttttaaaaattgccgccctaagcttcagcaaccaccacccggattagtcagcagccatcaacatcaaggcaagactctccaccagcaaaaagatcaggacttgctgagggctcagaggattattagcattaaaataaagtatatacattatttttagatataatacctttacacacataataggctttagtatggtgtaaagtttggtatagttacatgcactggaaaaccaaaaattttatgtgactcacttgattgtgatatttgctttattgccgwggtctagaacaaaacctgcaatatctccaagttatgcctgtacatacatacatacatacatacataaatgcagttcaaagtattagaaaatgcacctgagtaaaagttgggtgttttatccttgctctaccttgagtaagttatgaaatctttcccaaggtctccattgagacattttctcaggggtttattttcccaatctgcaattagtatatagatgtacaaagctttacgacat

SEQ ID NO: 118048 - DNA, 629 bp, Homo sapiens
agctatttaatagatctaggaataactttctatgatagtttattttatttayttatttatttattttgagacagagtctcgctctgtcgtccaggctggagtgcagtggtgcaatcttggctcactacaacctctgccccctgggttcaagcgattctcctgcctcagcctcctgagtagctgggattacaggcatgagccgccgcacccggtctctatgatactttaaaggatagtatataaaattgatttcaagtttttatagtaaaattttaaatttaggataccattgaattttgttaaatgtttgaacttcaaagtcaaatatttgaagtacattcattatataatgttagataagtaaatttaaaagttcaaaattattctataaaataaaggccattcatttttaaaagtcttacatttggaattgtaattcaaaacgaaattagaaaacttacttgtcaattgatgccttaacctttacctgatagtttagttctggcaattttattagtagcctggaaagagatatcaataaaaaaaatcaaagataaaaattaaaagtgtttaaaaacccttttttatatttaaacatttaaatatactatgaaatatgcatataaata

SEQ ID NO: 118049 - DNA, 556 bp, Homo sapiens
gaacaagtaattgaagttcagtataaaaattcctttaattccttctggtgtcagcccatcctttattcttttgctttctccagctcctcagatttctgtcctgtgatgtaacctacctgtgggttcagtgcagtttcagagatagtcattcaatccctcacacattcattcatttactcatgccctcatcctaaactttgctcattcactcagcatgcactgagctcctcatatttatgcagtacacccttaggtactagagaactgatgtagcaaagactgcagaagggagaaacgtggacgtggctctacataaaaggagggagtccaggcacacaaatggaaaacagagaatatggcgataagcarctcactggcattagagaaatgaaatcatagctcatgggcagcccaaacaaaagggtgggtagaatgttgcaaaggctctttaaaagtcctgtacaaggcacaagattggttcaggatctggagtatgttgagtgtgcagtcattggtggtgaatggtgagaagggggcatagtcacataaaatcagg

SEQ ID NO: 118050 - DNA, 575 bp, Homo sapiens
cagaatacacattcttctcaagggtgcatgaaacattctccaggatagatagcatgttatatcacaaagcaagtcttaccaaattgaaatyataccaggtatcttttctagccacaatggaatgaaattagaaatcaattgcagaaggaaaactagagaattcacaaatgggttaaagttaaacaacatatttttgaacaaccattgagtcaaacaaaaaatcgaaagagaattaagaaataaattaagacaaaaaaaaaaaacccaaacagaatatacaaaatgcctgggatgcaacaaaagcaatactaaatgattatgttatagcaatcaatgcctacattaaaaaataagaaaaatcttacataaacaacctcaccttacattccaaggaactaacaaaagaacaaactaaatacgaagttagcagaaggaagaaaataataaagattaataaatacaacaatagaaaaacaatagaaaaaagaagcaaaactaagagggttttgttgttgttgttttatctttttaatttttttgggggggacaggatcttgctctgtcacccagactgg

SEQ ID NO: 118051 - DNA, 575 bp, Homo sapiens
cagaatacacattcttctcaagggtgcatgaaacattctccaggatagatagcatgttatatcacaaagcaagtcttaccaaattgaaatcataccaggtatcttttctagccacaatggaatgaaattagaaatcaattgcagaaggaaaactagagaattcacaaatgggttaaagttaaacaacatatttttgaacaaccattgagtcaaacaaaaaatcgaaagagaattaagaaataaattaagacaaaaaaaaaaaacccaaacagaatatacaaaatgcctgggatgcaacaaaagcaatactaaatgattatgttatagcratcaatgcctacattaaaaaataagaaaaatcttacataaacaacctcaccttacattccaaggaactaacaaaagaacaaactaaatacgaagttagcagaaggaagaaaataataaagattaataaatacaacaatagaaaaacaatagaaaaaagaagcaaaactaagagggttttgttgttgttgttttatctttttaatttttttgggggggacaggatcttgctctgtcacccagactgg

SEQ ID NO: 118052 - DNA, 627 bp, Homo sapiens
aaaatgttgatttttgttttatttaaattatttccagaatgaaaagacattccatatttatgagttggaacactaatatttctaagatggtaatattacctaaagcaaatacagactcaatgcaattactattaaaatcccaactggctttcttgcagaaataaaaaagctaattctcaaatttatatggaactgtgatgggctcttcatagcaaagcaatatatatatttttaaagtgtaatagtcacacttccagatttcaaacattccacaaaggtgcagtaatccaaacaatgcagtaccagcatgaggacagatatagagatgaatgaagtaaaattataagcccagaaawaactcatatatctataaccaaggaaggttcacacaataataattgggaaagaatggtctcttcaataaatggtgctgggtgaaatggttattcacatgcaaaaattaaagctagactccctaactcacaccataaaaaaaattaactcaaaatgaatcaatgacccatgtagataaactaaaaccataaactcatttaaaaaaaacaaaagacagatctttgtgaccttggattcagcagtgtattcttaaataagacatcagaagcacaa

SEQ ID NO: 118053 - DNA, 627 bp, Homo sapiens
aaaatgttgatttttgttttatttaaattatttccagaatgaaaagacattccatatttatgagttggaacactaatatttctaagatggtaatattacctaaagcaaatacagactcaatgcaattactattaaaatcccaactggctttcttgcagaaataaaaaagctaattctcaaatttatatggaactgtgatgggctcttcatagcaaagcaatatatatatttttaaagtgtaatagtcacacttccagatttcaaacattccacaaaggtgcagtaatccaaacaatgcagtaccagcatgaggacagatatagagatgaatgaagtaaaattataagcccagaaataactcatatatctataaccaaggaaggttcacacwataataattgggaaagaatggtctcttcaataaatggtgctgggtgaaatggttattcacatgcaaaaattaaagctagactccctaactcacaccataaaaaaaattaactcaaaatgaatcaatgacccatgtagataaactaaaaccataaactcatttaaaaaaaacaaaagacagatctttgtgaccttggattcagcagtgtattcttaaataagacatcagaagcacaa

SEQ ID NO: 118054 - DNA, 550 bp, Homo sapiens
gtacattgggacttttctgttgattgatggtagtagttttcgtcttttgaattcctttctacattcctttcttgtgtccaatttgcccacaattaaggcaagagcctgagaaatgaagcatattttttcttactcttaatctagccacagcctgagctaaaagaataaccttatgtaagttatctccaatgccatcgcaagccttaatatatttagttamatgggccctctctgtctgggatctaatagcagtttgacactctgcattagcattattgtatgcaagaagctgtattacaacatcctgagctgttttgatcatttacggctttatacacagcctcttggagctgagcaataaaattaatatatggttctttaggtccttgtcagacagaactgaaataaggacacttttcccctgtaacatttatccttttctagcatgtaagcacatgaagcacagctgaacaatggcaacatcttccattagtgcttgattctctaatcaaccccagttagggccaactcatattaactgatcaaagaa

SEQ ID NO: 118055 - DNA, 550 bp, Homo sapiens
gtacattgggacttttctgttgattgatggtagtagttttcgtcttttgaattcctttctacattcctttcttgtgtccaatttgcccacaattaaggcaagagcctgagaaatgaagcatattttttcttactcttaatctagccacagcctgagctaaaagaataaccttatgtaagttatctccaatgccatcgcaagccttaatatatttagttacatgggccctctctgtctgggatctaatagcagtttgacactctgcattagcattattgtatgcaagaagctgtattacaacatcctgagctgttttgatcatttacggctttatacacagcctcttggagctgagcaataaaattaatatatggttctttaggtccttgtcagacagaactgaaataaggayacttttcccctgtaacatttatccttttctagcatgtaagcacatgaagcacagctgaacaatggcaacatcttccattagtgcttgattctctaatcaaccccagttagggccaactcatattaactgatcaaagaa

SEQ ID NO: 118056 - DNA, 567 bp, Homo sapiens
ttagctatattctgtcctacttgctggattatcgtaacgggaaattgccatgcttcaaggtctcccttggctttagctttttgaatagaattttgtctaccaccaccaattgctccaggttttaatgttgtaactacargagcagtaagtttttcagctaatttattttctcacccatttagaggagagagaggaggtggccattcacttaattcagcaggtggagcaacggactagtaaaacatactttttaaagtttttctttcttttctttaatctcctctggtagctgctccccacactcagaatttgaagttagttttttacactcatcctcctcttcctcatctgagtctgcctcatcatctgtttgaaatggctcaagggctgcctttattagtgcccacactgaccatacagaaaatagaatttttgctccatctttatatgtcttttaaaaaatctcttccaattctctcccattcatccaacttcatagtcctttgttctggaaaccatgggcaaaactgctttactgtactaaagagtgataacaaattctaagta

SEQ ID NO: 118057 - DNA, 567 bp, Homo sapiens
ttagctatattctgtcctacttgctggattatcgtaacgggaaattgccatgcttcaaggtctcccttggctttagctttttgaatagaattttgtctaccaccaccaattgctccaggttttaatgttgtaactacaagagcagtaagtttttcagctaatttattttctcacccatttagaggagagagaggaggtggccattcacttaattcagcaggtggagcaacggactagtaaaacatactttttaaagtttttctttcttttctttaatctcctctggtagctgctccccacactcagaatttgaagttagttttttacactcatcctcctcttcctcatctgagtctgcctcatcatctgtttgaaatggctcaagggctgcctttattagtgcccacactgaccatacagaaamtagaatttttgctccatctttatatgtcttttaaaaaatctcttccaattctctcccattcatccaacttcatagtcctttgttctggaaaccatgggcaaaactgctttactgtactaaagagtgataacaaattctaagta

SEQ ID NO: 118058 - DNA, 567 bp, Homo sapiens
ttagctatattctgtcctacttgctggattatcgtaacgggaaattgccatgcttcaaggtctcccttggctttagctttttgaatagaattttgtctaccaccaccaattgctccaggttttaatgttgtaactacaagagcagtaagtttttcagctaatttattttctcacccatttagaggagagagaggaggtggccattcacttaattcagcaggtggagcaacggactagtaaaacatactttttaaagtttttctttcttttctttaatctcctctggtagctgctccccacactcagaatttgaagttagttttttacactcatcctcctcttcctcatctgagtctgcctcatcatctgtttgaaatggctcaagggctgcctttattagtgcccacactgaccatacagaaaatagaatttttgctccatctttatatgycttttaaaaaatctcttccaattctctcccattcatccaacttcatagtcctttgttctggaaaccatgggcaaaactgctttactgtactaaagagtgataacaaattctaagta

SEQ ID NO: 118059 - DNA, 583 bp, Homo sapiens
tatacacatgtatgttcattgcagcactattcacaatagcaaagatgtggagtcaatccaggtacatccaaggtagattgaaaatccaaggtagattggaaaattccatatataccatggaatactatgcagccatgaaaagaacaaaatcacgtcatttgcagcaacatgaatacagctggaatccactctcctaagcaaaccaacgcagaaacagaaaccaaatatctcatgttttcactcatgtgggagttatatattgggtgcacatkgtcataaaggtgggaataatagacactgggaaataagaacggggagggacagagtgggccagggttgaaaaactacttcttgggtcctatgctcacaacctgtgtgataggtttaattgtactgcaaacctcggtatccctcaatatgcctttggaagaaacttacagaggtaccacgttaatttggaatacaaactagaaaaaaaaaaaagaaaagtttcctataagtagagaacagaaatttctttttaagataaaatttattgaagtaaaaaatggattaaacttttataaagggcagagttttctaa

SEQ ID NO: 118060 - DNA, 615 bp, Homo sapiens
aaaaatggattaaacttttataaagggcagagttttctaagaatttcaaagcaatgcattcattgcaaaagacggctttaattacttaatcttttttttttttttttttttttttttttgtgagacagggtctcatctgtcaccaggctggagtgcagtggtgcagtcttggctcactgcaacctccacctcctggcttcaagcaattctcctgccttagtatcccaagtagctgggactaaaggggcacatcaccacgcccagctaatttttgtatttttagtagagatggggtttccccatgttggccaggatggtcacgatctcctgaccttgtgatctscttgctttggcctcctcaagtgctgggattacaggtatgagccaccatgcctggccattgtttaacatttgtactaataaaacactacctttctaaaatcatgtatatgcaatagatcaatattaactgcatttttgtcagattactctaaacagcattacacatatacatcctctgttatctaaacttaaaataagtagaaattttattttatttatgtgattatttttctatttaagcaaacttcaagttatgtctagtcactaaaaata

SEQ ID NO: 118061 - DNA, 615 bp, Homo sapiens
aaaaatggattaaacttttataaagggcagagttttctaagaatttcaaagcaatgcattcattgcaaaagacggctttaattacttaatcttttttttttttttttttttttttttttgtgagacagggtctcatctgtcaccaggctggagtgcagtggtgcagtcttggctcactgcaacctccacctcctggcttcaagcaattctcctgccttagtatcccaagtagctgggactaaaggggcacatcaccacgcccagctaatttttgtatttttagtagagatggggtttccccatgttggccaggatggtcacgatctcctgaccttgtgatctccttgctttggcctccycaagtgctgggattacaggtatgagccaccatgcctggccattgtttaacatttgtactaataaaacactacctttctaaaatcatgtatatgcaatagatcaatattaactgcatttttgtcagattactctaaacagcattacacatatacatcctctgttatctaaacttaaaataagtagaaattttattttatttatgtgattatttttctatttaagcaaacttcaagttatgtctagtcactaaaaata

SEQ ID NO: 118062 - DNA, 615 bp, Homo sapiens
aaaaatggattaaacttttataaagggcagagttttctaagaatttcaaagcaatgcattcattgcaaaagacggctttaattacttaatcttttttttttttttttttttttttttttgtgagacagggtctcatctgtcaccaggctggagtgcagtggtgcagtcttggctcactgcaacctccacctcctggcttcaagcaattctcctgccttagtatcccaagtagctgggactaaaggggcacatcaccacgcccagctaatttttgtatttttagtagagatggggtttccccatgttggccaggatggtcacgatctcctgaccttgtgatctccttgctttggcctcctcaagtgctgggattacaggtatgagccaccatgcctggccattgtttaacmtttgtactaataaaacactacctttctaaaatcatgtatatgcaatagatcaatattaactgcatttttgtcagattactctaaacagcattacacatatacatcctctgttatctaaacttaaaataagtagaaattttattttatttatgtgattatttttctatttaagcaaacttcaagttatgtctagtcactaaaaata

SEQ ID NO: 118063 - DNA, 581 bp, Homo sapiens
ttgtttctcaccgcttactgcactctgccctttgctctagcaccaaactggatggagtggaactctgcagggctcttcctcacctcaggctctttgcctttgcctctttcctctatctgggaagcttttccttgtccttcaggtatcaacctatgttatctcctccaccagaaagcccatgatattgacataaaagtggatagatgtcccttctctgtgttccagtagtgccctgctctatacctgtcatggtatctatgactctatatggacattgcctgcctgtctgttttttaggttagagcttatgactgttgggaggtggaccatgccatcttcatcttgtaattccagtgctggttctagtaccttagcatgtggctgttgattacatgaatgaagactgaaaaagctctgatatttaaacacaattagaattaatgccatgtgtaaattattaaatagtaattytgtattgtaaatgtacatacatatctcattcttattaactctgataaagttctcaagtctttagtttttaaactcatacttagttaactgaagtgttttaggtaaagaac

SEQ ID NO: 118064 - DNA, 488 bp, Homo sapiens
tcaccttctacttgtccacatacctcatttttcctggactcaggacaagaactcgggacctgccaactagcagggctgaaagaggtgtaacataaacagggctgaaacgcgctccttgcttgccaaattgcaggcaagaagaagagaagagagaaggagagaagagctgtgtcccttcaggaacacagacctaggagctcccccagccagggctgtgacaccttctttggggmtctgcaggtcctgcatctccaagcttctgggtgccactgcattccctgatacccacagtggaagctgtttgcagtcggcctggtccagctgcagcctcacagggagctggcatctgtgcctggagctgcccaccccactgcagctggcatgcttggctgtgtgcagtggccagatcccatgctcgcttgctcacacacccctcactgctctgtacccagctcgcccttggcaggtgtgggatccagaccactagc

SEQ ID NO: 118065 - DNA, 449 bp, Homo sapiens
tcattacaattaattgtaaaacattttcatcaccctaaaaacaaaccccacaacatttagccatcttcactagttttcccttcctccctcagccgtagggaaccacccaccttctttgtatagatttgcctataagcctctgaaataaaaagcaagtggtctgctgggactggcttatttcacttagcataatttttcatgctgcatctgtgctgtagcaggtattgatgccgggtttttgctccttagttcagctacatctgggttcttctctcrtgaccaggaaaaatcaagcatgcagacacattgaggagggcagaatttatttgtgaaaggacagctctcagcaaagagagggatcctgcaaagaggtttccacctcacaattgaataccaggatcacatgagctgaagtggccaggctcctcctctgcataaggcgtgaattc

SEQ ID NO: 118066 - DNA, 446 bp, Homo sapiens
cattacaattaattgtaaaacattttcatcaccctaaaaacaaaccccacaacatttagccatcttcactagttttcccttcctccctcagccgtagggaaccacccaccttctttgtatagatttgcctataagcctctgaaataaaaagcaagtggtctgctgggactggcttatttcacttagcataatttttcatgctgcatctgtgctgtagcaggtattgatgccgggtttttgctccttagttcagctacatctgggttcttctctcatgaccaggaaaaatyaagcatgcagacacattgaggagggcagaatttatttgtgaaaggacagctctcagcaaagagagggatcctgcaaagaggtttccacctcacaattgaataccaggatcacatgagctgaagtggccaggctcctcctctgcataaggcgtgaat

SEQ ID NO: 118067 - DNA, 550 bp, Homo sapiens
ctgacatagtctaatattcagtgcagtatgttttactaactcattataattcatagaaccttccatagatgtttaccatctaggaaggagaagtttaagtctgagccaccagctttcctcagtggaaatcaagtgaagtcatcatcttgcagtttacagaccctctttcctcctggtagctggttctcttgggtagcactgtggctaatccttttcttagtgcagatcttgcattctcagaaaccacagttccctgtattgacctccttttactgaaacagagatgcacactctgctttctatctcagtagaggattcttggaataaaasgtttaactcattccaagaaagtcttaggagtgcagcacttcaaaatcaggtaacgttcaggcaatttatcagagacacatagtagattagtattttgactttcaaaatttcagagccaagttgtgtgctatagagaagcattgtggcataacatagagatgggatggtcttaacttctccatacaaacaagcttggagtaaggtaaaggagaaattgcat

SEQ ID NO: 118068 - DNA, 559 bp, Homo sapiens
ttgtgtcttaacactcaaaacacactatgcttattttacttctgtgaagaataaaaatcattccataatattctccttatttcctcatttagaaaagaaaatgaaaattgaatactaggttgattaataaatactcaaaacttcttcttttagaattttagttaattgaaatcaggtaaatgtctgattttgcctatgtcacccagtatttctagttgtttttcaaatcatacatcttcttgcttcccagtcttacttcctaacttgaggggaaattgtaagaagacacccttgccttgttttcagagttcataattgaagkagttttaggaaaattcctcctcagcagcttatgtctctctcctggttatctactgcttctcaataatgtttgacatcaataaataaatatcaacatttattagatcctgctttaaaggagactcttttctgctgcataagttatgtttcctgttgtctctttttaaaacttattttcctaacaattacccagagtcttgtggcttgaaagaaaaacatttattttgttcatgaacct

SEQ ID NO: 118069 - DNA, 657 bp, Homo sapiens
gctatactattttattcatgcaatttgatgatcttatggcggagaaggaagcagtatcttcaaaatgtgtcaatttgsctaaagagaatcaagtttttcaacaggagttattatctatgaaaaaagtacaacaggaatgtgaaaaacttgaggaggataaaaatatgttggaagaagaaatattaaatcttaagacacatatggaaaacagtatggtagaacttagtaaactacaagaatataaatcagagctagatgaaagggcaatgctggcagtagaaaaattagaagaaatccatttacaggtgagttgtttaaatcaggtaagtttacttgtaatgtgctttcatttatttcactgcaaattatattttggagatatatatatatatatatatatatatacacatatatatatagtgtttcctctgcctctcttgtagcaatctgctttgtagagttctagaaaaaaatggtatctgttttttcttttaaatatttaaatttccattattattataacaaaatcaatctttcagagtaatgattctcattatggagtcatttgatgattaagaccagttggcacaggaaaaaattgtgatttagaaattatgtgataattatgaattggtcttaagctacagtgttcattga

SEQ ID NO: 118070 - DNA, 557 bp, Homo sapiens
aaatcttaagacacatatggaaaacagtatggtagaacttagtaaactacaagaatataaatcagagctagatgaaagggcaatgcwggcagtagaaaaattagaagaaatccatttacaggtgagttgtttaaatcaggtaagtttacttgtaatgtgctttcatttatttcactgcaaattatattttggagatatatatatatatatatatatatatacacatatatatatagtgtttcctctgcctctcttgtagcaatctgctttgtagagttctagaaaaaaatggtatctgttttttcttttaaatatttaaatttccattattattataacaaaatcaatctttcagagtaatgattctcattatggagtcatttgatgattaagaccagttggcacaggaaaaaattgtgatttagaaattatgtgataattatgaattggtcttaagctacagtgttcattgatcactttttaaaactatgaatggattctattactttttatatgaccagattacattaatactagcataattatgatttcaaatt

SEQ ID NO: 118071 - DNA, 613 bp, Homo sapiens
ttacaactgagttagaagaatataaggaagcctttrcagcagcattgaaagctaacagttccatgtcaaaaaaattaactaagtaagtcaaaacatacactcatagaaaatgaattaagctcattaatttgtttcaaaagcataatttttagtgagatggcttcaggagattagaaggaagtgaatgctaatttgacaatgtaattttgaaaaataatgttagtaaataattttacctttaaaatgttagtcaaagatagtttttgtctctcctctcatttttttttttgcttttgtatggctttttttcctgaaaagtctcatgtaattaacctgatctgttagtttttttcactaagtatttttgaagctttataattaatgaagtgatcttgttataaaattacttgtcagaatttccctaaatagaaatattaatgtgtttaatttacttttcagtggatcacaacctaaatgcaaagtggtactgctactctgggcacaattgtttttgattgtgatctttagtattatcaccagagggtgcctcaagaaagactatttgtgtaacatattcaagatgttacagaaaggcacccttgtgaaataggga

SEQ ID NO: 118072 - DNA, 613 bp, Homo sapiens
ttacaactgagttagaagaatataaggaagcctttgcagcagcattgaaagctaacagttccatgtcaaaaaaattaactaagtaagtcaaaacatacactcatagaaaatgaattaagctcattaatttgtttcaaaagcataatttttagtgagatggcttcaggagattagaaggaagtgaatgctaatttgacaatgtaattttgaaaaataatgttagtaaataattttacctttaaaatgttagtcaaagatagtttttgtctctcctctcatttttttttttgcttttgtatggctttttttcctgaaaagtctcatgtaattaacctgatctgttagtttttttcactaagtatttttgaagctttataattaatgaagtgatcttgttataaaattacttgtcagaatttccctaaatagaaatattaatgtgtttaatttacttttcagtggatcacaacctaaatgcaaagtggtactkctactctgggcacaattgtttttgattgtgatctttagtattatcaccagagggtgcctcaagaaagactatttgtgtaacatattcaagatgttacagaaaggcacccttgtgaaataggga

SEQ ID NO: 118073 - DNA, 540 bp, Homo sapiens
  misc_feature (1)...(540): n = A,T,C or G
atggagaaagagcaggtgaaatattttctcagcactcttcctacaaggcgaggtcgagagtcaccttgtgttgaaaatcttactagtataggactcaacagaaaatatattccccaaatgcccgtaagaattcctacttcaaacctcagacttcaaataactgccagaactacttgactgaggttagttatatgaccgtttctctttagggtttcatttctctagcgtaattcttgtttataatttggtgaaatactgagttgttctgttgacttttgcatgtgaagtaaagatcataattagctgtgttaacacagaaaggaaatgggaacttwacattttttaattccctggagctctcattttcaagagatatccatttgctaactttattcaataaatgtgactaaactgacacgtttgaaatgtctttaaaagctgcatttaagttaggttttagaaattgcatgttattgcctgataagtgatgatatactttgagatgctttggcttactctctannnnnnnnnnnnnnnnnn

SEQ ID NO: 118074 - DNA, 582 bp, Homo sapiens
aagctaatgaatgaatgtgatcatttaaaagaaagtctctttcaatatgagagagagaaagcagaaagagtagtaagtatcaaggaagataaatattttcaaacttttagaaagaaaatttaaacatttggttctggatacatgttgaacttagttgaatataaaaatcaatggataaaaagtgtgtttaccatactgtataattccatttacatgaagcatccagaaaagataaacgtatagggacaaaaagtagactaatgtttgcaaagggctgggtctgaaagctggtagtgactgctaatgggcgtgagggatcttgcagtgatggaaatgctgtaaagttggattgtagagatggctgcacaactcagtaaatggactaaaaaatcttttaacyttaagttaaaacagatacattctatagtatgtaaattatatttcaacaaagctgttttaataaaaaaaaggaaaaccgtgtttactataccagcttagaaacgtgtctcatttctaggaaatcaaaggtagaggtgagagatgatttactttgagaaaagacattgtgtcacctatgaaatt

SEQ ID NO: 118075 - DNA, 582 bp, Homo sapiens
aagctaatgaatgaatgtgatcatttaaaagaaagtctctttcaatatgagagagagaaagcagaaagagtagtaagtatcaaggaagataaatattttcaaacttttagaaagaaaatttaaacatttggttctggatacatgttgaacttagttgaatataaaaatcaatggataaaaagtgtgtttaccatactgtataattccatttacatgaagcatccagaaaagataaacgtatagggacaaaaagtagactaatgtttgcaaagggctgggtctgaaagctggtagtgactgctaatgggcgtgagggatcttgcagtgatggaaatgctgtaaagttggattgtagagatggctgcacaactcagtaaatggactaaaaaatcttttaaccttaagttaaaacagatacattctatagtatgtaaattatatttcaacaaagctgttttaataaaaaaaaggaaaaccgtgtttactataccagcttagaaacgtgyctcatttctaggaaatcaaaggtagaggtgagagatgatttactttgagaaaagacattgtgtcacctatgaaatt

SEQ ID NO: 118076 - DNA, 611 bp, Homo sapiens
gatttgaacaggtgattgaatatgtcaggaagtttgaggttgagttgagcttctaagatgattgaatggtgggatgaatctgttatgtaagtaagagaataccaacttggcaggaagagaacatattgtgcatccctcwctgaattcagtaataaataaaaatgtgtacatgtgattaaaagaaggtgaatttatatgtgtggtgataattttcaaagtaggtatgttagagttaaatattattaacataatttaataataaggcaatttataaaatcagtaacaaaaatattttctcaggtggttgtgagacaacttcaacaagaagcggctgacagcctaaaaaaattaactatgttagagtctccactggaagtatatcacattatcacattaatttggatgagacacaggtcccaaagaagaaattatttcaagtggaaagtcaagtatgtatggaacttagcatgtcaactgttattctgtagctagttgaattacataacatgttttaggatactaattatggcagaagcttgattttttattttcattacaatgaattatttccattttactatctctataatgtacttatttttataaagtta

SEQ ID NO: 118077 - DNA, 611 bp, Homo sapiens
gatttgaacaggtgattgaatatgtcaggaagtttgaggttgagttgagcttctaagatgattgaatggtgggatgaatctgttatgtaagtaagagaataccaacttggcaggaagagaacatattgtgcatccctcactgaattcagtaataaataaaaatgtgtacatgtgattaaaagaaggtgaattkatatgtgtggtgataattttcaaagtaggtatgttagagttaaatattattaacataatttaataataaggcaatttataaaatcagtaacaaaaatattttctcaggtggttgtgagacaacttcaacaagaagcggctgacagcctaaaaaaattaactatgttagagtctccactggaagtatatcacattatcacattaatttggatgagacacaggtcccaaagaagaaattatttcaagtggaaagtcaagtatgtatggaacttagcatgtcaactgttattctgtagctagttgaattacataacatgttttaggatactaattatggcagaagcttgattttttattttcattacaatgaattatttccattttactatctctataatgtacttatttttataaagtta

SEQ ID NO: 118078 - DNA, 540 bp, Homo sapiens
ggaagtatatcacattatcacattaatttggatgagacacaggtcccaaagaagaaattatttcaagtggaaagtcaagtatgtatggaacttagcatgtcaactgttattctgtagctagttgaattacataacatgttttaggatactaattatggcagaagcttgattttttattttcattacaatgaattatttccattttactatctctataatgtacttatttttataaagttactttcattctaccattttgaaaaaccattgcataccttttctcttacaataygtacccttggaaaagttgagaattatacatcattcctcatagaaaactgacttttgtcctgttaaaacagtatttttaagtaatttttgtattgctctgatgaggcaggccagattaaatcagagaagaatgtttcatggaatgttccagaaaattgtcttatttcttcacttttgtgagtggacacagaatctgtgtctatttatttcacagattctaggttaacttgtacagaaaggccattatac

SEQ ID NO: 118079 - DNA, 540 bp, Homo sapiens
ggaagtatatcacattatcacattaatttggatgagacacaggtcccaaagaagaaattatttcaagtggaaagtcaagtatgtatggaacttagcatgtcaactgttattctgtagctagttgaattacataacatgttttaggatactaattatggcagaagcttgattttttattttcattacaatgaattatttccattttactatctctataatgtacttatttttataaagttactttcattctaccattttgaaaaaccattgcataccttttctcttacaatatgtacccttggaaaagttgagaattatayatcattcctcatagaaaactgacttttgtcctgttaaaacagtatttttaagtaatttttgtattgctctgatgaggcaggccagattaaatcagagaagaatgtttcatggaatgttccagaaaattgtcttatttcttcacttttgtgagtggacacagaatctgtgtctatttatttcacagattctaggttaacttgtacagaaaggccattatac

SEQ ID NO: 118080 - DNA, 694 bp, Homo sapiens
tgagaacaacaattctagtgatcttcctcatcactggttccaaaaccaagcccatgaaaggcctgcatagggataatgtggagaacatgccagagaaatacacatcaccagctcctcaactcagagctccaagggaatggccaaggaggctgtattgtcctaagaaatttgagactgttttgacttacaataaatcctgctcaatcatatgtatgtatacacacacacacacccacacacacagacggtgttgtcagtgaagcctctaacawtgcatcttgactggacagatttgacaattaaaatggctggaagaaaataggcttcataagtgtcacttactattcacattacacattaaaaggacatctcctaaattaaatcttgtctatgataaaaaggcagaaaatcatgacccaaggctcatttataactgcagaaatgttcaagatagaccaaggcttgctatgtttaggaactgacaagtacaggtctttataatctaccattttgcctcatttgataccaggtgaccttcataatgcaggcaatagagaattgcaagatttgtcagacatttcaggtctttggaaagctatgctctttcacaagaacagccatggaaacaggaagaaagtcaattcccacttaaggtaatcagaatttacaaatattcctttcttcattgaaatct

SEQ ID NO: 118081 - DNA, 694 bp, Homo sapiens
tgagaacaacaattctagtgatcttcctcatcactggttccaaaaccaagcccatgaaaggcctgcatagggataatgtggagaacatgccagagaaatacacatcaccagctcctcaactcagagctccaagggaatggccaaggaggctgtattgtcctaagaaatttgagactgttttgacttacaataaatcctgctcaatcatatgtatgtatacacacacacacacccacacacacagacggtgttgtcagtgaagcctctaacaatgcatcttgactggacagatttgacaattaaaatggctggaagaaaataggcttcataagtgtcacttactattcacattacacattaaaaggacatctcctaaattaaatcttgtctatgataaaaaggcagaaaatcatgacccaaggctcatttataactgcagaaatgttcaagatagaccaakgcttgctatgtttaggaactgacaagtacaggtctttataatctaccattttgcctcatttgataccaggtgaccttcataatgcaggcaatagagaattgcaagatttgtcagacatttcaggtctttggaaagctatgctctttcacaagaacagccatggaaacaggaagaaagtcaattcccacttaaggtaatcagaatttacaaatattcctttcttcattgaaatct

SEQ ID NO: 118082 - DNA, 694 bp, Homo sapiens
tgagaacaacaattctagtgatcttcctcatcactggttccaaaaccaagcccatgaaaggcctgcatagggataatgtggagaacatgccagagaaatacacatcaccagctcctcaactcagagctccaagggaatggccaaggaggctgtattgtcctaagaaatttgagactgttttgacttacaataaatcctgctcaatcatatgtatgtatacacacacacacacccacacacacagacggtgttgtcagtgaagcctctaacaatgcatcttgactggacagatttgacaattaaaatggctggaagaaaataggcttcataagtgtcacttactattcacattacacattaaaaggacatctcctaaattaaatcttgtctatgataaaaaggcagaaaatcatgacccaaggctcatttataactgcagaaatgttcaagatagaccaaggcttgctatgtttaggaactgacaagtacaggtctttataatctaccattttgccycatttgataccaggtgaccttcataatgcaggcaatagagaattgcaagatttgtcagacatttcaggtctttggaaagctatgctctttcacaagaacagccatggaaacaggaagaaagtcaattcccacttaaggtaatcagaatttacaaatattcctttcttcattgaaatct

SEQ ID NO: 118083 - DNA, 694 bp, Homo sapiens
tgagaacaacaattctagtgatcttcctcatcactggttccaaaaccaagcccatgaaaggcctgcatagggataatgtggagaacatgccagagaaatacacatcaccagctcctcaactcagagctccaagggaatggccaaggaggctgtattgtcctaagaaatttgagactgttttgacttacaataaatcctgctcaatcatatgtatgtatacacacacacacacccacacacacagacggtgttgtcagtgaagcctctaacaatgcatcttgactggacagatttgacaattaaaatggctggaagaaaataggcttcataagtgtcacttactattcacattacacattaaaaggacatctcctaaattaaatcttgtctatgataaaaaggcagaaaatcatgacccaaggctcatttataactgcagaaatgttcaagatagaccaaggcttgctatgtttaggaactgacaagtacaggtctttataatctaccattttgcctcwtttgataccaggtgaccttcataatgcaggcaatagagaattgcaagatttgtcagacatttcaggtctttggaaagctatgctctttcacaagaacagccatggaaacaggaagaaagtcaattcccacttaaggtaatcagaatttacaaatattcctttcttcattgaaatct

SEQ ID NO: 118084 - DNA, 601 bp, Homo sapiens
ggctgtattgtcctaagaaatttgagactgttttgacttacaataaatcctgctcaatcatatgtatgtatacacacacacacacccacacacacagacggtgttgtcagtgaagcctctaacaatgcatcttgactggacagatttgacaattaaaatggctggaagaaaataggcttcataagtgtcacttactattcacattacacattaaaaggacatctcctaaattaaatcttgtctatgataaaaaggcagaaaatcatgacccaaggctcatttataactgcagaaatgttcaagatagaccaaggcttgctatgtttaggaactgacaagtacaggtctttataatctaccattttgcctcatttgataccaggtgaccttcataatgcaggcaatagagaattgcaagatttgtcagasatttcaggtctttggaaagctatgctctttcacaagaacagccatggaaacaggaagaaagtcaattcccacttaaggtaatcagaatttacaaatattcctttcttcattgaaatctcaataggcacttcaatattatatttaattaattcttttgttacaatcatgcatc

SEQ ID NO: 118085 - DNA, 601 bp, Homo sapiens
ggctgtattgtcctaagaaatttgagactgttttgacttacaataaatcctgctcaatcatatgtatgtatacacacacacacacccacacacacagacggtgttgtcagtgaagcctctaacaatgcatcttgactggacagatttgacaattaaaatggctggaagaaaataggcttcataagtgtcacttactattcacattacacattaaaaggacatctcctaaattaaatcttgtctatgataaaaaggcagaaaatcatgacccaaggctcatttataactgcagaaatgttcaagatagaccaaggcttgctatgtttaggaactgacaagtacaggtctttataatctaccattttgcctcatttgataccaggtgaccttcataatgcaggcaatagagaattgcaagatttgtcagacatttcaggtctttggaaagctatgctctttcacaagaacagccatggaaacaggaagaaagtcaattcccacttaaggtaatcagaatttacaaatattcctytcttcattgaaatctcaataggcacttcaatattatatttaattaattcttttgttacaatcatgcatc

SEQ ID NO: 118086 - DNA, 433 bp, Homo sapiens
ttctggtcatgccaaggtttaattaactggtttaattgtttttctgttttcttggtttctttttccttcttcctgggggtttctagtaattttagtttgatgtctcactttctccattttttatttcttagttttcttctgtgattattttcactgcagctgcagggcctaatcctgggttggcagataactagcacttactctgccctaattggaatccgggagagataggaggtgccctagtgtgaaaatgtgtttgytcctctctgcttctggtagtctctctgtaggagtactttacgtattctgaatgttcacttcttatgagatacatgatgtgcaactataggttgaatgtctctgatccaaaaatctgaaatcccaaatgcgccaaagtctgaaactttttgagtgccaacatgacactcaaagg

SEQ ID NO: 118087 - DNA, 504 bp, Homo sapiens
aaaaattattacagacacagtctgatgcaaatctttgacttggctagcttcaaggctcttaaaagtctaagattcctyattaaaaatttccaacaaagccaattttaagaagcctatatggccaataaatattcttgctgccctttatggaaataatcaggcccggtatgataagactaaaacttattttgcatacaaaattggtcctactatgatttgtctttgataaaatgatggactagagagaaaatttatgttccaaaagaaaactatgacatatgctattagattccaaccctgatcattgttttagagtttttattatttgcctataatttgggctgaatcctgaattatttcctggctccaagtgttccctagtgaatctgaatataatatattttttaaaacttgttttatcctgtcaggaatgagatgtatttttgaaggactacttaaactagcaattacaattcgattattatgattatagaatctcgggat

SEQ ID NO: 118088 - DNA, 607 bp, Homo sapiens
ccgggcgtgctgctggaggctgtgcagggcacggtgctgggcgtggtgcagggcacggtggctcacacgtgtaaaaatcccagcactttgcaaggccgaggtgggtgaattgcttgaactcagaagtttgaaagcatcctgggcaacatggtaaaaccctgtctctacaaaaatacaaaaattagccagcatgatggtgcatgcctatggtcccaactacttcggaggctgaggtaggaggatggcttaagtttgggagggagaaattgtggtgagcmaagatcatgccactgcactccatcctgagtgatagaaccagaccatgtctcaaaaaaaaaaaagtctttacaatcagctatcatctaaattacttttaatggaaaggactctgacaagttctcttaaatatggtttcagataactttggggatcataccattggactaggaaaatcttccaggactctaaaaagctgaatgaggatttccaattgaaatcaagcaaaacacaaaaaaactgaatgagaattgctatttgaaatcaagcagaacaagatttagttacattggactgaacttataaaagaaggaaaagattttattcatgg

SEQ ID NO: 118089 - DNA, 607 bp, Homo sapiens
ccgggcgtgctgctggaggctgtgcagggcacggtgctgggcgtggtgcagggcacggtggctcacacgtgtaaaaatcccagcactttgcaaggccgaggtgggtgaattgcttgaactcagaagtttgaaagcatcctgggcaacatggtaaaaccctgtctctacaaaaatacaaaaattagccagcatgatggtgcatgcctatggtcccaactacttcggaggctgaggtaggaggatggcttaagtttgggagggagaaattgtggtgagcaaagatcatgccactgcactccatcctgagtgatagaaccagaccatgtctcaaaaaaaaaaaagyctttacaatcagctatcatctaaattacttttaatggaaaggactctgacaagttctcttaaatatggtttcagataactttggggatcataccattggactaggaaaatcttccaggactctaaaaagctgaatgaggatttccaattgaaatcaagcaaaacacaaaaaaactgaatgagaattgctatttgaaatcaagcagaacaagatttagttacattggactgaacttataaaagaaggaaaagattttattcatgg

SEQ ID NO: 118090 - DNA, 444 bp, Homo sapiens
gcgaatggcaccaaacttggaaaacatacttcagaatctcattcatgagaatatccccaacctatccagacaggccaacattccaattcaggaaatccagagaacctcagtaagctaagccacgagaagatcatccccaagacatataatcatcagattctccaaggtcaaaatgaaagaaacaatgttaaaggcagctagggagaaaggaaacgtcacctgcaaagggaattccatcagacttagcagacttctcagctgaaamcctacaagccagaaaagatattcaacttcttaaagaaaagaaatttcacgtagtatggcagagacagatataccatataataacatggtgttattataaatggttaaaagaaaaagaaatctcaacccagaatttcatgtccagcaaaattaagcatcataagtgaaggagaaacaaga

SEQ ID NO: 118091 - DNA, 444 bp, Homo sapiens
gcgaatggcaccaaacttggaaaacatacttcagaatctcattcatgagaatatccccaacctatccagacaggccaacattccaattcaggaaatccagagaacctcagtaagctaagccacgagaagatcatccccaagacatataatcatcagattctccaaggtcaaaatgaaagaaacaatgttaaaggcagctagggagaaaggaaacgtcacctgcaaagggaattccatcagacttagcagacttctcagctgaaaccctacaagccagaaaagatattcaacttcttaaagaaaagaaatttcacgtagtatggcagagacagatataccatataataacatggtgttattataaatgrttaaaagaaaaagaaatctcaacccagaatttcatgtccagcaaaattaagcatcataagtgaaggagaaacaaga

SEQ ID NO: 118092 - DNA, 444 bp, Homo sapiens
gcgaatggcaccaaacttggaaaacatacttcagaatctcattcatgagaatatccccaacctatccagacaggccaacattccaattcaggaaatccagagaacctcagtaagctaagccacgagaagatcatccccaagacatataatcatcagattctccaaggtcaaaatgaaagaaacaatgttaaaggcagctagggagaaaggaaacgtcacctgcaaagggaattccatcagacttagcagacttctcagctgaaaccctacaagccagaaaagatattcaacttcttaaagaaaagaaatttcacgtagtatggcagagacagatataccatataataacatggtgttattataaatggttaaaagaaaaagaaatytcaacccagaatttcatgtccagcaaaattaagcatcataagtgaaggagaaacaaga

SEQ ID NO: 118093 - DNA, 522 bp, Homo sapiens
gattgataccaacctgggctatctttattgcccaaaccaacaggataatttgctgaggttgtggagcttctcccctgcaaagagtccctgatctcccaaaatctggttgagatctaagtttgattttgctgtacaactccttttctgaagttttactcatttccaacaaggaaggcaagttttcctgcttctgtggtgatggagagcaggcacctcctttcctgagtttcagcttgcttctgacagggaaggtgagtgtaagttgtttccagcttctaagatggcagagaacgatcaccagcctgagccttgtttccaggtaagtagctgaattagagttttgtcttaaaatttttccttaatgactaaaatttaagattactcaccagctgcttttaatttctgcttttagtttctccttaccattagaacactcagtaatcatatgaattgtgcatttcttgttttgcttaactstttttgtttgtttatgcctggggctttattgttgtttcacttttc

SEQ ID NO: 118094 - DNA, 543 bp, Homo sapiens
acaaaattttgttcacagacaacaggatgtaatgggtaaaaatcctgaaattccacaaaatattggtaaaataatgaaattcaacaaagtttcaggatacagtaacacacacaagtcagttgcatttccataaactaacaatgaacaatctgcaaataaaattttaaaaagagaggccaggtgcagtggctcacacttataatcccactttgggaggccaaggcgggtagaccacctgaggtcaggagttcgtgaccagctgggccaaacccatctctaaaataaatagtaaaactctgtctctattaaaaatacaaaaattagctggrcatagtggcagacacctgaagtcccagctacatgggaggctgaggcaggagaattgcttgaacttggaaggtggaggttgcagtcagctgagattgtgccactgcgctccagcttaggaaactgagacgccatctcaaagaaaagaaagaaaggaaagaaagagagagaaagaaaagaaaagaaagataaaacaaaagaaaagaaatttttaaa

SEQ ID NO: 118095 - DNA, 543 bp, Homo sapiens
acaaaattttgttcacagacaacaggatgtaatgggtaaaaatcctgaaattccacaaaatattggtaaaataatgaaattcaacaaagtttcaggatacagtaacacacacaagtcagttgcatttccataaactaacaatgaacaatctgcaaataaaattttaaaaagagaggccaggtgcagtggctcacacttataatcccactttgggaggccaaggcgggtagaccacctgaggtcaggagttcgtgaccagctgggccaaacccatctctaaaataaatagtaaaactctgtctctattaaaaatacaaaaattagctgggcrtagtggcagacacctgaagtcccagctacatgggaggctgaggcaggagaattgcttgaacttggaaggtggaggttgcagtcagctgagattgtgccactgcgctccagcttaggaaactgagacgccatctcaaagaaaagaaagaaaggaaagaaagagagagaaagaaaagaaaagaaagataaaacaaaagaaaagaaatttttaaa

SEQ ID NO: 118096 - DNA, 543 bp, Homo sapiens
acaaaattttgttcacagacaacaggatgtaatgggtaaaaatcctgaaattccacaaaatattggtaaaataatgaaattcaacaaagtttcaggatacagtaacacacacaagtcagttgcatttccataaactaacaatgaacaatctgcaaataaaattttaaaaagagaggccaggtgcagtggctcacacttataatcccactttgggaggccaaggcgggtagaccacctgaggtcaggagttcgtgaccagctgggccaaacccatctctaaaataaatagtaaaactctgtctctattaaaaatacaaaaattagctgggcatagtggcagacacctgwagtcccagctacatgggaggctgaggcaggagaattgcttgaacttggaaggtggaggttgcagtcagctgagattgtgccactgcgctccagcttaggaaactgagacgccatctcaaagaaaagaaagaaaggaaagaaagagagagaaagaaaagaaaagaaagataaaacaaaagaaaagaaatttttaaa

SEQ ID NO: 118097 - DNA, 561 bp, Homo sapiens
ctggcaacttttgaaaaaatgtaatgaaataatgtgctttgctattggttaaaatgtttttgggcagggtcagtggcttacacctgtaatcccagcactttggtaggctgaggtgggcagatcacttgaggtcaggagtttgagaccagcctggcaaacacggtgaaaccccatctctactaaaaatacaaaaattatctgagtgtggtggcatgtgcctgtaatcccagctactagggaggctgaggtgtgagaattgcttgaacyaggcaagcagaggttgcagtgagccaagatcatgccattgcactccagcctgggcaacagagtaaggttctgtcaaaaataaaaaagaaagaaagaaaagaaaaaaaaagtttttagcttcaagtaacagaatagtcaactaattgaagaaaataacaaggagcaactttgaccaaattgcacaacaaatagatggtatcaatgcttagttaattcaacatgatccacttctttgtgattctgttatctttctacctatgttttcaagatggctatggcattcccagccttaca

SEQ ID NO: 118098 - DNA, 561 bp, Homo sapiens
ctggcaacttttgaaaaaatgtaatgaaataatgtgctttgctattggttaaaatgtttttgggcagggtcagtggcttacacctgtaatcccagcactttggtaggctgaggtgggcagatcacttgaggtcaggagtttgagaccagcctggcaaacacggtgaaaccccatctctactaaaaatacaaaaattatctgagtgtggtggcatgtgcctgtaatcccagctactagggaggctgaggtgtgagaattgcttgaaccaggcaagcagaggttgcagtgagccaagatcatgccattgcactccagcctgggcaacagagtaaggttctgtcaaaaataaaaaagaaagaaagaaaagaaaaaaaaagtttttagcttcaagtaacagaatagtcaactaattgaagaaaawaacaaggagcaactttgaccaaattgcacaacaaatagatggtatcaatgcttagttaattcaacatgatccacttctttgtgattctgttatctttctacctatgttttcaagatggctatggcattcccagccttaca

SEQ ID NO: 118099 - DNA, 561 bp, Homo sapiens
ctggcaacttttgaaaaaatgtaatgaaataatgtgctttgctattggttaaaatgtttttgggcagggtcagtggcttacacctgtaatcccagcactttggtaggctgaggtgggcagatcacttgaggtcaggagtttgagaccagcctggcaaacacggtgaaaccccatctctactaaaaatacaaaaattatctgagtgtggtggcatgtgcctgtaatcccagctactagggaggctgaggtgtgagaattgcttgaaccaggcaagcagaggttgcagtgagccaagatcatgccattgcactccagcctgggcaacagagtaaggttctgtcaaaaataaaaaagaaagaaagaaaagaaaaaaaaagtttttagcttcaagtaacagaatagtcaactaattgaagaaaataacaaggagcaactttgaccaaatygcacaacaaatagatggtatcaatgcttagttaattcaacatgatccacttctttgtgattctgttatctttctacctatgttttcaagatggctatggcattcccagccttaca

SEQ ID NO: 118100 - DNA, 282 bp, Homo sapiens
aataataagtgacgacattttggaactttaaggaaaaactttaaggattggaaaacagggatgccatatgtccagtaacatgggatagccgttcctaattaaggattgctgtatgtcctgaatgactttctaatgtaatgaaggtgaataacctgctytgtttaattatacaatcccaaatgtaactgcctaagtgccaagtacttttgcatggttttaatatgccatgaattttgcaagaatgaaactactatgtatatgagaaaagatggtagatttttt

SEQ ID NO: 118101 - DNA, 519 bp, Homo sapiens
ccatagtcaaatcactgggcaaaaaaagagtaaatcttgaaagtagctaaagggagggagaaaataatttacatacgtggaaacaaatagacagatgacctgtcatcagaaatgacactttaaaaagcaatgaaactacatcttcaaaataaaaaaaactgtcaactccaaattctataactagaaaaagtaattcttgagaaaataaagatttattcagataaaagaaagcttygaacaattgtcattagcagacctagatacaagaaatgcaaacggaaattttttagactaaagaaagataacaacagatggaaattctgacctacaggaagtaaggagaagctctaggaatggcatgtgcataaacaggaaaaactaaggcttttttcttttagttttataacaaacaactgatggtttaaataaaatttaagagtactattgataatgtatgtagagtaaaatattctaaattaatagctctgacaggagactaaacgcaacaattttgccaca

SEQ ID NO: 118102 - DNA, 519 bp, Homo sapiens
ccatagtcaaatcactgggcaaaaaaagagtaaatcttgaaagtagctaaagggagggagaaaataatttacatacgtggaaacaaatagacagatgacctgtcatcagaaatgacactttaaaaagcaatgaaactacatcttcaaaataaaaaaaactgtcaactccaaattctataactagaaaaagtaattcttgagaaaataaagatttattcagataaaagaaagctttgaacaattgtcattagcagacctagatacaagaaatgcaaacggaaattttttagactaaagaaagataacaacagatggaaattctgacctacaggaagtaaggagaagctctaggaatggcatgtgcataaacaggaaaaactaaggcttttttcttttagttttataacaaacaactgatggtttaaataaaatttaagagtactattgataaygtatgtagagtaaaatattctaaattaatagctctgacaggagactaaacgcaacaattttgccaca

SEQ ID NO: 118103 - DNA, 519 bp, Homo sapiens
ccatagtcaaatcactgggcaaaaaaagagtaaatcttgaaagtagctaaagggagggagaaaataatttacatacgtggaaacaaatagacagatgacctgtcatcagaaatgacactttaaaaagcaatgaaactacatcttcaaaataaaaaaaactgtcaactccaaattctataactagaaaaagtaattcttgagaaaataaagatttattcagataaaagaaagctttgaacaattgtcattagcagacctagatacaagaaatgcaaacggaaattttttagactaaagaaagataacaacagatggaaattctgacctacaggaagtaaggagaagctctaggaatggcatgtgcataaacaggaaaaactaaggcttttttcttttagttttataacaaacaactgatggtttaaataaaatttaagagtactattgataatgtatgtagagtaaaatattctaaattaatagctctgacaggagwctaaacgcaacaattttgccaca

SEQ ID NO: 118104 - DNA, 487 bp, Homo sapiens
tgtgactctgtctcaaaaaaaaaaatgagatgaccatttcacctaagatataccctcttaagtatttttttaagtgtacaatacaggacggccatgcatcagagatatatgtgggtttggttcagacaactgcaataaagtgtkatacaatttcttttggtttcccagtgcatgtaaaagtatgtttatactgtgctgtataaagtgtgcaatagcatatgtctacaaagtatgcacactttaatttacaaatactttattgttaacaagtgctaacagtcatctgagccttcagaaagctgcaatctttttgtgtgtgtgtgacagggttttactctgtggctcaggctggagtaattgcagcctcaacctcatgctcaatcaaacccccacctcagactcctgactagctgggactacaggtgcatgccaccgtgtccagctaatttttgtattttttttttttttttgtagagatggggttttg

SEQ ID NO: 118105 - DNA, 487 bp, Homo sapiens
tgtgactctgtctcaaaaaaaaaaatgagatgaccatttcacctaagatataccctcttaagtatttttttaagtgtacaatacaggacggccatgcatcagagatatatgtgggtttggttcagacaactgcaataaagtgttatacaatttcttttggtttcccagtgcatgtaaaagtatgtttatactgtgctgtataaagtgtgcaatagcatatgtctacaaagtatgcacactttaatttacaaatactttattgttaacaagtgctaacagtcatctgagccttcagaaagctgcaatctttttgtgtgtgtgtgacagggttttactctgtggctcaggctggagtaattgcagcctcaacctcatgctcaatcaaacccccacctcagactcctgastagctgggactacaggtgcatgccaccgtgtccagctaatttttgtattttttttttttttttgtagagatggggttttg

SEQ ID NO: 118106 - DNA, 487 bp, Homo sapiens
tgtgactctgtctcaaaaaaaaaaatgagatgaccatttcacctaagatataccctcttaagtatttttttaagtgtacaatacaggacggccatgcatcagagatatatgtgggtttggttcagacaactgcaataaagtgttatacaatttcttttggtttcccagtgcatgtaaaagtatgtttatactgtgctgtataaagtgtgcaatagcatatgtctacaaagtatgcacactttaatttacaaatactttattgttaacaagtgctaacagtcatctgagccttcagaaagctgcaatctttttgtgtgtgtgtgacagggttttactctgtggctcaggctggagtaattgcagcctcaacctcatgctcaatcaaacccccacctcagactcctgactagctgggactacaggtgcatgccaccrtgtccagctaatttttgtattttttttttttttttgtagagatggggttttg

SEQ ID NO: 118107 - DNA, 498 bp, Homo sapiens
acatttacaaccaattcaagtcyactttcagataacactatcccacttcatgggtgactacctgcttaacaaagaaaacacctgattcctccctcccatccttccattccattccttgtattattgttctttatttcacttgtgtataagcacacataatctatctgtgtgtatttattattatctacaaacttattggtcagatcaattatgaataaatacatgtttttattgtaccacaattcctccctcccatccttccattccattccttgtattagtgttactcatttcaattgtgtataagcatacataatctatctgtgtgtatttgttattgtctatgaacttcttggtcagatcaattaagaataaatacatagatttttattgtaccaaaattctttaatgctctttttaaaaaaatgttgatccaggtttcagttatatatcttttgtttccctctaaagaatttcatttaacatttcttgcaagac

SEQ ID NO: 118108 - DNA, 498 bp, Homo sapiens
acatttacaaccaattcaagtctactttcagataacactatcccacttcatgggtgactacctgcttaacaaagaaaacacctgattcctccctcccatccttccattccattccttgtattattgttctttatttcacttgtgtataagcacacataatctatctgtgtgtatttattattatctacaaacttattggtcagatcaattatgaataaatacatgtttttattgtaccacaattcctccctcccatccttccattccattccttgtattagtgttactcatttcaattgtgtataagcatacataatctatctgtgtgtatttgttattgtctatgaacttcttggtcagatcaattaagaataaatacatagatttttattgtaccamaattctttaatgctctttttaaaaaaatgttgatccaggtttcagttatatatcttttgtttccctctaaagaatttcatttaacatttcttgcaagac

SEQ ID NO: 118109 - DNA, 434 bp, Homo sapiens
gatttgttgttcactaacaagcacagaagctttgttacatttacagtgtcattcttggcaaaacctgaagttttgcctcctgggttcaygccattctcctgcctcagcctcctgagtagctgggactataggcgcccgccacctcacccagctaattttttgtatttttagtagagacggggttttgccgtgttagccaggatggtctctatctcctgaccttgtgatccgcccacctcggccttccagagtgctgggattacaggcgtgagccaccgcgccaagccagaagctctaatttcaatgatgattgtgctttttctctcttcctcagcatctggctcatgataaaatttcaggtgtcttgatggtatctaaatcagttgttgattcggtcctggagaaacacaagcataacctctatgccaagttat

SEQ ID NO: 118110 - DNA, 434 bp, Homo sapiens
gatttgttgttcactaacaagcacagaagctttgttacatttacagtgtcattcttggcaaaacctgaagttttgcctcctgggttcatgccattctcctgcctcagcctcctgagtagctgggactataggcgcccgccacctcacccagctaattttttgtatttttagtagagrcggggttttgccgtgttagccaggatggtctctatctcctgaccttgtgatccgcccacctcggccttccagagtgctgggattacaggcgtgagccaccgcgccaagccagaagctctaatttcaatgatgattgtgctttttctctcttcctcagcatctggctcatgataaaatttcaggtgtcttgatggtatctaaatcagttgttgattcggtcctggagaaacacaagcataacctctatgccaagttat

SEQ ID NO: 118111 - DNA, 618 bp, Homo sapiens
ttgtttcatcatttggttgtggttttattcttccattcttatatataaacaagtgatacatgttacaattgatgcagtaatacatctcgcaatttactagaaaaagttttaatacttgttagtgtacactatatrttttaaatactgttagttcatacaatccagccaacacgaggaagtaggtgctattaccatttccatagtccaattttgaatgtgatccaaaaactctgaaggaaagaattaggagaatctcagtttgacacaatctgtctccagagacttagctctcatgaactgtattccaatgtgttttctcttatatggtaaatactttctaagtttagttttaggaatcttaccctgctccatgctcatgaaaatatttccctaaattgtgttgtatatattggattaaatattttttattttggtctatgatccacttggaatatattttgcatttaatgtgaggtcacatttcaggttttaattcctcttaaaggatattcaattttctagaacatttttgaaaaaaatatcttttccaattcactgactattcttgcactgtaatactatttcctgtttttgtctgcaaatgcatttaggttaaat

SEQ ID NO: 118112 - DNA, 618 bp, Homo sapiens
ttgtttcatcatttggttgtggttttattcttccattcttatatataaacaagtgatacatgttacaattgatgcagtaatacatctcgcaatttactagaaaaagttttaatacttgttagtgtacactatatattttaaatactgttagttcatacaatccagccaacaygaggaagtaggtgctattaccatttccatagtccaattttgaatgtgatccaaaaactctgaaggaaagaattaggagaatctcagtttgacacaatctgtctccagagacttagctctcatgaactgtattccaatgtgttttctcttatatggtaaatactttctaagtttagttttaggaatcttaccctgctccatgctcatgaaaatatttccctaaattgtgttgtatatattggattaaatattttttattttggtctatgatccacttggaatatattttgcatttaatgtgaggtcacatttcaggttttaattcctcttaaaggatattcaattttctagaacatttttgaaaaaaatatcttttccaattcactgactattcttgcactgtaatactatttcctgtttttgtctgcaaatgcatttaggttaaat

SEQ ID NO: 118113 - DNA, 618 bp, Homo sapiens
ttgtttcatcatttggttgtggttttattcttccattcttatatataaacaagtgatacatgttacaattgatgcagtaatacatctcgcaatttactagaaaaagttttaatacttgttagtgtacactatatattttaaatactgttagttcatacaatccagccaacacgaggaagtaggtgctattaccatttccatagtccaattttgaatgtgatccaaaaactctgaaggaaagaattaggagaatctcagtttgacacartctgtctccagagacttagctctcatgaactgtattccaatgtgttttctcttatatggtaaatactttctaagtttagttttaggaatcttaccctgctccatgctcatgaaaatatttccctaaattgtgttgtatatattggattaaatattttttattttggtctatgatccacttggaatatattttgcatttaatgtgaggtcacatttcaggttttaattcctcttaaaggatattcaattttctagaacatttttgaaaaaaatatcttttccaattcactgactattcttgcactgtaatactatttcctgtttttgtctgcaaatgcatttaggttaaat

SEQ ID NO: 118114 - DNA, 618 bp, Homo sapiens
ttgtttcatcatttggttgtggttttattcttccattcttatatataaacaagtgatacatgttacaattgatgcagtaatacatctcgcaatttactagaaaaagttttaatacttgttagtgtacactatatattttaaatactgttagttcatacaatccagccaacacgaggaagtaggtgctattaccatttccatagtccaattttgaatgtgatccaaaaactctgaaggaaagaattaggagaatctcagtttgacacaatctgtctccagagacttagctctcatgaactgtattccaatgtgttttctcttatatggtaaatactttctaagtttagttttaggaatcttaccctgctccatgctcatgaaaatatttccctaaattgtgttgtatatattggattaaatattttttattttggtctatgatccacttggaatatattttgcatttaatgtgaggtcacatttcaggttttaattcctcttaaaggatattcaaytttctagaacatttttgaaaaaaatatcttttccaattcactgactattcttgcactgtaatactatttcctgtttttgtctgcaaatgcatttaggttaaat

SEQ ID NO: 118115 - DNA, 523 bp, Homo sapiens
tctggactgctccagatttgactttagatactccatggtatctagtctttatgatcagttgaatgatcagtgtttaagtctaaaaataatgctttcctgaaaatgtttatatttcattgctgtttccttattgcctgctagccaaatggaatttgggcaagcaactctttgaagacttttttaccctagaaatttacttttgtcctaaaaaccctaactgtaaataagcagtygaagcaagttgccaccttgaagttgagggatacactttgcttcatcagtattaaaaaccatggtactcttattttgtcttttttaattcaaaacattttctaaatgtggtactttgaaccttggagtatttacatgtttctgttcaaaactgtgacttattaatgtaagtctgctagtagtactttttttgtctgagcataagctatatttcaagatatactttgccaattttgttattggtgggtaatcatttttaaattatattgttattaggtaattatttttaaag

SEQ ID NO: 118116 - DNA, 544 bp, Homo sapiens
tttttttttctactatgtagtgaagggcatacatagtatgtgcaaactgcagctattaagagagatatgatgatttttggctgtttacattcatgaatactttataaaatccaggaaaaattttgttagatattctactctattgaagtctgaaaagaaacatgcagagaaaatataatcaagaatttatttggcagatttataacatctgcagagctcagagctcaaggaaagaccataacacataaaatatgarcatcaataaatgttcagaatgtgtcactggatgtgaaatatatttgtatttcctttgtgtttaatacaatgtagacacaaccttaataatcctttacacttttattacatatttaaacttaacagaacttgccaggtgtatgcctgtagttccagctacttgggaggctgaggcaagaggattgcttgagtcctttttttttttttaattaaataaaattggctgggcgtggtggctcacgcctataatcccagcactttgagaggccaaggtgagtggatcacctga

SEQ ID NO: 118117 - DNA, 602 bp, Homo sapiens
taagttcttgtgtggagatgtattttcagttctcttggggggagatacatatatatatgtgtgtgtgtgtrtatatatatgtatatatatatttttatgtatatgttccaaccattctaataatattctaataattctaatcatatgattagaatggttagaatgtataaatataaatatatatctcccccctaacagaaatacatatatatgtatgattagaatggttagaattattgggtaatatggtaaatgtattcttaaaaggaactgctgaacaatgctccagtatggttataacatcttatatatccaagagcaacacagaaaatttccagtatatccacatcctccccagcacttggtattgtcttttaaattttatccttctaatggttcctactgtagtggcttcttattatatgtaaaacttatatttctctgatgactaatgatgttgaacattgttcatgtgctacctagacatccatattttttctttggtaatgtgtctcttcaaatcttctgtccattttttattgcgttatcttactgttaagttgtaagaattctttatatatgctggatacaatactctaatc

SEQ ID NO: 118118 - DNA, 587 bp, Homo sapiens
tgttaggatatgagatttatttcatgagagcagtggtgagaacagaaaacaaggtaaaagaaattagacacttggaaaaattaaattccagagttctgaaggaacttgcaaatattttggagataatatccttgtgaaatcatagccaatgggagaggcaacaaaagattgcattttttactaattgtaactcacctgagtgtcacacatctaacattgagtccaacctgggttacaaggtttttaaaaagacaaatgtgctcagagttggttaacaacgtagtgaggatatttgttatttgatataggattcaaagggrtgaacgtcatggaggcaagagcatgcatacattggttagataactaatctatgcctggaggcaggagcagtgatttggagactatggacagcatcctacaattaatggttgaataataataataattgcaaacactgtgtgccaggcattattctaaatgttttttgtaaaaagttatttaatcctcatcctatgaagtagatactatcatgtttattttcaggtgaggaaatgaagggacagagaggttaaattacactgtcagtg

SEQ ID NO: 118119 - DNA, 539 bp, Homo sapiens
tctagagagtaggaccacacctggaaagcattgttaaaccatcatttgagaaacccacttgcagaggttaaaaaggcaggaaagggatctgtgtctgggatccctaagatcacgctgaggctcaatagtttgctagaactcacagggctcaaaaaagctgttatactcaaacttgaaatttattatagtttcttgttacagattaaaattagtaaaataaaacagcacattgtgtgaatgaaatcmaggagaaaccaggctcattctttcaggtgtccccttccagaggagttgcaagggaacatgcttcacaacaccatttgatcaatagtatcagtagtagcatatcttatttacataggtagttgaatcttatcaacaatgccagtgttataccatactgtagtatgatcatagcacaatttaattttattatagaacaaatcagtaaggatcatataaatttttgctatgccttcccacagaatgagcctttgtccaaataccatatatttttatgagtagtagttattacagtt

SEQ ID NO: 118120 - DNA, 623 bp, Homo sapiens
aaaggaattgtttagaggaacataaagttacattttgaggatgagttttgaggcttttttacattttttatttgtaattaaaaaaattaaaaattgcaaacaagtcaaatgtatgatgaataagttgcagcacattgatgcaattgtaatactattgtcttagtccattttttgttgctataacatatataagtccattcttgcattgctataagaaaatacctgagactgggtaatttttttwtatatatatatatataaagaggtttaattggctcatggttctgcagcctgtacagaaaacatagcagcttctgcttctagggaggcctcaggaaacgtataatcatggcagaaggggaagcaggcatgtcttacagggcaggagcaggaggaaggtaggaggaggtgccacacacttttaaacaaccaggtatcatgaaaactctattatgaaaactgcaccaaagcagggaaatctgtccccatgaacaagtcacctcccacaagccccaactccaacatcgtggattacagttgaacattacatttgggtggggatacacaaatccaaaccatatcaacataatacttgaaattaggtgatttgtaaagaacagaaa

SEQ ID NO: 118121 - DNA, 604 bp, Homo sapiens
tgtgaattagagacatcaagagacacaattctgaagccttctaatatttagagatcaaagaaatggaaaggagcagtamaggcacttaaaatgatataaagaaaaaggagaaaaatgaggttatttgtctgagtagataaatgaccttttagagatgtaacaaaatagctataacaagccatctactatcacctaataaagggctttgcccatgcaattgctttcactctagacacacaatttttctcctttctgtgggatctttcacattagcataaatcatgttacatgatcttgcttcttcaaaaagtatcctttgtcatggtacctttcagataccttcttaaagagaacttttataccactctattcctcatctcccactgtctttcaaacctatgccaattcatctttcattcctaatactccaccaaaatagaactgataacctccactgaaaacctccaggcttcaaaacccaatgactagttcttaatcattatcttgctggtttcctaactatacttgaaaccataaatcatttttttcttgatacactttctggatagtacacatttcgagtatctttcattcttaaaaatgt

SEQ ID NO: 118122 - DNA, 623 bp, Homo sapiens
aaaggaattgtttagaggaacataaagttacattttgaggatgagttttgaggcttttttacattttttatttgtaattaaaaaaattaaaaattgcaaacaagtcaaatgtatgatgaataagttgcagcacattgatgcaattgtaatactattgtcttagtccattttttgttgctataacatatataagtccattcttgcattgctataagaaaatacctgagactgggtaatttttttatatatatatatatataaagaggtttaattggctcatggttctgcagcctgtacagaaaacatagcagcttctgcttctagggaggcctcaggaaacgtataatcatggcagaaggggaagcaggcatgtcttacagggcaggagcaggaggaaggtaggaggaggtgccacacacttttaaacaaccaggtatcatgaaaactctattatgaaaactgcaccaaagcagggaaatctgtccccatgaacaagtcacctcccayaagccccaactccaacatcgtggattacagttgaacattacatttgggtggggatacacaaatccaaaccatatcaacataatacttgaaattaggtgatttgtaaagaacagaaa

SEQ ID NO: 118123 - DNA, 659 bp, Homo sapiens
tatcccaaaccacaaatacatatttatagaatactcagaatattgtgtttctctgtaggttttatgtatatctccattgtttcattgcctggtccaggaaattaggaatttcaactgttattttttatcataacaaaacaaatgtggaaaaaagtcctggtatgtggtggctatgggatctccattgttttgtgatacaaatataaatattagtaatgtttatatttttcagtatgataactttccactttattcactagtactcaataaacagaaaagactggacaaatagactaaaactaaaaatgaaatgctttttttaaagtaaatttttccatttaaaatattactttggcagactgtaggaataaggtgttctaaatctcttgttyttacatatagtttttaaaaagtaggtccttaagtactgccgaattattttttctcatctaaaagtccatggaaagattaactagaatattcaagtgtatggtgatacataataataaaaagatttgctgaagtatggagttcgttaagccaaacatcttatttggaacttgttcaaggtagtacgtaattgctagtatcagcaagaccagagaaaacatgtttaccctcagcattgtgtggacggtatgtgcagtcatgcaacaata

SEQ ID NO: 118124 - DNA, 640 bp, Homo sapiens
ttatagctaatgttataatgttgtcatatttatgaatagacaagtaatattaatgaagaagaaagaccaatgcaatcatttaaaaaaaattaatgcctatatgtcaatgttcttctcyatcccaaatactgcccacatgccaaatagaaagaatactaagcaaaaacagaatatataggaaaaggcaattttagattctatttatacataaaaataccggctaggtaaataatctaggtgggctgggcacggtggctcacgcctgtaatcccagctctttgagaggccgaggcaggcagatcacctgaggtcagaagttcgagaccagcctgaccaacatggagaaaccctgtctctactaaaaatacaaaattagcttgacatggtggcgcatgcctgtaatcccagctactcaagaaggctgaggcaggagaatcgcttgaaccctggaggcagaggttgtggtgagccgagatcatgccattgcactccagcctgggcaacaagagagaaactctgtcccaaaataaacaaataaataaataaataaataaataaataaataaaatctaggtaatcatctaggtaaagctatttacctctcttaacattagtttatttgtctataaaattagaataa

SEQ ID NO: 118125 - DNA, 526 bp, Homo sapiens
cccatacacatatctttaatttttttttacatttgaattagtgtctaatgaactctgtgagtcaatagtgcaagataaagtaatgtagttcagtgtttaagaatttgaaaaaaaaaaagaaaaaagaatttggattatggagtaagaaaaagcaagaattgtatcaagatttacctccttatgagggaagcctcattgggaaacaaaattcaacatagttgtttcacataaaaggacgtgaaaaaagatatcacttgtagagtgtgggcaggtttaaagagcacaaacagtaagggatgtcgaagcatccaagactggcaactgcagtaagccattcatttctatgggagctggagaacagaaggaggaggaaaaagagaagaagctctagamggagaaggaggatgtggaggagaggccaattggaaaaaactgtagaatctggaggagagtccaactggtaaaaactctaatttaccagttgcttccactgatgaaacttaaccaaagggaagcagtaagtgag

SEQ ID NO: 118126 - DNA, 546 bp, Homo sapiens
ttttacagcagtgcccactacccagtaccaatttactgtattattccattttcacactgctataaaggactgctggagactgggtaatttataaaggaaagaggtttaattgactcacagttccgcatggctggggaggcctcaggaaacttaactatcatggcagaaggggaagcaagcacgttcttcttcacatgatggcaggaaggagaaatgccaagcaaaatgtggaaaagccccttataaaaccatcagatctcgtgataactcactcactatcaccagaacagcagcatggaaataactgcccccatggttcagttaccttccaccagattccttccacgatayataggtattatgggaattacaattcaatatgagattttggtggggacattgtaaaaccatgttaatatcttaatccatattactaattataaacatttgccatgtggttataggtttgggggcaaaaaaattctaagttcacataaactcattttacctatagataagtttagtccatgtagtggaggctgcaag

SEQ ID NO: 118127 - DNA, 557 bp, Homo sapiens
tatacccagtaatgggattgctgggtcaaatggtatttctggttctagatctttgagcaatcgccacactgtcttccacaatcgttgaactaatttacactcccaccaacagtgtaaaagcatttctttgggttctattcttctcaaaacctgtatgtatgtctgtmtgtatgtacccatgtatatttatatgcatacatttttatagttcctgttgtatgctgctaccatgtgacactacttccaggccccttattttcctggcatcaaaatagtattactgaaatggttttaatctggaggctttcctgataataaatagggataacaaaaacatgagtcattaaaaaatgaaaatatcctaaaaatctccaaaaattcttacttatggttgtgtcaagactttgttacaatattaacagatcttatttttactgcatttttactcccatctctccccgtccagtccaaggggataatcgggcttttgactcaagagtttccattttaaagcttgcctgtaagtgctgtccaccattcatcatgatcacccctgc

SEQ ID NO: 118128 - DNA, 606 bp, Homo sapiens
tcctccacatgggagagcttctgattctttcttttgcccagaagtgtctacacatccatgtgtaaggtctggatgaggtctcatatcttccagtcaacactcctcagtccttctatccatagagatcttgtgcstggtaatataccccatcccacctgggaagctgacacagaggggcatctggagagaaggaaaaggacagcagctatagattatgcactattttggtcaaacagagaaatatcacaaaatgagaggcctggaagaaagtcagccttctaattttatagaaagcttaagtgattcacctaataagttcatacagcaagttaattaaaagcatggactttacctggacttctagtccaacattgttaagaggaagtgagagatgaagaaaaatagaatgggaaggaaaaagagagaaggaggagaagggagagagaggatggtagaaaaagagggaataaaagaaaagaaaagaaaaatataggtaaatatcacccagtccactaaaatattttatttcttcatttttaaaatataacacacacactcacagacacaaatactcctttttataggcaaactatattattcatttaa

SEQ ID NO: 118129 - DNA, 592 bp, Homo sapiens
agagtaatgaaaatgaaataaaaagtggttggggagatgagaaaggacagtttgctctgttttatgtatctttgataatttcatgtcagaagttcaccgtggaaacatgaatctacacaactatgactttgggggaacaatggacactatcactatagttcagcacaatgacactggagactagaggagagaacttgaaagagaaatttagacgagatggaaagaataatgttcaaagatgtctattcaagcaccaaaggataacttcagttcccaaagacaactawcctagcatttcatcatctaggatattccaatcagttaatttcaaacgaagcttgagttaaaattgcattgtcatcttgccttgctcgaattaaaggtttatttttattagttggataggttttctttcagttttacggaaaaaattgaaaaatggacagagtccattaggagatatatgggatttagtgaatttttacccaatgaacaaaacctggctttgaaattggttgtataaccttcttatttcaggatcaggctgatcagagatgccacacataccttctgccattggttgctatgcaga

SEQ ID NO: 118130 - DNA, 557 bp, Homo sapiens
caattaaaaattaaaacaaagtaatttttttatatttctttcagtttattactgatatgctttaatgtatctctaaaagtgctgcaactacatatatgtgccttctgaagagataaaatacaaagctcagagtagcggttaaatctgaatgtaatcaaacttctaaatataagtagaggtttacaataaatacaagggaaattaaccaagtcagaatgtagacaattcttcaaggtaaatgtcggtgatttaaaatcaatggcaagaaaaaagtagaataagcagttatatatttttgaagatttaaaaggcttaattgactaagtacaacctataaactctatttagatccttagycaaaaactgtctgaaaaatagagctcatgacaaaaatgttaaacatttgaacagggcccagtttattagatgatattaaggagttgtgtgtttaatattatttgattttaaaaatgctttaactgccagagatacataccaaaatatttagggtaaaataacatttttgaaatttgttttaaaatactacaacaaaaaat

SEQ ID NO: 118131 - DNA, 536 bp, Homo sapiens
  misc_feature (1)...(536): n = A,T,C or G
tcagagaagcagtgtgatccacagagagcagagatgagtgagtcagggcagattcccagcaggattggcacaaagccaaggggggctcccactctgnggaaagggtgagtgaatgagagccccagggacccacacttctgccatggaccttatcagtactgaacacaggagagtccctccctcccctccccacagggcctccagactgacatggagagtttgtgcaagtccggacagagctgctgctcagactcatgtggaaaccagggatcttgggtcctgagtgcctgactccagcagctgtagttccaccaacagggaggtcaggctttctcacatgccccagggaaagggctgcatccacagtgctgaggagcagacagactgcagacctcgcctctgtgcaccactccagcaaagctctgtgactgggaccccaggacaactacmctaccccaacctcagcacttgactatagcagttctgcattcctctaaggtggagctcctaggggtaactaggaggtctacagcttt

SEQ ID NO: 118132 - DNA, 580 bp, Homo sapiens
tgcttcatctctgctgcaagcggacaattactctcccacagtcagtcacacaaggcaggcatgccccagcaccacttacagcctgctgaagcacagcctctcccaccttccaccagaggtagcagggaaatcagtaaataggcagggtggcagaatggaaataggaagaagtgagacatcctcatctgaacctttttcagccatgcactcttcttcttccatccctagtcaattccmagaagaactgcaagtcaggtaaaagaccaagaagaacctaattgttttctgctgttcatatcatgaacaataccccaagatgaaataggctgaatgtgagagtgcttttgataacaaaaacaggaaagttttggcatcaccaccaactcagcccctatggtctttcccaaatgcctatatctctcttacttccctgccactcccatggtcaatggaccacagacgtaccaattcacttaccagacaagatttccaagtgtcttcccatttattctcttctcctttctatttacttagtaactaattctcatcctttctttcataaactggcttaggaagcttc

SEQ ID NO: 118133 - DNA, 590 bp, Homo sapiens
ttttttggtcacatgatggagaatgaataggtagatgctaccaggcatggctggtggaggaagacccttccatcttcatttaaaaagtgcatgtttaattagggcttcaatttggcacagactcagattaatcatgtgacattaggcatgatagaatatgcttccaaatccaaaaatgtgctttgatataccatttcatcagtgactgtcataatatcattattttacaaatatagaaaatgatactgtgggaattcaagtacatttggaaagtactgttagtaaaaagaacttcagttttgctcaagagaaattaattttttctaaaactcrtgggcccccattatcttttctggttaatgctatcttgttatgatataagtcatattaatctccatctatctttatttaagttttacttggccaggctgatgagatgacaggtcatcttgtagatgtgtcagtgttacaacacactgaaaactatgaaataagatgagcattaacactgagctaattctctactcagcaagtagaaaatgtccatttccatgaaaactgattgtgaaaaatgagaatagtcagttaag

SEQ ID NO: 118134 - DNA, 617 bp, Homo sapiens
tgatatttgtaagaatttcatgtttcatttttgataatttgtaggtatgaggttaaaaattttacagaaatgttaacacttttataaaactttttatatacttttagaaaagtcaaaaattttgaatacttttataaaactctaaaaattgtatacatatacacatctaagtttcaggaaagtttttgttattgtatgtgtgtaataacatcacacatgagatctattctcctaasaaatttttaagtgtataacacagtattgttaactacaggtacagatctctagaacttattcatcttgcaaaactgaaactttacactcattaaatagcaaatggagggcaagtgcccagattaaccagaacaaatgaacaattgcctagaggtctctgccttttgcgcagttagtgaaatcatgcagtcggcgatactgattctaagagctatatgatccacacactcggctgctttccagtttagggcagagatgacagtcacaaatcctgtaatacaagaaggaagataaaaggcagatgtaggcctacagaatgcttgacattttcaaaaaggaaagatgctccgataacgggaagattcagttattagcattggtaa

SEQ ID NO: 118135 - DNA, 537 bp, Homo sapiens
gaattctttgcttttgttcattttctgtgggtgtcatgagtgcctattatattttctagattttttttcttcagggtttagaaagtgagcatttgggcttacttgggggataaagggactacttaagtgaaaacattaatagaaaggtggaaaaatattttaattattttctttcaagcattatttgtcatatttaagaccscaggtgtgagctttgctctgctccccattgtgcaactgattaggggttatgcaaagttaagagtggagactgcaggagttattcttatgattttccagttgaaaatgctgtttagcactatatatttctaataaaacatgcaaaaggagagaaccacttgcttccaaaaagtcaagagccacttgcatccaaaaagtcaaaacatgaggtatgaaaaggtaagtcaagatggtatctaaacaattctgatcagccagatatctggaatcttttataatattgagagaatttgtatttggtattgttacggctgcaaatccatacaggcctgcggc

SEQ ID NO: 118136 - DNA, 575 bp, Homo sapiens
ccaggagggccttaacattcccctcaacttgactaaacttaagacagatttcttcttgtccttagactcttaacttcccttttcttaagagggtttactttagaaaacttgcagttgcacactttgctcctttgaaatatgaaccttctcccagactcttgccagttttacaaaccaggaatgtctttctcaaggacctgagagccatctctttgaaagataatcatcaagaaaggcagtgctcctgtctttcaggctttgcaggaagttagggacctcgctgggcccttagcaaacacagagggcctgatctcagtgaccaagaccctcccctcaaatgtcttccatctttcagcaccatttcacaagctcacctcactgcttaaaawctctcttgcctttgtttcaatggagtcaatttcagtatctctcccctattgcaatagtcttgagtaaaatattcctggatagtgtaattttttaccaggcaccaatctattttacaaagcataggaagcattatttgctggtgacaaagaacaacaacaaaacgaaaacaaacacaaaaacaaaaa

SEQ ID NO: 118137 - DNA, 575 bp, Homo sapiens
ccaggagggccttaacattcccctcaacttgactaaacttaagacagatttcttcttgtccttagactcttaacttcccttttcttaagagggtttactttagaaaacttgcagttgcacactttgctcctttgaaatatgaaccttctcccagactcttgccagttttacaaaccaggaatgtctttctcaaggacctgagagccatctctttgaaagataatcatcaagaaaggcagtgctcctgtctttcaggctttgcaggaagttagggacctcgctgggcccttagcaaacacagagggcctgatctcagtgaccaagaccctcccctcaaatgtcttccatctttcagcaccatttcacaagctcacctcactgcttaaaatctctcttgcctttgtttcaatggagtcaakttcagtatctctcccctattgcaatagtcttgagtaaaatattcctggatagtgtaattttttaccaggcaccaatctattttacaaagcataggaagcattatttgctggtgacaaagaacaacaacaaaacgaaaacaaacacaaaaacaaaaa

SEQ ID NO: 118138 - DNA, 575 bp, Homo sapiens
ccaggagggccttaacattcccctcaacttgactaaacttaagacagatttcttcttgtccttagactcttaacttcccttttcttaagagggtttactttagaaaacttgcagttgcacactttgctcctttgaaatatgaaccttctcccagactcttgccagttttacaaaccaggaatgtctttctcaaggacctgagagccatctctttgaaagataatcatcaagaaaggcagtgctcctgtctttcaggctttgcaggaagttagggacctcgctgggcccttagcaaacacagagggcctgatctcagtgaccaagaccctcccctcaaatgtcttccatctttcagcaccatttcacaagctcacctcactgcttaaaatctctcttgcctttgtttcaatggagtcaatttcagtatctctcccctattgcaatagtcttgagtaaaatattcctggayagtgtaattttttaccaggcaccaatctattttacaaagcataggaagcattatttgctggtgacaaagaacaacaacaaaacgaaaacaaacacaaaaacaaaaa

SEQ ID NO: 118139 - DNA, 614 bp, Homo sapiens
ataatgatggaaggttacaggatattttaggaaaggcaagaaccagtaaagaattacttgatatcagcatgtctttcttaatgaagtgtaggttgtaaaaacactcatttaagaaaaaaagaggaactaaatgacattttataaagtaaaaatgagagataagcaacagttcttttaatttagctgtttctctattacctaaaaaaaaaaaaaaaaaagattcacaaggctaagaatcatgctttattcaatctgcatgggaaagcctataaatatttgataagatgatgctatggccataaaagaaaatggtgagaaaaggtcccttctcattatcatgaagatgatatgatctagagattacacaggttttcraatcaattgcttattgaattcaacttccatgtgatgtttggtgagacttttcacttctgcctcagctgcttaatgtctaaggtcggataataataattcttacctatagcgttttgaagtgaggttatccatgaagcatgaacaaatgtttggcacagagtaagtgctcaataaatattaaacatttatctcttccttctcctctccctcctcctctcttttatcttatcatgatcata

SEQ ID NO: 118140 - DNA, 592 bp, Homo sapiens
gaaaaacgctgagcattctcacgagcaccctcaagcccagagtgaagaaaactggagttgaaggagtgggggtcttgtcctttcttactgaaaaaaatggaagtggttgctggctactgggacatgagtaaaggtctaaccctcccctaaccccacctctagtaatggggaacaggttcatgcaggtgtttttcccagtgtcaacacttcagccatctgaggcaagccccagcccagggtctcagagcctgtaccctatccatccctgtgccatgccctcaggctgcagtaatccagtgaaacagaggctctcaagggggaagtaaggtgcctcagacaaagaagaaagtcaccmcagtgttgagtggagcagacagaagctctggacaatgctgcctgagcagaaggcaagattaaaaaaaaaaaaaaaagattcacttacacaaaggagcacagatatgcacagtatacactaacacacacacacgtacacacacactaacaatgaagaaaagggaaagagcattcaagaacaaagaaccctacctagaagaaaacatcactcaaggagtgaaaagaaatgttccagaat

SEQ ID NO: 118141 - DNA, 538 bp, Homo sapiens
gatttgcttactctctttttcagttttttctttcccagagtatttgaaagaggcakggtatttacactgtattggtttttctctgagcacatcacttttgtatagtaccttattatatatgcagctaaaatgaatgagctcacacttttatccttctgcctggaaaccatcttgcccaagtccaagattcattaggtacattttctatcttccaaattacagcaacaatttaccaagtgttcaccactacatcacccaggtcaccatttttccagcctcctataacagtgtcctcaattgttatggcctggacctaaagccaataccatgagtatttggtagcactctgctggttttggttagcttgggtgtgtcctcatagtgaagacagagggacaagagagcaagtgaacacgtgagatctgtcaaggcccaggttagaaatggcacattctcacttctgcttcattttggtagccagagaaagttacattgccaagtcaaaactaaaggggtaagaaaacacactctggtcctt

SEQ ID NO: 118142 - DNA, 538 bp, Homo sapiens
gatttgcttactctctttttcagttttttctttcccagagtatttgaaagaggcatggtatttacactgtattggtttttctctgagcacatcacttttgtatagtaccttattatatatgcagctaaaatgaatgagctcacacttttatccttctgcctggaaaccatcttgcccaagtccaagattcattaggtacattttctatcttccaaattacagcaacaatttaccaagtgttcaccactacatcacccaggtcaccatttttccagcctcctataacagtgtcctcaattgttatggcctggacctaaagccaataccatgagtatttggtagcactctgctggttttggttagcttgggtgtgtcctcatagtgaagacagagggacaagagagcaagtgaacacgtgagatctgtcaaggcccaggttagaaatggcacattctcacttctgcttcattttggtagccagagmaagttacattgccaagtcaaaactaaaggggtaagaaaacacactctggtcctt

SEQ ID NO: 118143 - DNA, 557 bp, Homo sapiens
agaaaccaagtttggtgtcctgtgttctttcctacatttggaatgcatttgtttgcttccttttggtgtctttcaatgtgttactctatccatagtatttcttgtaagtggaagcaccagatgcttgaatagattcaggttcaaggttttacaagamtacttcatagatggttatacaagaatacttcagagaggaaaatatttataggtttttgcaagtgtttattcgttgaaaaatttggtttcttaatattttggggctgtccttgtatctgcatcctatgacaatcgctgcctaggattcctacaaggcatccatccagctacaagggtggtggagaaatgagtgttttgttttcccaggctctatagttgaggcagagaagggagaatggggtgtaggctgggtgaacctctattcctaaccccttctccctacattggaacaccccaagcagacttcagggtatctgtatttcctgaatgattaactccaattcaattttgttgcctcccacagaagaaggcatacagtagtgttactgagagagtgatgc

SEQ ID NO: 118144 - DNA, 584 bp, Homo sapiens
gtgagaatatttatgggagcttcctaattgacctttctaaacattctgcattgcttctcatttccttctttaaatttccttctaccttgacttccttaagaccactcaatgttggccccatgctttcattttttcttttatttttttctttcttttttttctttttttcttttttcttttttttttttgagacgaagtttccctcttttcacccaggctggagtgcaacagtgtgatctcagctcactgcaacctccgcctcccaggttcaagagactctcctgcctcagcctcccgagtagctgcgattacaagcatgtgccaccatgcccagctaattttgtatttttagtagagrtggggtttcttcatgttggtcaggctggtctcacctcaggtgatccgcccgcctcggcctcccaaagtgctgggattataggcatgagccacaatgcccagcccatgctttctttttaataactccttgctgcctagttttttcacgtccactgtgtaagtactagtcttaatgggtatttcttttcttactattctgcaccaatgtttccctgattgacaatagt

SEQ ID NO: 118145 - DNA, 533 bp, Homo sapiens
aataaacagacggcttacgatggtgttggctgggggtaaggaaatcagagtggataaggctctatcctgggaagtgacaggaggtgccattataatacctgggccttaagaggtaaggggagggagcagtccctggagcctggaactgagaggactgtgtggccagggccacccaaaccatgacctgttgtttagaagggcagctaatctgtgacaatcctgcagagagagaactgggggacaagatcctccaactcacacttcttyctctctccaaactttcctgttgagacttcccactggccaaagacaagcaaggccagaaggcaatggtggcctttcagggcagacagcagggtggaaaaggtggggagccaaaggcatgggacacatagcacctcaggactcttgttttttccctatctgccaaagtccacacagctctctcacacaaatgcctttctcatccctcaaactgacaactactctgatctgaggaatacatcaggaatgagaccagatgcccatatcaa

SEQ ID NO: 118146 - DNA, 525 bp, Homo sapiens
ggctgggggtaaggaaatcagagtggataaggctctatcctgggaagtgacaggaggtgccattataatacctgggccttaagaggtaaggggagggagcagtccctggagcctggaactgagaggactgtgtggccagggccacccaaaccatgacctgttgtttagaagggcagctaatctgtgacaatcctgcagagagagaactgggggacaagatcctccaactcacacttcttcctctctccaaactttcctgttgagacttcccactggccaaagacaagcaaggccagaaggcaatggtggcctttcagggcagacagcagggtggaaaaggtggggagccaaaggcatgggacacrtagcacctcaggactcttgttttttccctatctgccaaagtccacacagctctctcacacaaatgcctttctcatccctcaaactgacaactactctgatctgaggaatacatcaggaatgagaccagatgcccatatcaacctcttcagggaatgaaga

SEQ ID NO: 118147 - DNA, 525 bp, Homo sapiens
ggctgggggtaaggaaatcagagtggataaggctctatcctgggaagtgacaggaggtgccattataatacctgggccttaagaggtaaggggagggagcagtccctggagcctggaactgagaggactgtgtggccagggccacccaaaccatgacctgttgtttagaagggcagctaatctgtgacaatcctgcagagagagaactgggggacaagatcctccaactcacacttcttcctctctccaaactttcctgttgagacttcccactggccaaagacaagcaaggccagaaggcaatggtggcctttcagggcagacagcagggtggaaaaggtggggagccaaaggcatgggacacatrgcacctcaggactcttgttttttccctatctgccaaagtccacacagctctctcacacaaatgcctttctcatccctcaaactgacaactactctgatctgaggaatacatcaggaatgagaccagatgcccatatcaacctcttcagggaatgaaga

SEQ ID NO: 118148 - DNA, 525 bp, Homo sapiens
ggctgggggtaaggaaatcagagtggataaggctctatcctgggaagtgacaggaggtgccattataatacctgggccttaagaggtaaggggagggagcagtccctggagcctggaactgagaggactgtgtggccagggccacccaaaccatgacctgttgtttagaagggcagctaatctgtgacaatcctgcagagagagaactgggggacaagatcctccaactcacacttcttcctctctccaaactttcctgttgagacttcccactggccaaagacaagcaaggccagaaggcaatggtggcctttcagggcagacagcagggtggaaaaggtggggagccaaaggcatgggacacatagcacctcaggactcttgttttttccctatctgccaaagtccacacagctctctcacacaaatgcctttctcatccctcaamctgacaactactctgatctgaggaatacatcaggaatgagaccagatgcccatatcaacctcttcagggaatgaaga

SEQ ID NO: 118149 - DNA, 578 bp, Homo sapiens
aatataattttggtgattagaataactttcttctgatgggcctgaatattgttgaaatactttttcaaatctctcatagtatgatattataggctcatcaaaattttgttggcattgctgtattttactccaatcaactactgttttgaaaactaagggaatagtatctagtaaagacttggcagtactgcaggcccattcatgatctgcttcagaaaatttatgcaagtttttcacaatattcctgcagtttacctttgctacccagtcttggcttttctttctgatattaacatgtgaaccaattggtatatgtcagaaaatccagccagagtcataagttcaaatatttagttcaaattctttagcaaattcaatcgagttctgaagaggatacaggaattctttacatctttaagttccacttttgaccataatcaataaccaaggcagattctcctctatcagacacagagtattcccagaatggagccagaacagcagaaggtasaggaggaaagagaagtaagtttggacaaggaagttctggcaaaagaaaagaagatgaagaaggggga

SEQ ID NO: 118150 - DNA, 657 bp, Homo sapiens
gctttctgtgcagtgagctgcaggacctagaccaaacccctggcattttgctaacagatcttggttccctgatcaggagtgcattgctcgtgacttggctgtcgagggacaggagagtctcagaagccctcctaagcagctagccatctgtctctttttagccagaggtagatttttgtgtctctctctctgctcgcactgttgccagccccaactgtattcctgattgcctaggaagacagcctttgaaatatgacatctgcctccacatcagtgagtgtcttgtgtgggcccagtcagtggaatctgctcttctcartttgggaaattttaaaggaatttttgtttgcaggttgaacaagcccaaccaattgaaaaagggaagcactctgaccatttcggtctggacactcctgggggcttgttagtaattgtgtgtgtaaccagataaatgagcatcttttgtggatatcagagagcaggatcagttcctcttgatatggggaattttgaaggaatttctgtttgcaggttgaacaagcccaaccaactataaaagggaagcacctcaactacagttcagatactgttggggcttgttagtcactactgcagttagactgtatttttgattattttttttctgtgtgttgatat

SEQ ID NO: 118151 - DNA, 657 bp, Homo sapiens
gctttctgtgcagtgagctgcaggacctagaccaaacccctggcattttgctaacagatcttggttccctgatcaggagtgcattgctcgtgacttggctgtcgagggacaggagagtctcagaagccctcctaagcagctagccatctgtctctttttagccagaggtagatttttgtgtctctctctctgctcgcactgttgccagccccaactgtattcctgattgcctaggaagacagcctttgaaatatgacatctgcctccacatcagtgagtgtcttgtgtgggcccagtcagtggaatctgctcttctcaatttgggaaattttaaaggaatttttgtttgcaggttgaacaagcccaaccaattgaaaaagggaagcactctgaccatttcrgtctggacactcctgggggcttgttagtaattgtgtgtgtaaccagataaatgagcatcttttgtggatatcagagagcaggatcagttcctcttgatatggggaattttgaaggaatttctgtttgcaggttgaacaagcccaaccaactataaaagggaagcacctcaactacagttcagatactgttggggcttgttagtcactactgcagttagactgtatttttgattattttttttctgtgtgttgatat

SEQ ID NO: 118152 - DNA, 490 bp, Homo sapiens
aataaaatataaatggggtaaatactgtgggtgaaatttttgtgtaatttaaaatcttgaaatcatttgaatggtcattaaatgtcttggtaatttctaattaagaagggattataaaatggggaaacatgtttttaaaaattatggaatgttcttatctaaaagatgctgatatctgatagatagttcaatatttcttgcttcctaggtttttcattaaaatgtaaggttgctaaagaataagaattctaattaatatataattctgtatataaaatgtgacaaagaaaatgtatycctactgagaaaaaaattctctaaattcaaaagttatctaaaggttgattcacattatggacttgaaaaggtgatttataaaataaagaagaaaggaaacagtaagcaggggagaggaatatgaaaaagttaagataccataggagagacaaccatactacatatgatctttctttgctttttggtaactggc

SEQ ID NO: 118153 - DNA, 573 bp, Homo sapiens
tttttggcttttattttttaatctttggagtttacacagtgcttaaagtggcaattttatacagtaagtttccccacaaaggcgagaggcaattgtgcttacagggtttaccagatggaatcccaataaaaaataaacagaacactcaaattgggtamtttgagaagagcttaataaagggacaatctataaagttgtaggcaggctgtggtaatcaacaaagggtattgcaatatttcagagctagtgatagcagggtaacttactgcctttaggactgaagggctaagggaggaggcagtcactaaaatgtgaagaaagatttatgggatgacagctgcctgatggtggccatgacctttggtcaatgaatatggagcatagccattccacagcaacctctagggaaaaacctgggggaataaatattctgacttcactcttgtcccttccctggatctcttgctggctttccccattggctgaacccaactggaagctaattggcaagggcatccactgatataagcagaacaggaagggactttagtgtatatgaagtggcaagcttag

SEQ ID NO: 118154 - DNA, 486 bp, Homo sapiens
ttgctcctgctcaggtcttgaagatgacagagaagtactgcctggaccgaggaatccccttccctagcatcgaggtgggccctgaggacrtggaggaggcccgtgagtgctatctgtttgccaaggctgaggacccccgctcccccattgtgctgcacttccccctggttaaccgtaccttccgcacacacctggccccaggtaagggaagctccaggcctgggactgacccacagagccctgggatggtgatgggacgctgttctgagggtgggttccctggagaatgtcactaagcacgcctcctggtgggcctgagctggcccctgtggccctctgctccctgggtctcagcgttcagatggggccagcccctcctggggggtctgagagctgagatgtggcccaagcagggcccgcatggagccagccaggtgtcctgcacaaggaagacttctgggctgttccagccagttccacagaggg

SEQ ID NO: 118155 - DNA, 569 bp, Homo sapiens
ttggtgatcccaggttgtctggtcacatttaagagtgaggctctaaagtgatcactggaagctctgtgcacatggtctgacctggctgaatagaaacttcattgtaggttgattaggcagggatctggaactctggaatacagcaatcgcctattagtattggtagttttttgtttgtttttgtttttccttttatgttggtgtgtttccctggaagggaatcctctgttctcttgcctgatgatactggtggtggtggcagcaggggaggtgtaagactggctgccagcattctcagggctgagtggggaaagaggtctgaaggtgatgactcscatttcagtatgtggactcccaagtcttctgcttgctcctccccagagagtaaacctttaaccttctgctgagactggacaggtgatttgtgggactattacacttctgccaacttccaactaatcctattttcaggttaatctgcacctttacctttcatggtaactgagctctcctagaagttgaaccatcaatcagtttgcttatagctctttgctcccacccccaacagc

SEQ ID NO: 118156 - DNA, 624 bp, Homo sapiens
ttgcctaagatttcagagttgtaagcacctaacctagaatttgtgcccatatctgtctaacatgaagtgaaattactatgttattctgcctttaaattttatagttggtgttgttaaccagatatgataatggaaaccacaaaacatgtacattaatctagatgttacagactcaatgaaagagtgactattatttggatcataaatcccaatttatgggatgaaatgatgaagtcatatgatcagaggaactatcttctctgaattgaggggctgatacatcaatacaggatattttaaggacactgaggttttgagcactgaagaagatgcactttctgtgtcctgatagagtggggatcccagctgaaatgtaacgggttggggtacaaaaagggctggacatctttggtaaattgctggaagagtcctatctaaagttaattttaataaagtgcatcttacagagccatgaacaaaaaggtggacccagtttgaaagccagaatcagaggagargaacaaatctgactgcaataagctgtttcttagattgatctccaagtacagccacttcctcagactagattctaagattctaaatcagtgttaatgagaatatgag

SEQ ID NO: 118157 - DNA, 578 bp, Homo sapiens
aattgaacataatgtgtgcaaaatagtaggcatatttactcaataaataattttaatgagtggatgagcacattccattttatgtaaatttttcagtgaatattgcagtatctcatattattaaagatttttcatgctcaattaatatttcttcacacatatgtattataaatcttttgtctatttttatctgttctaccattattaggtacttactttttcccctaatttttagctagtttaagcagtggtgttataaagtctttttaacctaattttattttcataaataatcttttttaatatacrtaatttatttttcagatttctttaggatagattcctagaggtagaattatttaactaaaaggtatgaattctgctaaatttctcaatagttactgtcaaagtgctttcaaaaatattggtaataatttatattcccagcagagattatgcgagttcttgtctcactgcagctttattagcatagtttactgtcatgctttcaactctgtcaatttcattgacattttattccataaaaattaatttattgttatatatacatgttattt

SEQ ID NO: 118158 - DNA, 606 bp, Homo sapiens
attctaaatagggcagaggatccattagagtgaacttgtgtctctcgtgattttgtggtgccgctagagctgacctggccttctaatctcaagatttcttgcatgaaagagagaaattaacttctatcttgtttgagacactattattatctgtaaactactgcttcagtacaacctcctaataatgcagataaggaaactgagaccttatggttctgtggccataaaaatggaagtctgcgacacaattagtcttctgacttcggtttagtattctttacacattaacagtcttcgcrtgaagatttcaggaaaaacagaaaacaaccaaacacgctgaatgactcacatttctgtgaagcacaggcatataagacatatgtaatccctgcccttgtcacgtcagatggataaacaaataattttgatacaacatggtaatataatagtagacatttgtacacatgcatggtagcacagaaaactgagggaaagggattgtttcattctgcctttcactgtaagaaggcaagaagtaaacaggaattgggccttgaaggatgagtaggaatcttccaggtataaagatagaaggtagggagtgag

SEQ ID NO: 118159 - DNA, 606 bp, Homo sapiens
attctaaatagggcagaggatccattagagtgaacttgtgtctctcgtgattttgtggtgccgctagagctgacctggccttctaatctcaagatttcttgcatgaaagagagaaattaacttctatcttgtttgagacactattattatctgtaaactactgcttcagtacaacctcctaataatgcagataaggaaactgagaccttatggttctgtggccataaaaatggaagtctgcgacacaattagtcttctgacttcggtttagtattctttacacattaacagtcttcgcatgaagatttcaggaaaaacagaaaacaacmaaacacgctgaatgactcacatttctgtgaagcacaggcatataagacatatgtaatccctgcccttgtcacgtcagatggataaacaaataattttgatacaacatggtaatataatagtagacatttgtacacatgcatggtagcacagaaaactgagggaaagggattgtttcattctgcctttcactgtaagaaggcaagaagtaaacaggaattgggccttgaaggatgagtaggaatcttccaggtataaagatagaaggtagggagtgag

SEQ ID NO: 118160 - DNA, 625 bp, Homo sapiens
cagggcaggtctctttaagtaacagtttagttggcctggagtagcctctctggtacctttcctgccctttgctgtaccccgggtcagccactggctctgtcctcaagccatcttcacttctgcatgcaaactgtggtggacaagcctcttccttctgctcatccttcaccagaggtcactgtgcacccctcaaagaagcatgcggtcaacggagcagacccagaaacttgagtttgtgtcactggagcagacacagcaacctttttgggggttcctgaatcaaacagctcttcacatctctccggtgtagggaggagagaaacttgcatctgcatgtgaggatataccataggcatatatgtataagaaaaaacatggtgcatatggggttwggtaccatctatggtttcaggaatccactgggggtcttggaacatatcccctgtggataaagtgggactactgtactcatggtcatgtttctttaccatgaaaaataatggactcccccttgatatactttatcatttgtatattgctgcttgttcatgcccattctgttctccatttgagggcatctcttgtgtcaccagcacatttctcctctgcctcctcatggatcctg

SEQ ID NO: 118161 - DNA, 587 bp, Homo sapiens
gaaagaatagaaacatggatcgcagcagattatatcagaatagaggaccccaaaatagacttacgcaaacacagacaactgatctttgaaatagaaataaaggctattcaatgaaaaaaggatagtcttttcaacaaacggtgctggaacaattagatgcccatatccaaaaaagtcgacctaggctcggaccttataccttttacaaaaattaactcaaaagggatcgcaaacataaatgtaaaatataaaactattgaacttttagaagaaagcataggagaaaatctaggtgaccttgggtttggcaatgagtttttagattcatcaaaagcaaaatccatgaaagaaaaaaatagatcatragttgtactttcttaagattcataatttctactttgcaaaagacactgttagagaatgaaaagacagccaaagactagacaaatctttgcaaaatacatcctaataaagaacttacacacaaagagctcttaaaattcatcaataagaaaacaacctacttaaataatgggccaaagatctaaacatataactcactgaagaagatatacaaacagcaaata

SEQ ID NO: 118162 - DNA, 499 bp, Homo sapiens
gaaacttaaaaagtaaaatgataatgaaatcctccatgcarcaaaatcttcaagcccagattatttcataggtgaagttttatcatgtgttcaaagaacatatccttattttataagtcattataaaatattaaaaatactgaaaaacagaaaaaactgttcaactcattttatgagataggtataaccttcattcccaaagcaagtaagagcaagtcagagaaaaaaaatttaaagaactatttcaagaacattggtacaaaattccaaataaaaatattgctaagcaaaacccaagaatgtatcataagtaatacagtatgattaaataaagtttattccagaaaaacaagtttggctcaacatcagaaatatatcagtgtaagtcactgtattaataaactaaaggagaaaaaaatatgactgtctcaattgatgcctaaaaattagtttgacaaaatttaataactgtaattttttaaacctctcaaaaaaacaa

SEQ ID NO: 118163 - DNA, 499 bp, Homo sapiens
gaaacttaaaaagtaaaatgataatgaaatcctccatgcagcaaaatcttcaagcccagattatttcataggtgaagttttatcatgtgttcaaagaacatatccttattttataagtcattataaaatattaaaaatactgaaaaacagaaaaaactgttcaactcattttatgagataggtataaccttcattcccaaagcaagtaagagcaagtcagagaaaaaaaatttaaagaactatttcaagaacattggtacaaaattccaaataaaaatattgctaagcaaaacccaagaatgtatcataagtaatacagtatgattaaataaagtttaytccagaaaaacaagtttggctcaacatcagaaatatatcagtgtaagtcactgtattaataaactaaaggagaaaaaaatatgactgtctcaattgatgcctaaaaattagtttgacaaaatttaataactgtaattttttaaacctctcaaaaaaacaa

SEQ ID NO: 118164 - DNA, 594 bp, Homo sapiens
gtacttccaaaagcagttgttaaactctagtacccaaatgagagtaacatctgtttctagaaagccaaatccattccttagtacccacttccacttatttaagatagagctaagataataaaattggtattaataaggcctttttccttattgctattccactttcttacatttttcaaagatgtgagctattatttttctgagtgcttctatgttttcatttgatacaaggaattacagaaatgtgaaactgaaaattcatgtgaattatggaaacctaagcccagacagaactagagacctagaatatgcagctatataagamagttaaataaacaagtctgcttagactggtgggactcttacaaaatacacggtgaacagacatgcctttctgcctgggctcgcccaggagtttgcaaatgaacagagcttctgcagggcaggaccaatggctcatggattttttttttttccttagcccttcactagcaattggaacatggaatgttcttaacaagtgttaatggaatggattcgtgaaggagtaataaagaaagccaaaatgaaattcttttaatttaaaaagtaata

SEQ ID NO: 118165 - DNA, 628 bp, Homo sapiens
tgtaaattgatggcataaaaatgaaatatcattcagtgaaagcactgatgaaaaatctacgcaatcaatcaaaattcaaagtgttcaggtgtcctggtatgatccaagcataatcttcagggagacggaagtgaagcttctcaaattgcagtaattttaccccgggattatacatattagtgtgctgggggtaattaaacccaaagaattcacaagtctcatctttctgaaatctatgttaagattttggaggaaagtcatggattgtgtgtgtgtgtatgtgtgygtgtgtgtgtaggagacagtctcactccatcgctcaggctggaatgcagtggtgcgatctctgctcacggcagccttaacctccctggactccctggctgaggtgatcctcccacctcagcctcctgagtagctgggaccacaggtgcgtgccaccactgctggccaatttttgtatttttttgtaaagacggggtttcaccatgttgcccaagttggtcttgaactgctgggctgaactgatccacgttctttggcatcccaaagtgctgggatttcaggcgtgagttactgcagccagctggatttttttttttttcttaaaacatttgtcatataaatc

SEQ ID NO: 118166 - DNA, 628 bp, Homo sapiens
tgtaaattgatggcataaaaatgaaatatcattcagtgaaagcactgatgaaaaatctacgcaatcaatcaaaattcaaagtgttcaggtgtcctggtatgatccaagcataatcttcagggagacggaagtgaagcttctcaaattgcagtaattttaccccgggattatacatattagtgtgctgggggtaattaaacccaaagaattcacaagtctcatctttctgaaatctatgttaagattttggaggaaagtcatggattgtgtgtgtgtgtatgtgtgcgtgtgtgtgtaggagacagtctcactccatcgctcaggctggaatgcagtggtgcgatctctgctcacggcagccttaacctccctggactccctggctgaggtgatcctcccacctcagcctcctgagtagctgggaccacaggtgcgtgccaccacygctggccaatttttgtatttttttgtaaagacggggtttcaccatgttgcccaagttggtcttgaactgctgggctgaactgatccacgttctttggcatcccaaagtgctgggatttcaggcgtgagttactgcagccagctggatttttttttttttcttaaaacatttgtcatataaatc

SEQ ID NO: 118167 - DNA, 628 bp, Homo sapiens
tgtaaattgatggcataaaaatgaaatatcattcagtgaaagcactgatgaaaaatctacgcaatcaatcaaaattcaaagtgttcaggtgtcctggtatgatccaagcataatcttcagggagacggaagtgaagcttctcaaattgcagtaattttaccccgggattatacatattagtgtgctgggggtaattaaacccaaagaattcacaagtctcatctttctgaaatctatgttaagattttggaggaaagtcatggattgtgtgtgtgtgtatgtgtgcgtgtgtgtgtaggagacagtctcactccatcgctcaggctggaatgcagtggtgcgatctctgctcacggcagccttaacctccctggactccctggctgaggtgatcctcccacctcagcctcctgagtagctgggaccacaggtgcgtgccaccactsctggccaatttttgtatttttttgtaaagacggggtttcaccatgttgcccaagttggtcttgaactgctgggctgaactgatccacgttctttggcatcccaaagtgctgggatttcaggcgtgagttactgcagccagctggatttttttttttttcttaaaacatttgtcatataaatc

SEQ ID NO: 118168 - DNA, 604 bp, Homo sapiens
tacattgttattcaaatatgtttatgcaaagactttaaaagtggatttaagaatcagaatattaagagccatttgtagtggtgcatgcttgtgatcccagttgctctggaggattacttgagcccaggagttttagaccagcctgggcaacttagcaagaccccatctcaaaaaattataaatacattaataaagctatgtaaaggctttgagtggacatatacactcatttataaattttttgaaaagaaatcagaatattgctttcctgaagtttcttttgaagagtaaatatagctgtatttgtttttcatttgaaaaccatgtgatggcgtgatccccaaatttgcatctgtggcattaaatggtgatacatattatttgaatttcagatttacggcaagatatgctaacacttcaaattattcgtattatggaaaatatctggcaaaatcaaggtcttgatcttcggtaggtaaccagtaaggcaacctgtatgttgaaagttatcctgaaaaagtgaactattaataattatagaagsatatagaggcatatgtctaaaaagaaatgtatgcagtaattatcagtagttgattacact

SEQ ID NO: 118169 - DNA, 526 bp, Homo sapiens
ccaccagatccaatgccctgcctcagtgcgcttggtcaaagagttagaaaattctctctgaataaggcctcagactgtgggtcatggaggtacgactgggggtgttctcaccctctctctcttttgctcagtttctttctttctttggtccttattttatttttcctgtcttgtttatgtttttctcataagccactcaagtcattttgggaaacagagtacaaacggaaagaaagaaaagctcttcatacatagaaaagctgacgagaaagtgggctttcaattgtgggatgttttgtttgttttcctaaaagatattttttgatgacaagtagattatgttcatttaaaaaaawtattttgtcacccaaactggagtgcagtagcatagtcacagctgactgcagccttgaccttctgggctcaagtgattcttccaccccagcctcttgagtagctagtaccatgccctgctaagtgtgtgtgtgtgtgtgtgtgtgtgtgtgtgtgtgtgtgtgttttgtag

SEQ ID NO: 118170 - DNA, 622 bp, Homo sapiens
tggaagtggcactactcatcatccacatcagacaatcttttacaatgcatacttttaacgtgcaaaaattactattttccatactaacccatggtcattttaaaagcatcatagtaaaataaaagaaaaatacacacaaggcagctgtgttttataggagataaaactagtcctagagatgggagtttctcaatatgccacaagctagtgtgtgccttgaacatgtaacctctttctgacttagttttccaatctgttgaggagaatgtaagaaataatatcaccacytaccaccatcatctaccttccaaagttattggaagtattcagggaaaaactttagacaaattagatttaatagcgttcaactgagcaaagaatgattcatgaatcaggcagcccttggaatcagaatacattcagaacgactctgggtcatataacatttatggacagataaaggaaagtgatatgcagaaaacacaactgaggtacaggaacagctagatgggatacagctgggtgtttgctttatttgaacaggatttgaactagtggccacctgcgattggctgaaactcagctaatgcgattgggtaagactcagctacttgttataaga

SEQ ID NO: 118171 - DNA, 548 bp, Homo sapiens
ctgaagaaattctgaatgaagttttgctaaccataggctgcaaaatgatacaggtggatgtgttcattgatagagagttgcattgctttgaggatcaggtttgatctgtctctttggggtccaggactaaaaatatctgaatctggcaaggagaaatggcaaaagactgtcatcttgtttggagaccaagtaggtcagaggtagrtgtggggctaaggagagcccatctgagagggattggtccctcaaggcgggactcagcctctggatctgggagccatgatactttgtgtcctgtttaagtggtttgttttctttttctatttttaattaccttctgaggatattgcctacagggatattttattaactcttccagtcttgagtccactgaggtctggggattagggaggcaggatccaggcatgggaaagcttctgctgtgaagtagtgagagaacatctgcagagagtgagcaaggcctgaagggaggttgttattgaggtgacaatacacatgaaagacatattttggaacatgttggtgtc

SEQ ID NO: 118172 - DNA, 532 bp, Homo sapiens
ttctccatgaagagtaaggtctctagctggcagaggagagttcagggtagagatttgagaagagaagaggacgtgtgcaagcagggggttaggaaagaggattgactgagaaacaggtcagagctgtcaggagtacgagcatcctcgtgggggctgtggatattcatttaagagagtccagctggcacagtcgcaattgtttctaggagcagtcrgccgcttgggtgtaggcctgaggaagtggagtaaccagaaaacgctgcaaccagatttaggattccaccaaacaacaaccatggtggcagaggagggcaagaggatctttataacgcaggactgtgggtgctcacaaagggaagaggagggggccctgagagggtacacaagagtgtatccgctcttgcacgcaacaattatggggtacttgctgcgttgtgggcaccactccagattctggggctattgtatggaggagtgaacaaaatcaatagtgttcccctcttcaagatgtttagagtctatcaagtgagat

SEQ ID NO: 118173 - DNA, 426 bp, Homo sapiens
atactaattatctaaaatgattctccagaatttgaagactatgaactttgattacacacagtataagttaaagagtgcccctgacttactggtattacttggatgctttttatgcacatatattatttgatcttttcacctttagaacagacgaattagagatattaggagaagaggcaaacctcagttgcataggatgctgtttccccagaaatcttgtttcttttgcctttgttctatgtcagagagtgctggggaaggtggtaagacacaccctagtcattggccagaatttgaagtgggtgagtagacttctgacatcatggtgttcttggtattcccagttttcttctttggatgtactgttttaaattctacttcctstataaacaatagtataaatgtctaccagtgaatcactgggta

SEQ ID NO: 118174 - DNA, 661 bp, Homo sapiens
tggaggtgtcctggctagaacagggcctctaatttatcatgtcttctcactaggtgaggtgaatagggctccacaaaccaccgtggggaccagtggcatcaaattctggtgctaamaaaggaagttccatcacagacaaggagtgagaagaagccagggtagaaacaagcgacccctgcttccatgtgaagcttcattccccaacccattcttcagacagagaaagggtgcacacgcagacccgcaagcacagccttcgcacgtgtgctcacacagccgcagtatttacggcactcacgacgtgtccagcttctttgtgcgctcacagcaggcactgcactgtccgtggttacccttagggtggcgctgtttattggcgcctttttgcttggcacattctggttcctctgcatggagtctcctttctctttcccctacccaggggatctggcaaactcgtgttgctccatgtagagtcagctcagaggtcccttcctctcagaagccatctctgcctccacctacctccaacacaagagtttgctaacaggtccacactgtgtttagcactgtcaccttgcatcattttttggtgtgattgtatctgttgcacatacacctgtgtccccgctacacactttgagaggtaaagctcatcttt

SEQ ID NO: 118175 - DNA, 596 bp, Homo sapiens
gtaagaaactaaggccagtttagggcctgctgttccttccttcatcatgaataggtgtctattcagcacaatactcatagtactcctgtagatatcacttaattgtgaagtgcacataaagagatataatacatggtataatacaccacaatcacactgccctttaaagtcattatatgagcatgttattctcctgcttaaagataccacattgcccataggataaagagaagaatctttagtttgcatgttcaacctaactcaccagccccgtctcaagttgttctcctgcccactttctgcctttcaaacctactgggctttgggtcctttgaatgcttcattctcctttccacatacagtacagttttatgcacatgayatcatcaccctctcccttcacctaggtaacgcctactcacccttcagaggtcaaatggaatcttgcttatggaggaagacctccctaaatctcctagactggttccagctgctctgccatgacctgtcatgcaagctctgtgcctcttcatccaaatagtgattaagcagatgggcaaattatgtgtttaatgtttgtctcccctctagaattc

SEQ ID NO: 118176 - DNA, 519 bp, Homo sapiens
ggatgctttcactgcttcacttcctttctatgagagctcacggaatcagaagacaaaggagatgactttttttttttttttttttgaaacagggcttgctctattgcccaagctggagtgcagtggtgcaatcacagctcgccacagccttgatcttctggactcaagcgaccctcctgcttcagcctcctgagtagctgggactgtaggccgctacccccatgcccagctaattattattattwtttttttctttaaaaatgagatctcactatgtaccccagggctggcctcaaactcctgggctcaagtgatcgtcctgccttagcttcccaaacttacaggtgtgagcccccacaccagtcaacgctgtggtcttatgcacctggtgtcccctatgccctgagcaatgatcctcctgcttcaaactccgaaagtgctgggataacagatgtgaagcagcatgtgtggcccacatagtattcttatgggttaaattgagtcctcctcaaaacatgt

SEQ ID NO: 118177 - DNA, 519 bp, Homo sapiens
ggatgctttcactgcttcacttcctttctatgagagctcacggaatcagaagacaaaggagatgactttttttttttttttttttgaaacagggcttgctctattgcccaagctggagtgcagtggtgcaatcacagctcgccacagccttgatcttctggactcaagcgaccctcctgcttcagcctcctgagtagctgggactgtaggccgctacccccatgcccagctaattattattattatttttttctttaaaaatgagatctcactatgtaccccagggctggcctcaaactcctgggctcaagtgatcgtcctgccttagcttcccaaacttacaggtgtgagcccccacaccagtcaacgctgtggtcttatgcacctggtgtcccctatgccctgagcaatgatcctcctgcttcaamctccgaaagtgctgggataacagatgtgaagcagcatgtgtggcccacatagtattcttatgggttaaattgagtcctcctcaaaacatgt

SEQ ID NO: 118178 - DNA, 522 bp, Homo sapiens
gtaaaactgagcttagtcttcattgaaaatatgattttcaaacagagttctacagataaaatatcttttaaaaatattactgaatctcttgataaaccatctgcttagctttcatttcttaagaattaagacatgtgtattcacacttgtttactctawtatgaatctttcattgtctaaataattggaataagcactgtgatattgaatcaagagctgacttgagatgagagctcacaccctggtctgatggaaccatcggagctgagtctctgggagccctcagagagaaaggaggggcttgtctactccactcagccatcatcaggcactgactggcacagtgacatagccctgctctaggttgccctggtggcatagaggaagtgtggagagtagcctgtcctccccaaggactcacagcaaccagaaggggcactgatggaccctcagtgttctctaacactgttacccctgaaactaagaatcatccttaggttgagaactaccattgccaaaatt

SEQ ID NO: 118179 - DNA, 565 bp, Homo sapiens
ttaagtttgaaatttgagttttggaggtggttattttgccactttgcagatattatgtaacaaaatcatattttataaatttattttcaaatcatatttgagatacatatgaaatgcaatataaggtcaaaaattatataacagctatcaaaggcccctttgaccatctgtgttttttctttttggatgtttctttaaaatttatagaataaacattcctaaaataggggtggggagcatagaacttccaagatggctaatttkactgggttgcttattcattaaaaaaatattttctgaaaattttgtgactatatgacttcaagttatgtgtcacttggtagttttatgaattcagtgataaagaactaaaatcctattccaggctacaattttataaagcagaatgttgtataatttaagagatcacaaaatcactcaataaatgattaatatgccaacatcaatcacaaaagaatagcacctattgtgcctttcctcttattatagatgagaaaaactgccatgtggcatattaatacttttgggggacattaggaaatgt

SEQ ID NO: 118180 - DNA, 393 bp, Homo sapiens
aaattatagaaactaataggacatttgtgacaccccatgtatcatagatggtaacgatctgaaatatttgattagatcattctatttttgattgcrgtaaaatacatacaacatttaccatcttagagatttaaatgtacacttctgtggtgtcaagttccattcgtattgtgtgcagccatccccaccatctatctccagaacgtttttcattttgcaaaactgaaattctgcacccatctcccctcagtgcctgcaaccactttctctgaacttgactattctaagtacctcatgagtaacatcctatggcatctgcccttttgtgacggacttgtttcactcgaggcaatgtcctcaagctacggccgtgatgtatcatgcatcagaatt

SEQ ID NO: 118181 - DNA, 550 bp, Homo sapiens
atgttgaggcattcatggaaaagctgcacagaatgggtgagcagagggggaatcccagcagtggcatgttaactatcctgtcaaggaagggaatgctttatggggacctaaaagtcaacactgtccaacccagaattaatcattcattcacccaacacacattttcccaggggctagtctctgctagccaatcttctaggctatggagacccaggaaccctgaatagttcacattcaggtaatatctaattaaatagaaaatatgtcagtcaataatttcatatgcygtaggaaaaataaataaataagtaataaagatagagatttgcgagggatgctatttcagatagcaatttcttggaggcagaaaaagctctttcaccactgaggaccagcagacaggtatggaagaccattgagtgaatggtgggagattaagccaagcaagagttggggacagaaggtcatttttgttcactcgtacctctgagaaggatgcttctgcattgccaaggtaatgtcttcacttatacctagaactgactgaaaa

SEQ ID NO: 118182 - DNA, 543 bp, Homo sapiens
gagctcagattgcatttctaacctggggtccatggaggagtttccagaaggtttgtgaactagagaacactcattagtaaygtttctttgattttctttctattgctctggaaactattttcgtaagtaagagagttgaatgctactttttgcaattatattactattttctatcgaagaagtacaatgtgagacatgatgttatacaatgaagaaatgtatagctgccattattttcatgtaatactgttcatcagggtaggaattttaaaaaactcatcattttaattatggcatgagtctttgtttgccttgatctttttaggctggaaaatgtcaaagaaaagggaatactacaaagctatgcatattaaggttttactttcattctgaaatgtcatgagtgtatcctctttctggaaaaggtctcttacctttctgcaaagtataaaaccagcaaagccaaaggaatgttatgttacccaacctggaaatacatccaatagtgtggcttcttctcaggggcaggttaaattgcaaaag

SEQ ID NO: 118183 - DNA, 543 bp, Homo sapiens
gagctcagattgcatttctaacctggggtccatggaggagtttccagaaggtttgtgaactagagaacactcattagtaatgtttctttgattttctttctattgctctggaaactattttcgtaagtaagagagttgaatgctactttttgcaattatattactattttctatygaagaagtacaatgtgagacatgatgttatacaatgaagaaatgtatagctgccattattttcatgtaatactgttcatcagggtaggaattttaaaaaactcatcattttaattatggcatgagtctttgtttgccttgatctttttaggctggaaaatgtcaaagaaaagggaatactacaaagctatgcatattaaggttttactttcattctgaaatgtcatgagtgtatcctctttctggaaaaggtctcttacctttctgcaaagtataaaaccagcaaagccaaaggaatgttatgttacccaacctggaaatacatccaatagtgtggcttcttctcaggggcaggttaaattgcaaaag

SEQ ID NO: 118184 - DNA, 543 bp, Homo sapiens
gagctcagattgcatttctaacctggggtccatggaggagtttccagaaggtttgtgaactagagaacactcattagtaatgtttctttgattttctttctattgctctggaaactattttcgtaagtaagagagttgaatgctactttttgcaattatattactattttctatcgaagaagtacaatgtgagacatgatgttatacaatgaagaaatgtatagctgccattattttcatgtaatactgttcatcagggtaggaattttaaraaactcatcattttaattatggcatgagtctttgtttgccttgatctttttaggctggaaaatgtcaaagaaaagggaatactacaaagctatgcatattaaggttttactttcattctgaaatgtcatgagtgtatcctctttctggaaaaggtctcttacctttctgcaaagtataaaaccagcaaagccaaaggaatgttatgttacccaacctggaaatacatccaatagtgtggcttcttctcaggggcaggttaaattgcaaaag

SEQ ID NO: 118185 - DNA, 480 bp, Homo sapiens
gagaataatttccccatccgattggatacccatttgttgcatgtcctttctatttcaattgagaggcatcttatctgtcattattttaactttgtataggagggagttgaggtctgattaaatcaaagaagcacatcagaaaatttcctttcattattataaaatgagtttgagtcacatgaccatttgtaaaagaaatccgtgacatagaacttaactttctccagggcgtatgttatatatacaggatttatatacactaatgttagaataaagamaaccatagttattacttatttagcacctgtaaaaaccaggtactaagctatgtagttttcattcaaacctttaaaagacaagtaataggcaatgaggccaagattttcacccagatctgtctgactctgtagtccaagattgcacaaagaacatgctttttattaagttgacactgaacttaacttaaagattaggactgtg

SEQ ID NO: 118186 - DNA, 451 bp, Homo sapiens
gtttattcaacaaggtcaaccaacctggagcggggcagcatcagccagtgcagcgacaaaactggattcttccagctaaactttttcctgcataaacaggaaataagcaatttctctcctcttattatgtgaattgtctaggttgcagctcagatgctaagttaaaacaactgaaatatactgagattctactgtgtgctatatccgacactgggcattttacatatattttctgacttaatttttaataacaaactgcaagttatatattatgctcccactttaccaagaacactgaggctccagaagaccaagtaatttacccaagtgaagtaacagagctgggacttttactatgcaaagtttagcaggctccaaagtctgtgayctctgtgctttgttttcattttctcgcaaagaaactcgctgtaaggtgaaggcctgatcacaa

SEQ ID NO: 118187 - DNA, 590 bp, Homo sapiens
acagaaatactttttaacaggttatatattagatctctacaaatttttatgccaaaaagaagtattttattacataagaaaaattgtgaaaaccactatagtcgactcaaatctagagccccagagaacacaaactttcctgcaagaactctaagaatgctctaattagtgctttaggcacattccagctactgggaaaagtggaaggtttctcccacctggtctcactacctcctgagcagagagcatgccaacattgagctgatgtggttctgcactaaacaaggtccaacagtagaagccagagatttctatgatgccaatctcatgcttgttctcatttatgagcatagcattccctcactttcaagtttgtctttaggactatgctttcttggctctgactccarttagacttattctcattctatcttgactctatctttcagctatcaatcttccaccttaacctagacaggcaaagggcatgctcacagctaacacatgccccaatccagctcattccacacaccaggatttgagaccaaagccccataccaataaactgggtacttttacccaaactgttt

SEQ ID NO: 118188 - DNA, 590 bp, Homo sapiens
acagaaatactttttaacaggttatatattagatctctacaaatttttatgccaaaaagaagtattttattacataagaaaaattgtgaaaaccactatagtcgactcaaatctagagccccagagaacacaaactttcctgcaagaactctaagaatgctctaattagtgctttaggcacattccagctactgggaaaagtggaaggtttctcccacctggtctcactacctcctgagcagagagcatgccaacattgagctgatgtggttctgcactaaacaaggtccaacagtagaagccagagatttctatgatgccaatctcatgcttgttctcatttatgagcatagcattccctcactttcaagtttgtctttaggactatgctttcttggctctgactccagttagacttattctcattctatcttgactctatctttcagctatcartcttccaccttaacctagacaggcaaagggcatgctcacagctaacacatgccccaatccagctcattccacacaccaggatttgagaccaaagccccataccaataaactgggtacttttacccaaactgttt

SEQ ID NO: 118189 - DNA, 590 bp, Homo sapiens
acagaaatactttttaacaggttatatattagatctctacaaatttttatgccaaaaagaagtattttattacataagaaaaattgtgaaaaccactatagtcgactcaaatctagagccccagagaacacaaactttcctgcaagaactctaagaatgctctaattagtgctttaggcacattccagctactgggaaaagtggaaggtttctcccacctggtctcactacctcctgagcagagagcatgccaacattgagctgatgtggttctgcactaaacaaggtccaacagtagaagccagagatttctatgatgccaatctcatgcttgttctcatttatgagcatagcattccctcactttcaagtttgtctttaggactatgctttcttggctctgactccagttagacttattctcattctatcttgactctatctttcagctatcaatcttccaccttaacctagacaggcaaagggcatgctcacagctaacacatgccccaatccagctcattccacacaccaggatttgagaccaaagccccataccaayaaactgggtacttttacccaaactgttt

SEQ ID NO: 118190 - DNA, 536 bp, Homo sapiens
ctcttttgctccctctatcaccatgtgataccctggctcctgccttcaccttccaccatgactgtaagctccctgaggcctcgccagaagctgagcagatgctagcgccatgcttcctgtacagcctacagacaccctctggaggaaaaaccagctgaaaaatttgaaaggcctaatttgtggctgcatcacccatattaattcatccttatggaaagactgtgcaggcactgctctaagagttaggattcagttttcaaggagmcaatagtgggcaaagaaataccaatctaatgtcaactaatggcaaatgaatgaagtctaagattcctgaacatgcttgacatttcctaaaccacacattttggttctctatgatctatgatacagggatatatagttgtttcatgaaaggctgtggggcttctcttttgtaaccaccagtcagcatcccaaggaggcagccctgctgacagatgccaggtgtgaaccataaggagcaaagacagatgatttgtctgaaacttaagcatgcc

SEQ ID NO: 118191 - DNA, 651 bp, Homo sapiens
actcactgggattcagaaatagtgccgcccacaggagctgatcggtggctgggaagcggcgtgtgttggggggatggggcaggagcggggcagcagacccacaggtgccccacccacctggagatacgggccagtagagggcatgaggggggcggagacggcagagcctggtgctaaggaggcctggaagcamaggcaaacacctgcccctgcctgccacagaccagcagcactgagtccaagagggagcctggatcagcagcaatctcctacactggccaaataactcaggggcctgcacagctcacacagccaggagaaagggctcaacacagaaggacagggagggcaatagccagatattgccaagtacctatcacactctctgcacaggtcttcagagaagaaacatgcagggctggaagcaggcaaaatagagtaaggtggtggggctggacctgaaccccaccctcttccacagtgacagagccaggcagcaggacatccctgcccatcactgccacctgacccaactccagtggacagaggattgcatggatgatcctatatacacaaaattgttaggtcccctgcctaaaattcacgtgttgaaacctaatccccagtgcaatggtattaggaggtgggacc

SEQ ID NO: 118192 - DNA, 651 bp, Homo sapiens
actcactgggattcagaaatagtgccgcccacaggagctgatcggtggctgggaagcggcgtgtgttggggggatggggcaggagcggggcagcagacccacaggtgccccacccacctggagatacgggccagtagagggcatgaggggggcggagacggcagagcctggtgctaaggaggcctggaagcacaggcaaacacctgcccctgcctgccacagaccagcagcactgagtccaagagggagcctggatcagcagcaatctcctacactggccaaataactcaggggcctgcacagctcacacagycaggagaaagggctcaacacagaaggacagggagggcaatagccagatattgccaagtacctatcacactctctgcacaggtcttcagagaagaaacatgcagggctggaagcaggcaaaatagagtaaggtggtggggctggacctgaaccccaccctcttccacagtgacagagccaggcagcaggacatccctgcccatcactgccacctgacccaactccagtggacagaggattgcatggatgatcctatatacacaaaattgttaggtcccctgcctaaaattcacgtgttgaaacctaatccccagtgcaatggtattaggaggtgggacc

SEQ ID NO: 118193 - DNA, 651 bp, Homo sapiens
actcactgggattcagaaatagtgccgcccacaggagctgatcggtggctgggaagcggcgtgtgttggggggatggggcaggagcggggcagcagacccacaggtgccccacccacctggagatacgggccagtagagggcatgaggggggcggagacggcagagcctggtgctaaggaggcctggaagcacaggcaaacacctgcccctgcctgccacagaccagcagcactgagtccaagagggagcctggatcagcagcaatctcctacactggccaaataactcaggggcctgcacagctcacacagccaggagaaagggctcaacacagaaggacagggagggcaatagccagatattgccaagtacctatcacactctctgcacaggtcttcagagaagaaacatgcagggctggaagcaggyaaaatagagtaaggtggtggggctggacctgaaccccaccctcttccacagtgacagagccaggcagcaggacatccctgcccatcactgccacctgacccaactccagtggacagaggattgcatggatgatcctatatacacaaaattgttaggtcccctgcctaaaattcacgtgttgaaacctaatccccagtgcaatggtattaggaggtgggacc

SEQ ID NO: 118194 - DNA, 535 bp, Homo sapiens
gaggctatgactcctgaatgcagggtgtctgagttggggcggagactcctttcccgagggctgagagctggggaagaaggagagtagggagatcagcaggactctttggagccttacaaggttttgtcctgcctgggcctggcagacacttgaaactgacactgggggattcccagccaccactgggactctggttgtgaccgcttctcattgtccccttgtcctcttggctggctccycatgtggggctctgggagcacaagtgggtcatgtggtggtcctgtctgccccatgcccacaggtggtctgagtccagcagcagtccttcatgtctcccaactgcagggcacatctgttcagcttctaagaagtcccatggaagccacccttgcagactctgcatgagggaagtttcctctgcgctggtggctcacaggactgcagtgtgctctccacagaaagtgttttgcaaatccgctttattcctccccaccgtccgtatattctgagggtgggggtggtgagtggttgttga

SEQ ID NO: 118195 - DNA, 610 bp, Homo sapiens
ctttgtattttttatggggtctgaatttcatttagctctgctttgattttagttatttcttttcttctgctagctttgggactagttcttrtttttctatttcctttaggtgtgaagttaggttagtaatttgagatctttctatcttcttgatgcagggatttagcactataaactttcctagtgacactagctttgtcacatcttagaaattttggtatgttttgtctctattttcatttgtttcaattttttaaaatttctgccttagttttgttatttacccaaaagttattcaggagaaagttgtttagtttccatatatttgtgtgattttgagagttcctcttggtgttgctttctatttttattccattgtggtctgagtagatgcttggtatgatttcaatattttttaatttattgagacttgctttataaccaagcatggggtcaattttacaatatgtttcatgtgcagatgagaagaatgtatattctgtggttgttgggtggagtactttgtagatgtctatggggtctaatcagtcaagcatcaaatttaagccgagaatttctttgtttctttgttagttttctgccacagtgg

SEQ ID NO: 118196 - DNA, 505 bp, Homo sapiens
tgcacatgaaacatgtaccacattgtgctctgttgtttgcattgttgatatagaaaatgataatatggtttttaaaaagaaaagtcaagtgaggggatagcaaaaggaaaaactctaaaattgaatcatgaaatagtatgtattgataacatgattgtatctagttaatttttaagtcagtgactcctaaagaaaaccatctgctggcarcagaggaagtcatactacatggaaaccatttctgaagattccataactgaaaaccagttagtatcgatttttgatatttaatttatcacactgaaagatgtaaaataagccataataatttatattgaaaagcaagccctattgtttgctgatgatattttcttttccctttcaatatttcagttctcgttcaacttggaaaaccatattatcctgaaccaagggaacatcttcaaaaaatattcacactctgaaacaccactgtgtccagcagtttcaccaaaagagactgaac

SEQ ID NO: 118197 - DNA, 574 bp, Homo sapiens
cattggtgtaatatttggcagggccactgtgccctgctatttcacggccacacatttcctcctgactctggctggctgttccacagcagcgtggctctggggacaaggtggagcccagggacacattgcaaatgcacaagagtcaacakatccccactccaagaaaagctattcaagaaaagctatttaattcacccttttaacatgatcttattaaataaatatttgtggaagagaggagggcaaaatagagctgaagagaaagggggaggaaaaagaggaaaaggaaggcaaaaatgagaaacatttttccaaaataatttgtggtaataaaaattacttaatctggaaatttgtattgccagagagcgagaacataaaaaagaactgccagattggaatgaagactcctttccccagtggttatactttgaaaaaaatgtggattacagcattttgtaaacagatcaagttcaatgaaacaaaaattataaatgactgcttggaaagaaaacttatttatctcatgggagattcaacactgcatcagtggatttactacttacaaaaagct

SEQ ID NO: 118198 - DNA, 574 bp, Homo sapiens
cattggtgtaatatttggcagggccactgtgccctgctatttcacggccacacatttcctcctgactctggctggctgttccacagcagcgtggctctggggacaaggtggagcccagggacacattgcaaatgcacaagagtcaacagatccccactccaagaaaarctattcaagaaaagctatttaattcacccttttaacatgatcttattaaataaatatttgtggaagagaggagggcaaaatagagctgaagagaaagggggaggaaaaagaggaaaaggaaggcaaaaatgagaaacatttttccaaaataatttgtggtaataaaaattacttaatctggaaatttgtattgccagagagcgagaacataaaaaagaactgccagattggaatgaagactcctttccccagtggttatactttgaaaaaaatgtggattacagcattttgtaaacagatcaagttcaatgaaacaaaaattataaatgactgcttggaaagaaaacttatttatctcatgggagattcaacactgcatcagtggatttactacttacaaaaagct

SEQ ID NO: 118199 - DNA, 574 bp, Homo sapiens
cattggtgtaatatttggcagggccactgtgccctgctatttcacggccacacatttcctcctgactctggctggctgttccacagcagcgtggctctggggacaaggtggagcccagggacacattgcaaatgcacaagagtcaacagatccccactccaagaaaagctattcaagaaaagctatttaattcacccttttaacatgatcttattaaataaatatttgtggaagagaggagggcaaaatagagctgaagagaaagggggaggaaaaagaggaaaaggaaggcaaaaatgagaaacatttttccaaaataatttgtggtaataaaaattacttaatctggaaatttgtattgccagagagcgagaacataaaaaagaactgccagattggaatgaagactcctttccccagtggttatactttgaaaaaaatgtggattacagcattttgtaaacagatcaagttcaatgaaacaaaaawtataaatgactgcttggaaagaaaacttatttatctcatgggagattcaacactgcatcagtggatttactacttacaaaaagct

SEQ ID NO: 118200 - DNA, 584 bp, Homo sapiens
aaagagggcctattatttctcttgttctagaattgcactgtacaacacagtagccattagttgcatagggctatttaaatttaaattaaattaagtaaaaaattagttcctcagttgcactattcacatttcaagtgttcaatagccacatggagctagtggtactatacagatagcacaacatgtgcttgcattcttctctagaaagtattttttaatgttttgtcattgtaattggttgcatttttaaaagcaaattccataatgcrttatcatttttcgtggtgagtaaaaaacaaaaaaaatcaccaaatgttggtaagtgtcaagtctctgacttttaagccatttacttcttgtttattttttaaagaaattctggtatctaaatatttcataatgttttggcttaaggtgatagcttcaggttattgcagataatgactatattgctaatatacaagacttgagcaagccatttgaaatcatagaaatgttctctattgctattatcaaacctctttcaaaaacccatttatgcacaatggaataaaacaaaactagaaatcaatatcagatgctgg

SEQ ID NO: 118201 - DNA, 590 bp, Homo sapiens
tgccttgtgcccttcgctgtcagctgtgggtgactggattaggcatgtacagatcataagacatgggcagcttttttctccccaatgggggaaacttgatggctgatgggactgctggaagagattcctttgcaactgacaagcggccgcctgaacttttgactcagtgtcgttgggatctgtgggtctttccctggcctccctgaattccttgccttccctaccccaccgcaggccatgcttttctctcactttctctcctttccctgttctgtcttttctgttacttggggacactgtctgctcttccatcttgtacagagaccacatgttgaaacttctagtctgaggtcattccatcccactttgaatggattaaggatgacaggcatcaaccagggcaagttttaaccttgccagtttgatattgggtgctaagtggagtggctaatgtctatgttttgtcatgcatattttgctctggctggaaaagaaaatgttaatccacttcctccgtgcagcctgttgggccgcatctygcaaaactgagaggattttttgcctatggtcccatgaaactgaaaaaagat

SEQ ID NO: 118202 - DNA, 592 bp, Homo sapiens
ggcactggcaccaattgttgaaaagactattattttctcattcaatactcttggcatcattgtcaaaaatcagttgatcacagacacacaggtctatttatgaactcagaattctattccattgatttgtatgtctatcctagtgccagtaccactctgtcttgattactgttgctttgtagtaagctttgaaattagaaggwataaatcctcctactttgttagtctattttaagattgatttgacccttctgggttccttgaagttcaatgtgaactttagattcagcttgtcaccttctacaaagaagcagcccagagtctgacaaggatgatgttgaatctgtagactaatttggggagtacagccatcttgcatttttaaaattcatttatatcttctttaatttccttcaacaatattttgtaattttgaaaatatgtgttgcacttcttttgttaaattcattactaagtgtgaattacttagtggcctcttacaacttggagacatatccttctgttgtaggaaattttatcattattatttctttgaccatttctcttcttccatttcctctggtctcttttt

SEQ ID NO: 118203 - DNA, 600 bp, Homo sapiens
taagatgtgcaaacctacctttctaaatttaattaaactcatgtagcaaggatgtcttttggagccatagttttctattgggttcaggcatatttaggcatatttggagaatttgcagggaggaatctctttgcagagcagagcaaatggccttctctcacagtcagctgtcccaaagaggaagggcccaaaggacccctggcaagtgaggaagcagctatgggttgagaagcttaacctgatagcaaagccttggagggggagacagtccttaatctttttggctcatagacccctttgagaacctgctgaaagtattggtattggaccctgtccaataccacagaaaacatttacctatgcatttgcaacactcaatttcttayaccacaccagatgtattctcagattccagcaaacccatctgtggatcaccactgatggttctgtggactcagggaaacactttccttagagtttctgcttctcaagaattaactggaaatagctcagcatccctaccctgtctccagcccacttccctggatgcaggtctggtcctggacagaaaggaggccactgttctcaattcagtagcac

SEQ ID NO: 118204 - DNA, 542 bp, Homo sapiens
aatttgtggataaatgatcaggatgagtttcagaccacttctctcatcactgtaatgtaactacctctgctatagagataaatgggctctgacccacccacaggaacactagagtctggttctgccaaaaacctatcataggccagggttacagacgttactgcttaggtttcttgactagtttttaagctcagaatgtaggaaaagctcctctttcagtaataaaattcatctttgttcattctgaagccttggtggaaaccttccaagaggcgccatagggccttgcccctgcactgcctctctccctgccttagaaagcaatctgcagggcctggagcaggagggagctttcgcctggtatggcacactcctgagagtggacaggaatcaagttttgatcagacaagcctggctggagtccgtgatttgccacacactacttgtgtgayttctgagctttagctgccttagccattaaaatgcaagtaataacatctaactcatagggttgttgtgctgattatatgaacaaaggtatg

SEQ ID NO: 118205 - DNA, 605 bp, Homo sapiens
actcgacattcaaattgctgaactgggatttaaagtccctacaatggtctattacccaagaacagaaagagaggctgtgggtctgacagtttcacccaggggcacggcaaagtcaccagcactgagtaaccttgaaaggggaataggggacaaactaaagctgcatttgatcccagcccaccagtcatgcattccayaccctggttataatatcagtacagatgaaacctctgttctccttgcatagactgagagcagagagacgtattccagaatccgttctcccctctgccatggaggcagaactgtagctgggcacaagcttgcaggccaggccactcctcaggctctgcatagctggtggagccaggtaactaggttcttgtccatgggatatgagtagtggccacacatgcaacttcctgggctggtcctgtggacaccagtgtggactcttccacacatcctttcattctcactggcagttctccagtcaggggtgggggagcagcagatggagggaacttgcttctctgaatgatctcatggagcggagctggacttcccatctatcctcagacccattacaggaggggaaaatatgg

SEQ ID NO: 118206 - DNA, 605 bp, Homo sapiens
actcgacattcaaattgctgaactgggatttaaagtccctacaatggtctattacccaagaacagaaagagaggctgtgggtctgacagtttcacccaggggcacggcaaagtcaccagcactgagtaaccttgaaaggggaataggggacaaactaaagctgcatttgatcccagcccaccagtcatgcattccataccctggttataatatcagtacagatgaaacctctgttctccttgcatagactgagagcagagagacgtattccagaatccgttctcccctctgccatggaggcagaactgtagctgggcacaagcttgcaggccaggccactcctcaggctctgcatagctggtggagccaggtaactaggttcttgtccatgggatatgagtagtggccacacatgcaacttcctgggctggtcctgtggacaccagtgtggactcttccacacatcctttcattctcactggcagttctccagtcaggggtgggggagcagcagatggagggaacttgcttctctgaatgatctcatggagyggagctggacttcccatctatcctcagacccattacaggaggggaaaatatgg

SEQ ID NO: 118207 - DNA, 565 bp, Homo sapiens
ctagtggttagaagtaaatcacaggtcccactcatactcaaggggagagaattatatgagagggtgaacagtacacagggatcattgggtaccatcctagtgtctgtcctttacagaaccttcagtagtctttttttctcaataatcaatacaactagtacatagacaatcatcaaatatataggagaactaaacaatagctttaaccaattggatctaattgctataagtagaacatttaatccaatagcaacagaatatacattctcctcgaatacactaatacatatcatatgtattagtcataaaacgaattttaacaaattttaaagaattaaaatcatataggccgagagtggtggctcacgcctgtaatcccagcactttggaaggccgagatgggmggatcacgaggtcaagagatagagaccattctggccaacatggtgaaacctcagctctactaaaaacacaaaaattagccaggcatagtggtgtgcgcctgcagtcccagctactcaggaggctgaggaaggagaatcacttgaacctgggaggcagaggt

SEQ ID NO: 118208 - DNA, 582 bp, Homo sapiens
tcctgctttcggtaatcacacctgtacatctaactccctggtcccagggttcagctgaaagaaaatctctttgtgctcacagcctgctggcctacctgctctctgcagcctcattttcgcgggtctcagactgtcttgtctcygttgagctgcagccgggttggggatgtggcttacagtctgtggtggacaacactgtctccatggctgtgggccccaggcaggacccctccttagcatttagcacaggccagggaggggcatggcagcgaacccttgttcctgatgcctcttggaagcacggtagtaacctgagtgtgtccactgagtgacttaggttccgtgacatggagttcttgcaggttttaccccccttgcaaaattaaaggtaagtgtatcagatagccaaaattatatttaaatgatatacttaatgcataatcaacaaactccatgtcaggctctattttggggcattctttgattttagcaattttctaaccaagcagtattaccgagaccagctctatacatcggcaactcaagttacttcacagcatgtgtgatttgaggcactaagaa

SEQ ID NO: 118209 - DNA, 567 bp, Homo sapiens
gctaagggattgtaaatacacccatcggcactctgtatctagctcaaggtttgtaaacacaccaatcagcaccctgtgtctagctcagggtttgtgaatgcaccaatccacactctgtatctagctacyctggtggggacttggagaacctgtgtgtccacactctgtatctagctaatctggtggggacgtggagaacctttgagtctagctcagggattgtatatgcaccaatcagcaccctgtcaaaacagaccactagactctaccaatcagcaggatgtgggtggggtcagataagagaatataagcaggctgcccgagcagcagtggcaacccgctgggtccccttccacactgtgaagctttgttctttagctctttgcaatgaatcttgctgctgctcactttttgggtccacactgcctttatgagctgtaacactcaccgctaaggtctgcagcttcactcctgaagccagccagaccacgaacccacggggaggaaggaacaactccagatgcgccctcttaagagatgcgctgccttaagagctgtaacactcac

SEQ ID NO: 118210 - DNA, 654 bp, Homo sapiens
  misc_feature (1)...(654): n = A,T,C or G
tcatttaatactaaaaacaaacaaaacccctgtgggtgaggtcccacttttacttggattttctagtgcagaaactgtggataaagaagttgtgtcactcccctacattcatgtaacttaagtgaagtctagktgggattcaaacccagtgtgcctctgacattgatggtcccaaccacagcagtctggcaccccttatctataagaacaagtgtcagcaccaggcagctttccctgttaacaaggagcatggtgctatgagtgaatagacagtccttatttgaagagtgaaagaacccctaaaactctcacaaatagactttacaatttgtaagagttgcatttgtcttaaagatgttactataaatttagtggtagagctacctacaaaaataatgtaagcattttaaaaaatattttaaatataataggcatgtgtntatttgcgagtctaagcacttagaatcattcaagaatagattttaaaatggtttgaaaaacagccactatttatattttaaacctctctattaaaacaactaataggtgatttgcttttttattccccctgtagtgaaggtgtgatgtgctggcaaaacagagcatggctggttgaggcatcacagcagacccatctggctaaatcttaatgga

SEQ ID NO: 118211 - DNA, 553 bp, Homo sapiens
accatgattgaacattatgaaagtctggaaggattacaccattgaaaatgtcatgctacttacagaaaaaattgcaaaagccatcaagcccaaaacaataaatgcctgctggaagaaacaatgtctaaatgttgtgaatgaattcataagatttatgatagagccaatcaaagaaatcatgaagagataatggatatgcaaaaagtcaggggagggtttcaagatatgtatcttggagaaattcgagagctaakagacaccacactagaggaattaaaagaagacaactttatggagatgagtgcttttgaaccagtacctgctacggaagaagacatagaagaagcaatgccagaaaacaaatttacattagacaatctggcaaaaggatttcaattatttaagactaactttgactttgtttactacgtgaacactcctatgatacaagtactgaaacttacgcaaacagtggcaaaaatattggtactctatagaaatgtttttagagaaattagaaagcaaaaatgtcagacagaaattatgatgtgtt

SEQ ID NO: 118212 - DNA, 602 bp, Homo sapiens
ctgcagttgagaatgccatctgatctgtatccctatacaaaaagtttagatattattccattaaaatgaatttatgttgtaagagttattatgtatatttttcagcacttcaagttttaatttgcttttatatgtattatattgagttaatgaatttagttaagtcattatagtacagtggttaatagtgtggacttcggaagtaygcctggattcaaattcaggctctgctgcttattagctgattgagtttttatggttataaaatgggggtaatagcagtacctacctccggacttgtcaggaggaccaaatgcatacatgcacgcacatgcgcgcacatacacataaagagcagtacttggcaaggtagtaagttttgtgtctcagtattagcagttattattttgattctcatatcagcttagaagtttatatgtttgttttctggttgatgttaatatgttaagttctcaaactcccttcatgttagcaataccatttcttttggtgaacctctctagtatgtattttatagaagaaagttcacattgatctgagatcagagatcagattttgttaattggtatattactgaatta

SEQ ID NO: 118213 - DNA, 602 bp, Homo sapiens
ctgcagttgagaatgccatctgatctgtatccctatacaaaaagtttagatattattccattaaaatgaatttatgttgtaagagttattatgtatatttttcagcacttcaagttttaatttgcttttatatgtattatattgagttaatgaatttagttaagtcattatagtacagtggttaatagtgtggacttcggaagtatgcctggattcaaattcaggctctgctgcttattagctgattgagtttttatggttataaaatgggggtaatagcagtacctacctccggacttgtcaggaggaccaaatgcatacatgcacgcacatgcgcgcacatacacataaagagcagtacttggcaaggtagtaagttttgtgtctcagtattagcagttattattttgattctcatatcagcttagaagtttatatgtttgttttctggttgatgttaatatgtyaagttctcaaactcccttcatgttagcaataccatttcttttggtgaacctctctagtatgtattttatagaagaaagttcacattgatctgagatcagagatcagattttgttaattggtatattactgaatta

SEQ ID NO: 118214 - DNA, 456 bp, Homo sapiens
aatttttacttattttagagagcctgataattgttcatgtgacaaagtgcttatatcacagtttctcattttaaggtcctgccctattttggcaaagcattgaaaggaagtactaaagcatcacagggcagtctcagtaaaataaaactacaataatacagtagttatacaaactacaataatacagtagttatacggtagttatacaataatacagcagttatacaataatacagtagttctgcaattgtatacagtagttatacaaccaagaaaactacaataatacagtagttaagtgtttatggtatgccatatgatactatacttgacactttacatatattagttctcctcctcctcctcctytttggcaggacaacttattggaatattaattagtgttttctatatgattgatagaaggttggaaaaaatgtgtatggaatatatgtt

SEQ ID NO: 118215 - DNA, 514 bp, Homo sapiens
catcaagtctgaaaactctggccatgtcaggtgttgctgagaagacagaaagataagaataccccagtagagctcatggaaggrtaacttgatttaatctttgtcaaacagttggtaaaaactggcagaattgaaaacatatgtgtctcataagccagagagagataataattatatgtacctacatatcctataaatacatataggaggatgtcattatgtcttgaagtagaaaattcaaaataaatgtccattcacaggggaatagaaaactcatggtgtaatcatataaaatattatatagtagctaaagtaaatgaactagggctatttttatcaatatatatatagcagagtaaccatgatatgcaagttatttaatccttttggttcttcatcagaaaatggtggtaaataatggtaaattatctcatagaattgttatggcgattaaaggaattaatacacagagcacttacataaagctcccttaatgtgtctgttcttgatacca

SEQ ID NO: 118216 - DNA, 514 bp, Homo sapiens
catcaagtctgaaaactctggccatgtcaggtgttgctgagaagacagaaagataagaataccccagtagagctcatggaaggataacttgatttaatctttgtcaaacagttggtaaaaactggcagaattgaaaacatatgtgtctcataagccagagakagataataattatatgtacctacatatcctataaatacatataggaggatgtcattatgtcttgaagtagaaaattcaaaataaatgtccattcacaggggaatagaaaactcatggtgtaatcatataaaatattatatagtagctaaagtaaatgaactagggctatttttatcaatatatatatagcagagtaaccatgatatgcaagttatttaatccttttggttcttcatcagaaaatggtggtaaataatggtaaattatctcatagaattgttatggcgattaaaggaattaatacacagagcacttacataaagctcccttaatgtgtctgttcttgatacca

SEQ ID NO: 118217 - DNA, 588 bp, Homo sapiens
ctttccagccaccgtgccatagttcctggtgtccgacagatgctctcagccctcagggagtctgggcmgttcagggttattagagcccacaggttggtcaccttcacccagaccagtctttttcatttccctggtgtgtcacttcaactttaggattttcagtgttttcctggcatgaacaagattggaaagcactctaacactgatctagtgaagactaaggtaaggtcagggaattagaaacctcacagtttagtgagggagacagagatgtaagcaaagaactatagttaccaaaattcaatccaataagtgctaaaataataagcacagaggagagcctcattgaaagcaccataataattgtttctcattgttcagtaattactacacatgaagtcctgtggcaagttgtacaaacattatttctattgtacataagaatcctcacaggtaagttctgctacagttcccttttccagatgagaacatcaagacacagaagggttaagtaacttggtttcatagctgataaccagaggaagcaggatttgaaacttgctctttgaacctgtatcccatgcctgc

SEQ ID NO: 118218 - DNA, 588 bp, Homo sapiens
ctttccagccaccgtgccatagttcctggtgtccgacagatgctctcagccctcagggagtctgggccgttcagggttattagagcccacaggttggtcaccttcacccagaccagtctttttcatttccctggtgtgtcacttcaactttaggattttcagtrttttcctggcatgaacaagattggaaagcactctaacactgatctagtgaagactaaggtaaggtcagggaattagaaacctcacagtttagtgagggagacagagatgtaagcaaagaactatagttaccaaaattcaatccaataagtgctaaaataataagcacagaggagagcctcattgaaagcaccataataattgtttctcattgttcagtaattactacacatgaagtcctgtggcaagttgtacaaacattatttctattgtacataagaatcctcacaggtaagttctgctacagttcccttttccagatgagaacatcaagacacagaagggttaagtaacttggtttcatagctgataaccagaggaagcaggatttgaaacttgctctttgaacctgtatcccatgcctgc

SEQ ID NO: 118219 - DNA, 588 bp, Homo sapiens
ctttccagccaccgtgccatagttcctggtgtccgacagatgctctcagccctcagggagtctgggccgttcagggttattagagcccacaggttggtcaccttcacccagaccagtctttttcatttccctggtgtgtcacttcaactttaggattttcagtgttttcctggcatgaacaagattggaaagcactctaacactgatctagtgaagactaaggtaaggtcagggaattagaaacctcacagtttagtgagggagacagagatgtaagcaaagaactatagttaccaaaattcaatccaataagtgctaaaataataagcacagaggagagcctcattgaaagcaccataataattgtttctcattgttcagtaattactacacatgaagtcctgtggcaagttgtacaaacattatttctattgtacataagaatcctcacaggtaagttctgctacagttcccttttccagatgagaacatcaagacacagaarggttaagtaacttggtttcatagctgataaccagaggaagcaggatttgaaacttgctctttgaacctgtatcccatgcctgc

SEQ ID NO: 118220 - DNA, 592 bp, Homo sapiens
gaatgaaaatctgattgatcattttacgagcacgtattgcttgccaaatgtcaggcagtgtctttgcttttggaggaacacaaagactaataaaaatgctatccctgacattctagagctctcaattacattctacacaatactttgtaaataagtaacgtcagcagagactgaaagctcatatcattccttaattctcattttacaatagaattatgctttttttaaggagagttgcatcctcacatgcaaaaggaaggaaataaagcaacctattcagatgaccccgactaaaatgcaaattcttgttttgggtgaaatgcaaaagtagtttcatctatcatttatccaggctttgttccaaaactttcttttacatatacaycacttcccaaattacactttttgttacaaagaactaaatgtatagtcctttttcctctttaatgtttgcagtttttctactgaggatgattaaggtagacaagaccacaaaaatgtcactcaatcataaatgacaatctgccttaatttactataatttatattcataagcatgctctaaaagaaactgttgtcccaaaatgtgcac

SEQ ID NO: 118221 - DNA, 594 bp, Homo sapiens
cttgttttgggtgaaatgcaaaagtagtttcatctatcatttatccaggctttgttccaaaactttcttttacatatacaccacttcccaaattacactttttgttacaaagaactaaatgtatagtyctttttcctctttaatgtttgcagtttttctactgaggatgattaaggtagacaagaccacaaaaatgtcactcaatcataaatgacaatctgccttaatttactataatttatattcataagcatgctctaaaagaaactgttgtcccaaaatgtgcacatgtctgaaatggtttggggaaaacaatattttagtcacatgatgaaatcattcctgcctcagaaactgagcctgaagccagttctacccaacacgagcagatgtgggtatgattgaaatatatggttaatctgatatacaatagtctcttaaggaaacaaaaattaacttcctgattcactgaattattttattcactcctcgattcaacagatacattattcaaattcccactatacattgtgcgttattgtagagcttggggatttagtagttaacaagacaaaattcctatctaagactttc

SEQ ID NO: 118222 - DNA, 561 bp, Homo sapiens
cttcttatggttcatctaagagatgtagaaattaaatagtaatttcttggaaaatgaggtcttggatgctaaatgagcatgctctcttgtagcagcaacctccagcagagatgcggggatgcacgtggctagtcttcaggtctattcaactctaaaacctgtccacgagggaggggagaggaagcaatggattgatacattgaggtacctcttactatagaataaataaataggatttaggggagccaaaaaagaaatttataaaaatggaataaaaatcaagtaagatgaaaattttaataagaaactcactgaaggagtcttttttttagacagggtctcactctgttacttaggctggagtgcagtggtgtgatcttggctcactgcaacctcctcctcccaggctcaagcaatcctcctccctcagcatcctgagtagctgggaccactggcatgtgccaccatacctggatgttttttttttttgtagagacraggttttgccatgttgcccaggcttgaaggagcattttgtagactgtaaatagttaaaatggt

SEQ ID NO: 118223 - DNA, 609 bp, Homo sapiens
  misc_feature (1)...(609): n = A,T,C or G
taatggaatcaagtaatgagtttctacctataatatgtaaccacttctagatttaaaaattaattacaataattactaatattgagaagtaaggcacagccctcaatgttacatatgcatgtaagggtgcaaagacaaagatgccaggaaaagaaaaagaaaatatggactatatatcataaattaagacttctggtgggaggggcagacaacagaattggcaaatgtgttataactagctaaagagattggagaattagacagatttttaatcacatctttgagaaagagamtgcatatgctctttataaatgaaagaaggcaagaaacatgacatgtcacagaaatggtttaggcacaggtcccatattctcaatcaggtcgaaacaaaaaatgtccagaagaatttagataattcccaaatatgaaagctttatggaaatagttaaggatgatattccagacagcaacataggtcaacagatacaaagttacggttagataggaagaatgagttctggtngtcctgtgacagtagggtgactatgggttatttattatattgtaaatttcaaatagccannnnnnnnnnnnnnnnnnnnnnnnnnn

SEQ ID NO: 118224 - DNA, 607 bp, Homo sapiens
tcaaattcgcagagctaacaatttcaattagaaactgaagttggtctagtatagatgccttattattattatactcagcataaaggcattccatatatcagaaagtctcaattgctttgctaaagtatgtccctatatgatgcaactataaataaaacctataagtaaaagtaaaacattaataacttataagagcagatctttgactttttttttagacaacagtctcatggaacaaatgtgttatctggcaagtctgtgcccatggagctatttcaaccctattatgctaaatcatcaaacagcaaataatgagaaggaaaggaaagcactagtgtcctcagacacattgtgtagctatgaacagctcaaagtacacttctaaaacaggaccatgaaatacacacaagcagattagaaaccagaggcaaagcttcacaattacaaaacaatttaaggattaagttacaactaaattaaatttgcccataacctttaaaaattcctgtatggattctgtattttatatccacwtggttattcaacaaccacttactgcaaaactcacacagctagagaagctattaacacaagagcatgcaacaga

SEQ ID NO: 118225 - DNA, 587 bp, Homo sapiens
gtgagccatacctgccaaatctgccaaccccagtgccgaactagaggttaccaataactgtggcatcactctattacagtgagcaagaaactgatactcctttatctcggtttctgtcgctgtcctgcaaaggaaagttaaagcattcatgacactccagaattcctgtgtattctggcctggcctcacagccctaacttgttcccacccataacttagaaggttgctcggcccctgcagtgacttctaggagtgagtggagtgactagacctagtcacctaggacctagactcctagatctagtccagtagtgactaggagtacccagaccctggagtgactaactgatgggcttgaaaaaagtaaacgggtaatgggtaccaratagaacatggtagttgccaaggtatgcagtgtagttgatgcagctactcttgactttgatttccatctgccacaggacaagaagggagtatgggaatagttattctctaatggcttgattacagttttgtactgcacactcttgaataataacttggacccagaattcaaatggaaggccttcagctcaaatttgaaaagc

SEQ ID NO: 118226 - DNA, 576 bp, Homo sapiens
tgtaagagatactttctttttgagaacagctggctttttaaaaatgactaggctacayagcaatgggagtaatgtaagtttttgttattgttgtcaaacatatacaaaagtagagagagcagggaaagaacccgcatgtcctttcactcaccctcaacaattaacagatgccaattttgttttatctataattcatcctactctcccctttccccatcaccacagctgtctcacttgcaagtaaatcccagttaccatatcatgtcaagtgtatcacacattaagacagaaaacagagtatagtgttatttaaaatcatcttttctaatgaatgtggaatgctaatcgctcgggtttatatatgagtttctgaaactatataaaaagatttttttctgtctcaaaaatagttttgatttaacatgatccaagggcagttggaaattaacttttgccataaaaacacttggaatttaaaaataaccttaaaggagtcaaaccccaggataatagaataagaaagctccttatgataaatggtaaaatcacatgctctaataaaagcatggccttcac

SEQ ID NO: 118227 - DNA, 630 bp, Homo sapiens
tgttactctctggccaaccctaaacttagaaaaatccccaaagcttcccttagcctgtttaccctactttggatcttaacttaaagggggcatatcaaatactaggacagtgattctcaacctcagtgacacatgtaaacagcttgggaactttaaaaattctgatgcccaggccatacccctatgaaatcaaattagaatttctcagagggggcacaagcatcatgtttttttttttgttttgttttgttttttttttgaataaacccagatgattcccttgcacagctaargctgagagccactgccctaggatatttgttggaagtgttgtcattagggttttaaccaaatcactgaaaagttttttaatcaagtccttcagaagagttgcgggataggtccatgctcctcaaacctgaatgtgtaaacccatacctggaggttgcgttgtggtttcatattcactggggctgtggtagggcctgagattctgcttttctagcaagctccaagtgatgcacatggtgcttctgctgcatccaccgactttaggtagaaggggattaggtaaccttactaaagtgctctgagcaagttggaagaaacactgcttttgtcattattgtt

SEQ ID NO: 118228 - DNA, 669 bp, Homo sapiens
agcttcctaggaactggtttcttcccaaagagaaaatagtatatgtgatttatgaaatatcacatagtatttcctcataagctcatggctctagaaatgaattcctaattctccaactggaaacatctagatttttgattttagctattattatcagttgttggatccasagctcctcatggtccattaagtctagtgaatgcagtgctgaacagaatacagtcattgatacaatctacttttatctgggaagtctgctgaggctacttgtccttttggcattttccctttgctaaatgttaaggtatgggttcaaagcaacaaggctttgcaatatcagcaaacctctaagggcagtccttcacccccacaggtatgctcaccttagctccttgctgtactactagatgtctaataagtattcactgatggtcccctccctgttgctaccacatgataaatcaaggaggtggtgccagccctactttcaaagtactagaaccaggtcagcctacactccctaatttcaaagcccgagaagaagcaacacaatttgcagactataaaaagagctttggggattggatagaaatggaaacccaagtggtatcttctgcagagcaagcacaatgggccccggggaatggagggaagtggctgcatggacag

SEQ ID NO: 118229 - DNA, 585 bp, Homo sapiens
tctcatgtattttatatctatgtatgttataaacttcataatttaataatacaatattatttgctttaaaaagtgagaaaatttttaaataaatagagaaaaaagatttaaaaaatgcttttactcacatgtttaccattttagtgcttttcattctttcctgaaagtctgtgtttctatctggtgttacttccyttcagtttgaaaaaaagtcttcccttgttattttagtagtgcaggtctgtactctctctcttcttctataactttaactacatagatctacatagatattgcactgtttgatattgtcccatatgtcacttaaactctagaaattaaaaaaagcaaaattttttcatgtttttttctatctgttccatggataagattatttctattgatctatcttgaacttcactgaactttctacttttatttccagtttattgttaaccccatcttagtgaatttttcatttgagagatacttttcaattctaaaagtttcacttttttatcatttccatttctctgctgagattcacaataattatgactacattttcctttaagtccctgagca

SEQ ID NO: 118230 - DNA, 605 bp, Homo sapiens
agttgggctgggaaaatattgggggggaaaaacaaatcagcaccgggaactctccaaatgacctggagcaagaaggtctcggcatgagaaagtcctctttgtcttagtgagagacttaacaactgttgagaatgcgggcatcagctaagtggactgggagatgcgggaaggtaggggaaggtagaggcacttcccagaaatctggaaattacacaaatgacagagatcattagtggtggccagtgtgcttcccacttctttcatagtacttgttttttgcaggcactggctgactgaatagagacagctaggtatagtcctagaccaaggctcagcccatgggatgtaagtgaaagtgtgtgctgcagcttctgggaatcttctttaagagacagcaggtgtctgctctttgccacgtcttcctcattcctctttcttgctggcaggaatgcaggcgtgatgggcagtgctacagcagtcatcttggacctagaggtatcctgggggaacagaagcccatgtggaaccacaagaaagaagaagcaatgagmaatggaggccagacaccccagcgtctagtgtgttagataagcaaaggtgccctc

SEQ ID NO: 118231 - DNA, 388 bp, Homo sapiens
ttttaactggaacacagtatttaattgtataagtatatgtaaatcttagcgatgtgtctttgtgcacaggtatgtgcttttttctcctagggcacataccaaaaaaacaaaaaaagggggtgtgtagatttttgggtcatcagaaatgcacatcttcaactttactagacattgccaaattgccaatttatactcccaccactagtaaatgtgaatcctaatttctccaaaccttctgtactagaatgattaagaataattttctttttggaaatytgacttaagcatctcttctctggcttccatgtgctcagtctacatactgaaaataaagtggaaaattgtagccatcatcattctaatggaggtggaaactgcctagataatt

SEQ ID NO: 118232 - DNA, 634 bp, Homo sapiens
aaaaaaaaaaaaccctacattttcttagtcrtttaatattgttcctttccagagaaatatattaaaaactaaaatgttgcacaaagatttttcagtaaaaaagataaggaatatgaattttacttctcattcagtcttgttattacctataaaatcatttaacactaataaaaatatcacattgctctaagatcccataatatgacagtgcctaattatttcttctagctagattatttatttttttccaatttcaatatatttttgaaaactcaggtaagttagtgatttcttttaaaaaaaaaacttacttcaagatttaaacaccttccttaaggaagcaaaaagactattcagcctttcaaattgcatcttctgtttctggaagcatcaataaagctcttattcaagactggcccattgtgaagttgcctcgtctcctactttccagatagagtacattcttaggtcagatacatagttgaccactgatacgatttttccaggaaaaaaaaacaactttagaactactttgcttattcattatcgaaaaaaagggttaggggttggggaaagatgcaagaactatgtgtccaaaagaaaggcaacattcgaaacagaagtttgtagcttc

SEQ ID NO: 118233 - DNA, 634 bp, Homo sapiens
aaaaaaaaaaaaccctacattttcttagtcgtttaatattgttcctttccagagaaatatattaaaaactaaaatgttgcacaaagakttttcagtaaaaaagataaggaatatgaattttacttctcattcagtcttgttattacctataaaatcatttaacactaataaaaatatcacattgctctaagatcccataatatgacagtgcctaattatttcttctagctagattatttatttttttccaatttcaatatatttttgaaaactcaggtaagttagtgatttcttttaaaaaaaaaacttacttcaagatttaaacaccttccttaaggaagcaaaaagactattcagcctttcaaattgcatcttctgtttctggaagcatcaataaagctcttattcaagactggcccattgtgaagttgcctcgtctcctactttccagatagagtacattcttaggtcagatacatagttgaccactgatacgatttttccaggaaaaaaaaacaactttagaactactttgcttattcattatcgaaaaaaagggttaggggttggggaaagatgcaagaactatgtgtccaaaagaaaggcaacattcgaaacagaagtttgtagcttc

SEQ ID NO: 118234 - DNA, 624 bp, Homo sapiens
tttttaaagaaacttggggaagaatgttccaggtggatggaaataccgtgagatgtcatgtgtttggcaggcttgctctgggaagggcaggatgggctgtgtgtctggagcctggttgagtgcaggggagcagtgggcgataatgatgatgawgagtttggagaggtgaatgtggtccgattgcatatgggcttttagaccatgttaataatctgacatcttacattgatctgtttactatctgtcttctccacaaagattaatctccaccagggcaattattttgttttgttcactgctttaccttagaatctagaactgcaccattcaatgtggtagccactagtcacatgcggctctgagcacttgaaatgtggctggttgcaatcgtgatgtaaactatctcagttaaaaaatattttcatgacatgtcaaaatgattatatctggatatattgggttaaaatatatcacaaaaattaattgcacttttttaacttctcatactacttaaattatacgtacatttaatttgttttatatatatttaaaatgcatatgtggctcacataatataaatgttaaaagcacagacataaaagacacatagccatcacccagtaa

SEQ ID NO: 118235 - DNA, 611 bp, Homo sapiens
caaaacttacttcaaagctacagttatccaaacagggtagtactagcataaggatagacacagattaatagtacagaattgggagtccagaaataacacatatatctatgtcaaattgatttttgacaaaggtgccaagaccattcaatgtaaaaacaatagtcccttcaaaaactggtggtgggtattcacatgctaatgaatccctacctcacactatatacaaaaaagtattcaaaatgaataaataaactaaatataagaactgaaccataagatttttaggaaaaacataggtgtaaatcttcatgactttgaatttggcaatggatacttagatatgccaccaaatgtataagtgaacaataaagaaaaaatagattaattagactttgtctaaattgaacacttttgtgcatcaaaagacattgtgaagaaagtgaacagatgatttatagaattgagataatatttgcaaatcatgtatctgataagggactagtatccagaataaacaaatmattcttacaactcagtaattaaaaagataagtaacccaattttaaagtgttcagggaacctaagtagacatttcttcaaagaagatatgc

SEQ ID NO: 118236 - DNA, 565 bp, Homo sapiens
agtgagttctcatgagatccacttgtttaaaagtgcatggcacctcccccttctctcttgctcctactctgaccatgtgttgtgtgtgctcccccttcaccttctgccatgattgtaagtttcctgagatcttcccagaagctgagcagatgccagcatcatgcttcctgtgtagcctgtagagccatgaaccgattaaacctcttttctttataaatactcagtctcaggtatttattgcaatgcgagaacggcctaatacaaggtgggagagctttgtggtttgsggctttgtcttctctgctttgagctgagttatgtgacaaaattcatatccctcaactacactccctcctgcaggctctattccatggcttccattctcaatgagtttctaaaatgtattacctccccttcaggccaagggtggtaactcctttttttttgtagttagtttctaggtactttaacatcttttatcagttccttatccccgtccacattttatgaacattccttgaaccacttgagttggattctgttttctgttggtattctgtctgat

SEQ ID NO: 118237 - DNA, 585 bp, Homo sapiens
gtcaccagcggatttcagttgagagacatcaaagctggtttaacaggcaagatccccacatctttttttactccatcccctctccctacaaacagtataaacaggggatacacatacatgtgtgtgtgttctatttctatcttcccctagatataaacaaacacacatgcacgtgtgtgtgcatcacatgcacctcatatccaggaccatctccagtctcaatacctcttcaaccctttttaggctgcggtgcaaatggggtccggtaactccaagaaggtgctgcagtcggaggcctgtgggacctgaacggttgctaggttaccatcccctgggactggtctgctccagctggcctggaggcttgacagrtttcagctgattccgagtaactctacttctttgcttttaaggtcccctgggaatgtgagtgtgaaccaaagaagatttgtaataagcctgggaggactgcctagacccgatccctgtggctgcactgagcctgggtgggagaaggaagccaggagggtgcagagggtgcaggcagaattccctgcatcagctgtgcttcttgactccccacaa

SEQ ID NO: 118238 - DNA, 647 bp, Homo sapiens
aagccacttaaaatctttactctctctataaaatagaccccccaacatgcagcctatttccatgtaaaattagggtaaaaacagaaaatgagaatcaaaaccatttgcrtgatagaatttcttctccacaacaaactgtgaaacagaaggaagatgtaatacaatactcctaactgaattaagttgcctcaaacaaagaaatgaatcaaaaatttaaaaactaataacagaaatagctcaattcctctcctcaaaaaagacgaaacaaaattagaattcatcgaacttaataaagaaattaagactaaattacagtgtgcttgagggagagtagagtctactgaatatttaataggggctgttgtagaaagtcagagaaacaagcaagaaaattaaaaggagataaagaaataaaaagggtcagagagaaaaggattgaaatggaagacaagcagaaaagatccaacgtgcatataattggagtccctaggtggcatgggggaaaccagtggaacataattatatttaaaattataattcaagacaactttctagaaatgaaaaaagactttaatatgtatattgaaaggtccaattttgcctggtaaactgatttagaatgatcaattttgagatagagcctagta

SEQ ID NO: 118239 - DNA, 647 bp, Homo sapiens
aagccacttaaaatctttactctctctataaaatagaccccccaacatgcagcctatttccatgtaaaattagggtaaaaacagaaaatgagaatcaaaaccatttgcgtgatagaatttcttctccacaacaaactgtgaaacagaaggaagatgtaatacaatactcctaactgaattaagttgcctcaaacaaagaaatgaatcaaaaatttaaaaactaataacagaaatagctcaattcctctcctcaaaaaagacgaaacaaaattagaattcatcgaacttaataaagaaattaagactaaattacagtgtgcttgagggagagtagagtctactgaatatttaataggggctgttgtagaaagtcagagaaacaagcaagaaaattaaaaggagataaagaaataaaaagggtcagagagaaaaggattgaaatggaagacaagcagaaaagatccaacrtgcatataattggagtccctaggtggcatgggggaaaccagtggaacataattatatttaaaattataattcaagacaactttctagaaatgaaaaaagactttaatatgtatattgaaaggtccaattttgcctggtaaactgatttagaatgatcaattttgagatagagcctagta

SEQ ID NO: 118240 - DNA, 563 bp, Homo sapiens
gttttatgaggggcttctcccttcgctgggcactcattcttccccttcctgccaccatgtgaaaaacgacgtgtttgcttccctttctgccatgattgtaagtttcctgaggcctccccagccatgctgagctgtgagtcaattaaacctctttcctttataaattcctttataaatttcctttataaattataaataaattagtctcaggcatgtctttattagcagtgtgagaacagactaataaagctagtctgcctgttttgtattagttagatgtctatttcttttagacagacattggagataggactaaatgttttaccaaggcaaaaataaataccagcmcatcaaattagaatttagtttcccatgttattagtatgagaaaagtgataaatctggtggaacaaaatgtgactagttcaaatagaagtaaccatacttggttgtcctttataaagttatattttattattattatttcaatagtttttggcgaacaggtggtgtttggttacgtggctaagttctttagtgatgatttctgagattttggtgta

SEQ ID NO: 118241 - DNA, 587 bp, Homo sapiens
tcttaggacacagtcagaaatcggccccatagctcaccaggtgctacctagtctagggcagtggttctcaaagtgtagtcttggaatccatcagcatcacccagtagtgtgttttgaaattcaacatcttacgtctcactttagatctgctgagtcagaaactctggggaaggggtccaacagattgtgttttcacaagccttccaagtgattctgatgtatatactcaagtctgaaaaccactgctctagggcccacctacctttctggctatatacagtctcttgctctcacgttccagactctcatagcttgcttttattccctcatcaagcatacatttcctcctaccacagggcctttgcacagctcttcctttttccttgaacacttctccttcttctccttctctggttaacatctactcctccctcargtctcagctcaataaagctgcctaggaccaatttctcctaatgatatatattgctcctttataacacttaaaacagctgtgtatttgtcatttttgtgtggttattgattaacatctatctcccctactatactataaacaccaaaagaat

SEQ ID NO: 118242 - DNA, 536 bp, Homo sapiens
caattctccgaatcagaaagcgtttcttcatcttgatccgagatcagcttcgctgagtgttccttccaccctgatccaagctgctcttgggtgctaaatctaagaacactgccccttctctctcaggacagggctccagcatcagaggctactgtgctgcctcctgtgcgggactctccttaccctgcacaccagcagcacctggagcaaactttagccagcatagattccagccctcccagcatctctcagtgttctctgggctgctkgtgtctgggttaaaatgtggcactcagagctgaacacacaagattcctgatgctgtctgacaaacctagctcctctctcatctggattctccactgcagttcttgaaatatgcaaaaattcagtttacaggccctgataggctggcagagggctccagctgtggatttgaggaactatttcattcttacacaacctcctcctgccttcccaaaagggcctgtgcaccattcattcttataggattttaaaaaaattaacacgtataa

SEQ ID NO: 118243 - DNA, 614 bp, Homo sapiens
attgcccgctcttcttttcttattatagtaaaaaacactaacataaaatttaccctcttaaccacttttaagtgtacagttcagtagtgttaaatatgttcacattgtggtgaaacagatctccagaacttcttcatcctgcaactctgaaactctatacccattaaaaaactccccatatgcctctctcttcagctctggcaaccaacattccacttcttgtttctaggaatttagatattttagatacctcatataagtggaatcatacagtatttgtctttttgtgactgacttctttcacttaccataatgtccgcaagcttcagcyatgtcatatcatgtgataggatttactttctttttaaggctgagtaatattccatccttttttttttagggtgactattagaaaatgtaaaatgtatttgtggttcctattatatttctactggatagtgctagtttagaactagcggttctcaacctcatcagttccaacccctccttaccacaatgaatttgtaacactctcttcactctcctgaaataaactgtatagataaaataactcatatgcacacataatttttaaaaaagaacaatataataac

SEQ ID NO: 118244 - DNA, 557 bp, Homo sapiens
tggtaaaatatacatagcatgaaatttaccatttaatcatttattgtatacagttctgtagcattaagtacattcacatcgttgtgcatcaccagcatccatatccagagctttaggatctttctcaattgaaactctgtactcaatggcatttgagattttaatgcagtcaaatttatcaatcttttctcttaagggttagaaatccttcagaaagattctctctaatacttcctcccaaaaggctttttttttttttttttgagatggagtctcactgtgttgcccaggctggagtgcagtggcgcaatctcagctcgctacaacttccccctcccgggttcaagtgattctcctgtctcagcctcctgagtagctgggattacaggcatgcaccaccatgcccaccatgctaatttttgtwtttttagttgagatggggattcaccatgttggtcaggctggtcttgaactcctggcctcatgatccgcccgacttggcctcccaaagtgctgggaatacaggcgtgagctactgcacccagcctcccaaacgt

SEQ ID NO: 118245 - DNA, 563 bp, Homo sapiens
gtttcattagctttgaaaggctctaattggaagtccacactctagaggtagcttctgcaagagcttcagcaatctttattttccttcagcaccagagcgtttattcatttgtataatgggtttagaaatagtttttcattaatgaaatgagttgttcacaagatatatggatggctaagaatgtggtaagggccctccatgcttgtgtgcacygagtgtaagaagttttcaagctcaacagcttacacccttcataatgtcccaccaagcctaagactccatctggtcttatgccacagacacttaacagatgattctacgctgtctggcttgaatctgactagtagcccacatgaattctgccactagaatattttctcatcatgcaagatgtgtgtcatacagagagcaaagatctcatcaagcttagaaaaatacttatgtgttattatagtgcttgcttattagtacatgtttatatatatagcagaatttggtctgggtcttgctttcagtgcaacatacacataccccttggatgggcagccatagtagaggggatc

SEQ ID NO: 118246 - DNA, 393 bp, Homo sapiens
acctgcgccgcgcgagaaggagcctgggagcatccgcccacactgcccggacagtcggctcgactcggtgctctcggccccagccgggctccgctcctcgggcgcgcgaggggccgtggtggcggcggcgcccggcatgtttcatagtccgcggcggctctgctcggccctgctgcagagggacgcgcccggcctgcgccgcctgcccgccccagggmtgcgccgcccgttgtccccgccggctgctgttcccaggcccgcatccccccggctgctggcggcggcctcggcggcctcgggcgccgcgaggtcgtgttcccgaacaggtgagtgcaccccagttccgggcggagaacgccacggccgccaacgcgcggccgccacctggagacc

SEQ ID NO: 118247 - DNA, 574 bp, Homo sapiens
aaaacatattctttacagaacattattatcataaactttaagattcgtatatagtacagaaatgcagtagagctggaaaacagcactttttaaaaccccttatcaaaagacaaaacttttgtcttttcaaaccaaagacagtcttttatatasacacatatatactccaaggagaatacctacaggccatattcagtttcaccggtaattccaaaagcttacgaaaaaatagtttccaatggcaaagtgaagccctcctacctttacagtatttttcaaagttttgatgcaaaggcattctaaggttctttccgtgtgttcgcagccactggaaacaacatctcttgaactgtacatattcaatattcacagaaatatcattgacccaacaacttcacgtatcgttagtaccaataatataaagccaaaaattccatcccttaattcatattgtagtaatggacaatatatacaaaggaatcaagttctcattgtgctctcttactaaacttaagttcttgttctgaccagaaagcaactgtcaaacagatgtgttttaatcactactcagtaa

SEQ ID NO: 118248 - DNA, 515 bp, Homo sapiens
tcatggagtaaggaaggaactagaataaatggttttatagaagycaaaggggaaagataagaaagatgtcaactgatgaatgcacgaaacatcttgtaccaagtccactgcttggagagacgactagaagccttgctagagctgtttcagtggaaagcagaggtagggaagtgtctacgccagagagcagtgaaatgatctgtgactatagcacatttttaataagtttagctgtgttgtacagaaagcagagataaaatttcctccataattttcccttattccataccattgtaaatctttttggaatacaagtgattcactttgtccagaagcaatggagtcagcaaaagaaaaacagtcatgtttagagcaaagaggtacgcagagcacatatgtctggttggataatgcacagatccatagggagccctaattcaataatatagctaatgctcaatgtccttctctttctttaaacaaagtaagaaatagatagactaatgtgttttttg

SEQ ID NO: 118249 - DNA, 515 bp, Homo sapiens
tcatggagtaaggaaggaactagaataaatggttttatagaagccaaaggggaaagataagaaagatgtcaactgatgaatgcacgaaacatcttgtaccaagtccactgcttggagagacgactagaagccttgctagagctgtttcagtggaaagcagaggtagggaagtgtctacgccagagagcagtgaaatgatctgtgactatagcacatttttaataagtttagctgtgttgtacagaaagcagagataaaatttcctccataattttcccttattccataccattgtaaatctttttggaayacaagtgattcactttgtccagaagcaatggagtcagcaaaagaaaaacagtcatgtttagagcaaagaggtacgcagagcacatatgtctggttggataatgcacagatccatagggagccctaattcaataatatagctaatgctcaatgtccttctctttctttaaacaaagtaagaaatagatagactaatgtgttttttg

SEQ ID NO: 118250 - DNA, 515 bp, Homo sapiens
tcatggagtaaggaaggaactagaataaatggttttatagaagccaaaggggaaagataagaaagatgtcaactgatgaatgcacgaaacatcttgtaccaagtccactgcttggagagacgactagaagccttgctagagctgtttcagtggaaagcagaggtagggaagtgtctacgccagagagcagtgaaatgatctgtgactatagcacatttttaataagtttagctgtgttgtacagaaagcagagataaaatttcctccataattttcccttattccataccattgtaaatctttttggaatacaagtgattcactttgtccagaagcaatggagtcagcaaaagaaaaacagtcatgtttagagcaaagaggtacgcagagcacatatgtctggttggataatgcacagatccakagggagccctaattcaataatatagctaatgctcaatgtccttctctttctttaaacaaagtaagaaatagatagactaatgtgttttttg

SEQ ID NO: 118251 - DNA, 563 bp, Homo sapiens
cttaggaatatttaataacttctggagacatttttggttgtcacaacttaggggagggaggttgctggcatctggtaggtagaaaacagttaaatattctacaatatatagaacagccccccgacaaccaagaattatctagccacaaacatcaatattactaaggttgagaaaccctgctgtaggctgagttagactcctctcttttaagttctgcctgattgcttctattctgttacttatcacacttaattctttgttgtctgtttttatttttgcccagtagcatgttaggtcctaggatgagggagaaattgttcctttgatctctattttctcacagtggatattgtgtgtgtgtgtgtttgtgtatgtgtgtgcatgtgtatgcaagtgtgtatatgtgtgtgcatgtgtgtgtacgatttatatatatataaatatatattattgtrtataactattttctaaataaaggggtaaatagatccttgaatttacaaataaactcatatgcagtgttttgtggtgtgtagatgggctaacccaagcatttagacaga

SEQ ID NO: 118252 - DNA, 547 bp, Homo sapiens
aaagtgctggcattacaggcgtgaaccactgtgcccagtccaatttctttgttgatgcaacaatccaaacctgagagatcttcattttcctcacaactccaaccaatgctacttgccacctttgaggtattgaaggcacaattgcatcctgtgatgtggggttgaaccttcagcagcagaagtatacaggtgcctatatggaagtattcatccatcacctctctcttttctcattgaatgccttttcttgtgcaactctttgtggtttcttcatatttargtggtaatatctacacccttgctactcaaagtatggtcccctcaacaatggcaccttggagcctgttaaaaaatgtagaatcctgcagtttattccaaacctatagaataaaaatcctcattctcacaagatccctagaggattttaatgcactttaaagtttgagaagcactgtactgaaacactgtttcctacagaattgttgacaggggtctaggactttatttttaggtagtaaattggataattttaggtttcccaggaatt

SEQ ID NO: 118253 - DNA, 595 bp, Homo sapiens
aaatagaaaaatactcatagagtgtgttatgacaatgcctggactgataaacagtaacagccaaataaataaactctatttaagcacagagaaaggctggtgtggctaaagcctcttggatgatggggagggagataggaggtgcagtastagatgaagaagtaagggaacagatcatacagtcttgtaggacagggtcatttggattttgagtgcaaagaaaagtagctggagggtttgaagtataaatgcagcatgatctgacttattcttatgaaagatctgtctgctttgcaagagaagatagagtacaagtgacagtagtacaagtgttaactgctgtagtccaggtgttaggtgatgagtcttggactagggctttaacggtgatgacagtgagaagtattcagatccaggccatgtcctggagacctggagatggtgttgataggatttgccgagagattgctgaggagtgggaaagaaagaaaggactcaaagaggatcctcagacctaagctaatgagtgaggatgtctgtgccctttaatgacatgaggaaactaaaggtgtaggttgcaggaagctcattagtc

SEQ ID NO: 118254 - DNA, 465 bp, Homo sapiens
aagatctgtctgctttgcaagagaagatagagtacaagtgacagtagtacaagtgttaactgctgtagtccaggtgttaggtgatgagtcttggactagggctttaacggtgatgacagtgagaagtattcagatccaggccatgtcctggagacctggagatggtgttgataggatttgcygagagattgctgaggagtgggaaagaaagaaaggactcaaagaggatcctcagacctaagctaatgagtgaggatgtctgtgccctttaatgacatgaggaaactaaaggtgtaggttgcaggaagctcattagtctttttgttaaggcgtagactctagaatgtttattagatacatgaaaagagatagtcagaaagtatagagttttcaattcagggagtagctcaaacctatgattcacatttcggaattatgagcattcggatgctacttaatgccccg

SEQ ID NO: 118255 - DNA, 591 bp, Homo sapiens
ttttggacagaattatgtaatctcctctgactaattatgccacctgtttctttttttttctttctttctttcttttttttttttttttttgatggagtctcactctgttgcccagactggagtgcagtggcattatcttgggtcagtgcaacctccacctcctgggttcaagcaattctcttgcctcagcctcctgagtagctgggattacaggcatgcaccaccatgcccggctaatttttgtatttttagtagagacggkgtttcaccatgttggccaggctggtctcaaactcctgacctccggtgatctgcccgccttggcctcccaaaagtgctgggattacaggcctgagccactgcaccatatgccacctgtttcaaacctcttcttatatgtctttcctcgtatgcaacttccatgcctgtgtatcaatcttcaggattatgtaaaatgtgagagtcattctgatagttcatcatattataaattttctaaactaattttaaaaaataaattaatctatgaagtattagttcagggaagtgttaattttaataatatttcttacggcatgaaaaacgagtgct

SEQ ID NO: 118256 - DNA, 591 bp, Homo sapiens
ttttggacagaattatgtaatctcctctgactaattatgccacctgtttctttttttttctttctttctttcttttttttttttttttttgatggagtctcactctgttgcccagactggagtgcagtggcattatcttgggtcagtgcaacctccacctcctgggttcaagcaattctcttgcctcagcctcctgagtagctgggattacaggcatgcaccaccatgcccggctaatttttgtatttttagtagagacggggtttcaccatgttggccaggctggtctcaaactcctgacctccggtgatctgcccgccttggcctcccaaaagtgctgggattacaggcctgagccacygcaccatatgccacctgtttcaaacctcttcttatatgtctttcctcgtatgcaacttccatgcctgtgtatcaatcttcaggattatgtaaaatgtgagagtcattctgatagttcatcatattataaattttctaaactaattttaaaaaataaattaatctatgaagtattagttcagggaagtgttaattttaataatatttcttacggcatgaaaaacgagtgct

SEQ ID NO: 118257 - DNA, 591 bp, Homo sapiens
gctctcttctcacctctttttagtccttcatttcctatgtaaagactgacattatgaacactgtggtcatagattccttcttttccatcattcctcatctaatttgtcactgaactctataaattctgccagccaaatattgctcaaatcagtcaacactttctcattgatatttttacagttaggagtaaaataaagagttctggccaaagcacatatagtttttcatgatttagttcctacctatctcttctctcaccactctttcccctttaaccttmagtatcaaccatatttaattattttctgtttcctcaatgcaccagattttctattcctttcttggctttgactaatgcattctctctgccagtactgtggcatttcattttaaatttgatctaaaataaatacaaacaagctgggtgtcccctgtcttattccatcctctcaacagccccatcctatttacagaaaagaggttcagataggttaagtaacttacaactggtccctcagctggaaattttcagagacaagtctgaaattatttagggtctaaattaaagttggttaatattgaatctcaag

SEQ ID NO: 118258 - DNA, 591 bp, Homo sapiens
gctctcttctcacctctttttagtccttcatttcctatgtaaagactgacattatgaacactgtggtcatagattccttcttttccatcattcctcatctaatttgtcactgaactctataaattctgccagccaaatattgctcaaatcagtcaacactttctcattgatatttttacagttaggagtaaaataaagagttctggccaaagcacatatagtttttcatgatttagttcctacctatctcttctctcaccactctttcccctttaaccttcagtatcaaccatatttaattattttctgtttcctcaatgcaccagattttctattcctttcttggctttgactaatgcattctctctgccagtactgtggcatttcattttaaatttgatctaaaataaatacaaacaagctgggtgtcccctgtcttattccatcctctcaacagccccatcytatttacagaaaagaggttcagataggttaagtaacttacaactggtccctcagctggaaattttcagagacaagtctgaaattatttagggtctaaattaaagttggttaatattgaatctcaag

SEQ ID NO: 118259 - DNA, 620 bp, Homo sapiens
ttctagttttacttctgctattgatttttagtttcatttcattgtaatcagagatgcttctttgtgtgattgcaatattttaaaagtaattgagaattttgctgtggcctactgtatgttctatcttgaagattgttccatgtgcacttgaggaaaatgcatgttctgttgttggttggaaaagtgttctgcatattctcattttgttcatatattatttttctgattttgtttagttgtttgtacattctctccttgaacttcatgagcatatttaagacacttagagtttctacttcaawtggtagaatgctatggtttatttgaatggaattattaattatgtgtgtaccacaatcaaacccaagtatatttgtgtttcatccatttattaattttgcaagagctttatttttaacacaggactgagctctaccaaaattatttgtgtaatcactataaaaaactattttatatttaattatgaatttttaaatttgaaatctccctcaagataattttagactttttgactaaacattaatgttcaatttcaaatttaatttttaaaatcagaccattatttaaatcactctaactcattttctacttgaaatgtt

SEQ ID NO: 118260 - DNA, 588 bp, Homo sapiens
ggtcataatttttttgaaacatacaccctgcatactcaacacttttgcacatataccctctattttggttgttcattgctatgtgaaaccaccctcaaaacattggggcttttaataatcatttattttgctcatatttttgaggattattaatttaggaagggcccaattccatgcttcakctaaggtggaaggagctggaagacatactttcaagacagcttcttcatgcacacctggggcctcacactgaggctcttggcctctcctactcagtgtgatgtctcactctccagagtcttcccaatggctcaggattctcacaacatgaggggctcaggtaggtgcaattctgaggtggctttcaagagggaacatctaaaagccaagagttcaaagaggcccagaagaaagccatagatttcttaggatcaagcctcagaagtcacacagcaacaattctgccacattctattaaccaagagtaaatccaagagcaagtccagacccaatggttggggattacacaaggacaggaatactgtgaggtatgactatggatgtggggaaggcaggggaaagatcttc

SEQ ID NO: 118261 - DNA, 588 bp, Homo sapiens
ggtcataatttttttgaaacatacaccctgcatactcaacacttttgcacatataccctctattttggttgttcattgctatgtgaaaccaccctcaaaacattggggcttttaataatcatttattttgctcatatttttgaggattattaatttaggaagggcccaattccatgcttcagctaaggtggaaggagctggaagacatactttcaagacagcttcttcatgcacacctggggcctcacactgaggctcttggcctctcctactcagtgtgatgtctcactctccagagtcttcccaatggctcakgattctcacaacatgaggggctcaggtaggtgcaattctgaggtggctttcaagagggaacatctaaaagccaagagttcaaagaggcccagaagaaagccatagatttcttaggatcaagcctcagaagtcacacagcaacaattctgccacattctattaaccaagagtaaatccaagagcaagtccagacccaatggttggggattacacaaggacaggaatactgtgaggtatgactatggatgtggggaaggcaggggaaagatcttc

SEQ ID NO: 118262 - DNA, 659 bp, Homo sapiens
atattcccaaactttgccaccagcagttctgtaaaagaacccaataattttcacttccaataaacttcctggtgatgcccatatttccagtacatacatgggcctcactttgagtagcaaggacagaacggacaatatttctgaagagaaagaatcmaaataagagatgcctgaaattatgatgtcatccttgactccttctttcccttgaatcctaaccctctatgctctctcaccttctgccacaatatctaatcactgagttttgcagaaatatctctctagttcacccccttcttttcactcccactgtagttcaaaccctacttatttcttgcctcgatcttcagtagtatcttgagtgattctccagtctctggttttgtcttaatgtaatctagactccatgaaactttctaaaatcaaatctaatcaaactattcttctgattaaaatccaacaaagggctccaattctctacagaataaagcccacacttcttagcattgaatgttaggccttcttgatctcccctgatccatctgtccagtcttccttgtagtaatagctcactctactcactgaaagcaatgctttatttatctgacagccaagttgagctgcttgtggattcccaaacaggcaaagcccaagtctct

SEQ ID NO: 118263 - DNA, 560 bp, Homo sapiens
tacaagctcactccattcactgaaaaggaattccaaatggctcttaaacaaatatatatagacatcattcataataagagaaaatgcaaattacatttacaataacatctgatattttttaactggccaggttaggaaagatcaaataatttaatagcaatgtattatctcaggaaatatgtattctcatacacaactcctgggagagtaaattgaaacttccatggagagcaatttgtttctatcagagttaaaattgcatctcccctttggtccaggttatagtcctgtgtatctcctctacatgtacaytggcacgtgtgtaaaatgacagatgtacaaggatattcattactacattttatagcatcaaggtatgagggtcagagaatgctcaaaggtctaacaatggaaaactggataaaccaataatggttccataatataaaccagcactgtgtagcaacagaaatgaataaaataactccataggtacaggcatgtgataatttgaagatatactttatattcaaaaagataattccaaaatgcagtgtaga

SEQ ID NO: 118264 - DNA, 635 bp, Homo sapiens
gcttagtaatgtggcttctcttttgattccatggcctcctctgttgcacaacactgttctgggggttcccatcatcttctaatgccatcttagccagtttgatttcttttttttttttttgtgaaaagaaactagcccctattaacaggaactaacagataaaaagttgctcagggatctaagacatacacttcacataggcagttttctcgctgtctgttatcagcatcagtgtttaaatgttcaccatgctatgcacctagctacttttgactctgtcattaactcagcaaatatttgttggttttaaactattttccaagcagctatgtcccactatgcttaatgtgtggaataaaaagggatattaccccttacgaagcttgatgtctagtaggagaatgaaacacttaaataaagtcctacataatgggacttgccctatgaagacagataggaggagaaacatttaaataagtcccctcaggggtgcaccggaaataaactaagccaagatatgaaagtccgtcatgaagaaagtatkagagatacattcttggcagaaagacaaacgtgagagaaaatctgaaagtaagagcatcttgggacagtggggaatctgaaaacagagcact

SEQ ID NO: 118265 - DNA, 669 bp, Homo sapiens
caccatttagtgttaattacaccctcaaagaccctatctccaaattcagtcagtgaggtttagggctttaatacatgaacttgggagggggcacaatttattctatcaaagataccaattctcccaaaaatttatctgtcgattcaatgtattcctaatcaaaattctggaaggtgcttttgaaaaaaaattcacagggtgattctaaagttcatatggaaatacaaaatacttagaccagccaaataaactttgaacaggaagaatacatttgaagagctaacactatctgattttaaaacttgttaaaaagtcacagccaactatagcrtagtattggcataaagatagacaaacggatcaatgaaattgaatagggaggagatgcaaaggtaattcactggagacagaatagtctgtctccatcatcggtgctagaacaattggatacacttatttaaaacaataaactttgatttacacctcgcatcataatttaattatcaactcaaaattgattttatctaaatgtagaacctaaaatttctatggaaaaatataatggaaaaaactctggattagccaaaaacatttgttacatgtgacactaaatccattcaaaaaaagaaatattgggcttaaaatcaacacattttaaaacaaactttt

SEQ ID NO: 118266 - DNA, 650 bp, Homo sapiens
catgattttatatttggaaaaacctgaagacatcacctaaaaactactagaaaagataaacaaattcagtaaagttgtaagatatcaaattaacatacaaaaattagtagcattttatatgctaacagtgaacaatgtaaaaaagaaataaaaaagtaatcctatttacaacagctacaaataaaataaaatatctaggaatcaatttaaccaaaggaatgaatgatctctgcaatgaaaactgtacaactatgatgaaataaattgaagagaacacattgctaaaatgaccacagtactcaaagcaatctatagatgtaatgcaatccttatcgaaatactggggacattcttcacagaaataaargaaacaattctaaaattcatatggaaccacaaaagacccagaatatcccaaactctcctaagcaaaaagaacaaagcaggaggtatcacattctgactttaaatcgtatctcagagcgataataatgaaaacagcctgatactagcataaaggcaaacacatagaccagtggaacagaatacagaacccagaaataaatccatacatgtttttgaccaaggtgccaagaatacacactggggaaagtacagtctctttaataaatgatgctgggaagactgga

SEQ ID NO: 118267 - DNA, 495 bp, Homo sapiens
aacaaacgaagtaaaaaaaggagggaggaagaagagaaagaaaaagaacaggaaaacaacaatatggtaaagtatgaattgagacagaatttgtgttagtttaagcagtatatttcctcatcaatcaattactagagcacatattttgagatgtgtacctgcacaaccccaaaaacattaattagaaatagagaactacttttgatataggaaatacttttgatattattaaaaataatatgctgtagacagaaayaaaaaatttactaagatgaaaaagaaaaatcacagcccttcaagtgttgactggaaagtgaattctctgctggcatataaatagttggtcatctctataaaacttcagggtaccttaacaaagtgcttgaatttttcacagattatagcttttctttattttgtactttttactactgtctatattttactatagggtgtctgtgggctttttaagaaaagaaatttagatcaaagaat

SEQ ID NO: 118268 - DNA, 495 bp, Homo sapiens
aacaaacgaagtaaaaaaaggagggaggaagaagagaaagaaaaagaacaggaaaacaacaatatggtaaagtatgaattgagacagaatttgtgttagtttaagcagtatatttcctcatcaatcaattactagagcacatattttgagatgtgtacctgcacaaccccaaaaacattaattagaaatagagaactacttttgatataggaaatacttttgatattattaaaaataatatgctgtagacagaaataaaaaatttactaagatgaaaaagaaaaatcacagcccttcaagtgttgactggmaagtgaattctctgctggcatataaatagttggtcatctctataaaacttcagggtaccttaacaaagtgcttgaatttttcacagattatagcttttctttattttgtactttttactactgtctatattttactatagggtgtctgtgggctttttaagaaaagaaatttagatcaaagaat

SEQ ID NO: 118269 - DNA, 600 bp, Homo sapiens
gctggttggttgagttagtttccctaacagcaaagaaagactctttgattagcagactgaaaaaaagtgttcatctcaaaaatgtatcacactaataatcttcctgaataatacatccttggcttacctcttttgattttgactacaaaggcttatgattttttttttaaatcagacaactgatgaaataataaaawattctagaacactgtcatgcaactaatgaagtagcccaattgtcatctgataaccttaatagatatttcacgttgaatttatttatgcaggttaaaagaggttttctttattgagttattggatggctttataaagtagggaactgaaggggaatggtgaaatgctacaatcagactgcatgtagtaaataaaggcagctatagtactgttcttccaaagtataataaagagaatttatttgcatgttatgaagatttcttttggaaagatccttataatttgattgacatttgtacaatttatctgaatgtacttaattcttaccaaatacatatgcataattggcaatgtacacatcaaatttgataattttaatatctcaactaaagaggaataatgcat

SEQ ID NO: 118270 - DNA, 600 bp, Homo sapiens
gctggttggttgagttagtttccctaacagcaaagaaagactctttgattagcagactgaaaaaaagtgttcatctcaaaaatgtatcacactaataatcttcctgaataatacatccttggcttacctcttttgattttgactacaaaggcttatgattttttttttaaatcagacaactgatgaaataataaaaaattctagaacactgtcatgcaactaatgaagtagcccaattgtcatctgataaccttaatagatatttcacgttgaatttatttatgcaggttaaaagaggttttctttattgagttattggatggctttataaagtaggsaactgaaggggaatggtgaaatgctacaatcagactgcatgtagtaaataaaggcagctatagtactgttcttccaaagtataataaagagaatttatttgcatgttatgaagatttcttttggaaagatccttataatttgattgacatttgtacaatttatctgaatgtacttaattcttaccaaatacatatgcataattggcaatgtacacatcaaatttgataattttaatatctcaactaaagaggaataatgcat

SEQ ID NO: 118271 - DNA, 600 bp, Homo sapiens
gctggttggttgagttagtttccctaacagcaaagaaagactctttgattagcagactgaaaaaaagtgttcatctcaaaaatgtatcacactaataatcttcctgaataatacatccttggcttacctcttttgattttgactacaaaggcttatgattttttttttaaatcagacaactgatgaaataataaaaaattctagaacactgtcatgcaactaatgaagtagcccaattgtcatctgataaccttaatagatatttcacgttgaatttatttatgcaggttaaaagaggttttctttattgagttattggatggctttataaagtagggaactgaaggggaatggtgaaatgctacaatcagactgcatgtagtaaataaaggcagctatagtactgttcttccaaagtataataaagakaatttatttgcatgttatgaagatttcttttggaaagatccttataatttgattgacatttgtacaatttatctgaatgtacttaattcttaccaaatacatatgcataattggcaatgtacacatcaaatttgataattttaatatctcaactaaagaggaataatgcat

SEQ ID NO: 118272 - DNA, 635 bp, Homo sapiens
gcttagtaatgtggcttctcttttgattccatggcctcctctgttgcacaacactgttctgggggttcccatcatcttctaatgccatcttagccagtttgatttcttttttttttttttgtgaaaagaaactagcccctattaacaggaactaacagataaaaagttgctcagggatctaagacatacacttcacataggcagttttctcgctgtctgttatcagcatcagtgtttaaatgttcaccatgctatgcacctagctacttttgactctgtcattaactcagcaaatatttgttggttttaaactattttccaagcagctatgtcccactatgcttaatgtgtggaataaaaagggatattaccccttacgaagcttgatgtctagtaggagaatgaaacacttaaataaagtcctacataatgggacttgccctatgaagacagataggaggagaaacatttaaataagtcccctcaggggtgcaccggaaataaactaagccaagatatgaaagtcmgtcatgaagaaagtattagagatacattcttggcagaaagacaaacgtgagagaaaatctgaaagtaagagcatcttgggacagtggggaatctgaaaacagagcact

SEQ ID NO: 118273 - DNA, 532 bp, Homo sapiens
ctcctcacccctgacaactgcccctggagaagcccgttgacctgcctcctccttctctgaagatgagtctgtcccagaatgctcccccattcaaaaggacttctgccaggtccaggatggaactactaggtcagaaccatgcccagtggagggcaaaagggaggctgagctggggctcacwttcacacacccattttataaccaaggagacagaggctcagagaagtcaagtaatttgcccaaggtccccaagttagtaggtcacagggcaggatccaaatgcaggtctgtctggccccctccgcctccctgcacaaccgtccctagaggccttaactgtaggatctggttggccaaagaaggcaagagagggtgtctgaggcaaggagaggcacctaggagaggaggggggccttggagatgacgatgagtctggcagcgcagaccttgtaaaggcatcatcaaccagaggttaggctgatggaagtgtcagaggtatgtgaaccagagcaactccatcttgactaggagc

SEQ ID NO: 118274 - DNA, 657 bp, Homo sapiens
cattgcttccaggtgtgtgcctgcaccaacaacagatggaggactcctcctgagcctgagtctagagaagttctacatgttctggagatccaccctgagccaaggtcaggctcaaacattctgagggccscctgccccaatgataggtagctcaaggactgccaaacattttccagaaaatgttagaaagactgactaacccggaccccagggctgcctgggaatacctcaactgtcaaagagatggagcagaagaaaagcacatccaaactaacctgcctctggaggagatgcccgcgtgggccaggagaataagagaaggtcccagaaccagcaagcactagaaatagcaggagatacagacacactgtgaaaattacaactaacattaataaggaaacgtgattgctttataaaaattcatcactttgcttaagtctaggagtttcagaccagcctcggcaacacaacaagaccacatctctaaaaaaacaaataaataaaattaaaattatctgggcatggtggtatgctcctatagtcctagctactcaggaggctgaagtgggaagatcacttgagcccaggagttcgaggctatagtgagctacggtgtgattgtgccactatacccaagcctgggcaacagagcaagac

SEQ ID NO: 118275 - DNA, 594 bp, Homo sapiens
tgatggttttataagggactttcttctctctctgcacttctccttgctgccgccatgtgaagaaggatgcgtttgctttcccttctgccatgattgtragtttcttgaggccaccccggtcctgtggaactatgaatcaattaaacctctttcctttataatttaccaagcctcgggtatgtccttatagcagtgtgagaacagactaatataaagggcatggaaaatccaggaccatcaagaagaaagacctgaccagtgtccccaaagcaaggaaaacagtttcaggaaggaagaaatggacagccacatcaatgtgacccattggtcaactacataaagatctgaaagcatccactaactgaagacagagaacactgggaccactgcccatgcagctgcagggacaggaaaggactgtccctgggtaggaagcctgtctgctaacatgtggagagggaagggtgacacagtatgtgtggactgctctttcaggatgcttagtgtgaacagaagaacatagggaggcagctgctcatggactaggcccaagggatggtttttattattgttgtactaaaattttaagatgaa

SEQ ID NO: 118276 - DNA, 234 bp, Homo sapiens
aacacaacgatcttgactctacttcctctayaattacttgccttttctccattcctttttttgagtgaagcttcttgaaattgttgcctgtgcttactgcattcaacccctctactttgttctctcagaaatcccttttggtcaagctttctccttatcacttcacccaaaggactcttgtgaggtcatcagggctagccactttactaaatccaatggctgtttatcaggtcc

SEQ ID NO: 118277 - DNA, 574 bp, Homo sapiens
taacaaacagggagatcaggaatgctcacttcaaaaacattatttattcagggcaagtgggcaagtggtatttctgatgtgcaaatgaagcttaaacttcagctttaatttataagaattaggaaatgcagattaaatctctgatgccacattgtgaattcagtaaaggttaactaatctacgatgcaaagacaaactttagctatcctacacttattattctggaaatttaatgaaaattaaacaagaagactmacagagtataagaattgtccccccgtcttaacactgctgtttccagcctctgttgcctgaaacactgcagaatacttcagatttttttaaccccaactttttattgagtaaaaccaaagtactaaactaataaatgtgaaaaaggatgttgggcttaaaaagaaaaagcctcaagacatcgagcctcttagatattttaaaagtgaagaccgagaaggaatgcactgttgctaaatagaattataggattatggtcaatttataatcttttcaacatgggatttgaatgttctgatattagatacgatgtacgtacttt

SEQ ID NO: 118278 - DNA, 521 bp, Homo sapiens
cccttaccactctggcaggctaatcttggatatacagcctccagaacgatgataaaataagatctgttgtttaatccacacagtctgaagtattttgttatggaagcctgagctaaccaatgcacaggtgataatgaattttgtgacatatgaagtcctttttaaacaaaagctattgttacttgtcctggaatctctttgtttgtgattaaacagccatcagccgaccaaaggctgtgggtagtccaagtccagctccctacatgggaaagcaaagagaatagctcagcttcatttgaggcaaatatgaagctgagcatttgcatcacacagttctagttgataaaagtttttgagactattctctgcccttcccatcattttctagtgcattagaagaayactttggttaataatatttattgccttccctgtcatcaagtaatttttttatttcaattgctgaaaatggattagtgtcaagaccccagatttcagaaaatgtcaaaactttaacaaaa

SEQ ID NO: 118279 - DNA, 573 bp, Homo sapiens
atcaatccaagcctggtttataatactccaaattacctaccataactgccttttgctatatttaattacttataatctcctaaggctgttatgagataatagatgtgtaaatgctttggaaagtagaaagtgctcaacaaatgttaggtgttattagtaattaaacaagttttcctaataaaaagagcatgtatrccacagaactggcaactagaagattcttttttattttttattttattttgcattttggaacttcatctagcctgcataaacaaaaacaaattatcacttttctttgtctccataccagttagaaccataaaaactcacctatccatgtaattcatctgctaatattctggttttgtatcctgagttaaaatgtgagatcattctcccccaatttaatttttttgacagtgaatatttatactaaatttaaattaagtgtaaaagagcagattgataagaacaccaaaaaccttgtagatcaaccaataacaccagctgtccaaattattctacagcattgcaaaggttcctctaaactgcatatttattgctggatac

SEQ ID NO: 118280 - DNA, 542 bp, Homo sapiens
cctacttttgaattacttgtgtgattctttagagtatcaattatatattaggtttttaatgagtccattctttgcaggattttgtcattaaaacctgcaaaattaactcaaatttggacctaaaataaacctattggttattggaaatacattaatgcaattgtttattatttcaacttgattttaattagcagggtgggagatgcttttgatacaatattaargtgttttcttaattctcccatgcagtcgtctccagggtgaaagcttctgctttagtgcttggtcaagccttaaactttatatgttttggcactgctctgtaacagaagtgttcatggctgagactgccaagtgcacagagtaaatataaatttttatcagtacagtaagtgttcataatactgactgtcagtggaaggctatataatacttttatgattccaagttttagaagagcaataaggctttgaagtgactgtaagatgtttacatctaagctattgatgcccacaaatcactattgcacatataataatgcc

SEQ ID NO: 118281 - DNA, 554 bp, Homo sapiens
cctaaaataaacctattggttattggaaatacattaatgcaattgtttattatttcaacttgattttaattagcagggtgggagatgcttttgatacaatattaaagtgttttcttaattctcccatgcagtcgtctccagggtgaaagcttctgctttagtgcttggtcaagccttaaactttatatgttttggcactgctctgtaacagaagtgttcatggctgagactgccaagtgcacagagtaaatataaatttttatcagtacagtaagtgttcataatactgactgtcagtggaaggctatataatacttttatgattccaagttttagaagagcaataaggctttgaagtgactgtaagatgtttacrtctaagctattgatgcccacaaatcactattgcacatataataatgcccacagtatttagcatgaaacaagcaaggaatgaagaggccaggatataacccaagcttcatgatgactctctatgagccaaataaactcaatgagaccattgctggtagaaagtcaacttacagggttac

SEQ ID NO: 118282 - DNA, 576 bp, Homo sapiens
aatccacaactttaaaaagggcagggacagcatcttttacttctgccatatcccttataatatcctacacagtgctggcattcagtgcaattttaatacatattttgtaagttctcctaggtaacatgaataatgcagtaactcttttgttagaatgatcctttcactcattcaacagaacatgctgtgtatccttttatttagaaaatgaaatgctccaaacttttaaactggtagacccaaagggcactttatgtctggctcattccagtgctaaggggatacctcccactttcctcactttttgcctctcaacacatccaactggttatgacgttttatcaattccatccgccaaccatctctctgatccacttcttcctctccacctttagycctactgcttaaattcaaacccttacatctttcacctgggttgtttcaaaagtctccaaattgatttttgttttcatttttcatccagttgtgattcaatcaacacatatttatcaaggactaactatgtacctagtggtttctaggtactgaggatacagaccagatccttgttgttgt

SEQ ID NO: 118283 - DNA, 549 bp, Homo sapiens
agatgtgtatttcagcttcccctagtcccacctttttgtctctttaaaaatatgctctattttactttgaaagcagagatgctgaaggagttagagaagtgacatgaaaagcttttaaggaaagaaatttcaaaaatgtattggcagcartgactcttacctactttaccttgacaaaacaaaataaaacaaaaccccaaaacaacaacaaaaaatcatgccaacattctgtaaagcagttagctctctgatcaacaatacagaattggtgacagtccccaatagcagaggaaactgcttgtgtctctgagtcgcagacctgtgctaggtaaccctgaccactctgctacagcagaagtgcatgaaaaaaacaaaacaaaaccaaacaaaacaaaaaaacaggaaaaaaaaaccgattttcccccagcccttcacattgagattgaccatcttaagtgctttaccctcagagtaacagagcttgaactgtcttttcattaactatccaaattatttagatagtagagaaattgcacttcagaagtgtaa

SEQ ID NO: 118284 - DNA, 549 bp, Homo sapiens
agatgtgtatttcagcttcccctagtcccacctttttgtctctttaaaaatatgctctattttactttgaaagcagagatgctgaaggagttagagaagtgacatgaaaagcttttaaggaaagaaatttcaaaaatgtattggcagcaatgactcttacctactttaccttgacaaaacaaaataaaacaaaaccccaaaacaacaacaaaaaatcatgccaacattctgtaaagcagttagctctctgatcaacaatacagaattggtgacagtccccaatagcagaggaaactgcttgtgtctctgagtcgcagacctgtgctaggtaaccctgaccactctgctacagcagaagtgcatgaaaaaaacaaaacamaaccaaacaaaacaaaaaaacaggaaaaaaaaaccgattttcccccagcccttcacattgagattgaccatcttaagtgctttaccctcagagtaacagagcttgaactgtcttttcattaactatccaaattatttagatagtagagaaattgcacttcagaagtgtaa

SEQ ID NO: 118285 - DNA, 575 bp, Homo sapiens
acagtgcagtgtatactgcttgggtgatgggtgcaccaggatctcacaaatcaccactaaagaacttactcatgtaatccaataccacmtgtactccaataacatatggaaaaattaaaaaaaaattaaaaatgaggcttctggataagtaggcattagctaggtgaggggagaggtttagggacagactgcctcttgactagctttgtacctttatgatttttttttaactcttctaatcctccattttatgtgtataaaatgaaggaaatataccaaccttagaggtttgcctgtaaattgtttggcacagaaatggtacttagtacacaatatgtggccaccagtaatggtagtggcaatcgtgatggtggtgctggtagtggtggcagtagtacttagccagtggaatattgatttccaggagaaacatggcagttatgtagatctttacagccaggaatttccaagagagctgtatatttacaagcctctttcaactgaagtagaaatcatttgcacagctaatggccctgtataggccccaaaagaaaggaaacaaacaactcttccaa

SEQ ID NO: 118286 - DNA, 575 bp, Homo sapiens
acagtgcagtgtatactgcttgggtgatgggtgcaccaggatctcacaaatcaccactaaagaacttactcatgtaatccaataccacctgtactccaataacatatggaaaaattaaaaaaaaattaaaaatgaggcttctggataagtaggcattagctaggtgaggggagaggtttagggacagactgcctcttgactagctttgtacctttatgatttttttttaactcttctaatcctccattttatgtgtataaaatgaaggaaatataccarccttagaggtttgcctgtaaattgtttggcacagaaatggtacttagtacacaatatgtggccaccagtaatggtagtggcaatcgtgatggtggtgctggtagtggtggcagtagtacttagccagtggaatattgatttccaggagaaacatggcagttatgtagatctttacagccaggaatttccaagagagctgtatatttacaagcctctttcaactgaagtagaaatcatttgcacagctaatggccctgtataggccccaaaagaaaggaaacaaacaactcttccaa

SEQ ID NO: 118287 - DNA, 613 bp, Homo sapiens
tagagaaataggacacaggacagggaaattttgataagtttagagatggagaaccagtgggaaggggaaggccaattgaaaagctggtaggctgtgagttagtagtaggctggttgagggagggtctgggagaaggagtgatttctaacactgagaaagcagcagaagtacttctgatgacaattcactcactacatgacattttttttttttcttgagtgtcgctctgtcacccatgctggagtgcagtggtgtgatctcggctcactgcaacctccgcctcccgagttcaagtgattctcctgcctaagcctcccaagtagctgggactacaggcacacaccactatacccagctaattttagtatttttagtagagacaaggtttcaccaggttggctaggytagtcttgaactcctgacctcaggtgatcttcccgcctcagcctcccacagtgctgggattacaggcatgagccaccatgcccagcctacatgacattttcttgagttgatgataggtgtgataggtagtatgttaaattaaaactcattcattctgttagttattcttgagctgggccaaaatataagtactaaaggatgtagtaat

SEQ ID NO: 118288 - DNA, 574 bp, Homo sapiens
ccttttaaataattactagggattcaaatttaattcaatctcatatggaactaccaatgcaaataattcatataacaactgaagaggcagatactttctacacatagctaagttttcatacaacataaaacaacaataatatcaaagctaacttttcactcttgggcttagcaaatttattttgacatcgattgtatattccaacttcagaagcattaaaatatgaaaaccatacatctttgtttcaatgaggtatagtttagataacctctttgcctctacttttatataaagtattccttaagttctgacccttttatcattctttatttttatatgctgttaatctcaacttcttctacttgctcttataccctaataacgyccaatatatcactataagcttgcttatctgcccttcagtagccctccttatttaatcacttttgttacttttttcttttaaaaatattaagatgttgcatctcattacttctttaagtactcacccattgccctccatcttttcagcataatttctttaaaggtggtaattccttacctctactttctt

SEQ ID NO: 118289 - DNA, 574 bp, Homo sapiens
ccttttaaataattactagggattcaaatttaattcaatctcatatggaactaccaatgcaaataattcatataacaactgaagaggcagatactttctacacatagctaagttttcatacaacataaaacaacaataatatcaaagctaacttttcactcttgggcttagcaaatttattttgacatcgattgtatattccaacttcagaagcattaaaatatgaaaaccatacatctttgtttcaatgaggtatagtttagataacctctttgcctctacttttatataaagtattccttaagttctgacccttttatcattctttatttttatatgctgttaatctcaacttcttctacttgctcttataccctaataacgtccaatatatcactataagyttgcttatctgcccttcagtagccctccttatttaatcacttttgttacttttttcttttaaaaatattaagatgttgcatctcattacttctttaagtactcacccattgccctccatcttttcagcataatttctttaaaggtggtaattccttacctctactttctt

SEQ ID NO: 118290 - DNA, 599 bp, Homo sapiens
ctttaaaaaattgctgtaaaataaggaagaaataaaaaacagtatataactaaacaatgtgtttcaatatgtaaatacctagggacctctactctagaagacaaatccactcccctgcatttccaaactgtccctagggaaggtccctcgaaatccactaggtgagatagagccagrtatgtaagcatgggcttttacctttactcaaaggtaatggaaggagcagtatttagggcttgctgccctgtccctttactttcaaggaagttactggtttagaggtagagttgaagtggcaatcaatgggaaccatggttcccaagatggatatctctaatgggaaaatacgcacagttgagaagttagagggagaggggtgaattggcccaaagttaccccatacctactcttcaggagaacttgggggactttttcccgaaggctatagatatccatggggcctctaagtccctcttcaggatcactccctgatggaagcagagcatccagattcagtgggaagttcatggtgcaaaggaacacctttccctctaatctcgtctctaaatcaattgtgcatccttcagtataaaaagcag

SEQ ID NO: 118291 - DNA, 599 bp, Homo sapiens
ctttaaaaaattgctgtaaaataaggaagaaataaaaaacagtatataactaaacaatgtgtttcaatatgtaaatacctagggacctctactctagaagacaaatccactcccctgcatttccaaactgtccctagggaaggtccctcgaaatccactaggtgagatagagccaggtatgtaagcatgggcttttacctttactcaaaggtaatggaaggagcagtatttagggcttgctgccctgtccctttactttcaaggaagttactggtttagaggtagagttgargtggcaatcaatgggaaccatggttcccaagatggatatctctaatgggaaaatacgcacagttgagaagttagagggagaggggtgaattggcccaaagttaccccatacctactcttcaggagaacttgggggactttttcccgaaggctatagatatccatggggcctctaagtccctcttcaggatcactccctgatggaagcagagcatccagattcagtgggaagttcatggtgcaaaggaacacctttccctctaatctcgtctctaaatcaattgtgcatccttcagtataaaaagcag

SEQ ID NO: 118292 - DNA, 549 bp, Homo sapiens
attagggttctttaaaaatggaattgtatgtttgacactctgagatgaagtattgtttgtaaagaaaatatgcacttattttttgactggacatttccacacaatggggcatctttacattccccttcattcctcccccaattttaaagttgtcatcacagttagtccattgttttgtaaaaatactgattatttattaattagaacaagaaatgagtagcatgtagacacttaacaactttagagacttttataagtgatgggcatggtgtctgcagaactattcagcttcttgaatatattaaaaatatcattcattatgaccaagtrggatttatcacaggtatgcaaggatggttcctcatatgcaaatcaatcagtgtgatacattatatcaacagaatgaaaggtgaaagctttatgattatttcaactgatgctgaaaaagcatttgataaaattcaatacacattcatgataaaagtcctcaaaaaactgggaatagaaggaacatacctcaatataataaaagccatatatgacagaccc

SEQ ID NO: 118293 - DNA, 570 bp, Homo sapiens
taatttggtttattcagtgataagttccttgtggattaaagtggcttcctattatgtttgctttctttgtgatgtcttgagtatgaaagaaactcagatatttgttaagctgaagattgaaaatctctaaaagtccaacggaatggagtttacgtgaaacatcaaacactgtgagaggtagtaggacatagragggcacggtggttggttaactaaacttaggcctgaggaggaagagaggatttggtggggagtggaagacctaaaggcatgaagggtcctcaaattgcaccacttcagtctgtcctgagaagtaccctcattctagctgggccaagggatcctgctatgggctccacccttctccagtcatgcccatgcccacagggtgagcactttgcaggccgggggaggcacacgccccaagcccacacctaatcccacttttttttgagacaggatctcactcctgtcacccaggctggaatgcagtggtgtgatcacgactcactgcaacctcaacttcccagactcaagtgatcctcccacctcagcctcctgagtagctgg

SEQ ID NO: 118294 - DNA, 471 bp, Homo sapiens
ctggaatgtaacgtaatgaactcgaatgtaattgactggaatggaatgtacatgaatggaatgtaatcgaatggaaagtaatccaatggaatagaatctaatgcaataaaatcgactcagatagagtagaatgtaatggaatggagtgcagtgcaatggaatggaatggaatggaatgcaatggaatggaatggaatggaatgggatggaatggtatggaatggatagtaatggactggagtgaaatggactggaaaggaatggactcaaattgaaagggcwcgaaaggaatggagtcaaatggaatggtctggaatggaatgaacacgaatgtaatgcaacccaatagaatggaatcgaatggcatggaatataaagaaatggaatcgaagagaatggaaacaaatggaatggaattgaatggaatgggaacgaatggagtgaaattgtatgcagtagaagtgaatagaa

SEQ ID NO: 118295 - DNA, 471 bp, Homo sapiens
ctggaatgtaacgtaatgaactcgaatgtaattgactggaatggaatgtacatgaatggaatgtaatcgaatggaaagtaatccaatggaatagaatctaatgcaataaaatcgactcagatagagtagaatgtaatggaatggagtgcagtgcaatggaatggaatggaatggaatgcaatggaatggaatggaatggaatgggatggaatggtatggaatggatagtaatggactggagtgaaatggactggaaaggaatggactcaaattgaaagggcacgaaaggaatggagtcaaatggaatggtctggaatggaatgaacacgaatgtaatgcaayccaatagaatggaatcgaatggcatggaatataaagaaatggaatcgaagagaatggaaacaaatggaatggaattgaatggaatgggaacgaatggagtgaaattgtatgcagtagaagtgaatagaa

SEQ ID NO: 118296 - DNA, 650 bp, Homo sapiens
gggtgatgaaatctgtacaacaaaccaccaggacacgagtttacctatataacaaatatgcaaatataccccgaacttaaaaactaaaaaggagactttttttgtacagattacagatcatttttagtatttatttccttataatcttggaattacctttttaataatgatattagtagcacagcttaagactcagagaatcagggaacacagacatttaataattaatgacagctgggcatggtggctcatgcctgtaatcccagcactttggaaggccacagtgggcagatcacctgaggtcaggagttcaagaccagcctggccaacatggtgaaacrctgtctctactaaaattacaaaaattagccaggcgtggtggcacacacctgtaatcccaactacttggtaggctaaggcacgataattgcttaaactggggaggcagaagttgtaataagacaagatcactccactgcactcctgccagggtaacagagtgagactctgcctcaaaaaaataaatatataaataaaataattaatgacaaaagtaagtattgtgataaaggaaaatatagattatgagaaagtattataggtagatctgtcatagtcttgagaggagcaggacttatgtggtcatgaga

SEQ ID NO: 118297 - DNA, 623 bp, Homo sapiens
gttattctttttatgtgcaatcacattggaaatttgtttattatttcaaacagctttaaactacagttgcttggattttgtaggcataaaatatgtcagtaaaaatagatcattttactgtctcagttttttttcttaaaatgatgataatagtacctactttataacawctctatgaggaataaatgaattaaaatacataaaacattttgaaaagcacttagcatattagtgcttaatgaatgttagctattaatagtaatgataagcattcctgtctagtttcttattttagttaaaatgacttacatgtatttccatgtacgaggatattctagtgcccattgcttttctccttcttggccagatacagaaatactatgtactttgattttaagcttgttttaaatgccagtgttctgaaagaaaaaagaaaggggttgtctagtatcaattagatctggttgcgaatcaaaatttagtatctctacaattttggtcgagctacttaagctctaaatttgaagctctgtttttatacacacaaactggggctagatgctcctcatatttctaggttttttgagtattaaatgagatcataatcacaaaatactgactac

SEQ ID NO: 118298 - DNA, 623 bp, Homo sapiens
gttattctttttatgtgcaatcacattggaaatttgtttattatttcaaacagctttaaactacagttgcttggattttgtaggcataaaatatgtcagtaaaaatagatcattttactgtctcagttttttttcttaaaatgatgataatagtacctactttataacaactctatgaggaataaatgaattaaaatacataaaacattttgaaaagcacttagcatattagtgcttaatgaatgttagctattaatagtaatgataagcattcctgtctagtttcttattttagttaaaatgacttacatgtatttccatgtacgaggatattctagtgcccattgcttttctccttcttggccagatacagaaatactatgtactttgattttaagcttgttttaaatgccagtgttctgaaagaaaaaagaaaggggttgtctagtatcaattagatctggttgygaatcaaaatttagtatctctacaattttggtcgagctacttaagctctaaatttgaagctctgtttttatacacacaaactggggctagatgctcctcatatttctaggttttttgagtattaaatgagatcataatcacaaaatactgactac

SEQ ID NO: 118299 - DNA, 627 bp, Homo sapiens
gaggctttttactgaagttgtgactatgatgttggttgagtagagccttatggctttgcttctgcatgaccaaagcagtgaagtctctgtatgatttcttcagttacatatcattaatggtgtctgtggttgtcttggtgtgttattggtgaagcctgtggtgaagtgctggggactggaatgccagatgtgcatgtcttcagattttagtgatagcagtggtgcgataagcatgtttatccatgtcccctagggcagggtatgttracatctgtattggctgatacaggtatgatctaggaagttgatccttaggcctctcaatggctttcttatatgtcagttttaataacaatgtactggacaggtgagtgggggctcaagttcctaggcagctagcatggcatgggaaatggaaatagcaatggtgatgagatgctcttctgggttccaagcactgtgcattcatgtttgcacaggttgcaatgggctgtttgggctggcctgcaggccagtaagtggttttcacaggtaaaagcttgctgaagtgctagcagtattgtgattctacccaacctctctccctaaggaggagtgcttgggtgtcgcaggtgatggattgagttg

SEQ ID NO: 118300 - DNA, 323 bp, Homo sapiens
tgtctctaaataagatattaagtaaataatatgtacttattatttctaactcttgaatttccattactcccacagtagaaaagactctaggaggctcccacttatcctatagatactctgataacgtttcaaattactttcctggtgtgaccagaaaattaagctttcctcaagaggccacttttctccccatatttatgcgcattacaattgcaaagatgtcttttycaccagggacatttatttactgacttatttaatgcaatgtgtcagcaaaaaacaaaaagagttcacatattttgtggttacatcttggctatagt

SEQ ID NO: 118301 - DNA, 472 bp, Homo sapiens
acagcatgaattgtcttcatttacacctgagtgattcatattctggcatatttggccactctgttcatgtgatcaggctcacatttatttgggaaaatgaatttaattccactacarcgcttaagacaaataattattaacagttccaagtaatgagatcgtgttttgaacaaacattggaattatattttgtattagttcattttcatactgctatgaagaaataccggagactgggtaatttataaagaaaaggaggttcaacgtattcacagttccacatggctagggaggcctcacaatcatggcagaaggtgaaggaggagcaaaggcacatcttacatggcagcaggcaagagagagtgtgcagagtaattgccctttataaaatcatcagatctcataagatttattcactatcacctcccaccatgttcatccatgacatgtagggattataaaagctataatt

SEQ ID NO: 118302 - DNA, 548 bp, Homo sapiens
attctgcaccttggccttctcgttttttttttttttttttttttgagacagtctcactctgtcacctagactggagtgcagtggcacgatcttagctcactgcaaccttcactgcccaggttcaagcaattctccttcctcagcctactgagtagctgagattacagctacctgccaccttgcctggctaatttttatgtttttaacagagatggggtttgaccatattggtcaggctggtcttgaactcctcaactcatgatccacctgccttggcctcccacagtgctgggattacaggcatgagccaccacacccggtctcatgttctttatagcattatttttcctagggaataggagttgggcatggtaggaccatgatcaaaaagaaatggcatcatcagaaaagcctcagttttgagagagctacagtagtttcaatatttggtttgatattttttcattagctgttgtttcagtacaaccatgggtttagatggcacrataaactttgtctcagtgattttccacaccccacgttttgtt

SEQ ID NO: 118303 - DNA, 591 bp, Homo sapiens
cctacaaaatctcaactaatagtcctgagcaagtatgcaaagtcatacatgattttatgagtggacatgtaacagggcacaggttgatattttaagtgatatcattgaaagaatgctctacacattcaaagtgcctgagaaatgtcttaagagagttttttttttcaattttatattcttttttatttatttttttgagatggagtcttgctctgtggcccaggctggagtgcagtggcgtgatctccgctcactgcaagctctgcctcccgggttcacgccattctcctgcctcaggccctgagtagctgggactgcaggcaccaaccaccatacccagctgattttttgtatttttagtagagatggggtttcaccatgttagccaggatggtctcratctcctgacctcgtgatcctcctgcctcggcctccaattttatattattatataaccaagatctttgtgaatggtacaagggagcaaagtaaaaatattaacagacttaaaaatccaaatccctgtagtttattccatatttgttcagtgccaccagtttttgtttgtttgctttttagaagtgggaagag

SEQ ID NO: 118304 - DNA, 548 bp, Homo sapiens
atcataaccccaaaatttgtagactaaacaaaatattcttcattgtcataaaaaggaccttgactgttggacaaagaccataatgtggggcagagtgttgatctgaacagctttagagggttttccatagaagggaggacttacaaatgtatagctgtgggtttcagtaggtctgagttgtctactcaaggtatcatgaggctgtttccaaagctgtactagaagaaaggctggtttgaaagctgtgtttactttctttccctgattatctgagaagayggcagcaattatctagacagggtctcaaagattaaaaaccctgcctggatttcaaaattctttttggtaggaatttttagatattttaacctacattttatttccataaccccagtaactaatttagaattttgaacacagtagaagctaagtattttttgaatcaataaataacatatttctttccaagtgaatttttaaggaagttttcaggggaaaaagtagtgaaaatagttctcaataaaacaacaaaaagtcctatgccaaaa

SEQ ID NO: 118305 - DNA, 574 bp, Homo sapiens
attttaggaattaagtaatgtgatgtttctcttaatatgtatatatttcataactttctatatgtatatatgaatttttttgtgtatatatacacacacacagaggattgtttgttttgtaccattaaactttatatcaattcttacctaagtaccatcttgggtttttttggttttggggttttgttatttctcagacaaggtctcactctgtcacccaggctggagtgcagggcagtggactgattatggctcactgcagcctcaacctctgggttcaactgatccttccacctcagccttccaagtagctgggactatagatgtacaccaccatgtccagctatttttttttacttctagtagagatgaggcctcactgtgttgcccaggctggtctcaaactcctgggctcaagcaatcctcctgcctcagccactaaaagttctgggattkcaggagtgagccactacacccagcctgcacattgttattctaactatcatggaaatataaaatatttgaatctttggttaaaaaatgccaccttttattaatttttatttttttaaat

SEQ ID NO: 118306 - DNA, 570 bp, Homo sapiens
attacacacattcacttcagttcctatcaacttaatgcattattacactatgctctgaaatatcttaagtaatcttaagcaatacatcagcatattctaaagtagacttttggaagagggactattgaacacaaaagaataaacagtaaaatctgaaatatttccagactgacatttatttaataaaaagaacttgtaaaggttttttttttttttttttttttttttttaccatttttggaaagcggtttctttcatcttcagaaaagatgagtctcaatcagtctgaaggaagttactgagggaacatggcagcagcccaggtcccaagttagttatttaaraagtcaactgactcagttacttttcatctgacacagatgcatgattatgtgaaggcgatgatactgaaactaagaaagaacaagcaatggaataaaaaataagatctatattaaccaaatatagatcttggtttcaacattgttgtttgaaaaatctctttttttcacactgttcttcatggaaaatgtggaaggactcaattaaccagatgtcaaaatagaacta

SEQ ID NO: 118307 - DNA, 570 bp, Homo sapiens
attacacacattcacttcagttcctatcaacttaatgcattattacactatgctctgaaatatcttaagtaatcttaagcaatacatcagcatattctaaagtagacttttggaagagggactattgaacacaaaagaataaacagtaaaatctgaaatatttccagactgacatttatttaataaaaagaacttgtaaaggttttttttttttttttttttttttttttaccatttttggaaagcggtttctttcatcttcagaaaagatgagtctcaatcagtctgaaggaagttactgagggaacatggcagcagcccaggtcccaagttagttatttaagaagtcaactgactcagttacttttcatctgacacagatgcatgattatgtgaaggcgatgatactgaaactaaraaagaacaagcaatggaataaaaaataagatctatattaaccaaatatagatcttggtttcaacattgttgtttgaaaaatctctttttttcacactgttcttcatggaaaatgtggaaggactcaattaaccagatgtcaaaatagaacta

SEQ ID NO: 118308 - DNA, 615 bp, Homo sapiens
ttcaaggagctttgctaagaaattttttgtgcttttttttttttttttttttccagacagggtctcattctgttacccaggctgaaatacagtgcataatcatggctcactgcagtctcaaacttctggactcaagtgactctcctgcctcagcttcctgagtagctggggctacaggcatgcaccaccacacccagctaatgttttaaaaaatctctgtagagctgaggtcttkctgtgttggccaggctggtctagaactcccgggctcaagtgatcctcccgcgttgacctcccaaagtgctgagattatgcatgagccactgcacccaaccttgcatgtattttttttcatttgtatctatgcaataatcttttaagtcttacatccatattattgaaaggataaagaagaaacatacagagatttaggaaagctgtgaggagaatagaatgcaagcaaaaagagccttgaagaagcaagtgttggtaaatgccatcaagtgcttcagattggtcatgtaaaaatagcagtgacagtatgtcattccatttgaaaagtaagagctcattagtgaaaacagaaatcttagcagaaaagtaagagtggaaatc

SEQ ID NO: 118309 - DNA, 615 bp, Homo sapiens
ttcaaggagctttgctaagaaattttttgtgcttttttttttttttttttttccagacagggtctcattctgttacccaggctgaaatacagtgcataatcatggctcactgcagtctcaaacttctggactcaagtgactctcctgcctcagcttcctgagtagctggggctacaggcatgcaccaccacacccagctaatgttttaaaaaatctctgtagagctgaggtcttgctgtgttggccaggctggtctaraactcccgggctcaagtgatcctcccgcgttgacctcccaaagtgctgagattatgcatgagccactgcacccaaccttgcatgtattttttttcatttgtatctatgcaataatcttttaagtcttacatccatattattgaaaggataaagaagaaacatacagagatttaggaaagctgtgaggagaatagaatgcaagcaaaaagagccttgaagaagcaagtgttggtaaatgccatcaagtgcttcagattggtcatgtaaaaatagcagtgacagtatgtcattccatttgaaaagtaagagctcattagtgaaaacagaaatcttagcagaaaagtaagagtggaaatc

SEQ ID NO: 118310 - DNA, 634 bp, Homo sapiens
agtaaggctaactggagaaaaaaataatcactgacatttctcttcttagcttggtgaaatctaccaagtctgctgtcccaaatamcgaaagagagacatgtgaaactcatgcactctctgcactctcccctgatttagagatgagtttctgcaccaaatataaaactgtgcatggattattccactgtccaagtgctgatttttgagatttttcaggagcctactttcccatcatatttttttaagcctatccataattgcaacacggtatcacatacataagaggagcgtggatagttatatattgcactctggaggttagcctcaacagaacaagagaaatgaataacctaaggaaaagagcattctgtatattgtaaattatctaagcactcctcttcaggaaactaagagtggggaacaggcagcatggggaaactgaaactcagacagattcacacatgtgcaaataagcaaccagaaaagaagcttctgaaaaatgttgtggcacaagaaaaagaatgttatcacaatgacgaggaaaaacagacctctgaaaaatcttacaattctatgatttttgctccaaaaatatttacttaaaatatttacaagttcttaatagtatataaga

SEQ ID NO: 118311 - DNA, 583 bp, Homo sapiens
actgatgaaaagccctttgcatacttttgctgttttctccaggcacaatgctagtttctgtaacagttttgtgtcatcgattaagacttttcagtatgcattaccctcatatgaaagtcttctaaatcattcctgttatatcttagaaaactcatctatctgtctttccactcagataactaatcaaagcataatccacctagcagtaagacgagaaactcatcaaagtctcctgcaatcaaggtatccaatgaacatcctgcactgttagatgtggccctaaatcccaactgaagtacttattgggtttaactgctgctttacacatgtatgggcacggcctacactttctttcttttttttttcttcctccaaatgtgaatttgtgtttggatgcagaaatgcttccaccaacttcctggactgcaaagtcatggaayatttagtagctgttcattgctccttgctttctgatgcacttagagcatctcataaacacccccaaaatagaccaggaatgtaaagtgtagtgagtggatttgggtggttaatctcaatctccagtgggagaaggcatttggca

SEQ ID NO: 118312 - DNA, 594 bp, Homo sapiens
tcacttggaggccctcagttactgccaggtttcctctttggagacacactccttatcatattgcttaccttcctttgtgtgtttcatattcaatttgtcagtgacactcttaaagtggggagctggaaggaagcataacactcctagtatcactgagcactcatggatacagtgagatgactcttcttggagccagagtatcatgcttttatagagacatctttagcatattcaaccatgcattcattaaaatatagtatttttccatgtatttgaatgttcattcaaatcctccttttaccgtttattttgcaactatgccttatttcactaaatggatggtcaatttttaggggcagaggttacttcttttgatgctaatggcacttggcgcctgctaggctaagtgttagatgttcaaagagaatatgtattaaattgagtctaattaaatggtacttaaaacttcaacagacagcaggctaactattgtcccagaaacctccyagaatcattatttgggtattcttttcacataaggtacacaaattagaatcacaagaaaaaaaataaagtgaagagggaatggcaaag

SEQ ID NO: 118313 - DNA, 594 bp, Homo sapiens
tcacttggaggccctcagttactgccaggtttcctctttggagacacactccttatcatattgcttaccttcctttgtgtgtttcatattcaatttgtcagtgacactcttaaagtggggagctggaaggaagcataacactcctagtatcactgagcactcatggatacagtgagatgactcttcttggagccagagtatcatgcttttatagagacatctttagcatattcaaccatgcattcattaaaatatagtatttttccatgtatttgaatgttcattcaaatcctccttttaccgtttattttgcaactatgccttatttcactaaatggatggtcaatttttaggggcagaggttacttcttttgatgctaatggcacttggcgcctgctaggctaagtgttagatgttcaaagagaatatgtattaaattgagtctaattaaatggtacttaaaacttcaacagacagcaggctaactattgtcccagaaacctcctagaatcattatttgggtattcttttcacataaggwacacaaattagaatcacaagaaaaaaaataaagtgaagagggaatggcaaag

SEQ ID NO: 118314 - DNA, 610 bp, Homo sapiens
gcagtccagtctgtgcgactgagacaccatctcaaaaaaataaaaataaaaataaaaaatcagaaatacggtcatgcaacatacatatgatactctgcaactagcttttattttatgtattatttttaattatgttatgcacwaccctcacaaaataatccatactatggatgtaccttattttattcattttactgatgaacatttgttgcttctggtttatttactgaaaaaaatcctacaacagacacccttacacacagattcttacatgtcaatgtttttcctaatgtaaaacaaggctgcaaatgtgggattgctggctcacatggcacgtgtgctccaaactttcacagaaatgatctgcttttccaaaaggttgtagcaattcacacttatatcaatggtctgagaattcccaccctgccccatcgagcagagagtattaccaaccttttaaaagatgtatcaattgtatggacaggaaataatatctgtttttaaatttgtatttctctgtccactagagaaggtgagaagagacacaataatttgcatcccttgttctgggaactgcctgctcacatccttttctcatctttttataatg

SEQ ID NO: 118315 - DNA, 588 bp, Homo sapiens
ccagtttatgaacagctttaaatgtgctatttccctaattaatacacgttatgaaaaaaataacttctcaaatttcatcaaattagagtttgtttcacatatcccctctttaattaaaggggctgtattcacatcagccctctttaatactggagatrgagaatgaaaggtaagtgaagttcagtgtttttgtgatcacagaaactgcattttgctaaatagagaggactgagtataacttgaaacatcacacacctaaagcaggatctagttaatcaagcatgacagttaggaacagaacaaaatcacaaccctcagcagggtgagacagaccattaaaatgataatatactcaattgttgtcttatttcactcctgatattccctggcatttgctcatgtcagtcatttggcatagtttgtcagctgaatatcaaaacaatcatgacaagcaaataaatatgaaagtctgagaaaatataccttgacagtatgtgctgagcatgagtgcaggcagcctgccgatactaatgattaaattctactttgtgactagaaacgctaagaactgttcctcttaactctgta

SEQ ID NO: 118316 - DNA, 540 bp, Homo sapiens
tactgcctacattttaagtagaattgattcacaaaagtacaaaacagtctcatttcaagttatctatctgtgtacaatttaagaagtttaaatcctaagtgttttaggacaaaatcctcatttttttattttagcaattttaaatgcacagaccatgtactttgctaactgtaaatctaggtaggcattgagacgactattcagggtatagttagcacacagtagttgatgacaaawctagatcttcctgtagctaggacctgataaaagtttcaggctcttgatttttggaattaccaggagaggtttactaataaagaattgtagctctgggtaattgttagagcctgggattgatggtcatcaggaaagagcgtaaagcttgataacagttggttaatttgatttgaagaagttgttgaaacagcatgcaaatgttcttaataaacccaagtatagagctagaaataacattatattgctgtttttttctcctaatttatttctcacatactaatgacagatcataactaaaatatg

SEQ ID NO: 118317 - DNA, 540 bp, Homo sapiens
tactgcctacattttaagtagaattgattcacaaaagtacaaaacagtctcatttcaagttatctatctgtgtacaatttaagaagtttaaatcctaagtgttttaggacaaaatcctcatttttttattttagcaattttaaatgcacagaccatgtactttgctaactgtaaatctaggtaggcattgagacgactattcagggtatagttagcacacagtagttgatgacaaaactagatcttcctgtagckaggacctgataaaagtttcaggctcttgatttttggaattaccaggagaggtttactaataaagaattgtagctctgggtaattgttagagcctgggattgatggtcatcaggaaagagcgtaaagcttgataacagttggttaatttgatttgaagaagttgttgaaacagcatgcaaatgttcttaataaacccaagtatagagctagaaataacattatattgctgtttttttctcctaatttatttctcacatactaatgacagatcataactaaaatatg

SEQ ID NO: 118318 - DNA, 645 bp, Homo sapiens
taattttttttaattattttgcattgtcaaattctgtctaactccatgcataatgctactaattagctaccttggtcatctaaaaatttcttccatagtcaccttatgtatcactcaacattcttctttcccctgtgacacatttcctaaatagaattcttttcacttcaaatctatttttttctcaactccaattagcttcatacttcactcctatcaaacttacccctcctcattctatataaacaattttctttaaggtcaacaacatctaccttttgctaaattcaatggttagttctctttcttcttccttcactgctctgtgtcagatgctacagtaaaccacacattttgctctatgaaatatttttctctttatgcatctgcaataccatactcttcttggtgctttattagatgcttcttcttaatctcattgctggctgtttattcctttcacaaactcttattgtcaaagttccccaactctaactcttttcatcagtgatatttttatgcctcagattatgtgcctgccactgaatcccaaayctttatgttcagttctaacctcttctctgggctccagttttatattcaactgtgcactcaccaactccaccttgatcccaaaacgtaaca

SEQ ID NO: 118319 - DNA, 426 bp, Homo sapiens
atatgaatgtttaagatatacataccatggcaaattttgatttaatctactcttattcattgcaacctgtataccccttgtcagactcaccactttttagtgtctgattcagatgctttacactttttagttttaatacgaggataaacaatgttagtcaaatagatacagatatagaaaacagaaatacaaagtctctgtgagtgagagtcagatacataagtgtgcgataagaacaaaagaatacaaagacttcagatgagcaaatataaactatgttacctaaagataattcagcagactacgctcctatayacatttgcacagtttgtgctagtcccacccccacccccacctcaaatactaattattttcacttcttccattttttttattgtatacaaaaatggtcaaccaaatgtgtgg

SEQ ID NO: 118320 - DNA, 451 bp, Homo sapiens
agaagaattgtcttgggccacacataaaatacacaaacactatcaagagctgttgagctaacaaaaaaaaacaaaaactcatagtcttttaagaaagtttacgcatttgtgttgggccatgttcaaagccgtcctgggccacatgtggactgtgggccatgggttgaacaagcttggcctaaagacaaaagtaagctctcctgtaacaaatccacggtgcatcatctattgtgtgcattagagccctctttgctttaacacaagcaaggcttayggagcctccagtaagccagagataaacacttaagctaaatgaaaatatttttaaaattctctgagttctaatcattaaaatttaaaattactggaaaagttaaatagctggaaagctacatgattaaactgtataatactataaaagaaatagattgtaccttcatttttaaaatca

SEQ ID NO: 118321 - DNA, 659 bp, Homo sapiens
gcataaaaattaagaaaattaattaggtggtgctgatagacacaaggcagggacagcaacctcctttcaatttcatatacacttgcaaatggcaagatttactagccagtgacatatttttctttaaataattatagggttaagatttgggaggatttggatttcatctgatttgtagttgataaacctggagcagattgttggaactgtagtcattaagagcacatgttctgaagagaattgctgagtttcactcgcaggtgaaatttctgcttttcacctttactatcttgggaaatgtatttaccttatgataacccattttttaatcattgagttgtgtaaggattaaagaaaatgttaactactaattatttaaaataataccttatttctgcagggtgggccagcagtctggaaattcagggaagacccaatcttgcaggattttaaggtcagtctttgttccatccaggccttcaactgattagatgaggcccactcactttagggagggccatctgctttactcaaagtcyactgatttaaacattaatctcatccaaaaacatccttaaagaaacccagaataatgcttgacttcacatctctgctcagccaaattgacacaaaattaatcatcacaaccacttatattc

SEQ ID NO: 118322 - DNA, 607 bp, Homo sapiens
agacattacaacaacagaaacacaaaagattatgagactattttgaacaactatgcactagcaaaytgcaaaatctaaaggaaatggatgaattactggacacatacaaactactaagattgaatcaggaagaaatacaaaacctgagcagaacaataatgaataatgagattgaaatagtaattaaaagtctcctaacaaagaaaagcccaggttcgatgacttcactcctaattctaccaagtgcaaaaaaacaactaataccaattcacctcaaactatttcagtaaattaaagaggagcaattcaccatactcattctatgaggccagcattaccatgatgccaagaccagacaaggtgtaacaacaaagaaaactacaggtcactatccctgatgaacatagacacaaaaattctcaacaaaatagtagcaaacaaaatccaacatcagaccaaaaacagccatcatcatacttgatatttataccaggtatgcaaggctgattcaacatatgtaaattaataaatgtggtatatcacataaacagaatgaaggacaaaacccacatggtcatcttagtagacacagaaaaagcatttgatg

SEQ ID NO: 118323 - DNA, 607 bp, Homo sapiens
agacattacaacaacagaaacacaaaagattatgagactattttgaacaactatgcactagcaaattgcaaaatctaaaggaaatggatgaattactggacacatacaaactactaagattgaatcaggaagaaatacaaaacctgagcagaacaataatgaataatgagattgaaatagtaattaaaagtctcctaacaaagaaaagcccaggttcgatgacttcactcctaattctaccaagtgcaaaaaaacaactaataccaattcacctcaaactatttcagtaaattaaagaggagcaattcaccatactcattctatgaggccagcattaccatgatgccaagaccagacaaggtgtaacaacaaagaaaactrcaggtcactatccctgatgaacatagacacaaaaattctcaacaaaatagtagcaaacaaaatccaacatcagaccaaaaacagccatcatcatacttgatatttataccaggtatgcaaggctgattcaacatatgtaaattaataaatgtggtatatcacataaacagaatgaaggacaaaacccacatggtcatcttagtagacacagaaaaagcatttgatg

SEQ ID NO: 118324 - DNA, 679 bp, Homo sapiens
ggtgtggtgtcttgcatgtctgtgtgtgtgtgtgtgtgtgtgtgtgtgtgtgtgtgtgtgtgtgtgtgtgtatgaggaggagaatactgaagctaccacaaggatatagcaaccaaattgaatctcaacaaatatttaggaggcaaaggagcaagaaggaagaagagagtagagtttctaaggcaggaagttgagaggaaataatgttatataaaggaactgcaacaatgtcactaggagttgcaacactaagtcttaggtattaagagtaagagatgagactagagacataaacaggcactcttttgccatgttatgaacttggtctggatctgaaggggaaagaagggcttttgaagaacacaggaatgatgggctatgagatagggtttgacaattatctttgtcttttaccattcttatctttgcckaagttaaaaccagtagcataaaaatgaatttatccattgaaatattttttaatggtgactaagagacaaatgttcaaaagcatatagataagaggattatttcaaactcatatcacaaactttaaaaattatttcttgaaagcaatacgattaggattaaagtaaaaataacattgaaagttgacatgaaatttcctttccgatgataggggaaaggtatttaagacatttgtaaagggcatgataga

SEQ ID NO: 118325 - DNA, 679 bp, Homo sapiens
ggtgtggtgtcttgcatgtctgtgtgtgtgtgtgtgtgtgtgtgtgtgtgtgtgtgtgtgtgtgtgtgtgtatgaggaggagaatactgaagctaccacaaggatatagcaaccaaattgaatctcaacaaatatttaggaggcaaaggagcaagaaggaagaagagagtagagtttctaaggcaggaagttgagaggaaataatgttatataaaggaactgcaacaatgtcactaggagttgcaacactaagtcttaggtattaagagtaagagatgagactagagacataaacaggcactcttttgccatgttatgaacttggtctggatctgaaggggaaagaagggcttttgaagaacacaggaatgatgggctatgagatagggtttgacaattatctttgtcttttaccattcttatctttgcctaagttaaaaccagtagcataaaaatgaatttatccattgaaatattttttaatggtgactaagagacaaatgttcaaaagcatatagataagaggattatttcaaactcatatcacaaactttaaaaattatttcttgaaagcaatacgattaggattaaagtaaaaataacattgaaagttgacatgaaatttcctttccgatgatakgggaaaggtatttaagacatttgtaaagggcatgataga

SEQ ID NO: 118326 - DNA, 511 bp, Homo sapiens
ctgattctgtattttgacctgggtgatggataacaaaagtatgtacatcaataaaaaatacatccagtgcactttagattagtgcactttacacattttatacatgtatttttaatgtcaatttttwaaaaatctggtatggaatatacccccacaaccccccccccccaaaaaaaatgcaaagatgcaaatgactgccatttgggaaacactgatccaggcaggctcactagcagtgaccaaacacctgagaaagggtattgtgaatacctgatgtatgtgccaggaacttccatggttgaatagctccaaatctcagaaatgctcctaacctcgtgttgagctctggtgcatagatatattttcttttctttctttccttttttttttttttttttgaggcagagtttcactcttgttgcccaggctggagtgcaatggcacgatatcagctcactgcaacctccgcctcccaggttcaagcgattctcctgcctcagctgcccgagta

SEQ ID NO: 118327 - DNA, 527 bp, Homo sapiens
cttggggctcggcgcgcctcccactccgcagcccaacttggggccgtcgccgctttccggatggggggcgcccgccgcggatgccccgaacccttgccccgggtccccgggttggccgctggggcggactcacatcctcccctggggcggcggccgcggtgtggagtgcgccgcgaacaagtgctgcgggcgcgagggagcggttccccggggccgacgcggacggtaaacctgtccggcggcgcccgcctgctggggcctctccgctgtttctcgcgggcgcggcycggctgaaactgcgaccgtcggaggcgagcggcctctggacccgtgcagccggtccaccttgcagctatactttgagactaaacaattttttttttttttgcaaaggcaaaccggtatgtgaagttgaaaaaatcaaaaaccctcaaattttccttctttttttttttttttttttaaatcaagaaagggggtagataggtttgttttgttttggaaatagtttttatagcagagtgata

SEQ ID NO: 118328 - DNA, 594 bp, Homo sapiens
gcaaacttttcttctacaacttcattacctctctcattcttcatagaattgaagagaggtttggcctttttctggattagattttggctaagggaacgttgtgcctggtttcatctcctctacagtccactaaaactttctccatattaccaatatgggtgttttgctctctgattatttgtgtattcacttgaatggcacttttaatttccttcaataactttttatttgcttttgtaccttggctaacagtttggmtgaagaggtctggcttttggcctatctcattttttaatattcctttctcactaagcttcatcatttctactttttgatttaaactgaaaggcaacttgtcctctcttgaacacttagaggcaattgtagggttattaattggcctaatataaacactattgtgtctcagtgaatggaaggcctgaatagagggagtgagacaagggagtactgatcaatggagcattcagaacacacacatttatttattacatttgccatcttacatagatgtgcttcataccacctcaaaagaattaaaatagtaacatcaaagattattgatcatagatcatt

SEQ ID NO: 118329 - DNA, 594 bp, Homo sapiens
gcaaacttttcttctacaacttcattacctctctcattcttcatagaattgaagagaggtttggcctttttctggattagattttggctaagggaacgttgtgcctggtttcatctcctctacagtccactaaaactttctccatattaccaatatgggtgttttgctctctgattatttgtgtattcacttgaatggcacttttaatttccttcaataactttttatttgcttttgtaccttggctaacagtttggatgaagaggtctggcttttggcctatctcattttttaatattcctttctcactaagcttcatcatttctactttttgatttaaactgaaaggcaacttgtcctctcttgaacacttagaggcaattgtagggttattaattggcctaatataaacactattgtgtctcagtgaatggaaggcctgaatagagggagtgagayaagggagtactgatcaatggagcattcagaacacacacatttatttattacatttgccatcttacatagatgtgcttcataccacctcaaaagaattaaaatagtaacatcaaagattattgatcatagatcatt

SEQ ID NO: 118330 - DNA, 594 bp, Homo sapiens
gcaaacttttcttctacaacttcattacctctctcattcttcatagaattgaagagaggtttggcctttttctggattagattttggctaagggaacgttgtgcctggtttcatctcctctacagtccactaaaactttctccatattaccaatatgggtgttttgctctctgattatttgtgtattcacttgaatggcacttttaatttccttcaataactttttatttgcttttgtaccttggctaacagtttggatgaagaggtctggcttttggcctatctcattttttaatattcctttctcactaagcttcatcatttctactttttgatttaaactgaaaggcaacttgtcctctcttgaacacttagaggcaattgtagggttattaattggcctaatataaacactattgtgtctcagtgaatggaaggcctgaatagagggagtgagacaagggagtactgatcaatggagcattcagaacacacacatttatttattacatttgccatcttacatagaygtgcttcataccacctcaaaagaattaaaatagtaacatcaaagattattgatcatagatcatt

SEQ ID NO: 118331 - DNA, 537 bp, Homo sapiens
atgtgactttgctcctcattcaccttccaccattattgtgaggcctccctagccatgtggaactgtgagtcaattaaacctctttcccttataaattacccagtctctggtatgtctttattagcagcatgagaagaggctaatacagcagtgaaaggtccccaagacagtcacactgcccctgcctgaatattttacctgcaacctacagcttttctgaaaactcaacccccwcagccctgtgatattccctcaggctccaaacacctaagggttctgcgtgctcttgcctgagattttggctggtgacatggggatgagcacaccccccaccacagccagcacttgaactctaggctagcctaaccctggttcagcccctttagaacacatatatgctgtccagttagtcatctagaggtctggaaactggagaaatatctatctcctattctaactctgctgacacctgaccacttccttcagggcctgaggtcagcccaacccaactagccaacactaccatgaccaacaccc

SEQ ID NO: 118332 - DNA, 607 bp, Homo sapiens
tacccagtctctggtatgtctttattagcagcatgagaagaggctaatacagcagtgaaaggtccccaagacagtcacactgcccctgcctgaatattttacctgcaacctacagcttttctgaaaactcaacccccacagccctgtgatattccctcaggctccaaacacctaagggttctgcgtgctcttgcctgagattttggctggtgacatggggatgagcacaccccccaccacagccagcacttgaactctaggctagcctaaccctggttcagcccctttagaacacatatatgctgtccagttagtcatctagaggtctggaaactggagaaatatctatctcctattctaactctgctgacacctgaccacttccttcagggcctgaggtcagcccaacccaactagycaacactaccatgaccaacacccattcacgcaggcccaatggtggagccccccatacaagatgcagcagtactgccacatcagagaacaggtgagcctcaaagctaactgtatgaggttgagtggcaaggttatgccctgaaaccacttccagagagagttgcaaaaccagcattccctgtgtagatag

SEQ ID NO: 118333 - DNA, 552 bp, Homo sapiens
atcaagaaagattcctcaaaataatgagtcatctatgactaacrcacagacattacactcactgggcaaaagctgagagcacgccccttaagaattggaacaagacaaggctgcccactccaactgctcctattcaacatagtattagaaatgctaaccagaacaatcaagaagaaaagaaataaaaggcatctaaataggagaaaaagaagtgaaattatctctctttgctaatgatatggttctatacctagaaaaacttaaagatttcaccaaaaggctcctagaggtaataaatgacttcagtagtttcaggatacaaaatcaaagcatgaaaattagtagcatttctatgcacatataatgttcaaactaagagccaaattgataacgtggcattgtttaaaatagctgcataaaaataaaataccctgtatacatctaatcaaggaggtgaaagatatctataaaaagaagtacaacacaatgctgaaagaaatcataaatgacacaaatggataaaacatctactgctcatggattagaagaatc

SEQ ID NO: 118334 - DNA, 556 bp, Homo sapiens
atataattgctgtataaataattatagtgaccatgggaaaactcatatagagcactggggtcagaattatagataatccaagccaagactagggttattagcataattaataaatctgggtgaataaaacaaaaatattgatgtagtttataaaatatgaccatggtaaaatgttggaggggtatagtttttaacataacaaagggaatataactgtagggacaatggactgccctcatagttatatattatgacatttaacccatgcataagacctttattttaaccaaagwttcaattactaggtgtaatactgagtgctttaaatatcaatcatgaaatgctgtgtaaatgacttgagagaacataattgtgtgaacgggttttgctaataagccttgttcatccactgtgcccttgtagggcaaatcagccaaattcgaggtcaccaattcaagaattaagttttgaagtggaagaaaaattcaagaatcatcagttaaataagaggaatcaagggagtaaagcagagcttagttacttactcactaacccc

SEQ ID NO: 118335 - DNA, 590 bp, Homo sapiens
gtctgtagtggttacaagtttcttgaagaagactcaggaacaggggatattaacatgtgacagccagaaagagaaaaaaaaatactggactggttattaaaaacgactaaaatgattggtttctggggattatacacacacacacacacacacacacacacacacaaataraacttgtagggaaactgagattaggggctgtggttaggaggaggtaagcaaactatttgcaatttgggcattcttgttattcgtgttcttttaaaaagattttgtttttttaaagtccaagctgataaatttgtcaacataagttgaatttatattcacttggttaaaaaagaaaaaataccagtgctaaatttctatgactaagtagaggtgttttgtggcttttttgtgttagagtttgcgtatttctagtcatatataaacttgaggattagacttaaaaataaatttgcaaggactgtctgatggaaaaataactatgaattaagatatttttatttaatattattccttttcaatattttgtaaagggctataaaatagtaaatttagggttttaccttagggagtgttgggaa

SEQ ID NO: 118336 - DNA, 631 bp, Homo sapiens
ttgctgtgtcacatgggtttttgtttgttgtatttccatttttacttgtttcaaatttccttttacattttttcttactatctttgtcgatgcaaaggtaatttaaaagtatgttctttaatttacatgtatttgttaaattttcaaagtttcatttcttattgtagttttattcctttatgttctaaaaagatatttgatatgatttaaattaaaaaaatatttaaacttgttttgtggcctaatatatggtctgtcccagagaatgtttgcatgtgctgatgagaagactgtgtattctgctactgtttgataaaaggtttagtaaataaatttctgttaggtccatttaatctacagtgcaaatttagtctcacagttctttgcttattttctctctaaataatctgtccaatgctgaaagtgtagtgtagaaagtcccaactattaatgtattrgtgtctatctctcccatatatatatgtatgtgtgtgtatatatatatatatatatatatctatatatatagatagatatacacacacatacatatatatatatatataaacatacacacacacacacgcacatcttccaatgttgactgtgtgtatgtgtgtgtttacaattg

SEQ ID NO: 118337 - DNA, 568 bp, Homo sapiens
acccaggtttccagtacttctgactagctacaaatctaaagtttccattagccccacctctggttccataattttctagtatggctcactgaactcagaaaaaaaaaaaaaaaagaaaacaacttgcttatgtttactgtattttttaattaaaaaaagaatacaacacaagaacagccagatgaaagagatgcatagagtagggtataagggaaaggggtgcacagagattccatgctctctttggacacttcagctcctaaatatgttcaccaactcagatgctttctaaatcccttcatttagggttttttttwaatgaagctctcattacataagaataattgattcaataacaggtcattagtgaataactcaatattcagtcctcttctctggccacaagtccaggggtggggctgaaagtttcaatcctgtaatcccacggtctgttctcctggcaaacagcctccattctgaagctatcaaggtaccaccaagagtcattttattagcgtaaaatgagatatgattgaaaagagcttatgatgagtaacgaaagatgatt

SEQ ID NO: 118338 - DNA, 575 bp, Homo sapiens
attacatgcagtactacagaaatacaaagaatcattggagaatactatacgcaactatacatcaacaaataagaaaacccggaagaaaggaataaattcctgaacacacacaacctaccaagactgaaccaagaagaaagagaaagtctaaacaggcccaataatgggaaacaagatgaaagcaataataagtctctcaccagtgaaaagcctgggacctgatagcttcactgctgaaacttaagaattaataacagttctactaaaacaatttcaaaacaaaagaaaggaaaggaaaacttctaaacttattatataagaccagcattatcattatacaaaamccagacaacaatataattaaaaaagaaaactccaggccaatatttttggtgaaaataaatgcagaaatcttcaaaaaagaaaatactagcaaacaaaattcaacagcacatcaagaagataatacatgacagtcgagtatgatttatcccagggaggcaaggatgattcaatataagcaaataaataaacatgatacatcacattaacaaaatgaaagacaaaaaaccata

SEQ ID NO: 118339 - DNA, 592 bp, Homo sapiens
acttggtggtcttataaggggcctcccccttcactaggcactcattttctcttctgctgccatatgaagaggtgccttccatggcaattgtaagtttcctgaggcttctccagccatgcagatctgtgagtcaattaaagctctttcctttataaattacccagtcttgtgtatttctkcatagcagcatgagaacgaactaattcactagctcttctgtggtaacaaagaaccctaatatttcagtggctcacaagaacagacattgtttttgcacacattatatgttagtggccgtggatcaactaatatctttttactttatgagttttatcatcctgggacccaggatgaagtaacataccctatttaagacatgacttttagtaacagagggaaagagaacaaaagccaaccatatagtagctcttaaagtatttgttgggacatggcttacatcagttctgcttagcagatggctaaacccagggaaaatgaggtgaaagtatacactcccacaaaattatctctgaaagtcacagggttacatgcaagaatgtacagtccttttacaaagaagaggaaagcaaac

SEQ ID NO: 118340 - DNA, 592 bp, Homo sapiens
acttggtggtcttataaggggcctcccccttcactaggcactcattttctcttctgctgccatatgaagaggtgccttccatggcaattgtaagtttcctgaggcttctccagccatgcagatctgtgagtcaattaaagctctttcctttataaattacccagtcttgtgtatttctgcatagcagcatgagaacgaactaattcactagctcttctgtggtaacaaagaaycctaatatttcagtggctcacaagaacagacattgtttttgcacacattatatgttagtggccgtggatcaactaatatctttttactttatgagttttatcatcctgggacccaggatgaagtaacataccctatttaagacatgacttttagtaacagagggaaagagaacaaaagccaaccatatagtagctcttaaagtatttgttgggacatggcttacatcagttctgcttagcagatggctaaacccagggaaaatgaggtgaaagtatacactcccacaaaattatctctgaaagtcacagggttacatgcaagaatgtacagtccttttacaaagaagaggaaagcaaac

SEQ ID NO: 118341 - DNA, 559 bp, Homo sapiens
atactgggcagctgagttctaaagccattagttaacaaaaatgtattgccatacacactgggaaatattttattttcataaagatttaatgagcttaaaacccaccaacttacttaatattgtratagtgcttcacttcccagtactcactaacatttttcctgctttattgttctccaaaagacttacttactatctgccatatgataggttttaattaattgcttattgactttctcctccactatactataagctccattaagtgagcaatttgaatcagttttgttcaccactctatccccagagccgagaatggtgcctggcactagtaagatatcaatacatttttgttgaatgtaagtaattaaataaaaattaaatgaaagtataaaaaagaaggattgaatgaatactcccaaagatttaccttggactgtgcattggtgtgcatataaagcaagtcatgctgggacattgtcagtactaaatatctcacttgtgtttgattgaagtgatacagagaagaagagaaaatatcgataatactattgacata

SEQ ID NO: 118342 - DNA, 606 bp, Homo sapiens
aaatgtatacaatttattaagggacaaattaactctacagggttttataataagctgacatgaaaatgactaatggtttgccaggcagaggagaatgagacagacattccaaaaaagaaagaatatccacaaatccatggatgtccaagtgtgagaagactggtccgcccagatcatgtgggcacttatagscttcaatcactgtcttcacctccagtctacagatgtgtggctgttaaaatgggttcctgggaaccccagacgtcctgccagtgttgcaaacataaccctgtgaggcccagcatttgcaagaccagcaaagagaggtgataagcagacaaaatccaggcctctcatcatattaactgtgtgacattgggtaagggtccaaatctctctgtgcctcagtttccaccatatgtgccattgggaaaataagagtaactatatcactaggttgttgaggagataaattatttgaatatatgtaatgtttttggaacaaggcctggtgtagagtaaatttcatgtaagtgttagctaattttatgatgctaatcacactttaaacagaaggaatcttctttacctattttataccttcag

SEQ ID NO: 118343 - DNA, 606 bp, Homo sapiens
aaatgtatacaatttattaagggacaaattaactctacagggttttataataagctgacatgaaaatgactaatggtttgccaggcagaggagaatgagacagacattccaaaaaagaaagaatatccacaaatccatggatgtccaagtgtgagaagactggtccgcccagatcatgtgggcacttatagccttcaatcactgtcttcacctccagyctacagatgtgtggctgttaaaatgggttcctgggaaccccagacgtcctgccagtgttgcaaacataaccctgtgaggcccagcatttgcaagaccagcaaagagaggtgataagcagacaaaatccaggcctctcatcatattaactgtgtgacattgggtaagggtccaaatctctctgtgcctcagtttccaccatatgtgccattgggaaaataagagtaactatatcactaggttgttgaggagataaattatttgaatatatgtaatgtttttggaacaaggcctggtgtagagtaaatttcatgtaagtgttagctaattttatgatgctaatcacactttaaacagaaggaatcttctttacctattttataccttcag

SEQ ID NO: 118344 - DNA, 596 bp, Homo sapiens
tctctctgaccactgtgatttttaaaacacactttctttgaatggctatctttttcctttaagagataacctccacatttagaaacatagacactagaaggtctggcaaatgaaagagaattgtggattatttttccattgaatgatttaaaaataaataaaacaactttgattgacatctggtagattaaaaaggcaagatttatttcctacaaaataaagaaactgacacatatgtcagacacacgtggcatttctgatgtggaaagaaggaaagacatcaataagaccaattaatttactttctttagctttgtggcaagtcacctaactcgtcaatctgtgtgcaggcaaatatgtattacattgttctgtgctaggatggtattaaacattgccactttttaatttactctttattatactgacaggtaaacaaagcaacacgaaggctaaataaaagtcatttccccaaggtaagtttacratgttggttcatttacagtttagtggtcttgaaagtgaagagtttattttgtattgttcaactagcttgctttgctgtggatacacttgctcaatattagttataaatg

SEQ ID NO: 118345 - DNA, 594 bp, Homo sapiens
aattaacaaagccagaattcactactcttacccccagatagggccttaatctatgcatgaggcatttgccctcataacccaaacacctctcaataggccccatctccactacagggatgaaatttgaacatgagatttggaggagacaaacatacaaaccatggcatagtatgacacataattacagttttaaaatcctattcaaatctttaagaatcattcaaaagggatctatattaaaattgaattattaccaaaaataatgttcttactcccaaaataatkaatgaagtcacttaatgctatgatgaaatgtagcttcaataaatatgaaaaaaacataatgtggagttattttaaaacggctaaagctattttaattaaacattaattttttagagttggaagcaatcagttttggtaggtcatttgtacaccaaaaaatagaattcacaaactgaatttatataaaggtcaagcacaacacgcatcagttcaaaaatactaattagtgttttaccagtgattgcatgagaatatttatggatgcagaattgaatagtagagatcaaaaataagaagtgtgggtagatt

SEQ ID NO: 118346 - DNA, 599 bp, Homo sapiens
acttaccaatactagagttcaaataaattgaaaatgaaattttatgtccagatacctatgtgtcacatttttactatataagaccttcgcatatgaaagggtgagaagatatactttattactaagaaatcytagaactttttaatagagcacatgtgcctcacagcagatggtgcaagagagatactgacatttctccatttctgtatccaattttatctgttcagtttatataattttctccttagaaaaacaaaataataacattttctctctctttttcactgtcattaattccttactttaaatctccactgccttatcttcagaaagtactcctttttcactggttctcatgcagattattacttttcaggcactgccactggagtaacgggtgaaggaaaatagcccttcttggtcagtcttctatacaacagctaggaaataaagttttgcaaaatcaagatgaaaagccttttggaacaactttgtgctttattacattaaagacaaacaaaagtcaatgtctttccttgactttattaatattcctattatagactgaatgtatgtattcccctaaaatgtgtatgtca

SEQ ID NO: 118347 - DNA, 642 bp, Homo sapiens
aagtttgtgagttagtgttgtaataatatgcaatgcagaaacaaaatgttcagatattgtttatgagttggcaaaattaaaatgtaacaattttgccacttttgaaaaagaagataaaactgttatttgtctagaatctatagtggtctgtaactatactatggtttttacatacgtcatttttataattgaaattatactttatatcccattttgtagcaactaaaattggggtcacgtgggtaaagcaatttctcatttttataattttttatttccacatactttaaagcttatagcaaatttgcaagaatagtgttaagaatttccatataccctccaaccatatttctctattttaaatattattatatttgttctctctctcatataaatgtgtgtgtttatgtttatgtatgcataggtagtctgatatatatgtttttacatatatataaaattttcacgccctacttctcagcaaacttttaccatctattttggcatcagttgctgaatcttacttgaaataattattaatatgatgactgctaaatgacagtttgaaawatctccataattctatcattcctgtacatttattaggtataattccaccctaaatgaatatttttcctttta

SEQ ID NO: 118348 - DNA, 599 bp, Homo sapiens
tgtaatcccagctactcagaaggctgaggcaggagaattgtctgaacccaggagacagaggttacagtgagccgagatcacgccactgcactccagcctaggcaacagagcgagactctgtctcaaaaataaaaaaaacaaaatagtgctttttatgtcttgttaaacaaatctgtctstattgtaagtgcaagaaggttcgcctatatattctatgaaaaactttaaagttttgcctttaacattgaggccttaatccttctggagttagtttttgtgactaatgcaggataagagatttaattttgtttttttctatgtggataacttttttttcccagctttactttagagtaattcctccttccttcattgatctgtcatgcctgctcttatatattgaacttctatatatgtgaacattggataatttctctggctctgcaatgattatactgtcatctctattacagcttcataattactcttgatgtctgataaggaagtcttccttccttgttcatcagaagagtcttggccattctgggccctttccttttacaaatacagtcagctgtctggatctatcggttcctcat

SEQ ID NO: 118349 - DNA, 599 bp, Homo sapiens
tgtaatcccagctactcagaaggctgaggcaggagaattgtctgaacccaggagacagaggttacagtgagccgagatcacgccactgcactccagcctaggcaacagagcgagactctgtctcaaaaataaaaaaaacaaaatagtgctttttatgtcttgttaaacaaatctgtctgtattgtaagtgcaagaaggttcgcctatatattctatgaaaaactttaaagttttgcctttaacattgaggccttaatccttctggagttagtttttgtgactaatgcaggataagagatttaattttgtttttttctatgtggataacttttttttcccagctttactttagagtaattcctccttccttcattgatctgtcatgcctgctcttatatattgaacttctatatatgtgaacattggataatttctctggctctgcaatgattatactgtcatctctattacagcttcataattactcttgatgtctgataaggaagtcttccttccttsttcatcagaagagtcttggccattctgggccctttccttttacaaatacagtcagctgtctggatctatcggttcctcat

SEQ ID NO: 118350 - DNA, 599 bp, Homo sapiens
tgtaatcccagctactcagaaggctgaggcaggagaattgtctgaacccaggagacagaggttacagtgagccgagatcacgccactgcactccagcctaggcaacagagcgagactctgtctcaaaaataaaaaaaacaaaatagtgctttttatgtcttgttaaacaaatctgtctgtattgtaagtgcaagaaggttcgcctatatattctatgaaaaactttaaagttttgcctttaacattgaggccttaatccttctggagttagtttttgtgactaatgcaggataagagatttaattttgtttttttctatgtggataacttttttttcccagctttactttagagtaattcctccttccttcattgatctgtcatgcctgctcttatatattgaacttctatatatgtgaacattggataatttctctggctctgcaatgattatactgtcatctctattacagcttcataattactcttgatgtctgataaggaagtcttccttccttgttcatcagaagagtctyggccattctgggccctttccttttacaaatacagtcagctgtctggatctatcggttcctcat

SEQ ID NO: 118351 - DNA, 481 bp, Homo sapiens
gtacattcaattcaccagtcacatcacaagccctagtattccattggccaaagcaagttacatattaagttcagtagcaataagacaaggaagtatacctttcctgtggagttctaggggtagtggtagtaaatatttctggattttcaaagcaactgtagacaaggagacaattatttattttctataagctaaccatgaaacctaattattaaaatttattttctcagtttttgtgcaaaaagccaatgtggaaatctggaattacatacattatttcctttagcaattatatttcttactattaattttctgaaatcagaaacaaataaatttttagccatacttgggtctgaatgactctctgatattccctgcggatcagacaatgactgatacactttgtgttacatatgcctyatattctgaacaaaggatctatataatgtttcttgcagaaattaataggccaaaggaattc

SEQ ID NO: 118352 - DNA, 576 bp, Homo sapiens
cctgggttgtgggttattcaatctgcagtgctaatgtactcagttaaacatggtagatttacatacctacagtcataggtatgtatctgaagaggccaactgatatcatgaataataatcatttcattttgccatttatctagtgaaaatctggattctgaaagccttatatgatttttctcaggtgctcaatattaatgaagaagaagaaatttatatgaattacttaggcttataggtaattgaaacagagtctgccaaaagtagaaatggaactctgaagtttgtattttaagatacatgtttttttccaaacgggtttgttgaaaaaaactatttctaaaaaggtcttaaggcaactaatgtttattctttactgtactgaaatgtgtaggtcattatatatccttagtgtggcaagtataataacaaaaactttrtaaataatgattggaaaagaataatggtgatgtgctttgagcttgtttaaagaactattctgtggttccagtttaagtagctttctattcatgtttatactactatataatttcaataatatagaatgttaagctg

SEQ ID NO: 118353 - DNA, 576 bp, Homo sapiens
cctgggttgtgggttattcaatctgcagtgctaatgtactcagttaaacatggtagatttacatacctacagtcataggtatgtatctgaagaggccaactgatatcatgaataataatcatttcattttgccatttatctagtgaaaatctggattctgaaagccttatatgatttttctcaggtgctcaatrttaatgaagaagaagaaatttatatgaattacttaggcttataggtaattgaaacagagtctgccaaaagtagaaatggaactctgaagtttgtattttaagatacatgtttttttccaaacgggtttgttgaaaaaaactatttctaaaaaggtcttaaggcaactaatgtttattctttactgtactgaaatgtgtaggtcattatatatccttagtgtggcaagtataataacaaaaactttataaataatgattggaaaagaataatggtgatgtgctttgagcttgtttaaagaactattctgtggttccagtttaagtagctttctattcatgtttatactactatataatttcaataatatagaatgttaagctg

SEQ ID NO: 118354 - DNA, 517 bp, Homo sapiens
tctgagatgggaggattcagctaccttggcctcccaaagtgctgggattacaggggtgagccactgcaccaggcttaacatgtttaggtgttttatatcagaagacatttttctggtcctctatttcaggagttggcaaacttctgtaaagggccagataatatyctcagcttcatgggccatgtgatttctgtcccaactactcaactaattcacatttcctgtcatcatcagcatcacttgagttctaatcttttattattatttaagtagtaggaaatcttctagctgtcaagatacaaaagaccttcaatgggagtgtcagactctaaaagataaagctcaaactccctcccatatttgaatatgaatttaaagctaatatttgctgagcgcttactgcggttcaggcactattctaagtgcctttcctacgttaacctctttacatctcacaatggtatgaaagagaatgaccattataatctccatttggaaactgaggctcagttacata

SEQ ID NO: 118355 - DNA, 517 bp, Homo sapiens
tctgagatgggaggattcagctaccttggcctcccaaagtgctgggattacaggggtgagccactgcaccaggcttaacatgtttaggtgttttatatcagaagacatttttctggtcctctatttcaggagttggcaaacttctgtaaagggccagataatatcctcagcttcatgggccatgtgatttctgtcccaactactcaactaattcacatttcctgtcatcatcagcatcacttgagttctaatcttttattattatttaagtagtaggaaatcttctagctgtcaagatacaaaagaccttcaatgggagtgtcagactctaaaagataaagctcaaactccctcccatatttgartatgaatttaaagctaatatttgctgagcgcttactgcggttcaggcactattctaagtgcctttcctacgttaacctctttacatctcacaatggtatgaaagagaatgaccattataatctccatttggaaactgaggctcagttacata

SEQ ID NO: 118356 - DNA, 517 bp, Homo sapiens
tctgagatgggaggattcagctaccttggcctcccaaagtgctgggattacaggggtgagccactgcaccaggcttaacatgtttaggtgttttatatcagaagacatttttctggtcctctatttcaggagttggcaaacttctgtaaagggccagataatatcctcagcttcatgggccatgtgatttctgtcccaactactcaactaattcacatttcctgtcatcatcagcatcacttgagttctaatcttttattattatttaagtagtaggaaatcttctagctgtcaagatacaaaagaccttcaatgggagtgtcagactctaaaagataaagctcaaactccctcccatatttgaatatgaatttaaagctaatatttgctgagcgcttactgyggttcaggcactattctaagtgcctttcctacgttaacctctttacatctcacaatggtatgaaagagaatgaccattataatctccatttggaaactgaggctcagttacata

SEQ ID NO: 118357 - DNA, 596 bp, Homo sapiens
tcttacattgctaatacattttaattaatgcaaattatttacaaatatttacaacattgagactctctttggcgttggtgtgaattacggaataatagaatcgacattgactgggcggccagccaactccattctcsaccagattcttcaactaaactgggtgcataaactttcacaaattacttagcttctgtggttttctagtacagaaaatgggtcagtggacaagattgtctttttcattccttccatctctgaaagctgtaatttttatatgtttcaaaatggtagcaatgtgtcatgtgtctttctggcctcacatacccatcatatatgcaagccactgcagcttgtgcaataattcctcctgcaaatataacatcatattctgacctctagatatcttggagctgtcaccctatctccaaggtaggtccaccattcacttttaatggatcctaggttcagacttacagaagaatgggaaacagcacaaatccactagtaactaactaacctaacttcacacatcacggttatcattcctaaactagcgaaagagcatggaaaaaagggtgtggacacaaatgccttct

SEQ ID NO: 118358 - DNA, 501 bp, Homo sapiens
ccggggttactttaaatgtgcattactgaatttctcacaaagtaacagaggtaggaagttcatgagtatttctagaagaggtttaataaagtcaaacctataatccatctggtcactagcaacacgagccattaggaattcctatgcccctgaaacaaccaccttccccacaacccgcctcgtgcaccttttgcttcccaaggtgcctctttggtgcagcatcaccctctttctcatggaagtgatcttctgaaggcacagggctggckctctctgacagacatcagaatgctgtctgctaataaccaagtggccatcctaggcttgacccagctacacttctggttattccatccgagcaggatcatatcggggttaggaagatagacctcttatttcattgcagagggagaaaatgaggcagtgacttggtcaaggtcattcagagtaggtgacagccaggaatatcacccaaaggtctttggcttccaatcacagtac

SEQ ID NO: 118359 - DNA, 608 bp, Homo sapiens
caagcatctcttttatctctgcagaattctaactaacttctgcagatctgttttccagttcccatagttctctcttgagaatttatgctatttgctgtttaacatttccactggggttttaactcaatgttttcactctagaggctttatttgattctttaaaaaataatcccttttaagatgtattctgtcttattctttcctttgacatctatttcttcttttagcccttcaatcactttagacatttctattataatctcttctattatttgaattctcatgttgagaatcttgtgtttgttgtgatcgctgactcatgttctaatttctacatgcttggtaatttcctagaacaagctcatcatctgtgggcatcctaggattccaaaaggcctgtactgtgcaagggtcactctagaaaagttctgcctttgttctgcaagcaaraagcttcaggggtatcgccagtctgctggctggtctggtgccagctcgggcattcctgcaacatgtagatgttataaacacagacttagaacttggatgttttccactgttcacagaagacttcctccaacacaatccagagtgtggggcaatgatca

SEQ ID NO: 118360 - DNA, 592 bp, Homo sapiens
atcaatcagtttatcaccatccaaggctcaacctagttttatatcccaagctatactttatacaggttttctcttatgtagatgaatgtacagtctccttgtttttcagttgtacattgaagtagtctgcatgttttcaggttctggtgtatagacactactaaagaagccttttgtctacagatatccctggtgaaatatctcaagggtttataacatttacattcttcttgagctcaaaagatttccaytcacagagggaatgtgttctggtgctgtcctttaagcttcttgtggcttgcagtgtagtggtgtaaatactagcatactaatacatctattgcgtctgtgttccactttaccaattatggggacaaggcaggtggggcatcaatagtgctggatgaaagcccatcaggtggtgttggtgagttttttggggcaactcagcttgcatgagagttacacttttctacatctactaaaggttcctgaaatttaaagcaaattgatagagttgattttaatccttctattttcctgcaattggagtttatggaaaatcacatactaaactgtagctaatagcatt

SEQ ID NO: 118361 - DNA, 578 bp, Homo sapiens
gagggaaggcgagagagagagacagkgagagacagagagagagagagagagaaagaaagagagagagagatctcaaatgcagtatctattgaagtattgaggtataggattattgaataaataaaacttaatgaaggcatatgctcattaattaggtagggttttcgaaaaaaaggcgaataatatgactcagtagcagttatttctatagatctctgtaaaaagtctcttatgataattgctagttaaaaagttgttaacaacaataacaaaatatgggctaataatcacaggaggcaaatataaatgtaaatggcatggtctgaatgtcccccataattcatgtgtcaaaagtttattactgttgtggtggtattaagaggtaaagccttttgagagatgattgtcgtgaggcctcagccctcatgaaaagattagtgacttatcaaggggctggagggaaatagcttagacccctttttgctcttccaccatgtgaggacacagcaagtagggccttactagatattgaatctgccagcaccttgatctggatttctcagcatccagaactgtga

SEQ ID NO: 118362 - DNA, 596 bp, Homo sapiens
atattcaaagtgaagattattatgtgggtgtttaaaaataccaaacagcaacttttaatatcaaaaatatggatgtttgaaatgatacaatacatctcacagagttgggaagaatgcctggcagaagtcctctggatatgactgagtgagctttatactgaaatctcataaggatgaagaagaatgtttataaaatatcagagaaccacagaactgatagataaagtagaaaaaagggtggaaaggggacttttcataagattctctaaaaataaaaagtgacaaacaacacttatgacttaagatattacaagtcgatgcacaaagtatggaaaataaaaagtaacctttacatttttaaatacaagaatttaaatatgatcttaaatttcagggtataagacctgtggcaagaacgtggaaataaaaatttctgatttggagttgaaacatgggtggaaagaattttrgtgataaaattaagattattaatcaaagtgatattactatatgtgcatatgtcattacagtgtatattacattgcattgtagtcactgttcaaatatcaattttctccactagattgcaagtttca

SEQ ID NO: 118363 - DNA, 331 bp, Homo sapiens
tattcttttcacatttatcagttgctagtctactgttaggaagagccttcccctattccccatttatttatttgtttattgtttatcagtatgcamtcatgaactcctgttactcactgtgttttaacccattatactccttaaattttgatgaaggtattacctacatgcatgcaagctggcttctgtgtccttttaacacacctctttgggatttttatttgtttggggttttttgtttctgtttttgtcttgagtacttcctgaacaataagctgttccagactcatacttctgatagaaacagggggcagagaaattctaggtggaa

SEQ ID NO: 118364 - DNA, 586 bp, Homo sapiens
attcttgcctatagcaatttgttctgtgatggttgcaaaatgatgtttttccaattccactattcttttcacatttatcagttgctagtctactgttaggaagagccttcccctattccccatttatttatttgtttattgtttatcagtatgcaatcatgaactcctgttactcactgtgttttaacccattatactccttaaattttgatgaaggtattacctacatgcatgcaagctggcttctgtgtccttttaacacacctctttgggatttttatttgttyggggttttttgtttctgtttttgtcttgagtacttcctgaacaataagctgttccagactcatacttctgatagaaacagggggcagagaaattctaggtggaaagacagtgagaggtgaagccagctggactctctgggtcaagtggggacttggagaacttttctgtcttactagaggtttgtaaaaggcaccaatcagtactctgtaagaacgcaacaatcggtgttctatagctagctagaggtttgtaaaatgcaccaatcagtgctctgtaagaacgcaccagtcagcactct

SEQ ID NO: 118365 - DNA, 567 bp, Homo sapiens
cttttttgcctactttattttttcttcatgtcacccagatgtatgagcagtaacagattatgccactccaaaatatacctcttgggcatatcaattattttgagctaaaggtcattgagaaccagcagactcaagaaaacctctaaaacagggcccaagttttccctttgtaaataaaagttacatttattttttaaaatcccattcgtagrgatgtcgccctcttctttaccagggaaggaaggagtcttagcttttattggtggagaaatttaaatttgcacaataaaacttatttaaaaactcttgttcaccagactttttttttcaacttttattttaggtttggggatacatgtgcaggtttgttacatgggtatatttcatgtggctgaggtttgatgaatgaataatcccatcacccaggtaatgagcatataaccccacagggagtttttcagttctcaccccctcctgccccaccccctctgtagtcccctgtgtccattgtccccatctttatgtccagtaaactcaatgctccacacttgtcttgatcaccttcct

SEQ ID NO: 118366 - DNA, 460 bp, Homo sapiens
gaattcaatagaatggaatcaaatggaatggaatggaatggaatggaatggaatggaatggactggaatcgaatggagtggacyagaatggaacagcctcgaatggaatggaatggcatggaatggaattgaatggaatggaatgcaatggaaacgaatgtaatcgaatgaaatggactggaatggaacatactggaatggaatggattcgaatggaatagactcgaatggaatggattcaaaaggaatggactcgaatgatctctaatgcaatgggctcgaatagaatttactccaatggaatggactcaaattcaatgcaatcgaaaggaatggagtcgaatggaatggaatcgaatggaatggaatcgaaaaaactggaatggaatggactcgaaaagaatggacaagaagggaacagtcgcgaatggaaaggaattgaatggaatggagtggaacg

SEQ ID NO: 118367 - DNA, 432 bp, Homo sapiens
ctcaaaaggaatgtaattgaatgcagaggaattgaatggacttgaatagactggactggaatggaatggactcgaaaggaatggactgtaattgaacggtctcaaatggaatggaatcgaatggaatggacttgaatggaatggaattgaatggcatggaattaaatggaatggaatggactggaatgcaggggaatgggcttgaatgtaatggactggaacagaaygaacttgaatgaaatggacccaaatgaaatggaatcaaatggaatggaatcaaatggattgaaatttaatggaatggaagtgaatggaatggaatcgaatggaatggaatggtatggaattgaatgaaatggaatggaaaggaatggaaaggaatggtctcaaatggaatggaatggaatggaatagaatggacacgaaggtaat

SEQ ID NO: 118368 - DNA, 436 bp, Homo sapiens
ttttctgtattcatttagagatgatttacatttatttaatgatagaatgggaatacaatgggagggaagcaatgactgagacaagccacaaaaacacatctagccttgagatttgcaacgaatattcccagccaaatgagtctgtttaatgtgttttcatgcatgcaagtttatctgcttagctcaaactgtttgaacttacagtcccatcatagttatttccaatatttttgaaaacaaacatatacttacacatattttaaaaaatcaccaytctgcaatatttctgttgaatcagaccttacattatgttgtttaataaagtatggtaagttttggcatgtatgatttttatcatataagaagcataatttcttagccaaaaatttagcctttgactctttagtagaaagttgagttctgtacattgtgttct

SEQ ID NO: 118369 - DNA, 502 bp, Homo sapiens
tccagaaaagataaatgtatagggacaaaaagtagattaatgtttgcaaggggctggggctggaagctggtagtgactgctaatgggcatgaggaatcttacagtratggaaatgctctaaagttggattgtagagatggctgcacaactcagtaaatgtactaaaaatcttttaactttaagtcaaaacagatacattctatagtatgtaaattatatttcaacaaagctgttttaataaaaaaggaaaaatgtttactatatcggcttagaaacatgcctcatttctaggaaataaaagaggtgagagatgatttactttgagaaaagacattgtgtcacctatgaaattttattaggcacagagtcatattttaaggtagatagttctgtactgctgaaatagtaattttaatgtctttatattgccacatgttaagaccataatgtagttataaatggaaatgtttacacctgaagtattttcaaattaaaatttaat

SEQ ID NO: 118370 - DNA, 400 bp, Homo sapiens
aagagtctcactatgttgctcaagctggattcaaactcttaggctcaagctgggactacaggaatacaccactttgcccagcttcaaaaaaacatttttaaacatgttcaggccttattaggtctattacatcaaaatcttcaggggaaagcctacaattgtaratttttaacaaaatgtcctcaggtcactgtaatgcacaattctgaaaattagtgcagcaatcacttcagtctcacctttcacccacatggctaattcctttatcagttggagatgtggccaaaaagagaaaagagtaagagagagtgtcatttattaaaactccagttaagtttcctggctatgggtaaaacagggacaagtaaactcaaaatcccacttgattttgctatttaca

SEQ ID NO: 118371 - DNA, 620 bp, Homo sapiens
  misc_feature (1)...(620): n = A,T,C or G
nnnnnnnnnnnnnnnnnnnnnnnaatgttccatgttatctttccactgagtagtgggaaccagcttgcagttggcccctcaagtaatgtgtctctataatcatgaaaatctcctgggctacttgcagctcttcctcaagttttmaatatattttaaaattctacctcacaggaagccattcaataaaattctctgaatctgaagtaagtgagttggatttaatagagctaagcctcatccatgactcatgagtatccatgtatcaaacagggctttgtacttatttcaacagcacatattttaaaattggatcaatacagagcagataagcatggctactgcctagggatggcacacaaattcagaaaacattccatattttacatagtcccaggaaggccatttgactatttgttgagtagctccaaggaagcagtgtgagcaaaaccaaaacaggtgacacgcaatattgaaattgtgattatcgctatgaaactattgatgtatggtgatctctgaaatgggaacagagctgagtaataaggggatgttacatgttgttagtacatgtcttggaaatgagaaaatgtcaacttgcatttccttcatggaactgaaaa

SEQ ID NO: 118372 - DNA, 620 bp, Homo sapiens
  misc_feature (1)...(620): n = A,T,C or G
nnnnnnnnnnnnnnnnnnnnnnnaatgttccatgttatctttccactgagtagtgggaaccagcttgcagttggcccctcaagtaatgtgtctctataatcatgaaaatctcctgggctacttgcagctcttcctcaagttttaaatatattttaaaattctacctcacaggaagccattcaataaaattctctgaatctgaagtaagtgagttggatttaatagagctaagcctcatccatgactcatgagtatccatgtatcaaacagggctttgtacttatttcaacagcacatattttaaaattggatcaatacagagcagataagcatggctactgcctagggatggcacacaaattcagaaaacattccrtattttacatagtcccaggaaggccatttgactatttgttgagtagctccaaggaagcagtgtgagcaaaaccaaaacaggtgacacgcaatattgaaattgtgattatcgctatgaaactattgatgtatggtgatctctgaaatgggaacagagctgagtaataaggggatgttacatgttgttagtacatgtcttggaaatgagaaaatgtcaacttgcatttccttcatggaactgaaaa

SEQ ID NO: 118373 - DNA, 553 bp, Homo sapiens
ttagtaaataaataactacagttgacccatgaataatgtgggggtgagggactctgatccctgtgcagttgaaaatctgagtataacttttgattccttcaccttagctactaatagcccacaattgactggaagccttcctgataacataaacagttgatgaacacctattttgtttgtgctgcattattatatactgtgttcgtacaataaaataagctagagaaatgaagctgttagaaaggaaatcatcaggaraaacatattgacttttcataaagcataagtagtcctgacaaaggtcttcatgatcttcaggttgattaggctgaggaggaagaggagaggtggatcttgctgtctctctgttgcagaggcagaagaaaatctgcatataagtgaatccctgcagttgaaacccttgctgttcaagggtgaactgtattacatattgatttgtgtcactaagaaagtaactatctttagaaccgggaactcagcaatccctttctggtaccgtaaataaatggcaataagaactgtagaactgaac

SEQ ID NO: 118374 - DNA, 393 bp, Homo sapiens
aaagaattctctgtaaaatgaagatgtacttttcatctcatgtgtatatataactgatatatataacatatctgttatatatgtatacatatcagtaatatatatatatatatatcttacgatatataataaacaacataggccaggcgcggtggctcacacctgtaatcccagcgctttgggaggcggaggcaggcagatgacttgaggtcaggagttcgagaccagcctggccaacgtggtgaaactaaatatacaaaaattarccaggcatgctggcacctgcctgcaatcccagctacttgggaggctgaggttggaaaattgcttgaacccggcaggcagaggttgcagtgagccaagattgtgccattggacaccagcctgggcaaa

SEQ ID NO: 118375 - DNA, 539 bp, Homo sapiens
tatcaaacttgtcataaaccccaatattttgatctcttatagaagagtctgtactcctatccaatccagtgttgtttatcttcaaacttggacttcccctgctcattccattcttatctacttccattgggttcaccagctaattccattctcattctacccacagactcactcccgtttgtattattaaaacacacrccaataggatataaaaagaagcaagagtactgggctttaacatgagttcaaatctcatttctgccaattcctatgtctaaaaaaaagcatcctaatctctttgagcctcacattctctatctagagaatcatttgaccagaatgttcaacacaggtaaaaatactagaaggtattttaattcattccaagattccttaaaattctgtaattctatgtcctcttgatactatctatagaaaaacttagaatacatagctagcagagtttgaaaaaataatagaacaaaagaaataccaagaaaagcagagaagaaagttttaaaaaatgcagacaagattat

SEQ ID NO: 118376 - DNA, 539 bp, Homo sapiens
tatcaaacttgtcataaaccccaatattttgatctcttatagaagagtctgtactcctatccaatccagtgttgtttatcttcaaacttggacttcccctgctcattccattcttatctacttccattgggttcaccagctaattccattctcattctacccacagactcactcccgtttgtattattaaaacacacgccaataggatataaaaagaagcaagagtactgggctttaacatgagttcaaatctcatttctgccaattcctatgtctaaaaaaaagcatcctaatctctttgagcctcacattctctatctagagaatcatttgaccagaatgttcaacacaggtaaaaatactagaaggtattttaattcattccaagattccttaaaattctgtaattctatgtcctcttgatwctatctatagaaaaacttagaatacatagctagcagagtttgaaaaaataatagaacaaaagaaataccaagaaaagcagagaagaaagttttaaaaaatgcagacaagattat

SEQ ID NO: 118377 - DNA, 539 bp, Homo sapiens
tatcaaacttgtcataaaccccaatattttgatctcttatagaagagtctgtactcctatccaatccagtgttgtttatcttcaaacttggacttcccctgctcattccattcttatctacttccattgggttcaccagctaattccattctcattctacccacagactcactcccgtttgtattattaaaacacacgccaataggatataaaaagaagcaagagtactgggctttaacatgagttcaaatctcatttctgccaattcctatgtctaaaaaaaagcatcctaatctctttgagcctcacattctctatctagagaatcatttgaccagaatgttcaacacaggtaaaaatactagaaggtattttaattcattccaagattccttaaaattctgtaattctatgtcctcttgatactwtctatagaaaaacttagaatacatagctagcagagtttgaaaaaataatagaacaaaagaaataccaagaaaagcagagaagaaagttttaaaaaatgcagacaagattat

SEQ ID NO: 118378 - DNA, 547 bp, Homo sapiens
tatttgataggaatagcattgagtctgtaaattactttgggcagtatggtcattttaataatatttattcttcctattcatgatcatagactgtttatccatttgtttgtgtcatctctgatttctttgagcagtgttttacaattctgattgtacagatctttcacctccctggttagctgtatttctagctattttattttttctgtggcaattgtgaatggggttggcttcctgatttggctcttggcttggatgttgtttgtgtatggaaatgctaccgattttyatatctcgatgttttatcctgaaactgctgaaattttttattagacttagaagcttttgggcagagatcatggagttttctagatatagaatcatgtcatctgcaaacagggatagcttgattttctgtcttcatttggaatacttttattcaatactatgtcttgtgccagttttcaaggggaatgtttctagcttttgcccatttggaatgatgtggctatgggtttgtcatagatagttttattattttaaacta

SEQ ID NO: 118379 - DNA, 583 bp, Homo sapiens
gttcctacataaaacttccagcaagtttccttaaaaagagcatttgttcctttcttcacacctccttttttccctgctggctgggatttagatgtgatggttaagcaaccacattgaactatgaaatagaagctgtacattgaggatgcagagctacaaaatatccagcatttgggtccctcacgcttctgagctttcatatttgcctcagactgctttgttcctgtatcagttatccagtgctgcaataatactgagtaagaaaggttcataaaaataagtatttttcacacatatatgagatttagctgatcagaagctagsctccctcatgcttcctggaggccaattgggagttggctcatctaagctgggttcaaatagagtaactggtataactcagccctgctctatgtgcctttcgtccttcagcagaccagctgggcacaaccctgtcatggtaatgataaaaccacaaatgagccagcagaaacagcacgacatcttaaggtttaggcttggaacttgaataccagcacttctgcctcattctattggccaaagcaagtcacaagacaggatt

SEQ ID NO: 118380 - DNA, 600 bp, Homo sapiens
ttttagtaaaatatttccctggctgctttaacttatgcaaatccaaactgaagaaagcaacatgatgctaattaaagctgtagctcagagtttgccaaaactgctggctttgatgaacgagcctttcaaagcctcccaagctcatggatgatctaccagtcagcatgcacctcattcaaagactctctaatcaaagagatttattatgtgaccaagaagtaaatctcgaattattttaaaagaataattatgatgattactaagcaacatttatttttaaaaattcaaaaattcctagacacttatacaaaatcataaaaagatgtagaactctccagactttctgtgacactattggataaaatcctggtaacctctgctcccatctggtggctctgagaaacaagaagttggtctctatcaaggctttcaaggtatttgatggcagatctagtcattgaagakccaaagattgatggacccaaggagactgaattattcagaaatttcagatcaagagcaaaaaatgacaatgtgaagttatttgttctggagttgaatgtgctctgtctacttagaccacaggccaagtgtgggaga

SEQ ID NO: 118381 - DNA, 391 bp, Homo sapiens
atccgttttacctttttttcccccacaacatccaacagtgtctgggatatgagatatgcaacattaatgtaggtttaatgaacaaactgtgtctccatttatatgtagtttaacatttaacaaataatgccgttctcaacatgaagtttgtttgtatttttgtgtttaataattccttcttgtaattccgttagctaaagaataactcaaatctttttcaatcatcagataattgaatatcatattktgatgttatgtttatgctataataagaaggctggggttatgcccattaaatacttctcctgatgaaattttttagcaaggtcactccttatggctaacattttcttatctttgtaaaaataacaaagaagtccctgtttgttca

SEQ ID NO: 118382 - DNA, 552 bp, Homo sapiens
catttgccttacaaaaacccaactaagccacacaatgcttaagcaatagagaattccacattagtgatgcaaaattaaataatttacttttactccttgctttcatttttttgttttgttttgttttgtttttttgtttttttttttttgagatagagtatcactctgtcctctgttgtccaggctggagtgcagtggagggatctcarctcactgcaacctccgcctgttttatttattaatttctatgataaataaatatttcctgttgtatttattaatttctatagtagaatatgatgtatttttattgtacctcttccttatccttatacctacagagaagtcattaaatattgattggataaataaatgattgaattaatgaatattaaactctcaataaaaatttctaaaagtttagttgttagtaatccagctctgcattcaattatgtgtagtttggtcttgctaaaactctaacacttctggattactgctactggttattctgctctccagataccgcatcctattttaccaagctccttc

SEQ ID NO: 118383 - DNA, 651 bp, Homo sapiens
tttgaaactctcaaagggcaagctgcagacagcttcacggcccaggtttcatcacaggtgcatcccattatcacctatatcctttacattgaaacaccaagaaagggcctagccacccgacggcggcaatccactctggccagcatttacatctcaggtgatgacagagatattgtgattagcgaatgccagcacaaaaagccaaacaccattgttaaaaacagaagccagttcactaggtacaacagaagcactagtggtaattttcaagaattgatgaaactaccaactgaagtatattcatttaatcattcaatcatttcatcattcatccattaaatatttattggacaccccaagttcttgtttgaggtattatatagtcctacagctttggtgtcttagtatcataatatgacacatatattggtgaaaataagccagtacaaaacaataacaattatgaaccatatcatcacctctttacyccatgttctggctatgcctggccttttatgtgggccatgtttataactatttcatatatttaagtaatttaagttgaatcctttgcttatgcataactatttcactgatagtcaaactataacatgtgcgatttcttgaagcattgctctcaaaataaaaata

SEQ ID NO: 118384 - DNA, 651 bp, Homo sapiens
tttgaaactctcaaagggcaagctgcagacagcttcacggcccaggtttcatcacaggtgcatcccattatcacctatatcctttacattgaaacaccaagaaagggcctagccacccgacggcggcaatccactctggccagcatttacatctcaggtgatgacagagatattgtgattagcgaatgccagcacaaaaagccaaacaccattgttaaaaacagaagccagttcactaggtacaacagaagcactagtggtaattttcaagaattgatgaaactaccaactgaagtatattcatttaatcattcaatcatttcatcattcatccattaaatatttattggacaccccaagttcttgtttgaggtattatatagtcctacagctttggtgtcttagtatcataatatgacacatatattggtgaaaataagccagtacaaaacaataacaattatgaaccatatcatcacctctttactccatgttctggctatgcctggccttttatgtgggccatgtttataactatttcatatatttaagtaatttaagytgaatcctttgcttatgcataactatttcactgatagtcaaactataacatgtgcgatttcttgaagcattgctctcaaaataaaaata

SEQ ID NO: 118385 - DNA, 519 bp, Homo sapiens
tgtgttagatgtttctttcagatggaaatgtgccttcttcatctagatactcaaggtaatgtaggatgagtcaaagataaatgtagaccagaagctcattagaccccagagctggcaaagacattstgatataaaaacagaataaaccccccaaatcataccaacctcaatatgacaggggagggagtctatgtctgcctcaatgtagcaattggaataatttaatctggtcataagagatgattgtggctaagaaaagaagacagagagatctcacaagttatgctagtcatactgctatcttccggtcaagagtttggtcaatataggagtacttttaactttttctttaaatgttagtgaaagtttcttttgtaaaagtcaaaccttgtttctacctgagttgacacaaagcaagatggtaccatctaagcagtgttaggaggaaaatcagagccctttaagaatttaagtccagtggtagacatgaggacactggtttaagacagaaaagaatgg

SEQ ID NO: 118386 - DNA, 561 bp, Homo sapiens
ttgccctgtttttgacatttcaaaggtatctatttttatagcagcggctttattatataattattttatcttagataatcttaattattttctagagttaagcaggataaaaaagtaaccttgtgtatcttggcataaatataaacttatatcacaggcaattaatttgaattcagtgagaaaaacgcatggatatacatccttgtatcctaggtaagagaagacttctgaaataaaactgcaaaaaccaaaaaaaaataaatttcatagtttccaaattaagaatttctattcaataaaggataccacagacaaagttaatcgttggcagatgggagactatatatgcaatttctgaaagtatcaaagaattacacaagattatgctatctgcacacacatacactagaatctacccagaacttatgcctacgaatagaaaaaatagytaccccagtgaaacatgggcaaagaacatgaataagcaattcaaaaaaaagtatgaaaatgctaacaagcacatagtgcttcagttcattggtcatgaaatttaaaacgaaa

SEQ ID NO: 118387 - DNA, 527 bp, Homo sapiens
gacattctcttaaagtctgtgaatgctcacatttttaacaaaaaggtatgaaatgggttcttatattacaaagagtgctttgtattattttaaaaatatagtttgttaatgcagtatgttgttccctgtgaggtgtttttatttgaaaatgttagatccatttaaaaagatttataagatgctgttgtaacagtttaaatgagaacttctaggaggcattttccattttcacaagtttagttctcatcagataacattgtgtgacaatatattatttttgtaatatttcctattakgaaatattaaaaagaaatatttccttttattcacgcaaacatgaaagacatcaaaataaaattcaatgaaattttaagctctccttgtagagaaatttctctagatatatttattttcttgcaatatatgttaacttattaagttaaccttcggcaagtaaacctgatacataggcttgggtttcttttaaaataaagtataatagtattaatctagttcaacaaaattct

SEQ ID NO: 118388 - DNA, 555 bp, Homo sapiens
gataactttcaacgttaatagtttagttacatactattgtatcagtataaaagattttaaaatgagaaatctcctcaacctcatcaacccaattagttgccagctgtttaaccttgggagcattgcttaaccaatttcctttgttatatgttataaccaggctttttccttaatagaaatgacttcagtcggtcattagggtatttcctcatttgtatgactatttgattgtctgtcttccgtgyctgggcttctgaaccacatgaactcaaggactaaagcttctcactcttcattgcatctccagagtcccgcatattgtttaactttgtagtagctcaataaatacttagtagttatttggaattaaagacttatctatactcatatgtaacatattatttccttagaccatcagccttgggagcaagtcagaatgtgttagtagttattttgtgcctcagtccccaaaatttctttctctagttcaaataaaggaggactgattgcttggaaacttcccaactgccatattccttctgttaaaatgtggtt

SEQ ID NO: 118389 - DNA, 488 bp, Homo sapiens
atacctgaggttagtgagccccagtatctgggcctgtgctcctcatccactggccctatattactccctaacccaactccaggacagagctgggcatgcctagtgtggyttgtgaaacccactttctgtattgagaacatgtgtaattttgctgcattctagcattcacctaaaaatatggtgagaactagggttcacgaagataaattattaggtgtttctgaaatttagtattttttctatctttatatcacttacttcttgtgcaagttttcatttgtttgctggtaataaattttataaatttcagtttactgataataaacttcacatatttaaagtgtacaattgataaacctgatgtaaccatcctagttatcaaggtgaaccagaaaattctcaaaatttccctctcattcttccatattcctcctcctttcctcttcccttcttctactatttccccaaatggtaaattctgatcttct

SEQ ID NO: 118390 - DNA, 520 bp, Homo sapiens
atagatacacaaattaccttgatcatgatgagcattttacaatgtgtatctgatatggtttgcaacttgtcctggcctgaatctcgtgttgtattataatcctcaatcctgaagctgggacccagtgggagaggcttgggtcakggggtgggtctttcatgaatggtttagtaccgactcttcgtgctgttctcataatattgtgtgagttatcataagatctgtttgtctaactgtgtagacctccctctcttcctgtggcccctgctttggccatgtgacgtgtctactactatttgtcttctgctatggttctaactttcctgagtatcaccagaaggagaagccactacacttcctgtacagtctgcagaaaaatgaaccaattaagcatcttttttttgtttcaaattactcagtctcaggcatttctttatagcagtgtgagactggactaacacaatatcaaaacatgaagtggtgcaccttaaacatatacatttaaaaatatttcagttgt

SEQ ID NO: 118391 - DNA, 607 bp, Homo sapiens
agacctttatacttagatgctaatcattcccagtattgttgaaatggctggccacccccagtcctgtttctcccctccactcacctgaatgtctccaaaaaccccatgaacctaaggattctcttttccatggatgactctgaggattctcaatctggtcagtgccacagtcagaggcagctaatgcaggattctcagtccgctaataagttgagcccataatataggatacatatccaasagtggccaattcatgtcagtgccaatccacatttaattcaaggggcatgattttcagtgcattgaagtttaaaagcttcataattcttaatagaggcacaaactgaatggtttgctgaagaagtgagttcatggttagaagaaagctgactgcacccaggcagagtctctttaagtaaaacacctgaaatgtgatgtcctgaaaccttgtgaaaattcatttccttgagtaaaaaaacaggaaagctattctcaaatcattgggagaaaacttatcagaaattttatgaacacaccagtcgaattccagtaagtcaatccttgggtttatgtttcacaactcaagaagcaataaagaaatctacat

SEQ ID NO: 118392 - DNA, 504 bp, Homo sapiens
gccacccccagtcctgtttctcccctccactcacctgaatgtctccaaaaaccccatgaacctaaggattctcttttccatggatgactctgaggattctcaatctggtcagtgccacagtcagaggcagctaatgcaggattctcagtccgctaataagttgagcccataatataggatacatatccaacagtggccaattcatgtcagtgccaatccacatttaattcaaggggcatgattttcagtgcattgaagtttaaaagcttcataattcttaatagaggcacaaactgaatggtttgctgaagaagtgagttcatggttagaagaaagctgactgcacccaggcagagtctctttaagtaaaacrcctgaaatgtgatgtcctgaaaccttgtgaaaattcatttccttgagtaaaaaaacaggaaagctattctcaaatcattgggagaaaacttatcagaaattttatgaacacaccagtcgaattccagtaag

SEQ ID NO: 118393 - DNA, 589 bp, Homo sapiens
gctaatgcaggattctcagtccgctaataagttgagcccataatataggatacatatccaacagtggccaattcatgtcagtgccaatccacatttaattcaaggggcatgattttcagtgcattgaagtttaaaagcttcataattcttaatagaggcacaaactgaatggtttgctgaagaagtgagttcatggttagaagaaagctgactgcacccaggcagagtctctttaagtaaaacacctgaaatgtgatgtcctgaaaccttgtgaaaattcatttccttgagtaaaraaacaggaaagctattctcaaatcattgggagaaaacttatcagaaattttatgaacacaccagtcgaattccagtaagtcaatccttgggtttatgtttcacaactcaagaagcaataaagaaatctacataattggaaggctgctccaacagagagaattttgaactatttaattaatagaccagtattcattcaaagacactctcctatggaatctgcaacttaaacagatctctgcaacctggaaaaattttctcacttatttttctctagacatccataaatgcaaaa

SEQ ID NO: 118394 - DNA, 387 bp, Homo sapiens
agtcaatccttgggtttatgtttcacaactcaagaagcaataaagaaatctacataattggaaggctgctccaacagagagaattttgaactatttaattaatagaccagtattcattcaaagacactctcctatggaatctgcaacttaaacagatctctgcaacctggaaaaattttctcacttatttttctctagacatccataaatgcaaaaacacattttgtgtgtatatgcatgagtgatctatagaaatactttgcatattaatgaaagtttggaaaaatgataacttcatcacttattgtgaactcayacttcactggtttccaaaattctccacctgtgtcatggggcaatgggtgcctctgagaatatgctgatttt

SEQ ID NO: 118395 - DNA, 596 bp, Homo sapiens
ctcagggaccccccaggatgtaccaagcctcccccagactgcaccagctgaacctcacactggacacctgcaaacagagagacacaaaggtcagaaattgccacacatcacatacccactgtttctctcattcatgcccattcacactcaatatctctagttctccatgaatcaccttttaatatagcaacaaggaaaacccagctcagcacaaactccatggtgattcctgtgtgttcagtcctgatcactgaatggaaacacctgggaatcccaaggctggggctccactcccagagctgcagggtcagggctgggctggttttcatcaggagagggagggctctatttgcatgtcacctactatatagcaagctatggggtgggaatcctgaggagagggcagggcccagagtagatgagagcgtcctgggggattttgatgacaakgattgtgtttgggaaaatgctgtcttaatgtgaaattgttgtgcgataaacatttaacaactatcatatttttaattatttttacctatgtgtataaatgatgttatttagcactcagtggtttcttcgtttacagatgtaaaagt

SEQ ID NO: 118396 - DNA, 494 bp, Homo sapiens
accttttatgttgtattgtttattttttaataaataataggtagcatttcagcaaacaaatgtagcataatttgtttttctaagttgctaattggtattcaaacttttcattactttgggtcttactaataaatctgctactcaatttggtaatgtacatagatgataaattatatataaaatatattatttttgcaacaataacacataaacaagagaatgtgctatttggcaaattttctttagcatgtcaaataattgaagttatgaaacaaaaaacaaacytgtaaaccaaagagtatctgagactaatctcaatagatttaggaagttcattttcgaagattaaggacatgcctgtgacaccgcctcagggagtcctgatgatttgtgcccaagcttgtgggcacagcttggttttatacaatttagggaggcatgagacattaatcaatatatgtatataagatgtacattgatttagttcagaaagg

SEQ ID NO: 118397 - DNA, 581 bp, Homo sapiens
gaatgaaacaatatagtatgtactcttatctatttggcttatttttctcagtagaaataccgagaattaaaccttttatgttgtattgtttattttttaataaataataggtagcatttcagcaaacaaatgtagcataatttgtttttctaagttgctaattggtattcaaacttttcattactttgggtcttactaataaatctgctactcaatttggtaatgtacatagatgataaattatatataaaatatattatttttgcaacaataacacataaacaagagaatgtgctatttggcaaattttctttagcatgtcaaataattgaagttatgaaacaaaaaacaaacttgtaaaccaaagagtatctgagactaatctcaatagatttaggaagttcattttcgaagattaaggacatgcctgtgacaccgcctcagggagtcctgatgatktgtgcccaagcttgtgggcacagcttggttttatacaatttagggaggcatgagacattaatcaatatatgtatataagatgtacattgatttagttcagaaaggcaggacaacttgaagtg

SEQ ID NO: 118398 - DNA, 512 bp, Homo sapiens
cgcctcagggagtcctgatgatttgtgcccaagcttgtgggcacagcttggttttatacaatttagggaggcatgagacattaatcaatatatgtatataagatgtacattgatttagttcagaaaggcaggacaacttgaagtggggagagggcttctagatcataggtaggtttgagagaaatggttgcattatttgagtttctgattagcctttaactgaatgcacaatttacaggaatagtcacgtaggccttaatctggcttagtgaaataatagagcaaagggagcaatcagatatgcatttgacttacatgagcagagaaatgactctgtctgtctttggcccacaaggattttacttgtggtcaaattttgaaggaggtctgtagcttttaaaaaccgtagtagctatcattttagtgaaataatggaggtggatttrccccaaacagttttcagcttgacttcccttgggcttagtgatttggtggtcccaaaggtttatttt

SEQ ID NO: 118399 - DNA, 603 bp, Homo sapiens
tctgtgttgagtgggttctgggcctgccctgcagctctgccctcaccctgctggggaggatgctgtttgggctcacagagcatattctcccaatgttgctctcccagaatgaaagggctgtyccctggttcacaatcctctttcagcagcatctgatgcttttgaaattgtctcttgaaacagtgatttgtcattactatacccagtaaactgcagggagagcccaagcacagattcatgaaaccaccagagagtcacttccctgggactgtcagatgcaatgacacagtcaagatccatggtgagtccagaaactttcagataattcataggagcctcttatttctcttacaattctctattcaaaggtcatgccaaaaagtatcttcacagagagaactacatggcttaaagcccacagaaatgaaaacatgcatgtacacacacatatacaccaaccaccccccccacacacacacacgcagagtggtatggctgatttttacagtaattggctcctaatttgggatctttcctagtgtaaaccaaaggtttctgagacagatctcaatcaaattaaaactaattttcccaaagttagga

SEQ ID NO: 118400 - DNA, 603 bp, Homo sapiens
tctgtgttgagtgggttctgggcctgccctgcagctctgccctcaccctgctggggaggatgctgtttgggctcacagagcatattctcccaatgttgctctcccagaatgaaagggctgttccctggttcacaatcctctttcagcagcatctgatgcttttgaaattgtctcttgaaacagtgatttgtcattactatacccagtaaactgcagggagagcccaagcacagattcatgaaaccaccagagagtcacttccctgggactgtcagatgcaatgacacagtcaagatccatggtgagtccagaaactttcagataattcataggagcctcttatttctcttacaattctctattcaaagktcatgccaaaaagtatcttcacagagagaactacatggcttaaagcccacagaaatgaaaacatgcatgtacacacacatatacaccaaccaccccccccacacacacacacgcagagtggtatggctgatttttacagtaattggctcctaatttgggatctttcctagtgtaaaccaaaggtttctgagacagatctcaatcaaattaaaactaattttcccaaagttagga

SEQ ID NO: 118401 - DNA, 555 bp, Homo sapiens
tttcatcctaactatctacctaaataatttctttctatctcctattacaccagctggactcttytctttagcttagtgattttggggtctcaagatttattttctcttcacaataggcaggtacaaaaggagacttcatatgtaattaagttgcttgtattagtccatgttcaggttgctataaggacatacatgaggctgggtaatttataaagaaaaataggtttaattaactcacagttcttcatggctggggaggccacaaaaaacttacaatcatgatgcaaggggtagcaaacacatgctatttcacatgactgcaggagagagaagtgttaagtgaagagggaagcccctcataaaattatcaaatcttgtgataactcactcactaacaggagaaaagcaggaagaaaacagcccgtatgattcaattatttccacctcattccacccttgcaatgtgtgaattattacaataaaaggtgagatttgggtagggacacagagccaaaccatatcattgattttattttctttagaatttacattgtc

SEQ ID NO: 118402 - DNA, 555 bp, Homo sapiens
tttcatcctaactatctacctaaataatttctttctatctcctattacaccagctggactcttctytttagcttagtgattttggggtctcaagatttattttctcttcacaataggcaggtacaaaaggagacttcatatgtaattaagttgcttgtattagtccatgttcaggttgctataaggacatacatgaggctgggtaatttataaagaaaaataggtttaattaactcacagttcttcatggctggggaggccacaaaaaacttacaatcatgatgcaaggggtagcaaacacatgctatttcacatgactgcaggagagagaagtgttaagtgaagagggaagcccctcataaaattatcaaatcttgtgataactcactcactaacaggagaaaagcaggaagaaaacagcccgtatgattcaattatttccacctcattccacccttgcaatgtgtgaattattacaataaaaggtgagatttgggtagggacacagagccaaaccatatcattgattttattttctttagaatttacattgtc

SEQ ID NO: 118403 - DNA, 565 bp, Homo sapiens
caagcccagtcaatattttatctgtgccaccagatagctatgtgaattgggttactttctcttttttcaagtttccaagaaaacttgggagtcctgggtctgtcagaaattaaattgtttacttactacasttcagggccctgtaaaaaaaaaaaaaaaaggtacatgccagttttcccaaggggctttatcagctctccaggttagattcattttataaagtaaatatgaaaatatataattcaagttaaagacttagtaaaatgaccattgtctccaattgtgccctgttatggaagaaagcagatttttattgaacctatgcaaataactattttgatataagaatactcacagtttccaaattttggagaaattatgtatataagaagatattatgtttttatttttttcttaataaagtataccatactcaattgttaacaactgtgaatagcttaaaagacaaacttttcctgattctgaaaaaacagaacataagtaattagcaaatgctttaaagaataagccataaaaataatttcagtcttctgtcaattcagtt

SEQ ID NO: 118404 - DNA, 584 bp, Homo sapiens
aaacaccaactgtggatgactgaagttttcgaatagccatggttaaaggcagaattgaggggaaaatttggttacttccgcaataaacagaaattttacataataatcataaacactaccgataaaatatactaagacatatcaaatcacttggatctcatacaattttggaaaatatgctctttratttatataaatatggtccaattatatagtccacatttatttaaatatagtccaatgttaaaacacttttgcaaatttgacgtagctccctgcatattttaattataccaaataagctgaataagtttaattttggctttggggacctaatatcagaaaagaataatgaggtcaaatgactgcatttagaattttattttgtgaagtttgtcaaatatcaaaagtttacaatgtttgatattacaaaataggattacagattgttgtaatgtaagttatttatttagtccagtgagaactcagtgattttgaaagaaagcaaaaacttttatttttcaaagagaagaattaattttctaaacaataaccccttataagaacagcatgagagaagttaa

SEQ ID NO: 118405 - DNA, 623 bp, Homo sapiens
attctttctcatataaaattatttttatttttttattttaacctttcataccaaaagtactcctctatgtctaaaaatttctttttttttttttttttttgaaacaaaatcttgctctttcacccaggctggagtgcagtggcatctctcttatttactggttatgtttaggatgttttataagtaacctctgaattaaataaaatctttttgtaaaaacaaatattttacaaaaatattttcttttagtatacatttttaaaacgattagcaatgacctaaacatttagtcaatatctattatttaattaaactttaaatttttaaattgtaraacaagtttatttaaaaggtttattttgttacattaacttaatttattttttaaatagcttacctagatcatttatgaaaactataatactcatcctttaaagctttttccctgttatccatattataacccatgaatttcaggtgtttacctaagtaaaattcttattaaataaatgattgtatttccaataactatttacctgttttttattaaaacaataatattaaacatcttatttgtcaaattacaaagatcattctggttttaacttggttaataattttat

SEQ ID NO: 118406 - DNA, 578 bp, Homo sapiens
tgaatatttactatgtgccagacagtgttgtaagcactgtgaattgattagctcatttaaattttacaacaagcctatgaagtcaatactattacccgtaatttacagataagagctaatgtagtgacccaaatcactagggtagtaagtggtagaacctaagtattttcaatctggacctttaaaataattttcctgacagcaatttagacagtattttggtataatttgtataatacttagtagtgagaaattctgtgtggggaatttggacttggtacttgcagcttttcagtgtgaggtgatgagatcttaaaagcaattagaagaaaaggggttagtttgagagaaattgctaaagaaacagcagtaggacttgaatgatgtcatatggrggaaagttataagacatgtataaaatagctctctagcctgatttgggagaatcagcacatcatgaacagaaatagcgaagtcaggagggcaagccaaataggtgaacattcagtttggtttagatatattaaggatgaagagagagtaagacaagttattctcaatagagaacagagccgttc

SEQ ID NO: 118407 - DNA, 598 bp, Homo sapiens
aaaggtctggtcaaaacactctccctcctgacttgtcctcagttcataccactgttgagctccctgaggcatctaacagagatctttactggtagggtaggggttcttggaagcttgaggttaacaatttgggaaccataaagagagcctctcttctaaaatatctgatagtcacatctggttaatatcagagacattttacctttgttagattttgagcaggactaaatgaagtctttgtgggcagctgcaaagttacaatgaaaacagccctagttacctgccttaagacttttgctctgtgatttgatcccttcaaaaacatattcttgccatgcctattttagtaagtctagctgcagaggcactttttaaaaagtccayttaaaaaatatgagccaatatgcctatgattgagaacatttgactggtgattgtgagctgtgatacagcttaatctggtaaatgaaatgtttgatactaaaaataggcataagtttttagctattaacagtggatttagaaaagaaagtttttgagggctgatttcgacatgttgacatttgcatatctgctgtaatgagagaactcgatgtct

SEQ ID NO: 118408 - DNA, 606 bp, Homo sapiens
gttgctttgattctttgtgtggatatttgggtctcaatttcattcagttcttttctgacttaagtgattcctgctagctttgggatttgtttgttcttatttttctagttcccctaagttcaatgttagatcattaatttgagatcttgctaacttctttttattattattacactctaagttctggggtacatgtgcagaacatgcagttttgttacataggtatacacwtgccattgaggtttgctgcacccatcaacccatcacctacattaggtactcctcctaacgttatccctcccctagcccgccacccactgacaggctctggtgtgtgatgttcccctcggtaagtgtttggcactataaactttcctcttaacactacttatgctgtatcctagatatttttggtatgttgtgtctctattttcatttatttgaaaggttttttttgtttcttttgtttttgttttcttgatggagtctcactctgttgcccaggctagagtacagtgttgcaatctcagctcactgcaacctttccctcccaggttcaagcgattctctgcctcagcctcccaagtagctgggattacaggtgcc

SEQ ID NO: 118409 - DNA, 470 bp, Homo sapiens
ctcgtctcgaactgctgaccagaggtgacccacccgcctcggtctcccaaagtgctgggattacaggcgtgagccccgaaaccagccgagttctacttttattccactgtggttagagcagatacttggtattaaatattatttcaatttttgaatgttttaagacttcttttttggcctaacatatggtatatccttgagaatgatccatgtgctgagaagaatgtgtattctgcagccattggatgaaatgttctgtaaatatcaattargtccatttggtcaatagtgtagattaagtctgatgtttacttgttggttttatgtctgaatgatctgaccagtgttgaaagtggggtgttgaagtctccagctattattatattggagcctctctctctcagctctaaaaatatttgctttgtatatctgggtgctccagttttgggtgcatctatatttacaatgtt

SEQ ID NO: 118410 - DNA, 574 bp, Homo sapiens
taaaactgaaattaatattttaaaaagaattttaaagaaatactaaatgaattttaaaaataaaatactttctactttcttgcccaagatctagtcagcatactgccatcagtgaacgttttgtggaatgccaagataatcaagaactctgcagactatctgtggcagagagcaggagaattgacacagctctgaggccacactgtgaagatatactattggcactgctgggtaaaagcaaactgtgactagtggtcccttcaaattggtatgsagaaaaaaatagcatgagccacatcaattactacataccaaatgccagcagttttgctgatttgctccagtaaagacacaacagagccaacagctgcatttgggccacctgaaccagtttatgacagtccacattctccaaaacccatccaactgctgcatgggccaaacaggtgaattaaacaggaatgcaataggtaccaccactcctgtttctttcagtgcctggatgatggtataaatctctgaaatttcccctaaagatgcaatattgcctctaatttattaccttggtatggag

SEQ ID NO: 118411 - DNA, 514 bp, Homo sapiens
ccatcagtgaacgttttgtggaatgccaagataatcaagaactctgcagactatctgtggcagagagcaggagaattgacacagctctgaggccacactgtgaagatatactattggcactgctgggtaaaagcaaactgtgactagtggtcccttcaaattggtatgcagaaaaaaatagcatgagccacatcaattactacataccaaatgccagcagttttgctgatttgctccagtaaagacacaacagagccaacagctgcatttgggccacctgaaccagtttatgacagtccacattctccaaaacccatccaactgctgcatgggccaaacaggtgaattaaacaggaatgcaataggtaccaccactcctgtttctttcagtgcctggatgatggtataaatctctgaaatttcccctaaagatgyaatattgcctctaatttattaccttggtatggaggagaagttccaagggttttttatttagcccttccaaccatgatgg

SEQ ID NO: 118412 - DNA, 597 bp, Homo sapiens
ctgcatttgggccacctgaaccagtttatgacagtccacattctccaaaacccatccaactgctgcatgggccaaacaggtgaattaaacaggaatgcaataggtaccaccactcctgtttctttcagtgcctggatgatggtataaatctctgaaatttcccctaaagatgcaatattgcctctaatttattaccttggtatggaggagaagttccaagggttttttatttagcccttccaaccatgatggccctcatccgatgggtccaagagccaacatgaggatacttccagtttctgagtacaatcagtcctcaccatccatrggttctgcatccatgtattcaaccaaccacagatcaaaaatattcagaaaaaaaaattgtgctgaacataaacagacttttcctcttgtcattatttcctagacatacagtatagcaactatttacatagattttgcatagtattaggtattataagtaatctagagatggtttaaagtatatgggaggatgtgtataggttatttgcaaatgctacatcagtttatatcagggacttgagcttccatggattttggtatccccaagtg

SEQ ID NO: 118413 - DNA, 422 bp, Homo sapiens
ttggaggcccaggtgggcagattgcttgagcccaagagttcgagaccagtgtgggcaacatggtgaaaacccatctctacaaaaaaaaaaaaaaaaattagatactgagaagaagagggtaaagaggggaagaaaagtgggcttggtgtgtgggaargggagttgaggctctagaaagcaggaaccgtagggcaagggaaacctgtagataaatgatccatcaaaaaagaattggcctggcaaagtgactcacgcctataaactggtactatgggaggcccacgaggaggattgtttgaggccaggagttcaagaccagcctggccaacataacaagaccctgtctctactaaaaaaaaaaaaaaaaaaaaaaaaagacagagactatttggaggtggagtttggggagaagaaggttcagc

SEQ ID NO: 118414 - DNA, 461 bp, Homo sapiens
cacatttattttaatttaactgataatattttaaaatttcaaagtttttttttctttggcacacatgttatttaaaagtatgttgtttaatttccaaatatttggggattttccaattatctttttgttattgatttttacttcaattccacttggtgtgggagccaacttttatagtattatcttcctataaatttgttaaggtgtgttttatggcccagaatgtgttttktttttttttttttttttttttttttgtagcagggagtggggttgcgaatgttccatgtaaacttgagaagaatgtatattctgctcttgttggatggaacattccataaatgccaattagatcaagttgattgatagtactgtttaggccaactatattcttactgattttctgtctgtttgatctatcaattactgaaatgggaatgttgaagtctccaactataata

SEQ ID NO: 118415 - DNA, 461 bp, Homo sapiens
cacatttattttaatttaactgataatattttaaaatttcaaagtttttttttctttggcacacatgttatttaaaagtatgttgtttaatttccaaatatttggggattttccaattatctttttgttattgatttttacttcaattccacttggtgtgggagccaacttttatagtattatcttcctataaatttgttaaggtgtgttttatggcccagaatgtgttttgtttttttttttttttttttttttttgtagcagggagtggggttgcgaatgttccatgtaaacttgagaaraatgtatattctgctcttgttggatggaacattccataaatgccaattagatcaagttgattgatagtactgtttaggccaactatattcttactgattttctgtctgtttgatctatcaattactgaaatgggaatgttgaagtctccaactataata

SEQ ID NO: 118416 - DNA, 562 bp, Homo sapiens
tctgccaacaatttaagtgagtttggaagtggctctttccctagttgaacctcctgatgatggcacagctatacaacatcttaatttaagccttatgagaccttgagtagaggacccagttaaaaccagactcccaacacaaaaactgtgagataataaatttgtgttattttgagctgctaaggttgtggtatttgttacacagcaatagaaaactaatataccctggttataccttcttcctctgattaggtcattaayggccctagagttgggggccattagctcactgaactccatggctcttttattcttaccaaagtttagactggctggaatatttttttctttattttctcttatcttatttacttatctttaggaaagaattttaaattaatctaagtttagaaataggtaatacctatccatggttcatagtcaaaatatgttgcaagagatatagtgaagactctctctgcaactattcttcctcatctgtcttgttctcacctgccacctcctccccccctcaccagataaccactgagaacagtttcct

SEQ ID NO: 118417 - DNA, 562 bp, Homo sapiens
tctgccaacaatttaagtgagtttggaagtggctctttccctagttgaacctcctgatgatggcacagctatacaacatcttaatttaagccttatgagaccttgagtagaggacccagttaaaaccagactcccaacacaaaaactgtgagataataaatttgtgttattttgagctgctaaggttgtggtatttgttacacagcaatagaaaactaatataccctggttataccttcttcctctgattaggtcattaacggccctakagttgggggccattagctcactgaactccatggctcttttattcttaccaaagtttagactggctggaatatttttttctttattttctcttatcttatttacttatctttaggaaagaattttaaattaatctaagtttagaaataggtaatacctatccatggttcatagtcaaaatatgttgcaagagatatagtgaagactctctctgcaactattcttcctcatctgtcttgttctcacctgccacctcctccccccctcaccagataaccactgagaacagtttcct

SEQ ID NO: 118418 - DNA, 562 bp, Homo sapiens
tctgccaacaatttaagtgagtttggaagtggctctttccctagttgaacctcctgatgatggcacagctatacaacatcttaatttaagccttatgagaccttgagtagaggacccagttaaaaccagactcccaacacaaaaactgtgagataataaatttgtgttattttgagctgctaaggttgtggtatttgttacacagcaatagaaaactaatataccctggttataccttcttcctctgattaggtcattaacggccctagagttgggggccattagctcactgaactccatggctcttttattcttmccaaagtttagactggctggaatatttttttctttattttctcttatcttatttacttatctttaggaaagaattttaaattaatctaagtttagaaataggtaatacctatccatggttcatagtcaaaatatgttgcaagagatatagtgaagactctctctgcaactattcttcctcatctgtcttgttctcacctgccacctcctccccccctcaccagataaccactgagaacagtttcct

SEQ ID NO: 118419 - DNA, 606 bp, Homo sapiens
gaatatagaaaaaaacattaaattatgtactttcaaatggtgaactgtatgttatataaattatattttattaaaacattgcaaaaaaaattaacagagaagggggtaggggagacaattaacacaaaacagctgctacattccttaattctctaaccagttacaaattctaatttgagaatcatgacttttttcttccactacccattccacgttccccttatcctctgctaaaaccttagctggatggggttctttacctgatagggtgacccaaacccccttcctgtcatacctcagtctttggggcgtttactgattgctatagtgaatcccctgggtttcaaacaccttacctggtaaggtaacaactcattttctcattattaattggtttctatcatgygtccgtaagagtcacccctttagctccctctaggttaagtagcacaagagccaaaaacggccaaacagcggggctcaattttccatttaacaggactgcctgactgttaagcatggaaaagcattccttccttgggcacttggacccccaaacccaccaaatccatggttatgaagattaaagggagaagttctggaagt

SEQ ID NO: 118420 - DNA, 539 bp, Homo sapiens
tatgaatagcactgtaatgaataaacttgcacatgtgattgcttttatcgtggtaaaatatatatataataaaatgtgcattttaatcatgtttaagtgtgcattcagtggttaagtacattcacattgtcatgcaaccaccaccccatccatcttcagactctttttcaccccaagatgaaagtgtatgccaattatacaatacctccccatttttcctccctacagctcctcgcagtgagaatcctactttctgcctctatgaatttaactactctagatayttcatataagtgagagaatacaatatttttgtttgtgttggcttattacacttagtcacttatttataaaccatttatagcttatttcactcagtcaaaatttatccatgttgtactatgtatcaaaatttcattccttttcaaagttgagtaatattcctgtgtatgtatgcattcagggtattttcctatatgttaacatactgtataatagaaatggaattactagattcaaggacacatatatctgtaatt

SEQ ID NO: 118421 - DNA, 539 bp, Homo sapiens
tatgaatagcactgtaatgaataaacttgcacatgtgattgcttttatcgtggtaaaatatatatataataaaatgtgcattttaatcatgtttaagtgtgcattcagtggttaagtacattcacattgtcatgcaaccaccaccccatccatcttcagactctttttcaccccaagatgaaagtgtatgccaattatacaatacctccccatttttcctccctacagctcctcgcagtgagaatcctactttctgcctctatgaatttaactactctagatacttcatataagtgagagaatacaatatttttgtttgtgttggcttattacacttagtcacttatttataaaccatttatagcttatttcactcagtcaaaatttatccwtgttgtactatgtatcaaaatttcattccttttcaaagttgagtaatattcctgtgtatgtatgcattcagggtattttcctatatgttaacatactgtataatagaaatggaattactagattcaaggacacatatatctgtaatt

SEQ ID NO: 118422 - DNA, 457 bp, Homo sapiens
tgcctttatctctcctggttttttaattcaaaatagaagcttgactaatgtttatacaaatatgaataaaaattcaratcaattaagtcaaaagattttgttgtgataagaataactttaccagtctatctttaattcatcatacaagacccagtgttctgaagctgtgttaccagatgcattataattaagttaataatggatataatagtgatttatttgaatgcatccacttcaactattctctcaagtcctgtatacctgtaagtaatttatctgttcttagatttgtttggtattcagaatagaattatcactttggatgaaacaagacacagttttataaatgttgtataaagagttctgggaaacaacatggaaaccatttattttactaaatacactggaactggctctttaaaagtatagtatcctgaaattaagagactcaccaaaa

SEQ ID NO: 118423 - DNA, 634 bp, Homo sapiens
atctgtcaatatggggaaaaaagagttattgggttctgttataaaactcgttttgctaaggatagaaaaccaaataccacaatgttctcacttacaagcgggggctaaatgatgagaacacatggacacatagagaacaacacactggggcctactgcagagtggagggtggaaggtgagagaggattaggaaaaatagctaatgggtactaggcttaaaacctgtctctggaaatatctgcacaacaaatctccatgatacacatttatctmtgtaacaaacctgcacatatacccctgaacttaaaataaacgtaaaacaaaaaacacttgttttgaaaacacaaatttgtttcagcgtaactattaggaaacaatttgagaatgacacaaattacgcactgcatttgtgcagtgtcatgggtgagaaccgctgggtgaactcagaaattgcattctgctcaatggaacaatggagttggacacaaaacacatgcactcacctcaagtatacaccagctacctcagttcactcccacccacatctggcattcaaacttcacttcttatttcagatagcccacattctatcacttcacaataactaacaaaagcaaaccctctgcatgctcac

SEQ ID NO: 118424 - DNA, 634 bp, Homo sapiens
atctgtcaatatggggaaaaaagagttattgggttctgttataaaactcgttttgctaaggatagaaaaccaaataccacaatgttctcacttacaagcgggggctaaatgatgagaacacatggacacatagagaacaacacactggggcctactgcagagtggagggtggaaggtgagagaggattaggaaaaatagctaatgggtactaggcttaaaacctgtctctggaaatatctgcacaacaaatctccatgatacacatttatctctgtaacaaacctgcacayatacccctgaacttaaaataaacgtaaaacaaaaaacacttgttttgaaaacacaaatttgtttcagcgtaactattaggaaacaatttgagaatgacacaaattacgcactgcatttgtgcagtgtcatgggtgagaaccgctgggtgaactcagaaattgcattctgctcaatggaacaatggagttggacacaaaacacatgcactcacctcaagtatacaccagctacctcagttcactcccacccacatctggcattcaaacttcacttcttatttcagatagcccacattctatcacttcacaataactaacaaaagcaaaccctctgcatgctcac

SEQ ID NO: 118425 - DNA, 579 bp, Homo sapiens
cttaacaagtgaaatacctgagacctagagagtttaaatgaccaasctaaagctgcccagctaataaattatgagtcctaatgccagattttatccttccgaggaaagccaactcttaatttggaaaaggcatcaactctctggattctctttgcagataaaacagtttaggacctccttttgtaataacatgccttgttagtgtaaggaaggaaagacagcttagaagtcatttccttggggcaggtgatgtctggtagataggcagatatcccttgtcccttgtcttctagaaagctcatgagctcagcatgttggcaactctagtcctgcatgcttcttgttcagctaatccttgcaggcgctcatgtacaaaatgattttttgtttgtttgtctctgaagtggcttctcagtccttgagggccaccaggcactaattcctcgtttctgcccatgttccacctaactaaaaaagtaaacttatgttctttgtacatgtgctgctcccctgacacctcctaccttccccaaatccctccattcttctgggtgttcttctgttcttctagttaccgag

SEQ ID NO: 118426 - DNA, 579 bp, Homo sapiens
cttaacaagtgaaatacctgagacctagagagtttaaatgaccaacctaaagctgcccagctaataaattatgagtcctaatgscagattttatccttccgaggaaagccaactcttaatttggaaaaggcatcaactctctggattctctttgcagataaaacagtttaggacctccttttgtaataacatgccttgttagtgtaaggaaggaaagacagcttagaagtcatttccttggggcaggtgatgtctggtagataggcagatatcccttgtcccttgtcttctagaaagctcatgagctcagcatgttggcaactctagtcctgcatgcttcttgttcagctaatccttgcaggcgctcatgtacaaaatgattttttgtttgtttgtctctgaagtggcttctcagtccttgagggccaccaggcactaattcctcgtttctgcccatgttccacctaactaaaaaagtaaacttatgttctttgtacatgtgctgctcccctgacacctcctaccttccccaaatccctccattcttctgggtgttcttctgttcttctagttaccgag

SEQ ID NO: 118427 - DNA, 681 bp, Homo sapiens
agactcccaacttttgaacttaaaacttggtaaagcaatcaggccaaacgttatagctctttcatcaatcaaaccttcagttcccatataggtttgtcataccagtcaaagtggactactcctgtctgctgcatgtttactcatttgttccctccatccctctctcccttcttcagygaaaaaatacagtaatgtttctttgcaaactataaagcatgcaaccttttatctgtccaacaaagtaccctgctatgtgaaagggaagaatggagttttggatttggtaactacctactgtgtgctgataatttgtatttagtatcttatttaattctcttgttattcctgtgagttagattgagttatgttcacgttacagatatggaaactgaagctctaagaaaaaggtaacatgttctcctgctctgctgccatcctggtgctagacgcagagtggtgggtgggaactaaagtctttaagagggcaggagggataaagcacacacataaaacagctgtcatggaagaaaatgctcattgtcatgagaactgtagttatggtgctgtcaaaattctgagcatgatgaaatttcttctagctggaagattaggaaagacttcatggagaagttggattccgctgagtgtgaaggatgggcagtgttttgacagaaggagctg

SEQ ID NO: 118428 - DNA, 681 bp, Homo sapiens
agactcccaacttttgaacttaaaacttggtaaagcaatcaggccaaacgttatagctctttcatcaatcaaaccttcagttcccatataggtttgtcataccagtcaaagtggactactcctgtctgctgcatgtttactcatttgttccctccatccctctctcccttcttcagcgaaaaaatacagtaatgtttctttgcaaactataaagcatgcaaccttttatctgtccaacaaagtaccctgctatgtgaaagggaagaatggagttttggatttggtaactacctactgtgtgctgataatttgtatttagtatcttatttaattctcttgttattcctgtgagttagattgagttatgttcacgttacagatatggaaactgaagctctaagaaaaargtaacatgttctcctgctctgctgccatcctggtgctagacgcagagtggtgggtgggaactaaagtctttaagagggcaggagggataaagcacacacataaaacagctgtcatggaagaaaatgctcattgtcatgagaactgtagttatggtgctgtcaaaattctgagcatgatgaaatttcttctagctggaagattaggaaagacttcatggagaagttggattccgctgagtgtgaaggatgggcagtgttttgacagaaggagctg

SEQ ID NO: 118429 - DNA, 627 bp, Homo sapiens
gaaatgtgaattacatggtgagttgagggaataggaagtagacaaaggtggtcgggcccgtttcccatactttagccatttgtgtcccatcttctggctctttccacagctgtgtaccacctatgctattattacttaacatamttttccttcaaattaagtcatctctgtagcctaaattaatgtattttaacaggaaattttatatcgctaccatgaatttgcttttattctctatgcattaaaataactttttatccatacaccaccttggatcatctaatgtccctacagggcatgggaacactaggctacgaaacactttgagaaatactaggctgcagcataaggaatgtgagtacgggtactgagagatgaggctaggaagacacgtggggctaggccagtgagggccttgaataccaagccaatgtgttcagactttattctgtcagcagttggaaaatattgatggttttggaggaagcaaacaacattatgtgattgtgctttttaaaaatttctggcagaggtgtgggaaatggattggaggggaagaaacccatagctgaagggcagacaaaaggctgcagtccagactagaaaataatcaagtcctggaccata

SEQ ID NO: 118430 - DNA, 627 bp, Homo sapiens
gaaatgtgaattacatggtgagttgagggaataggaagtagacaaaggtggtcgggcccgtttcccatactttagccatttgtgtcccatcttctggctctttccacagctgtgtaccacctatgctattattacttaacatacttttccttcaaattaagtcatctctgtagcctaaattaatgtattttaacaggaaattttatatcgctaccatgaatttgcttttattctctatgcattaaaataactttttatccatacaccaccttggatcatctaatgtccctacagggcatgggaacactaggctacgaaacactttgagaaatactaggctgcagcataaggaatgtgagtacggstactgagagatgaggctaggaagacacgtggggctaggccagtgagggccttgaataccaagccaatgtgttcagactttattctgtcagcagttggaaaatattgatggttttggaggaagcaaacaacattatgtgattgtgctttttaaaaatttctggcagaggtgtgggaaatggattggaggggaagaaacccatagctgaagggcagacaaaaggctgcagtccagactagaaaataatcaagtcctggaccata

SEQ ID NO: 118431 - DNA, 526 bp, Homo sapiens
ttagaaaccttccaaaaagagattttcagacccagatggtttcaacagcaaattctacaaacattttacagaaaaaatatcacgaattctatgcaatctctgcaagaaagcttaagagaaaggaacatttcccaactcatttacgaggccacatcctgataccaaaatcagacaaagatagtacaaaaaaggaaaagaaaactacagactaagatccctcatatatataaatgaaaaaagcaacaaaatattaacaaattgaatccagcaatacattacaaagagtaatgcaccatgaccaagtggcctttatccaggaaggcaagtgtaaatatttgaaaataaatcaatgtaaactaccatactarccatctaagcatgaaaaaaccccatgtaatcatatcaattgacaaacttcaacatgtaatcatgataaaatctctcagcaaactaggaatagaagggaacttcctcaacctgataaagggcatctacaaaaaaaaaaaaaaaaaaccctacagttaac

SEQ ID NO: 118432 - DNA, 533 bp, Homo sapiens
  misc_feature (1)...(533): n = A,T,C or G
aaaatttatatagaaaaacaaagaaactacaaataattaaaacaattttgagaacgaataaagttaaaggaattataccatctgattttgagacttagyataagactagagcaatcaagacagtgatgtatttgtgaaggaatagatatattgatccacagaacagaaaagagtcaagaaataaacacatgaatatggtcaattgatttttgacaaagatgaaaaagcaattccatggaggatgaataagtcttttcaaggaacggtgtaggaaaatttgatgtccatatgtggcaaaatgaatcttgacccaaacttcaggctctataaaaattaactcaagtatgacatcaacaagatggtgaatgggaagtccatcacatctctccagagcaacaagaatctggcagccatccatggaccaaagtacctttgtgggaattttggacccaggtaggatgttgcaaaactctagtagagtccaacaccaaggaaggctgttttgagagggcaggcccacaccnnnnnnnnnn

SEQ ID NO: 118433 - DNA, 550 bp, Homo sapiens
ttgtgtcaggaactcatacttctctgtattgcaaatctcacctcaaacaactcttaggacttaattcctgccttaacatggggtatataaaagatcttgaaacagggtcaagtgctggctcagtacaatagcatgtattttgtccaggtttcttatcctcactatccaaatcatctttgcatattccaagcttatcagggctgatcctttaaactttgcattagtagctggctaacaacttaatgacccagaaaaaaaaatcaggagcacaggcacctgtccctcactggtaccccaaatcttcaactttctctgtttttctttgtgcaagagaagaagggaaggagaacaggagtaagatattattccaagttttccagagtactacctagcctcatctacctccagcctctgattttcccactcctgaatactcaagctctgcctgttttcaacactggcttctggatttggctcactcccacataggaaactctcaattttgcctcacattttytgttcagttctagctcctcatcttgcatctata

SEQ ID NO: 118434 - DNA, 555 bp, Homo sapiens
atgaatgccctggaataggctttcgccttgtgtttttctcttcggttcttcctttcctcattcaccmaggcagactgcttgtcaaaacaggattaaaatcctgaggccagcccctggccgacttgaagtctgcatctaaggcagggccttagacatggcagctccaagtgtttcatgggcctggtgagaggggcaggccctggctctagacaccagggaaaaacatactccttagtgttcaaccctggttttctcatcagagcaatgatgtcccaggatgacctgtggacaaaagaggacgggagaagagaaaatattttcttcagttcaaaagaaaaggcccctatggtctatgagctgacagctgtatggtactcatagctattactgaatcctttctgaactgcaccgggggtacaagagggagagtgaaggtctagtgctcggttggaagggagaaggaacaggctcccttctctttgttttatcctactgcctctttgctccataccactttcccctggctggatttagacccagccaagttgagtattc

SEQ ID NO: 118435 - DNA, 503 bp, Homo sapiens
gggctttccctcttttgaagggtagactattgaccatctcctagtacttgtaattccttccttttaaagcacaggagtgtatgcaggactctagccaacagaaatgggytgtgctccacaaggcaccaggaaaaatgagcctggaaggaggctttgaagagagtcattgcagtggacccaaacacttatcagtgctgggaggccagcctgctgaggtattgttgtttgtttgtgcttctgttgtctgtggagatgtctagaaccttctcctcccttggctttcttatttcctcagtaaccagtgagataacacatcataaaactggtattccagcaagaaggaacattggagattgtacagtcaaaaactttcacagatggtccctctcaatggcccacaaagaataaaaagagaaaaaaaaaaaaaggttcgtccatgatgtatttatttctcatttccagcccatggccctatcatgctactgctctttctcctacctggt

SEQ ID NO: 118436 - DNA, 671 bp, Homo sapiens
aagataaacatggatttgtaaattcagacacatatgaacaaactagtgtgttctgagaaggctgaaaagaattcaagagttaagttgaaatggtttccttaggttagttagtatcttacaagcatttcaagtgctgtgctcggtaaagattaaaacactgtgagcagaactgtgtctgtgtcttcaggaaacttataaccttttaagacacaaaagactgtctttattctctctctgactgaatttactccctctgctcttgagtgcatcaagataggcataattctgattggaaacttcctccatttaagcacttattcctggctaacaccccaaaacaagcttctaaatctgagtgttcagtatggtgaccactggccacatgaggctagatgagctcttaaaatatggctagtataatggagaarctgaatttttgtctctaattaatttaaatttaataactgatactcaattcaattattgggaaatgttccggtatgtttgatacaacctaagtatgtgaatctgctttttcaactgtaaattttataaattttatctaaacacatatcaagcatttccatcaaaaatttaaaatccaagttgagatgtgttgtaagtataaatacacactggaattcaaagacttcctatgaaatcatgttaaa

SEQ ID NO: 118437 - DNA, 593 bp, Homo sapiens
ttctactatggatgattgcagtctcacctaataataacagcactgagtgcttaatatttgtcagttgttgcgttgagtgctttagctaagtcatctcatttaatcttcacaaaaaacatgatgtggggactcctattaccctcacgttgcaagtgagggaattagggcttagagaggataaatcacttgctccaggcttcacagtgggtgaacagaagaatagcattagaacctaggtttttctgttcacatagcccatgatcttttaaaatatattttgatcctttatgttcttccaatttttaatattttattctgaaaaatttcaagtcttcattgttttcttctgtagctcaagcttttataccactgccttctaaagcatcatgtaattaaggaaataactatatataaggaatagtaggagcaaggagtactcacctcrttgatgaggagttaggaaagcatcacagaagtgggcagctaagcagaaccatgaggttgcttagtggtttgcaagagaaaagagtggcagactatcaaagctgagggaatacatgcatgaaggacagagggatgcagaacacagcaag

SEQ ID NO: 118438 - DNA, 628 bp, Homo sapiens
atatctcatcttttaaaattccttactctcattaaaaagacaaaatttaaagatcttaattcatcattctagaatcaggcagctctcagaaccagaacaagttcaaaggactccaacctgccacgtgatcagacagcactgacgaacagaaaatacaaatgaggtacagaaatggaagtgaggtatagagacagcctgattggttactgcttggggtttgccttatttgawcttggtctgaacaattgaccgcctgtgattgaatgaagctctcagctgctatgattggctgagactcagctatatgttacaaaagtatattcctaaattaggcttccagttagtttatgtatgaagttaggctgcagtttgttatgtgaagactcctgtatggagacatcctcaggtcaaatttagtttaatttaacactcaaaagaaaccacatgttttccagaccagagttgactgatattgttttccaactctcattctgtatgtttataacaattttatatcgggatacaacagtgtgcctataatgtgatacatgtgctgttggaagtgttaagaatatctttcattagtgcatttgaaaaatctttccattttaccctatacactgtgtgc

SEQ ID NO: 118439 - DNA, 534 bp, Homo sapiens
ggactccaacctgccacgtgatcagacagcactgacgaacagaaaatacaaatgaggtacagaaatggaagtgaggtatagagacagcctgattggttactgcttggggtttgccttatttgaacttggtctgaacaattgaccgcctgtgattgaatgaagctctcagctgctatgattggctgagactcagctatatgttacaaaagtatattcctaaattaggcttccagttagtttatgtatgaagttaggctgcagtttgttatgtgaagactcctgtatggagacatcctcaggtcaaatttagtttaatttaacactcaaaagaaaccacatgttttccagaccagagttgactgatattgttttccaactctcattctgtatgtttataacaattttatatcgggatacaacagtgtgcmtataatgtgatacatgtgctgttggaagtgttaagaatatctttcattagtgcatttgaaaaatctttccattttaccctatacactgtgtgcatagtataaaaat

SEQ ID NO: 118440 - DNA, 552 bp, Homo sapiens
tgaagttataatagtcaaaaatttctaaatttgatgaaaaaatattactttatacatctaagaagcttaactaactccaagtaagaaatttagaragagccactataaggcacatcataatcaaactgttgattaaaaaaataaagcttggaagcagcaagaaagaagtgactctttatgtacgagaagtttgcgataactataagagataattgctcattagaaattatgaaggccataaggcagtgccgaaatatatcaaattaacaaaagcctgttaactaagaatactatattcagcagaactatccctcaaaaatgaaaagaaaattaacatattcacagataaataaaaactgagggactttgtcactagaggacctgccctgtaagaaatattacagggggagtttcaggttgaaataaagggacattagacagtaactcaaactaacatgaataaataaacagcaatggtaaaggtaacaatataggtaaatataaagacaatattaatttatttttatgccactttttcctctatctaataaa

SEQ ID NO: 118441 - DNA, 609 bp, Homo sapiens
agagcactctacataacaatrgaaaaaatatatacattcttcccaagtgtatatggaaaattctccatgacagaccatgttttaggctatacaacaagccccaataaatttacagggattgaaatcatataacactatgttctcaagccactgcaataaaactaaaatcaataacaaaaggaaatctggtaaattttcaaatatatggaaattaagacatttttaaattgccaatgtgccaaagaagaaatcacagggaaattataaaatagcttcagcagaatgaaaacaaaaacgtaacacaccagacattataggatgcaatgaaagcagcactcagagggacatttagagctgcaaaggcctatattaaaaacattagagattgtaaatcaataaactcatctttttgtctaaacaagtaagaaaagaagagaaaatggcatctaaaccaagcaaaaggaaggaaataattaagattagactatggataaacaaaataaaaaatgacgaaaaaagagaaaaaagtttctttgaaaatatcaccaaaattgactaacttctaagtaaaataatcaagaaaaaaagagttaaacattaaattactga

SEQ ID NO: 118442 - DNA, 637 bp, Homo sapiens
ttatgaaaacatcattaattgttaaggttgatgttcatacaaattgtattacacttaaaaacaatttgttccttagaattactcactttgaaagggttttcaaataagtccagcgattgctaaggcctcatagccatgarttagtcacagccaaccacaagcaaaatcattaaaacctcttttaaacatactacagcaaataataataataattaacgtgaaatgtgggtgactttcagtatgtttgataaaatgtgggttgaaatctccaaaaggaagagcgttcagggtcttcgaaagtcttaggattactctagaaccagagtatagaatatgcactcatatttataaatcacttactctgtgccaggctcttctgaagcccttcccatgcattaactcacttaattggtgagacaattcttgaggtagacacaatcaccattcccattctacaggtgaggaaactgactaagcaagtaagtggcacagctagaatggaaatcaatggcaccagggctcatgttctcagccaccttaccacatacaaagcttgccatgccgggtgtttccccaggagaaaacaagtgctggcaggttaagaagggagggaggtacatctccctaatgaggagtg

SEQ ID NO: 118443 - DNA, 637 bp, Homo sapiens
ttatgaaaacatcattaattgttaaggttgatgttcatacaaattgtattacacttaaaaacaatttgttccttagaattactcactttgaaagggttttcaaataagtccagcgattgctaaggcctcatagccatgagttagtcacagccaaccacaagcaaaatcattaaaacctcttttaaacatactacagcaaataataataataattaacgtgaaatgtgggtgactttcagtatgtttgataaaatgtgggttgaaatctccaaaaggaagagcgttcagggtcttcgaaagtcttaggattactstagaaccagagtatagaatatgcactcatatttataaatcacttactctgtgccaggctcttctgaagcccttcccatgcattaactcacttaattggtgagacaattcttgaggtagacacaatcaccattcccattctacaggtgaggaaactgactaagcaagtaagtggcacagctagaatggaaatcaatggcaccagggctcatgttctcagccaccttaccacatacaaagcttgccatgccgggtgtttccccaggagaaaacaagtgctggcaggttaagaagggagggaggtacatctccctaatgaggagtg

SEQ ID NO: 118444 - DNA, 637 bp, Homo sapiens
ttatgaaaacatcattaattgttaaggttgatgttcatacaaattgtattacacttaaaaacaatttgttccttagaattactcactttgaaagggttttcaaataagtccagcgattgctaaggcctcatagccatgagttagtcacagccaaccacaagcaaaatcattaaaacctcttttaaacatactacagcaaataataataataattaacgtgaaatgtgggtgactttcagtatgtttgataaaatgtgggttgaaatctccaaaaggaagagcgttcagggtcttcgaaagtcttaggattactctagaaccagagtatagaatatgcactcatatttataaatcacttactctgtgccaggctcttctgaagcccttcccatgcattaactcacttaattggtgagacaattcttgaggtagacacaatcaccattcccattctacaggtgaggaaactgactaagcaagtaagtggcacagctagaatggaaatcaatggcaccagggctcatgttctcagccaccttaccacatacaaagcttgccatgccgggtgtttccccaggagaaaacaaktgctggcaggttaagaagggagggaggtacatctccctaatgaggagtg

SEQ ID NO: 118445 - DNA, 472 bp, Homo sapiens
caagcttagatgtacaagtttcagtgagcatgttctatagaaccagtgcttcacacaacacccagtacctacaacatgttcaaatgaatgaacgaataaatgaatgaacaaggagggtcctggaaggggcaacatggtcagcctgtactccccactccatccactgaccacaacacaccaaggacagtggttcagtgccttgtttactgaccctctctttccttgggcctcagctgatttgccttcctggggaaaacttcccacatcaagtggctgagcctgtggatraggcacagttcagaggcctgtgcaggaaagcagcctcttggggccttccccagagccactaccagcacagaagcctggactttgacctgcaagccctgttctagcccccacttctgccccagcttggcctaagtccaggtgcagaacgtttttaaacatttaccagggttgatttaggagctat

SEQ ID NO: 118446 - DNA, 550 bp, Homo sapiens
cttatgcctattcttctgtggggcataagaaaaggttttcatgtcctataagatattaatamgctcctacattaattttactgctattactaatatttctggcagagtaaagattttaaaattaaaccaaaatctaaatagatgtattgctgacatcccagttccaaggggtgcagcaacccttacaagcttatgcctcaggagaatacctgagcatgtctcaggagaattatcatatatctaagggctagtaggaggaaaaacaaaactgctgagtcttccaggcaagaaataataaagtctggggaagggaactaaagtaaaccagccttgtcaagtgattgctgtctcatctttatgccatgcctgagtacgggagtccttcccctacccttctcatccacaccccgctttcttcttgctgggctttcttacaggtgccagggattagaagttttctagttcttcagataagacgtgtcttcaattcccacctcattccttggagacttccccagcaaaattagccaaagaagaacatctggctttc

SEQ ID NO: 118447 - DNA, 548 bp, Homo sapiens
tctagtaacaaaagctagaaactcaacacccttacttcctcatttcccctcaccccrtaattcaattcattatgaagttcttattaaacaatccttatatttatgcgtttctctctgtctccaccacaattcttgcccaaacagccatcatacccttccagaatttctgaaagtgctgtctatttggtctaacagacaatctttccatcagttatcttcactgtccaggagcaagggccctgttcccagagctctctggtctttgaaaaaatctgaccctcagctcaataaagctcaataacagttaaagcaggctacctagtcagtagcaggagcagtggatccccacacaaatcaaaagactccaatactcaaagcctgtgagcctcccagaggtaacttactcataactcaggaatctaaaatcagctaggccatggaacaaagcacctttatttaaatctgtgtggcaagtctgcttataaacatggaggaacagagaaagattatcaatgttaataattgccatgtgaatttccagaccaatc

SEQ ID NO: 118448 - DNA, 548 bp, Homo sapiens
tctagtaacaaaagctagaaactcaacacccttacttcctcatttcccctcaccccataattcaattcattatgaagttcttattaaacaatccttatatttatgcgtttctctctgtctccaccacaattcttgcccraacagccatcatacccttccagaatttctgaaagtgctgtctatttggtctaacagacaatctttccatcagttatcttcactgtccaggagcaagggccctgttcccagagctctctggtctttgaaaaaatctgaccctcagctcaataaagctcaataacagttaaagcaggctacctagtcagtagcaggagcagtggatccccacacaaatcaaaagactccaatactcaaagcctgtgagcctcccagaggtaacttactcataactcaggaatctaaaatcagctaggccatggaacaaagcacctttatttaaatctgtgtggcaagtctgcttataaacatggaggaacagagaaagattatcaatgttaataattgccatgtgaatttccagaccaatc

SEQ ID NO: 118449 - DNA, 548 bp, Homo sapiens
tctagtaacaaaagctagaaactcaacacccttacttcctcatttcccctcaccccataattcaattcattatgaagttcttattaaacaatccttatatttatgcgtttctctctgtctccaccacaattcttgcccaaacagccatcatacccttccagaatttctgaaagtgctgtctatttggtctaacagacaatctttccatcagttatcttcactgtccaggagcaagggccctgttcccagagctctctggtctttgaaaaaatctgaccctcagctcaataaagctcaataacagttaaagcaggctacctagtcagtagcagragcagtggatccccacacaaatcaaaagactccaatactcaaagcctgtgagcctcccagaggtaacttactcataactcaggaatctaaaatcagctaggccatggaacaaagcacctttatttaaatctgtgtggcaagtctgcttataaacatggaggaacagagaaagattatcaatgttaataattgccatgtgaatttccagaccaatc

SEQ ID NO: 118450 - DNA, 409 bp, Homo sapiens
agacttcaccactctgcaatatatgcatggaagaatcctgtacttagactccctaaatatattaaaaatgaaatttaaaaattttatttaaaaaaggatttccaaattttcaaatgtgtattttaatgtcaattagatatacacttgacatcatctgatttttttttattgaccagtggttgcctgccatakaacatggctccatggcaggggcgcatcttcccccacactagatttagagaagttactgggtccaggtgctcctcagtgctctcaggtactgcttgacctgctggaaaccacaaagtagatgctagtattgtgtgctttgcagtctaacaaccctgaaatacaaatcctacccagccaccacttctagaaatacaactttgaataatatacataactt

SEQ ID NO: 118451 - DNA, 630 bp, Homo sapiens
ttatgcatagaaactgttttccagaaactttaggccagatcatgggaagagaactgatcaccgataaacacagtaggtcartgccccatggcccatgtgatgaggtctgccctgctgtgggtggatgaaaccatgttggggctcaggattatacaggtgttaataacaatggagctctggggttggaaccacagtgaagacagatgacaattggacagcccttctttataatctaatgattgggggccagggacaagtatatatcaaatgtagtggtgagctaaataatagcttacacaggtatctggtcctaatctctggaatgtgtagttgttcctcgatgtagaaaaagggtctttgggaatgtgcttaaggattctgtggtggagcaatagctctgattttccaggtgtaccttaaatggaatcacaagtgctactataggagagagacagagggtggcttaaccggcagaagatgtgaaactgaaggagtgcagagaactttaccccaaaatagtggtccctgatgtaacgtgcattttgaattaaagaccttcagagatcaacagaggctggaggagaacgttctctgtctacatagagaccagagggagtatccaaggagaac

SEQ ID NO: 118452 - DNA, 494 bp, Homo sapiens
gggaaactcactatctaggcttctaggaatcccagaatcaggtgtgaccatccacgtggttagcaataagtttcctatgggaacttcccacccaattcagtgcttgcagaataagaaagcgctagcaaaaacatttaatatcttgtatttaaggtgagtcatagtccagacaggacaggcccatgagatgtggaaaaaatgtgtttccaaggctatgttaacatcactagggagtttcgtctcgggaaagcactctctataaagtcagttcttccaggtcctcaaaccaattcaaaacctagcctgctgattcaacttgtgtggacctcagccagtctggtattaggatgatagtgtaggtattccarcttcctaggggagctctgctgaatacgttagctcatccctgggcaatgttgttggcacagccccatgttacctcatctatcacatggttaccagagcgagctcaccatcttgcacacctgaacatg

SEQ ID NO: 118453 - DNA, 588 bp, Homo sapiens
agcagggactacaagtgagctccaactatgtggttaatttttgaatttttagtagaaacggggttttgccatgttgcccaagctggagtcaaactcctggcctcaagtgatttgcctgcttcagcctcccaaattkttgggattacaggtataagccatcacacctggcttaatttacatttccaccaactttgtgcaaggattcccttttttccacatccctaccaacatttgttatcctttgtccttttgctaaaagctattcttacaggtgtgaggtgatacctcatgaacaaatgtttatttaggcagggagtaggagactcccattttagcctccgatcccatccactttccaagatctgactttattagaccttaattttagatttatggtcacctcattgtcccatcactaacatatcccatgattttcatttgatcatcagtttgctttgtgtaatttttatagtttaaaacctaaagggggaaaggggatcaggtcacctgtcctatccctacataataaatctatttacttttgcaaactatccacaccgcaagttcagtaattaaaaactagaaaaa

SEQ ID NO: 118454 - DNA, 588 bp, Homo sapiens
agcagggactacaagtgagctccaactatgtggttaatttttgaatttttagtagaaacggggttttgccatgttgcccaagctggagtcaaactcctggcctcaagtgatttgcctgcttcagcctcccaaattgttgggattacaggtataagccatcacacctggcttaatttacatttcyaccaactttgtgcaaggattcccttttttccacatccctaccaacatttgttatcctttgtccttttgctaaaagctattcttacaggtgtgaggtgatacctcatgaacaaatgtttatttaggcagggagtaggagactcccattttagcctccgatcccatccactttccaagatctgactttattagaccttaattttagatttatggtcacctcattgtcccatcactaacatatcccatgattttcatttgatcatcagtttgctttgtgtaatttttatagtttaaaacctaaagggggaaaggggatcaggtcacctgtcctatccctacataataaatctatttacttttgcaaactatccacaccgcaagttcagtaattaaaaactagaaaaa

SEQ ID NO: 118455 - DNA, 588 bp, Homo sapiens
agcagggactacaagtgagctccaactatgtggttaatttttgaatttttagtagaaacggggttttgccatgttgcccaagctggagtcaaactcctggcctcaagtgatttgcctgcttcagcctcccaaattgttgggattacaggtataagccatcacacctggcttaatttacatttccaccaactttgtgcaaggattcccttttttccacatccctaccaacatttgttatcctttgtccttttgctaaaagctattcttacaggtgtgaggtgatacctcatgaacaaatgtttatttaggcagggagtaggagactcccattttagcctccgatcccatccactttccaagatctgactttattagaccttaattttagatttatggtcacctcattgtcccatcactaacatatcccatgattttcatttgatcatcagtttgctttgtrtaatttttatagtttaaaacctaaagggggaaaggggatcaggtcacctgtcctatccctacataataaatctatttacttttgcaaactatccacaccgcaagttcagtaattaaaaactagaaaaa

SEQ ID NO: 118456 - DNA, 616 bp, Homo sapiens
ttgccatgcattattgcatatattttgctcatcgtttgatggtttgaagcaggagggtaaatctgttccttgttacttaatctttaccagaatcaggagtcccacatatcagctctcatattcttcattctagagaatttatttagttgtttgggcattttctatactttctctctcttttcattttcatggaatcaatgtcttatttctctgagaattagttttcctctattgcatatcttgcttctatttcttccaagttgcttatattcctctttatttctctgggtatttctctttgatttggatggtaattttttgtatttttagcagagacggggtttcaccgtttttgccaggatggtctcaatctcctgacctcgtgatccacccacctcggcctcccaaagtgctgggattacaggcatgagccactgctcccagtccatgtgaaccattttttaatggcttcctcctctaatagcttagtcttagctttagttggtaagcaaagttagttaatasttatcagtttacttttaacatatggccaagtcatatgttgaaactcaactgtcagtcgtttaattttttccctcaagggttaatgcttttc

SEQ ID NO: 118457 - DNA, 280 bp, Homo sapiens
aggcttgtttaaacccacttaagaatggctgcataaccagggcccagacctctcaggggtaagggtctggatgatccactaggtaagctcatattggcatgggttctatcaaaggtgagagaaatctgaaacargatttagagaggggagaaaatgaaaaccacttccaaacttcacaccagcagcaacatcacgagttaacacccatcctactgaccttcccgttactgtttcctgagggccaaaaaccaatcaaaatcctggagaagctgctcccaga

SEQ ID NO: 118458 - DNA, 280 bp, Homo sapiens
aggcttgtttaaacccacttaagaatggctgcataaccagggcccagacctctcaggggtaagggtctggatgatccactaggtaagctcatattggcatgggttctatcaaaggtgagagaaatctgaaacaagatttagagaggggagaaaawgaaaaccacttccaaacttcacaccagcagcaacatcacgagttaacacccatcctactgaccttcccgttactgtttcctgagggccaaaaaccaatcaaaatcctggagaagctgctcccaga

SEQ ID NO: 118459 - DNA, 492 bp, Homo sapiens
gggggaaacataattatttataggattaatgtttttagaaatattcacacagaacaacaaaatgagcaaaatagctcacaccaattatcttgaaaacataaatgaaagttgtaagtcaatagcagtgtatatgtaacaatttatcatactaatgcttcaataatgtcatcaatcatttagtatttactttggaaagcacagaaataagccaagtatgaagaacaagaaaagaacaataaacaaaaatcctgctctggagcagttcctaatctaatgagggagaaagaattatcattaataaaagacccattcagacataatacaaaaggagtatcatgacaagagtataactagtaacaaccttccttatgaagcaatatacatgcatattgaaacattaagattaggtaaaakatttatttccagcgtcaagcttcacaaaaatagggtgttttaatcagaattttgcagaataattttgtaacttagact

SEQ ID NO: 118460 - DNA, 586 bp, Homo sapiens
aatgataattacataatgatgatgaaataaaataacttcctttgagggcacttgtgttagtttcccattgtcaaaataaattatcataaattcaatagcttaaaacaaaacaatttattatctttcagttctgtaggccagaagttcaacacaggtctcactgggcaaaaatcaaggtatctgcagggttgcattcctttttagtaattctagaagataatctgatttcttggctttttcagaggctgcaaaattccttggcttgcagcccctttgtctatcttcaaatccaacagcatagtatctctctgactcttcttccgcaattgtgcctctttctcaccacaactgggraacgttcttcacttttataaaatattttatgttgttgttgttgttatgtaaagaacatattgacagattccaaagattagagtgtgggtgtctttgggagtcctttattcttcctacatcatctcagaacaattaattactgatttaccaaatcccagaagtcctctaaagtagatttaaaggaactcctacctcatgtagctctagggaagactgtgctaaaaataggccc

SEQ ID NO: 118461 - DNA, 541 bp, Homo sapiens
caggggcctgtaccagatatgaagattttgagggtcttagggtctggggcatacagagcatctcctctaaattaaagcataagcaattttacttcccctaagaaagtgtcacatcacttgatggggcttttggatttgaatcatagtttataatgtccttgaaattactgaaccaactaatttttatatcacccaaaagtctgccagttttgagtgaaagcctagagaaaaagctggtagtgtttgtctcctaagtcaaagatgctttgcaagctactgtactacttgggatgtatgattttatagatctgataraacttaatgcacctggtagataaaatgttctattggaaagccctctagaggagtcatagcagttactatccattttcaaagcaactcctgacatgctcctgggcccttgtagagactgaaccatggaatgccaaatgactatgttacctgtgctgtccatcatgagttacatattatattcactgagtcataaaattgggtgggagacatggtatatttaggatgt

SEQ ID NO: 118462 - DNA, 567 bp, Homo sapiens
gaactagcacacatctcaccagtcctgaagctctgatgggtctggaacatctagctacctggggagaaccaaggtggtggcttgagctggtagatgccatagctaccccactggggtcagcacagagtgagaagataaagaccacagatgcctgtatctccatgggaaaggaaagagtagatagaagtcctcagaatctctgtctaggccaattggtggggkacttctctatgagaacatttcaggaagactgagagagatgcctgctttgcctaaagtgcagaaagcaacatagagagtcaaggaaaatgaagaatcagacaaaaatatttaaacaaagaataagataatggaaaccaaccctaatgaaatagatttatatgacttacttgatagagaattaaaataactcttaaaaagagactcactgaggtcaataatgcaattcatgaacaaaactagaattttcaggaaagagaaaatatttaaaagtactaaacagaaggcatggagctgaagaacacaataatagaactgaaaaaaaaatcactagaggggtcaatagca

SEQ ID NO: 118463 - DNA, 656 bp, Homo sapiens
ctagaaagatactatctgagactgggtaatttataagcaaaagagatttaattgactcacagttctgcatggctggggaggccttaagaaacttacaatcatggcgcaaggcaaagaggaagcaaggcatgtcttacatggtgacaggtgagagagcaagcaaaggggaaatgccccactttaaaaccatcagatctcatgagaactccctcattatcaagagaacagcaagggattacatgatccagtcacctgccaccagttcccaaccttgacacatggtgattacaatttgagatgagatttgggtggggacacagagccaaaccatatcagctctcttagtccatttttctgttgattgtaatagaatacttaaaactgagaaattcataaagaaaaggaatttatttattacatttatgaaggctggggagtctgaggtctagggaaggcatttggtgagaaccttcttgctggtagggactctgtggtgtcccgaggtggtgcagggcatcacatggtgagggagcagagtgtgctaataktctagctcaggtctttcttctcttatacagccactagttctcctcctatgatgcttcattaattcattaacccattaattcattcattaggacagagctttcatgatt

SEQ ID NO: 118464 - DNA, 572 bp, Homo sapiens
gtctgcaatcctggaaatgagcagccccaactatgttatgacccagagttcttgccctatgacttcgggtttaaagtccgaattggcgaacccctaatgccattatataccaaccccacagaaaccagggtcagtaaacttgtaaacaaaacagaagtattcccgtactcgcataaaaggcctgtctccayatattttgatgcctgccaagctgcacatctcagtaaactaaataatattaaaaccacctgtaaaaatctaggacaagaaaaactcagcagcagagccattattcgggtcgtggggtatgtctgttcttggtggctttgcaaaagtaccaactggtatcacaagatgggtatgtacccactcaagaagaaatagctaactgtggtgctctttactaatctacatttgtgtcgagcaccaaaagggaggaatgaagaaggaaataatgaaaataactataacctaatagtagtagtaatagaaattttaaaatcttcctaaagttgctgcaaagtgtgacaccccccttacactcaagttaaaaaggaatactaacagcctgt

SEQ ID NO: 118465 - DNA, 572 bp, Homo sapiens
gtctgcaatcctggaaatgagcagccccaactatgttatgacccagagttcttgccctatgacttcgggtttaaagtccgaattggcgaacccctaatgccattatataccaaccccacagaaaccagggtcagtaaacttgtaaacaaaacagaagtattcccgtactcgcataaaaggcctgtctccatatattttgatgcctgccaagctgcacatctcagtaaactaaataatattaaaaccacctgtaaaaatctaggacaagaaaaactcagcagcagagccattattcgggtcgtggggtatgtctgttcttggtggctttgcaaaagtaccaactggtatcacaagatgggtatgtacccactcaagaagaaatagctaactgtggtgctctttactaatctacatttgtgtcgagcaccaaaagggaggaatgaagaaggaaataatgaaaataactataacctaatagtagtagtaatagaaattttaaaatcttcytaaagttgctgcaaagtgtgacaccccccttacactcaagttaaaaaggaatactaacagcctgt

SEQ ID NO: 118466 - DNA, 572 bp, Homo sapiens
gtctgcaatcctggaaatgagcagccccaactatgttatgacccagagttcttgccctatgacttcgggtttaaagtccgaattggcgaacccctaatgccattatataccaaccccacagaaaccagggtcagtaaacttgtaaacaaaacagaagtattcccgtactcgcataaaaggcctgtctccatatattttgatgcctgccaagctgcacatctcagtaaactaaataatattaaaaccacctgtaaaaatctaggacaagaaaaactcagcagcagagccattattcgggtcgtggggtatgtctgttcttggtggctttgcaaaagtaccaactggtatcacaagatgggtatgtacccactcaagaagaaatagctaactgtggtgctctttactaatctacatttgtgtcgagcaccaaaagggaggaatgaagaaggaaataatgaaaataactataacctaatagtagtagtaatagaaattttaaaatcttcctaaagttgctgcaaagtgtsacaccccccttacactcaagttaaaaaggaatactaacagcctgt

SEQ ID NO: 118467 - DNA, 440 bp, Homo sapiens
ggtcatggtttttaattcattctgtcagtctatatattttaattaatgtttacattagatataattattgatatattagggcttaggttctccattttattttttgttttttggttgttctatttgttattgctctgcttttttycccttgcctttctgtggtttaattgaacactttttagaattccattttgacttattattagttaattttagtgtatttctttgtatcactttttaaagaggttgctataggtattttattatatacaaacaacttactggaatctactgctgctacaaattaccagtttgaatgaaatgcagagacttttcctttctttacttccctttacttctctcatttataataaattttattgtttttccctatatatattatgaaccacatcagactatgttatttcagctttaaccat

SEQ ID NO: 118468 - DNA, 626 bp, Homo sapiens
ttatattttctttgctgatcttctatatttattactttctgctctgcttttttttaaaaaaactccttcatttcatgtttgttttattggttgttctcatgmcttttctcagtcacccttattgggttgttagatgagaacatttgttctttgtaattttatctttatttttgagatgattttgtctttttattgacttactttcttgaagtcagttgatttttatttcatatttcctaaggttttgttgcccatttctgtcataatttttaaatttttgatttgagattacttttcatatctgaaaatgcttgttattttgggagtgttaaatgacagtttttcaatacttcaccttttttttttttttttttggccagtttggctagatgtttattgattttaaccttttcaaagaactctcttttggtttcattgattatctgttttctttttgtctttaattttattgacagttgctacaatccttatttctttctttattcttgctttgggtttgatttcatcttcttgttttaagtaagccttgcttactgattttagatcttttctaatccatttggattagtgtcccatttccacttttaaaaaaatggtgtgcattc

SEQ ID NO: 118469 - DNA, 626 bp, Homo sapiens
ttatattttctttgctgatcttctatatttattactttctgctctgcttttttttaaaaaaactccttcatttcatgtttgttttattggttgttctcatgccttttctcagtcacccttattgggttgttagmtgagaacatttgttctttgtaattttatctttatttttgagatgattttgtctttttattgacttactttcttgaagtcagttgatttttatttcatatttcctaaggttttgttgcccatttctgtcataatttttaaatttttgatttgagattacttttcatatctgaaaatgcttgttattttgggagtgttaaatgacagtttttcaatacttcaccttttttttttttttttttggccagtttggctagatgtttattgattttaaccttttcaaagaactctcttttggtttcattgattatctgttttctttttgtctttaattttattgacagttgctacaatccttatttctttctttattcttgctttgggtttgatttcatcttcttgttttaagtaagccttgcttactgattttagatcttttctaatccatttggattagtgtcccatttccacttttaaaaaaatggtgtgcattc

SEQ ID NO: 118470 - DNA, 500 bp, Homo sapiens
ggcagcatgcataccctcaggatgaagtcagtggaactgcacagagtgcccccatactttggagtatcttctttaaaatggaacttggcctccatttcttccatctggggcactcttaggctgtttaccccatgtatggagtcaaacagatgccccagggagctctagaacratgcctatggggtcatcctgggcccccctggccgagccccagttctaggaggatgacctagcaagcaacaggctcccattggctggcatgggttttatctcacggaattatgtgagattgcaccactaaaatgctgctgccaggtggagtttaggatgactattactcatgccagacacacgctgagtttggggctttgtctgttgacagatcattgtcaatccttgggtctgttgggtgggcaccggtattggcttttgccatgttctgacagcagtgccacctgcaggatataacacccaagggcaactggatggtggcaggtgtc

SEQ ID NO: 118471 - DNA, 500 bp, Homo sapiens
ggcagcatgcataccctcaggatgaagtcagtggaactgcacagagtgcccccatactttggagtatcttctttaaaatggaacttggcctccatttcttccatctggggcactcttaggctgtttaccccatgtatggagtcaaacagatgccccagggagctctagaacaatgcctatggggtcatcctgggcccccctggccgagccccagttctaggaggatgacctagcaagcaacaggctcccattggctggcatgggttttatctcacggaattatgtgagattgcaccactaaaatgctgctgccaggtggagtttaggatgactattactcatgccagacacacgctgagtttggggctttgtctgttgacagatcattgtcaatccttgggtctgttgggtgggmaccggtattggcttttgccatgttctgacagcagtgccacctgcaggatataacacccaagggcaactggatggtggcaggtgtc

SEQ ID NO: 118472 - DNA, 430 bp, Homo sapiens
gaattcatttaccagttctagaagctttatggatgagtcttcagggttttctrggtatatgatcatgtcatcagcaaacagcaacagcttgacttcctttttgtcagatcacagggaaaatctctcttgcaacctcctcttgagcccactctacccagaccatccctcctcagggaaggggcccagagataaagttctaatcttgactctatctagttctcaagccaatgtatggtctttaagctccacgaaggctgcctccagagatggccttattggcttcaaacaaaaataaacaagcctggatggggccctaaaaaaataagtgattacttgctattttttataaaagtatcattcctgtctgcaggatacacaataaacttcttttgtgttttcctgagtcatcaaaaactagttaattgaagac

SEQ ID NO: 118473 - DNA, 644 bp, Homo sapiens
tgtttgttcctcttcatcctttctttctctattcttgtcttcctgtctatttcagaaagatgatctgcaggctctgagattctttcctttgcttggtctattctgctactgatacttgtgattgtcttgtgaagttctcatgttttgtttttcagctccatcgggtcaattatrttcctctgtaaactggctattttggttgtcagttcccgtattgttttgtcatgattcttagcttctttgcattgagttagaacatgcttttttagcaaggcaaagtttgttattacccaccttctgaagcctactttggtcaattcagacatctcagcctcagcccagttctgtgcccttgctggagagatgttgtggtaatttggcggagaagaggcacccagctttttgagttttcagcgtttttgcattgattctttctcaccttcatgggcttatctaccttcaatctttgaggttactgacctttgaataaggtttttagggtcttttttgttgatgttgttgctttctgtttgtttgttgtaacaatcaggccactcttccagtaggtctgctgtggttagctgggggtccactccagaatgtagtcacctcagcccctcccacacctagatgtatcaccaggg

SEQ ID NO: 118474 - DNA, 574 bp, Homo sapiens
gatttctgtccacttatatttgagtcttctgagctctttatatattctggatacaaatcctttgtgagatatacgaatattttsttccagcttctggcttgctttttcatttacttagtaatgtcttttcctcatgatttttgtgtcatatccaaaactgtttgcctgtacaaactggctacatttctcctatgttttcttctaaatgtgtgtagtttagctttcatgttgaggtttaatatttatttcaagttaattcttgtatggtgaaaggtaaagattgaagtttattttttccttcatggttatagaattgctccggcaccttttgaaaaaaaaaataaatgttcattccctcattaaattgtgctgttatttggtcaaatatcaatttgcctttcatagataatatctggcttccttattctgtttcatttatctaaatgcatattattttactaatattatgctattgtaattaattactctcgttttatagtgtatcttgaaattaggtactgctgggccagtgacttatttttgtaaataatatttttttaaaaaataggcttcc

SEQ ID NO: 118475 - DNA, 500 bp, Homo sapiens
ccctgcccacctaacttttgtatttttagtagagatggggtttcaccacgttggccaggctggctttcgaacttctgacctcaggtgatctgcctgcctcggcctcccaaagtgctgggattacaggcgtgagccactgtgcccgtccgccagcttgctaattttttaaagaaaggttgcttaagtttcctgggattgggggaagattgcatcaaatctatagatacatttggaaagaatactatattatcaatatttastcctgcaattcaacaagacgtaactctcaatttattttgaactctttaattttcctttgcaatattttggacttttaagtgaaaagtcttgtatatatattttttaatttgacaagtaatactgcatatattcaaggtgtacaatttgttttgatatttatatacattggaaaatgattttcattgtcaaactaattagcacatccattacatttgcacatctatttttaaagtgtttct

SEQ ID NO: 118476 - DNA, 504 bp, Homo sapiens
cacaaatttgtaccatctgagacctaagactgtgacctatttggaaatctggtctttgcagttaattgagttaggaggtggttgtactgtgttagggtgggccctaaatccaatgactaatttactcataaggaaaggagagatcacagagacacagaaaagtcatgtgaagatggaggcagagattaaacttacgttgctgcaagccaaggaaccccagaggttttcagaagttggaaatacataactactctatgatccaattcctaagatamattaaaacatatgttcaaaaagaaaagacttcttcatacctgtaatcccagcactttgggaggcctaggcgggcagatcatgaggccagaagttcgagaccatcctggttaacacagtgcaactccatctctactaaaaatacaaaaaattagccaggcgtggtggtaggcgcctgtagtcccagctactcgggaggctgaggcaggagaatggcatgaacccgggagg

SEQ ID NO: 118477 - DNA, 504 bp, Homo sapiens
cacaaatttgtaccatctgagacctaagactgtgacctatttggaaatctggtctttgcagttaattgagttaggaggtggttgtactgtgttagggtgggccctaaatccaatgactaatttactcataaggaaaggagagatcacagagacacagaaaagtcatgtgaagatggaggcagagattaaacttacgttgctgcaagccaaggaaccccagaggttttcagaagttggaaatacataactactctatgatccaattcctaagatacattaaaacatatgttcaaaaagaaaagacttcttcatacctgtaatcccagcactttgggaggcctaggcgggcagatcatgaggccagaagttcgagaccatcctggttaacacagtgcaactccatctctactaaaaatacaaaaaattagccaggcgtggtggtaggcrcctgtagtcccagctactcgggaggctgaggcaggagaatggcatgaacccgggagg

SEQ ID NO: 118478 - DNA, 497 bp, Homo sapiens
  misc_feature (1)...(497): n = A,T,C or G
agtttttgtcttgaaatatattttatctggtatcagtttaacttctcttgctctatttggtttccattggcatgaaatattntttcgtccctttattctcagtctatgtgtctttctaggcgaagtgtgttcttgctggcaacagatcgttggaccatattattttatccattgagctactccatgtcttttgattagagaatttatttcacttacattcaatgttattattaataaataattatttactcttkctattttgttatttgtttcctgttttgtggtctctttgtccttctttccttccttccagttttccttttaatgaaagtgattttctgtggtagtgtgatttaatttctttttattttttgtatatctgttgtatgttttttgatttgagattaccaggaggcttgaaaatactatattataacccattgttttcagcttattatgacattctttgcaaaagccaacaagcaaaacgtaaaaac

SEQ ID NO: 118479 - DNA, 525 bp, Homo sapiens
aattgtgccttaataaaatgggcaagaccaggggaatggagcaggaaggggttcagattctgcttttcatttagcacctgagatccacatttgggagctctttggatgcccatccgtttttgaatagccttcacatatgtggggcaattcccatattatgagtctcagtgtcccttgtggttaggacataagcgtggcacgctgggcttccaataaggcatgcttatgtgatgctttgrtttgaaagggcatgaggaaacaggtttatgctgacttctctggtttgcctatgtaagggccaagggaaaacttccctttgctctctaaagattcactgaaaataacacaaaaaaaggcagattaataggggaaaaggcatacaaatttattaacatgcgcagggaaaataacagtgattaccccaccacacaatggggtagaaaaggggtatacccttttttcttaaaggaaagggagatggagaagtatggatgattttaggggtatagtaggtgatttttggag

SEQ ID NO: 118480 - DNA, 576 bp, Homo sapiens
tcatttagtcttcattttttattatcttctcaatccactggaaaacaccagcctgtatctattattagtaacagtagaaaaaaatgctcttttttttcattgctgggttgagagtttacatttctatgagggtctgacctctgttgataacatggatttcaacagattttcctttaatctatttgagcatttgttaaataagagagtggtgtagtagaaagaattacagtcatgccccacttaatgacaggaatccattctacgaaaggcattgttaggtgattttcttgtatacaaatgtcatcgagtgtacttccacaaacttatatggttatactgtactgcatacctaggctatatgggttagccgattgctcctaggctattaacctatacagcatgttgctgtactgaatactgtaggcaattgtaatgcaatggyatttgtatatctaaaactagaaaaggctctgtaaaaatacggtattataaccttatggaaccactgtcatacacgtggtacttcattgatcaaaatatcattttggggtgcataactgtatactagtctgtgtg

SEQ ID NO: 118481 - DNA, 595 bp, Homo sapiens
gcctgtgttcttcttatatctgagtcattggcttaatactctgtctgcctttcaggtgctgtgaaactgacatgtccctttgctctcccacagataggtctccaagtaggcttcttaagccccttgttaggggtagagtagtgacatgtaccattgctgggacagtgaattagataacgttctggtcaaaygtggtgagataagtgttggctatgaaacctatattcctctttgaatgtttccactcactacctgtgtgatgtaaatcaagttgctcaacctctctgtgtctttgtatccccattaagaaggatctctaatgtccctcgtaggtccaatcttttttcttttactcctccatttcttcatctcatatgtacttattgaggtatgctactgtggtagccccaagggctaagtcacgaataaaacagctaccatttatggctttaggagtttaaatttttagcacaaaagacacatattaagtagttttatcctatgtgcaaataaaatagccatctccctcctagactcttgattggggtatgtcctagatagggaaaaagataaatacctagattacacaggcctg

SEQ ID NO: 118482 - DNA, 595 bp, Homo sapiens
gcctgtgttcttcttatatctgagtcattggcttaatactctgtctgcctttcaggtgctgtgaaactgacatgtccctttgctctcccacagataggtctccaagtaggcttcttaagccccttgttaggggtagagtagtgacatgtaccattgctgggacagtgaattagataacgttctggtcaaatgtggtgagataagtgttggctatgaaacctatattcctctttgaatgtttccactcactacctgtgtgatgtaaatcaagttgctcaacctctctgtgtctttgyatccccattaagaaggatctctaatgtccctcgtaggtccaatcttttttcttttactcctccatttcttcatctcatatgtacttattgaggtatgctactgtggtagccccaagggctaagtcacgaataaaacagctaccatttatggctttaggagtttaaatttttagcacaaaagacacatattaagtagttttatcctatgtgcaaataaaatagccatctccctcctagactcttgattggggtatgtcctagatagggaaaaagataaatacctagattacacaggcctg

SEQ ID NO: 118483 - DNA, 565 bp, Homo sapiens
aagaaactgaggcccagggaggctaagagtcctgccaggatcattcacctttcaaggtaaggagccagttccagacctgggtttgtgcagctccaagctcccccgtctttctacaatgctagatttagactatagcaatctagcaagtgtggccacacaatgrtcaagttggatttagatgatgttccctataaatccattctcctctcccgtgtaagcaaggcaaagtcctccaggccatggggagtccctgaagactcgatgaactgcagtggccacatcaggaggttgcaggttgaccagaactcaccgacacagcaggagagcagcttggaacctgcaacctagccaaaacctagtgccttggattgggggagaaaacaggcagccattcctctctctctgctggctagaggggattctggcttttcctgccagagccacccctttccctcctcctaaagttgatggtggttctttaaggaaagggagaagtgcacggtgtgatagggcaggaagagaagaaaatggaggagaggaggggactttcccataagcaggcaga

SEQ ID NO: 118484 - DNA, 565 bp, Homo sapiens
aagaaactgaggcccagggaggctaagagtcctgccaggatcattcacctttcaaggtaaggagccagttccagacctgggtttgtgcagctccaagctcccccgtctttctacaatgctagatttagactatagcaatctagcaagtgtggccacacaatgatcaagttggatttagatgatgttccctataaatccattctcctctcccgtgtaagcaaggcaaagtmctccaggccatggggagtccctgaagactcgatgaactgcagtggccacatcaggaggttgcaggttgaccagaactcaccgacacagcaggagagcagcttggaacctgcaacctagccaaaacctagtgccttggattgggggagaaaacaggcagccattcctctctctctgctggctagaggggattctggcttttcctgccagagccacccctttccctcctcctaaagttgatggtggttctttaaggaaagggagaagtgcacggtgtgatagggcaggaagagaagaaaatggaggagaggaggggactttcccataagcaggcaga

SEQ ID NO: 118485 - DNA, 598 bp, Homo sapiens
ggaattctgggagagagaattcaagttgagatttgggtggggacacagccaaaycatatcagtgcactctcttcatttgaccatgcaatgcatgtttttaataataaacatctccatccaatatgaaaactcatactgtaactgtgatttataaaacctttggcccaatctttttcctacaactacacttctctttatctaccttttatttttactttttgcttacttgagcacatgctatacatgcccctttttatgcctctcaggaggtttacagtggtggaatttcatcactcagatagctttccactccacgccctttggatcccaaaatggactgcccatttatctctttctgtgtgaaggaagtcagggttaggagagtcatctgtatatgcctcctcgtttatctctgattctttagcaaaaccaccctgaaacccaggcagatgtcaagtcagcttgtccttgagggtctctgctaaaggagagccccagtggccactgcagcctccataaatcgctgtggtcaagcatgcatcttgccatcagaccaaccaccacctgatatgtgaaattcacatttgttaattatttg

SEQ ID NO: 118486 - DNA, 631 bp, Homo sapiens
agcacacagtattctgccttggaagaaaatttccattctgcaagacaagactatgacaaacaggcattttctcaaaatgactaatgcctcaaaagaaggcagaatgagaaacttgatgytgtgtatggtatttctgtgaaacatcacccccctgtttggtggaatatttaactgcatttcagttttcctgaagtctgaatatcacatttgatgctgttgcaaagtctcactggtgagaactgaaattgcatgctaacttcacatttggggtggggaagtggggtcctcccctgaaacaggtaaatgagaactgggagtgcattactcagttaggcaggtctatggttatcaatcagaggagaatagtcagtatttgctaaaagacaaaaatccccaagaaggtaggatggagagcttttgaacaggaagctgagtctccctttgaaatgagtaacgggaatagagtctgtgtaaaaagcaagagaccacatggctactggacgacagggcagctgccatcttgccagagatcctggggcaaggttggaaagataaacaagtgagcctgatctttagacaaagctgtcagcaccaaaggtccacagtaagctcaagtgaaggtaggacggaa

SEQ ID NO: 118487 - DNA, 631 bp, Homo sapiens
agcacacagtattctgccttggaagaaaatttccattctgcaagacaagactatgacaaacaggcattttctcaaaatgactaatgcctcaaaagaaggcagaatgagaaacttgatgctgtgtatggtatttctgtgaaacatcacccccctgtttggtggaatatttaactgcatttcagttttcctgaagtctgaatatcacatttgatgctgttgyaaagtctcactggtgagaactgaaattgcatgctaacttcacatttggggtggggaagtggggtcctcccctgaaacaggtaaatgagaactgggagtgcattactcagttaggcaggtctatggttatcaatcagaggagaatagtcagtatttgctaaaagacaaaaatccccaagaaggtaggatggagagcttttgaacaggaagctgagtctccctttgaaatgagtaacgggaatagagtctgtgtaaaaagcaagagaccacatggctactggacgacagggcagctgccatcttgccagagatcctggggcaaggttggaaagataaacaagtgagcctgatctttagacaaagctgtcagcaccaaaggtccacagtaagctcaagtgaaggtaggacggaa

SEQ ID NO: 118488 - DNA, 631 bp, Homo sapiens
agcacacagtattctgccttggaagaaaatttccattctgcaagacaagactatgacaaacaggcattttctcaaaatgactaatgcctcaaaagaaggcagaatgagaaacttgatgctgtgtatggtatttctgtgaaacatcacccccctgtttggtggaatatttaactgcatttcagttttcctgaagtctgaatatcacatttgatgctgttgcaaagtctcactggtgagaactgaaattgcatgctaacttcacatttggggtggggaagtggggtcctcccctgaaacaggtaaatgagaactgggagtgcattacycagttaggcaggtctatggttatcaatcagaggagaatagtcagtatttgctaaaagacaaaaatccccaagaaggtaggatggagagcttttgaacaggaagctgagtctccctttgaaatgagtaacgggaatagagtctgtgtaaaaagcaagagaccacatggctactggacgacagggcagctgccatcttgccagagatcctggggcaaggttggaaagataaacaagtgagcctgatctttagacaaagctgtcagcaccaaaggtccacagtaagctcaagtgaaggtaggacggaa

SEQ ID NO: 118489 - DNA, 539 bp, Homo sapiens
ttagacaggctcaatcccccttttcacagttatattcaatagctggaagacagatgcgtccaatgggtttgatttgttttggcattttgggcacaaacttaattatgataaaccagtccagttcttttttacttaccctcctcctcagagtggatcacactgataaagtgtgatttaagtatatttttcagtaattctaataattgacccagggaaattaaaataatattttcctgttctacttgtcataatctgttgagatatctttcaaaatgtgctactgtggggaaaaaagaaattctatacacacattattgctgaaatttcctggctgtttgcctcccagaagggcaatgcatgaaatatttattcaaaaatggaaatattaagaattaaatgagtttaaaccaacctaattactttatgggcatttcttcactgcttaaggaaattccaaattatcttcagctctgcatagactgtgtcaactagaacatactgaaaaaaatgaaaaartcctctcaaacagccaacttgac

SEQ ID NO: 118490 - DNA, 512 bp, Homo sapiens
cccagcagtgtgggaaggctggctaggggttcatgcccaatggacctatgaaatgtacctcctacagggtactgctgcttaacagctacctgatttggcatctcctttggccaagttacagagcagactttccagggctcaggatgctagtccctcctcctccctttgtctctgcctgtccttagggatatttcttccttcaggcaatcacttcccatgggttaaggcaaggacaggtctcctgccaggcaacctaagatagtgggaaagctggatgatcacctcaatctcactttttccagtgtaggaactgtgaattgggtaaaattacctgcacacttgttgccrggaagaatgtgggttgtggggaagggcatcctcagagcctagatggtaggtaaattctcccatcctttgctcagaggtttttcacttctccatgacctcaagatctatctcatcttcacatttgagtcctgggttgttgctggcaaaaactttggtactgtata

SEQ ID NO: 118491 - DNA, 603 bp, Homo sapiens
gccttgtgccttaagcccaggtttgctttgactctagttaatgagtggagcactgcctgtcctggatggggttaaatttcaaaggaattatcccagcagtgtgggaaggctggctaggggttcatgcccaatggacctatgaaatgtacctcctacagggtactgctgcttaacagctacctgatttggcatctcctttggccaagttacagagcagactttccagggctcaggatgctagtccctcctcctccctttgtctctgcctgtccttagggatatttcttccttcaggcaatcacttcccatgggttaaggcaaggacaggtctcctgccaggcaacctaagatagtgggaaagctggatgatcacctcaatctcactttttccagtgtaggaactgtgaattgggtaaaattacctgcacacttgttgccgggaagaatgtgggttgtggggaagggcatcctcakagcctagatggtaggtaaattctcccatcctttgctcagaggtttttcacttctccatgacctcaagatctatctcatcttcacatttgagtcctgggttgttgctggcaaaaactttggtactgtata

SEQ ID NO: 118492 - DNA, 629 bp, Homo sapiens
cttccctaaatgttggtggtaatagataatatttattgatagcatcctatgtgccaggtcctgtgctacgtactttatgtacatcaacccccttagtcatcactgcagcctgtgactaagattgtgttattatctgcattttaaagctgaagaaacaggtgactgcgaaagtatcccaacagacctttttgcctgaagctsttctcagatttatctactgcatggcaagctgatttctcttttaaataagcagacctgcatgtaccatgcccttccttacaagcttcactggctcctcgttgtcctcagagtgtagcccaaactcttagccaggagtacagcaccctttattacttggtcactgagcacccatccaacctcatttccagtggctcttaccttggccccctatcccctcactcccatgttgtagccatgttggatacttgccagcacttgaaatatgcatattttccagcctcatttaattcttcatcctaaaaatactttgggggagcccaccatatgctaggtactgtcttaggcactagtgctatagctgtgaacaaaacagatcaaggcctgccctcatggcacttgcattctagtggggaagtcagacaatgcac

SEQ ID NO: 118493 - DNA, 629 bp, Homo sapiens
cttccctaaatgttggtggtaatagataatatttattgatagcatcctatgtgccaggtcctgtgctacgtactttatgtacatcaacccccttagtcatcactgcagcctgtgactaagattgtgttattatctgcattttaaagctgaagaaacaggtgactgcgaaagtatcccaacagacctttttgcctgaagctgttctcagatttatctactgcatggcaagctgatttctcttttaaataagcagacctgcatgtaccatgcccttccttacaagcttcactggctccycgttgtcctcagagtgtagcccaaactcttagccaggagtacagcaccctttattacttggtcactgagcacccatccaacctcatttccagtggctcttaccttggccccctatcccctcactcccatgttgtagccatgttggatacttgccagcacttgaaatatgcatattttccagcctcatttaattcttcatcctaaaaatactttgggggagcccaccatatgctaggtactgtcttaggcactagtgctatagctgtgaacaaaacagatcaaggcctgccctcatggcacttgcattctagtggggaagtcagacaatgcac

SEQ ID NO: 118494 - DNA, 629 bp, Homo sapiens
cttccctaaatgttggtggtaatagataatatttattgatagcatcctatgtgccaggtcctgtgctacgtactttatgtacatcaacccccttagtcatcactgcagcctgtgactaagattgtgttattatctgcattttaaagctgaagaaacaggtgactgcgaaagtatcccaacagacctttttgcctgaagctgttctcagatttatctactgcatggcaagctgatttctcttttaaataagcagacctgcatgtaccatgcccttccttacaagcttcactggctcctcgttgtcctcagartgtagcccaaactcttagccaggagtacagcaccctttattacttggtcactgagcacccatccaacctcatttccagtggctcttaccttggccccctatcccctcactcccatgttgtagccatgttggatacttgccagcacttgaaatatgcatattttccagcctcatttaattcttcatcctaaaaatactttgggggagcccaccatatgctaggtactgtcttaggcactagtgctatagctgtgaacaaaacagatcaaggcctgccctcatggcacttgcattctagtggggaagtcagacaatgcac

SEQ ID NO: 118495 - DNA, 568 bp, Homo sapiens
tgcatctgtttcaccaaaaacttaaagtaggcaacaattcaatttaaagcaaaattggaaaggaaagaaagccttaagtgtttttgagatattacaccaatccctcctttttgttaaggatgacttaatctagaattgtagttatacatttgcttcytccatcacatacttcagcctaccacacaggagctcatcattcaccagatgaagttatttccatctggcttttaacactattcttgatgttttacagattaatcagtgctttcaataccttcattaatttcattctggtaggggtccatagaataattctcttttgaggtctggacttccaagcaaatcccactgtaaataaaattttgtcacagtaaaccctacactgcttcctaacttagttacagctgtggatcttaaattaaaagtctggatgatataatttgattatgatgcaggaacttgaattcaggcacaggggccatgatggaaatatcagagtgcaactaacttttagcaatatgagaaaacattattgagctacttatgcatggacagaatctgccctgaa

SEQ ID NO: 118496 - DNA, 568 bp, Homo sapiens
tgcatctgtttcaccaaaaacttaaagtaggcaacaattcaatttaaagcaaaattggaaaggaaagaaagccttaagtgtttttgagatattacaccaatccctcctttttgttaaggatgacttaatctagaattgtagttatacatttgcttcttccatcacatacttcagcctaccacacaggagctcatcattcaccagatgaagttatttccatctggcttttaacactattcttgatgttttacagattaatcagtgctttcaataccttcattaatttcattctggtaggggtccatagaataattctcttttgaggtctggacttccaagcaaatcccactgtaaataaaaytttgtcacagtaaaccctacactgcttcctaacttagttacagctgtggatcttaaattaaaagtctggatgatataatttgattatgatgcaggaacttgaattcaggcacaggggccatgatggaaatatcagagtgcaactaacttttagcaatatgagaaaacattattgagctacttatgcatggacagaatctgccctgaa

SEQ ID NO: 118497 - DNA, 530 bp, Homo sapiens
aagttgagttattaccattcccatttttaagactggattttagaaacaagggtaaaatgaaagaaatgttgaacttacatatacattattatttaacaaacaatcaggaaactaattaataagaaaagagccaaatgagcaattgtttaaaatgactatagaagtctaattaataaattaataaactaatttacttcctgttttttcaactgccaacttcaacccataagtaaataaactttcatcctcattatcagcgtaaacatttaaaaagagaataattatgacaacaagatggtcctgatcatwaattttgcttaaattaatcaagcatcatatgtctgcaactcttcagaaatagcagagacgaaaaaaatttaagaatctatgacataaaattcaataacaattacactaatccagcgcactcctgagagtgctgcctctgagaacacactcctgcatgtattttacatttatatttatcacccactacaaatcaggaccaagctaagcatgcaggaagacca

SEQ ID NO: 118498 - DNA, 640 bp, Homo sapiens
ttctaccctcttcccttttggaatttctgacagaacagactctttaagttcaataagaaacatgtacaatctattgtctctgaagcctgctatctggaggcttcatccacatgataaaaccttggtctccataaccccttacggtaacccagaaattatcttctattgatagtaactctttcaaccaattgccaatcagaaaatctttgaatccatctatgagttggaagcccccacttccagttgtcctgactttctgaaccaatgtacactttacatgtattgcttgatgcttcatgtctccctaaaatgtataaaaccaagctgtaatctggccaccttgggcacatgttctcakgatctcctgagggctgtatcacaggccatggtcactcatacttggctcagaacaaatctcttcaaatattttatagagtttgactctttcgtcaacattctaaaataaaaagtttattttaaaaaagaatgagggaaagaaacagagggatggttcccccttctttactgtgtgggaggtcatgtttggagctgaggtggccgtccattgattctcaatatgcctgttcacagccctaaccaaccttggatccatccactggatttttgttatgtgacaaaa

SEQ ID NO: 118499 - DNA, 603 bp, Homo sapiens
tcagtaattagctagattctcataaggagcgtgcaatccacatcccttgtatgtgcagttaacagtaatggttctggttcctatgagaatctaatgccaccactgatctaacaggaggcagagcttaggtgctaatgccctcctcmtgctcacctcctgttgtacagtcgaattcctaacaggccagggaccaggactggcctagggtttgggaacccctgccttatataatagcaactcaatagttccccaatgtataaatcaaaggataaatcaagagtttttctcataattgaaagacataaagtatacatacaaaaatgaatctttaatttatttattcacatatttatttactctctttctctttataccaaatgttgcactttataaaaatatgcaaaaatgagtagcacctggtgcgtgacctggaggaagtcatgctcctatggggtagcagacatttaaagaccttacttcagtgtatctagaacatcattgattgtaaaatgtaccattatattatatgctgctaagaaatatggagtactgcaaatgcaactctgacatattattcttatgatatagaattcttattcactt

SEQ ID NO: 118500 - DNA, 629 bp, Homo sapiens
cacaggcatcatagtgaagtgtattattgttatttgttgtttctatatagtattaaatgatcacatcttgataaattaaaacctgctcctggaagttgtaaaataatgtttgaaacatcagtgttcatgttgtcagtaagaatttttgaattcctagagggtaactaaatataaaataataagtaactgacttagagatctcaaacttttcatcaatcaaaagagctgttctcgcttctgtgactcttcaccaatgggcagtcctacatgmagcaggaaacatactactcctattaatatatcagaatgtgactaatattgatttagcagtctattcatttcatcatctcctaaatcacaggaaaagctaactggcaaggccaaaaaaaggcattaagcaaaatactattatatttttgcaaagaaacaatacaattgtttatgcagacaaagaatcttcagaagttgacatgcaatgcatacttcctgaagaaatatattctatcctggctctagcactgaaatactatgtggtctggggaagtcattttattcactccggttttacctttttaaaatgaaagaattgacctctaagtgtcttcttactttatatttctcaacctgtg

SEQ ID NO: 118501 - DNA, 629 bp, Homo sapiens
cacaggcatcatagtgaagtgtattattgttatttgttgtttctatatagtattaaatgatcacatcttgataaattaaaacctgctcctggaagttgtaaaataatgtttgaaacatcagtgttcatgttgtcagtaagaatttttgaattcctagagggtaactaaatataaaataataagtaactgacttagagatctcaaacttttcatcaatcaaaagagctgttctcgcttctgtgactcttcaccaatgggcagtcctacatgcagcaggaaacatactactcctattaatatatcagaatgtgactaatattgatttagcagtctattcatttcatcatctyctaaatcacaggaaaagctaactggcaaggccaaaaaaaggcattaagcaaaatactattatatttttgcaaagaaacaatacaattgtttatgcagacaaagaatcttcagaagttgacatgcaatgcatacttcctgaagaaatatattctatcctggctctagcactgaaatactatgtggtctggggaagtcattttattcactccggttttacctttttaaaatgaaagaattgacctctaagtgtcttcttactttatatttctcaacctgtg

SEQ ID NO: 118502 - DNA, 585 bp, Homo sapiens
ttctagaaaccagactaaggcaacctaggattgctgatgccaccaggtatctggtagaaaccaacaaagatctataggggttgataatattatctgagtccttgaaaaatttctgtaaacatctgttcaactctggtatacaataaaaaatcacagcatacatcaacagacaagacaatgtaaataaaaaattagtcaaagcaatagacaatagaaacagacccacaagaccttctggcactgaaattgtcagaaaaagactttgaaatagtgatgcttagcatatataaccagataaaagttaagagaaaattttctcagaaaactggaaattataaaaagtgttgcaacaaaattgaaagaaaaccaaatacaagctctagaactttgaaaagcctgaaattgaattgaaaaatgtaattaatgagattaatagcaagtgaaacacatagtgatatgaaaagtatagcagaagacaatatttagaayagagcataatggaaataatgaatggaaaataaaaaagagcattttagaatgagacataaagtaaaatgggcactttgagtcttagaaaagactgaa

SEQ ID NO: 118503 - DNA, 589 bp, Homo sapiens
gtgttggccatggctagggtctcatctgaaggcctggttggggaagaatctgctgccaagctcactcacaaggttgttggtaaaattcagttcttcaaagggttttggactgaaagcctcagtttattactgactgttggccagagtccatcctcatttcactgccaggtaggcctcatcaacatggaagttcacttcatcaaagccagccagagacagggtgtacaagcaagatggaagtcacatacttttgtaacctaatcacggaagtgccatcccattacctttgccatactctattggttagaagcaagtcaaaaggagcaacttagaaggtatgaattagaaggtgttaataccaggargcagagattattgagggtcaccttagagtctgcctgccacatggagggtcaaaactgggctttcatgcatggttatatagtggggacaccaggagactaaacattgctcagctcccccattcacatgccctgaggcattactgtggcagccctggacaaggaatggcctcttgcaaagtatctgtttcattttatatgaaaacaccacatgtagtaaaagtagc

SEQ ID NO: 118504 - DNA, 425 bp, Homo sapiens
aaacattcagaaaagagtttaaaaaatgaatagttgtagtgataactcataattggctataaaatgayacatcaatttttttgttatattatgaggcaagtaatgaattaccagaattggtgaacatagaactgaaacattttaaagtcaaaaaataacagatgctggcaaggttgcagagaaaagggaacacttacacattgtcgatgggatcgtaaattagttcaaccattgtagaaagcagtatggcaattcctcaaagagctaaaagcagaactaccatttaacccagcaatcccattactgtgtatatacccagaggaatataaatcattctatgataaagacacaagcacttgaatgtttaacacagcactataagcaccattcacaatagcaaagacatggaatcaacctaaatgctc

SEQ ID NO: 118505 - DNA, 516 bp, Homo sapiens
aggtgagaaagtagtttagtattactacacttccttccttgaacaagttttgggttatttttagagttagagttaattgctttgtgtttcagcttttctttttctttcttagaatttattattgcataattctacaaaagaactacaaaactcctccccaaatggaaaatcagtattctagtcagttttttattgttgctgttgtttacttttgacatcattcctgttgcctaccatcttcctgttccaaactgcaacggtttactccttcgccatggtttgggggcttccttttattagtcctgagacttactgcttatgaaattaaattccctgttttctgccaaagtagttgatatgccttggctgtatccccaccccaccttacaatgcaaggtatctcaccttgaactgttcttgtggtagagaataagtttcatgagatctgatggatttataaatgggagttcccctgcacaarcctcttgcctgccaccatgtaagacatgattttga

SEQ ID NO: 118506 - DNA, 312 bp, Homo sapiens
tataaaaatcaataagtgcctttgattgctgttttttcaagaatcaagtccaacaatcaaaaccaatcaccaaatgacttgtttaatttgtttgacatgggtagaaattacttccaggaataacactgaggcatcytgaaagttgttagaacatctgtgaattggggaatgatatgagagaaatccggatttgggatggtcctgcaatggccagtttatggtcctccacctcagatacttcacttccaaaggtagcctaggactagtccaaatagaaattggggtgttattttcctgagagatttaccccat

SEQ ID NO: 118507 - DNA, 566 bp, Homo sapiens
taatgcaaagcctgttttataataaagtgttgatatatcatgtaatttattgaatactgtactgaagtacagtttctactaaatgtgtaccactcttccactatcgtcaagtcaaaaaatcaatggaaccatcataagtcagggaccatctatagttggattagttatatttggcaactagcagaatccccaaattgactctctgacccacaaagtgaaggccagttggtagaaaaggctacctggaaactccaggaacttcccctccataccaagatagtaaatactagcaataccacattcctggaggaattgtaaagattaatgccacaatcaaagacttgaaagaatcagatgataattctatcacattctcattctcatttaatttactgttggcctgtgcagaagtcaaacggatcttgaagagtgattgtcggctgttgtaaatttaatcaggtagttactccatgactccaatgcagctgctgtcccacatgtgctatctttactgcggcaattaacataaccttttgcctttggtakgcagctcttgacctggctaa

SEQ ID NO: 118508 - DNA, 609 bp, Homo sapiens
tcattacccaagtaggcatgattgatggaatcattggccatgtggtttaacttgatctccaatcctcctctcttttctttaggttgggctggcttaaagccccagccctctagtcacagagttggtctttctggtgtccaaccccatcctgggtcatcttgattccactactgagtatatatcaaaaacgaagaaactcaatatattgaagagatatctgcactctatgtttattgcagcactattcacagtagccaaaatatggaatcagcctaacagtctatcagcagatgaatgrataaagaaaatatagtataggtacacaatagaatattattcagccattaaaaaaaaaacctggaaatcttgtcatttgcagcaatatggatggaactggaggttattatgttaactgaaataaaccaagcccagaaaggcaaatatcacatgttctcactcatatgtgtgagcttaaaaagtagatctcatgaagatagagagtagattggtggttaccaaaggctaggaatggtgggatgggaataaagagaggtttattaatgggtacaaatgtatacttagatggaagaaataagagctgggttagat

SEQ ID NO: 118509 - DNA, 607 bp, Homo sapiens
taacattaaaaatcacttatgatcaattgtaagataaaacattgaagtcattatataacaggcttattttcctcttttcacttaaaaacatgaaaataaatatgtagatggataaaaaacaaaaaggttaatggtgactcaggttggacgaatttatatgatgtttaatttttttattcaatttgcttcattttctggtatttctactgagaacatatatttataatgagattatttatttattgagaaattgttattggttttcaaaaataatacatgatctttgaaaagtattaaaatcataagaaaaagataaaaaaaagggaaaaaatatcccaaattacattacctagaagaaaatatctatacgccaggtgtggtagctcacgcctgtaattccagcactttgggaggctgaggtgggcagataacttgagtccaggagttcgagacragcctgggcaacagtgagatgctatctttacaaaaaatacaagaaaaaaattaaccaagtgtggtggtgcgtgcctgtcatcccagacacgtgggaggctgaggtgggaggatcgtttgaggctgggtggtcaaggctgcagtgagccgagat

SEQ ID NO: 118510 - DNA, 563 bp, Homo sapiens
aggccaaaagggaaaagagaaaatagggaaggtgaagcaatagaggaaacaccattgccaataggaagggaatcagtgcctcttgacaactctagttagaacccccaaatttctctatggtattttttcttcttttatggcttaaaatggctcctatctaactttataatgttcttccaacatgggaaacgttaatttcaccaaaccttataatgcttagcttagggttgagctaggagraagggagcctagaagtctcacatgccagcaaaagagtaaaagattttttttgctgttgttgttgttttttaccaattaggcttttggtgtctttctccctgtggaaaccagtaaaagaaacaataaggatcactctttatattctctgtaaagtttcaattaatgaaaaagaacttctgaggttggtcttaggctgtagccaatctgttgtgctttgtgtgtctttctgtatggttctgtcaaaagaaagggtaccttaggctagtatgcagaacctcataagcctgctattcaagccagcccaacaaaatggctggtaacaa

SEQ ID NO: 118511 - DNA, 552 bp, Homo sapiens
accagaagcccctctcaggtttattctccaaaataaacctgtctttgactgttgaaaaataaataaataaataaatwaattaattaataaaatttagaggatgaagaaggttgcttgcagaaatgaaactcaacagaaagagagacagagacttatcagacttattggattgaagaagaggtcctatgggactaggaccctagacttctcaagatagggcactggttagctggtactggtctccctaagggctatgatgaggttgattctgtacctatggaaacattgcaaactgattcaacttttgcttcaggatacatctgccactgctgctatggtggtctttaaatatgttcacaaattttttgatatttactccctcttttaggcagtagtgtttagtttccctcctgttgagtataggctggacttaatgacatgtttgtagcaaacagaatagaccagaaatgacagtgcatgatttcagagagcaggtcactaacatcagcatagcaccctcacagcatgctctctcatgtgtgcctgctctcc

SEQ ID NO: 118512 - DNA, 599 bp, Homo sapiens
cttttctaaatttaaaattatttttttcttggtggttatgtaattctacacatgcaaaaaagttgcatagaagcacacacacacaaataagtgcatataaatacgggaaatacaaacagactctggcttgtactgatgtccatttccttgggttaacaagactgcagttatgcaagatgctaccacagaggaaaagtaggtgaagggtgcagtgagacctctccattttctttcggcagcttcttgtgaagtctataatcatttctttggtcgcataaatagaaggtctaacatcctggcgtcccagtagattctctgcacctccaggagactgcaccctgttggagccatggccttggctcaccgtgagacctggagggaggcatttccactcttgaggctaatttccctcatctgtaaaatgcacagtttggcccaaagctccactcagctctaaaattctaggattgtatatgcmcagtttggtgtagggaggtgtaaatctcactcagattatgagccagctctaggtggtgaagggaaatgtgctcacctgtttgatataaagtctgctttcctgcaacatgaacatggagcca

SEQ ID NO: 118513 - DNA, 571 bp, Homo sapiens
  misc_feature (1)...(571): n = A,T,C or G
aaatgcaacctccacctccagggttcaagcgattctcctgcctcagcctcccgagtagctgggactacaagcatgcatcaccacgcccagataattttttgcatttntagtggagacggggtttcaccatattggccaggctggtctcaaactcctgacctcaagtgatctgcctgcctcggcctcccaaagtactgggattacaggagtaagccaccatacccagccccccttacctcttacatacagttttatgccagggtagagaagggacagttgccctgctacaagggttggaggagaaaatctgaagccctaaccatatyttaaacagactttcaaccaatgcttgttttcaacccctcttttcctcttttcaggaatatcatgtaactaacatcaatttttgagcttatcaggggcttcccctgggcaaatggagttgcttcgaggcttctcactctatgagattgaatttcagtgctctggggtctcctttaaatcagacaagttttaaaattttgttgctcctctcctgttctctttgtatctgtggttttacagaggggga

SEQ ID NO: 118514 - DNA, 538 bp, Homo sapiens
ctgggctagcatacaatgccggtttagaataagctggtctcgaggtcagacattctctcatatactatctgatcgcaccatcttttattctactttctcacacctggctcttcctagctttatttattcctctctgaaaaagaaaaaaatctttttctttttcttttttttttttttgcctaacttttgagatgcttgcagatctcatggtcagagcattcttcctgttacaatagtcctcctcccccattgcaatagtttccttacaataatcttcccttacaataatctttttgaataaaatctcttcttactaagtccagatttgtttttatttgacaaatatatagaaggatattctatgaaagagatctgcaaccactagcatattatcaagaagattcatagagtgaatgattttcttttggtggctgcttatgacatggtcstatagctcatcactggtcacttggagggagatcagggtaaggtctagaaaagttgcaggagggtgggaaatagaactcttgtgaccagc

SEQ ID NO: 118515 - DNA, 659 bp, Homo sapiens
ttattgccagaacagtatctactgactctttcttgttccgcaattctgagatgacaggatccagtgtttggagttataatactacactcaaataatcttcatcayatttccaaatggatatagagtcagctttcaaaaatatttaccaaaactactgaatattgctacaaaagtgactttcaaataacaatgtgatttacatttggaataatgagttaaatacaaaagagacaaatgcagctgaacattacaaggaccaaacaactactttaccaaagcacagttatctatgtctccatccctcttctgcatctgttctattgtgttctcccattgtttaatgagttcttgtctttcattatgaatcttacgaaaatcttgtgctgctttatccaattctaactgtcaaacagagagcaaagaacatttctgtgaatttaagtggttttgcaaacatcaccttgaaaattaagaaataaaaatcttccttaaactaacctgtgcgcttatagtctctgtaagttcgttgtcaagtatctttcttttctgattacattccaaagttagtctttctaattgcagagtcagtgcctatgatgtaattatatacagatacttataattctcattctattaatttaaatgttattagtgtatct

SEQ ID NO: 118516 - DNA, 527 bp, Homo sapiens
caaattaccatagttcaggttacaccagaaactcaccttgaaacaaagatacaatagcaaagcagtttatttgggtggtgaaagaaacactggtgaaagaaggggaaaatgagacagggaaggcagtcgacatggggtttattatcaaatcatctattactgtggatgactggagctgaatcctgtagaggaaaccctggagaacagtgttgggcacacaccttagarttatcccatataaaggatgagggagctccagtatttatacacctactgcaggaagttacaggttgagtgttatttgggggatgcaggtgggttgcacttccagcctccttcatgatgggcttcagtggccaaagaagactcttaattaaagaaatgtagatgctggcagctgcaagtcactggacatatacaggagatgggagaatatagacaggccactgataatggctgctacatgtgcatatccacgttacattgtcagatctgtgagccagtgcatggtgtattacgtgggaatt

SEQ ID NO: 118517 - DNA, 583 bp, Homo sapiens
attcatcttttacaaagtgttttaacgtaaattgcagacatcagtatacttcttcctaaataattcagcatgcatattattttgctagagtttcatatttgttcacagcattttttctttttgtgtaaaattgacataaaatgraatatacatatctcatgtatacatttgttgaattttgaaaaatctgtatttgtgtgtaacccaaacctctaacaagacactgaactttaccaccagcccagggggttcctttgtgtccctgccagtcaatctctgctcccacttcccttagaggaaacaactgttttgattttttttctgctgtggattagttcttgcctcttctaaaacttcatttaaatgaaaacatacagaatacattttgggggtgaggattcttttactcagcataatgtttttgaagttaattcatgtgtcgcatgcatcagtaatttgctccttttcctggcagagtaattttccattgtatgaatatactaaaggatggttactcattctcttattgacggctacttggaatctccccattttttagctctcactaacaaagtttttatga

SEQ ID NO: 118518 - DNA, 589 bp, Homo sapiens
tcctcaagacattaggcaaataaacaaaggctgtcttataacccaaatgcctcatgactttgtttgtcaatgttcccgagctatctcctggagcctttctgaaatctgctcagggcccttgaggagcattgcagacttaatttaggcagacatttagggagtatgctggattaccctgttgccagtttagttaatctgggagctacgttccccagactttctttccctgtatagttctagattagagttggccaaaagaggaatttgtgcaagtttgaaaggcaatagtcattactcactgaaggctgttttgtaatcacatacagagaaagaaatgtgtagatgtgtccaayacatcctcacttgctctcacgttcctctactctgcacccggctctttataactactggctctgatgaccaacagtggcccatgcctatcatcagatactttcaggtgaaaccacagaggtggtagctgcttacagtcaacagcttttcagagacccttttccatgagcctccccttcattgttgcactttggccccttaggtagaattgacttatcagattcccttgcagatgcca

SEQ ID NO: 118519 - DNA, 652 bp, Homo sapiens
gcatggtacactagtttgctagggctgccataatgaaataccacagagtggttggcttaaacaaaaaatatgtatttgctcactcttgtagaggctggagactggaagtccaagttcaaggtatcagcaggtttagtttcccctaaggcctgtcttcttggattgtagatggccaccttcttgttgtgtcctcaaagggttttcaatctatgcatgtgaattccgagtgtctcttcctctttttatgaggataccatcatatttgattaatgccccacctttatgacctctttaatattaattgcctttttaaaggctgacagtcacattgagggttagggcttccacatgttagtttgtgcagaacacaattcagttcataacatggggttagtaaatttgaacaataatgcttgatctcattttaagttttctacarcttggagtctgactaaccacagtttcaaattctgacttcaccacttcatagctgtgcaaccttaaaaagactatgtgtattgccctacttgtaaaactggaataataatagtaattaactcatgcatttgttaaaagttaaacaatttataaaaagcatgtagcacaggattttgcacaaagtaactgctcaagaaatggtgcttgtgttatg

SEQ ID NO: 118520 - DNA, 524 bp, Homo sapiens
atgtgctcaattaattgtattatctcattcaatgtgtgaggaagagtggatttgtgggctgccacaatgagtcacttttcattgccattttccacactctagaatgcccataatgtgatgcagaattgttttcccaatgcagtcaaaattctcaagtgtgtgtgtgtgtgtgtgtgtgtgtgtgtgtgtgtgtgtgcgcacgtgcgcatgcgcgcgcacgcactatcagactgattgctatgttcatcaaggtcattgattctctcatctatccaacaaytgacgtaagattctaaagaagcacccctttgttctagaaatacaattttataagtctgaaaaagccagcatttgcatggtgttaaacttaaaaatctctgtaatcaatgctaatttgacatgatgaaatgcagcactttccatctcaaagctctttgcaaaaattaattaccaattaatctaaaactttagagcattatttattatctgtacactcagaacttgaaaatatttacatttcaaag

SEQ ID NO: 118521 - DNA, 595 bp, Homo sapiens
agagtgattctacagcagcaaatgccttatgaaagaaatgctgagcacacaagggctatttatagaaaaatactggggtttatttgcagtatcttggttgtaacaacacaaaatcgtattgcagaataagccaaatcaaaagactggacacattttgtttttgtgtttgaatctagatttcgagcatctaggatgattaaagtacctataaaattccagccatattatagcattgttagatcatatttatgtcyttttcttggtcagattcctgaggaaaatgaattccaagagagtcagagtacctcaaagaagacatagaaaagagatgagactttactggcagggaaaaaaaaaaagcatcaagtgcttggttgggagaaaggagggaagaagggaggatgtttaataaatggagaaagaagtgctcaagaccagggctgaggccctggaaaatgatacccacctttctctcagtactttataagcttataaagcactttcactgcaataattttatctttgttttctgggacacacaagagagggtatattatctccattctatgggaaaattagacagagattttaaaga

SEQ ID NO: 118522 - DNA, 602 bp, Homo sapiens
gagtgatcacattttttttctttaattttgttaatgtggtgtatcacattcatagttttgcatatatccagtgatcacaggaataaatcccagttgatcatggtgaatgatattttaaatgtactgtttaatttggtttgtggcactgggttgaaaacttttgyatctactttcattaggcatattggcttgtaattttttttttttcttatagtgtccttctctggctgtagtagcagggtaatgctggacttgtaaaatgggtttggaagtattccttgctcttaattttttgaaacagtttgagaaggcttggtattctttaaatatttggtaacattcagctgtgaagctatcaggtcctggggttttcttttgtcatcggaaatttttaatgactctttcaatctccttacttgttactgatctgttcagattttctgtttcttcctgatttagttttggtctagaatattatccatttcttccagattatccagtttgttggtttataattgttcataagagccttttatgattctttgtatttctgtggtattaattgtaatgtcttcttttaagattctgattttagttatttg

SEQ ID NO: 118523 - DNA, 490 bp, Homo sapiens
gaattgccccaaacaattatgctatatggttgtattgtgttaatatttcatcaagaggaagtgccatacttaagtactcatctctccctgttgctgcttatttgcatattarcgtatgtcatcatcatcattatcacaaacaccaccgtgttgcctttagcattttctgtcatttgaactatgtcctttcgataagttcccaggagagagatactgaaaacgctttgaaggttcttgccacctgttacccattgtgactttgctgtgaaattaggagtggaagggagatggagatgggggaacaagagctggaaggggatccctattgaggctgggacagggagcagtacaaaggtcaggatacagccacagtgggattgtttgacgggcaagtggatctgcctccaatggggcacagagtgcaagtcagggaggaatggggagctgggagggatggacacacggatgaaaagacaggaagttcagacag

SEQ ID NO: 118524 - DNA, 549 bp, Homo sapiens
acaatctatatattccagttacatgataatcaagagcaggtgacactaacttgtggtgctgtaagtcaaaaagtggttgccagtgattgggactgactatagaagtgcacagttgaacatcggtggaaaagatacatgtcttgtctggggtagtggtttcatgatttttayggttagcaaaatcctttcagctgagctgttcaaatttctacatttcattgtaaaatatactgtaatttatttaagttacagtatgataaggaaaactatagtggtagggaatggacttaaaagattaatattgttgaacatattacctagttatttagggaaataaaattagcttagagcctcacttcacactttgtgtccaaataaattttcgtttagcctagagttcagtaatagatgtttttaaattgtccctttggaaccactttagataggtcattgatacagtgctaaagtgtgtgagaccaaccaactcaacctagttcacccagaacattcatggttttagaactgaatgccccatgtctggaaaccctt

SEQ ID NO: 118525 - DNA, 589 bp, Homo sapiens
tacatacctgtagtcccagccactctgggctaagatgggaggatcacagaagcccaggagaggagggygaggctgcagtgagctatagtcataccacctcactcccacctgagcaacagagtgaggccctgtccctttaattaaaaaaaaaaaaaaaagttaaaataaaaattcagatttccctgtctcattgaaagttttatttttattttttaaaaataaaagtattagtctttgtttaattgaagggagatatttattgagagaaaacttgagatgacatttacatggatgagaagagtgcctatggttttaccaaacaataaagtcgtgaaatggagtcacttttaaggagggccaggcagtttctggctgggtgtgtttgttctcattgtcttttttatgttttgcaaaagccagccagtgccagtcttatcaaagcagagtttctaagaaatattagttggttttaaaatgcaattgccaccatcggtgccttcccttccagctgagacatctgaatttatgacttctaatattagttggttttaaaatgcaattgccaccatcagtgccttcccttccagct

SEQ ID NO: 118526 - DNA, 498 bp, Homo sapiens
catttaaaatacaaaatggtaattaagagtgtttgaggcagctccagctggttcttgaatagctcccaataggtaggctgacatttccaccctctaagaatccctgcttggatgcagttcagagcagccaaccttgattccrcccaccatttgattaaacaacagagaaacgacaaatagtgaaagtcacttctcttgggctagcttaaaatgacagaaaatgcaagaaaagagaatgatggaaaaggagatcatgaattaacataaaaacatcggatcaaatttcattcttcaaagtgtgcatctaattggtcaatgagccttctaaatgtagaaattgcattagcatctccagaggtgagtatcttgagggcgatttgaaacacaatttaattttccttcagaattatacccaaacaaagattgagataaacagccacctgtctacaaatctttaggaacagccttacattgtgactgaaaacctgagatattgct

SEQ ID NO: 118527 - DNA, 590 bp, Homo sapiens
tgagctgtgagttcctcaggggaagtcatcctgggcttactagtccactgctgctcctctgacaattctctttacctacaaagcactcaatctcttaattcacaaattacaaagcatgcagatcgccacaagggaggtcagtcaaccaacaaactacatttttagtaattcagtattaatgaaccttttactttgagtggtgttttaagagtagaaatctctacttctctgtacagsctctttctataaatttcttgcaaccccaggcaatttttggacaccggatttaatcaatcctcagacttctctttttaagcaagggcatagaaaagttcactcacagtttgactctcccagtttgtaagttctcttacctaattctgagcttcttttgccccagtcttcctgactataaaagtggaaacttatttctaactctctttttattaggtggcttttaccctagttcatgggtcagcatgacatatgtttaggccaagaggaaattcttagcacaacatgagggtctcatgcacttgaaatggtgtactcatttctcagtgaacatcaggaagatctgtgttctcaat

SEQ ID NO: 118528 - DNA, 590 bp, Homo sapiens
tgagctgtgagttcctcaggggaagtcatcctgggcttactagtccactgctgctcctctgacaattctctttacctacaaagcactcaatctcttaattcacaaattacaaagcatgcagatcgccacaagggaggtcagtcaaccaacaaactacatttttagtaattcagtattaatgaaccttttactttgagtggtgttttaagagtagaaatctctacttctctgtacagcctctttctataaattycttgcaaccccaggcaatttttggacaccggatttaatcaatcctcagacttctctttttaagcaagggcatagaaaagttcactcacagtttgactctcccagtttgtaagttctcttacctaattctgagcttcttttgccccagtcttcctgactataaaagtggaaacttatttctaactctctttttattaggtggcttttaccctagttcatgggtcagcatgacatatgtttaggccaagaggaaattcttagcacaacatgagggtctcatgcacttgaaatggtgtactcatttctcagtgaacatcaggaagatctgtgttctcaat

SEQ ID NO: 118529 - DNA, 605 bp, Homo sapiens
cagctctgcagtgttggtgatgacatcttcacttcgtagatgaagccccaaatgattataaactgagaattggtttttgaaccctcaggatgtgactgaaacccatgcttttcctagtagttccttattacagcaattctgttttctagcggttatttacctttgttcttagtataatgagtttttttttttttgtataggtatgatgtattatgtktgagtctacagaatactgtgctttttctttacacttcagagtaaaagtgtcacgtaaaataataatctttgagggtgggcatcttaacacatcatgtgtctgtaattggcttacaagcctgactagcagtgtgatcattttgattttagatttctatgttgaggttactgaatcttagggtatctgctgtataggaataatacttgcattgtaaatttgaaattgaaccatgagcacatataactgcaccatgtcagtcactatcaagaagttcactgaccattatagaagcatatagaaactcagtgtttactgtctggaaaacattaacattttcacaacaaatattcccatagatagatagatacatacatacatagatatgata

SEQ ID NO: 118530 - DNA, 595 bp, Homo sapiens
ggaagaaaaggtgtcatcaagtaaaatgaataacctgattttaagattttgatagtccgggctgctttaggctgatatagatagaatgttctgtaagttaaaactcctgcagaatggctgacatgtgtgaactgggttcttaagtctgtaaacatagttttatcctctgtacccttagtgatctttctcttggattgccagttccagtgtaaattttaataatatgatgctaawtacctgtttttctttttcaaagtaaagtgaaaagtgtgtaaagtcatttgatacagactacaaagtagaagttttcagttgtcatgtcaaaaatctgtaagttaggacaatctaaacttcctgatgttgaaatgctacaagttgacatttgggagatctttcctgaccaacttccaaaaaaagaacaccactcctggagaacagaagaccaatgcagcaaaacattattttcggagccagactatatgcatatatataatacctatttgcccttctactgtacttggctcacaaatcttgaatcctggataattatgataattattgctaacttttttgagcaataactatgtcccaggca

SEQ ID NO: 118531 - DNA, 494 bp, Homo sapiens
ttcaccttgggccttgggtgagactcagagatgtgctggcttcagatatgatccagaatattccaagctgtggtggctacagagagggattcccgcttgagtaaaggagcgggaagagtaaaggagactttgtcttgaagcttagataccagctcagccatagcagggtagagcattaagcagtctcttggggtccccagttccaagccttggctattggatggcatttctgaacgtgccctgggccagcagggcacctactgccctgaaaggagagtcctaggcctggcagcrtttaccacaagctgactgaagaggccgtgggccttgagtgaacattagcgtagcttggcagtatttgccgtgggcctagggcagtggtggccgtggggagagattccatttcttatatgaaaaaaggagggaaatgtgggcagaactttatcttgtgtcttgggtgccaatacagttgcagtagaatagagcaccaggta

SEQ ID NO: 118532 - DNA, 584 bp, Homo sapiens
tgaacccatctagatatttcaggaaaaattctccatctcaaaatcctcaacttaacacatctgcaaagcctcttttgccatgtaaagtgatgtattcacagggatgtagatttcttcaggggaccattattcaggttgcccaaaccctacctcatcattcattcttcccttctatttctagtgaagaaatgcctcttgcatttgccaaggcttacatcataactttcccatgttctgtcctttacctcctcccacacagtgtgctcctcctctcagcaactaattcccctcattgtcttcwaatggagttatcaagttctctgaatttgcattcccagctctgctactttgatgctgttaagtagtcacagagctttgactctctggttgcctttaagttgccttacagataacaactatctgtaaggcagatatttgggactatctggaggattaactcaaataatgaatgaaaatctctctcccagagcatggctggtggaaagcattccacacatgtaggttgttggattcattaccttcaatatcgccctgtttcttctgtcctatcctggggactggag

SEQ ID NO: 118533 - DNA, 584 bp, Homo sapiens
tgaacccatctagatatttcaggaaaaattctccatctcaaaatcctcaacttaacacatctgcaaagcctcttttgccatgtaaagtgatgtattcacagggatgtagatttcttcaggggaccattattcaggttgcccaaaccctacctcatcattcattcttcccttctatttctagtgaagaaatgcctcttgcatttgccaaggcttacatcataactttcccatgttctgtcctttacctcctcccacacagtgtgctcctcctctcagcaactaattcccctcattgtcttctaatggagttatcaagttctctgartttgcattcccagctctgctactttgatgctgttaagtagtcacagagctttgactctctggttgcctttaagttgccttacagataacaactatctgtaaggcagatatttgggactatctggaggattaactcaaataatgaatgaaaatctctctcccagagcatggctggtggaaagcattccacacatgtaggttgttggattcattaccttcaatatcgccctgtttcttctgtcctatcctggggactggag

SEQ ID NO: 118534 - DNA, 584 bp, Homo sapiens
tgaacccatctagatatttcaggaaaaattctccatctcaaaatcctcaacttaacacatctgcaaagcctcttttgccatgtaaagtgatgtattcacagggatgtagatttcttcaggggaccattattcaggttgcccaaaccctacctcatcattcattcttcccttctatttctagtgaagaaatgcctcttgcatttgccaaggcttacatcataactttcccatgttctgtcctttacctcctcccacacagtgtgctcctcctctcagcaactaattcccctcattgtcttctaatggagttatcaagttctctgaatttgcattcccagctctgctactttgatgctgttaagtagtcacagagctttgactctctggttgcctttaagttgccttacagataacaactatctgtaaggcagatatttgggactatctggaggattaactcaaataatgaatgaaaatctctctcccagagcatggctggtggaaagcattccacacatgtaggttgttggattcattaccttcaatatcgccctstttcttctgtcctatcctggggactggag

SEQ ID NO: 118535 - DNA, 591 bp, Homo sapiens
tgaaatctaggtggaggttcccaaaccccaattcttgacttctgtgccctggcaggctccataccacatggaagctgccaaggcttgaggcttgcatcctctgaagccacatcctgagctctatgttggcccctttcagcgacggctggagtggctaggatgcagggcaccaagtccctaggctgcacacagcacagggaccctgggcctggctaatgatcactttttcctcctagrcctccaaacctgtgatgggaggggctgccatgaagacctctgacgtgtcctggatacattttccccattgtcttggggattaacatttggctcctcgttacttattcaaatttctacagctggcttgcttggattttcctcagagaatgaggttttcttttctatcgcattgtcaggctgcaaattttccaggcttttatgctctgcttcccttatacaactgaatgcctttaacagcacccaagtcacctcttgaatgctttgctgcttagaaatttattctgccagataccctaaatcatctctctcaagttcaaagttccacaaatgtctaggacaggagcaaaatgccac

SEQ ID NO: 118536 - DNA, 736 bp, Homo sapiens
aagggtttaggattgtgggctctggaatccaaccacttaggttcaatttggggttctactacttactagatgtgtaactgggcagttatttagccttggtaggccttggtttcctcttcatgaaaaatggagaaaaaattatgcctagctagtcacaggttggttgtgaagattaaatgaggatattcatctaaagtcctttgtagcctgtgaaatggtgtcagcaaacactatttattactgttaatattatgtctatgtttttgatgaaacaaattccaatatgtcctcatgtgacatagttctgagtccctccactatcagggtgaccaacgtgtcttggttttatgagtgaaaagtcccatatcctggaactcttcctgagtcccaggcaaactggatcgattggccaatctccctactatttatatattggttactgactttgggatttttctgccccaattaaagtacctttaagatgcccctaaaaaccctgccatgtgatacagtcccattaaaaactgtctagagtgctgagagctgtgtttggcgttattgtctggcttactttcttactcaatcttgcttcctctatgataactatctggtacctytaatactatgctcttggtcttcatattggggcttattctggattggctttgagtgtttccttacaaatattatttgacccctttcttatctatcttccatatcacagatggaattgaac

SEQ ID NO: 118537 - DNA, 611 bp, Homo sapiens
tcatatggcagaaagattttgaaatgaaggttatacaaaaatcaaagaaaagatactcacagtagcacggttcttagctcacggaaggagatccataaagatttgttgaatgaatattttttaagaaagtaagcactgcaattggtggtccacagtttaaatttttccctcaaacattgtgcttattgtgatacatacaaattccatatataattccataggttacattttattttctttttcttttcttttcttttttttttttttgcgacagagtcttctctgtcacccaggctggagggcagtggcaccatctcagctcactgcgacctccacctcccaggctcaagcaatcttcccagctcagcctccctccccggtagctgggactacaggyacacagcacctcacctggctaatttctgtggtttttgtagagacaagtgttttgccatggtgcccaggcttgtctcaaactccttgagctcagatgacccacctgccttggcctcccaaattgctgagattacaggcatgagccaccatgcccaatcttaattccatctatttcatgaaagtgggaaaatgctttcttcagaggccacagtgta

SEQ ID NO: 118538 - DNA, 580 bp, Homo sapiens
ctgggattacaggcgtgagccaccacacccagccgttgccttctttgataaatgagaaagctcacattctgaggagggaagtccccaaagcacacacgcagtaagttgggctttccccctttagtctttaaatgtcctgcatgaagtgagcacagtattaaacaccagaaaacagaagcccccttccaccttcttctgaacagtaacagcaggcgtctctattatagaaatgtaaacattcctgtggtcctttagaatagctccacagtctcaatgattttcaagttgagtaagttttaagttccttgaataaagttattgaaaatgacctaataagttgcattcaaaaatttaagtacctaatttccatccattacaacctattatactacaacaagagaaacatatattaaaagtatttctttactgcacttactttacrtaatgcagacctgatgatggaaactaagctccttggattaaactgcttcaacctgacctgatttattggtccatttttaagttatagctagctgcacatgagtatgaaatgtaactttttggcctgagaaagtgtgaa

SEQ ID NO: 118539 - DNA, 592 bp, Homo sapiens
aaacatttgatagcgacttagatgcagaaaccatatctgtgtctcagactatggtgagacaagatggtggatccccatgccattaccccrcagacccagggcttatacaccatagggaaaggccatatgtgtttcagaagggatgcgtaggacaattgctcaagggcaggatttacgtttcctcttacacaagcgacaattgataaacgaaatcttagaggccttcccagaactagagttaatcaaaaatcaacatggcagattagcatccaagatggagttgctttagtttccacagctatagatcaggtatagcatggactttggaatcagctgtggattcaaatccactacttactggatgtgaaaacctgagcaagtcatgtaacttccctgagccttaatttcctcttcttttattgggaataataggaacctcacagaactaccaggaagattcaataccaagggtcttccacagcacccagcatatggtagtgccttcagtaaatgttcgtttcattcactcgttgcctcaacacaagggatgatggctatcattgagaaatgcgtgtgcccttgatataagatt

SEQ ID NO: 118540 - DNA, 586 bp, Homo sapiens
gatttgcagatttaactccatatttgccaccttgaagacatcattctattgcccttatggcattcacagtttcagaaaaactatatatagtcattctttttttttttttttttttgagacagagtctcgctctgtcgcccaggctggagtgcagtggtgggatctcggctcactgcaagctccgcctcccrggttcacgccattctcctgcctcagcctcccaagtagctgggactacaggcgcccgccactacgcctggctaattttttgtatttttagtagagatggggtttcaccgttttagccgggatggtcttgatctcctgacctcgtgatccgcccgcctcggcctcccaaagtgctgggattacaggcgtgagccaccgcgcccggccaatatatatagtcattcttaacttctctgtaaaggtagcaagtattccttgccttcctttttctttcttttaattttcttatctggttttcagttacttaaccatgatatgacatggtgtgattatctttgaaggaataactttacaatttttaaattaaaattatatatctgtatattcaaagtactaa

SEQ ID NO: 118541 - DNA, 453 bp, Homo sapiens
aaaacttactctattgttgggaagtcacagacatgctacagacactgagaaaggctgtgaggggatgcagagtttcacaaagcacagtgatcaaaggccgtagcggtggggatcgtgctaccgacagagaaactacgaaatccaaacgcagggagagtggccttttaggaagtaagtctatatcagtcactcaaacttgaccccagattaaacaacctggctgagttccatgagcagctgacaccactgggagtaaggggtgtcacatgaaaaggacttaaaacaagcagctagacaaaaggaagggtakaaactgatacagggttttcaggaatggatggcaatactgggaacacgtggtcagattcacaaatgacatccccaatgatgtttcctgttcagcaatcatttgacaaggggaagatccaggaggcagctgaagggagcaaggat

SEQ ID NO: 118542 - DNA, 632 bp, Homo sapiens
agatggataccttaatagcttaactagaataatcattttactatgtatgagcatatcaaaataacttgtataccttaaataaatatataattttctttagaaacaagtaaatagtaaaaaataagatttgttttgacattataactgtttcaggatccttagggtgttaacttttccacccagaaacctctgtggccagtgttgcctttgtcagagttttggttgggcccactgggctcattccactcactcagcctggcagactgcacctgtcttgtgctactggcctgtatcccatgcctgccaagggtgagccaggcatgtagtggcaaggggtgtgtgagcgagtgtgtgtggtccagacactgcacacaaccaggcagaccggtggctgtggtggtgtgggcagctccaggcaccggctccatgcaaggctgtggctgwatcagatttactacaagtggcttctactatgggcaccgatatctggatgagggaaatatgctggtacctggaagcttggagacaccaggaatcatagagccccaaagagggtgtcatagccctggttcagggaacccttaggtctgggctccccaaagggccacagctcttctgtccttcttgtcacc

SEQ ID NO: 118543 - DNA, 539 bp, Homo sapiens
taatcaagttgagtgcattatttgcacggtagacaagtaaactgatggagcacaatagagagcatagacccagattctggcataaatggtacttgatttatgacagaaatagtgctgaagaacagtagaaaatggatgttctctctcaaatggtgctgagaaatttcctgtccatgtggaaagaaakaaatctgaatcttcagatcataccgtataaggaaagaattccaaatggattaaaagctgaaaggtagaaacattaaatagatagaagagtattgagattaacttcctgacctgaagataggtgctttgctaaacaagactttaaaacagtagcgtaagggaaaacatttttaaaatagcatttacatttaaatcattaacttctgtttatcaacagacactattaaaaaattagaaaggccaataaatgggcagaagaagatatttccaatgcatataactgagtagaagcatgtatcagattgtgtgaagagcttctatcaaaagccctatagagactgagtaaaatactt

SEQ ID NO: 118544 - DNA, 562 bp, Homo sapiens
ctgtttgttaaagtgaattttgatcacctttgtagttttgcttgtattcatttattaatttgttttgggcttatagttatataagaattaaaaacataaagtacaagagcataattctgatcttagggttctgggacaatgtgtttccttttgggacragggcatatgttactcaagttcaagaagctctgggctggacactctctgagttttctgcacctctgacttagtggtctggaagttgagagatgcattctcttcccaggaccagctcggtacccttcggcatctgcctcccctgtcctctatcttccccctcccgccccaccgcaagcctcagcctcttcatctgtaaacggagaaaagagagggggagctggaacccacagatctcaagctcttcccatccctagtgtcttaggatttgtcttaagcctcttaaaaaccccagagcacagcagtggggaaaagtgaaacattcacccgtgagaaagtgagctcccctgcatgcctaacatccatcgcaggcaagaaaaactgtctcccagggcctcgatgagcc

SEQ ID NO: 118545 - DNA, 562 bp, Homo sapiens
ctgtttgttaaagtgaattttgatcacctttgtagttttgcttgtattcatttattaatttgttttgggcttatagttatataagaattaaaaacataaagtacaagagcataattctgatcttagggttctgggacaatgtgtttccttttgggacgagggcatatgttactcaagttcaagaagctctgggctggacactctctgagttttctgcacctctgacttagtggtctggaagttgagagatgcattstcttcccaggaccagctcggtacccttcggcatctgcctcccctgtcctctatcttccccctcccgccccaccgcaagcctcagcctcttcatctgtaaacggagaaaagagagggggagctggaacccacagatctcaagctcttcccatccctagtgtcttaggatttgtcttaagcctcttaaaaaccccagagcacagcagtggggaaaagtgaaacattcacccgtgagaaagtgagctcccctgcatgcctaacatccatcgcaggcaagaaaaactgtctcccagggcctcgatgagcc

SEQ ID NO: 118546 - DNA, 562 bp, Homo sapiens
ctgtttgttaaagtgaattttgatcacctttgtagttttgcttgtattcatttattaatttgttttgggcttatagttatataagaattaaaaacataaagtacaagagcataattctgatcttagggttctgggacaatgtgtttccttttgggacgagggcatatgttactcaagttcaagaagctctgggctggacactctctgagttttctgcacctctgacttagtggtctggaagttgagagatgcattctcttcccaggaccagctcggtacccttcggcatctgcctcccctgtcctctatcttccccctcccgccccaccgcaagcctcagcctcttcatctrtaaacggagaaaagagagggggagctggaacccacagatctcaagctcttcccatccctagtgtcttaggatttgtcttaagcctcttaaaaaccccagagcacagcagtggggaaaagtgaaacattcacccgtgagaaagtgagctcccctgcatgcctaacatccatcgcaggcaagaaaaactgtctcccagggcctcgatgagcc

SEQ ID NO: 118547 - DNA, 562 bp, Homo sapiens
ctgtttgttaaagtgaattttgatcacctttgtagttttgcttgtattcatttattaatttgttttgggcttatagttatataagaattaaaaacataaagtacaagagcataattctgatcttagggttctgggacaatgtgtttccttttgggacgagggcatatgttactcaagttcaagaagctctgggctggacactctctgagttttctgcacctctgacttagtggtctggaagttgagagatgcattctcttcccaggaccagctcggtacccttcggcatctgcctcccctgtcctctatcttccccctcccgccccaccgcaagcctcagcctcttcatctgtaaacggagaaaagagagggggagstggaacccacagatctcaagctcttcccatccctagtgtcttaggatttgtcttaagcctcttaaaaaccccagagcacagcagtggggaaaagtgaaacattcacccgtgagaaagtgagctcccctgcatgcctaacatccatcgcaggcaagaaaaactgtctcccagggcctcgatgagcc

SEQ ID NO: 118548 - DNA, 527 bp, Homo sapiens
tgagagattttcttttgagccagagaattatttgaaagagcaaagaccttccagagttgttaaacaaaacaacacaccatctctagaggaattacaaataaatggggattcacccttcaaatctggataaagctcccctccccagacctcaaacttgctgctcaactaaagctgctttgaccttggaccagacctccctgtgcctgggcctcccaggacatgtcctctctcccccgtggcctggttccttgcacctccatctgtcttcctggctccgtcgtgcactcctggaaggcagagagtgtggtcatctccccagggcagaacggccctcaggacctgcgttgatgcagcgctgctggcctgggctagaaaagtttttcgcgattctctgccctggcgagtggctgcagggtcctgcccaccccaaygcagcccagcccggccctggggttatcctgcagagcccagtagagtcaggtgtgggagggaagtatgaagtaggatgaatgctctcggcacaaaat

SEQ ID NO: 118549 - DNA, 527 bp, Homo sapiens
tgagagattttcttttgagccagagaattatttgaaagagcaaagaccttccagagttgttaaacaaaacaacacaccatctctagaggaattacaaataaatggggattcacccttcaaatctggataaagctcccctccccagacctcaaacttgctgctcaactaaagctgctttgaccttggaccagacctccctgtgcctgggcctcccaggacatgtcctctctcccccgtggcctggttccttgcacctccatctgtcttcctggctccgtcgtgcactcctggaaggcagagagtgtggtcatctccccagggcagaacggccctcaggacctgcgttgatgcagcgctgctggcctgggctagaaaagtttttcgcgattctctgccctggcgagtggctgcagggtcctgcccaccccaatgcagcccagcccggccctggggttatcctgcagagcccagyagagtcaggtgtgggagggaagtatgaagtaggatgaatgctctcggcacaaaat

SEQ ID NO: 118550 - DNA, 440 bp, Homo sapiens
tctaaacatggccccaaacatcactttgttgtattgagcaattgcctataccttctcctggagttctaggccactggatatgtcagatagccgtaagcaccttttttctttttcttttctttcttttctttttcttttttttttttttgagatggagtctcactctgtcacccaggctagagtgcagtggcacsatctcagctcactgcaacttccacctcctgagttcaagcaattctcatgccccagcctcctgagtagctggaactagaggcgcatgccaacactcctggctaatttttgtattttttggtagagacagggtttcaccatgttgggctgggcaggctggtctcaaactcctgacctcaagtgatccacctgccttggcctcccaaagtgctgggattacaggcgtgagccactgggcttggcctgag

SEQ ID NO: 118551 - DNA, 391 bp, Homo sapiens
tgccatttgtaaaattcagagaygtgcctgaaaacagagtccaccccagatggctcagatgaaaagaacttaaggggaccacttagctaggtgtgatcagggttatgagaacaaagggtgacaaggccaaaagcaagggccagaacagcaggacaggggaacatacaggaggtattcgcgctgagatctctacagccggagatgggagtctctgtttcccatctgtcatctccaacctaataggatgccagacagcaagggaccttgggtgatgcagtctggaggatcagcctcctggggcagggaggagggagagaatgcatgggacgccaggtggcaaacggcccactgttcctaccgtactagatactggcagggcaagcatagaatt

SEQ ID NO: 118552 - DNA, 520 bp, Homo sapiens
tagttttaggccaagtgaacaaaaacactgagtaagtcagtactaagcaaataggcacctggccatggtttgaatgccaaggtgatactataaaaatagtccaaggaaaaaatattaaaaatctaaattaaagcagaagcactggaaaatgaagataatggacatgatttcagtaatactggrgatactttgactggcaggagttggtaatgtgctaggtatttgaaatcagaaggcagtcacatttgaacttgcgtttagatgcctgagagaataaaactacaagtaactaaaatcatgaaggtgggagaaataatatatgttgcccttaccctggggagatcataaattcagatttaaatgtaatgaaattgagttgcctatggaatattcagttgaaaaatatttaggaaacattagaactatatttctggctcagaacagataagtgacaccagttgaaaaccattagcttccaaatagaaattaaaattatgcatttgaaattaaaatcatgcat

SEQ ID NO: 118553 - DNA, 550 bp, Homo sapiens
gaattcattccttctaaaacgtaagaagtaaaattctcatattgtcaccttacaaacctaaaagacttctttcctaggatctatgcacagtgtcagtagagtaactagtttgctaaatttggtaaagatttaatttggctattagagtgcctaatctagatctcaaattatttcttttcccttgtgcattgattcctatggcaataaatgaataaaagttatttcactccctgaacacttctratttaaagcacattaatcaaccctcttcattgaaagattctggactacaatcacagcactaatgtctagctgcttgttcttttgaggcctagtaacagagagtaattgcatctcgtgtatttgcttgtgggaattgtttcatgcttagaggtgattttttttttttttttgtaaatcatttcttctgtatgatgtaattgctggtcatacacatagaggactttttagctataatattcaaataggattctcctctatctggataatattcgggtttaaaagataataatttgaaaagatttagcaa

SEQ ID NO: 118554 - DNA, 619 bp, Homo sapiens
atgtatacatgtgcgttggtgtgctgcacccattaactcrtcatttaacattaggtatatctcctaatgctatccctcccccctcctcccacaccacaacaggccccgctgtgtgatattccccttcaaagaccaaaggtagataaaaccacaaagatggggaaaaaacagagcagaaaaactgaaaatccattctcttatttcttagtgtcatgtagggatctcttctaggtcgtcttcccctcttacctacttactctactgattccttatccttggacattctcatccgcagccatattttctatttccatgtctagcaaataatattttttgctcaattaattttttactcttactctgtaaaaggatcatgcatccttgttcaccatcatataatttcaagggcttttctgaggaaggatagtaatttcctctctatttaatttatggttggctatctgattgctctggacaatgaaatgtgagtggaagtgactgatagatagatttaagaatatagcaccacaccattccagaagctttttcacacttttccttctgcaaattagttatccaatgggtagactgcaacttcagcttagatctcatattgagc

SEQ ID NO: 118555 - DNA, 619 bp, Homo sapiens
atgtatacatgtgcgttggtgtgctgcacccattaactcgtcatttaacattaggtatatctcctaatgctatccctsccccctcctcccacaccacaacaggccccgctgtgtgatattccccttcaaagaccaaaggtagataaaaccacaaagatggggaaaaaacagagcagaaaaactgaaaatccattctcttatttcttagtgtcatgtagggatctcttctaggtcgtcttcccctcttacctacttactctactgattccttatccttggacattctcatccgcagccatattttctatttccatgtctagcaaataatattttttgctcaattaattttttactcttactctgtaaaaggatcatgcatccttgttcaccatcatataatttcaagggcttttctgaggaaggatagtaatttcctctctatttaatttatggttggctatctgattgctctggacaatgaaatgtgagtggaagtgactgatagatagatttaagaatatagcaccacaccattccagaagctttttcacacttttccttctgcaaattagttatccaatgggtagactgcaacttcagcttagatctcatattgagc

SEQ ID NO: 118556 - DNA, 557 bp, Homo sapiens
atatgtgtagtaaccctggcctgagaagtgtatacttgccaaaatctcagatcactaaagaatgaaagtttggatgacatcatcaagtatgtatgtctctattgcacaccctagtgatggttgaagatgaaagaaatgaagaatggagagtaaaaggggagaaggtaaatatcaattgtagcctggagatgaactacagaaatgtgggctatagtttttcctactaacttccttcttctatgttgtatctcagacatacaagcctaaagatattatgaagaagctgtttcctggaactgcatggagaaaaaatactctttggaaaggtgggtggacatggtggccataaacaatgagcttctcargtctactgttgcaggtagcataattgattgacagccctagctgcttacttctggatttctaccaagttctgagcagagttgggagtactcacagaggctcattcttatgagacatagaagctttttcacaggaaactttggctcattgattgattccttatcaacatggctgaaccattggaatggctctgc

SEQ ID NO: 118557 - DNA, 612 bp, Homo sapiens
tgtcatcaaagaaaaaattttaaaagttaagaaactatttattcatttattgtactatagtaactttgccttagtattaatatttttaaggtttttaaagtttactacacaaatatatatttaaagttaaaataggccagacactgagaagttactagtgagacgatggcaaaacatgacgtggattctgctctgaagtagtttatctttatgtaggaaatacagatgagcagtttagagaaaaagaaatattaacctaacattaccattagtaacacaattttttcatttttaaaaaaatttattttaaaaaagtaagctatttttcttagcaaaatgtcttatggagagataaccttcaaatcatgactagaattggctcagattcagagacaattaaagtaatctctataaaaatgaataattagataactgaaagaagagaaagctaatggggttgaaggagggcttgaggatattggaggggattagaacttttgaagagatgagcaatttctctagtagtgtatacaagtgagggactttaaaatgcagaaatgcctattawtaattcttaatttttgctgtttgatgttagttataatataaatc

SEQ ID NO: 118558 - DNA, 560 bp, Homo sapiens
tgatggctttgaggcataaaagaaagttaagtttgtgyttagagaaaataaactcagtgacaaaatcagaaaatctattcaatatatctattttctgttgaatatttctttaacaattcattttttgacagttttgattattttttgagcacataatgtcatttgttattgtttgttacccatgattttttttgcttttgacatgcaaaaaataaattaaattgtataaactagaaagaattgatctattaaattatgaaagagtcatttcactctcattgtttatttctctctttttaaaaaaataggtttgtaataaagtgtgaagatgctaccccttaaattacagtaatatgaaaattttccatcaaaataatgttaggttgaaaataccatcttcagtgttcttatttatagatattgttttcctcttatgaacttgatttttaatgaaatttcctttaaatctcaagacttaagttttacaataccatttttatcttttccccatttaagtgaaagagaataataaaaaagaagaggtccaatttcaacaataa

SEQ ID NO: 118559 - DNA, 608 bp, Homo sapiens
tccctgacccccttgtgggactcacgaagtgggtgactcatttactcatctggcagctctcaactttttgcaggaaaggaatgcgcaagcaaacaaggcaggaactggagtgcacggcactgaaactaggccattttggcaggggtgaactccactcacttggacccactgtgctccacccctcatgggaggcagcatgcaagtgaccaggtgctggagccacagcgagcacttttgggcgccagcaggtgtgaacgttgtgcaggtcctaccatgccatcttgtgggtgggttggtggggggcgcctacgatgcctgaagccccagcgggactrttacagtgctcctttagctctgttgttcacagacagcacaagtgttaatagctcaatggaccccatgaaccctgaaaatttgagacaggtctcagtcaatttagaaagtttattttgccaaggttgaggatgcgcacacatgacacagcctcagaagggcctgacaacatgagtccaaggcggtcagagcacagtccagttttatacattctagggtgacaagagacatcaatcaacatatgcaagatgaacattggtttggtctgaaaaggt

SEQ ID NO: 118560 - DNA, 618 bp, Homo sapiens
gctgagtctgaattgaagccctccatgacttggtgtctccaataagtcttctcacattcatgaaaaatgaatgtgcaagcccgaaccacatctctaatccaaagctttctcacttgacactagttaccttttactagccacaattacaagaataagagcaagcatgcattatcttgcttcagcctcacaataattccacaaggaaggtatccccatttcttgagaaggacattgaacttagagaggttatgtcacttgctcaaagtcacacaactttgccaaggtggatctaattagaagccagatccatctgattgtgttttctctggtatgttccatggtgccattgacaacaccgtggcacaagggcaccacttgccctgtcacacctgagacaggcattacaagttgatcrtgacacttctctctggagctagtctgtgtttacctgcagaatgctcatcaacagcccctgtgggttgatcagagtcattatgttgggttgttatgtagtttgcaatctctgtctcaggccattcctccaccagatcacttcagcatcagtaccactacttatctcctaatggagacacatcaccccaggcaaatcatcacatg

SEQ ID NO: 118561 - DNA, 590 bp, Homo sapiens
tcacagaaacaagtcaacattttgatttcaaacatcaaaaaaggtgtccagaaatctcaagaatttgagacatcctaaggaactttaagtgctgtgagccacaagtaacatcaagaaaagacagggatgaagaaccgcacttacaagctaagtaagattaaacccagcatggagatatatgaattaatatgaacactgagaaagaaattggtcagctaaaaaatatatggctttcctgaatagacaaaagaacaaagattttccctttggtatgtaacctgtttcatttagtcacttatattttctctgagtgtgagataaatgttatgaaaaaatttgttttgattatgcaagagaggattgtttacctagtcaggtcaaaactggaaaaaagaactgctgcttcattatacatcccccacaacttcatagaaagtgaktttaaaaagaggaaaaccaaagatttatagagttgggtgcccatcttcatggctgactttcattggatatatatataaaataagtatgaacattaaagttcatctagcacccccccccaaaaaaaaactggatagacatttttcaaaaga

SEQ ID NO: 118562 - DNA, 480 bp, Homo sapiens
agggagaccttgaggctccttcagttcagcatgtcaaagtgccatatcttagagtatcagtttctgagccccaacactagaaacatgaacaagttaacaattcagttaaaagggagagagagatgaactgagtgaagtgcattgtaatccttcctgaggttaagctagtgatagtcggcctctcaggcgattatgttcaccctcctagtgtcagggagacatctttactgcttttcytaagagaacttaagagatactggggcagggcagggaattggaagcagatagcaatgtggacaatctgactttgttggcaaatgactaacctgaatacaatgaagttaaacatctgcagatagtttctggttgttggcttttatcagtttttatatccatgtggagtggtggggctgtgattaagaaagctggtggactgtgaattacatttttcaccttttagtttaaggattgaatatgaca

SEQ ID NO: 118563 - DNA, 480 bp, Homo sapiens
agggagaccttgaggctccttcagttcagcatgtcaaagtgccatatcttagagtatcagtttctgagccccaacactagaaacatgaacaagttaacaattcagttaaaagggagagagagatgaactgagtgaagtgcattgtaatccttcctgaggttaagctagtgatagtcggcctctcaggcgattatgttcaccctcctagtgtcagggagacatctttactgcttttcctaagagaacttaagagatactggggcagggcagggaattggaagcagatagcaatgtggacaatctgactttgttggcaaatgactaacytgaatacaatgaagttaaacatctgcagatagtttctggttgttggcttttatcagtttttatatccatgtggagtggtggggctgtgattaagaaagctggtggactgtgaattacatttttcaccttttagtttaaggattgaatatgaca

SEQ ID NO: 118564 - DNA, 480 bp, Homo sapiens
agggagaccttgaggctccttcagttcagcatgtcaaagtgccatatcttagagtatcagtttctgagccccaacactagaaacatgaacaagttaacaattcagttaaaagggagagagagatgaactgagtgaagtgcattgtaatccttcctgaggttaagctagtgatagtcggcctctcaggcgattatgttcaccctcctagtgtcagggagacatctttactgcttttcctaagagaacttaagagatactggggcagggcagggaattggaagcagatagcaatgtggacaatctgactttgttggcaaatgactaacctgaatacaatgaagttaaacatctgcagatagtttctggttgttggcttttatcagtttttatatccatgtggagtggtggggctgtgattaagaaagctggkggactgtgaattacatttttcaccttttagtttaaggattgaatatgaca

SEQ ID NO: 118565 - DNA, 566 bp, Homo sapiens
ttgtgtgtaattataaatcattcattttcactgcagcaaaatattcctatatggtgtgaatatatcacaaagcatctatacattgatggacgtttggatcacagacttttttttttctattttaaacagccctgctttgtgcattttgagcaagagattttatagaacgggttttttaactgcaccatggacttttttggaaatctggtaaagcttattggcttccttttcagattaagtttttaaagtacaaaataaaataataggcttataaatgacaccagttatactgaaatatggttataaaaatgttaataaatttttacatagtattaaatatctttctttattaatccattaaataacgtgatctaggggtaggtcgaataacttccctggttgtgaagtagtgattaatgtagaggatatttacactcagttatcttcaatagtwgtaatgtgatacaaaaatatttttgtttccttggtgacaaagtcactggtactgctaagactgctgtggtttgttgcctacattcacaaacaaaggaaataaataaaggaaa

SEQ ID NO: 118566 - DNA, 593 bp, Homo sapiens
aatcatatttttaaaacaatattagctatccagtcctaaaatccaatatatagccaaaaggatataaatgatattagctatttaatacaaatgggagaaatgaacctctcttatagaaagaatgactttcctaaggacataatagaagttcttaaattgaggccgggcagggtggctcatgcctgtaatcccagcactttgggaggccgaggtgggtggatcacctgaggtcaggggttcgagaccagcctggtcaacatggtgaaaccctgtctctactaaaaatacaaaaattagccaagygtggtggtgggcgcctgtaatcacagctgctcaggaggctgagacaggagaatcgcttgaacccgggaggcagaggttgcagtgagcagagatcgtgctattgcactctgggctgggcaataagagcgaaattctgtctcaaaaaaaaataaataaataaaaataaaaaagctcttaaattgagtgcaagaagacttttttttaacacacaggaaaataaacatcgtaggggaaaaaacagattatacatatattgtgttttctccaagcacatactatagtgttaatcc

SEQ ID NO: 118567 - DNA, 435 bp, Homo sapiens
tttaaaacatattcagagtcgtgcaatcatcagtacaattggttttagaatcttttcattactgcaaataggatcccccatatctttcagttatcacccctcatttccctcattccccttcccagacaacaattaatatagtttctgtctatatttgactattctggacatttcctataaatggaaatgtataatatgttgtcatttgtgatgttttcttttacttaatatactgtttttcaagtgtatccatgttgtagcatgtatcaggacaccattccttcttatgaccaaataaaattgattgtgtgaatatactatattttgtttattygttcaacatttgatggactttttggggggtactttttggctattatgaataatgttgctatgagcatttgtatacaagtttatgtatgaaaatatgttttc

SEQ ID NO: 118568 - DNA, 414 bp, Homo sapiens
ataactggaattcctccagtgttgtgctaggtatgaaaggtgacactataggataagacgccttgctgggaaataccaatcattattgaagtgtgcaaaatgcatttttccttactggttataaaaacaaacttgagctatcacatggcttaggaagaaaggggtgggaaaaagtgaagtttttcatattaaaattaggctggatgcagtggctgacacccgtaatcccagcactttgtgaggacaaggcaggaggatcacttgaggccaggagttcgagaccagcctgggcaacatggtgagacccrtgactctacataaaataaaaataaaaaattagccggaagtggtggcgtgtgcctgttgtcccagctactaagtaggctgaggtgggaggatcacttgagcccagga

SEQ ID NO: 118569 - DNA, 567 bp, Homo sapiens
attcctgactacatttttcaaccccctatactaacagcctaataraagaaaaaacatgcccattcctggacatgaataacatttacctcagtctcttctgttctacacatgatgttgggcattaaatttaaaaatttgaaacaaatcaatcaacagaaccagctgcagaggagatataaatgctagaactttgagacaggaacattaaattaactgtaatatattaaaggatttagtgggaaaggtgaataattgcatgcacaaatggagaaattcagcagagatggtaactataaaaaacatgtcaaatgtaaatcttagaaatataaaagacaacatcagagatgaagaatgtcttcaataagttcatcagtaggctcaacacagtcaagaaaacgtatatgaacctcaagatagttccatgcagattacccaaactgaaacagaggaaaaagaaagaaaaaatgtaatagggtatctaaaaaacatggaacaatagcaacggttttaacaaagaaggaagagagaaggaacatggcagaaactatttaaagaaataatgagaaa

SEQ ID NO: 118570 - DNA, 567 bp, Homo sapiens
attcctgactacatttttcaaccccctatactaacagcctaataaaagaaaaaacatgcccattcctggacatgaataacatttacctcagtctcttctgttctacacatgatgttgggcattaaatttaaaaatttgaaacaaatcaatcaacagaaccagctgcagaggagatataaatgctagaactttgagacaggaacattaaattaactgtaatatattaaaggatytagtgggaaaggtgaataattgcatgcacaaatggagaaattcagcagagatggtaactataaaaaacatgtcaaatgtaaatcttagaaatataaaagacaacatcagagatgaagaatgtcttcaataagttcatcagtaggctcaacacagtcaagaaaacgtatatgaacctcaagatagttccatgcagattacccaaactgaaacagaggaaaaagaaagaaaaaatgtaatagggtatctaaaaaacatggaacaatagcaacggttttaacaaagaaggaagagagaaggaacatggcagaaactatttaaagaaataatgagaaa

SEQ ID NO: 118571 - DNA, 544 bp, Homo sapiens
ttcctgtgcagataaaaacttttcaaacaatataatactcattgtattttcatgtgaagataccgagaagtcattcagtgctcatactttacccccttagctgagaccctgtgtggctaggcaacttttatccaggtaatatggtaatggatggaggctgctattcaaacccttcttcttgttcccaggatattcctttttccagaagtctgtttcccacatttccatcaacacagttgatgaaaagttattttccccagaggaagtattgcaaccagtttatctactctgcaagagattttctatacacataccrcaaatacatacatacatatatatatatatatatatataatttttacacaaatggtagtatattagtctgctagagctgttgtaacaaaataccacagactgggtgacttacaagacagaagtctattttcttatagttctggaggttagaagtcaaagatcaacgtgtaggcgtatttggcttctctgaggcttctcccctcggcttgcagaatactgcctttgcacc

SEQ ID NO: 118572 - DNA, 502 bp, Homo sapiens
ggaattccggccctcaatttctattcaataagagtagcactgcttttttacatatatatacatatgtgtgtgtgtgtgtgtgtgtgtgtataaatatatgcataagtaatatatatgtaaaatatgtacatatatgtaaatatactttgtattctatactacacgggttaatcatagccattttctcatcttgggataaatattcttcttgacaagttcatctccattacttgaacaattatcttttaaagtcaaattgtactgaaarcagattaaaacacttcttagatattattgtgtaagaaagaaataaactgaaaaaaaatggcctgctatgtatgcaaaacaaattttcttagagaagaatgtgatttacagataggtacactagaatgataggaaaggtaactttggtctgcacttaatgttagatgccaatatttttaccttcctgaagagtatttatgacttcctatcaaggcttacagtactgtagggataa

SEQ ID NO: 118573 - DNA, 211 bp, Homo sapiens
tttgcagttacaaaagtcaataagttaccctttagctgaaacatgtctaagtggagtttcagttgttacaactgacaaagccctgcctagcacaaggaataaacaatgttcagcagtggcatgagaacaagggacagcctgtttggtgggcagcayggcaaatggctgtccagaaaatatgacatttgggctggagggcaaagtggaattc

SEQ ID NO: 118574 - DNA, 211 bp, Homo sapiens
tttgcagttacaaaagtcaataagttaccctttagctgaaacatgtctaagtggagtttcagttgttacaactgacaaagccctgcctagcacaaggaataaacaatgttcagcagtggcatgagaacaagggacagcctgtttggtgggcagcatggcaaatggctgtccrgaaaatatgacatttgggctggagggcaaagtggaattc

SEQ ID NO: 118575 - DNA, 404 bp, Homo sapiens
tgatcaaaccaagtcatgggaccagcccgaatttaaggagaggggaagtagaattcagctgctgatgagaggcccccaaagtcacatcccaaaggggcatgcaggatgaggagttactacggccagctttgcaaactgtctaccacccccaatgtccagacttcaatctcacgaagatttgtattggccctattcaggtcatttgtgtatccctgagtccatcccaggagggttasttcctctgattggccagcttggtcatgtgctcagcccagaagtggtggacagggtagagggcaagaagtagaataatctcatggacaactctttcagagccacctagaatcagggagggaatctcccgcaaaccagaaaaggttggaaaagtttgtttggaagacaca

SEQ ID NO: 118576 - DNA, 579 bp, Homo sapiens
atagctgtcaatgaaggtttcctcaatctctcctggtggatagtggaccactcttttagtggcaaagagatttcaggctgcgatgggatcctggctttgctgtgtactggctttgggaccttaagaaagtgacataagttctttgagcctcagtttctcatctgtaaaatgggaagaatattgcctatgttaagcattgatgtgaggatttaaataaataattcatttagcacagttcttggtagataaatgacaatgcatactgctagaggatgtagtaaaaatacaggcacaaagtgccgtatatcatcaccatcaaaatcatcatcatcacagtaacaacctcaagctcatattgtgttcaggctgtttaagaatttcccttgaactcacatttaatcttcaaacaacccaactgttattagccttatttaatagatgagaaaacagagagaattagacagactgaaacctacaaaggmtaagtggtttgccaaggacaaatagcaagatagtgccaaagtcaggcccaggtccaaaccttccaattcccaggccaatacacttgccaagcaagtt

SEQ ID NO: 118577 - DNA, 644 bp, Homo sapiens
gcaacagagcaagaccctgtctaaaaaaaaaaaaaaatctaagcatcctttctttttagttcatttgaggataatgattgagctccccttctaccatcactagggatacagagggggagcaaacagacgttgttccttcctcttgaggctcacagttaattggtaaagagggaccactattcagaaagtcccacacatcattgtatgatcaaaagctatgacagatgcaaggaaggaaagctagatggtgttgtgaggcttcatggcagggacactaaacctggtctasaggtgagggaagacttccctgaggcactggcttgaatggagagctgaaggaggagtaagaattcactagaagaaagaagaggaagcagcaagtgcaaggtcctgctgcagcaggagggagcatggcatgttcaagaaacacaagaagccggcaatgtggattacagaggaagagtgcagcacgagggcagtggcttgagatgaggccagagaggagggcatgcaggaccaaggggaccaaggcaaggattttggtgtccatcaaattggagggtgctgagcaggggaggggtaaccatgtaattgcctttctcaaatgcccctcttgccatagcaaggacagactggtagaagca

SEQ ID NO: 118578 - DNA, 489 bp, Homo sapiens
gacaagcaagaaggctgctgtctgcaaggcaggaagacagccattaccagaaagggattggtggatacttcaatcatgaacttctggcctccagaacagtgagaaaatcaatgtctgttatttaggccatccggtctcgagtactttgatatggcagctgggctggctgaggcagttgttgagaggaaccgacaaggtagttggggtaaagcacacagcacagccacagctcactgagcacaatgtcagtctcattccccttcaattgttattttctgtctggaggattttcatgatggattttctccaagaagctccctgggstctttgtaaatatggagatatttctgacaagaaaaatccttacagttcttaacattgacaatgatcaggaacagcaagacatgaaaatgagaaggtgactagaaaacagaggacccacagaagaaaccaacaaccacacaacacacaaacacacaggaggaattc

SEQ ID NO: 118579 - DNA, 573 bp, Homo sapiens
gcaaaaagattttttgcattgttaataaataaaataaaaatatcttaaatatttatttcctcttagctcactcttttctaattcctattcaatgtctttcataatgtgcaatttttaatttataaattaacaactatataactgttgatggtgcatgcttacttttaaactgattctaatcattgaaaatgattgaagactactggtaccggcattagtgctaagagcttctaggggagagatgccactgcggattcartggttccggatgagggatttgatctgttcagaaagcatggagcagctgaatcaattgttcaatgatctggtcatgctgtggtaccgtttatagctacatatagattcctaattcataattcactccatgcaggacaatgaaccaactgtctgatgatggctgatgataataatttactaatatttgtcatttcagcactcaggcaaggttcacactccaccaggcaaatggaacattgatcaaacattggtttgttcaggtgacaactatattatagggtctgtttatctcactggcacttaggaaattcagcc

SEQ ID NO: 118580 - DNA, 517 bp, Homo sapiens
aatgccatcatcttctctttcctaaggatatcgagtgactggtatcattagctctaagtgtttccagaggagtggagctctagtctgggctaatgtgatggggtggggcagctggtgagatggcagtgcaggtttaagccccatttttcagtacaggccttgtgacatttcacttagcaacacaagatatggcttacaggtagaaagaggttgggggaaagaagagaagacatgccccactgagaaatgatacatatcatttctgctcatatccagttggaaaggatgtaacacctagctgcaagggaggstgagatatgtaggattcagctaagtggccatggttcccctaaaaatcctaccatcataaaagtagatgatcaggaaaaatagctttcatagaagacacagagagattgttttcctaaatatctaatcacacacttctctgttcaaaatagattacaaatgcacatacattattgcaagataaaataaattgaaacgttttaaaaaa

SEQ ID NO: 118581 - DNA, 629 bp, Homo sapiens
gtgtaaaactgaaaatattctatatccacgtacagtaaaactaggtttacttgtactctgtcagaacactctttcaacagatatttttgcctattgacaaatgacaataacatttgcaaattgttaaatcattcctgaagcaatacaaactaaattatgttcagtagcaaataacataaactctatgaaaattaatagcccatgtactaatgtagtaactcttttagttagattatttaattagcatgaacacccagttctctactrtaagagatatcagaagcagcttgatagacttgagagagaaggtatctgtagtcttaggtgattggagttaacattttagggttgaaaataacacttctttcttgctaaatattaatgtaagaagaaagaagtattctatctcattattaatagtgtaaacacattatttaaatattgatattagaaactgtgcataattatactctgaatttggtcatcttttatatttttcagcaagtctttctttcaagatttctggagtaccttagttattttaaaccataactgctgaaaggagaataacatgaatctagagaactttttaaaaagtaactgaaattatcgaacattagcagcattga

SEQ ID NO: 118582 - DNA, 534 bp, Homo sapiens
ttaaatatagctggataaatagcatgttcttttcattcacaatgttgaccttaataatgattcctgggtaaaataggtgctgccaaatatatctcatcagtgtattatgaaaataaaacttctttcaagattatctaatgtttcctatgtagcattcacaatattcagggcacagaaaataatggaatgtcaaagagaagaaaagacagttaaagmctgggtccagaaatgaccaagagtctcctgtcacaggattattttgaacatgctaaagtagaacatgaataaaattctaaaaagaaatttctaagcctctacttataaaaattaaaagttaatatacatttgttcaacctataaaaaataatttgtcacaaataggatgtcctattctcacactaggacattcgtcacaaattcttagaaaagcttaattcaagatttcctgttgttgttgttgttgttgttgttgttgttgttgttgttgttttgagatggcgttttgcacttcttgcccaagctggagtgcagtgg

SEQ ID NO: 118583 - DNA, 587 bp, Homo sapiens
tctgtgactgtagtgggacatttatttataattttgtttcaagttgtaattctttatccaataacactggtcgattagccccctgctgctacttgattagaatgtcagctgtaataaatagatcctccactacgtaattactttgccccaacaatcagaattttaatgagcaaattggtgaaaatgagaatgagatttgtcatcgtaggctgagcctgattatgtcgcccacagctttgggtagaatcactccctttttcaacaatgttaatgggactctcataaaaatattctataaccttgtgaacagcaaccttaaggggttttccttgaggtgagagatctgaaattggccatttgtgatggtagaagttaccttgcattctaaatctaatcagataaattgtgctgattgcctgaaacagatgccttaggcagaagtctcagagcagtacttgaaccaacctgcctgtcatgctagaggattatttctgaaacgactctatcccgtgtttctttgagtaactcactsctgtgcaaataggagctgtgttttacgtttgtgttctcagcaataagaaagagcc

SEQ ID NO: 118584 - DNA, 572 bp, Homo sapiens
ctgcgtccagccaaacacatactttaaaagacacagactatttgagaacttggcaaagaactgaaaatcataaagaaactaatgaaaattctagaactaaaaggtacaataacttagctctcaataggttaaggagatggcaggcttaacaacagtttacacacagataaacagaataagtaaagagaaagttggttaaaatatctagaatgcgggagaaacaaaagaatggaaaatatacaaaacaaagtaaggartataggggatatattaatagggtataaaatataagaatttgaattccagaagaaaaagtaatagaggagacataaggaatatgtgaacaaataactttctaaaactgatgacatcaagtttaagattcacaaaaccctgtaaactccaagcagcatcaaaacaaagaaaatcacacttatgagaacactcaaaaacataaacacaaaacaaaattacctaaaggaaaataaagagaatgacaaatgatcttcaaaattgtaagattagattatatttattctcagtctttctccctgtggaatgccttcaagcta

SEQ ID NO: 118585 - DNA, 676 bp, Homo sapiens
aatgaagtactgatgcgtgtggcaacatggatgaaccttgaaaataccatgctaagtcaaagaggccagccacatatcgtatgattacatttgagtaaatcaattaagacagaaattagattagccattgcctgggtctggggagaatagtaggagggtaggattgggaatgattgttaatgagtattaagtttcttttggggtgggtaaaatgttctaaaactgattttttaactattgggttttgacaattcttttcatattctagatacaattcctatgtcagatagrtggtttgcaaatattttcacgcagtttgtagcttggctttttatctgcttatcagggtctatgtggagcaaaagtttttaattttgatgagattcactttatcaatttttcagtttttgcttttatggattatgcttttggtgtcaagtttaagaactctttgactagcttagtcctgaaacattttcttatatttttttctaaaattactataatgttatgttttacatttggtatgttatccattttgagttaatttttgtataagaagtgaggtttaggtcaaaattcattttctttttgcctgtctgtaatagccccagcatcatttgttaaaaagactatcccccattgaattgcttttgcacctttgtcaaaaatctaa

SEQ ID NO: 118586 - DNA, 570 bp, Homo sapiens
tgtcatcatcatcatcaatttacttaatttattctgagcttcgcttcttctcattgtccaaattccctgccctcctgccctactgagatttcatcttgtgaggtccagccttgtgtcacctcctttacgataaccgtcttcctttcccagggtcccagcgttcactgctacttctgagcaccctctttcagagccaggtaaaaattcattcacacaagtttaccgggcaccctgaacagcgccagcactatgccgggtactgtgggtacttcagtgaaagagaaagaggcagacaaatccctgccatggtgacaggtatactctgatagagaaatatgcttaaataaataaataaataaataaataaataaatatgcatgatgaatttcaaaaggaaattcacataactctgggaccacagagcaggaaaataaattagtgtctcttctgtattagggkcaggggccacaaaggcttacctcggaaaggcacatcgaagctgagatggaagcatgattaagtcaggccaactgaggagtggaataatattctagaaagagagtcaggcca

SEQ ID NO: 118587 - DNA, 619 bp, Homo sapiens
taacagcattttacccacggtagaacttctttcaatatggcagtcaatcctttccaaactgactgctgctttatcaactaagtctgtgtaacattctaaatcttttgttgtcatttcaacaaggttcacagaattttcaccaggtagagaatccatctcargaaaccactttctttgctcatccataagaagcaacttctcatgcattcaagctttagtataagattgcagcaattcagacacatcttcaggctcctcttctaattctagtcttcttgtggtttctactgcatctgcagttacttcacccagtaaagtcttgaacccctgaaagtaattcacaaggtttcaaatcaacttcttccaaattcctgttaaagttaatattttgaccttttcccatgaataatgaatggtcttaatggcatctagaatgaatccttggtttttaatgtacttagatctgatccatcagagggatcactgtttggcagctctagccttacaaaatgtatttcttaaataacaagacttgaaattcaaaattacttattaatctatggctgcaaaatagatgtttcgttagcaggcatgaaagcaacattaatattcttataca

SEQ ID NO: 118588 - DNA, 593 bp, Homo sapiens
tctcactctttctctttaaaaactatatttgtattttctttatattttcagtttattacctacatagtctctttaatcatcttaattgccaagtttttgtcttatatgcatgtaatattcttcttagctgcataacaaagtatcacaygtttaacagtttaatataacaacaatttcctatctcacagtttctaagagtcaggaggcccagcttggcctagctgaatcctttgctcagggtcttacatacggtgaatgaaggcagaagcagggattagagtttccgctgaggcttggtgtcttgtcttgcttcacactgtaaaatttatttcttgctgctggatgaagtgacttgcttctttaaagccagcaagaaagaatctgacttcttctgtctctgactcctaagacctctctgaaagggctcacctgatttgatcagactcatcaaaaatcatcttcctttcactaaggtcaacttattacagggcttaatgacatctgcaaatttccttcaccttagccatacaacagaacagaagcagaggagtaatgttcctaaactttgccacattctaatggttagaagcaag

SEQ ID NO: 118589 - DNA, 485 bp, Homo sapiens
gggagtagaagcgggagtcagagagaaagggagatctaagcatatttcatcatrtgtaattcacagtgaaatgacattaagaaaaatctagtgtatttcttcttagataacacaagaattaaaatgtattatgagaaaatagatacaggaaattaggaaatggaaatagaatttgaatttcactatttagatataagaacttaatcattctcatgatagtttttcagtatgtgagtaattatttataagattttatatgatagcttacatgtaaggtataatatataatgaaatataaattatctaagttttatagtaatctgatactatatattggatttacatacatgtgtgtacatctgcatgtatatatccctaataatatatatgtgtatatatgtgtttgtatgtatataaatataactaaaataacaaatgtatattttgttgctaaatattgttgagatttaactcacataaaatca

SEQ ID NO: 118590 - DNA, 670 bp, Homo sapiens
ctgcattggtggtggtggttgttgttgttgtcattgcttactctaacttaggtgaatctggatgtctgtcctgtgatktttaaaacttataaattctattatttgaataaaaacatatagttgcagctatagctgtttttccttatgacacatttttatggaataaaagccacagttaaaatgaaaaaataaagcagaagtaaaataacactagaaagaatttccattccataattatatttttaaaaatctcttctaccttttactactattcataatttcatcaacaaaaacattgacatgctagattcgtatttcatttacttacacatggtcgttaacataaaaactgaacatataagtaacctcttctttttttatgttcattgatccttggcagcagtcttttacttttattttctatacttttctaagcactgtactgaaaataattaattttggagtaaggcaacaattttctttgagactttcaaactttgtttactttgttaaaatagtagaataaaaatgctgagtgtttcagtctatgaataagcaatctgtcacaaaatatatttctaattaaattcagtatttctactctaaattattgcatataaaatttaaccagttgaagaattgaacacctaattaattcacatatagatat

SEQ ID NO: 118591 - DNA, 670 bp, Homo sapiens
ctgcattggtggtggtggttgttgttgttgtcattgcttactctaacttaggtgaatctggatgtctgtcctgtgatttttaaaacttataaattctattatttgaataaaaacatatagttgcagctatagctgtttttccttatgacacatttttatggaataaaagccacagttaaaatgaaaaaataaagcagaagtaaaataacactagaaagaatttccattccataattatatttttaaaaatctcttctaycttttactactattcataatttcatcaacaaaaacattgacatgctagattcgtatttcatttacttacacatggtcgttaacataaaaactgaacatataagtaacctcttctttttttatgttcattgatccttggcagcagtcttttacttttattttctatacttttctaagcactgtactgaaaataattaattttggagtaaggcaacaattttctttgagactttcaaactttgtttactttgttaaaatagtagaataaaaatgctgagtgtttcagtctatgaataagcaatctgtcacaaaatatatttctaattaaattcagtatttctactctaaattattgcatataaaatttaaccagttgaagaattgaacacctaattaattcacatatagatat

SEQ ID NO: 118592 - DNA, 549 bp, Homo sapiens
attcaatgagtaaatacgagcatatctacaaggtctcaagactatcagtcttggaaagaatcatgtatctcgggaaagaaatgtttcacagcagtgttgtcttcttggtccctcagaccatattttctataagaaatggttgacttaatgaaaaactcgattgtctggagttctgctttaaacttctctaaatgaaaaaatctcttcaggcaattactacaaacagaaagaaccacactgaaakaaaagtttcaaaaatattttaaaatacaaacacatttccttccttaagaaattcatgttcacatatcattgtacattacattttgggaattttcttgctgttatatattcctgaaatgtgtgttctaatcactaaataatttatccaggaaaaacatccttgtacatgtatttcaggcaaagtcatttgccttttttttttttagctggcataaattaagcacctcagatagggggaaaagaaactgaaagaaatccaaagattgatcccttttctttggttcttttctttaatctgctatcatt

SEQ ID NO: 118593 - DNA, 549 bp, Homo sapiens
attcaatgagtaaatacgagcatatctacaaggtctcaagactatcagtcttggaaagaatcatgtatctcgggaaagaaatgtttcacagcagtgttgtcttcttggtccctcagaccatattttctataagaaatggttgacttaatgaaaaactcgattgtctggagttctgctttaaacttctctaaatgaaaaaatctcttcaggcaattactacaaacagaaagaaccacactgaaagaaaagtttcaaaaatattttaaaatacaaacacatttccttccttaagaaattcatgttcacatatcattgtacattacattttgggaattttcttgctgttatatattcctgaaatgtgtgttctaatcactaaataatttatccaggaaaaacatccttgtacatgtatttcaggsaaagtcatttgccttttttttttttagctggcataaattaagcacctcagatagggggaaaagaaactgaaagaaatccaaagattgatcccttttctttggttcttttctttaatctgctatcatt

SEQ ID NO: 118594 - DNA, 573 bp, Homo sapiens
tattaacccactgatgcctgaggttgcaattttttgaatttttgcaatcggacattggcgatgaccttgaacagcagggtataagtaactcctacatkctgaacgttctagtaatggaacactagttataaattcctaatcactcttgttggcactttgctcatttcattttatgagtatcccagggatgtagcaatttatctgaattgcgtgtgacaatagcaatacatccaagtttgactttcctatactgtgaattcttagcctattcattaatgcagaatattcaaactgttgattttgtttggtcatttctaatgattttctttaaacttttctctatctcaactcgaaaatgacctttatattatatacctacttttattctgccatgcttcatattttccatgaaagtctcaacctccacttgctgtatgatctttttctaataaataatatttgcatttatgcctctaaactcacatttgaatttgtttctgagtcaagttgtctatgttctctgtaataatgattaattttacagttgtttaatttcaataaaatcatatactg

SEQ ID NO: 118595 - DNA, 598 bp, Homo sapiens
tatttccagattgaaagggcccaagaaaactgaatactgaatgaaaatggacttgtataacaaaatgtcattaggtgatttcagaacattgggacaraagagaatatcctaccaaatttccagagaggaaacaagtcagagtaggtcagtaataataataataaaaaacgtaaagtaaataacctaaaatattctgatggaatccaatctcaaaatcggattcctatgccctggcaaaatgtcatttactcctagactttttcacaatacaaaacttcacaatttttatctcccatgcacctgtctcagtacatctacctaaaagaggaaattagccaagaaaggaaaacatggtgtgttgggggtggaggtggtcaaggaaactgggaatgcattcaagaaggttcaaaaaatgaattcccaggctccacatgaaaagagggagaagataatgactgtgctagttttgttgacagcagatctgaaggctccccaggagacatcctcagaagaggaaattgataggaatctgctgaatttgaacatattaagtgtagatgttgaaagtggaagaagaggttgggaatgtgttggtgat

SEQ ID NO: 118596 - DNA, 598 bp, Homo sapiens
tatttccagattgaaagggcccaagaaaactgaatactgaatgaaaatggacttgtataacaaaatgtcattaggtgatttcagaacattgggacaaaagagaatatcctaccaaatttccagagaggaaacaagtcagagtaggtcagtaataataataataaaaaacgtaaagtaaataacctaaaatattctgatggaatccaatctcaaaatyggattcctatgccctggcaaaatgtcatttactcctagactttttcacaatacaaaacttcacaatttttatctcccatgcacctgtctcagtacatctacctaaaagaggaaattagccaagaaaggaaaacatggtgtgttgggggtggaggtggtcaaggaaactgggaatgcattcaagaaggttcaaaaaatgaattcccaggctccacatgaaaagagggagaagataatgactgtgctagttttgttgacagcagatctgaaggctccccaggagacatcctcagaagaggaaattgataggaatctgctgaatttgaacatattaagtgtagatgttgaaagtggaagaagaggttgggaatgtgttggtgat

SEQ ID NO: 118597 - DNA, 650 bp, Homo sapiens
ggaccaatttcctactggttttatcacatgaaaccctttacttaaactgtttcagtttcagtatcttcctggaaaataagagtgtcctagtggtgctttaaaggcgaatttagcttcattatgcaccagtgtaaagtgttgcataattggcaccctgtrtcttacagctgtcgttatacttatacgaaaatttattacaaacgtaatgaaaattttttgaccaggtagagggtatcacagtggtgtttgagctgcttttaagtgaacattgctgtgctaagcactggaggtaaagaacgaaggaagactctatgcctgccctggaggcgtggacagtccagtgaggaaggtggcgtggatgaatggtctgcattcagtgttgtggatctcaggggagtggcactcatcctgcacgacgatctgcatatagctccctgagctgcctatggaactgagtgggcatcaaggggacaaggagcagaggaagggcatttggaatagtgggaccagcagatgcaagggcaaagggatgccaaacagtgccatttgcaaatgttagaatgatgattttggtgggaagccccgagtgatgcttgagtagatgagtacaaagaacccagcagggcacaatcacttagatgtttgcacac

SEQ ID NO: 118598 - DNA, 549 bp, Homo sapiens
atttttccctcaaccatgaaaagctggtgatagccaaaggatgttctctctgcatgagaccaataggcagagtggggtggggagggattaggaatacagcaccccataaataagacctgctcctttgcaggtaatgtctgtggggggaagacagctggcctgggacagcattctccagcarcagtcatgaaacacagctgacaagaaatgcatgggaaccgctggtgggcaaaaaggacgagaaaatgggggtcccttgtttacacagtaaaatatgttgaagaaaaacatttgacaatcacatttctatttttacttttagttttgagacagggtctgggctcggctgcccaggctggagtgcagtggcatgccctccacctcctgggttcaagcaattcttgtgcctcagcctcccaagcagctggaattacaggtgtgtgccaccatgtccagctaattttttaatatttttagtagacagggtttctctatgctggccagggcagtctcaaacttctggcctcaagggatccacccgcctcagcc

SEQ ID NO: 118599 - DNA, 549 bp, Homo sapiens
atttttccctcaaccatgaaaagctggtgatagccaaaggatgttctctctgcatgagaccaataggcagagtggggtggggagggattaggaatacagcaccccataaataagacctgctcctttgcaggtaatgtctgtggggggaagacagctggcctgggacagcattctccagcaacagtcatgaaacacagctgmcaagaaatgcatgggaaccgctggtgggcaaaaaggacgagaaaatgggggtcccttgtttacacagtaaaatatgttgaagaaaaacatttgacaatcacatttctatttttacttttagttttgagacagggtctgggctcggctgcccaggctggagtgcagtggcatgccctccacctcctgggttcaagcaattcttgtgcctcagcctcccaagcagctggaattacaggtgtgtgccaccatgtccagctaattttttaatatttttagtagacagggtttctctatgctggccagggcagtctcaaacttctggcctcaagggatccacccgcctcagcc

SEQ ID NO: 118600 - DNA, 549 bp, Homo sapiens
atttttccctcaaccatgaaaagctggtgatagccaaaggatgttctctctgcatgagaccaataggcagagtggggtggggagggattaggaatacagcaccccataaataagacctgctcctttgcaggtaatgtctgtggggggaagacagctggcctgggacagcattctccagcaacagtcatgaaacacagctgacaagaaatgcatgggaaccgctggtgggcaaaaaggacgagaaaatgggggtcccttgtttacacagtaaaatatgttgaagaaaaacatttgacaatcacatttctatttttacttttagttttgagacagggtctgggctcggctgcccaggctggagtgcagtggcatgccctccacctcctgggttcaagcaattcttgtgcctcagcctcccaagcagctggaattacaggtgtgygccaccatgtccagctaattttttaatatttttagtagacagggtttctctatgctggccagggcagtctcaaacttctggcctcaagggatccacccgcctcagcc

SEQ ID NO: 118601 - DNA, 584 bp, Homo sapiens
gacaaatctgaaatacagtagttactctaaatgtaaaaaatattcacaaagcttactgccatggaatttagaagagctaactgctgggggttagttttgcatggcccattggtgtctcaagaaaaccaaaacaacgatagaaacctggccatggggattggaacgggtgtcgtcttttcctttccatgtgttccttgtaggaggtaaaaatattgaaaatcatcctaattgatcatytttgaaaaaaccatgtggacatttacatatccaaagatgtagcacccagagttttagttgtaatagaggttgtagcaaggcagggtcgtgctgagtctgaaatcctcttactgctcttccctcaccatcctctcccctgcctcctcctgtgctgcttatcacggtaaagatttgtcattattgctaagtcttctctttgcttgctgtattctggtttccgatgtaagcatctcagcttcttgcattctttctttcctgactatgtattgggaaagtgagatgatagcagaagatggaaagtttgaaggtggagagacaacagggaaggacagggaaggagaaggtaa

SEQ ID NO: 118602 - DNA, 472 bp, Homo sapiens
gtgagctatgatcacaacactgccctgcagcccgggcaacagagcaagtccccatcttaaaaaataaaacataaagtatgtgtgggggctggagaaagggtagaaaaatccatcctgtaagtgtggtaaagaatgtatttatattaacaatattagctgtctcatatccaatgcttaaaatgttttgactaccataaaattaaaagtttttttttaatgtgtcaagaaatgtcataaagaatgatgagtgaagtagcaactcaraaaaatactggctatgctgatagaaaattagaaaaaagaagcaggccgggagtgttggctcatgcctgtaatcccagcactttgggaggctgaagctggtggatcatgaggtcaggagttcgagaccagcctggccagcatggtgaaaccccgtctctactaaaaatacaaaaaattagctgggtctggtggcacacacctgtaatcc

SEQ ID NO: 118603 - DNA, 621 bp, Homo sapiens
ttgagtaaacacagataaatggattcgtattatacatatttaaattcataagaatctaccaaatggttttgcaaagtggttatagcattttacgcttccattggtcatagatgacggttctagttgctcygcacctttgtcaacatttgggtctgtcagtctttataattttaagttttttatacaccttgactttactgacaagcctttaaattttagagattctagtgtgtatgaagtcatatctcattgtggtttgaatttgtattttcctaatgtctaatgatgtttagcacattttcatgagcttattggctattcctatatcttctgttgagaagcttcaattaaagccatttgcccatgtttgatagaattgttttttctgttaatttttagcaattcttatatgcgcttgtatcttttggtagatatatatatatatattgcaaatatttttcccagttggtggcttgcctttttctattctcaatggtgttgattgacaggagctttaaattttgctgcagttcatcttacctcaaagtcttttttcgcatcccctctctttctgcagattctggatcttttggaatgcctctcccaggacttagcaaaaca

SEQ ID NO: 118604 - DNA, 582 bp, Homo sapiens
ttccttctgcaattagagaaggcaggttacttaaattcatatgttaaattattcattgagagcaagttgtgatggaagcktgggaggaaaaattgagtactccatttgtacagtctccaaataaggtacatgcattcattgcctttttacagtctcacaagcctacgaggtaggagtgttgatgttcccattttacagacaaagaccctagagcttagaagtgctgagtgactccctctagttgccatggctaatagagtagggatttgaagccaagcagcatgaattcagttgtaatgctcttagccactgtgctaggaacttgataaatggattggaaaccatgccctacgcaaatagtaaatgcaatttggtccagtccaggctgggagtgcatgtgctgaaaaggtgcaagataagcatgctgaggctgattgatagggctttctcaattgcctattcctacattctgtgtctgcttccacactggtgacccccaaccctgggaaatgcttttcacacctattcattagaatatcattcaaatttacaactactgaggtcacctagcaatttacaatt

SEQ ID NO: 118605 - DNA, 631 bp, Homo sapiens
gctcctgggaatgccagtgaacctggagcttgagacacggacttgagacccagctctgtcaggagtgccatggtgacttgggacaagccccttttcctctcggggccccctttcatttgtctccgtgggactcaataactggggtcaggcatgctgggtcttgggctccccgaaaggctgctcctgctgtgaagttctagtactttgtctccaggagragtgggggttctcagcatggggagatgggtagcaacaggggcacatggatgcctggaccagtccaatgggtaaacgggatcagaccaaggcagatggggacagagtcagccctggccaaccactccctttccaggcacagtggcgacacctgcagctggaccagccccgaagcagggtggtccggcagataggaaggagctgggcactccaggggtactcaccatgggtgctggttttcctccagacacgatgcagaccagcgtgaagttctgggcttggtagcggctgaagggggctggtgtgtcagcagccaccacttcaatggaggtgggaggagctgccccaaaaggaagcacaggaagacaagggctcaactgggagattcaggaagagttcactgatgacctaagat

SEQ ID NO: 118606 - DNA, 525 bp, Homo sapiens
acccaggataccgcgtatgagaacaatgtatgtggccaacacgtgtagagcagctcacaggtaactgtgtgccaggcactgggctacgaacttctggatgtttttctcaggagttccacaacaattccttcacatgtattgttacacagacacgccagacacacagaggaggcctgcggcttagggtgttgagaatttgcctccctccctcrctgacagcttctgaatcctcttgggacccatcctcaggacaagagaaggccaattcttctccatccagattatacaaggtgggaaccaggaatctgcatttgtagcaagtcccctggccagtcattgttctctccctggggaaactgagtcttgaggcagggggtggtggtatggtttggctctgtgtccccacccaaatctcatcttgaattgtactcccataattcccatgtgttgtgggagggacccagtgggagataattgaatcatagtggcggtttctcccatactgttctcatggtagtgattaag

SEQ ID NO: 118607 - DNA, 525 bp, Homo sapiens
acccaggataccgcgtatgagaacaatgtatgtggccaacacgtgtagagcagctcacaggtaactgtgtgccaggcactgggctacgaacttctggatgtttttctcaggagttccacaacaattccttcacatgtattgttacacagacacgccagacacacagaggaggcctgcggcttagggtgttgagaatttgcctccctccctcactgacagcttctgaatcctcttgggacccatcctcaggacaagagaaggccaattcttctccatccagattatacaaggtgggaaccaggaatctgcatttgtagcaagtcccctggccagtcattgttctctccctggggaaactgagtcttgaggcagggggtggtggtatggtttggctctgtgtccccacccaaatctcatcttgaattgtactcccataattcccatgtgttgtgggagggacccagtgggagataattgaatcatagtggcggtttcycccatactgttctcatggtagtgattaag

SEQ ID NO: 118608 - DNA, 572 bp, Homo sapiens
catccttgtaattactctacaaagtaaggtaattattgcttgtatatcaataccaatataacagcaatttcaccaaccaataattttaaatcattttcaatataaccatcatataaattttacattcaattagctgaaatgactgaagacaaaattcgaaacatatgtagtaattacagaggtaaaatacagaaaatcaatttgaaaaatgaaacatgcacaaaataaggtcaattttctgcacagtgatggaattctaaagcaacagattatattgagcccttattaaaagttactaaatttgccatactatcttttctaattttaaaggtatactttagggattaaatactattttctgagactacaagcaataatttagtatgtaaaatgctgatatcactgagtcactatctacctggtatgtgtatttgtttgyttagcattgtgtaaagattcattctctttgcaatcaataacatatatttgaaacataactgtgccaaaattatgtttctcaccaatagaaaagtttaataccctaccacttcaaagatcagaggtaacagagt

SEQ ID NO: 118609 - DNA, 590 bp, Homo sapiens
tttattagtataacagttgaaaagaagcaaaacttctaaacttgagcttatatgcttattgttttgtgtgcttagtggaggaatgtataaatgcggctgagtatacaaactataaaatctctaattttaacattgcttgtttatatattaggaacttttaggggagttttgatttgcaagtttttrtaggtttaccagactcattaattgcctgggaagaactttacaggatttcctttggtttatgtctaatctttgaaattggaaaacttaaaagtgaaatataaattcctcatggagaagtgatcatgaggtctgaatagaatcaggtaattcccaagagacatgcaagataataataaagacacaaaaaattattccatatcatttgtgcccttatttgtgagtaaaggggtggaaaataaaataagatgtcattttcatctattgaattggcaaagattttaaaatataatattgaatggttgtaagggattggtcaaatgagcattctcttatatggctggtgagaatttaaatagacacaaattttgtggcaagtagtttaaaatgaaaaacacacaagaatt

SEQ ID NO: 118610 - DNA, 566 bp, Homo sapiens
cctgggaaaaaatccatttggggatggaatggggtcctaaggctgtgtgtgtaagggccaatggcagagccttctctggtctcctcatcgraaaggctcggtactcagttctctctatttcatcatgatcttaatgctggtttgtttgttgccagctcccaaatagaataccctttccaggagggcaagggccctgtcaggcacacagtcaagtggcctgttacagatttccaatagtgcatttaacttttggaatgcactcagtccttacttgtttcttgaatttgagggcaaaggcatcctcaaaatggctggaagtactcccccaagatccccatccagtcctcatgggattctgggatgagggaaagacaatgatgacatggaagcaaggagtggctgcctcccagataacagccatggctcctggtgtggggaaagatcccagcagctctattgagatatttgtcaaccctatctccagccacctcccactgtgggttcaaagggggaggctgggggggccaggaaacctttgcttttgtcctccagcccatgacctaacc

SEQ ID NO: 118611 - DNA, 566 bp, Homo sapiens
cctgggaaaaaatccatttggggatggaatggggtcctaaggctgtgtgtgtaagggccaatggcagagccttctctggtctcctcatcgaaaaggctcggtactcagttctctctatttcatcatgatcttaatgctggtttgtttgttgccagctcccaaatagaataccctttccaggagggcaagggccctgtcaggcacacagtcaagtggcctgttacagatttccaatrgtgcatttaacttttggaatgcactcagtccttacttgtttcttgaatttgagggcaaaggcatcctcaaaatggctggaagtactcccccaagatccccatccagtcctcatgggattctgggatgagggaaagacaatgatgacatggaagcaaggagtggctgcctcccagataacagccatggctcctggtgtggggaaagatcccagcagctctattgagatatttgtcaaccctatctccagccacctcccactgtgggttcaaagggggaggctgggggggccaggaaacctttgcttttgtcctccagcccatgacctaacc

SEQ ID NO: 118612 - DNA, 637 bp, Homo sapiens
agactttgcctctgtttgcgcggtttaagatggggaagtgggaaagagagagagagaagcaaaagaaacacaatgattctttagaagcaacatccattcatggatctctctctccacttttgatcctttatgtctgmgggctgtgtgtgcctgtgtgtggcacacatacgtacctccctgtgtgttttgtaggacacaaggattgatatggaggagaactgttgatagtgacactgattagatattgaataaacaacatgagaagattaaaaactgtaaaaatgtgattagtttaaaatcagcacaaattactacattcatgtaaaactgcctctccttcacacacaattgccacacagcacaatcacagttacacttgttcccagtcaatctttatgtgttttcagagaatgataaaatgttaccaaaggggtctaagacattgcctaatccaacctcaacatttaccgattaaataactgagacagagaaactgaccaaccgccggtcccactgcacatcaatattaataatagaaaaatgttttgtaagagccttctaaggcctgggcattttcgaagttctctacttcacatttaattctcacaatgaccctatagtcatcctctttattcag

SEQ ID NO: 118613 - DNA, 569 bp, Homo sapiens
tcactgtctgtctctatgaatttgcctgttgtatttcatttcatgtaagtggaataatataatatttctccttttgtgtctggtttatttaacttagaataatttttcaagkttcattcatgttatagcatgtattagaatttcatttctttttattgctgaatatttcaatttaaatatagcgagagaggcatatgcatacaaatataaatatatataacattttatttatccatttatatgttgatggacacttggattgtttcccagcattgttaaactcttatcccgcattgttttctggcttctattgtaatggttgagaagtctgttgtcactctaattattcttcttatgtagataaagtctattgtctgtggttgctttcatggtactttcctttctttgatgttctgcaatttcatgtgcctaagtgtgaattttccattttgtttatttttctcaagactcaagtttccagaatcagaagagtctggtctttcatcaacactagaaaaaatttcaccattacctcttcaaatattatttttctataattccttttattt

SEQ ID NO: 118614 - DNA, 641 bp, Homo sapiens
ttttttcaagaaaagttgtgtttaagatcaaaccaggtgcggtggttcatgcctgtaatccsagtactttgggaggccaagacaggaggatcacttgaccccagggatttgagaccagccctgataacatagtgaaacctgtcgctacagaaaatttaaaaattagcttggcatggtaagctgtagtcccagctacacaggaggctgaggtgggagggtcgcttgagcctgagaggtcgaggctgcagtgagccatggtcatgccactgcactccagcctcaatgcttttataagtgttcttatataagcaataagtaaattgcttatataaactcttatatagctatttatttatttttttgagatagggtaggcaatactctggtaacaaaccatccacaaatctcagtggataaaaacataaaatcattgcatattgcattaagctgcattgaaaacccagtaagaaatttggtgtaaataaaatgaaataaaaatgggaaaaataaagtccttaagatcattgtgttaggaaaaattgtctactgacttcttgacaacaggacttatttatttattttatttatttatttaattattttgagacagcgtctctttctgcagcccatgctggagtgca

SEQ ID NO: 118615 - DNA, 566 bp, Homo sapiens
gtgtgagtatatgaatgtatatacacacatacgtgtatacatatacatttagtatgtttatgtatatgtttgtagacagactaaaatagaggaaaatatggaaaaatgtaaacaaatggtgactctaagtaaaaagatatatagatatttattgtactattattttaacctgtaagtttaaaatttttcaaaacaaatagtaggagaaaaaaattagcacttgtcatggtaactttttttcaagaaaagttgtgtttaagatcaaaccaggtgcggtggttcatgcctgtaatcccagtactttgggaggccaagacaggaggatcacttgaccccaggratttgagaccagccctgataacatagtgaaacctgtcgctacagaaaatttaaaaattagcttggcatggtaagctgtagtcccagctacacaggaggctgaggtgggagggtcgcttgagcctgagaggtcgaggctgcagtgagccatggtcatgccactgcactccagcctcaatgcttttataagtgttcttatataagcaataagtaaattgcttatataa

SEQ ID NO: 118616 - DNA, 469 bp, Homo sapiens
ttctttatacttaaaaggacaaatttctcatatgttccagaaagtatgccatctttatttagcactatgcagctcatctcttacttgcagcaagttgtacccagtctacataatttctgtaacctactactccatccagyagttatttttgaccagcactgctgcaataatacatatacttgtttaagcagaagttaatcttacacattggttttgacaataccactgtttcacagatatttcctgttctgtctccttacatccatatggtaagattgtacatgctggtccccttgtggtggggttaggtgaccagttctagcacttgtcacccgtaagtgatgagtagaagtgacaatccacttctgggccagagtacttaaatgttgatggtaaacccaccacatttctctcttttgcttccagcacagtgacccatgatattcaaggtggtggctcctttgtcaga

SEQ ID NO: 118617 - DNA, 469 bp, Homo sapiens
ttctttatacttaaaaggacaaatttctcatatgttccagaaagtatgccatctttatttagcactatgcagctcatctcttacttgcagcaagttgtacccagtctacataatttctgtaacctactactccatccagcagttatttttgaccagcactgctgcaayaatacatatacttgtttaagcagaagttaatcttacacattggttttgacaataccactgtttcacagatatttcctgttctgtctccttacatccatatggtaagattgtacatgctggtccccttgtggtggggttaggtgaccagttctagcacttgtcacccgtaagtgatgagtagaagtgacaatccacttctgggccagagtacttaaatgttgatggtaaacccaccacatttctctcttttgcttccagcacagtgacccatgatattcaaggtggtggctcctttgtcaga

SEQ ID NO: 118618 - DNA, 596 bp, Homo sapiens
acagtgatgaccagctcagtggttggaccgagaagatgctccaaagcacttcctgaagccaaactttcatcaaaaagaggtcagggtcactgtttggtggtctgctcctggtctgatccgctacagctttctgaatcatagtaaaaccaatacatctgagaagtatgctcagcaaatcgatgagatgcaccgaaaactgcraggcctgcagctggcactggtccacagaaagggtccagttcttctccacgacaacacccgacaacatgttgcacaaccaacatttcaaaagttgaatgaattgggctacaaagttttgcctcattcaccatattgaactgacctctcaccaaccgactaccacttttccaagcatctagaaaattttttgcagggaaaatgcttccacaaccatcaggatgcagaaaatgctttccaagagttcatcgaatcccgaagcatggatttttacgctacaggaataaacaaacttatttctcattggcaaaaaatgtgttgattgtaatgtttcctattttgataaagatgtgtttgggcctagttataataatttaaaattcgtaatccaaaaccac

SEQ ID NO: 118619 - DNA, 596 bp, Homo sapiens
acagtgatgaccagctcagtggttggaccgagaagatgctccaaagcacttcctgaagccaaactttcatcaaaaagaggtcagggtcactgtttggtggtctgctcctggtctgatccgctacagctttctgaatcatagtaaaaccaatacatctgagaagtatgctcagcaaatcgatgagatgcaccgaaaactgcgaggcctgcagctggcactggtccacagaaagggtccagttcttctccacgacaacacccgacaacatgttgcacaaccaacatttcaaaagttgaatgaattgggctacaaagttttgcctcatycaccatattgaactgacctctcaccaaccgactaccacttttccaagcatctagaaaattttttgcagggaaaatgcttccacaaccatcaggatgcagaaaatgctttccaagagttcatcgaatcccgaagcatggatttttacgctacaggaataaacaaacttatttctcattggcaaaaaatgtgttgattgtaatgtttcctattttgataaagatgtgtttgggcctagttataataatttaaaattcgtaatccaaaaccac

SEQ ID NO: 118620 - DNA, 529 bp, Homo sapiens
taagctaagttgcctgggagtccttggtgctttttcgaggttctactgaagacaatgccatcatccaagtatctctgaatgccaacgtagctcttgcctcaggagctctgagacccatgttatctatttttgaactggccaaggccccccacagcaaggaaagggatgctcttcccatccttgtcagccctcgtgtcttgtattccaccccacagcctcctagcaagcatctcagtgtctgcaggtgagcatggctgagttcagtcttgcttactgcaactgtagacatgaggtctgtggaagtaagaatcctctcatttgctgactggcattttgtttaagtcccatgtcactaatctctggygagacaatcctctttgtgtttcctggtgatggacttgagtgatttcaatgtaaacagtggctccacctgggagtgtatccccttcccacggggagggggtgcatagcccctgccaggtttctgctgtcctctcatcctcccactgggcttttcccctgcagatgg

SEQ ID NO: 118621 - DNA, 596 bp, Homo sapiens
acagtgatgaccagctcagtggttggaccgagaagatgctccaaagcacttcctgaagccaaactttcatcaaaaagaggtcagggtcactgtttggtggtctgctcctggtctgatccgctacagctttctgaatcatagtaaaaccaatacatctgagaagtatgctcagcaaatcgatgagatgcaccgaaaactgcgaggcctgcagctggcactggtccacagaaagggtccagttcttctccacgacaacacccgacaacatgttgcacaaccaacatttcaaaagttgaatgaattgggctacaaagttttgcctcattcaccatattgaactgacctctcaccaaccgactaccacttttccaagcatctagaaaattttttgcagggaaaatgcttccacaaccatcaggatgcagaaaatgctttccaagagttcatcgaatcccgaagcatggatttttacgctacaggaataaacaaacttatttctcattggcaaaaaatgtgytgattgtaatgtttcctattttgataaagatgtgtttgggcctagttataataatttaaaattcgtaatccaaaaccac

SEQ ID NO: 118622 - DNA, 656 bp, Homo sapiens
tgaaacatttcaggtctcttctttggctttttcrcattattaataatactgtgataaacatccttcagcagaaaccttcataggctagcttcctagaagtagaggtattaggtccaaggttttgaattgttttaaagctattgatttatctggataaaattgcttccagagatattgtcccattttgcattccaatcagtggatctcaccttcagtattttgtgcaattaaaaaaaataatgtttctccttttaaagattatatttaaaatagcttttaaatatgaaaaatttgtatctacaaataagagatagtgacaaaaaataaataataaaataaacacaagagcagaaagtagattgaaacattaaaattcaaatcacaggcctctgttatggagaagacagctgcaatagcttttctgttcttttatctacattggtaggttcttcttttaattaatttttaccccaacttaagtgctggctggtttggcaatttgttgctgggatggaaagaagaaatgtgcaccttgtcttttgcaggttatgagagccttgtctgtccttgtggttgtgtgggtgtctgttagattattgtgaatactgagctttgaaaataacctaacagtcaatcaattgctgagcttctattac

SEQ ID NO: 118623 - DNA, 552 bp, Homo sapiens
tcatcccttttggcactcatggtgccacttgtgggctgatacaggagtgagtctactgtgaaggcactcagtatagtggaaaaaacaaatatcaacctcctgctgacttttttcagtgtaaaaactataagccctatgggagtttctgcagatggtaccataatggcctgagggaggagtatcacagtcacagagtattggttctctcactctgtaagccatggttttacccatcttcacaggccaaaggtgcttcataaccttgttcaygtattgaggttctgttggctcttgtaatggtaatttcacatgtggacagttgttcatattgatgtttctataggggtatgatagctggagaggtctgcaccactgtcttgctctgcctcgatcattatttttttctaacaagaatttgtctcctcctagtttttctttttctcttaaccgacctaggtatagccttttaatccttctccctcctctgcttctaatgtcattgcttctttgtatgcctatcatatctacatgctacatgaccttcagctggtt

SEQ ID NO: 118624 - DNA, 535 bp, Homo sapiens
acataaaaaagctgttattgaagactattgcaaaagggcaaagaggccagaacttagtctgaactcagctccrctgaaacaaacagcagtagagattttaagagccaggatgagggggagatcatagaccacttgtctttgatagttgtctttttccaaaggaatattaaactatctttcatctttatgacagaaggtgattttacaaattagaggaatatgcccaccaaaatttggctcttactctctcatggagtctgggagataatggtgttatcttttttgagaattacatttcaaagggatggctctgaggtccttgaaatggacatttctgaagtgtaaaactggcacgtgggctcttagaaagatttatcaaagaggcagagaaagaatttacaatgataacatttctaaaatatgctaaagaaaaaaagaggtgaggagccaagaatcagaaataatcctgtctaaaaattttatcaaactgaggggatggctttagtcaaaggtttagtgtaaggggaatttctat

SEQ ID NO: 118625 - DNA, 535 bp, Homo sapiens
acataaaaaagctgttattgaagactattgcaaaagggcaaagaggccagaacttagtctgaactcagctccgctgaaacaaacagcagtagagattttaagagccaggatgagggggagatcatagaccacttgtctttgatagttgtctttttccaaaggaatattaaactatctttyatctttatgacagaaggtgattttacaaattagaggaatatgcccaccaaaatttggctcttactctctcatggagtctgggagataatggtgttatcttttttgagaattacatttcaaagggatggctctgaggtccttgaaatggacatttctgaagtgtaaaactggcacgtgggctcttagaaagatttatcaaagaggcagagaaagaatttacaatgataacatttctaaaatatgctaaagaaaaaaagaggtgaggagccaagaatcagaaataatcctgtctaaaaattttatcaaactgaggggatggctttagtcaaaggtttagtgtaaggggaatttctat

SEQ ID NO: 118626 - DNA, 506 bp, Homo sapiens
ttccttgccttgtgaccacatcgcttcaatctctgcttctatggtcacactgattttttcctgttctttgatgaagtttccttctmaatccctcttataaagagacttgaaattgcatttagggcccacctggataatccccaggaaaatctccctgtctcaagattcttagtcacatctgcatagtcccttttgctatgtaaagtaacattcacaggttccagggcttagaatggggacatctttggaggcctttattcagcctactacagtcagataaagcacacagaaaagctggtgtgggttttatttgtatgttgtctctgagtgttttcaaggttaagatctttcaaggactaaagaatattggttaattcctaacatcctgggctatacaattagtgtagaaagaatacgcccttttggggtggatgagtcaaaatactcacactttattaaaaccattttagtgaattttactgtttgttctgtggatgttacagaaa

SEQ ID NO: 118627 - DNA, 540 bp, Homo sapiens
atttatattcactatgccaagtcaggtatagtcttattttgccattttattttattctttgtgrtttatacttattgttttcttcttccctatacattatatgtcattgtagctcctctttcttcctattagttattttttctacaaattttattctatattcccatttgtagaatgcacatttttgttctacagttatatatatattcacatatgcacattatatgtatataaaaatatacatatacacagagattagcatatatatgtaattttcaaccaattataagaatggaagactattactggttctcctatataagagacttatcacacttttactttcctcttctctactcctgctcaacatgtattaattaattagttttttaggtcaaattcctggtattaaaaatattattttttattttgtttattttctttcccaagaaatatatttgatacaagaattatgtaacatattgatgttaaaaactagtaattatttattaatgtgaattttaatggatgcagtacaca

SEQ ID NO: 118628 - DNA, 540 bp, Homo sapiens
atttatattcactatgccaagtcaggtatagtcttattttgccattttattttattctttgtgatttatacttaytgttttcttcttccctatacattatatgtcattgtagctcctctttcttcctattagttattttttctacaaattttattctatattcccatttgtagaatgcacatttttgttctacagttatatatatattcacatatgcacattatatgtatataaaaatatacatatacacagagattagcatatatatgtaattttcaaccaattataagaatggaagactattactggttctcctatataagagacttatcacacttttactttcctcttctctactcctgctcaacatgtattaattaattagttttttaggtcaaattcctggtattaaaaatattattttttattttgtttattttctttcccaagaaatatatttgatacaagaattatgtaacatattgatgttaaaaactagtaattatttattaatgtgaattttaatggatgcagtacaca

SEQ ID NO: 118629 - DNA, 451 bp, Homo sapiens
aaatttcagtaaactaagagacagagactctacacagagtttcagtttccccttagctcctataaaatggaatgtcatgctactgagatatctcatgcactgctcttgccttctgtctgaagatgggattcatgaattacctgaatcatctggatccctagaattggattagtggctcagacaactccatcttttgggacagatgatagaaggtatctatttcctacagctaggtttttgcagtaagattacataactcttatttgatctttctcattatttttttcaggacataaattgtgttccaattctgatatccaatgatcttacctcatttggggtaggttaaagtagatactcattaggactctaaggagcatatttttctacttagtgcaaaygtcagaaagtaagtaatcatgtttaaactgacaagagctttaaccaggaa

SEQ ID NO: 118630 - DNA, 457 bp, Homo sapiens
gtaaactaagagacagagactctacacagagtttcagtttccccttagctcctataaaatggaatgtcatgctactgagatatctcatgcactgctcttgccttctgtctgaagatgggattcatgaattacctgaatcatctggatccctagaattggattagtggctcagacaactccatcttttgggacagatgatagaaggtatctatttcctacagctaggtttttgcagtaagattacataactcttatttgatctttctcattatttttttcaggacataaattgtgttccaattctgatatccaatgatcttacctcatttggggtaggttaaagtagatactcattaggactctaaggagcatatttttctacttagtgcaaacgtcagaaagtaagtaatcatgtttaaactgacaakagctttaaccaggaagttgcctacatcac

SEQ ID NO: 118631 - DNA, 578 bp, Homo sapiens
attcttggcaggaaacagatggcgtactcaacctaggtttttgagaagagtttaatgcaagggtattcaaaaagttgaaagcagggagcttgggaagatttgaagagatgaggggaataagtgtttagcataacccaaagagaaagttattgtagctrtagaagaagggtgcctgatgggactgtggtcttcaagaaaggagtatagtgtaagtgtactgaaggggtaaaatctggaaaatgtatacccaacttcattttctttctgtcccttaatttcttgctaatgtcttcaattagtcaaactcaactggaaaccagtaggcaagggagcgtctcaagcattaaaacaggacagggaggttggaaaggcagcaaaaggttggaaaagcagcaaacataagttgtgtttcagggctgggttatctgagtctcaataatgtcatcagagacccaggttttatctatatctctgctgtaccagctacagtgttgattttatgctaaagctgatactgtttgaggtcacaaggctgccagagagaattagtgctatagaccttcacatccaggtgaaga

SEQ ID NO: 118632 - DNA, 578 bp, Homo sapiens
attcttggcaggaaacagatggcgtactcaacctaggtttttgagaagagtttaatgcaagggtattcaaaaagttgaaagcagggagcttgggaagatttgaagagatgaggggaataagtgtttagcataacccaaagagaaagttattgtagctatagaagaagggtgcctgatgggactgtggtcttcaagaaaggagtatagtgtaagtgtactgaaggggtaaaatctggaaaatgtatacccaacttcattttctttctgtcccttaatttcttgctaatgtcttcaattagtcaaactcaactggaaaccagtaggcaagggagcgtcycaagcattaaaacaggacagggaggttggaaaggcagcaaaaggttggaaaagcagcaaacataagttgtgtttcagggctgggttatctgagtctcaataatgtcatcagagacccaggttttatctatatctctgctgtaccagctacagtgttgattttatgctaaagctgatactgtttgaggtcacaaggctgccagagagaattagtgctatagaccttcacatccaggtgaaga

SEQ ID NO: 118633 - DNA, 573 bp, Homo sapiens
gatgattatctgcatttgatttagtgctgaactgtcaaagggggactaacaaaaacaaaatattagagttgcaagcagtgtaagtggaaaataatgatcatattgaactcatcattactgaaataagaaaacaaagcaaaaaataaataagaaaaaaattgactacgtgaacatttgcttctctcctaagaatcaaaacccttaatttgctgtggcaaaaaagcatctgggtccatgaacccatgcaaaagtctactgtttctgggagataagaagaagcaaaacacatcagcttccagagaaggttaagaaacctctcataccctaccctaccccacctgacaccaggcaaaggatcactgcttctgggagagggatgcaagaaaaatactcctccatcaggagaggaacaaggattgttttggggcccaggattttgcactaatgcagagtcgtgytactgtggtaaaggtttggaaagtctccatccagtgaccacagacaaaggtacattgttcctatggaaggagaaataaaagagtttgcccttattgtggggttgaaaacttgcaa

SEQ ID NO: 118634 - DNA, 517 bp, Homo sapiens
taatacaaaatttaaagaacgctagaataatcacactagtgaaactgctgaaaaccaacgattagcataaatcttgaattcagtcacagaaaaaatargaacactgtgtagagagataaacagaaacaaacattgtaatgaactgcttgtcagtaactctacaagtcagaaaccaatgatacaaaattcttaaataactgaagaaaagtcaacccccaatcttatatccattaactgtaatacagcaaaaataacaattaaatgacatttgcagattaacactggaagagtcccttgctaacaggcatgcactaaaataaatgtcaaaatcatttcttgaggcaaaaggaatatggaagcaggtgaaagttgaaactacacaaagaaataaataatgccagagaagatataaagatatataacccaattattttacattgctctaaagataattgattgtctaattttttaaaaaaagagtaactttatattatggaattcataatatttgagacta

SEQ ID NO: 118635 - DNA, 517 bp, Homo sapiens
taatacaaaatttaaagaacgctagaataatcacactagtgaaactgctgaaaaccaacgattagcataaatcttgaattcagtcacagaaaaaataagaacactgtgtagagagataaacagaaacaaacattrtaatgaactgcttgtcagtaactctacaagtcagaaaccaatgatacaaaattcttaaataactgaagaaaagtcaacccccaatcttatatccattaactgtaatacagcaaaaataacaattaaatgacatttgcagattaacactggaagagtcccttgctaacaggcatgcactaaaataaatgtcaaaatcatttcttgaggcaaaaggaatatggaagcaggtgaaagttgaaactacacaaagaaataaataatgccagagaagatataaagatatataacccaattattttacattgctctaaagataattgattgtctaattttttaaaaaaagagtaactttatattatggaattcataatatttgagacta

SEQ ID NO: 118636 - DNA, 517 bp, Homo sapiens
taatacaaaatttaaagaacgctagaataatcacactagtgaaactgctgaaaaccaacgattagcataaatcttgaattcagtcacagaaaaaataagaacactgtgtagagagataaacagaaacaaacattgtaatgaactgcttgtcagtaactctacaagtcagaaaccaatgatacaaaattcttaaataactgaagaaaagtcaacccccaatcttatatccattaactgtaatacagcaaaaatawcaattaaatgacatttgcagattaacactggaagagtcccttgctaacaggcatgcactaaaataaatgtcaaaatcatttcttgaggcaaaaggaatatggaagcaggtgaaagttgaaactacacaaagaaataaataatgccagagaagatataaagatatataacccaattattttacattgctctaaagataattgattgtctaattttttaaaaaaagagtaactttatattatggaattcataatatttgagacta

SEQ ID NO: 118637 - DNA, 369 bp, Homo sapiens
tgaattcagtcacagaaaaaataagaacactgtgtagagagataaacagaaacaaacattgtaatgaactgcttgtcagtaactctacaagtcagaaaccaatgatacaaaattcttaaataactgaagaaaagtcaacccccaatcttatatccattaactgtaatacagcaaaaataacaattaaatgacatttgcagattaacactggaagagtcccttgctaacaggyatgcactaaaataaatgtcaaaatcatttcttgaggcaaaaggaatatggaagcaggtgaaagttgaaactacacaaagaaataaataatgccagagaagatataaagatatataacccaattattttacattgctc

SEQ ID NO: 118638 - DNA, 512 bp, Homo sapiens
gagaatcattactgtgaaaaatcgattttgttataatgatagaaatttaaacatataaaagtaaaaacagatgccacctctttgctagaactctacaaggcaaattactataagagagccattgcagtgaaataagtgaaagcacattataaataaacttacctgattttacaaactaacctgtaaagggatttgtactaatttttccattgcctgcattgccctttcttctagatccaatttatatttttgtacttcaccaatgtgtcttcaccaatgtgtactttccataygttttttaagatttaatattactttttccaacatctttttagcctcctcaagatttttacattcctgttgtattttttcatacataataactcctgttgaataccttgattgttttgagtcaaacagacatattttgaagatacagcttccagctctgctgtaagatcaccaaactacattaataaaataatataacttgaaaatgaagtaggctgaga

SEQ ID NO: 118639 - DNA, 502 bp, Homo sapiens
attaatcatgttccgtgtatttttcatctcaaatttataagagtttttgggtgggcatggtggctcacacctgtaatcccagccttttgggagactgaagtgggctgatcatttgagctcaggagtttgagaccagcctgggcaacaagayaaaaccccatgtttacaaaaattagccaggtgtggtggcacatgcctgtagtcccacctactcaggaggctgaagttgaggatagcttaagcccagaaggcagaggttacagtgagccgagatcacgccactgcactccagcctggacgacatagccagaccctgtcaaaaaaaaaacaaaaactttcataaccaattatataaccattctactacttagaggaacaaaaaagtcaataattcacgatttaaaagctactaaaaacataaaatataaaactatgcactaaggagttttatatataaatttacccattaaataaatatgtgtatgtacttctttaatttaaa

SEQ ID NO: 118640 - DNA, 502 bp, Homo sapiens
attaatcatgttccgtgtatttttcatctcaaatttataagagtttttgggtgggcatggtggctcacacctgtaatcccagccttttgggagactgaagtgggctgatcatttgagctcaggagtttgagaccagcctgggcaacaagataaaaccccatgtttacaaaaattagccaggtgtggtggcacatgcctgtagtcccacctactcaggaggctgaagttgaggatagcttaagcccagaaggcagaggttacagtgagccgagatcacgccactgcactccagcctggaygacatagccagaccctgtcaaaaaaaaaacaaaaactttcataaccaattatataaccattctactacttagaggaacaaaaaagtcaataattcacgatttaaaagctactaaaaacataaaatataaaactatgcactaaggagttttatatataaatttacccattaaataaatatgtgtatgtacttctttaatttaaa

SEQ ID NO: 118641 - DNA, 632 bp, Homo sapiens
ccagccttctctctgtacctagttatataaataaactcccttctatccagttcatctgcatctcattattgggccatgagaataagcataaaacaaaccttcctttgatgctggtatctaagcaccaaaaaatagataccagcatcaaaagaaggtttggatacaaccttctttcattttgtttggatacaaggagctagtttgggtctgctcctttaatgtatctatgctcatattttccttcctcaattataaaataaaktagaggtgaacactgtggttagccatagattaaccaagaaagcagaaatcatctcaaatgttcacagcagaaggaatggaaagcagtggtgggtccatgaagagtggagaggctgagaattaaacagagggctctaaaataatcctgggagattgacgatagcaggaagtctttatcattcttgggctggagagacaaaaggaaaacatggaattactggcaccaagaggaccactctgggagactggatctctggtggcctcgatacaatgggggctggagtcacagagaagataaagccactggagaggccaccttaggctgaaaacaggagggagtgtcttgatagctccctcccccaaaaaccgct

SEQ ID NO: 118642 - DNA, 632 bp, Homo sapiens
ccagccttctctctgtacctagttatataaataaactcccttctatccagttcatctgcatctcattattgggccatgagaataagcataaaacaaaccttcctttgatgctggtatctaagcaccaaaaaatagataccagcatcaaaagaaggtttggatacaaccttctttcattttgtttggatacaaggagctagtttgggtctgctcctttaatgtatctatgctcatattttccttcctcaattataaaataaagtagaggtgaacactgtggttagccatagattaaccaagaaagcagaaatcatctcaaatgttcacagcagaaggaatggaaagcagtggtgggtccatgaagagtggagaggctgagaattaaacagagggctctaaaataatcctgggagattgacgatagcaggaagtctttatcattcttgggckggagagacaaaaggaaaacatggaattactggcaccaagaggaccactctgggagactggatctctggtggcctcgatacaatgggggctggagtcacagagaagataaagccactggagaggccaccttaggctgaaaacaggagggagtgtcttgatagctccctcccccaaaaaccgct

SEQ ID NO: 118643 - DNA, 632 bp, Homo sapiens
ccagccttctctctgtacctagttatataaataaactcccttctatccagttcatctgcatctcattattgggccatgagaataagcataaaacaaaccttcctttgatgctggtatctaagcaccaaaaaatagataccagcatcaaaagaaggtttggatacaaccttctttcattttgtttggatacaaggagctagtttgggtctgctcctttaatgtatctatgctcatattttccttcctcaattataaaataaagtagaggtgaacactgtggttagccatagattaaccaagaaagcagaaatcatctcaaatgttcacagcagaaggaatggaaagcagtggtgggtccatgaagagtggagaggctgagaattaaacagagggctctaaaataatcctgggagattgacgatagcaggaagtctttatcattcttgggctggagagacaaaaggaaaacatggaattactggcaccaagaggaccactctgggagactggatctctggtggcctcgatacaawgggggctggagtcacagagaagataaagccactggagaggccaccttaggctgaaaacaggagggagtgtcttgatagctccctcccccaaaaaccgct

SEQ ID NO: 118644 - DNA, 595 bp, Homo sapiens
ataatatcaatacgtaaagaggtggacattataaaaagtattcaggagcagaaaatacaataaatacaaaatttactaaaggatgcccaaagcatagttgagcagtcagaagaatgaatataactaaagaaagagcaattcaaatcactcattctgaggagcaaaagaaaaaaaaataaagaaaaatgaactccargggagctaggagacaccatcacacataccaatatattcataattgtaatcccaggagaacagaaaagtggaaaaacagatatatgaaaaaatagtagcttaaaactttataaatacaaaagacgtttatgcccaaattcaagtttctcaatgacctccaaacagaataaacaaaaagaaagcaacattgagactttttataatcaaattgtcaaaagacaagaacaaggataacttgtaagcagcaagacaaaagagtcttagcatatatgagggattcttaacaagatttctcatcagtaaccatgaattccagaaggcagtaagaggatatatttagagtgctgaaagaagggaaaaacaaaggaactgtcaaccaaaactttgtatcaagcaaaac

SEQ ID NO: 118645 - DNA, 595 bp, Homo sapiens
ataatatcaatacgtaaagaggtggacattataaaaagtattcaggagcagaaaatacaataaatacaaaatttactaaaggatgcccaaagcatagttgagcagtcagaagaatgaatataactaaagaaagagcaattcaaatcactcattctgaggagcaaaagaaaaaaaaataaagaaaaatgaactccaagggagctaggagacaccatcacacataccaatatattcataattgtaatcccaggagaacagaaaagtggaaaaacagatatatgaaaaaatagtagcttaaaactttataaatacaaaagacgtttatgcccaaattcaagtttctcaatgacctccaaacagaataaacaaaaagaaagcaacattgagactttttataatcaaattgtcaaaagacaagracaaggataacttgtaagcagcaagacaaaagagtcttagcatatatgagggattcttaacaagatttctcatcagtaaccatgaattccagaaggcagtaagaggatatatttagagtgctgaaagaagggaaaaacaaaggaactgtcaaccaaaactttgtatcaagcaaaac

SEQ ID NO: 118646 - DNA, 570 bp, Homo sapiens
ctctttttccccttttaaggtcagctgattaaccttaattccatctaataccttgatttccctttgccatgtatgtcctggggatgaggatgtggatggatctaggggggccggtattctgcctaccatagctatcttgctctttttgtttataattatgatatgttccaaaaaggagtaaaacgtaatacaagaagataaaaatacatttaccattaagtaagaaaaaagacaaggagaagagaataagaaaatgagtcaggagtgggatttatacaaaaaattagtgagtccactttacttcctggaagtggatggtgagcttttcttgccagccttcttgaagagggaagcactgtcagttatgttgtagtgtgtcgatctagtaaaatccaactggttgttcagatacctagatgaatattcttgatakgaagatgaaaaaaaaatttcttccaaagtcttcatggatacataaagtgtataatgagcaaaacctttgacatgtttacagtaaacccaatggtgtgtttcacctggcctttctcttctttcgtttactgctttata

SEQ ID NO: 118647 - DNA, 585 bp, Homo sapiens
ggttaccaggggtggggaggagagagggggatgaggagggagtggtcaatgggtaaaaagttacatttaggaggaataagttctggtgttctattgcacagcaaggtgactatggttaataataacgtatatttctaaaagagacaattttaagtgttctcaccacaaaagtaataattatttgggggtgatgtgcatgctaactatcctaatttgatcatttcacaatgtatatgtggattgaatctcacatgrtactccattattatgtataattattgtatcaaatttaaaaaaatttttaaaacagggaataaaggagtattatgagttaaaaacacctgtctaccttggattgttcaaagtttctatgtgggactctatgacatcctttagggagcccctccccacacacacaccttctcagagaaaggcactgaccacagtggcacaataaagtatctgctaaatgaatatgtcgcctagggcactacagcactttattcagcccttctaactgcaggccagccaactagcacctgccctctttccttcctccactccgctccgcgccaagtctatatt

SEQ ID NO: 118648 - DNA, 571 bp, Homo sapiens
cccccaaagacaagaaatgccggcaatggccatgccttgcacacagagggtggtcattaagtatttgytagatggaaggacaggatggtggaaatgaggtgaagaaatgcaaattagcaaagacctccaagacctccttctggtatgagccacagaacctgggcattctgacaatacatttgcaccttaccttttacaagattttacccttagtagtaaaacccttgaagaggcagggttaaactaaagtggatgtgatggtagtcaggtattaacagagaagaaaactgcaaaaaaacactccagaagaaaattctaggggggcagggcagtgagattacagaaacaaaatatgtctaagacaagggatggaggggaaaatacccgggaacctttcttggaggccacttgtattgtcactgttatgctgagaagatcacagaaaataagacctgaaagggtgacaaggaggaactgagagaaccttgcatcaaaaacctgaaaatctctgatctgcagcttgttctaccattggcattgtgtgatcctaagtgtgtccatctcagtttcc

SEQ ID NO: 118649 - DNA, 448 bp, Homo sapiens
gaattcacatgaatatttacatgtggcattggaatgaactagtgaggaaggtgttggttaatctatgtggaatccatatgaattttgtagatcattaaaataatagtggaaataacagagggccttaaamcttgaagagatagtgcatccttttcacaaactctgttaaaagcaccgtctgtcccttttagtacggcaagcgattgcagaaaacagtagggaaacacaaggtaaatcagttttctttgttgttcgagattattttctgaaagtgtttaagctggtttcctttaataaagaaaatctcatgctaaaaaatgtaagcatttggcatgtctttcacagagggcttggaaaacaagtcccctctatatcatacacctggagtgtttaatcccaaatttgttaatgtatagacttgatgatttaaatgataaaactgcagacc

SEQ ID NO: 118650 - DNA, 655 bp, Homo sapiens
tggaataacgtcttgcttaagttgaaatcttgttcacttaaagttattgtattagtaaatttgacatttaaaccttagttcctttgacgtcagttgaaaatctttttcatttactctaattaaaaatagattaacctgcaattcacattaggtataaatgctcaagttaaacaaattaaaataaatagtaacttaaatgtaaaggawcttcctgtgaactagttcaatccagaaaaaaaaatgctatttctcttttcctgtgaaataaaggtaaaaaatttactcttgctatttttagcttgcttctcaggacttttgaaaactatggctctgtacataatgttatagattctttccttgtgtatattcttttaaatgtaaattatgttaactaataacagaaggattgaatttttagccatttcaattattttcccctttgccctttattttaatatcacatttctctggcatcctcattgcaactcgtagcatttaccatgataggacatgtcatctggcacttatttctcccacgcttcataatgctgactcaaacaaaggttttaaacaaagccaactcattattactagtaatcttatcatgccattatgtttaagccattttcctttactccatactgaatgaaatcaa

SEQ ID NO: 118651 - DNA, 655 bp, Homo sapiens
tggaataacgtcttgcttaagttgaaatcttgttcacttaaagttattgtattagtaaatttgacatttaaaccttagttcctttgacgtcagttgaaaatctttttcatttactctaattaaaaatagattaacctgcaattcacattaggtataaatgctcaagttaaacaaattaaaataaatagtaacttaaatgtaaaggaacttcctgtgaactagttcaatccagaaaaaaaaatgctatttctcttttcctgtgaaataaaggtaaaaaatttactcttgctatttttagcttgcttctcaggacttttgaaaactatggctctgtacataatgttatagattctttccttgtgtatattcttttaaatgtaaattatgttaactaataacagaaggattgaatttttagccatttcaattattttcccctttgcyctttattttaatatcacatttctctggcatcctcattgcaactcgtagcatttaccatgataggacatgtcatctggcacttatttctcccacgcttcataatgctgactcaaacaaaggttttaaacaaagccaactcattattactagtaatcttatcatgccattatgtttaagccattttcctttactccatactgaatgaaatcaa

SEQ ID NO: 118652 - DNA, 535 bp, Homo sapiens
atagaatatgtagtgaattgacattttttcattcttatgtcaatttttgtttttttcttagatagttggccaggattttaaatattctttttwttgaaatcattggcttttgtgagcactaacaatatgcttttaaatactaataagatagaacatctttttcatgttcctatcttaaagaaaagtaatgcaatattttatttaggtttggaatataaaacttttacaaattaagtaagtttcttccttgccctaatatgctaaggattttacttttaataaaaaatatttaacattatcaaaagctttttctacattgattaaaataattatatcacttttctcatttggtctattaatttcactaaatacattaatcaattttatgatattttaaaaatcttaaattttgtgataaaacttgtattttaaaaatctgttcaatgtattattaaatttatttagctaattatttattattttgcatcaaatttcattgatatataaaagaaaatagctgtttttaaaaaatttg

SEQ ID NO: 118653 - DNA, 614 bp, Homo sapiens
ggtcctagtaacagattcacacttactgcagatcagtggaagaaagatcagtactccaaaacttaaagtacatttattattgcccaagattccaattagttgtgaaatttttgtgtacaaacaccaaaaatttgtggccacaaacatctgtaattttatagattctgaagaaaatatgtggttcaggaaaagactgtttcattgccctcaagactgatgctaaaatttcttgtcataaggccatcactcaaatttgtttagtgaattgctatagatgatctagtaaaatgtccagctctggagtgtactgttttcaaaatgtagaagcccaatcaaggatcaggcctctttctttgtagttagtggctacagagatagcattcttgtttgcttgtttgtttgtttattacgagactatggaatgtccctctgggctcaaggccagataagtcaaaggcaatcactggaatgcggagccttagatattaaccctaggttaggtaagactcaggttctgagtcttaccagctcaagaaaaaaggaagaaactggcacctgaaatgctcaacatatttataagggttaggyacaggaatgtgtctatgtaacaataa

SEQ ID NO: 118654 - DNA, 633 bp, Homo sapiens
catttatcatttttctaatatactatatacttccttatttataatgtttactattagttcttatccctaccttcactcctactttcccagctagaatggaagtccacaaagataggatttctgtctctttcattcacgagtacatgctggtttccctgagcaatgcctaacaaaagcaaagttgcttatcaagtaaatgttgaataaataagtgaatgggccatacctaaacagataagcaaattgtaaatatcccccatagtgattaagatattaatttcccacaaaaagattcatagattcaatacaatccaaaattacaatcaagcagacagtttgtagaaactggaaagcctagtctaatattcatatggaaatataaagaacctagcctagtcaaagtatctgaaaaacaaataaacacgaaactgytggaggactaagcctctctaattgcaagacttataaagggctgtagtcactaagaacgttttgcattgtcttaaagacagacaaatagatgctgggcattgtggctcacacctgtaatcccagtgctttgggaggcccaggtgggatgatcacttgagcccaggagttcgaggctgcagtgagctataatttcaccactgc

SEQ ID NO: 118655 - DNA, 555 bp, Homo sapiens
cccaccagcaatttatgaggcttctattttctccacatctcatgaacacttgttatatcttcctttttctgtacccratcaaataagggggaagttctatttcattgtgttttgcatcttcctaattgctaatgaaattgagtgtcatttcgtctcttattggctagagatggagtggggacagttccaacttttctttgagtggtaatgttgctgtgtgagttaggaaagatggcctcaggtctttttggtttccttctctttgtgtagaacttccaccttatgagtaagctgaggtaagaggcacgggggcctagtattctcagcagaacttctgtcctataagaggagggtgaactgaggaagagaatctaagatttttcagcctctcttgcttggatagcattcctgcaagatagagatggggttttgatatatggtggcagcttgtcccttctggggaagatctggtagccctaaactaggaattggtagaaaggaaaactcttttcttgtctgaagtacagcacccatctcactgattttggaagaagg

SEQ ID NO: 118656 - DNA, 555 bp, Homo sapiens
cccaccagcaatttatgaggcttctattttctccacatctcatgaacacttgttatatcttcctttttctgtacccaatcaaataagggggaagttctatttcattgtgttttgcatcttcctaattgctaatgaaattgagtgtcatttcgtctcttattggctagagatggagtggggacagttccaacttttctttgagtggtaatgttgctgtgtgagttaggaaagatggcctcaggtctttttggtttccttctctttgtgtagaacttccaccttatgagtaagctgaggtaagaggyacgggggcctagtattctcagcagaacttctgtcctataagaggagggtgaactgaggaagagaatctaagatttttcagcctctcttgcttggatagcattcctgcaagatagagatggggttttgatatatggtggcagcttgtcccttctggggaagatctggtagccctaaactaggaattggtagaaaggaaaactcttttcttgtctgaagtacagcacccatctcactgattttggaagaagg

SEQ ID NO: 118657 - DNA, 681 bp, Homo sapiens
cagtagcagcagtaaagttgcagtaatttatgattctgctctgtctacaaagtgcaactgagaaagcactatcccttcagcgctaacctcacttttaagtgccctaaaactactaaggtaaatgtaatttctgggtttctataacattgcagaagyattgtgtcaataacctgtattcaattttatcacacatattttcctgatccatgcaattcctaaagcagagcacaaaggcttttattctattatttcagacaaaagtttaaaatgcaaaagctagtatgagaggtaacaattgtgaaatcaatgacagatgttttcttgttttgaaaaatacagaaataggtacttaagtggggagaagaggtcattagtaagaggctagggatgtgtacaaaaatgtcagccctaccttgcatttggccttataccaaagtctctttatttgttctgaggtaacttgtgaaatagctacatacatttgaccagatacctaatgcaggtaccactctttaagggtgaatgtttttatcttttttgccctcactacacaattaaattttaccattataattatcaattgggtcactctaaaggaattatattaacttcgtattttaatgatgatagtgaaagactcatttgacaaatcttaagcatatattaaagagtaagattatt

SEQ ID NO: 118658 - DNA, 590 bp, Homo sapiens
ttaaactttaagaacaagaaatagactttgttagtttagatttcttggtagataatttttagcctgtcagtaacgagtgtaaaattttgtctagaaaaaaaaaagtyccagatactcaggaaactgaggcagtaggattgcttgagcccaggagttccaggctgcagtgggctatgattgcaccacttcattccggcttgagtgacagagcaagaccatgttccctgaaaaaaaaaaatagtaacaaaaaaactgtaaagaatttataaataactaccaattgtcagtgactgagggaaaaaaagaatatggactaatagtcttgagctaggagactaagtggatagaaaagacatgcatctgagggcagtttgagaagcatgtcaatgccatcctagccctttcgattattgacccatagagagagaggttccaatgcaggtgaggtgatacatagattaatatccacacaaatgctatatcttacacaatatcacactttgctaacgctgcacataatcaagaggtacccataggcagcaagatgtttggaccaccgtatgtgactctggatttttctttcctgtaag

SEQ ID NO: 118659 - DNA, 599 bp, Homo sapiens
aggtatactgatatcagagccaaaatatactttaattgaaacactgaagttacagaaaaataagtacattttacaaggataaaagggagaaataataagacatatataaaattataaatatccatctaactaaagaacttcaaaataaataaagaataatagacataattgaagaacataaacaacagtaatagttggagattctaatacttcacctttaattgtgaatagaacaataagtaggagatcaacaatttaatagaagacttaaacattgtaagtcaacyaaatgaacatctctggaacactttacctaaagcacacattttctcaagtacaaatgaaaatttctctgggataggccacatgctatatatgctaggccaaaaacattaaaagagagacacaaataatttaaggttgaaatcataaaaagtatattcctgacttcaatgacattaaattagaaagcagtaatagaggaaagtttgggaaattcataaatacgtacaagataaacaacaaattgcttttgaccaatagtctaaagaagaaatcataagtgaaattagaaaatacatttaatgaatgaaaacaaa

SEQ ID NO: 118660 - DNA, 639 bp, Homo sapiens
aaagcagtaatagaggaaagtttgggaaattcataaatacgtacaagataaacaacaaattgcttttgaccaatagtctaaagaagaaatcataagtgaaattagaaaatacatttaatgaatgaaaacaaaacataatgtaccaaaatatatatgcaataaaagtaatgctcagatgaaaatctataaatgtaagtgcctaaatttaaaagagataaacatctcagttttttagtttaaccttcaacctaaagaaactatgaaaagagtagacactaaacacaaagaaaccagaaggcaataaataataaatatgaattgaaataatagaaaagagcagaaatcatagagaacacatttaaaaaacataaaattgatttttggatggaataaaaatttttgaaactttcagmtagactgaaccaaaatatgagagagtattcagattatttaaatcagaaatgaaaggtaaataatcactactgcttttaaagaaatgagaagattataagagaagactgtgagaaactctatgtcaacaaatttgataacctaaacgaaatggatgtttctacaaccacagaactcaactagaaacgtgaactggaaacagaatctaaagagacctgtaacagtagc

SEQ ID NO: 118661 - DNA, 513 bp, Homo sapiens
taaatggaagggtgctctttttacaaggattaactcagctatggaactcttgaagtatcttcctctgtagcagaatgaacatgaattctagaacctggaaggcccaggctggcatgtgagctgcattttcttggccaaattatttcccctctgagcttctctcagtattcatattattgataataacaacagcagacacatattgagtgctttctatgggtcagttattcttctcaataccttrtgtgtaataatttatataatcctcacagtagccttattattattagtctttctagtttataagtgcatgtgttttatgaattattttataaaataaaagttcagggatataaaccttttacaaacacttatatgttttatagtagttttaagtttaaggtaaaattgagcagaagatccagagacatctcatatagtccccccctccctcttgcatagccttcccccattatcaatgtcctgtaccagagtgttattgctacagtagat

SEQ ID NO: 118662 - DNA, 513 bp, Homo sapiens
taaatggaagggtgctctttttacaaggattaactcagctatggaactcttgaagtatcttcctctgtagcagaatgaacatgaattctagaacctggaaggcccaggctggcatgtgagctgcattttcttggccaaattatttcccctctgagcttctctcagtattcatattattgataataacaacagcagacacatattgagtgctttctatgggtcagttattcttctcaataccttgtgtgtaataatttatataatyctcacagtagccttattattattagtctttctagtttataagtgcatgtgttttatgaattattttataaaataaaagttcagggatataaaccttttacaaacacttatatgttttatagtagttttaagtttaaggtaaaattgagcagaagatccagagacatctcatatagtccccccctccctcttgcatagccttcccccattatcaatgtcctgtaccagagtgttattgctacagtagat

SEQ ID NO: 118663 - DNA, 511 bp, Homo sapiens
tgcagtaaatattccctttaaaaaaaggtctacaattgcaaggratgtttgtacgtagccaaatctcttgatctctgtgtgcttaagttttgtggcttgtaaaatgaggataacaatatctaactcatggggtagaagtagggatcaagaaagatgctaaatgtggaatgcctcattcagttctctcatcaatattgggaactaataaatggatttgtcggaaatagggtagaggaggagagactctcatatcatttatatacaaatgtgcatgggacctgggtctaaacccacaggacgtgggtctaatggccctatcctcagcaccttagtggaagcaatgtggtgtcatgcaggacaggctcactttgccgatggcttaggaaggaaatacacacaaggatctattgtgttgctgctgggcccacctaagccaggaaagaggatgctgccttagccagcaggtgtgtgttttcacctctcagtgatgcttcctgggaactggaaggtc

SEQ ID NO: 118664 - DNA, 524 bp, Homo sapiens
gacaaaatggaatcctgaaagttttccctactcctcatagtgttattttacccatcagtttatttattgagacaacaactaagtatccaataagtagaggcactaaaatctagtggaatggacaagagttttggggtaaggcacatctgaatttgaattctaatgtcattgcttcctaattgtggatccttgaacaaaccacataacctgacagagccataattttctagtgttaaaatagggagagcactgggggaagttgtaaatattcattgagataatgcatagaaattgcttagtctgacatttagcactaagaaactacttygtcaagggtaaattttaaagtagatacccatttgtgcagatctttgtgctagaatctaagaaggtattgaagatatatacatctacatgtctttctcactgttgtgggaagtcagggacctcgaacggagggaccggctgaagccatggcagaagaacataaattgtgaagatgtcatggacatttattagttccc

SEQ ID NO: 118665 - DNA, 625 bp, Homo sapiens
aaatatctatatgtgtaagtataacatggaagagaataatagaaagagaggagacattgtaaagataagtagggccctcrgtccaggacttttaaactaataaggagaatttttgtttacataaattactgtggggcatgtatttaataaaaatccaccatagggaaaggagttcagtttatagacaatggtaatgagttattattctagggttctgataaggatggaggtgggactgggaggttggattaaataaatatatataagggaaaatcaacaggtcttgatgacatgagaaaagaggaagaaacagtaataagggacgaatgactctcaggtttaaaaatcagatgtcttaggagttggggattccaggaaatacagaaagatgatcagagagaaataggaaatcgttgatttgagttcaagccctatctcggctacctactactagctgtatgtcctcaggcaacttacataatattcttgagcttcagtgcgatccagtttgccttgtagatactcaaaagaatgcttggaaagggacacatgtatgggagttatcttataatggtagaggtcaagccataaaaatgataataagctcactttggttaaaaaaaaa

SEQ ID NO: 118666 - DNA, 625 bp, Homo sapiens
aaatatctatatgtgtaagtataacatggaagagaataatagaaagagaggagacattgtaaagataagtagggccctcagtccaggacttttaaactaataaggagaatttttgtttacataaattactgtggggcatgtatttaataaaaatccaccatagggaaaggagttcagtttatagacaatggtaatgagttattattctagggttctgataaggatggaggtgggactgggaggttggattaaataaatatatataagggaaaatcaacaggtcttgatgacatgagaaaagaggaagaaacagtaataagggacgaatgactctcaggtttaaaaatcagatgtcttaggagttggggattccaggaaatacagaaagatgatcagagagaaataggaaatcgttgatttgagttcaagccctatctcggctacctactactagctgtatgtcctcaggcaacttacataatattcttgagcttcagtgygatccagtttgccttgtagatactcaaaagaatgcttggaaagggacacatgtatgggagttatcttataatggtagaggtcaagccataaaaatgataataagctcactttggttaaaaaaaaa

SEQ ID NO: 118667 - DNA, 539 bp, Homo sapiens
ctggccaacatggcgaaaccccatctctattaaaattacaaaaattagctgggcatggttgtgcacacctgctatcccagctacttgcgagggtaagggacaagaatcgcttgaacctgggagacagaggttgcagtgagcasagatcctgtcactgcactccaacctgggcaacagagtgagactgtctcaaaaaaaaaaaaaagatttttgataagaggatgaaacatagcatcattcaagatgtagttcttaaatgctacatatgtctccaaaactataaggtttatttctcaagatatagtttgctaatacatctatcccttctaagatagataacttttttccacttaaagacaatgaacaggtaaattaaacttgagattatgtttgtatataaaatacaaatacatacacgggactgatttcacttgaatatgtctaaacaaagattattttgactgtttttctaaattgataaggatgaagaagatttttttactttacactgatatgtctagaagacagtaatgaaattt

SEQ ID NO: 118668 - DNA, 539 bp, Homo sapiens
ctggccaacatggcgaaaccccatctctattaaaattacaaaaattagctgggcatggttgtgcacacctgctatcccagctacttgcgagggtaagggacaagaatcgcttgaacctgggagacagaggttgcagtgagcagagatcctgtcactgcactccaacctgggcaacagagtgagactgtctcaaaaaaaaaaaaaagatttttgataagaggatgaaacatagcatcattcaagatgtagttcttaaatgctacatatgtctccaaaactataaggtttatttctcaagatatagtttgctaatacatctatcccttctaagatagataacttttttccacttaaagacaatgaacaggtaaattaaacttgarattatgtttgtatataaaatacaaatacatacacgggactgatttcacttgaatatgtctaaacaaagattattttgactgtttttctaaattgataaggatgaagaagatttttttactttacactgatatgtctagaagacagtaatgaaattt

SEQ ID NO: 118669 - DNA, 491 bp, Homo sapiens
gactggtcttgaactcccgagctcaggtgatctgcccgccttggcctccaagtgctgagattacaggcgtgagccactgcaacccgctagagagaaaggtttttaaaacactgctttagctatttgttccctttccgtcaactactccctttctcatttttatttcgaagtagacctttccaattgttttactcaagtttcctttggaggaaggggcactgtacactcaaatartaaattactgagatgctcgagcttactagtttaaaggatttctaccacagggataggatgaatataatcagtggaagaaaaaaaaaaaaacaggtagtaaaaatgagaaaaataaagtctctaaaagattaaaccaaacgttatttttatttatgaagtgtttaacttagtgtgaaggaagattataatcccctttaagctaattaaggctaatacttcagcactgtatggtacagttttaatgcaataataaatgg

SEQ ID NO: 118670 - DNA, 554 bp, Homo sapiens
attgtaggtggtatttgcagtgatgtgaagtaccccacaccccacccctctcccacactgcsaccagtgctgtttatttgggcagtggtacagaaaatccagtatgtaaggtgaggatacagatacttataggaaaggcagaggatgctcacctatgctactccattactgtgggtttcctactggacatgcagccccaggtattagtccacgggcttcttgtcctgccaatttgagtgagaagacacattctttgataactcactgttcttctgtccatgagcttccatttcccactgcaaaagtacttatattgataatctttgtgtttctgaacaagaataaaattttaaacagtgagatttacaggtccttgaactaaagtcggttgagtaaattcacttctaatacatgatcctcagcttgcaatcaccttttttaaaggtcctctgctttttcaacacttagagttcaggcaatctctatacagtctctgcttacagcttctcatcaccccgatagcagttttcctctagaggttgattacatttgta

SEQ ID NO: 118671 - DNA, 554 bp, Homo sapiens
attgtaggtggtatttgcagtgatgtgaagtaccccacaccccacccctctcccacactgcgaccagtgctgtttatttgggcagtggtacagaaaatccagtatgtaaggtgaggatacagatacttataggaaaggcagaggatgctcacctatgctwctccattactgtgggtttcctactggacatgcagccccaggtattagtccacgggcttcttgtcctgccaatttgagtgagaagacacattctttgataactcactgttcttctgtccatgagcttccatttcccactgcaaaagtacttatattgataatctttgtgtttctgaacaagaataaaattttaaacagtgagatttacaggtccttgaactaaagtcggttgagtaaattcacttctaatacatgatcctcagcttgcaatcaccttttttaaaggtcctctgctttttcaacacttagagttcaggcaatctctatacagtctctgcttacagcttctcatcaccccgatagcagttttcctctagaggttgattacatttgta

SEQ ID NO: 118672 - DNA, 554 bp, Homo sapiens
attgtaggtggtatttgcagtgatgtgaagtaccccacaccccacccctctcccacactgcgaccagtgctgtttatttgggcagtggtacagaaaatccagtatgtaaggtgaggatacagatacttataggaaaggcagaggatgctcacctatgctactccattactgtgggtttcctactggacatgcagccccaggtattagtccacgggcttcttgtcctgccaatttgagtgagaagacacattctttgataactcactgttcttctgtccatgagcttccatttcccactgcaaaagtacttatattgataatctttgtgtttctgaacaagaataaaattttaaacagtgagatttacaggtccttgaactaaagtcggttgagtaaattcacttctaatacatgatcctcagcttkcaatcaccttttttaaaggtcctctgctttttcaacacttagagttcaggcaatctctatacagtctctgcttacagcttctcatcaccccgatagcagttttcctctagaggttgattacatttgta

SEQ ID NO: 118673 - DNA, 554 bp, Homo sapiens
attgtaggtggtatttgcagtgatgtgaagtaccccacaccccacccctctcccacactgcgaccagtgctgtttatttgggcagtggtacagaaaatccagtatgtaaggtgaggatacagatacttataggaaaggcagaggatgctcacctatgctactccattactgtgggtttcctactggacatgcagccccaggtattagtccacgggcttcttgtcctgccaatttgagtgagaagacacattctttgataactcactgttcttctgtccatgagcttccatttcccactgcaaaagtacttatattgataatctttgtgtttctgaacaagaataaaattttaaacagtgagatttacaggtccttgaactaaagtcggttgagtaaattcacttctaatacatgatcctcagcttgcaatcaccktttttaaaggtcctctgctttttcaacacttagagttcaggcaatctctatacagtctctgcttacagcttctcatcaccccgatagcagttttcctctagaggttgattacatttgta

SEQ ID NO: 118674 - DNA, 596 bp, Homo sapiens
atcatgtaatgacttaaatatatacataattaataaattaataaacatatacagtgtaagtagttctttttagcttttattatagaaaatatccaggtgtgttttttccrtatagcacagctcttaaaagaattttacttttatttgttgacattttcagcaaactttcttataaattataatgtagatacataaaattgcaaatattgtcaatgtatagttaaattttcacaaactaaacactcctgtataaccagcactaatatcatgtgagagaacctttgtagtgatctgaagatgttcttgtccccttcctgtaactttatcatccagccatggtaacaagaaagaaccttgtcaccatatgcagagattattttgctgttttgttagttatataactattttgctatttagtgtattgcttcttgaaaattaacatgtatgtgtttaaacatcatttgcattgtatatttgaagtttgttcaatattattgttgcttagtatttaaatgtaaaagtataactcaatttatttaatgttctacttttcacaattaacattgggttgtttccagattttttaagcaaagagt

SEQ ID NO: 118675 - DNA, 550 bp, Homo sapiens
agtgagccgagatcgcaccactgcactccagcctgggtgagtgaaactcagtctcaaaaaataaataaataaataaataaataaataaagcttaaatgggcagaatagacctcttttttaaatcatgattcaactatatgctatctatctacaagagattcacttgatatttagaaacaaattggttgaaagtaaaaggatygagaaagatatataagcaagcagtaatcaaaagagagatggagtgtttctactaatattagacaaaaccaactttcaggaaacaatttgttaatgttgacaaagaagaacattttataatgacacaaaggtcaatctttcagaaagacatatcaaacataaacagatatttatttcacaacagagccctaaaataaatgaaacaaaaacacacagaaatgaagaaagaaagataactatacaatagtagagactttaataacctactttacaaaagatcaccactaaaaaaaagaccaccaggaaaatggactatttgaacaatattactaatcaactagacctaaca

SEQ ID NO: 118676 - DNA, 581 bp, Homo sapiens
gtgcattttctcagtctattttccctgtgctgctcatataatatttttaatctattttcaagttcactgaccatgttctgtgttacctgcactctgttattgagactatccagcaagttyttttttcactttttataatttccagctctatcattttcattttttataatttctacttcctttctgagattttctaattttcacttgtcttttgatttgtaatttcttattgaagcatatttatcatgtctgcttcaaaatccctgttgaataattccaacatctgatgagtctcaagacctgaatccattgattgcttttttctccttcgatttggtgattttcctggacactggaatgatgggtaatcttttattgtatcctagacactttttctattatgctgagggactgtaggtcctattaagtctcttaatttagcaggccaggcagacaatctgcttaggcttagcacacaggtcttgtgggccatagttctaatggtgttgaatgggtagagaattggcagagttattttggtctcatcggttttcctggtgttgatggagcagctcccactg

SEQ ID NO: 118677 - DNA, 581 bp, Homo sapiens
gtgcattttctcagtctattttccctgtgctgctcatataatatttttaatctattttcaagttcactgaccatgttctgtgttacctgcactctgttattgagactatccagcaagttcttttttcactttttataatttccagctctatcattttcattttttataatttctacttcctttctgagattttctawttttcacttgtcttttgatttgtaatttcttattgaagcatatttatcatgtctgcttcaaaatccctgttgaataattccaacatctgatgagtctcaagacctgaatccattgattgcttttttctccttcgatttggtgattttcctggacactggaatgatgggtaatcttttattgtatcctagacactttttctattatgctgagggactgtaggtcctattaagtctcttaatttagcaggccaggcagacaatctgcttaggcttagcacacaggtcttgtgggccatagttctaatggtgttgaatgggtagagaattggcagagttattttggtctcatcggttttcctggtgttgatggagcagctcccactg

SEQ ID NO: 118678 - DNA, 581 bp, Homo sapiens
gtgcattttctcagtctattttccctgtgctgctcatataatatttttaatctattttcaagttcactgaccatgttctgtgttacctgcactctgttattgagactatccagcaagttcttttttcactttttataatttccagctctatcattttcattttttataatttctacttcctttctgagattttctaattttcacttgtcttttgatttgtaatttcttattgaagcatatttatcatgtctgcttcaaaatccctgttgaataattccaacatctgatgagtctcaagacctgaatccattgattgcttttttctccttckatttggtgattttcctggacactggaatgatgggtaatcttttattgtatcctagacactttttctattatgctgagggactgtaggtcctattaagtctcttaatttagcaggccaggcagacaatctgcttaggcttagcacacaggtcttgtgggccatagttctaatggtgttgaatgggtagagaattggcagagttattttggtctcatcggttttcctggtgttgatggagcagctcccactg

SEQ ID NO: 118679 - DNA, 581 bp, Homo sapiens
gtgcattttctcagtctattttccctgtgctgctcatataatatttttaatctattttcaagttcactgaccatgttctgtgttacctgcactctgttattgagactatccagcaagttcttttttcactttttataatttccagctctatcattttcattttttataatttctacttcctttctgagattttctaattttcacttgtcttttgatttgtaatttcttattgaagcatatttatcatgtctgcttcaaaatccctgttgaataattccaacatctgatgagtctcaagacctgaatccattgattgcttttttctccttcgatttggtgattttcctggacactggaatgatgggtaatcttttattgtatcctagacactttttctattatgctgagggactgtaggtcctattaagtctcttaatttagcaggccaggcagacaatctgyttaggcttagcacacaggtcttgtgggccatagttctaatggtgttgaatgggtagagaattggcagagttattttggtctcatcggttttcctggtgttgatggagcagctcccactg

SEQ ID NO: 118680 - DNA, 418 bp, Homo sapiens
aagcaattctcctgcctcagcctccctactagctgggataacaggcatgcactatcacacccgcctaatttttgtattcttagtaaagatggggtctggccatgttggccaggctggtctcaaactcctgacctcatgcaattcgtccatctcagcctcccaaaatgctaggattacagtcatgagccactgcacctggcctaatttttaatttaaaaacaacgtaatactcattttttaaaaaaagtcaagcaattccaacatagaataaagggcatgcatgatgtgtcccmccatccaggcccctttcctgcctgcaggggtgtgttcttaagtaatgagtggtgattctaatttaataaagcaattgccttgtttgttagacaaaatttgcttgaattatttaagggccatttca

SEQ ID NO: 118681 - DNA, 528 bp, Homo sapiens
ttttcagtaagaaaattagttcaatttactagtcatccaagtagcttctaagattttctaattttcctgatattttgtggtttgtctgtgatgtgtataagaatcaatttgtttgtatttatcctgcttgatactcattgctctttttcaatctgcatccaatatctcctttcaattcttgaactctctgccatcgtctttttgaacattggctgtccccattgtctctaatcttttctggaatttttactagacatttgttggagcctctcctgtcttctatatctttcaatttctcctccaaattattmatttacttattatcatctagtacattctaagtggtttccttaaaattatctaacaatgttttaatctgtcttctggtaaactaccaattttatatatattttagtggctattttttattctcaagaatttctacttttttttcaaatgtatctgttctgcttcattttcttattattatgttctggattattttcccttataatttgaacgtcttta

SEQ ID NO: 118682 - DNA, 524 bp, Homo sapiens
tccagcacaccttcagataggggcatttttaggctttaacagattttctggaattggcagactctgaacattactctcaatgtttttcttttccagtaagcccttcctagggggaagctatgggaaggacaacagtaactgcttctaatgtcaaggtagcatggtagsatgggcgttgtccatgcacaccgcaggtatcttcacccacagcctccaggcctgagcttcaaaaacggagagactcttctttgctgcatcacaaaatgtttcctcaaataattaacggcaattatgataatggtgaagaagccaggctactagccagtctctctgagttttaaccaggctccaacacatactagctataagaccatagagaagttacttaaccctctgtgtcttagtttcctcaccggtaagagtataaatactgcattgggaaggttggctgagttaatactacaaagcacttatcccaagaaaatagtaagtgcttttagttattgcttataagtgtataaaat

SEQ ID NO: 118683 - DNA, 540 bp, Homo sapiens
tttctgcccattcaccattgtgacaaaaatcaaagacgaaaaaaattatctactcatttctgaatactgagagaaatgtgctcattttgcgcctgactccgtggatcttaaacactaacatcccgctcagagatcaaccatgatttycataccaatctcatccactcagttttacttagcaaacacctttgctgcccttccacggtgagaaaaatggtgcaccaatcccacggatgacaggttgctactcgactgtacccgctcaatagttttatcagcaaccggaaaacttcacaatcggtcaattagctacttaaatctgtctaagacaaactaagaaagcatctcagtttcacctgtcttaaatctagtctaagacaatcccccaaacacgccgcatataaacactcccccttccctcacccccaatattccaaaagatcccccatggactaagagcacattcagatcgccagcattaagcaaggaaattgtccccatgcatttagacgcatctatgcaaagcaaagtatgtgacaa

SEQ ID NO: 118684 - DNA, 608 bp, Homo sapiens
tttttgtttcttgaagaacctccatactgttctccatagtggttctactaacttagatttccaggagcagtgtaccagggttcccctttctccatatcctcatcagcatttgttattgcctgctttttctgtaaaagccattttaactggggtgagaaaaaatatgctacartagtaaccaaatcagcatgatactgacataaacacagacacatagaccaatgaaacaatagaaaaacccagatgtaaccctagatttgggttctctcaatctagagatgtatttttctcactttcaaaaaaactaaccctttttctgagatattttgatgtatcccatcacttatgtatttatttacttaattttgaggttatgatggttaatcttatttgtcagtctcactgggctacagaatgcccacatcttttttcaaaccttattttgggtgtttctttgagggtacttcattctatttctctggagaactctgactaatacagagatattttgtgatacagttctaagtattagtacaggtagatcccatgcaccttgtcttagtctatttgtgctgatgtcacaaaattccacagactaagtaagtcat

SEQ ID NO: 118685 - DNA, 586 bp, Homo sapiens
gctggcaaataaaataagcactgaaagttgaagtcactctttgatctagtaaataaacctgcagaaaattcagactcaattactctttaaatttatgacatttctagtattgtgacaaatactgctttctcactgaaaatacatgatgtattcggtgagtatgcttcaaaaatcaatgggctgcttacaaataaaaccatattgacatttttacattttcctttttacatttgtttcttcgttcatttcaatgatcacaygtggcgtgcaatgactgaataggactctatgtactgtattgttttaggtgctatagtgaatgcaaagataaatacagacttagcctgggaagtgcatagattctggtacagaactgccatatatagttgtacaggttgttcactgaaaaagagtatccaactgaaggggaaagtggggtctagagcccagcctacactccttttaccaagttcaaggtcctgacacagggccatgacaatccaggagtagtagcagcagtagcaggagtaggagtaagcgctaatattgattgcaggatttctgcgtcccagccacggttcatgtg

SEQ ID NO: 118686 - DNA, 561 bp, Homo sapiens
  misc_feature (1)...(561): n = A,T,C or G
tatcagctaaatcccttaacttaatctttcttagtatacrtcttctatctgtaaaatggacaaaataacagagctcatgtcaaagagttgtgatgtttaaatgaggcagtacatgtggcagagttagccgaagcattccacagctctgcttacttatcagctatcaaatattactataaagttttgtgctaccatctcacacatgcatagggagagaggaaagatganagacaagaaaagagacagggaaaggcagaaggagagaagggagagaagaaaggaaagagagaggtagagagatctgctctgccattaaaccgaagggatgggaaagtagcctgtgatctgaaaagcggtgcactgtactgctgggcatgttcttatcctcttctccttaacagcaatgcaaagcgagagctgttcttagaaaagctggaagtattgaatgctgcggttgctctcttttgtatagtataaatgaattacagattgaacgtgtctccttacccgtttccatggaaagaaatggatatgaatgatgagaaatcctaagaaaagccc

SEQ ID NO: 118687 - DNA, 558 bp, Homo sapiens
ggactgtacatgttttaattaatttaatcttctgtatagttttatgaagaacacactcttttgacctcatttaacagctagccatataactaataagtgatagaggtaagatttaaagagagtctggtttcagagaacattctcttgatcactgtatacaaatattattccaaccatagtgtaggctcttctggtcttacccttcctatgagagaggggttattgtctccatttcataaatgaaagcagtaagagtcagagcaattsactgagctgacaagtcataggatcactgaacaagggctccagtggcagtgcctgggagtggcagaacaaatagcacagtatcacatacaactgcagcaacagcagcagtacccgcagcaagtacaatgacacatttactacacacttgctctcatttaatactcacaagaattatggcctctgggttctatcatcaacaccattgcagatgaggggaccaaagttcagctggatcaaggaaggtgttcaggggcatagagctagggagtaatggagttgggtgtccccctg

SEQ ID NO: 118688 - DNA, 634 bp, Homo sapiens
tactcagtctcaggcatttctttacagcaatgtgagagtggactaatacagggaccttttaggaggaagtcataggagagttcttggagaaggtaaggttggaagaaggtacaaagaaaaaagcttatgtctttaaatcatcttcattcctgataattcagcacactttagaggcaacttccaagtcagctgttgatggtagtgaagacccaaggcccagagagggagcaactggccctagagttgcatgatgagtcttcagtggcaaggccgagattagaggtctgtactcagcattcagctattggtggacagaactcgtcctttgcttcctaagtgcggcttcagtcctgtcatggccctgcacttccccgattccctgcccactccgtccccacttcttcaggtgcttccccatgggaactggtagaatagtgttagaaagccacatccatagtatggcctcttgaggatttctggtttgtgtgactttgagcamgtcctcccctgatgttggaggattcttacccctgaagttggggaaggagtgaaatcttgatggtaggacatctgctcacatgtcctttgagacttaccacgtttgtcaccatgtatttagcacagctgcctttca

SEQ ID NO: 118689 - DNA, 516 bp, Homo sapiens
tctttttgcaaatgccaaccaggtgtccccaagtaagagatgatacttgtttgtttggtaaaggcacccagataagaagagtcagaatgaacagctccaaaagagaagtggtttcctcggtcaccgactcaccacattaaacattcaccctggctcactgtctgaaatgagtcagtggtcctttcagaattccctttacaacagtgtttcaaagaaatctgtgactgaggttgcaaatcattttttcttcactgcagctgactattttgcattttcccaaggtgaaactcagcctgtcttttcaggtgttgagaaagagagtcaaaacttcaaagttgagggggtgggggtgcggggygggggacccagctaccaaagggaagcccgaaagcactcttttcaaggataggaaaacactcaccaacgtcagattctaacactgagctgagtggtttgctatgtgcagctttctagtggcttggatttttctttcctaatttttttttaaaccatcat

SEQ ID NO: 118690 - DNA, 516 bp, Homo sapiens
tctttttgcaaatgccaaccaggtgtccccaagtaagagatgatacttgtttgtttggtaaaggcacccagataagaagagtcagaatgaacagctccaaaagagaagtggtttcctcggtcaccgactcaccacattaaacattcaccctggctcactgtctgaaatgagtcagtggtcctttcagaattccctttacaacagtgtttcaaagaaatctgtgactgaggttgcaaatcattttttcttcactgcagctgactattttgcattttcccaaggtgaaactcagcctgtcttttcaggtgttgagaaagagagtcaaaacttcaaagttgagggggtgggggtgcggggtgggggacccagctaccaaagggaagcccgaaagcactcttttcaaggataggaaaacactcacsaacgtcagattctaacactgagctgagtggtttgctatgtgcagctttctagtggcttggatttttctttcctaatttttttttaaaccatcat

SEQ ID NO: 118691 - DNA, 612 bp, Homo sapiens
caaatgttccctgttgggccagttgcccccggttgatgaccattgtgtttaaagaattcatttcaactattttatcggcccctaaggcaccagcctccctctgaggctgtgtccatgggaatgctatctgtggctgcttgcggatctctccagcactgactggctaagtcacactggcagccatgggtgagacttcctcaacgtgggtggagcaaattcctacgatgccaggctgcaaggttgcatttctgcatttctaggtgtcggggatgccttgattattttccaaagtaatctaaattttgtctccagggatccttgcccctcctaaatgggtattatctgggaataagacagctcaattgtttatggagcctttatttaatatttgacaatatctaggagaaagtcacaaacacttagttcaattattaaaataaagcctgtagggtatctccccaaaagagtatcccagaatcattattttaatttaagcataattataaaagggggstgggaagcctgcagtagggggagataaattttcaagtgtcattttaggaaaacaaaggctttgcaagagaaaacatccactttcccccctagttgcag

SEQ ID NO: 118692 - DNA, 596 bp, Homo sapiens
agaattcaaagatttgttttactttttgccttctcgctcttcctagagggtcgccatcggaggcgtgtccggtgctcatccaggtaaaagaggcggacaagccctttggttccacgtttcagcttgatcatctgtgtcccggactgcatcacactcatgcatctttcaactgcaaaagaaattagagtgtatccagctatcacacaatgcacaggcatactggtgtccaggttttagagtcaaataaaacctctgattcacctgcaaagactccaaggaccagaacaaatttggtagrggtaatctgaaaagtgagttgttaaggaattgattcaacaggcttaagtcagtaaaaagccttactaacagaaaaaaaaaaaaaaaatctacttccaggtaaataatgcaatacttcatagggctatcttctgttctgttttttggtatgagacttaagaccatttgatacttggatttatgttcttaaagtaagttctcagacatgataagtcttgtgagtttttatagaaccaattataaaagtatcttataataatgctttaaatgcaatcaacagaaacaagattggcaaaatg

SEQ ID NO: 118693 - DNA, 559 bp, Homo sapiens
aagattgtcttgcaaaggacctggacttttttttgttgttgttgttgtttttgtgcctgctaattcacagttcaatgatcagtgtcccagaatagatgtgttcacaaaagagtgcaagtgatattcttgtatgaccctaatctyggcgaatggtcatgattctgtatgtgaaaatctgtctcaaggttcttttgtagcaaagagtgatcagagcaccaagtgtgcatattactgctagaagtgattttgcctgttggtcctttcaaaggctagaacaaggaaatatatgcaggtatataaaaacatacacatatacacaaacatgcaaatatacatgcacaaatatgtatatatgtgtgtgtgtgtagattgctttctgtttatatatttatagtcatgtgccacatactgacatttcagtaaataatggaccacatatatgacagtggttcctgtgagattataataccatatttttattgtaccttttctgtgtttagatacacaaatatttaccattatgttacaattgcctatagtattcagtacagtagcatgt

SEQ ID NO: 118694 - DNA, 624 bp, Homo sapiens
aacctgtacatgaatgttcacagcagcgttattcgtaacagcccccaaaaagcaaatgacccaaatttccatcaactgatgaatatataaacaaaatgtggtatagtcatacaacgatatattatttggcaataagaagaaatgaaatactgataatgctacaacatgaatgaatcttgaaaacattacgccaaatgaaagaagccagtcacaaaggtcacatatatgattccctttatatgaaatgtccagaacagataacagacaaatcaatagagacagaaatattagttgccacagcatgcttggaagagagaaatggagaataattgctaataggtttggggtttcttcttggggtgccgaaaatgttctgaaattagatagtggttatagttgcacaactcttttttcctttttttttttttttgagacggagtttcacttttgtcacacaggctgcagtgcaatgacgctatctcggctcaccacaacctccgtctcttgggttcgttcaagcattctcccgtctcagcctcccgaatagctgggattataggcatgtgccaccmcacctggctaattttgtatttttagtagagaccgggtttctccatgttggtc

SEQ ID NO: 118695 - DNA, 504 bp, Homo sapiens
ggggtcattgattttctcagaattgatgtaaggtgtaaaaacagtcacttcttttgctagaggggattctctgcatgacagaagcacaagaaatggtgaaagttacagaacacatccaaactatcattatgtttcatgtgtaggaactgatgttcacctgtgtygccttagcatgtggaggagcaccgtatgtatgtgtcactaattcttctcttcagtattcacctagctcatatgacaggcagtgctgtttgtataagctgcagccattctcccatctacgaatggtcaaagccaattctctctatagaagctgaaatgccagatacttatgtttccagccttccatgcaaataagcaaggcaatatgatacaatcctggccaatggaacttagggaaattctatctgggaaacgttggggtaagattttcctctccagtagaagtgaggggttcgtggggagaagcccattcctgctctgtatattatcatggaggctatg

SEQ ID NO: 118696 - DNA, 532 bp, Homo sapiens
tagctcatatgacaggcagtgctgtttgtataagctgcagccattctcccatctacgaatggtcaaagccaattctctctatagaagctgaaatgccagatacttatgtttccagccttccatgcaaataagcaaggcaatatgatacaatcctggccaatggaacttagggaaattctatctgggaaacgttggggtaagattttcctctccagtagaagtgaggggttcgtggggagaagcccattcctgctctgtatattatcatggaggctatgatgcctaaggctttggcagcatcttgagaccacaaagggaagccaggagaactgaagagatgttgcccagagatctagtgtaattgrggtgcgaaataccagattcctatctcgagaatttttgtgtttagagactcatttacaaacactgattgtttaggccacatgtagacatgtattctgttacgtgcagctgaaagcatgccaactaaaaacctattttcagatttcttctggggaaataattgagttct

SEQ ID NO: 118697 - DNA, 564 bp, Homo sapiens
tgctaaatgttgaatgttgctggtgctgagagtataagaaggcataagttacagcctgagggtgaaagactttgaatgttaagccaatcaattaagattttatttgtggaatttctacaaatctacaacaaccatatacccaataaacgagtatactcaaattttgttaaaaaatggtgtttctattctacttatcgtactccaatgaacyaataaggtgaccttcaaatttgatgttctctgttcattccaggtatacatacatcttcaatttctcctgttttctcagtgtacttagtaatcataccctcttaccctctcaaaagtatcttggatgataaattatttggacaccctagttataccttcaaccacctctcctgtcatctgaaagatgtgaccacattctctgggggctctggcctatggaagtttgggctccctggctttgtttacactttgctttcctccaggttagcctctagtttattttgatactggcccccatactttctctcttttggatttgatgtttgcatatatggctttactcttttggcctta

SEQ ID NO: 118698 - DNA, 570 bp, Homo sapiens
tcagtaagtgcaaagagatttagggacctattagtgttaattattcagttctgttcagcagatatttactgaatatcccgtatgtgtcaggcactatggttacaaaagtgaatgagcatggttcctgtcctttaggaatttatagataagcaacacatagtatttgatatgatttggctctgtgttcccacccaaatttcatctcgaactgtaatgcccatgtgtcgagggagggacccagtggggggtgattggaccatgaaggcagtatccctcatgctgttctcgggatagtgagggagctctcacaagatctgatagtttaaaagtggcagtttctcctgcattgtctctattgccmccttgcgaagagggtgcctgcttcccctttgccttttgccatgattgtaagtttcctgaggcctccccagccacgtagaaatgtgagtcagttaaacctctttgatttataaactacccagccacaggtaggatcctttttttttttttttttttttttttgagacggagtcttgctctgttcccctggctgaggctgaagtgcagtgg

SEQ ID NO: 118699 - DNA, 570 bp, Homo sapiens
tcagtaagtgcaaagagatttagggacctattagtgttaattattcagttctgttcagcagatatttactgaatatcccgtatgtgtcaggcactatggttacaaaagtgaatgagcatggttcctgtcctttaggaatttatagataagcaacacatagtatttgatatgatttggctctgtgttcccacccaaatttcatctcgaactgtaatgcccatgtgtcgagggagggacccagtggggggtgattggaccatgaaggcagtatccctcatgctgttctcgggatagtgagggagctctcacaagatctgatagtttaaaagtggcagtttctcctgcattgtctctattgcccccttgcgaagagggtgcctgcttcccctttgccttytgccatgattgtaagtttcctgaggcctccccagccacgtagaaatgtgagtcagttaaacctctttgatttataaactacccagccacaggtaggatcctttttttttttttttttttttttttgagacggagtcttgctctgttcccctggctgaggctgaagtgcagtgg

SEQ ID NO: 118700 - DNA, 539 bp, Homo sapiens
ttctgcccattcaccattgtgacaaaaatcaaagacgaaaaaaattatctactcatttctgaatactgagagaaatgtgctcattttgcgcctgactccgtggatcttaaacactaacatcccgctcagagatcaaccatgatttccataccaatctcatccactcagttttacttagcaaacacctttgctgcccttccacrgtgagaaaaatggtgcaccaatcccacggatgacaggttgctactcgactgtacccgctcaatagttttatcagcaaccggaaaacttcacaatcggtcaattagctacttaaatctgtctaagacaaactaagaaagcatctcagtttcacctgtcttaaatctagtctaagacaatcccccaaacacgccgcatataaacactcccccttcccccacccccaatattccaaaagatcccccatggactaagagcacattcagatcgccagcattaagcaaggaaattgtccccatgcatttagacgcatctatgcaaagcaaagtatgtgacaa

SEQ ID NO: 118701 - DNA, 636 bp, Homo sapiens
tacccatgtacaagtgtgagaacttgactttgaatgtaggcctttcaatgctctagtccttggtcatttgacttttccagtggttttaaaaaatgtgtttgagcccagaatgctgtctattaaaaaacttaatctggaacagttcctacccctgtttcaaaggttctgatgtaccttttcagaatttttatgtttcttcaaagctaattttaaactatgtgcaggcccctgagctttctcctatttaggtgtactggggctctagtgcagaaaaagatgaagcaaagaaaaatctaatttaacatattaataattttttaaaagatttrtgtttattgaatacaattcagtattgtctagaactttttaaaaaagtatatttctatcacttaatttattttaatttttaaataattttagactagaaaagttacaaaaatagatcagaaagtttttgtatttccttcatccacctttccctaacgttaatatcatacataaccacaatttatgtacttacatagtacatttatcagaaccaggaaattaacgttgctgcattcctattaagtaaactacagattttattattttttcaccagttttttctgctaacattctttttctgttccctaa

SEQ ID NO: 118702 - DNA, 636 bp, Homo sapiens
tacccatgtacaagtgtgagaacttgactttgaatgtaggcctttcaatgctctagtccttggtcatttgacttttccagtggttttaaaaaatgtgtttgagcccagaatgctgtctattaaaaaacttaatctggaacagttcctacccctgtttcaaaggttctgatgtaccttttcagaatttttatgtttcttcaaagctaattttaaactatgtgcaggcccctgagctttctcctatttaggtgtactggggctctagtgcagaaaaagatgaagcaaagaaaaatctaatttaacatattaataattttttaaaagatttatgtttattgaatacaattcagtattgtctagaactttttwaaaaagtatatttctatcacttaatttattttaatttttaaataattttagactagaaaagttacaaaaatagatcagaaagtttttgtatttccttcatccacctttccctaacgttaatatcatacataaccacaatttatgtacttacatagtacatttatcagaaccaggaaattaacgttgctgcattcctattaagtaaactacagattttattattttttcaccagttttttctgctaacattctttttctgttccctaa

SEQ ID NO: 118703 - DNA, 636 bp, Homo sapiens
tacccatgtacaagtgtgagaacttgactttgaatgtaggcctttcaatgctctagtccttggtcatttgacttttccagtggttttaaaaaatgtgtttgagcccagaatgctgtctattaaaaaacttaatctggaacagttcctacccctgtttcaaaggttctgatgtaccttttcagaatttttatgtttcttcaaagctaattttaaactatgtgcaggcccctgagctttctcctatttaggtgtactggggctctagtgcagaaaaagatgaagcaaagaaaaatctaatttaacatattaataattttttaaaagatttatgtttattgaatacaattcagtattgtctagaactttttaaaaaagtatatttctatcacttaatttattttaatttttaaataattttagactagaaaagttacaaaaatagatcagaaagtttttgtatttccttcayccacctttccctaacgttaatatcatacataaccacaatttatgtacttacatagtacatttatcagaaccaggaaattaacgttgctgcattcctattaagtaaactacagattttattattttttcaccagttttttctgctaacattctttttctgttccctaa

SEQ ID NO: 118704 - DNA, 622 bp, Homo sapiens
ccacaatagcattgagcacacctggcaccaagaacatagttcctaaatacaattctccaattaaagaagtcaagattccttggagaactgattgattttaagccccagcagggaaaatactaaataaacttgaggaaaaagagcctgttggcaggcttcaggaggtccactttcaaactcaatcagggctgttggaaggcctcaggtccttrgtaagcattagagctactcactgcatgttatttgcttccctcttgtttgcctgaaggaaataagatatactaaaagaaattctttttagaatgatgagcattgaatgtagtatatttgaggaaaaaaaatttatgccgggcataataagtggcatattaaaaatatggacattatgagaaaaccactgaatttggagtaagtctgtgctttagtaaatagtgctgggccaaggttaattgcttacggtttttaaaatattttattgttatataaaacatcagtgtaagtagaagctggaagaaagataaacagaaaatctctgcattgtttttgtacatttctgtaagtccaaaattatataattactctcccccaaaatttaacatcaatgaaattttatttaaaattg

SEQ ID NO: 118705 - DNA, 586 bp, Homo sapiens
taaaattacaccatttcatctcttttgttcatagttttgcaacttgattaatgaaaaaatcatttgcttggcattcaaattaaagcttcaaatacacatatttgtggaatatatatatatctatatatctcacattaaaaaaacaaggcatcaaactattgcatagttatagtctatattgatagcaaattgtggtctgtaattaaaccacaggaaaaaaatggagaaatgtgatgttttaagatgacacataaaatgatattttgaattcagacaatgagcgttcttatcaaagaggattttttgttcaacacttcttataaacgttgtcctaatttttttgttcactcagataattaaatgcaattgatatctttagttaaatactgaatgtattataaaaataatattcaagatgttctgagtcatttacagaaaatgttgtaccctgtaaaaccaataattaatggyaagttaaaatcaaggaaagcagctactaataactttaccatcaatataagatgatattaagttataacgcatgatgagtcagatcatattttattaaaaatgaatagtctttaca

SEQ ID NO: 118706 - DNA, 586 bp, Homo sapiens
taaaattacaccatttcatctcttttgttcatagttttgcaacttgattaatgaaaaaatcatttgcttggcattcaaattaaagcttcaaatacacatatttgtggaatatatatatatctatatatctcacattaaaaaaacaaggcatcaaactattgcatagttatagtctatattgatagcaaattgtggtctgtaattaaaccacaggaaaaaaatggagaaatgtgatgttttaagatgacacataaaatgatattttgaattcagacaatgagcgttcttatcaaagaggattttttgttcaacacttcttataaacgttgtcctaatttttttgttcactcagataattaaatgcaattgatatctttagttaaatactgaatgtattataaaaataatattcaagatgttctgagtcatttacagaaaatgttgtaccctgtaaaaccaataattaatggcaagttaaaatcaaggaaarcagctactaataactttaccatcaatataagatgatattaagttataacgcatgatgagtcagatcatattttattaaaaatgaatagtctttaca

SEQ ID NO: 118707 - DNA, 595 bp, Homo sapiens
aggtaagttttaaaaacaatgttctaggggacaatgccttgcctgtgttgagaatcactagtattggcaatgagagccataaaaatgatgcttcaaacagctgtatcaaagttggattggaagtgggcatgaatgaaggcagggaaatgaataagaastttccacgttataagtgtagaactgaaataagtaaacttcaaacacattctaatggctttgtgcagacaggaaagcaagagttaatagaaaagaataaaatattcaggaatacaaccaccaacattattaacataaagacatgttcttttaaagtcactaacccctgtcacacaaatatgggctaagagcctcctttggctaccatgattgctgcaaaaatactgctagttctgttacaggcaaaattttctggactgcatgaagctactgttaaaatagagatcttaagactaatataacagactctttacagcaataagataaagacctaaggtcatgccaggcaaggattaagtcacatacccctacacataaagaatcaaccatgttctaattgtcaaaaggttttttctttttatctagtagctaagcaagt

SEQ ID NO: 118708 - DNA, 640 bp, Homo sapiens
tatgggagtccttggtaaggcttttctttttaatgaaaagcagccccaaattattttcctttctaacaaagagcagcctgtaaaatcgagctccagacatagataccagcagttgtgccaatcgtgctcaagatggtggctccctcttcccttctgtttgtcagcagcatgtacagtaagaagcagacaagatggcacctatcaattggaaaggccatttgcatagtaagattagggtggggcaccagccttcccctcccactatgtagatatcatacctgatcagaccaatccagcctgcctttaaaatctgctgtggtctgctgcctccccacttttcggacgtctctctctcccccaaaaggagttgctctcttctttcctttcttctattaaactttccactccttaacccacccacgtgtccatgtcctgaattcttttttggcgagcaacaatgaaccccagggtatattccccagacagagtarccatttcattatgttaaggatatgtgaataagtatgtaaaattataattatacagtggtcttatataattacttttcagacaattaactacagagaaccatgcattgcatgtttagaaaataaatttaacatgagtatattgccaaata

SEQ ID NO: 118709 - DNA, 566 bp, Homo sapiens
cggtgctaagaatggcagtcctcagtgagaacataaagcaccaactaattttctcatggagggyatggaagggatgtggaagctgaaatgtgaaggaagaagaaatgccaggcaaagaatgccgggcaaaaagcaggtcacatacaaaggcctgagacaagagagcatagctattggaagcagtgaaaatggttctgagaggtcgatgagtaggtttggataaaggggattggagccagtctagagaagaagctgaggtgataagcaggtgatatatcttaaaggaccctataaaagggcaggagtttggatgtcaaaagcaactgacctccactgaaaagttttatgctaagaaatggcagaattccatcctgaaattaacaaggaaccccaaggggtcataaatagccaaaacaatcttgaaattaaagaacaaagttggagtactcacacttcttgatttcagaacttactacaagactatagtgaccttaacaatttattttcaacaaatgatgctggggaaactaaatgtccatatgcggaaaaaaatgcagttggacctt

SEQ ID NO: 118710 - DNA, 622 bp, Homo sapiens
aattaaaattaaacatcacaacaaaacataaaaaacatccctttaaagttacagcaatacaakaatgcttgttatcattattaatatttaatgtgtcctgaatcttctagcttgtgcaataagacaagaaaataaaatagaacatatctggaatagaggagatggacatatctctttcttctttatccagataatttaatttacttcctagaaaaccaaggaaggaaattaaaattttgtgaattgataagaattttttagtttgtgactagctataaaataaatagacagaaataagtagttttctatactcagatatttagaagaaaatagagagtgcacagtacaaaaaaaataaaatttctaaaaatcaacttataaatgtgtattttaaaaatcctcaagactttactgacttaaaataagacccaaaaaagcagtgagacataccatgattttgattaaaagattatttacaaataatttaatactaccaaaatataataatacatttattaggatttcaatgacatttttaacaagacaaaaattattctacagtaagaaatgggtaagaatggccaggattatttagaaatagtaaaataatgaaagaggactt

SEQ ID NO: 118711 - DNA, 622 bp, Homo sapiens
aattaaaattaaacatcacaacaaaacataaaaaacatccctttaaagttacagcaatacaataatgcttgttatcattattaatawttaatgtgtcctgaatcttctagcttgtgcaataagacaagaaaataaaatagaacatatctggaatagaggagatggacatatctctttcttctttatccagataatttaatttacttcctagaaaaccaaggaaggaaattaaaattttgtgaattgataagaattttttagtttgtgactagctataaaataaatagacagaaataagtagttttctatactcagatatttagaagaaaatagagagtgcacagtacaaaaaaaataaaatttctaaaaatcaacttataaatgtgtattttaaaaatcctcaagactttactgacttaaaataagacccaaaaaagcagtgagacataccatgattttgattaaaagattatttacaaataatttaatactaccaaaatataataatacatttattaggatttcaatgacatttttaacaagacaaaaattattctacagtaagaaatgggtaagaatggccaggattatttagaaatagtaaaataatgaaagaggactt

SEQ ID NO: 118712 - DNA, 622 bp, Homo sapiens
aattaaaattaaacatcacaacaaaacataaaaaacatccctttaaagttacagcaatacaataatgcttgttatcattattaatatttaatgtgtcctgaatcttctagcttgtgcaataagacaagaaaataaaatagaacatatctggaatagaggagatggacatatctctttcttctttatccagataatttaatttacttcctagaaaaccaaggaaggaaattaaaattttgtgaattgataagaattttttagtttgtgactagctataaaataaatagacagaaataagtagttttctatactcagatatttagaagaaaatagagagtgcacagtacaaaaaaaataaaatttctaaaaatcaacttataaatgtgtattttaaaaatcctcaagactttactgacttaaaataagacccaaaaaagcagtgagacataccatgattttgattaaaagattatttrcaaataatttaatactaccaaaatataataatacatttattaggatttcaatgacatttttaacaagacaaaaattattctacagtaagaaatgggtaagaatggccaggattatttagaaatagtaaaataatgaaagaggactt

SEQ ID NO: 118713 - DNA, 401 bp, Homo sapiens
  misc_feature (1)...(401): n = A,T,C or G
gcaagtgtctaactatattttttttgcatgtgggtatccagttgtccagtaccatttgttgaaaagatcatgctttcaaccayttaatgtcatgacacacttgtcagatgatttatacttttaaaagatattgtgggacaggatcagcttcatgcttgtgtgatctgtgcagttgctctgagccctacgcttagaagtgccctgtactaggcttaatgctctgctgtgaccgtactgaaatacaaaataatttattaataaaaagcccacattttcattttgcactgtgcctgaaaattatgtaggcagtctgttatcgggaaaagcaaaggaggccagagtagaagcctagaaactttttgtaaaaaaactgttgtagaatagaaatgagaaaannnnnn

SEQ ID NO: 118714 - DNA, 341 bp, Homo sapiens
tgaaatgaagtgaaatctaatctcaagggatggggggggatatgcaatgatcacacttctctgagtcttcacagaaatgtttgattcttgcagatatagaatctggcaactgctattgggccccaaaaaatgtctatattaatacttctataaatgatacagtaattcatcctataattgatggttgaatttcccatcagtactgcatttctgtgcaatacaaaattgttcataaaatcttgttgaaatacatgtgtggaataaaattttrtaatagttctcagtcctttttattttgtattacattatggtttatagaaacaaatagtgtatgttaataa

SEQ ID NO: 118715 - DNA, 491 bp, Homo sapiens
aacaagcaaaagtttaaccatggtgctatggtttgaataatggtgttccctccaaaattcatgttgaaacttaatccccaaggtaacagtattaagagacatggtctttggaaggtgattatctccyaaaagggcagagcctccatgagcaggattagtatccctatgaaagggctccaggttgaagggcatactctcttgcccttccattcctttcacaatgtgaatacctcacattcttcccctctagaggatacagcaataagacaccatcttggaagcaaagagccattctcaccagacaatgccagcaccttgatcttggacttcccagcctccagaattgttaaggaatacatttgttccttataaattacctagtctaaggtattttgttagagcaatacaagtagactaagaaatatagattctgcctgtgtcgatgggagatacccagggaaaaagcacatctcaaagaagtggctcaaata

SEQ ID NO: 118716 - DNA, 484 bp, Homo sapiens
ggttcaacatatgcaaataaataaacgtgattcatcacataaagagaacttaaaaaccacatgattatctcaataaatgctgaaaaggcttttgattaacattccacatcccttcatgataaaaaccttcaacaaactgggccttgaaggaatacacctcaaaataataaaagtcatctatgacacccacagctaaaaccatactgagtgggcaaaagttggaagcattcccctggagaaccagagcaagacaagaatgcccacgctgaccatttctattaaacatagtactggaagtcccagccagaataatcaggcaagagaaagaagtaaaagtcatccraataggaagagacgaagtcaaaccacctgtctttgcagacaatatgattctatacttactaatttccatagtctctgcccaaatgttcctagaactgataaacaacttcagcaaagtttcacaatacaaaatcaatacatg

SEQ ID NO: 118717 - DNA, 548 bp, Homo sapiens
atttattttgttccagtacattatcctgtgctggcatcctttacggccataaaaacttaagtcatttttgcagtcaaatttgtagtttcttattgttttccctgtttattttggtgcatggtatgctattttaatgtctctagttttatatttggttaaaacataaacattatatatttctattttatcactttcataataatggcatcaatattttatgactttcatatttttacccctaccactattccctcagttctacttctagacagttgccctatgtcttggaagtgccttggtatctatttgaaaatcatatgtgatattttaagtttgtaaaatgtttgtgattctaaaagtaaccttttataggccaattcactgctcgagggcactgagtctctaggtagctacacctgggaatagaggtgtgtgtgtgtatatgtcataaacagatgtttggtcatcatgagaattaggcatacaacctgtgattatctaatgcatttatwaaaaaaaaaacttgtactaagtagcagatatttcca

SEQ ID NO: 118718 - DNA, 587 bp, Homo sapiens
gggcaaatctgtgttttgtctttaagagtctgatgttctttcttggagaccagtgattctcaaacactttatgtatttcttaaggatgggagttaactgcattataaacaatctatatataagaaagcaattatatggggttattaccattatttaccattatcttgactacctattctcatttctctactcaagaatatrtagtgaacaaataaagtaaatttgaaagtttaaaacatggaagtaaatatgagctcccacaggtgggacaggcctcatgaccaaaatgaattgatagaaaggtatatgtctcagtcattaatctcttcacaagatgtttacagttcttctttctgacaggtggtaggagagtatttctccatcccctttagaagacaggagtagaataggactattctgaccaataaaacatgagcagaaatggcacatgttacctctaggtgagagctttaacagttggtgtgaaatgtgggtctctttctctctgccaccatgtctggtgtctgggaatgctccagatagtggctgttctgtttgtctggtcctggactaagaccaagaggaac

SEQ ID NO: 118719 - DNA, 540 bp, Homo sapiens
ttcatgggatatattcctccttttctgaaaacattgaaactcattgattcagttaataaagaagagtagggaaatcataatttttaaaataaatgaaaaatatatgttttaatcttttcaaatttattgaamtcattgcagaatacatgaatgaaaattttgctatatggtgtggggttaaaagcatgaacaagataaaaacaccacccacaaagccattacaatccagtaatataagtaaatataatatataatctaataaaggtcagtttataaagagtgtttggggagtttagaaaaatatattagtgacatatttttgttacctgttattggtacaatactcatgagctagtgaatcaagcaccttgttcatattttggccattcagaggatagacaacattttcattaagaaagtaaaatttgaagtggaccccaaagtaaagatgcaaaaaagtcagtaatttctggcatggaggaaaatacaaacaaaggcatcactgtggacttacacatgcatatttgggaccaaaaacaa

SEQ ID NO: 118720 - DNA, 540 bp, Homo sapiens
ttcatgggatatattcctccttttctgaaaacattgaaactcattgattcagttaataaagaagagtagggaaatcataatttttaaaataaatgaaaaatatatgttttaatcttttcaaatttattgaactcattgcrgaatacatgaatgaaaattttgctatatggtgtggggttaaaagcatgaacaagataaaaacaccacccacaaagccattacaatccagtaatataagtaaatataatatataatctaataaaggtcagtttataaagagtgtttggggagtttagaaaaatatattagtgacatatttttgttacctgttattggtacaatactcatgagctagtgaatcaagcaccttgttcatattttggccattcagaggatagacaacattttcattaagaaagtaaaatttgaagtggaccccaaagtaaagatgcaaaaaagtcagtaatttctggcatggaggaaaatacaaacaaaggcatcactgtggacttacacatgcatatttgggaccaaaaacaa

SEQ ID NO: 118721 - DNA, 623 bp, Homo sapiens
ttggaaattgctttagaatgtgataatatgcctatagaatcatattacaatgatttgcaaataatgtcactgccactattgcattctccacttggaaaaatgtcttacttagaaaatttctcttaaggcaagcagtaaacgatttcatcagaaatagttattttttmaatggtatttttcaaggttattgccaagtttttttgggggtgggtcatctttgtaaatttgcaagactccagtgatcagttttcttcaattattctgtatcctgtatgatatgattgtatttttctaagcatcaaaatctgattcattgtggaatactgaatggatagccctactgtaatagtcttctgtctaccctgtaaacataaccttagagggccaaataaattacgtattgcagcctcattcattatagattttctaaggcctctaggtgcagactggacctgggctctgttggataaacttggttgagaaacattttgtacttacagaattaaaaggaggagaagaatctgcatcatgtgagattagatgacttgattcactgacgtctatgatgggtgtgttgtgcagatgagctgagaagaaagagcctgctttttcttctgttgaac

SEQ ID NO: 118722 - DNA, 623 bp, Homo sapiens
ttggaaattgctttagaatgtgataatatgcctatagaatcatattacaatgatttgcaaataatgtcactgccactattgcattctccacttggaaaaatgtcttacttagaaaatttctcttaaggcaagcagtaaacgatttcatcagaaatagttattttttaaatggtatttttcaaggttattgccaagtttttttgggggtgggtcatctttgtaaatttgcaagactccagtgatcagttttcttcaattattctgtatcctgtatgatatgattgtatttttctaagcatcaaaatctgattcattgtggaatactgaatggatagccytactgtaatagtcttctgtctaccctgtaaacataaccttagagggccaaataaattacgtattgcagcctcattcattatagattttctaaggcctctaggtgcagactggacctgggctctgttggataaacttggttgagaaacattttgtacttacagaattaaaaggaggagaagaatctgcatcatgtgagattagatgacttgattcactgacgtctatgatgggtgtgttgtgcagatgagctgagaagaaagagcctgctttttcttctgttgaac

SEQ ID NO: 118723 - DNA, 623 bp, Homo sapiens
ttggaaattgctttagaatgtgataatatgcctatagaatcatattacaatgatttgcaaataatgtcactgccactattgcattctccacttggaaaaatgtcttacttagaaaatttctcttaaggcaagcagtaaacgatttcatcagaaatagttattttttaaatggtatttttcaaggttattgccaagtttttttgggggtgggtcatctttgtaaatttgcaagactccagtgatcagttttcttcaattattctgtatcctgtatgatatgattgtatttttctaagcatcaaaatctgattcattgtggaatactgaatggatagccctactgtaatagtcttctgtctaccctgtaaacataaccttagagggccaaataaattacgtattgcagcctcattcmttatagattttctaaggcctctaggtgcagactggacctgggctctgttggataaacttggttgagaaacattttgtacttacagaattaaaaggaggagaagaatctgcatcatgtgagattagatgacttgattcactgacgtctatgatgggtgtgttgtgcagatgagctgagaagaaagagcctgctttttcttctgttgaac

SEQ ID NO: 118724 - DNA, 489 bp, Homo sapiens
atgttccaatatgaacttgtttaatctaaatagatttaatttaaaatatgacatgaaagtttaggaagctatttactaaagggagttaaacctgtgtatagccatttctttgagatgaaacaacaccataatagaaattgctaccayataactattcttcctgaaagtagaatcgatagtatactatttccatctacatcatagcatatccctagttaggtaagttcatttttctttttaaaactgacattaattgtcctcaactcaactttagaaacacaatacattaagagaaagagaatctaaatattgttcaaatacataagccacctcttgctcatactcacaaagcagtaaatttttgtgaaatgctttagcttaatggtggcatataaaaataaaaatgtacattatcactattgagtttgaatgcagcacattcattcattagagcttcatgccactaaattcaatctagtgtgtggtaca

SEQ ID NO: 118725 - DNA, 445 bp, Homo sapiens
acattctcagcaactgttagttaataaggagagtaaaaaccttgccagaggtcttctctcaaagtgtaatgtgctaatagagccacctggccaactatgtcaactctgtccagcagacatgggaatatagctatttacatctgctatttagaatgaatatgaaatagaacattgtgaaatcttggacctacttacttagcctctgaygagttatatgacaccctccccaatcaaagtttccattgcccatctgtgtctttccagagtagtgttgtatctgggtgtagaggtggtgtcaggaaggaatggaccctgctccacttgcacacagatgagcacagggtatcattggtgcttggaaagtcattcatttctactttcacctaggctggatttctgtaagtaagacctttcgtgtcatttcaaagttttacctggatgtcag

SEQ ID NO: 118726 - DNA, 445 bp, Homo sapiens
acattctcagcaactgttagttaataaggagagtaaaaaccttgccagaggtcttctctcaaagtgtaatgtgctaatagagccacctggccaactatgtcaactctgtccagcagacatgggaatatagctatttacatctgctatttagaatgaatatgaaatagaacattgtgaaatcttggacctacttacttagcctctgatgagttatatgacaccctccccaatcaaagtttccattgcccatctgtgtctttccagagtagtgttgtatctgggtrtagaggtggtgtcaggaaggaatggaccctgctccacttgcacacagatgagcacagggtatcattggtgcttggaaagtcattcatttctactttcacctaggctggatttctgtaagtaagacctttcgtgtcatttcaaagttttacctggatgtcag

SEQ ID NO: 118727 - DNA, 648 bp, Homo sapiens
  misc_feature (1)...(648): n = A,T,C or G
cccttagaatggtccatcacacatcccatttccagcaaagcattgcctaggactaactccaaactgtttttgtagatattttagaaacactgggtcaggcacagcggttcacacctgtaatcccagcactttgggaggccgaggcaggaagatcacctgagcctaggagtttgagaccagcctgggcaacatgacaaggccctctctctacaaaaaaaagaaaaaatgaataaaaattgaaacattgtgtttttttttctcttactctggattttatgcagctatacctaaactcagacaaaagrtgtattctgagagaactctgctttaaaggacttcaagatagctctctttttaggcaatgaatacgtctatgaaagtcaccctgcacttactcgttttgtaggtccaaagtttttccctagtagatttgcacagaagaatttgattataattcagttaacaaatacatttcctctataaagggcactttcagaagcactatataaaggtcatggatttggacacattgcggttatcaggtttatagtacatcttctatgcagtaaatacagtaagaaaaatggctacatttcaagatggggtattnnnnnnnnnnnnnnnnnnnnnnnnnnnnnnnnnnnnnnn

SEQ ID NO: 118728 - DNA, 471 bp, Homo sapiens
aagatttaagactcaggtgttcccaayccctcctactggtaggtttttactatttcacactggctttcttttcataagatggaggggaagtcagtgcttattgacatagtgacttagtgatttagtagtgattatgtgacttagtgacatagtgacttagtgattatgtgggtttttccaaacaacaaacatgtgttgcatactttctgtgatagccaatgagaatttaaagatacatagagcataactgttgcccccaagcaacaatgtaataaagaaacaaatatatatgaagagaactgcaaaagactgcaaatatgtactttcatagaagtgtgtgcaaaaggtttggtgatgatactttaaaagggaccagagaagtcatagccagggttgatttccaaaaaggaagatatttgactgattttgatgagaaagagtaaggtgtgtgtgtgcatgtgtgtgtgcatg

SEQ ID NO: 118729 - DNA, 471 bp, Homo sapiens
aagatttaagactcaggtgttcccaatccctcctactggtaggtttttactatttcacactggctttcttttcataagatggaggggaagycagtgcttattgacatagtgacttagtgatttagtagtgattatgtgacttagtgacatagtgacttagtgattatgtgggtttttccaaacaacaaacatgtgttgcatactttctgtgatagccaatgagaatttaaagatacatagagcataactgttgcccccaagcaacaatgtaataaagaaacaaatatatatgaagagaactgcaaaagactgcaaatatgtactttcatagaagtgtgtgcaaaaggtttggtgatgatactttaaaagggaccagagaagtcatagccagggttgatttccaaaaaggaagatatttgactgattttgatgagaaagagtaaggtgtgtgtgtgcatgtgtgtgtgcatg

SEQ ID NO: 118730 - DNA, 471 bp, Homo sapiens
aagatttaagactcaggtgttcccaatccctcctactggtaggtttttactatttcacactggctttcttttcataagatggaggggaagtcagtgcttaytgacatagtgacttagtgatttagtagtgattatgtgacttagtgacatagtgacttagtgattatgtgggtttttccaaacaacaaacatgtgttgcatactttctgtgatagccaatgagaatttaaagatacatagagcataactgttgcccccaagcaacaatgtaataaagaaacaaatatatatgaagagaactgcaaaagactgcaaatatgtactttcatagaagtgtgtgcaaaaggtttggtgatgatactttaaaagggaccagagaagtcatagccagggttgatttccaaaaaggaagatatttgactgattttgatgagaaagagtaaggtgtgtgtgtgcatgtgtgtgtgcatg

SEQ ID NO: 118731 - DNA, 537 bp, Homo sapiens
agaatgcaaaaagcttgaagcgtatgttgtattttcataagtttactgtgcagatgcacactggtaactatttctgaagactgcaactccacattttttttctcttcacccaggtagtgcaggtgctccaagacgccaggtagccttgaactgtgactgcttgtatccactagaacaagtcttaagcccaagtgamtggctactgtattgaggctatagttcctgagggggtgagtttagtcacattgtctaacctaatgtcatgttatgttaaactgcaccttaccattgacacttcatgacaacaggcaacccaacagtggttatgtgcagatgcaaaataaaattcttcctcctccaccacctcacaacctcaaacacactctcatgccagacatgcctgcagtttggacagcaagatgagtctgaatctttggcagataaataaggcagcagcttgaacactcatgaaaaagagctaatttttatacccgcgggacagcacacaatagcggcttttggcactctgagaagctg

SEQ ID NO: 118732 - DNA, 494 bp, Homo sapiens
agtctctctatacccagtgatggggtaggaagataaaactgagtgaattctgattggggtgataaaaaattttggaaatagtggtgattattgcacaacattgtgaatgtaattaatgtcactgaatggtacatatatatatggtatcacaattttaaaattatatttaaaaaaaaaaaactaagtgtaaaggaaaatgaagccagagaaaagagaaaggggaagaaagaaaggagttayagagaaaaaaagttgggagagaaagaagaaagagaaggaaggatggaggtaaagctgggatatccttccccaacatctatctctatcaccaccaccagagtctgttctcttccagtctgaacagtcttagttcctccaatatactagtgatatggtgttcatacatctcaccctggtccatgcaattcctctggactttaccagtttgtgaattttcctcgtaaaatgcattgcccagaactgaatacgagctc

SEQ ID NO: 118733 - DNA, 552 bp, Homo sapiens
ctgtggctggtggtgcctttgcccgagttttgctagggcccactggctcgttctacccactcggcctggcaggctgcactcagctcatggtactggcctaggtgtcatgcctccaagggagatgggagtcaggcatggagcagcaaggggtgtgtgagtgagcaaggggtctggcccctgcacattcagatacaccggctgctgccacggggtgggcagctccaggtaccggcagggttaccaactctctgtgaggttgtggctggaccaggtacacctcaagcagcttccaccagcaccggggaacacggyggcacctggaagcttggagacaccaggaactgcaaggccccaaagagggagtcacagccctggctcggggagcccaggtctgtgctccccaaagggctgcagctcttctcttctctcctctttgcccccaatgtggcaagcaaggagaatgtttcagtcctgtttgtgttacatcttttttagcctcattcagtgagtcccaagttcttgtcctgcaaccaggaagaatgaggtacacag

SEQ ID NO: 118734 - DNA, 534 bp, Homo sapiens
attatcctaaatcttctaaagactaagcaaccaagtccggtaaaaattgttctccacattctgttcaccccgccccaagccactataggcacctcatgtcttttttccctttttgtgggcwgacccatattttctagtcatgttgtattagcaagggaaagagttaatgcctgcattctcagatcttttctattaatcccatgaaacagattaacatagatgtgtttttatataccattggcatgtaattctggacaattgaaaagaataattgagggtgactttcaaatagtgtcttatgttgttttgtgttttactaacacagggaaaaaacaaaggatgctagaaggttatattctaaaataaatatgtcaggaaactatttcacagggattaagttattgtgttgctttctgacaccattgtattcttttccctcaagaatttgtgaaaagtagccccactatgacttgcaaacatgctgctttccttgacttttggatagctcctaagatttgttttttttaaaggtta

SEQ ID NO: 118735 - DNA, 578 bp, Homo sapiens
tactgcccaagagcaaaatgtaagtaataagcttgatataagcaggatctgattttgagacaagcacattaatggcagcaaattgcaatgaaataaagaggaatgtgagagaagraaaaaaagctttggaaagcagaaatcagaactccaaaagtaaactagtttttcgccattagggagaaaggtaaacaactttttacatttcattagcctctgaggacaaatgatcataaaataataatcaccaaaatggttaaatacagtaatatattgtgaaattcatttttaaagaatttaagaaagtaaacattggttaataatttgagaaaagtatgttttcattgttaataaattgtgcttatgcaaaatactttgttttctactaatgaacatcttcctgtaaaagaaaacccattagattagaaataaaaaggaatctctttaaagaccatttatgtcttcaattacaaagtacttattaattgaacctcagtttatctctgtgttatttagcactttttaatttccacctagtatcacaattattaatatttgtttaggattgtcctgttagatca

SEQ ID NO: 118736 - DNA, 578 bp, Homo sapiens
tactgcccaagagcaaaatgtaagtaataagcttgatataagcaggatctgattttgagacaagcacattaatggcagcaaattgcaatgaaataaagaggaatgtgagagaagaaaaaaaagctttggaaagcagaaatcagaactccaaaagtaaactagtttttcgccattaggragaaaggtaaacaactttttacatttcattagcctctgaggacaaatgatcataaaataataatcaccaaaatggttaaatacagtaatatattgtgaaattcatttttaaagaatttaagaaagtaaacattggttaataatttgagaaaagtatgttttcattgttaataaattgtgcttatgcaaaatactttgttttctactaatgaacatcttcctgtaaaagaaaacccattagattagaaataaaaaggaatctctttaaagaccatttatgtcttcaattacaaagtacttattaattgaacctcagtttatctctgtgttatttagcactttttaatttccacctagtatcacaattattaatatttgtttaggattgtcctgttagatca

SEQ ID NO: 118737 - DNA, 578 bp, Homo sapiens
tactgcccaagagcaaaatgtaagtaataagcttgatataagcaggatctgattttgagacaagcacattaatggcagcaaattgcaatgaaataaagaggaatgtgagagaagaaaaaaaagctttggaaagcagaaatcagaactccaaaagtaaactagtttttcgccattagggagaaaggtaaacaactttttacatttcattagcctctraggacaaatgatcataaaataataatcaccaaaatggttaaatacagtaatatattgtgaaattcatttttaaagaatttaagaaagtaaacattggttaataatttgagaaaagtatgttttcattgttaataaattgtgcttatgcaaaatactttgttttctactaatgaacatcttcctgtaaaagaaaacccattagattagaaataaaaaggaatctctttaaagaccatttatgtcttcaattacaaagtacttattaattgaacctcagtttatctctgtgttatttagcactttttaatttccacctagtatcacaattattaatatttgtttaggattgtcctgttagatca

SEQ ID NO: 118738 - DNA, 578 bp, Homo sapiens
tactgcccaagagcaaaatgtaagtaataagcttgatataagcaggatctgattttgagacaagcacattaatggcagcaaattgcaatgaaataaagaggaatgtgagagaagaaaaaaaagctttggaaagcagaaatcagaactccaaaagtaaactagtttttcgccattagggagaaaggtaaacaactttttacatttcattagcctctgaggacaaatgatcataawataataatcaccaaaatggttaaatacagtaatatattgtgaaattcatttttaaagaatttaagaaagtaaacattggttaataatttgagaaaagtatgttttcattgttaataaattgtgcttatgcaaaatactttgttttctactaatgaacatcttcctgtaaaagaaaacccattagattagaaataaaaaggaatctctttaaagaccatttatgtcttcaattacaaagtacttattaattgaacctcagtttatctctgtgttatttagcactttttaatttccacctagtatcacaattattaatatttgtttaggattgtcctgttagatca

SEQ ID NO: 118739 - DNA, 590 bp, Homo sapiens
gatctatgatgtttgtatattcagatgtattttacagtctattcatgcatgttaacatttactcagcatgcacaatgtcttgttatatttgaagacaaaatttatacacatattatgacctaaaaatacttgcagaacagaattttattaagcactatttaaattcatacaaagaaaatacataccaactcatttatgcactgaggatatgcaaatatactgtttagtttacattaggttaattgggaaaagacttctggaggaaatgaattgccagttgcattttgaaatagtttatagatacaggcaaagaagaaaaatcatacagaggratggagttgaagatatgcaatttgtggcaaattgggtgggtagacttctaagaagtctccagccattcttttattcaatagacatacactgcacatagtttacacaagaacagtgttaggtcctgaggatacaaagccaggtaatatagcattcttgcctgcaagctcatagattcgtgcaggagatgggcataaataaagataggataagtaaaaaaaaaaaaaaattatgacacagtaagataaataaatttcatt

SEQ ID NO: 118740 - DNA, 590 bp, Homo sapiens
gatctatgatgtttgtatattcagatgtattttacagtctattcatgcatgttaacatttactcagcatgcacaatgtcttgttatatttgaagacaaaatttatacacatattatgacctaaaaatacttgcagaacagaattttattaagcactatttaaattcatacaaagaaaatacataccaactcatttatgcactgaggatatgcaaatatactgtttagtttacattaggttaattgggaaaagacttctggaggaaatgaattgccagttgcattttgaaatagtttatagatacaggcaaagaagaaaaatcatacagagggmtggagttgaagatatgcaatttgtggcaaattgggtgggtagacttctaagaagtctccagccattcttttattcaatagacatacactgcacatagtttacacaagaacagtgttaggtcctgaggatacaaagccaggtaatatagcattcttgcctgcaagctcatagattcgtgcaggagatgggcataaataaagataggataagtaaaaaaaaaaaaaaattatgacacagtaagataaataaatttcatt

SEQ ID NO: 118741 - DNA, 626 bp, Homo sapiens
atataagaggggatttattatgggattggctcctgtgattatgaagatcaagaagacccataattaacctctgcaagctgaataagcaggaaagctggcagtgtaattcagtctgagttcaaaggcctgaaaaccagtagagccaatagtataactcccagtccaatgtcaatggcctaagaactgagggactgctagcataagtcctggttaggtttaagaactaggagctcccatgtacaagggtaaaagaagatgatatggtttggctgtgtccccacccaaatctcatcctgaattgtagctcccataattcccatgtrttgtgggagggacctggtgggaggtaattaaatcatgggacaagtcttccccatgctgttctcatgataatgaataagtctcatgagatctgatggttttataaagaggagattccctgcatatgcactttgcctgctgccacgtaagacatgactttccttctcctttaccttccaccatgattgtggggcctctccagctgtgtggaaccgtgaaacctttaaacctctgtcctttataaattacccagtctcaggtatgtctttattagcagggtgagaatggattaatacagaagatga

SEQ ID NO: 118742 - DNA, 567 bp, Homo sapiens
attttaatcagcttaattgcattaagtttttttccagttcttttactcattccaaatgagacatgcaccaacaccttatttaattttgaatctattatcagggagttgactgaaatgcaagcaaaacatctttttccaaacatttctttgcacatgttagtgactgctaaacaaatttcattattatttaaaactagaaggctaatgctacttcagatatatttatttattgcacattgcaatggttaaaaactcatatatttgttgtggtttaatttaaaaagataaatgaacactgagtcttatacaaggagtcttatacaaggaagagaaatgaatgtctaaacactgagtcttatacaagcagtctaatacaaggaagataaatgaatatctaatcgtgtttgtagcacattccaggcaatgcygttagtcacagttctaactacatttctaactcaagaaaattacccaaaaaaaaacacatcttgatttttgaaaacataaagaaaagtccctacaacatcaggagaaggtgaagcatgagaaacagatcaggatcaggtg

SEQ ID NO: 118743 - DNA, 567 bp, Homo sapiens
tattaacagaaaaaaagatatctcaatttgtggaaaaggaagaaatacaaatgcttaaaattatagtatagttaattgcaatggcaaaatgtgtccatggagggcatgggaaacaagtggatgacaaaccagccttactaaaagcagtaaatattatatgtaggcaatagagtgggaaagaatgagagtagatgtaatgatgttttgtgtctggtagaaatctctatgggttctggaatatagaagtcaactcacaagtgtgaggcaagaaagtgactaaaagaaatagcaaaattatcaagcacaaattaaaacactattttaaaaatatcctccataattttgaaagcattacttcatctaaacactgctgaaagtttctgctcacatcattgggggaatattttttccctaagagaattaatctctagttctttatttaacttgcttaaagatgagatattagcaaggaatatargtggtcatttcaggtttgggatttcagagctcagaaattttcaccttaaagaaacaagtgccaaattatagaatgaaagttaattaagt

SEQ ID NO: 118744 - DNA, 552 bp, Homo sapiens
gtctagtgccatttcaatacaataaaatgcccactttagataaaatcatggattgtgaaagctaatttggattttgcaggtgaactataccatgctcctcctctccagtaaggaagctaaggactcgctagtgcccagtttccctaggagccctcgttctcttccccaggcaagacccacctaattgaatgaggagataaagaccttgagtagaaraggacatgtgaactcaagatgaccaaaggagacttgcctcataatctatattaggcctaacgttccagaaatgcatctccctttagagtaccttcacttttaaaagggaatttaattgtgggaattcaagcacaatatggaccaatgaggtaaagatctttgagataagtgatgccttaaggtcttcaaaccagttcatttaaaccagaacttgctccatctctgtgtaaggcctccctgtgcacaatcacaaccattttcccaaccctgagggatgacaaaaaacaagtcagtattgtcagtgctaatacatgaatcatgactgcctgcaagtaa

SEQ ID NO: 118745 - DNA, 595 bp, Homo sapiens
atgaaactggctcgatgatacaagctgcaagttacttttagagcacatttgtgctcttttaacacttgcttggaaaaaaaagtcggcacctccagggctaggtagatccttatgcaatacggaatgcagtatataggttctgtctattaccgtgcatttagaacttttmatattcagcatccagaaaatgatttccaaaacattggtgggaatgagggtgtaactaaaaataaaaagatagtgcaacataatgagaatgtgaatagaaatgaaaaatattttagatgttcaagaaagaaaaaatatctgacaatgctgactcgaaacaataatataagtggaggctcttgctggactctattatttatatcaaatatttaactggagtggatttgtacatttatacaatcatatctgtgaagatagtcatgtttaaccacagtatgacttacagcttgatcctggaaatataagtttgccatgctatagtacaggtttaaggtgaccatcagaatcaaataaaaatatgaaatccattaaattcttagagtaaaactcattctctggatctcaaatagctaactgcttgtgtttg

SEQ ID NO: 118746 - DNA, 580 bp, Homo sapiens
ctgcagaaattcaaaggatcattagcaactacatactaataaattggaaatctagaggaaatgggtaagttcctagacacatacaacctaccaagattataccatgaagaaatccagaacctgaacagaacaataataagtaatgagatcaaagccataatgacaattatctcagaaaagaaaagcctgggacccaatgacttcacttctgattctattaaacgtttaaaaaagaaccaaaaccaatctactcaaactataacaaaaaacagaggataaggaagtacttccaaactcatttatgaggtcagtattaccctgataccaaaascaaaggcacatcaaaaaaagaaaactaaaggttaacatctctaatgaatattgatgcaaaaatcctcaacaaaatgctggcaaacaaaattcaacaatacattttaaaaataattcatcatagccaagtgagatttattccagggatgcaaggatgcttcgacatgtgcacatcaatcaatgtgaattatcacatcagaagaatgaagaacaaaaaccttattatcatttcaattcatgctgaaaaaag

SEQ ID NO: 118747 - DNA, 555 bp, Homo sapiens
gcctccgtgcccggcctattttatttcttcttcttctttttttttttttttcctatttttgatgagggaactgaagtccaaaggtattaggaagtcacccaaagaagacatagtaaatggcagaggtagaaatataatacagtatctgattccagagtccaagttccaaaccactgctcttactgcttctgtgagaaacaattccttctccagatcatcataaaaatcaaaaccatgtcccataaaactgctcatgtatgactattagtctggacgtacatccaattctataccatttatatcttagaaatccattgagatttatttattgcctcaattttatactttgagttcatgattcttggagctatagtgcaggtkgtacatcaggccccaaaagccatgttcctggatcatttctgtctgtagagtcatcagggactctgcaaactggtcaccatcatgcggaagtctcatgcaactttcccccagaagcaaaaaacttgaatagatgacacaaaaacagaagacacacaaatatctaattagcacatg

SEQ ID NO: 118748 - DNA, 555 bp, Homo sapiens
gcctccgtgcccggcctattttatttcttcttcttctttttttttttttttcctatttttgatgagggaactgaagtccaaaggtattaggaagtcacccaaagaagacatagtaaatggcagaggtagaaatataatacagtatctgattccagagtccaagttccaaaccactgctcttactgcttctgtgagaaacaattccttctccagatcatcataaaaatcaaaaccatgtcccataaaactgctcatgtatgactattagtctggacgtacatccaattctataccatttatatcttagaaatccattgagatttatttattgcctcaattttatactttgagttcatgattcttggagctatagtgcaggttgtacatcaggccccaaaagccatgttcctggatcatttctgtctgtagagtcatcagggactctgcaaactggtcascatcatgcggaagtctcatgcaactttcccccagaagcaaaaaacttgaatagatgacacaaaaacagaagacacacaaatatctaattagcacatg

SEQ ID NO: 118749 - DNA, 620 bp, Homo sapiens
tatggactgggccacgcctagagaaataactctcgctagtgctacggaggagggagtcaccctgtttcacacagagaaggaaactgaccctgagaaaggcgaagtggcttctgcagggtcattcagccagcaaggcagagtaaggatggaaacccatgctgaattgggtgtagctgatttttttgttcataattccacagtattagggagggaaagcggggaaacaggagctcacaggaaagaaaggggtatggagagggtgagggcaggacaattatggggccagagcgggagtctggattcaaatccaaacccacaaggacacatcactcctttcttcagctggtccatggatactgaatcagggaacctcttggaactggcttcctaccctgcaatcagggtccttgacagtccccagtcgggaacacagaccaccacagtgagccactagccagggsgtttaccacggctggccagaggatggcagtcactgcctacgcatgcccacttggctggcgccgctgatggagtagcaagtacctgccctcctgggctcctccagactccggaggcagtgaattcctgctcttgaatcattatgggacccctcgtaaagg

SEQ ID NO: 118750 - DNA, 620 bp, Homo sapiens
tatggactgggccacgcctagagaaataactctcgctagtgctacggaggagggagtcaccctgtttcacacagagaaggaaactgaccctgagaaaggcgaagtggcttctgcagggtcattcagccagcaaggcagagtaaggatggaaacccatgctgaattgggtgtagctgatttttttgttcataattccacagtattagggagggaaagcggggaaacaggagctcacaggaaagaaaggggtatggagagggtgagggcaggacaattatggggccagagcgggagtctggattcaaatccaaacccacaaggacacatcactcctttcttcagctggtccatggatactgaatcagggaacctcttggaactggcttcctaccctgcaatcagggtccttgacagtccccagtcgggaacacagaccaccacagtgagccactagccagggcstttaccacggctggccagaggatggcagtcactgcctacgcatgcccacttggctggcgccgctgatggagtagcaagtacctgccctcctgggctcctccagactccggaggcagtgaattcctgctcttgaatcattatgggacccctcgtaaagg

SEQ ID NO: 118751 - DNA, 483 bp, Homo sapiens
gtctggaatagacttaaaagttgacaacacaattttagtttattgtttcctaattataacggcattgtcaagccaattggaggttagaatctgagacagaaaaaggacatatttcaagaagtaaccaatgaaaatactgtttactaatatttactgaaatgcttaccttgaccaggcattcttctgtatgatttccatacattgactatttaattttcacagcaactttatgggataggtttttttaattcgtattttgcacataagaaaatcaargttgggagagtttcagaagcttcatcagaaagtggaggaagtggaaaagctaatgttgaaaccagttcatctgaattttggttaatgctctcaacatccatactgttcttaaatgtttctcaagataaaggatggctgtgatcatttgaagtgaaaaagaagcagtattagaaacaaatatatgtaaataaacattgtttaccatta

SEQ ID NO: 118752 - DNA, 528 bp, Homo sapiens
tctgcacctgactgttgctccaagcttggatacagttgattgatcaaagacaaaatatatgatgtttcttcttgtgaatataaattaagagatgaagagctgtatttagtgtttactgggttctgaactcttaaaatcgtgtaggtttgaaatgcatgtgttggtagtcaccctgagttttgaggcaagaatcttcayatggttaaagctcaccagtgaatgcgacatttagaccctgagattctgatagataatattaaaggaaatttaaaactaagaacaataattaacatctgttcatttatttacacactcatttattaatttgtgtattaaacaatattaataacatattttgtgccagtctctcttctggttactcaagatgtatcaataaccacaccaaacaaaaaaactccctatctgtgtatgatttacattttaatggaagcagaagaacatagatagtaacaaggtaaatgagggtgcagggttgggattggaggctgacacaggtgacaatgttta

SEQ ID NO: 118753 - DNA, 595 bp, Homo sapiens
ttgtgtattaaacaatattaataacatattttgtgccagtctctcttctggttactcaagatgtatcaataaccacaccaaacaaaaaaactccctatctgtgtatgatttacattttaatggaagcagaagaacatagatagtaacaaggtaaatgagggtgcagggttgggattggaggctgacacaggtgacaatgtttagatgatcacagcagccctgtttagaaagcttcatggatctaagacatgcagaaagtgggggtgacctttactgagtgccctttctatttataaagcagggactattacttccccatkctacaagtgaagaaacagaggaacttcccacattcacttcattttgctttgttttaatttctaaaatcttaccaggggttcattttagtgagttcttaagcccaggattttctgttgcttttggtatttgttgtttagtgttatgctttccctaaggagagaggctgtaactcaccttcaacctcattatctgtatgacctcctctttggtctatttcattcttctctaacaaatattttaaacatttacttatcagagtaaatatgaaaatgca

SEQ ID NO: 118754 - DNA, 535 bp, Homo sapiens
gaacatagtgctgggagaactggctatctacatcaaaaaaaaaattaaatgctacgtcacttcataattaaaaattaaatcaaaatggattgtagacmaaatcataatgctatctctataaaactcttttctgccccagccacctgctaaaaatacttgaagctctgagatttctaccctgcttacaagattacaatttaccctgtcatcattttatagatgctggtagaagtcacaagtctcctgtgaatgaaaaagtactttaggactcagcaggcaacatgagtatcatcactgttgccttcgactcccatgcaggtggacccagagggaggcctgcacatgcacagggttatgttacaggcgctgagctctgagctgtgctccgtgattaggccttgtcctttactctggagagagacactatatcttccaaggccatttgctaacaaaggcctttgaaaagatattctggaacagatggtagtcggagccttgcttgcaagacaggcagaaatgcccgacccaggggaat

SEQ ID NO: 118755 - DNA, 535 bp, Homo sapiens
gaacatagtgctgggagaactggctatctacatcaaaaaaaaaattaaatgctacgtcacttcataattaaaaattaaatcaaaatggattgtagacaaaatcataatgctatctctataaaactcttttctgccccagccacctgctaaaaatacttgaagctctgagatttctaccctgcttacaagattacaatttaccctgtcatcattttatagatgctggtagaagtcacaagtctcctgtgwatgaaaaagtactttaggactcagcaggcaacatgagtatcatcactgttgccttcgactcccatgcaggtggacccagagggaggcctgcacatgcacagggttatgttacaggcgctgagctctgagctgtgctccgtgattaggccttgtcctttactctggagagagacactatatcttccaaggccatttgctaacaaaggcctttgaaaagatattctggaacagatggtagtcggagccttgcttgcaagacaggcagaaatgcccgacccaggggaat

SEQ ID NO: 118756 - DNA, 596 bp, Homo sapiens
aagctatggcattaacacgtcaaaatccctcagaggagggcctgtgacatctgtaggaaggatatgatatgcctttaaaagagggcggggctgcctatcccagaaatgaagggaaaaggacttgagacaaatcaataaacctggcctattttactatttttcctaggtacagcgatccatttaaaaagtacacagcacattaaaattaagttccaaaytgatgtcctttataaggctctatatcaaaacattaggagttgtttctatttctactcctgggatcttaatattatcctaaatgttttacatgaccgtgtattaattttttaacttgaaaacaacaaagctaatttcagtcatgaaaaaactgatacagtatagttataaattcttagaacagtcacacatttaaattgagttttttaattaaatatatggtattagcaaacaatcaaaaaagaaaaataaataagtcacaacaacaaaaaataaataaaaggctttctgttagttccaagtttgtctttaaatgtatgtacaaatgcaaaacatttactgacattttcagaacaacttcagctgtttcatttttaaat

SEQ ID NO: 118757 - DNA, 590 bp, Homo sapiens
attaaccaggcatcctagagtattcatccatggcttttttatgcaaaaaaaagtttataaaacagcaaaaatccactaaatgtcaactgttactattgctattactgttaaaaaaattaaataaagtcaattttagatactttaaataaattgacttttaatactgctttaattaaaaatatttgtccattttgtactatgcattactatacctaatctgattactttattccttgttacatttctgtctgaccttcacccattaccctaacctgttatttaaaaacaaataaatgacacataaacaaacaaaatactttttttagcatttgctgctttagtcagttactcctgggatgaataaattatatttgatgtttttaaaaaacatcttcakgtcttgccaacttgaaatcacaatttactctttggttatatctctttgttagaaatttcctttcaaaatggggaaaatttttttctttaataactcatatgttacattccattgaatgaaaccagctgtcaaattcaaaagagtagattctctatttcattttgaatagtaataaataaaacagattaggaca

SEQ ID NO: 118758 - DNA, 604 bp, Homo sapiens
gctatagctcgtgaatccagaaaaacctctccactttaaggctggtaatctcacagcttcacatctgccaagtccctgttgccaagtaagttcacatctgctggatccagggcttagggcatgcatgtgggggaggggcggtccgctcaccatgttgttttccatsactaacacttctaaatagtcctgttcaattagttcgtacagtgtccctcaatatagatttgtctgctgttttctcatgactaaattcaggttcgacatttactagaaagaatatcaccaacagatgatgtacatgctcactacatcagaggcataattcacagtaccaacaatgtacccttgctgacatagacaaggaagtatctgctgggctcttcaactgtacagtaaatattttcactctgtaattaataatattttgggggcagatattctgagactgcaaatatcttgtttctgcccgagatggtgattttaatttctctcattcttcatgtttcttaatagaatgctcataaacaggagaaatatcccttttcccttacttatttatttatttattcaatcacttatttaaatcagtttggattcctggatt

SEQ ID NO: 118759 - DNA, 533 bp, Homo sapiens
ttttctttcttctgaatctggaggccttttatttcattttcttgtctaattgcttttgctaaactgtccattacaatactaaatagaagtgataagagtggacttccttatcttcttcctgatctttgaggggaagaattaagtctctcaccattaagtataaagttagctatgggattatcacayatgactttaatgacatttagctttcatttctaatttgttgatttttaattattgaagagtattggattttgtcaaatgatgttctgtgtctatcaagatactgtgtttttcttctcttttttctattacatagtatatttttataattcaggcattaaatagtataattaattagtacattaaataatactttatttcttatgtgctatgcagggtgtgtttgaaacatagaatatttgactacttcatcagttagcagatgactaaaataatttagtggtgataatgaagttaggatttgaacccccattgtgaggtgtttgaattattaaaattaatcaatgttg

SEQ ID NO: 118760 - DNA, 533 bp, Homo sapiens
ttttctttcttctgaatctggaggccttttatttcattttcttgtctaattgcttttgctaaactgtccattacaatactaaatagaagtgataagagtggacttccttatcttcttcctgatctttgaggggaagaattaagtctctcaccattaagtataaagttagctatgggattatcacatatgactttaatgacatttagctttcatttctaatttgttgatttttaattattgaagagtattggattttgtcaaatgatgttctgtgtctatcaagatactgtgtttttcttctcktttttctattacatagtatatttttataattcaggcattaaatagtataattaattagtacattaaataatactttatttcttatgtgctatgcagggtgtgtttgaaacatagaatatttgactacttcatcagttagcagatgactaaaataatttagtggtgataatgaagttaggatttgaacccccattgtgaggtgtttgaattattaaaattaatcaatgttg

SEQ ID NO: 118761 - DNA, 507 bp, Homo sapiens
catcatttttatgcaaaaatccttcctagattctctttagggaaaaccagctaggcagaatatccttgtcaccaaataaatgcatttttattcattagatgtccctgggaaacagcttttgaggcagagatttagatgcaagaggtttcatggatagtgttttccggatgcttataaggaaaagataaagctcagctgggcaggtgatgaagttgagctgtgatggagttgcagtagagtgcttagttgatcctagcaggggtctggagttgggatggcttttcagagttgtctggaatagaggcagagacagggtctacacatcaataatwggatgttggctgccccgggggagaagcatggtttgtgttgaggctgtgctgtttgaccaagaagcataagcaggggccacaccgggagcatcagctgaaaatattcctggcagaaattgtggaaggcaacacactacagtccattcatgtgttctttggttccatattctccctc

SEQ ID NO: 118762 - DNA, 644 bp, Homo sapiens
aaggcagactaaaggcccacaagatgccatatgtactccatggatattgtgaatataaataaattaacccagatgagctcgatatgatcacagagctcctaaargcaggagaaaaagggcattttaagaaccagaaaggccccacatacaaagcctggcttgatgatgatgaagaggccacatggaaagtgtggaaagaaactgaactttgccacaactaaggattttagaagaggaccccacacctcagataagaacagcagtccacactgacaccttggtttcagccccacgtagccctgggaagagaatccagccatgccatacaggacgttagacctagagtaatgtaagctaatgaatgggtattgttttaagatagtaagtaagtgagattttgttaggggaccaataggaaaacctataccatgtgtttgtttgttttacttggatggctaaatatatttataacagagagtgtgcatagattgaggggtatagaccctggctctttctatgggtgaaaatgtgagatcgagatagatactcctttgaccctgggcagtggtttgcacctgtgcatgcacaagaatcataatcactttataatcaattctgcattgattggcctgttccattgagaa

SEQ ID NO: 118763 - DNA, 607 bp, Homo sapiens
aaactgaatgaaattgaaatgcaaaaatccatgcaaaagattaagaaaaccaaaattggtttcttgaaagaataaaagagacctatagatcactagctagattaataaagaaaaaaaaagaagatccaaataaacacaatcagaaatgacaaagttgacattaccactgaccccagagaaatacaaaaaaccctcagagactattatgaacacctttatgcacgtaaactagaaaacctagaagaaataagtaaattcctggaaacatacaacctccaaagattgaacaaaaagaaaatgaatacctgaatgatcaataatgagttccaccagtgaatcagaaaaagccatagaccagatagatgaacagccaaattctaccagacatataaataagaactgataccaatcctactgtaattactttttaaaatgaggaggaaaaactcctctctaactcattctttggcaccagcatcattttgataccaaatctggtagacacataatgaaaaaagaaaactttaggccaatatcactgatgaacatagacrcaaaaaccatcaacaaaatactagcaacttgaatccaatagcacatcaaaaaa

SEQ ID NO: 118764 - DNA, 579 bp, Homo sapiens
atatacatatgtaacaaacctgcacgttgtgcacatgcaccctaaaacttaaagtataataataataaaatttttwaaaaaaaagaacaaggtgtgatagttaattttatatgtcaacttggctgggccgtgggatgcccagattaaacattatttctgggagtgtctgcaagggtgttttgaatgatattagcatttaagttggtggattcagtaatgtaaattgccctcttcaatgcagatgggcatcatccaatcccttgaggaagtgaatagaacaaaagaactgcttcagctcagtcatctcatctcacattctgctgacatctgactggaatttatataccatcagctctcctggccctcaaccttcagtctcagactgaaatacacccgtagctttcctagatctctagctagcagacagcaaatcattggatttctcaccatccataatcatataagctaattcctctcaataaaatatgtgtgtgtatatatatataatctcctattggttctgcttctctggagagccctgcctgatacacagggtatgccactagatacactaatact

SEQ ID NO: 118765 - DNA, 575 bp, Homo sapiens
agccaccttaatgaccttatctaatcctaattagctcccaaagactccatctccaaatatcaccaacatataaatttgaagattgtttccaacacatgaaacatggggaacacattcaaaccatagaaaaagggtcctaggcagaggaaagaatttctggaaagacaggaaggtatygcctacagtgaaattattgtgaaaatattgtggaaaatatagagtgggtgatggtccttaattaggagaaaataacccagagattccgggtcctgattgttagaataccttatttcatcttaaattttatccagaaagcatttgttaaacgccaactgtagatacacttagtttttatggcatttcaagcatcagtttcctccatcctccacgtgtaatcaatactgggactatctagatcagggaagatttcaaaaggcagaccaagggaagtgagaaggacatttcaggcagagaaagtaggttaacctagggatacaaacaggattgaagtggggaatcatgaatgctttgcatagcttgagtttgggagcttgtgtatggaagagagtagagta

SEQ ID NO: 118766 - DNA, 575 bp, Homo sapiens
agccaccttaatgaccttatctaatcctaattagctcccaaagactccatctccaaatatcaccaacatataaatttgaagattgtttccaacacatgaaacatggggaacacattcaaaccatagaaaaagggtcctaggcagaggaaagaatttctggaaagacaggaaggtatcgcctacagtgaaattattgtgaaaatattgtggaaaatatagagtgggtgatggtccttaaytaggagaaaataacccagagattccgggtcctgattgttagaataccttatttcatcttaaattttatccagaaagcatttgttaaacgccaactgtagatacacttagtttttatggcatttcaagcatcagtttcctccatcctccacgtgtaatcaatactgggactatctagatcagggaagatttcaaaaggcagaccaagggaagtgagaaggacatttcaggcagagaaagtaggttaacctagggatacaaacaggattgaagtggggaatcatgaatgctttgcatagcttgagtttgggagcttgtgtatggaagagagtagagta

SEQ ID NO: 118767 - DNA, 575 bp, Homo sapiens
agccaccttaatgaccttatctaatcctaattagctcccaaagactccatctccaaatatcaccaacatataaatttgaagattgtttccaacacatgaaacatggggaacacattcaaaccatagaaaaagggtcctaggcagaggaaagaatttctggaaagacaggaaggtatcgcctacagtgaaattattgtgaaaatattgtggaaaatatagagtgggtgatggtccttaattaggagaaaataacccagagattccgggtcctgattgttagaataccttatttcatcttaaattttatccagaaagcatttgttaaacgccaactgtagatacacttagtttttatggcatttcaagcatcagtttcctccatcctccacgtgtaatcaatactgggactatctagatcagggaagatttcaaaaggcagaccaagggaagtgagaaggacatttcaggcaragaaagtaggttaacctagggatacaaacaggattgaagtggggaatcatgaatgctttgcatagcttgagtttgggagcttgtgtatggaagagagtagagta

SEQ ID NO: 118768 - DNA, 466 bp, Homo sapiens
gaattccaagccagtgggtcttaacttgtgaggtgtcgtggaagtggggcttgcagaacaatgctgcttggctccttggattcagccccctttctaggggaatgcatggatggatctcctgacttgccaggattcctggggcyggagtatgtaaaacttctgggtctcagtgtgtgactccatggctgctctgctgagtccatacagctttgtgtatggtgcccaaggccctggtggcatgggctcatgaggggatctcctaatcctcaggttgcaaagatccatgggagaagcatggtttcctgggtggggtcacacaatcactcaccgctttctttagctggggttgggagttcctttggctccatgccactcccacatgggctgtagccacaccctgcttttcttcattttccacggatcctagtggtttgcctagtcagtcccaatgtgagaacctggatat

SEQ ID NO: 118769 - DNA, 518 bp, Homo sapiens
tattgaagtaatgagataattggtgttcaaagtgccctgtggtgactggtgggattgtggcagtctcaaagtcaccactggagcaacaagaaactctccctcataatttgatcacacgtactgtctcgcctgaggatgcttctggtttataacttttgtactggtgtaattgttaatccagccccctttcattgtgcagactggacaactggttacctagagctcctttgccccttgggaccaagagttctcccatctatttctgtctggctctaagttttaccctaactcacaaagaggaaaggagttcaggacacagccctcaaccctgaaaccctaaggcaagaactgacagagacctgaagaagaatggttgtgaagtataggtctagggataaggagatgccttgaactgagcaaagggctgaggttatgggcaatgttggatcttctgyggtttggctttgggccagggtttcccaatatatgttataaggaaccattctacaacatattaa

SEQ ID NO: 118770 - DNA, 571 bp, Homo sapiens
cagaacaatgggagacatctcaaaataacgaataactcaaaacaaacaagagaagtgtccagccttacacagaatataaaaacaaaagcccagtatctaaagcaaagactgmaaatgcaataacaaaataagcataagcatgcatttatgcactaagagtggaaaaggaaaatggctgatcgttgtaaactaaagagaaaacatctgagagaaagggaagcgaggcagattacaaaggatatggccagtcaggtgtgctgccatcccaggaacccagatgatgtgaaacaatgaactgattaccaggccagaggatcattcctatttcctagttcacctgaaaaggtaaagggggaagaaaagagtaaaagagaaagtaaatcagttaaaggagagagggtgacaccaatggggaacaaagggaacactcacctgtctgtggaagccaaatgatttgaatttggagtctggttgagggtctcactcaggtccctgtagcttgttagccccttcatggtcatcatgaagttatcccaaaccctagaattggggctttgcttaggagggttct

SEQ ID NO: 118771 - DNA, 571 bp, Homo sapiens
cagaacaatgggagacatctcaaaataacgaataactcaaaacaaacaagagaagtgtccagccttacacagaatataaaaacaaaagcccagtatctaaagcaaagactgcaaatgcaataacaaaataagcataagcatgcatttatgcactaagagtggaaaaggaaaatggctgatcgttgtaaactaaagagaaaacatctgagagaaagggaagcgaggcagattacaaaggatatggccaktcaggtgtgctgccatcccaggaacccagatgatgtgaaacaatgaactgattaccaggccagaggatcattcctatttcctagttcacctgaaaaggtaaagggggaagaaaagagtaaaagagaaagtaaatcagttaaaggagagagggtgacaccaatggggaacaaagggaacactcacctgtctgtggaagccaaatgatttgaatttggagtctggttgagggtctcactcaggtccctgtagcttgttagccccttcatggtcatcatgaagttatcccaaaccctagaattggggctttgcttaggagggttct

SEQ ID NO: 118772 - DNA, 620 bp, Homo sapiens
tggctggggaggtggattgattcactgaggagggcagaatgagagtgaaagctattttgccaatgacgatgtgtaccctggagctcacattcctctttttggagaggcaagcaccactataactagggcagggccagcgtcctgcccacagatggccctgaaaacctctcattcaccaatgatctgggcttcaactccatcacattatatagatggaaaggactttacaggtgtccacagtctctattctaagcagttcactcctcgaaaacatgatctaaaggatctcaagatcccagggacatgacacgctcagcaaagtgacaagttttgcttgctcaacaagcatggagagtactgcctcctgtacctccttcttggagccttgcagcttatatcagcatccaggcagtaaggcgctctaccatcgagaaccctttccaccattgtccatcctgctattgttcattccatttcattgtggaatcttccagttttgatcacrcttgtgaacactgatagaaccaccaatgagagaacatactttaggagacattactataattcagaccagtagagtagtttacaacatgccaactgggctttatttgtagcctata

SEQ ID NO: 118773 - DNA, 448 bp, Homo sapiens
ttttttgtttgctttatattaattgatcctatcaatttcatataaaatgcatgaggtaaaattctctattgagtacagcttggactcatgtgagacaagcataaaataattagtctctaaagtgactgtgaagtaaatatctaaataaaataataaggkaataatcacacaagcatgcatcaagatcaacaagtttgatgacctccaccagacgtctgcttaaattgtttgaaaaacagccaggtcactgtggctggagcagaccgtggaaggcaaacagttatagacattgagctcatggaggtaacagacagtccatgtgagtggctagggtttctgtaagtcaatagattttactttctttttaccctaagcctggttcatgactagaagtggaattggtaaggtggttactagcatctagccctgagagattagaaaagctgaa

SEQ ID NO: 118774 - DNA, 633 bp, Homo sapiens
aattattcaaatttgtatctctctcatgccttaaatgatacttgcaacctacaaagaaaagaacatagaatatatactaacagtactcctaaaacaaaataatttctttttgcctgtattatgcttacaataaagaattttgctgaattattaggctattttttcttacttttaaaatgtgcagtagccttgggctccaggtcttatcagccattggtcaagaacctgattagaattttgcatcaaaaatagacaagagaacatgataccactctttatcttccagagataaaacatggaaggattattcagatgaagttgtaaagtaacaattttttctgagagtacttttgaaaagaaggagggaagaggtccttaggtaggttagcactagctctgtgccagtgtctgtgccaggctctgagcatagaggagggatccagtacttgccagtcattcccttcactaccattatttgattttaaaattaattttactatgttaagaggaggtcagctcttacggcacctgtagaatgatgyatgtcatagctaaaaggtatactttttgttaaccacagaagtagcagtatagggtgacagaagaactttgagcagaaacttggtgtattag

SEQ ID NO: 118775 - DNA, 633 bp, Homo sapiens
aattattcaaatttgtatctctctcatgccttaaatgatacttgcaacctacaaagaaaagaacatagaatatatactaacagtactcctaaaacaaaataatttctttttgcctgtattatgcttacaataaagaattttgctgaattattaggctattttttcttacttttaaaatgtgcagtagccttgggctccaggtcttatcagccattggtcaagaacctgattagaattttgcatcaaaaatagacaagagaacatgataccactctttatcttccagagataaaacatggaaggattattcagatgaagttgtaaagtaacaattttttctgagagtacttttgaaaagaaggagggaagaggtccttaggtaggttagcactagctctgtgccagtgtctgtgccaggctctgagcatagaggagggatccagtacttgccagtcattcccttcactaccattatttgattttaaaattaattttactatgttaagaggaggtcagctcttacggcacctgtagaatgatgcatgtcatagctaaaaggtatactttttgttaaccacagaagtagcagtayagggtgacagaagaactttgagcagaaacttggtgtattag

SEQ ID NO: 118776 - DNA, 254 bp, Homo sapiens
agcatgattagaagtcaggcttcatctgcaatccagggttcacatgaaagcacagtacatattttctagcakgaagtaaggtaggaatgggggcagaaataagattaagattcagagacgggaaaggagatgcacagaaaatgaatcaaagagctgccaagcccatttccatcactccttttgactacaaatgcagcagctgtcttcttgggatgtttgaaatgtgctccttcaacctctgtcaaagaacatta

SEQ ID NO: 118777 - DNA, 545 bp, Homo sapiens
gataagggagagtggaaaatatggatagtgccagcactaggatccctgatgaggtccttgaactgctgagttaaccaaccatggattctgctgacctctgattttcttatcacataagacgataaatggcctattttgagtcacttttagtgggattttccattacttgcagctagaagcatcctaacaggcatagctgcatttctaatttatactacattttttctttgatatagagtctattcccctccaaatctcatgtgaaaaatggatcccaaatgttggaggtggggtcagccgagtgggaggtatttgagtcatgagagtggatcccttatgaattgctcagtgccatcctcacagtaatgcatgrgttctcaggctattagttactgtaggatctgatttgctaaagagagcctaacacctcttcctcctctctttcttcctctctgtcacacatgtggcatgcttgcttcccttcgctttcaccatgagtgaaatcttcctgaggccccgcagaagcagatgatggtaccatgctt

SEQ ID NO: 118778 - DNA, 556 bp, Homo sapiens
ctatatcagaattgtcttaatcatcagaatcatctattttggaaaaatcaaattcatcaactaaatcttcagccaataactgttcaaaaatgatgttaacacatgtaggaatgctacgttttctaggatttgacattttcagtgattgagaattactatattttgtaaatgaaaatgctactaaaaacagaaggctataaataaaatgtcttttgtttccaaagttgatatattagagtgataaaataataataataaaagcaagatattttgtggcaaaattatctctgggtaaacactgcagccayaagtgctgccagcaagtattctcagggaaaatgtgaaaagggttgagtacatagaccattaacattacaatgcaactacacaatcaagctgacattaataaccagctaacagcacaatgataggatcaaagccatacatatcaatattaaccttgaatgtaaatagcctaattgcccccaattcaagggcacagagtgtcaagatgaaagaagcaagacccaacagtatgctatcctcaaaagaccca

SEQ ID NO: 118779 - DNA, 606 bp, Homo sapiens
ttgctaacagtgggattacccaagggtcaggatttaatgtgttaaaagtctacaaggttagctaattgaagccttgactcaatggtgacctatagtttatgagattgaaatgtcagaactttggtgcatactataatctttcaatttaaagttttgtccacaaagcagtaggaacacctgagagcttcttgaaaaggcagaatccttggccccaaactcaatctattgtcacaatcggcattcaaacaacatccccgtttgatttgtatgaaactttaaattcaaaaacactgcaggtagataaaataatccaaaatttctacctgrgcaaactgttcagctaacctgacgctgttaggagaccatttttcatctttctcttgtatttctgtagagaaatgttttgcgagtagagggacttactgctctttttttttctggactatatttttacttttccacaaatttttgtatagtgaacaccctcagaaaatagatgtagtatttcctctggagcaaaagtcagagacactcactatccagtataataatgttaatgtctcctatggagcaaaaggcagtcaggtttgctgccataaatgattt

SEQ ID NO: 118780 - DNA, 197 bp, Homo sapiens
ttctccttctttgggaacttctagtattcaactttacttacaagctttgtacattttctctgaatatttttagatttwaaaaaaaattctttatagtgtgtcatacattaggtatttctagctctgcatctctttcttattactcatcaagtcttttcagtgtgaagatttgtttttactctccattttgaaaaaaa

SEQ ID NO: 118781 - DNA, 502 bp, Homo sapiens
atatctctgttctgttccgggatccaattctgtctgattcctgcatttagttgtcatgtctcattagtcttttgtgatctttggcagttccttagcttttccctgtctttcaagaccttgatatttttgaagagtactggtcygttattacgtagaatgctcttcaatttgtgcttgttttatgatttactgcatttagatggaagttattcattattgggaaggatattacagaggtgagatgcttttctcagtgtatcacataagaaggcatatgatgttggaatctctttatcccaacgatgttattcttgattctttggctaggatggtctcctccagaattcttagctataaacacaaattttccctttggaattagtaaatattttgaagagagaatttaggactatgcaaatatctggtttctattatatttgggctatgcaaatatcttacatttttgttatgttgttttagaatttaccactttatagtgcct

SEQ ID NO: 118782 - DNA, 572 bp, Homo sapiens
cctctacaaagtgattgaccaatgagacaaaaccaaaaaatctatactcaagtgatagtatacaagaatgacccctgcctcagagaattgtgatgagcytcaaatataccaatagcgcaaacagacatacggacatgtgtgtttcacaaattagttatcctaccccctagaaaaaaaaaaaacagagaaatgtgaaagccaagacagcagggagtcacaaagatcaggctatcaactatagatgctatagagattttgacaaaaagaatgccactattgaccttttagagaactgcttctggagggtgatgaagatcaaagccagttaatgcaaagagttaggaaagggaagcacaatttcgcaagtatagccaataggcgtaaatgacacatttgagaggcttgggaaggaggatgaagggagaaaactgtagcgtttggtgaaagttagtctgcttattttttaagaaatggaactctgtttaaatagcaggtttctctagtaagagggtaaaaattaaaatgttctagaacctaccataactctaacctgatgccaacaggacaagtac

SEQ ID NO: 118783 - DNA, 596 bp, Homo sapiens
ctctttattttttatttttattttatttatttatttatttattttgaaatggagtcttgctctgtggccaggctcgagtgcagtggcacgatctcagctcactgcaacctccgcctcctgggttcaagcaaatcccctgcttcagcctcctgagtagctgagactacaggtgcatgccaccatgcccagctaattttttgtattttagtagagacagggtttcaccatgttggccaggatggtcccgatcccctgacctcatgatccgcccgcctcagcctcccaaagcgctgggattacaggcrtgagtaaacgcacctggccaggtggactctttaaacaacgctaaagcactcccagcagtcctgccttggttttctgcttaaggttttcatttataatagtcatattcacttatcaactcattaatgcggcgaagacttataaggaactagtaagtgccagtcccaatgctcagcaatggggaaacatttacagacaaaaattagcaggatcccagcccttttagagctttcagcgtagtggaggtaataggcataaccaaatgattgtacaaataaatgtgaaatgaaaaa

SEQ ID NO: 118784 - DNA, 550 bp, Homo sapiens
aggaggagagagaaattaagccaaacaaatactcttttcagtggatcagaaacatatatcccactgtctttgaaaagcgagtaggtctgaaaataaaacttctaaaagtttttgaagaccccccaaaattggatctccaaaccactccccaaactggaatccagtttgagatgttggaataaaagtagatttgamctttgtcacccggaatgatgaaggatctaaggacggtgagaattctcatatggcacttgaaatggccagctgctgttctgatcactatataggtactatttaatagtttcagaaacatactaggtaagtgccattattaccactgtttaaccactgaggcagcggagatatacggagagaaatgaagtgacatgctcaagatcacacagcctgaagttcatagaatcccacaaaatgtggctgaggtaaaatatcatagtcccatctatgcttttctttctctgcatttatgtggccaagagcattttgggaaccagtagtattttggcacaactccagatatgtgctcccgtgt

SEQ ID NO: 118785 - DNA, 550 bp, Homo sapiens
aggaggagagagaaattaagccaaacaaatactcttttcagtggatcagaaacatatatcccactgtctttgaaaagcgagtaggtctgaaaataaaacttctaaaagtttttgaagaccccccaaaattggatctccaaaccactccccaaactggaatccagtttgagatgttggaataaaagtagatttgaactttgtcacccggaatgatgaaggatctaaggacggtgagaattctcatatggcacttgaaatggccagcygctgttctgatcactatataggtactatttaatagtttcagaaacatactaggtaagtgccattattaccactgtttaaccactgaggcagcggagatatacggagagaaatgaagtgacatgctcaagatcacacagcctgaagttcatagaatcccacaaaatgtggctgaggtaaaatatcatagtcccatctatgcttttctttctctgcatttatgtggccaagagcattttgggaaccagtagtattttggcacaactccagatatgtgctcccgtgt

SEQ ID NO: 118786 - DNA, 543 bp, Homo sapiens
gctcaacttattcctcaaggctaaagcaaatctgaaatcaaatctaaacaaatgatgcacataaagaaaaatccatagagtaatccaatttacaaatacagaacaaaacttttaaatatgatattcataaatagtatcaggcagactttatcttaagaatgaaataatagtttaacatgagtaattatgctgaagattaaatttttgaaaagatgattatcttaatagatgtttaaaaaatgatcactttaatacctgttgatttgagagaaaataaatttcaaaagatttagtaagctaaatatagaaggacaattgttgaaccatgtgtaagatgtttataagacccagaacaacccatatatatcattttctgttaaactcaggaaaaagaagacacagrtgtccactttgattacttacattcagaatctcatagataaaaatctgttaaagtgataaaatacattaatcttagaaagaaaaaggcaaaatttcaacttaactcaaatacccaaactctgtgaagcttaccttctttta

SEQ ID NO: 118787 - DNA, 507 bp, Homo sapiens
caatttgttcagttcttttggttgtattctcckattatacaggagccctattggtatggtaaagtatgggggatgagaagccttgtgattaggttttaatattttaatgagtcttcacgagtgcttatcagctctcctaaccgctctcctttgtcgaggaaataaggctaaagggggccagagtttggcattttccttcctttaagccagttaggctctgataaaataatttgtcctgaaggcaggccttgttaagaagaatagaatgctctggtgtattttaaagtagctactattcccctcccattccagaagtaagaaggttttattctccagtcttcactgtgagaatctggtatagctcctataggtaaaactcacaaaagtgtgagtggtcctctaagactggacctacctaatgtttttaattcttaaacttgtctacactcagtctccagcaattcaccaattgcactgtaggttttattattttggaactagtttcca

SEQ ID NO: 118788 - DNA, 580 bp, Homo sapiens
ggcagtatttataataacacaacattttatcccagcagtatttataataacaaaacaaaacatgtaagttaaatacctaatgctgtctggaatgtagtaagaactacgtattacgtatgtgtgcatatatatgtatatgtatgtgtatatataatattcaatgaactatctatagttgtatatatgtaggaactattttatatatattcactgcatcatatatgcatataaaaatataaagccattaatattatagaattctattactctgcatgttgttaagtaatgtatgtgaaaaagcagcctacaaattagtatgtaaaaaatggtatttttgcaaatatagtcatgtgtgtataaaaaatatcaggaagaaccagtaccaaaatgtttatagtcctgacctctaggtaacagaattattaatataaacaattttattttatctttcgcttatttttactttctaatttcttctacaatgagcctgtattacwagtgtaatttttaaaaaatttactgtattatgtttaaaaatcaaagaccacctgcttattagaactatcctgttagttgcagg

SEQ ID NO: 118789 - DNA, 476 bp, Homo sapiens
accacagactgcccatcacagacttaaaatgcacctcctgcctttcttgcttcctctctccctcatccttagttctattcattcctttattctcagaataacctattgactygatctagaaatattttttgcaaggtatcagtaaatgtgaagcaccccactccttccagcctaaatcataaccaaagacaagaagaaaatgtttgaaagaaagagctagctctagtggctgggtgaccactatgtttccattgacccacacacctaaaacaactcctacttcctaacgctgtccaagtagctgaacctgaaacatggtactcttggacatttttaaactacctggtccagtcctttgcccagttcttaggcatagctgtaactaataaatgactgaagtgccttgctccttgaagtgtggcctgcagatctgtggactcagcatcaccagagagcttgccagaaatgcagaattc

SEQ ID NO: 118790 - DNA, 645 bp, Homo sapiens
atttccatataataatgagtaaactcctaaactttctcttattctttcatttcaattgatgacaataatcttaaacctaaaattttagtgtgatattctaagaatgcaggccttaggttttagaaaagaaaytttcaggaaaaaaaaatttaaagaatgcaattttatgaagtgaaaaggaagaaattttaaaaatctcttaagataccatttttgatacttctcttgatttgtaccacataagaaaaagagagatatatttaccaaaaagttaatagtaataaaaaatacccaataataaaacaggtctcagagttcatatttcttcatgaactttcaatttatgtattttatgctgtcaaaagcaatagagtcagctatgcttaagtttatggctttgagaaagcctgataagattggacatttaacaaaacttgtgacggcatcaggatgaagcccaccattttcttgtgtcttgctggcccacagcgactaatttaaatgtttgttcatataaactaaactggtagcaggaacaaatcactttgattggtttacctgcttacataagaagccaaaccaccaggaagatgacagccaaaagttgatagataaaaatgtcaacaaactctcttccattttttg

SEQ ID NO: 118791 - DNA, 526 bp, Homo sapiens
acacatgttgaaaattcatatattagcagcagaaaattaagcagaagcagagagcatatcctacatgcatctggccttagatcctcttccccaaggacactracctctgaatagcgttgacagggaaggtcatttatctatcctaagaaagtctgccagcactttccttgaactcataaaagggtagggtggtcagtagcagcacttcactcttaatcttctaagttgctgccaagttactcatcaccataactagacctaggagatgttgtccttgtttttgcattcaaaagtctatgtatttctttactatctacaaacttcaaagtattctgcctcgtcaggcgagggcctggtattccagtgcccaatctgcgggtaactaacatacatctcaggtcccaaatgtgaactcagacgattacaccaggtaattacaaaccagaggcaaacttactaacaggataatgctgacaaataattgaaagagaagaaagttgtctcagcatttttctttatgaagcaa

SEQ ID NO: 118792 - DNA, 554 bp, Homo sapiens
cattctccaaccaacatgatatattagttaaggttgttccacatccttgtcaacatttgatattgccagggttttttttaattttattttasccattctggagggcatgtatcaatatctctttttagttttaatttgcatttaagttgaattttgaacaatttgatacatgcttcttggccaaatgggtaccctcctttaaggatattcaagccttacacattttcaaattgggttgtttttatttttctcattgatttccagggtattttaatgaatatttcctttgtttatgtattagcttcctcaatgttatgccacttaataaacaacctcaaaaatctcagagtgttataacaacaaatgtatatttcattctcactttatgtgttggttgcagttcatttacagctcttctggactcctctagttcaagctaggctcatttttccttggttcagcttggctgcatgtgtcttctcactctaggaaacaagctgaagatggagccactatctgagatatccagttctcatggttgaaagtcaaagcaa

SEQ ID NO: 118793 - DNA, 560 bp, Homo sapiens
aaaatccttttctcttcttattttcttgtgctgatttgattcaagactaagccttagttttcctatctctaagacaagaatattttcctaccttgttatcgctgaggaatgtggagaatttgaatggtgaaagatttgatcttagcagcaagaaaagaataaattgctcacttaataaattgccaggccacttgggtactatttagtagattaccttttccagagcactaaatgatagtaaatggtaaatggcagtaactggaagagttaatgcagctttgatctcttgaactgagtctctgtagtttccttagaatgagatggaattatttctttccttttatctgaggctcggtaaacccttgaaaaaggaagacattattacttttttccatcttgcatgaccattagaataaaagggactttataaccctacacatacacatatacacactgaaagtggccattacaaactccttaaagaattcttttaaaagtaccatttgtcattcrattaattaaaaatgcttactgagtactgactacgagcaagggtttgt

SEQ ID NO: 118794 - DNA, 581 bp, Homo sapiens
gtgcaatttttacatgctttctgagggtcttagaaccatgcattttctccaaaatatacaaccttcaaactgaaagtaatctcaatatatgctgccaaaatcatgtgaaatgaaatcttattttgccagccctaacaaaattgtgaaaaaggtcaggcttgtctttcattttttcattctttgtcaayttatctcaatctatatacatgcctgtaagatatatcctgaattttatcatgtctcatcacttccatagttatcactctagtcaaaatcgccatcatcccttattaggactattggaacagcctccaagatggtctctctgttttcactcttgtttctttattctctattccataagcagacagagtgatccatacagaacataaatataatcatcttgtttctctgctctcccccacagtggctttccatcccactgaaaagaaaatccaaagtgtttaccctggtccctttctacctctccaatttcactcactgttccctggccacactggactctgctcttacttcaacatgtaaaaaacattcctctacccccgccaccccaaaacaag

SEQ ID NO: 118795 - DNA, 581 bp, Homo sapiens
gtgcaatttttacatgctttctgagggtcttagaaccatgcattttctccaaaatatacaaccttcaaactgaaagtaatctcaatatatgctgccaaaatcatgtgaaatgaaatcttattttgccagccctaacaaaattgtgaaaaaggtcaggcttgtctttcattttttcattctttgtcaatttatctcaatctatatacatgcctgtaagatatatcctgaattttatcatgtctcatcacttccatagttatcactctagtcaaaatcgccatcatcccttattaggactattggaacagcctccaagatggtctctctgttttcactcttgtttctttattctctattccataagcagacagagtgatccatacagaacataaatataatcatcttgtttctctgctctcccccacagtggctttccatcccactgaaaagaaaatccaaagtgtttaccctggtcccttkctacctctccaatttcactcactgttccctggccacactggactctgctcttacttcaacatgtaaaaaacattcctctacccccgccaccccaaaacaag

SEQ ID NO: 118796 - DNA, 508 bp, Homo sapiens
aaacatttaaaatataactgtaagggagaaaaagctttgtttgatgctagaacataattagacgttttagggttttattttaatttaaattcaacttgagtttttggaaygaaaatgccaatgagacactaagaacttttattaaaaaagatggccaaaaagtcgaattggaaaagatagaaatatgaaaatattcctgtgcatttataatggctgacattgctatatcatgtcattggtctgctgaacgatattcctgtaaactatgatcaaaatcgtcatgatttctagcacatttatttaatgtttattctatccaagtctctgctgagagccacaggagacgaataagacagggcctatggcttcaagaaacttagaactgtattgtagagctaggatttaggtacatagaaaagtaagcataacaaagggaagattacaacggatgccaagtttgtattcacacaggaattcagagaaagaagcggagtctctgctcaagaag

SEQ ID NO: 118797 - DNA, 535 bp, Homo sapiens
gcatcctaatgtatgagattttgttttagcccatctgacacaccttgttttagtggttccagatgacgaaacacatcaaaactgccattgacagagcaaaatgggccaaagcttttctaaaccattaaaaaaatttattaacaacactgtatgaaagagggaaaattattgtcatatgaagaagtatgcagcyaaaatgtggcattttagaggaagtgtcaggcagttaatgaatataaacgttatattatttttctggatattgtgatgtttgtggtacttgtcagcttttaatctttgtaatttgtcatgaattcttttttatcttaaagaaatattttggacctaggttgacactgacagttatttcttacagacagtctcccaaatagtatatgcttcaggcattacaagacctggatttatccttgaactgtactgtatagcttcacaggaactatggtgggttctggggaaacatatattaaatatttagaggtcacaaaaccctacagaatgtgtggaagaaagtctg

SEQ ID NO: 118798 - DNA, 450 bp, Homo sapiens
agagatatttgaaaggcatgtggtatgataaagttcaagtgacataaaattaatagtaatatcatgaagcaaaaagcagaaatggaaagatatagaacgaaaggggataatcacttgaatcacaagattatatatttgagttcagtacactgaaatatttcatttttcaatatgaaagacatayagtgacctctaggcactcattttaatatacaagagccattaaaaaggcacttcaaggtgttagcaggatctactccattataaccatggatgggaggtttgcattcactctgaaaagagtttcctttgcagttttatgtgagaaaaatacagtatcaaaatgattatattgtgatacagaatctccctattaaccaattgcaatgacccaaatatgaccccacaagaaatgaatctggtgcatataactaacgagatgggtgaaat

SEQ ID NO: 118799 - DNA, 501 bp, Homo sapiens
gctgcgttacattggcaagctgtaatgggaaatgtatttgtcaccctaggcaaactggaaaggcaggtatattgaattcagtaatgctgagtaattaagccttcacttacaacccttatattagataattcaacttaataagttaagtcattttccaagtgtttgttaatgtatcaaaaggatttatacatttcacaaacggggactcaagctaaggtaaagatttataaacacaaccaattcactagagaaagaattttaagcttgtttttcttgtttttccaaacctaactctttcatggaaaaaaataaaggcaatattataaaacagatgaaagtgcaggtaattaccttaagtgacattgagaagcctagagctcacctggtccacactatttgataakccatgtcacccctcatttacttccacggttcccttcaagattgaagagctgtctgaataccacagtcttagtatattatatttttgtaaggaaacct

SEQ ID NO: 118800 - DNA, 556 bp, Homo sapiens
gagggaagggtaaagaacagtgggccgggaacagtggctcatgcctgtaatcccagcactttgggaggccgaggcgggcggatcacttgaggttaggagttcaagaccaggctgaccaacatggtaaaatcctgtctctactaaaattacaaaaattagccggatgtgttggtgcacgcctgtaatccttgctacttgggaggctgaggcaggaaaatcgcttgaacctgaaaggcggaggttgcagtgagctgagatggcgccactgcactccagcctgggcaagagatggagctccgtctcaagaaaaaacaaaaacaaaaaaaacagtgcccagatcagataaagaaattaacatttatatatattaatatgcagtaagcccgggcaaagtttgtatctaatgcccctccccttaatttagttgaatctgtattacttagtcattaaagagggaaggaatttgaattaatgggtagaaacaacataagaaacaaccatacgtgacataccctgcaagtrccaaaatggttgctacaaatttgtagatgaattc

SEQ ID NO: 118801 - DNA, 561 bp, Homo sapiens
gctattataccaaagggaattctgattctggctaaacactacatctgaacttgcttgggaaggtcactaaaacaaccagccagtttcctgccaacaacttagactattatttactggaagggtcaaaatgcctttaagtattagtaatgaaatttataattgactaatttgaaaaaagaaatctctgggtaggaggaggagggaagatagtggttgcagtactggaacagctgggtgcaatgtggacgcagtggccttggcrggtctccttcatctcagcattttaccccaatcccaggtccacacaagtgcttctcttgacacttctcaaaaatgggagaagaagaataaaaccgtttatcctccacaactgcctgcagaacctcagagaccagcagaaatctaccaataccaaagaaaactaaaagacagcaaagacaagatgttgtatttggcaaaattggtaggagaaatgtccactgaccaggcttagctcaactgggattcagcgacaaaaagggacccaaatcattaaagatgttctcttagaagcacaagacg

SEQ ID NO: 118802 - DNA, 243 bp, Homo sapiens
gattccattcgatgatgattkcaatcaattttattcgatgattccattcgaatccattcgatgatgagtccatccatttcaatttcatggtaattccattcgtttcaattcgatggtgtttccatttgattcattcgatgttgattccattagcttccgttggatgatgattccattcgggtccattcgatgatgatcacactggatttcattccataattctattcgattccattcgatgat

SEQ ID NO: 118803 - DNA, 243 bp, Homo sapiens
gattccattcgatgatgattgcaatcaattttattcgatgattccattcgaatccattcgatgatgagtccatccatttcaatttcatgrtaattccattcgtttcaattcgatggtgtttccatttgattcattcgatgttgattccattagcttccgttggatgatgattccattcgggtccattcgatgatgatcacactggatttcattccataattctattcgattccattcgatgat

SEQ ID NO: 118804 - DNA, 243 bp, Homo sapiens
gattccattcgatgatgattgcaatcaattttattcgatgattccattcgaatccattcgatgatgagtccatccatttcaatttcatggtaattccattcgtttcaattcgatggtgtttccatttgattcattckatgttgattccattagcttccgttggatgatgattccattcgggtccattcgatgatgatcacactggatttcattccataattctattcgattccattcgatgat

SEQ ID NO: 118805 - DNA, 243 bp, Homo sapiens
gattccattcgatgatgattgcaatcaattttattcgatgattccattcgaatccattcgatgatgagtccatccatttcaatttcatggtaattccattcgtttcaattcgatggtgtttccatttgattcattcgatgttgattccattagcttccgttggatgatgattccattcgggtccattcgatgakgatcacactggatttcattccataattctattcgattccattcgatgat

SEQ ID NO: 118806 - DNA, 542 bp, Homo sapiens
tgaattccatttgatgacaattccattcaataccaattgatgatggttatttttgattccatttgatgatgattacattcgattccatttgatcataattccattcgattccactcgatgattccattcgattccattcaatgatgattccattcgagttcattgactgttccattccattccattcgatgattccattcgagtccattcgatgattctattcgattgcattcgataattccattcgattgcattcgataattccattcgattccatttgaggataattacatttgagtccattcgatgattgttccattcgattctattcggtgattccattcgattccatttgataatgattccaatcgagaccattcgatgattccattcaattccattcaataatgatccytttcgagtccattcaatgattccattccagtccattcgatgattccatctgattccattcaatgaatccattcgattccattctatgacgattccattcatttccatctgatgatgattccattcga

SEQ ID NO: 118807 - DNA, 498 bp, Homo sapiens
acctgtaaatgtacagtgctctcctttcttctctcagcttctttagtagatataaaactatataaataaaaattataacaatttattgttgtgagtgtagaagtgatatgtgtaacaataatagcataaaatgtgaaaagatgtaatagagcagcacaagggagacgttgctacctcactgaaatktagtttctataaatcagtctttaattgcgtgctgactgccggattgtttcccataacgccttgtggcttacatttctccagtctgacttgatcaaatttgggcccttttgcaggaatagtttcactggccagcctatgtagtgtattctgatgcaaggaaggctctccttagctgccttttctcctggttcactattgtgaaccagattgttttacaatttagcttgtcaccttctaggagctaccagcctcctcttaattgtttatcaccaaaatgttcattgttttctagagcacccttgggcttaagct

SEQ ID NO: 118808 - DNA, 498 bp, Homo sapiens
acctgtaaatgtacagtgctctcctttcttctctcagcttctttagtagatataaaactatataaataaaaattataacaatttattgttgtgagtgtagaagtgatatgtgtaacaataatagcataaaatgtgaaaagatgtaatagagcagcacaagggagacgttgctacctcactgaaatttagtttctataaatcagtctttaattgcgtgctgactgccggattgtktcccataacgccttgtggcttacatttctccagtctgacttgatcaaatttgggcccttttgcaggaatagtttcactggccagcctatgtagtgtattctgatgcaaggaaggctctccttagctgccttttctcctggttcactattgtgaaccagattgttttacaatttagcttgtcaccttctaggagctaccagcctcctcttaattgtttatcaccaaaatgttcattgttttctagagcacccttgggcttaagct

SEQ ID NO: 118809 - DNA, 585 bp, Homo sapiens
gtggtatcatttaattagcagccacccaatggtggctcagaagagatgcattctgcttcttaagaagttaaggccaacttggtctgtaccagaaaaacacactttaacctatgttgtgctccctccctcctcccttcccatctttcacacatttccatacccccttctatcctttgctcctagtatttctccttttattctcaataaaaccagtcatttaactttaaaatctgtccaatttcagttgcttaaatgtatgaacttgcttattcctgtaaaataagcagccctcacatactctgaaaacaaaaaaaggaaatcaattcagatttatatttttaaagaaaaaagtgttctaaaatttgatgaaaaaatagatacacaattttttttaccacagtgattaaacaaaatacgactttcaactaaaatataaaagaaactgccatctcaaagtatcatatttatatagaaatatatagtgaagaaaggcaaataaaagtctcataagtacctgaaattaaaaaatacaatacaacataatacaatattacrgagttatgaaaaaaaatctagcatgttact

SEQ ID NO: 118810 - DNA, 570 bp, Homo sapiens
aatcctttactcattaagaggaagacttagctttccaaacaatctgtcttctgtcttcttcttcttttttcagtatttacaaggcaaatgaaaaattttcattatcctttactagtacacgtaaatcttgttcataggagagaaagccaattttccccctttcattagtcaactattaatgtcaacctcagtttttaaaaaataaaacattatagataattctgtctaatcttaaccagtttgaccatgaggtgagattcttataaaccctttataactcttttcaaatttttgttagagaagatcagtaccttaagaaaaccttgttgtgcttttgtttcatgctcaatttatggaaaaaccacataatgcccttttgaatttagtcagtatgttcacgtaaagaatttcttgtgcaagattaattttacaaaccttccacaacttgtttaaacctttagctttatcttatctaatttaaaacaatwctttaaccttctaagctaggcacaaatttatattcccatgccttcttataatattttactaaaaacacattttacttacctt

SEQ ID NO: 118811 - DNA, 603 bp, Homo sapiens
agaactgctgtagaattcctctcctatcactgatactaaacttgtaatcctatctgataatttttagtgtttcccaatttctttggagtaaatactcctatcatggccaatttcaygctactaacctgatgccactgaatgtggagttgggaggagatgtacacaatcaactcttgagagccagtattaagtggttccaggtcaccactggttttgtgagaggaattcttccttgatggcagaaagtgctggttctgttctttacattcaaatatcactttacaataagattggctttccaaaaacaacattaacagcctactaaaagtggccaataagtcaatcaccttaattatattttgggtgtaaagtaggaatatacaatctacaacttaaaaagccttttctgtggcagttggaaaactgctcaagtgaattggggctagtgtcctacagtgcctgtgcacatgaaactaaaccatacaaggtgttaagatatacatgttctagtctgaattctatattgagtcaatggtggtgctctagtgattagttctattagtggaggtgtttatagtctatatgggttgtgcagagtaggct

SEQ ID NO: 118812 - DNA, 603 bp, Homo sapiens
agaactgctgtagaattcctctcctatcactgatactaaacttgtaatcctatctgataatttttagtgtttcccaatttctttggagtaaatactcctatcatggccaatttcatgctactaacctgatgccactgaatgtggagttgggaggagatgtacacaatcaactcttgagagccagtattaagtggttccaggtcaccactggttttgtgagaggaattcttccttgatggcagaaagtgctggttctgttctttacattcaaatatcactttacaataagattggctttccaaaaacaacattaacagcctactaaaagtggccaataagtcaatcaccttaattatattttgggtgtaaagtaggaatatacaatctacaacttaaaaagccttttctgtggcagttggaaaactgctcaagtgaattggggctagtgtcctacagtgcctgtgcacatgaaactaaaccatacaaggtgttaagatatacatgttctagtctgaattctatattgagtcaatggtggtgctctrgtgattagttctattagtggaggtgtttatagtctatatgggttgtgcagagtaggct

SEQ ID NO: 118813 - DNA, 551 bp, Homo sapiens
acctggaaagagaaaggatttttgattgaaaatagaggctacttatgactcattcaaaggagtttttcctctccttcatcttatttgcctagtgattttgtcttatatgacactttggagcctactgtgagatgactgcttcacactggatctttttcaaatatttttcaaggacaaacatccttcctacaggttttctcatctgtaatgattgtcttgtctggggattgtattctgattaattcaacgttagctttctcactgcttcagtggattccaaatttgtcatagttaaaaaaaaattctcctgggaagttttataaaagaagttggtgaagagagggcttaggatttattctgctgaccaatctttagaatgtggtaggggactgaggcacacaaaaaagaaaaatggaaggaatgcccaattcttatgcattctcataggtcaggcataactcaggrgttttgcagaaatttcagtgattgttgctcacatggaggttttaccctgcagtcaccatccaattgagcaaaaagcagttaaaagg

SEQ ID NO: 118814 - DNA, 596 bp, Homo sapiens
tagttgaaataatgaactaattaaytgtttatagaatccagtctttgtgctgagtatttttagatgttttgtggggagatctctcttgatcctcagcagaattagaaaaatagatattgtttgaaattagtaccaggaaccttttcagtagtcaagatttctccagtttccctggagagaaggaggcaattctgctctaagcatatgagagatttatggcccttacaatgcatactgacatttcctcatatccagctcaggagagtaaatctttacaattaatatgagaggtagaaacagtggtaccaggctgagtttgacttgctggcataagtgtttggttctcacagaattaaaaaaaaattattttagatggcttcctgtatttaataacttgaagatttcccacataaattttgattcgtcctgttaaaaagtggatgatcctataatgtcaggtttatattcctttaggtcaccaataactggagttgaataccagctatttcatttgatagcccaagtgtcttctacatagcattagcattggaactccctatttttaaaaaattgtcattttttttttaacttttaag

SEQ ID NO: 118815 - DNA, 538 bp, Homo sapiens
atgcatactgacatttcctcatatccagctcaggagagtaaatctttacaattaatatgagaggtagaaacagtggtaccaggctgagtttgacttgctggcataagtgtttggttctcacagaattaaaaaaaaattattttagayggcttcctgtatttaataacttgaagatttcccacataaattttgattcgtcctgttaaaaagtggatgatcctataatgtcaggtttatattcctttaggtcaccaataactggagttgaataccagctatttcatttgatagcccaagtgtcttctacatagcattagcattggaactccctatttttaaaaaattgtcattttttttttaacttttaagttcagggctacacatgcaggtttgttatgtaggtacactcatgtcatgggggtttgttatacagattatttcatcatccaggtcttaagcctagttcccattaattatttttcctgatccccttcctcctctcaacctccatcctctgataggctccatcatgtgttgt

SEQ ID NO: 118816 - DNA, 634 bp, Homo sapiens
aacttttagtagaaaaatgtggtaaaagagtgcttttggtaagctttgtgtagyttaacatcagcatgaagtagaaaaaatctttaaaaatgtaaacaaacaaaaccatacaccaaaaaaactaatattcaccagtgcatacatattgatctttgtgttgggagagtctaaagcagaacatttggtgaacttgataaaattattttaatcacattggcatactgataaaattatttatatttggccaggtgccggggctcacacctgtaatcccagcactttgggaggctgaggtgggtggatcacgaggtcaggagttcgagaccaacctgaacaaatggtgaaacaccatctctactaaaaatacaaaaattagctgggcatggtggctcatgcctgtaatcccagctactcaggaggctgaggcaggagaatcccttgaactcaggagtcagagggtgcagtgagctgagatcgcgccactgccctccagcctgggtggcagagtgagactatgtcataacaaaaaaaatttatttatatttaatttgactaaaacatgttcacatcttaaaaatactgctttgtaccatgaataataaatgtaaagtctttatcctcaaacggattctga

SEQ ID NO: 118817 - DNA, 634 bp, Homo sapiens
aacttttagtagaaaaatgtggtaaaagagtgcttttggtaagctttgtgtagtttaacatcagcatraagtagaaaaaatctttaaaaatgtaaacaaacaaaaccatacaccaaaaaaactaatattcaccagtgcatacatattgatctttgtgttgggagagtctaaagcagaacatttggtgaacttgataaaattattttaatcacattggcatactgataaaattatttatatttggccaggtgccggggctcacacctgtaatcccagcactttgggaggctgaggtgggtggatcacgaggtcaggagttcgagaccaacctgaacaaatggtgaaacaccatctctactaaaaatacaaaaattagctgggcatggtggctcatgcctgtaatcccagctactcaggaggctgaggcaggagaatcccttgaactcaggagtcagagggtgcagtgagctgagatcgcgccactgccctccagcctgggtggcagagtgagactatgtcataacaaaaaaaatttatttatatttaatttgactaaaacatgttcacatcttaaaaatactgctttgtaccatgaataataaatgtaaagtctttatcctcaaacggattctga

SEQ ID NO: 118818 - DNA, 634 bp, Homo sapiens
aacttttagtagaaaaatgtggtaaaagagtgcttttggtaagctttgtgtagtttaacatcagcatgaagtagaaaaaatctttaaaaatgtaaacaaacaaaaccatacaccaaaaaaactaatattcaccagtgcatacatattgatctttgtgttgggagagtctaaagcagaacatttggtgaacttgataaaattattttaatcacattggcatactgataaaattatttatatttggccaggtgccggggctcacacctgtaatcccagcactttgggaggctgaggtgggtggatcacgaggtcaggagttcgagaccaacctgaacaaatggtgaaacaccrtctctactaaaaatacaaaaattagctgggcatggtggctcatgcctgtaatcccagctactcaggaggctgaggcaggagaatcccttgaactcaggagtcagagggtgcagtgagctgagatcgcgccactgccctccagcctgggtggcagagtgagactatgtcataacaaaaaaaatttatttatatttaatttgactaaaacatgttcacatcttaaaaatactgctttgtaccatgaataataaatgtaaagtctttatcctcaaacggattctga

SEQ ID NO: 118819 - DNA, 586 bp, Homo sapiens
gttgcagccatgtccaggctgacactgaggaggaccccaactgtcacaagcaacacccgtcaaacacagccacccacctggggacagatcaagaagctgtcacagatggtggaagaaaacctgaggaaagcaggacaatcagtcacaatgaataacttaatggtagctatgatagtggttatcaccattgctgtgagtattccttcaataagggctggtaataatgcctggatgcaatcactctatgacacagttacacatgctttctgatctccgtatttaccataataaatctgctcctataattgaggcatactgccctcaaaaacctatttgtaaacaggattggacccagtagaaaaaatgaacgtacttatttaggaagattgctttgcagaacaggcagaggtgctgcagaatgtttcctatggaatcattattaattgatcccctaargggatgtttagcttgaattgcacctctcagtctgcatgccacggtcacactatgttcaggtgatctgaacaaaatggtcagatggtagatataataataagtatggcaaaagttcctattatctggaacc

SEQ ID NO: 118820 - DNA, 632 bp, Homo sapiens
tttctgacaaccccaataggtatatagaagcatttctgaatttaactcaggtgtttcacctcacatgaaaggatgttatgctgcttctaaaacaaaccccaaccacagctgaaaagcaggcagttctgcaggcagcagaggattttggagatgagcaacawatctcctataatacgccaaaaaggaaaaaagggagatagggaaagtgaagaaatagcagaaacaccatttccaataggaagtgaagcagttcctcttgacaacccttggaaccccaatagctctgcagatgaatggaaaaggaaatactttttttttttttaagatagagtcttgctctgttgcccacttgctggagtgcagtggcccaatcttggttcactgcaacctccacctcctgggttcaagccaattctcctgcctcagcctcccaggtagctgggattacaggtgtgtgggaggacacccagctgatttttgtcctttcagtagagatggagtttcatcatgttggccaggctggtctcgaactcctgacctcaggtgatccacccacctcggcctcccaaagtgctggggttacaggtatgaaccactgcgcctggcagaaacactttttaatatgcatataa

SEQ ID NO: 118821 - DNA, 632 bp, Homo sapiens
tttctgacaaccccaataggtatatagaagcatttctgaatttaactcaggtgtttcacctcacatgaaaggatgttatgctgcttctaaaacaaaccccaaccacagctgaaaagcaggcagttctgcaggcagcagaggattttggagatgagcaacaaawctcctataatacgccaaaaaggaaaaaagggagatagggaaagtgaagaaatagcagaaacaccatttccaataggaagtgaagcagttcctcttgacaacccttggaaccccaatagctctgcagatgaatggaaaaggaaatactttttttttttttaagatagagtcttgctctgttgcccacttgctggagtgcagtggcccaatcttggttcactgcaacctccacctcctgggttcaagccaattctcctgcctcagcctcccaggtagctgggattacaggtgtgtgggaggacacccagctgatttttgtcctttcagtagagatggagtttcatcatgttggccaggctggtctcgaactcctgacctcaggtgatccacccacctcggcctcccaaagtgctggggttacaggtatgaaccactgcgcctggcagaaacactttttaatatgcatataa

SEQ ID NO: 118822 - DNA, 632 bp, Homo sapiens
tttctgacaaccccaataggtatatagaagcatttctgaatttaactcaggtgtttcacctcacatgaaaggatgttatgctgcttctaaaacaaaccccaaccacagctgaaaagcaggcagttctgcaggcagcagaggattttggagatgagcaacaaatctcctataatacgccaaaaaggaaaaaagggagatagggaaagtgaagaaatagcagaaacaccatttccaataggaagtgaagcagttcctcttgacaacccttggaaccccaatagctctgcagatgaatggaaaaggaaatactttttttttttttaagatagagtcttgctctgttgcccacttgctggagtgcagtggcccaatcttggttcactgcaacctccacctcctgggttcaagccaattctcctgcctcagcctcccaggtagctgggattacaggtgtgtgggaggacacccagctgatttttgtcctttcagtagagatggrgtttcatcatgttggccaggctggtctcgaactcctgacctcaggtgatccacccacctcggcctcccaaagtgctggggttacaggtatgaaccactgcgcctggcagaaacactttttaatatgcatataa

SEQ ID NO: 118823 - DNA, 632 bp, Homo sapiens
tttctgacaaccccaataggtatatagaagcatttctgaatttaactcaggtgtttcacctcacatgaaaggatgttatgctgcttctaaaacaaaccccaaccacagctgaaaagcaggcagttctgcaggcagcagaggattttggagatgagcaacaaatctcctataatacgccaaaaaggaaaaaagggagatagggaaagtgaagaaatagcagaaacaccatttccaataggaagtgaagcagttcctcttgacaacccttggaaccccaatagctctgcagatgaatggaaaaggaaatactttttttttttttaagatagagtcttgctctgttgcccacttgctggagtgcagtggcccaatcttggttcactgcaacctccacctcctgggttcaagccaattctcctgcctcagcctcccaggtagctgggattacaggtgtgtgggaggacacccagctgatttttgtcctttcagtagagatggagtttcatcatgttggccaggctggtctcgaactcctgacctcaggtgatccacccacctcggcctcccaaagtgctggggttacaggtatgaaccactgygcctggcagaaacactttttaatatgcatataa

SEQ ID NO: 118824 - DNA, 531 bp, Homo sapiens
tagctttacagcttcgattctggaggagacaaacttaacaaggaggttaaagatacagartccaaagaggagtaacaatattatagctgctagaggtcctaagaaggggagaatccagggcatccattggctgaggaggccccaggtccagtgttttgaagctcctctgctctacattatatttgatctcaaatttctttaactttcttggtgacaattctggattgattaacataataacagcattgttcccctaaaaataaacaaattccccctctttcggtggttagcaagtctaaagctctttgattttgaaggactactgctgctagggagtgaagttgatcttgcactaacctccactgtctgttgggtttctgtactcctaaaattggagtattgtaggggctattgcatggttgggcttttaggtccttaacaatcttttggagttgttgttgggcctcgggtttaagggggtactgcctttggtagggaaaagaggtggaatcctttagtttaacttgaaca

SEQ ID NO: 118825 - DNA, 602 bp, Homo sapiens
caaccacaaaagaattttctgagtagtccctctcacatgctgggtttctctccctgaattcgaaggagcagctggacccctcacaaccccagtccctagaccccagtccctagtcagagtggtttcttgcatctccagtctggatcctggaggggtcagataggaaagtcctgggcaatgtgaagaggctgggaaagggcctgaaatcatttcaccagctggtgccaggactcctctttccagatggagggagcccagcacctcttctcccagggctggttgtcagccctgaggatgggggtatcaaggcctggggataccaaggtctgagtgtcgggtagaggatgggagccccagaatcacctggaggtggtgtggaagaggcttccagcagtattttgtgaaaggaaaatatttgcagtgttttgtgaaaggaaaataaaaacttggtaccccaattcactatatcagaggcatttgaaccagagtgactccatcttkaataggggctgggtaaaatgaggctgagacctacaaaatgaggctacatttctagatggctaaggcattctaagtcacagaatttgacaggttggcacatg

SEQ ID NO: 118826 - DNA, 637 bp, Homo sapiens
tgttaatgcaaaagaacatgccactttgcctcaaagacagtaggggggccgcatgtataatagaagatgcagaaatagttctaacacagaaaaacaaatcactagagcatctgtgttatcttggctattcagaaaaaatcacaggagtcattctgtacttgaatgtcatttatgttaatattaagtaaaagtgttcttaatcttaatgaatacagtatttatagtgaatgacattctttccattcctcctcacctcccccaactaccctgccatttctccaagtgaaatgcttgccttgtcatagttagtcaggggaagaatagaaaggcttggtgtaaaattttagtgatctggattgatgtatgttggagtaattatattctgcctgtctaaagtttttatgctatttgaaatggaaaaaaaatgcttctttgatttaaaattttgagtaatgtgactctgcatagttatgtccttgttatgttccactcattggttaaaaaaaaaaagattcagctatgattggctgaaaagaataacttcgaaaggctttttttttcttcttttctagcacagcaacatttatctaaatgacaggcataagactgycatcacaatacaggttactgcattgcc

SEQ ID NO: 118827 - DNA, 610 bp, Homo sapiens
tcaccagcaacatgggtgaccaaaacctatataagccaaccaaagaaagaaaacaattgacttggaaggaaaaaatatattttatagtcagtagaagacaactaaaaaagaggaaggaagaatgctatgaaaagcaacaataaacaaatccaaaagctagttcttgcaaatacttataaaatagacaaatctccaagaattttgataagtagaaaaaatgtaaatatgaccatgctctggaaatgaaacagtaatctcataaaaactrgtgaagaaaaagagtaaggatatttgaagttgtgggagaggaaaaggtatttttttttctcctcttccaagttctcaactagaactcttataacaaaaggtagactaacaagagaaaaacaaacacaagattattaacgcatgtattttatacctacatgggagaaaactcagggatgaataactctcaaggaggcagtttagaactctggcttacatagcatctccaacaaagaaccatacatttttagagaagtcacaggacaaaggaaaaacaccttgagcatctaggggctgcaaattctgaaaaggtaagtttatcggaaactagtggtagacaaag

SEQ ID NO: 118828 - DNA, 619 bp, Homo sapiens
acctactcatgatggacatgatgtatttgaagatgcaatgtatttgttygtcgctgactctatcttgaaaacagagcatttgggtattttttccaaattaatgggcaacagctcagatgttttattctgtagatacagactttctggtgatagccacgaccttaattatgcttctgttttactctattgagtcaattactatagctgaataaattggacctcatttaggcaaaaatctcaatttatgatgcattttattctgagagtacttcttgaagtgagaagagacatgcacaggatgttagggctaatcgatttttaaaacattgagtgcatatattatatagagtttaattcattccacaaaaattttgataatgttaaatacattccttagtctctttcagaatttttattgaaattggaaggtgatagggtgatagctccaaatattctcttttctacatgctggctcataaaaatgtagaagttgttaaagtcacaatatctaaaaatgtgttggaaaccttacaactatatcgctctgaaacctaacttaaagcggtggcttttaaatcttttattcatttaaaaataaacttttctttaatttcaaaat

SEQ ID NO: 118829 - DNA, 559 bp, Homo sapiens
atgtacttttgcgaatagttttcatctctgctctgccctccgtataattattctgggccacagttkcttcacttgtaaaatggagaagcaataaaatagccatgtgcacaaagtgctggtttctaatttagttttggggatcttgtggaaaacacatactgaacttttcttcttatagaagaaaatgtagaccttttttgaattgaaaaataagtttgtgatatctgtctgagagcttataatatctacaagcccccaaactggaaaaagatatgcatcgtccacatccaacaagggttattatgaagtaccttctgtgtgagcactggcctcggactttcatctagaaaaggagtcagaaaactattgttgatcctgatcacagacttagtaactagcactgtactaagtattctcccatgcattacttcattcaacattatctatcagatgcaaagaaagtaattcatttgaaactacagtgtagctgtcaatattaagcaaatgctgtatactttattgtttcctcataaatttccatggtgaaaaaaatgaataa

SEQ ID NO: 118830 - DNA, 546 bp, Homo sapiens
cacaccagatttataacttccccatgaatcagggaaattttgtccattgatgtatatagtaggtgttcatatggtacttctgtttgcctcttatttttgcacttattaatatctgtacatgtttctaattttcccacatcctttcttatggacacatttaataaaattaggctttacatattcagatttgatttatagagtcttttgcaatgaaatacatgatgggcaaatattatactaaagcttatawttgtaattttgtttgtaatatttttaaatagatatattcattctttggctactccagcaatgaacgaagaaagtcagacttctctaatagttactggttactgggggagtctgattcatttccatcgccgtcaaatgggaccacgtaagtttatctgtgcaaaactaaaataaaaagtaaaaacaaaacaaactcccaaacttattttctgagaaaacctagggaattattggaggaaaagaaatgatgccataaataaggaaataatacatagcctaaggtgtgtttctaaataa

SEQ ID NO: 118831 - DNA, 556 bp, Homo sapiens
gagttctatttttaaagaaaaagaggagtataaataacgagggcctataggaatgtctgccttgcctctttttctcttcttcttaatggttaaggaacaggctgaaggtcacacaatggcttgactggagagctgagattcgcgctcaggtcagtcttcaaagtctgtacttttcactacaccaaactctgctttataccagtcaaggcttagaagaatgtctccatctgggtctgcttactgcatccttcagcaaccatgagctaaagagaaatcctatcaccacaggagtgggctgaggtagccaccrgaaagatccatttttccaaaaagcagtcaagtatctccaagcctcctcaacagtcttattaaagatgcctgtccaattctggccaaggaagctcatctgaattccaagaccctaattaaggtgtctcttttacttcttatttgttgtagcaaaacaaggaaagaattattggcagcacagtgtagggaatggagcactgaggtctaagttagggcccttggggtctagtctcagcttttatactga

SEQ ID NO: 118832 - DNA, 608 bp, Homo sapiens
taactagtctagttatcaggtctttccagtttgaagatgctaaaaaagaaaacagctaaattattccatctctctttagggcatcagacatgcctgttttattatcttctaaattttattcccaaagtgtgtttataagtaggagtmattttcctgggttattcccaagggtacaaactagagaccattcattatctagtctctgtctctctttttttcagctttattgaggtataattgacaaacaaaattatatgtaatcaaggtgacaatatgatgttttgatatacatataccctgtgaaattattgccacagttaagtaacacatccatcatctcatatagttaccttgttttgcatgtgtaatgagaacacttaagatctactccgtcagcacatttcaagtaataatacagtattattaagtatagtcacaatgctatacattagatctctttttataaagagacagccctgttctgtgccttgctcttttaaacactaagcctgtgtcctccatttttgtgaattggtctgacatagcagttttcaaatttgagagtgcatcacaatcacttaaaagtttattaaaatcatggctgggtg

SEQ ID NO: 118833 - DNA, 551 bp, Homo sapiens
ttgacttcctagaagcaccacttgggagcattacgtctgcctggcctgctgggctggggcccacacaagaggctgggctctccaggtcctggttcctggaatcaggcctggccacccaggccgttctcccctgcctctcccctcttctccccaggaccatcctaccccagcctggcctggtcaggcctgcccctcccgatgagaccacatcagacagagctggstttgtgtcttcttcactcaccggtgggcccggaaagcctggctggccttgaaatccctagggtgagaagcaaggggcagtgtgctgtgccaccccctctctcctgcctggctgcccaggtggaaagagtgacggggggggcaccctcaaacccatggctttgccctcccctctgcccaccatggctggcaggtgaggctctgggcatgaggtaggtcacaacccaaggacaggtagggtggggagactagagctggtgatcaccagggacccagctccttccctgcctccctgcagccaggtcccagtcgtcactcacctggtcgcc

SEQ ID NO: 118834 - DNA, 592 bp, Homo sapiens
ttattcttatccatgtcacggatagagatcagatgacaaaatgtgttctgttgaaataaagccattttaatcatgcattttagactcttaagaatccagcaggcagaaagaggttttgttcaccttcctattcgcctattagtttggggccctaacatttgactgtaagttaagttcttagtttaccctgcctctcaatttttcattcatttatttatcctttcttcctttttttccccttccttatgtctcagccttataagaagtatcattttttcttttaaaggagatattttctcagtttgctagtttactaattattatgtattttaaatgratctttctttctggtcttttatgtttcctattataagatggttattttttgagagtacctaatccccttagggatacactgagaatcagtttctgttggaagagataaactaaaagagggtataagaatgattcttgttttgattaactgttgattgatatgaataacataaaaataatacataatctccccagtactttttttttttttttttttttgacatggtctcactccagactggagtgcagtggtgca

SEQ ID NO: 118835 - DNA, 544 bp, Homo sapiens
ctttccccaagcacaagaataaaatataatatataattagcatctggagttttttgaagacgatgtgattgacggaggtgacagagatgatgtaaaggtgtcaatagcacttaagtctctgtatgtttgattgtgtgcatttacagtcccatacctgcttaaatacatacayaatgcagagaagaatatgaacatgactatcttccacaagaaatgacatgctacagtaggtggaaaagtgttgctttaacatacctagtagtcaataagtggtatgtgaatttgtgaagtgaatgtagtacctatagatgtactatatatcctatgatacttaaagttacatcattatttaaaagtaatgatttgtctctaactcatttatctttgaacaagggaaatatattcttaaagctctattgaagtgcattacaactgctctgagacttagagatcctttggacatttttaaagccattatttcaatcattattttatctaaaaatactgttttaaaaaaaggcaaataaggaaaacaaaagcctag

SEQ ID NO: 118836 - DNA, 584 bp, Homo sapiens
tctagtgtcaaataatctagactgttgactatatccatccattctcattgtaaaaccaaaaccatcacaaccccctttttggggacaaggacgagaatgtctgactgtttattcaacaaacttttattaaattcaattaagagccctgtattaggccactcttgcattactataaagaaatacctgagactgggtaatttattttaacaaagaagtttaattggctgactgttctgcagattgtacaggaagcacagygtaatctgcctctggggaggcctcagagagcttttattcatggcagaaggcaaagtgggagcaggcacttcacgtggtaaaagcaagagcaagaaagagaggagagtggggagggggtgccatagatgtttaaatgatcggatctagcaataactcactatcatgaaaacagcaccaagccatgaggaattcacctccatgatccaaacacttcccaccagtccccatctccagaactgggggtaacaattcaacatgggatttgggtggggacaaatatccaacttatatcatgctccaaatctggtgatgacaagaagaataag

SEQ ID NO: 118837 - DNA, 227 bp, Homo sapiens
tctttataccataattataataaaatttacatgtggttttatccctccagtgggtttttcctaataaactatgggtaagaacatatgcrgtttaattttagctatgtaaccataaactgctaatcaaataacatcattctgtcactgacatagcccaaacctcaactcctctccaaaaaactctcatgaaagcccgttgagttttgtaaggaggggctaatttcact

SEQ ID NO: 118838 - DNA, 538 bp, Homo sapiens
acctcagtggtcttgaataagatcctgaagaattctctaaggcaagagactcatgttctcttcccttactttctcccagacaaacaaagtctccatctgtgctgagcctcctggagctagggtagtggtgatacaagcacccctgtggccaccaccacagagactgcactgggtcaaacccaaagccagcaaatcactggttctcacccaaagcctgtggtaaacatgcctggctaccacctatgttcgctcaaggccctaggactctacaatcagcaggtggcaaatccagccaggcttgtgtctatcctttcayggcagtgagataccctcggctccaggtgggtccagagatgctgtctgggaggcagggctttaggagtctactgtctacaggtgtcctaatctactgtcactgtgctcgcacccaagctacaaggcaaagtccttcccattcttccctattctttccacaggcaaaagagtctcagcttgtggtgaatgcttccagccccaagactctctgttcaggtcagtg

SEQ ID NO: 118839 - DNA, 627 bp, Homo sapiens
cttcatcatggcttcttatctcatcatactgtgtgtccaaggaatgtactcttcaatgatgagctcaattctgcattatctcaattatttcctttcgctgattctttccccttagcatataaacatgtctacattttgccatcttcaaaaacaaaatatacttctctgcytcttagctctcactagctagtatgctattatttttccacttttcacagcccggcttgcttggctccatatcttcatctcccaacaacatctcccatggcaacacataactccatgaaaattgtgctccctaaagtcacaggaagcctctatacagtaattcgcctttgtgttattccttggaacatttcaacttttaataactatttcttggggggagctgaggtgtatgaaacaaaagtcctaacctaatgtgtaatggtaaaaggaaatcagtccaatacagtaactttagtcctatataataatttaaacaatatcattaggtctcattttttataggtaaaatttctagcttctcagacatttgttaccattccaaatacctctccaagacaatgtctatgtacaaagtacagtgtttcttattgtttcttcttcgtagtgagggaaaatggt

SEQ ID NO: 118840 - DNA, 627 bp, Homo sapiens
cttcatcatggcttcttatctcatcatactgtgtgtccaaggaatgtactcttcaatgatgagctcaattctgcattatctcaattatttcctttcgctgattctttccccttagcatataaacatgtctacattttgccatcttcaaaaacaaaatatacttctctgcttcttagctctcactagctagtatgctattatttttccacttttcacagcccggcttgcttggctccatatcytcatctcccaacaacatctcccatggcaacacataactccatgaaaattgtgctccctaaagtcacaggaagcctctatacagtaattcgcctttgtgttattccttggaacatttcaacttttaataactatttcttggggggagctgaggtgtatgaaacaaaagtcctaacctaatgtgtaatggtaaaaggaaatcagtccaatacagtaactttagtcctatataataatttaaacaatatcattaggtctcattttttataggtaaaatttctagcttctcagacatttgttaccattccaaatacctctccaagacaatgtctatgtacaaagtacagtgtttcttattgtttcttcttcgtagtgagggaaaatggt

SEQ ID NO: 118841 - DNA, 509 bp, Homo sapiens
attggtaagttttatggattaaaggacattttctggtaaatctggttgctatttatggaacttggcaaaaatcctttactgtatatgacagtgcctgaggaatttctactagttgcaaagttaaagaaaaggaaagtgacaatgcatgtttgactctacattccacaaaatcagaaatagaacttagcatatttattacttaagataaagcatagccatataaccatgaaacagtatttgggagtaattattgacaatggaaaatatattaacattaaaaagtttaatacaaattaawcttaaaggaactgtggctctaagtgatggcattatcagttgatatttttcctgtatatctctatgtgtttctccactaaaacttttattacatgggcagatattgctttgataaattgataaaaagtaaataaaatttctgggttcatctctgacatgtaacacacttggaaatcttcattttcttacagcaagaaaaagctaagcaaatg

SEQ ID NO: 118842 - DNA, 621 bp, Homo sapiens
actgaaatccttctaaataaagccagagccatcggagctgttgagtagaaaataacccctgactgataatacgtctggacaagccattatccaggaggggttgctttgatttcagtaaagtgaagtgctaatctaagcagttagtttttcagagtttccagagactaaagaggatgcataccaacaaaatgagcacacttacagagcatttatttgtcaaacggccaatacagtgtgtgtgtgtatgtgtgtgtctgtgtgtgtgtgcatgtgagagagtgagtgaatatgtttgtctattcacaaagtaattaatatataatatgctgataaaatttccacaagtaataaactaatatttataaataagcaggtctcaaaatatagatgaatatctattagcttcaggataaaaatcaaactcgatggcataggacctccatggcctggcctctgatgccctcttcacactcatctcttgctttgccctgactcaaattctatcctttgatcatactgagctacttgttcttgctygaaaacatcaggatttcagcctccatagcttttcatgagcaacttctcttatctattgttctagttatctactgctgggtaata

SEQ ID NO: 118843 - DNA, 621 bp, Homo sapiens
actgaaatccttctaaataaagccagagccatcggagctgttgagtagaaaataacccctgactgataatacgtctggacaagccattatccaggaggggttgctttgatttcagtaaagtgaagtgctaatctaagcagttagtttttcagagtttccagagactaaagaggatgcataccaacaaaatgagcacacttacagagcatttatttgtcaaacggccaatacagtgtgtgtgtgtatgtgtgtgtctgtgtgtgtgtgcatgtgagagagtgagtgaatatgtttgtctattcacaaagtaattaatatataatatgctgataaaatttccacaagtaataaactaatatttataaataagcaggtctcaaaatatagatgaatatctattagcttcaggataaaaatcaaactcgatggcataggacctccatggcctggcctctgatgccctcttcacactcatctcttgctttgccctgactcaaattctatcctttgatcatactgagctacttgttcttgctcgaaaacatcaggatttcagcctccatagcttttcatgagcracttctcttatctattgttctagttatctactgctgggtaata

SEQ ID NO: 118844 - DNA, 608 bp, Homo sapiens
ttaaaaaaacagggcatggtcaattaaatttgttggggaaaaaacagaagggacaggacagagatatcttcatagatgaaattagagctgaagccaaacagattratgggtgactgccaggcagaccatgagttagtagaggactctaagcagaggaagctgcagtaacaaatagcagagacatgaacaatactggcatattttgaaatcacaagggacattgtgggatgtggcgcagcaccttaaaattcctctgcaatctcatttctaaagttggaatgggacaagcctggaagtacagtgacctgacaaaaagttgtttgggtagcccagaaagaaattaaagtctggattaagtaacatggagacactgtgtaagttcaaggaatttttaagaatcacaattttcaagacctggtgattagttggatatagagggtaatggaaggagggtttaagaatcaatcctaaatttttagtctaagtgatcatgttcatgacagttctattaggtaagatagaaaactcagtaaaattgctccctggcacaaatttggaaataatggtatttgtgattgcttccaatcttcctctgagacccaaatgtt

SEQ ID NO: 118845 - DNA, 608 bp, Homo sapiens
ttaaaaaaacagggcatggtcaattaaatttgttggggaaaaaacagaagggacaggacagagatatcttcatagatgaaattagagctgaagccaaacagattaatgggtgactgccaggcagaccatgagttagtagaggactctaagcagaggaagctgcagtaacaaatagcagagacatgaacaatactggcatattttgaaatcacaagggacattgtgggatgtggcgcagcaccttaaaattcctctgcaatctcatttctaaagttkgaatgggacaagcctggaagtacagtgacctgacaaaaagttgtttgggtagcccagaaagaaattaaagtctggattaagtaacatggagacactgtgtaagttcaaggaatttttaagaatcacaattttcaagacctggtgattagttggatatagagggtaatggaaggagggtttaagaatcaatcctaaatttttagtctaagtgatcatgttcatgacagttctattaggtaagatagaaaactcagtaaaattgctccctggcacaaatttggaaataatggtatttgtgattgcttccaatcttcctctgagacccaaatgtt

SEQ ID NO: 118846 - DNA, 608 bp, Homo sapiens
ttaaaaaaacagggcatggtcaattaaatttgttggggaaaaaacagaagggacaggacagagatatcttcatagatgaaattagagctgaagccaaacagattaatgggtgactgccaggcagaccatgagttagtagaggactctaagcagaggaagctgcagtaacaaatagcagagacatgaacaatactggcatattttgaaatcacaagggacattgtgggatgtggcgcagcaccttaaaattcctctgcaatctcatttctaaagttggaatgggacaagcctggaagtacagtgacctgacaaaaagttgtttgggtagcccagaaagaaattaaastctggattaagtaacatggagacactgtgtaagttcaaggaatttttaagaatcacaattttcaagacctggtgattagttggatatagagggtaatggaaggagggtttaagaatcaatcctaaatttttagtctaagtgatcatgttcatgacagttctattaggtaagatagaaaactcagtaaaattgctccctggcacaaatttggaaataatggtatttgtgattgcttccaatcttcctctgagacccaaatgtt

SEQ ID NO: 118847 - DNA, 590 bp, Homo sapiens
caatagctttcatttgctttgtgtttgccttggtgtacctttttctataacttcacgttcaacctgtctttcccaatatatttagagtggatctcttgtaggcagcaaatagttgggttttgctttcttatgcagtctgataaactctgaatttaaattattgatataagtgagattgggtctataatagtgtcatttgctatttattcgctctttgtttctttgttcttccttttctgtcttctttgtggttaataaaaattttaatatctcaaattatcttctgcattggctgcttagctaatacagtttttggggggttattgtttcctctgtggaatacaatgtatatcctcaattaatcacagacttcttgaattcatattacgcctctttatgtaaaaactggtaaatttcaattttcactgctcatattctttgtaatattatactatataygctacgtctacacattataaacctcacaaagcttttacttttgttttaaatagtctatggcttaaataattttaaaaataaaagataatgttttatatttacctatatgtttaatattcctagtattctac

SEQ ID NO: 118848 - DNA, 580 bp, Homo sapiens
ttatgggagttatggggattacaattcaagatgagatttgggtggggacacagagcctaaccatatcagatacaatggggctacaagcaattgggtaaatattcctgttccaaaagggagaaattgaccaaaagaaaggggctacaggccccatgcaaatccaaatcccagcagcacagtcattaaatctcacagctccaaagtaatctcctttgactccatgtcccacaaccagagtacactggtgtgaggggtggggtcccaaggccttgggcagctctgcccctgtgtctttgcagggtacagcctatgcagctcttctcataggctggcattgtgtgtctgtggcttttgagstatagggtcaagctgtcagtgaatctaccactctgagatcttgaggattgtggccctcttctcacagctcaaataggcagtgtcccagtggggactttaacctcacatttcccctctgccctagttgaggttctccatgagggcagcgcacatgcagcagacttctgcctggacatacaggcttttccatacatcctctgatatctaggcagaggccccaagc

SEQ ID NO: 118849 - DNA, 582 bp, Homo sapiens
ttctcacattgctataaagaaatacatgaggctgggtaatttctaaagaaaagaggtttaattggctcacagttctgcaggctgtacaggaagcatgatgctggcatctgctcagcttctggggaggcttcaggaaacttacaatcattgtggaagccaaaggaagagcaggtgtatcacatggccagagtaggaacaaaagggagcaagcaaggtgtcacacacttttaaacaaccagatttcatgaaaactcactcactattgtgaggacagcaccaacggaatggcrctaaagcagtcatgagaaatcaacccacatgatccaatcacctctcaccatgacccacctccaacaatggcgattacaattcaacatgagatctggatgaagacacacatgcaaactatatcaatggacacaggactctgatctctgagaaactgtaaacacatgaggtgagtcctatcattgctgtcgctttctgagtggaagctattcccagattttggcacagggaaggcagaccaaaaaaatagtccaacaatctcatggaattgagaaaacatagactggaagccaa

SEQ ID NO: 118850 - DNA, 577 bp, Homo sapiens
atagttttttcaccctttctcagaaacctcacagtgtgggagcaaagtattcctttccccaggataaaagagagaaagtaaattgagccataacaaatattagcccacgtatgctactaagtgttcmcaaaaattggaggttaaataaatccaccatgtggctttcagagttgtggtatagtcaggggcaacacccataaggactttatttctgaatgctttttgagaatatgcccatgattaaactctgtgctgtcatttaaaatgagggaattaaacaaccagcaattaatatcacactggagtattacagtcatatatgcaaggatttagataccttttattaaatgtattattttaaagcatataaatatttttaattgtttccatttctaccaaaagtcttatttacaaagggatggatgctgctggggtaagatgacagactcaggcaatcttcctgggcagggattgagaacattttttgtaaaagttcagataacaaatattgcaggctttgcctaagaataggctctttcacagctgctcaactctgccatgtgaaaccagtcataga

SEQ ID NO: 118851 - DNA, 590 bp, Homo sapiens
aataaatgtttaacagttgggatacttatgtttaacagctgcaacattgactccaaggacagctgcattttaatggtgtgtgaagtgatttatatgtaagcttctaaaactcataactaaagcacttagcactttaggstcctctgggacaaaaggtgatagattaaggtaaaatggtattattatttaattccgaaagaggtaaattacactggcaaaatgctatttgatgttactggcaaaccgctgtggtctgatgctttgttgccatcaggaaacgtggtccagtggtggtagctgtggtgaaggaggcaggagtcccgggtgctatttctggttaattcactgacttcctgggtgaccttgggcaactcacttaacctccccatgcctcagtctccctccctaggagtagaactgagcagtcctttctaagattctgctttaaaaggacattttaagagtaaaaccttgaaatgcttcatttggcaataacattttttgcagtaatgagtgatttgtttttctcccagctgcattgttggctgttagaaaagcagtgtatattaatatgtccttagcctgaacac

SEQ ID NO: 118852 - DNA, 611 bp, Homo sapiens
ctaataaatgatgggcaaatctcataaatataataaatacataataactaactaaataaataatagatatatagctttactattgactttcatgagagatgtgtgtataggaagtagagatacaggttgacagtttttaaagtgctttataaaagggtctatttaaatataatatattgctattattctaaaggcaaatacactrtaagtaaagggcctgtcagcatttcttttggaagtttacattctaagagtgtgtaactcaatcctaaattgtgctgtcagctgaaatatgccatataaacttccagtgtcattgccatttttttaaacatttggaatcgcaaaaccccacatttttttcacatgtggacattaatctaaagtagaagtcagtaattgccaatgctatcaaattttattccatctcaataagacaatcttttttaagaaaccaaggctgccaacactaaggagcatacataattagatttttgtgattctgctttatatcagtgttttggtgaaatacaatgtgtaggtggatgctgtaatactggcttccaagtcatttggaggaaaataattatgcctggggcactggaaaaatt

SEQ ID NO: 118853 - DNA, 604 bp, Homo sapiens
ctcccgcacgcctggctctgtgtgaataactctttctctattgcaactcccctgtcttgataaatcggctctgtctaggctgtgggcaaggtgaccctgttggacagttrcaatttcctggctgggagtcaaaccctggctgcaacagtgaaagcacagttttaactatcagactataagttgcagaactgtagtcctcagactacagcctttattgttaatcctgcagagaatctaaagaaaggcagtttgagtatagaaaagattttaaatttgttttaggtcaaatttttgccttttaatttagtcaagagaactttaaaggctagtcatgacactattatgtgtctttgtttttaaattttgattttttccataaattcaaataaggcaattgtttagaataaggtactctaaaattacaattaaaaaaatttagaggtctttttaatttaaaggatctatctttgcccgttgattagaattttccattataatattgtaattttcaattactatagtgactcaatccaatagcctcttcatacaaagcccaggtactcacacaaaattcacctccaggaataagctaagatagcaaaag

SEQ ID NO: 118854 - DNA, 616 bp, Homo sapiens
ctatgtaagtcagactactgtgctgaagattccgcatggagaggctctgagaccacatggaataggaggtggcccagctgagcccagccttctagaagttaccactgaagccatttggaaccccctgaactttcagccattggctaaatacaactgagtggcccttagtaaaccacatattgagaattgtccagctgagctctgtccaaatccctgacccagaaaatagtgaraaatgaaaatcatgtttcaagccatgaagtcttggggtagtgtgttgtgcagcaatagataatcagaacagatggcaaaatgtttcttcttgagtcccagccatgactgactttggtgactgcctgggttatagtgttgaggatgattttcaagctgtatctggtcttagtagggaactgttctgattggctagtaatgtctgccttgggtgtgtgcgattagagggtggcagtaagaatgctgcctctcctagatatagctcaggataaaatcagttctaacagttattggttccgttatttttcccaccaaaaattgtggtaacctttctgagtgtttgggaataaatctaagaaactgctctgggatgtctccctctatg

SEQ ID NO: 118855 - DNA, 449 bp, Homo sapiens
gcagagtttgggtggagtccagagacctgcctgtgaatgggtttcccatgatcactcagttctccatcatttaggaaccttgacaccagatgattcaagtctcattacctcctccttgtctcacctcaccactatccctttccagttgcagtcatctaaaagcccaatcttggtatcagtaatgatcattgtgctggggctaatattatttttgtgaggcacagaaacccagcaaaggsttttaagtgaatacttggtaatagaacaatcaagttaaaagatcagtgtgacacagagcatgaaataggaaagtatcgtggtcaattgatttggaccacacttacgggtttgtgaaatgaatttcattttctggaccaaatggaagccctgcttataaatcactgccggtcttggagattaataaaggaaacaggcttgattaagaattc

SEQ ID NO: 118856 - DNA, 561 bp, Homo sapiens
ccagctcctatttatcaagcatctgtggggagcaaattcctgcttattgggtcttatttaattaccaaaccactctgtgctgtaggtgctattgcgattccagagagcctggcacagagacaacagtcaagaaacttggagtgaattaatagcgatgatctcattggattcctttcttttcattccactgrggcttctggagttcccttgttctaggttcctcgtgtctaatgaataaaatagtaatatttacttcctaaagaggttgtgaggatatcctgtagaccaagtcccttcctaggaagcaattaatcaattagctttttttttttctttttttgctttcagaaacattctatgcaaataatacatgcaaaggatttacatagcactaaatatttttaatgcaaatgatatacaatactatcttgcccttttcacttaacaatgtgccttggagataattgcattataatacatatagacaacattgttctttttttaacagctgcatagtattccattgtatggctgttttataattttgtcttttgctattaa

SEQ ID NO: 118857 - DNA, 608 bp, Homo sapiens
ggcaggtgcacctggggctcaggccccctgaaatgggggtgcagaagccaggagcatgttataggttaaagcagtgctgataggttgagtggctgttcacctgctgctggctggttcccatctgtgttaacrgcttccaactggcctcattatttgggaaactggaggcctttggacaaaggcccttatgccggttttgcaaacatcaacacatcccctgcaggctcttttcaggttccaggttgcaagctctaaggagtggaaataggcaggcaggagctggcttctgccattccaggcttgactctttacccgtccctctgagtctgtttccctatgtgaaatgtgtgttgggtggcaggagggtggaaacagttattccacttactccttgaggtcacgaggattaaggaggagggaaggaagaaaggaactttctattttatttattttttatggcatgtgctgggctgtaggctggcacttccaaacagatgctcagaaagcttctcccttcccttcctgccctttccttcactgtgccctcttgtgctatgcagcgccccctcccttctcccaagtcccagtctctgtcttcctgcagcacc

SEQ ID NO: 118858 - DNA, 563 bp, Homo sapiens
atcatttataaactaagcatatgtgtagtatgggtgcatagtaaaactatttcactgattggatataccatcaaaatgtacaggtaacagttattggggctccagcataaacaggaagtgctccatgctcacagatcctcccagctgtaattttcctgctgtcatgtcattgcatgctctattagtattccttttctatccttggtgaaatatattgtgaccattttcttttttgtagagtcaaaatcgtgctttgtttcccaggctggagtgcagtgggacaatcatagctcactgcaactttgaactcctgggcgcaagtgatcttttggcctcagtctcccaagtagctaggactataggtgtgcaccaccatgcctggctaytttttaaatttttattgttgtagagacagggtcttgctatattgcccaagttggtctcgaacttctgggctcaagtgatcctcctgcttcagccccccaaattgctgggactacaggtgtgagccaccatgcatagtgggttgagaccatgctttatttgatgcttaatatgggttt

SEQ ID NO: 118859 - DNA, 563 bp, Homo sapiens
atcatttataaactaagcatatgtgtagtatgggtgcatagtaaaactatttcactgattggatataccatcaaaatgtacaggtaacagttattggggctccagcataaacaggaagtgctccatgctcacagatcctcccagctgtaattttcctgctgtcatgtcattgcatgctctattagtattccttttctatccttggtgaaatatattgtgaccattttcttttttgtagagtcaaaatcgtgctttgtttcccaggctggagtgcagtgggacaatcatagctcactgcaactttgaactcctgggcgcaagtgatcttttggcctcagtctcccaagtagctaggactataggtgtgcaccaccatgcctggctactttttaaatttttattgttgtagagacagggtcttgctatattgcccaagttggtctcgaacttctgggctcaagygatcctcctgcttcagccccccaaattgctgggactacaggtgtgagccaccatgcatagtgggttgagaccatgctttatttgatgcttaatatgggttt

SEQ ID NO: 118860 - DNA, 418 bp, Homo sapiens
tgccatgataaggaattttttttctcttatcctgtagatgaacatttgccaagcctacttctgatgatgtaagtttagagacacactatgcgatatcatatgactcctagaagctcatttttaaaaagcagtttaacgttttgtgattgaaagttttccagacttgtttcatcatagaactagtttttatttgaataccaattaacaccatagagttacttttagaaatkttaaggattttgagcaagggaatggtgagatttgcatttgtataatatgggtatgatgagaatcaagaaatcccattgagtttaagtgtgttaaatatatgggacattggccaggcatggtggctcacacctgtaatcccagcactttgggaggccgaggcgggtggatctcttgaggtcaggaattc

SEQ ID NO: 118861 - DNA, 579 bp, Homo sapiens
cacaacattatataaatccaagtgggaaaagtgtagttactaaatcatactcattttcatgatacctacccaccagttatgcaaaggtatttgttaaaatatgactggtaaattccattgtctgatgtcaatctgttgtttttatatgctgttataaagtattgcattttttgtgtaataaatgacatcaaaacccagtaaaatgcttcacttggataatatgttagctgtgtttccaagttggtgaaagtggtcagcatggtgttctatcatctgattctgagtccagagttgctctaattcagagttaatctcctgtcttctggctagagggaggaatggagcggggagagtcattcttacagccttgactgttaaacagaatgtaaatcataaaatcactttaactggttattrtacacaatgacacatggtgatttcttgagcttgaaaataattaaaatagaaattctggtatttgtgttggagggggttctgttggattatcctgcttgtacctcacagttgaatcctgctggtggttctcaggatattttttgtaactgttcacgtcaagtc

SEQ ID NO: 118862 - DNA, 608 bp, Homo sapiens
gacgtcagggcctgttgaccctggaacttgcccagagctgagttaggtaaaaggaaagatatgaaagaggggaagtttgagtagaagaaacccaaatggatggggtggggtttccttggatttacttcattggtgtattcaattcacctcccaaagttttcccaatcagtaagtcagataaccaacgtattactttaacaacccttcttacatgtcaagctcatctgaagtgattattcttctgcctttttataacttcactcaaaattcaaagtccctctttcccctttgttatgacatctctctcttatgtttaaacactcatttaaggcatgtttttctctattcacactttcccagataacattggagggcattctagcccagtcttcactgtcctccatactccagaaagctaaatatgtcttttaatcytgcaacccagcctttggcactaagtggccttccagcttatcctggtccaaaagattccatgcccatattgtggagacatctgttaccaactactgctccttgacctgatcagttctctgtcttccatatgtgtgtagaccttttcctgccttcctttcatccctagaacccat

SEQ ID NO: 118863 - DNA, 604 bp, Homo sapiens
gagtcaatgttgacatttgtaactctttcctggaaggttagaaaatctaaggattgactggtttgctcacttaccctggcttttgtttcctaacgaatgggtaatattagtctttcagcatgataacataaagcagactgatttgcatcacttggtattgtcagccctgtgtgtttgagtttgttctcttatttaatatgtgctgtactgaaactgggtagtccctgtttgttcagcggcctcttgtgagtgcctgccttctctctcggattgaattgaaccagggaaaacagatatgggatagtgtaagaataggagattttcttatttattcccaaatttttcactactctaaggacttccaataggattttgctctctttagaaatctagactgagtctagagttgaaactaaaattattttagtttcttccttcacttatgtcgagattctggaccagctggtcttagtcarccatcatcttttgctgtctttgactcatggtagcatattattgtcagctttatttattttctgttattcatatgtataaaaattaataattactctttaagtcctgccttttcattgtctggaaggta

SEQ ID NO: 118864 - DNA, 629 bp, Homo sapiens
tagccacaagttagtttttcaactcttactcctctgccttcttccccactgtagtagcccccagtgtctattgttgctatctttatgttttcccaatgtttagctcccagttataagtgagaacatgcagtatttggtttctgttcctgctaatttgcttaggataatggttcccagatgcattcatgttgctggaaaagacatgattttattcttttttatgactgcatactattccatgtgtataggtacctcattttctttatctagtccaccaccgatggacacctaggttgattccatgacttagctattgtgaatagtgctgcaatgaacatgcwaatgcatgtgtctttttggtagaataaattgttttcttttggttaggcactcagtaatgggattgctgtgttgaatgatacttctaagttctttgagaaatctccaaactgttttccaccgtagctgaactatttacattcctcccaacagtgtttaagtgttcccttttctctgcagcctctccaacatctcttgttctttgactttttagtaataatgattctaactagtgatagacagtgtctcactgtggttttggtttgcatttctctgatgattagtgatga

SEQ ID NO: 118865 - DNA, 533 bp, Homo sapiens
aatattaaaagcacaactgaaatttagaagcatgcaaaaaaaattcagggaatattataaatcttcaataattaaatttwaaaaatgtaacaatgacacaataatagacaaatcactaaaaaagaagataatatgaaagtgatcttatgggaatttaatatattatagaagttacactttaaatcaatcaggaaataataggcctttacgtaaatggaactggtataattagcttcatatacagatgaaaaaaattaaaattaacattcctacctatgccacatggaaaatatctagacaaatttttaaaataaacataaaatcaataaaattactaatacaaaatataaaacatttttaaacttcacattaggaaaagcattctcaaacaaggctttttatctaacaattatttaacaattattataaacaaattattgttaaatttgactatatagtaataataattattgagtacttattatatgccagagactattcattatttaagccatttaacattcacatcaacc

SEQ ID NO: 118866 - DNA, 601 bp, Homo sapiens
cttcccctgttctaggttccacttaaaattagcagcttttcaggttacttagcaaatggtctggagtaacatacccaaatgaggaatatgttgactccaaaatccaaagaggtccattaagcattgttcttatttttttggcagtggtgggggrtgagggggttgtcacccttaggcattttactgagatagaaagtctttccattttttgtctcatttatttcccaccttctgaaatgcaaatgacttaagtctagagtagttgctacttcttgctcactacttccaaacagcataatgtcactaatatgacaaaccagtataatatccttttgaagagaaagatgatcaagatccatgtgaactaaattatggtgtaaggctggagagttgatctacttctgaggtagaatagtgaaggtatattactggcctttccagctgaaggcaaactgcttctgatggtttttattgacaggtatgaaggaaaagcatttgccagatcaatagctgcataccaggtaccaagggatgtgttagtttgctcaagcaatgaaatgcagcaattggagtcacctcctggttaagcttacttaactgc

SEQ ID NO: 118867 - DNA, 601 bp, Homo sapiens
cttcccctgttctaggttccacttaaaattagcagcttttcaggttacttagcaaatggtctggagtaacatacccaaatgaggaatatgttgactccaaaatccaaagaggtccattaagcattgttcttatttttttggcagtggtggggggtgagggggttgtcacccttaggcattttactgagatagaaagtctttccattttttgtctsatttatttcccaccttctgaaatgcaaatgacttaagtctagagtagttgctacttcttgctcactacttccaaacagcataatgtcactaatatgacaaaccagtataatatccttttgaagagaaagatgatcaagatccatgtgaactaaattatggtgtaaggctggagagttgatctacttctgaggtagaatagtgaaggtatattactggcctttccagctgaaggcaaactgcttctgatggtttttattgacaggtatgaaggaaaagcatttgccagatcaatagctgcataccaggtaccaagggatgtgttagtttgctcaagcaatgaaatgcagcaattggagtcacctcctggttaagcttacttaactgc

SEQ ID NO: 118868 - DNA, 578 bp, Homo sapiens
taagaaaactctgttgttcttctattccaatgtccaatttatagaaaaaaaatgaataatgccattttaactttagccaatacattcacacatagaatctcttgtaattaatttttataaaccattcacaacttgttctaacctttagctttttaattcaaaataaatctttaaccctctaacctagacaaaaatttacattcccatactttcttataatctctcacaaaaacacattttattccctttacaaaccttgtatgtaaacttattttttcagtagtctcaattacatattaaaatgttaactcttagcatcttttacttttggtgaaaaccttggtaagggattttaattatgtactaggtgtggagcctacgacccaaacagaaatgcagataagatctgagcctttccagtgtctaactccatgtgtcccaggccttaccyagctgtagagtaggcaagctgtacagttaagagtcatagtggcattttatgaagcatttaggaagcctaatcacctttaaattgtaaaacgggggaagagccaagatggccgaataggaacagctcc

SEQ ID NO: 118869 - DNA, 616 bp, Homo sapiens
ggcccttcccattaaaggatcctagaagcttgttaagaaaagcttatctctatcattgaaaggaaataagtgggaaagtacaatatgtayggatttaagaacattgttcaggatatacatagataatggatcacgttggagctgataagggagaaataaccctggaagcaaaaatacgtaataggtgacaatttcagtaatattagagaaaaaacatttgacttgcatttgaacggtggcaatagggatagagagaaacaaaactatttcagagatagccaaatgatagaatgaataggaatcaagaggaattaactgctattggaggtgaggggttgagaggcttaaagtattccgtccatgtttctattctgggtgaattttgatactattacaggaatgtgggacccaggaaaaacctggatttgacgtacatatttaagtcaccactggacatctacatggagacgagccgtaggcacttggataagaaggtctagattccccaagagtggaaagtcacactggtagaattaattcttaaatttctatctggatatttagttgtctcctgtgaatattgctccagttaccaccgagcagatggagaaggtaa

SEQ ID NO: 118870 - DNA, 335 bp, Homo sapiens
caggctaggccttgaagggacgtatgacaaaataataagagccatctgagacaaactcatagccaacatcacactgaatgggcaaaagctcaaatcatttgccttgagaactggagcaagacaaagatgccaattttcaycactcctattcaatatagtactgaaaatcctagccagagcaatcagacaagaaaaagaaataaaaggtatccaaataagaaaatgagaagtcatgctttctcttcactgacgatatgattctagacctagaaaatcctaaagattctgccaaaagtctcctagtactggtaaagtttcaggacacaaaatcaatg

SEQ ID NO: 118871 - DNA, 335 bp, Homo sapiens
caggctaggccttgaagggacgtatgacaaaataataagagccatctgagacaaactcatagccaacatcacactgaatgggcaaaagctcaaatcatttgccttgagaactggagcaagacaaagatgccaattttcatcactcctattcaatatagtactgaaaatcctagccagagcaatcagacaagaaaaagaaataaaakgtatccaaataagaaaatgagaagtcatgctttctcttcactgacgatatgattctagacctagaaaatcctaaagattctgccaaaagtctcctagtactggtaaagtttcaggacacaaaatcaatg

SEQ ID NO: 118872 - DNA, 504 bp, Homo sapiens
gtgaattccaggtcggcatgcctgagctatatgacagtgactgggtcaaatgatttcatctgtctgagccccaatctcctcaaaattaagttgaggtctctttgcccattgggataacactacctacttcatacttttgtttgtttttgtgaaaagtaaatgaaatgatgtttgtaagaggatggtgctgtgtctggccagtagtcagtattgagcgcatgtaaaaaagaagaaacactaaacttctctttgtaataaattaattccagatacatgtttttggagactgactatgaggggaggtccacaggctatttgactaggggagaaggtccattattgttgcttctccagrttcacttgagataaaaacaagtagagaaggcttcagtttcacagagggtccagcaatgcagtgaatcttgaatgttgaaacagtaagagttctgaacagcttatctaacagattcagtgtggcagagactaaggggggaattccatgca

SEQ ID NO: 118873 - DNA, 594 bp, Homo sapiens
tgaaaacaaacctacgcacattctaatagagggagagagatatttccagaatcaccattaaaccaaagtgccatttgaggagggccaaaagagacatccagcatgcaaaggaagaaaacactgtgtgcatcctcagagaagactgtgaaagttgattaggaatttagaaactgggcaaaaggaacatgctgagaaaagtgaaaaatatcagagtgaatttgggaaatctttcagattttgtgctgactgctgaaccatatggagtgtttcctgatgtgtaaactgaaccaattttatccttaatattttaatttcaataaatataacatttatttgagaatrtaaatttcctgtaaaatttgatgcagtttatcaatacctaacacataccatagaaccacatagaaagaactttagtttaaataattttcttttcatcctgccttttagcttaaataggatttaaagacatgatcattacttttatttcttttctcaagttgcatatgctttctgagacagttgatagactggctgaagagaaagaaaatgttttggaaccatttcattttaatattttcatgtcaagttcac

SEQ ID NO: 118874 - DNA, 541 bp, Homo sapiens
cctaatcttctgacttagtgcttgcaagtattaaccatttactgatagagatttatgatagcatgtttgtcttacttggctttctggttacaacctaattccaatttctattaaattagtctaagtggcaagattgtatggtggcaatctgtgaaagtgattttacttacagtgttgaattcttctctaacctgagcaaaatgctgcccttaactccttgccattcaaggaggaaaatgtgtatgctgatgaggttggctgggggaggaaagggaaaggagtactagagagcatagatagatgaagattaatcattatctctggcatttatcattatttgtcattaataattatctctgacattaagcaaatatctaacaaagaaatagaggtattttcagagctggcccttggattctgtagtggtacatcattctggcttttgcagcaaggccagctgatcttgtgggtatggtaagagtggtcagaaccccacctcctgaggtgctctggggtgcygtaagtatgtccaggcttcagg

SEQ ID NO: 118875 - DNA, 590 bp, Homo sapiens
aaatgtgaaaaatcagatcagtgattcctcttccctttgtaaggattgaataagagaagaagagtgagtacctcatcattcctactttgtgaagagaagaatctcaagctcaaagtcagtagaaatatgagctgggggaaaataaatatctcatttttagcacaaatatatttttaatgggtacaaaaatacagttaaatacaagaaataagatctggtgtttggtagcacaatgggagastatagttaacaataacttactgtgtatttcaaaataactaaaagagtggaattggaatgttcttaatgcaaaaaaagataaatgcttgtggtgatatacatcccaattactcggatttgatttttacatattgcatgcttgtatcaaaatatcacatacaccccataaatttgcacagctaatatgtatctataataactaaaaacataaaaataaaaaaatatcccttcaacctggatgaaatataaaacaccagcctgttacttgcaaatgcttttgccatgtaaggtaaaactaatacaaagtttagcaattttgttgcaatttgttccaaagcatgcagtctgac

SEQ ID NO: 118876 - DNA, 541 bp, Homo sapiens
gaactccatcatctatgggggttttatgtacttctctaatatttttacaattttctccataatcttgcatgttctttattcatctaattctcagatactttgaatattttggtaggattatcaatgtgttattttcttatatatcatttttttctaattgcaatttttcattaagtttatttttgtatttttgtcttactcgatcttgtgtccagtaatctaatgaactctggtaaatgtgtctaccatctcacttccttgatagactaaggcaaaacagaaataamctgatagctgccttttatattactatagttatacatgtaattatatgttttgatttgttatacttaaaacatatgaatttttcatgataactcaaatatatatagatattttatagacatgctggctgtacaacatgtcattatttgattagagtataatttacccagttttggcatttatgttctatgttctccccccaccacctttctttgttattctaaacatcaattggatgagaatgttttgcatatag

SEQ ID NO: 118877 - DNA, 528 bp, Homo sapiens
cagctggaatctgcttaagcccaccaaactcccaaggggaggggggaccagcactacagtagctgtgacctgctgtttaagttgtttgagctccttgaaggaagggcagcagccaacactgggactacctaacacactaagctccctgggttgggggagggcagcactcatctctaaagctacaggctttgttttcccttgctggagccaggarggttgaacaaggcttggtcccaagacttgtcctccatggcccaacacactagctgtggcagtctgcagccagagtgtgtcttcaggcctgatcctgacccatccttcctcaccagacagggcttccctacaggaactccaatacctccagccaaaggctgagggacagaacccggatacccctgggcctgaggtcctagcgaaagaggtggccgcagtctctgtggaccagcagacttagcctttcctcctgatagttctgaggaatatgggcagcccagatgaatgggtttccccccagtggggcacacccct

SEQ ID NO: 118878 - DNA, 524 bp, Homo sapiens
ttcacactacagttaaattaacaggtatgttaattttgcttttgtgacctagcgctggttatttctgatatattttgtgcctcatccttgtttaggtacacaattatgaaaacaacattattcctatatgaaaagcaaaagcatggcatgctttactgtttagatccaagaagatattgccagtggaagccgggaatttgccgattctaacagggtgggtcagcactatgaatcatcacaggatcctgcacattttaggattgttagatcaattaactcaacagcagctgaaaaactttagttgaaataaattkctctctttaagtttaagattcccaagcacagtttcttggttctatcttagaaacgtttggtaataatgttaataaaacatgtgttctaactgccttgtagcattttatatgtgtgctaatttactttttgatccactagatagagtttgcttttctgatgaaatatgtggtagttatttaggttccttgtaaatactttttggggaattt

SEQ ID NO: 118879 - DNA, 579 bp, Homo sapiens
acatccgttaggttttatcaagaagacactcccatcctgagtctatgacctgaacagctgtgttgttagcaagttggaaagaaaaagggtgccacggctttaggatcatattaaaggccatgaagccgctgagtactttccatatcacaagcatttgtaccatgaaatcatggattcagcaatgactgctgagaaaagatgggaaaatgtacacaaagagacaggtcatagtttacatttccacaaaataagtaaatttgtatttagttgttactgaggtttgtttgtgtctggtaataagttcagaatcttttatctcattaggaaatctatcaggcaacaaaggtgtatgggggaaccatatgctgtgggaattaccgaagagatcaaaagcacagtgctggaggtgcttaagcactacctgagagaatcagacatggtcataaagttttcaaaggacaatttacaagcaargtatttgaagataagaagatgtttttctattttttggagcccaaagagaaatgaaaaaaattgcaagtaactaaataactcccccaaaaaagtaagctgagaatc

SEQ ID NO: 118880 - DNA, 586 bp, Homo sapiens
agccgctgagtactttccatatcacaagcatttgtaccatgaaatcatggattcagcaatgactgctgagaaaagatgggaaaatgtacacaaagagacaggtcatagtttacatttccacaaaataagtaaatttgtatttagttgttactgaggtttgtttgtgtctggtaataagttcagaatcttttatctcattaggaaatctatcaggcaacaaaggtgtatgggggaaccatatgctgtgggaattaccgaagagatcaaaagcacagtgctggaggtgcttaagcactacctgagagaatcagacatggtcataaagttttcaaaggacaatttacaagcaaggtatttgaagataagaagatgtttttctattttttggagccyaaagagaaatgaaaaaaattgcaagtaactaaataactcccccaaaaaagtaagctgagaatcagcagcttactcacgtctggacttatctgttagaggagtgacttagaagaaaggcttgggatgaggggaatgaggcagcctcatacacagctctcagccctggaagtgaagcaggcaccgtcctaccttg

SEQ ID NO: 118881 - DNA, 407 bp, Homo sapiens
gcaggaaattctctacaatctcttcccacaagactggaggaaaccaggatgtcattaccgtaggcacatggctgagattcccaagaaggtgaggaggggaacacctcaaaggcagcatgcttccaaccctccttccctttaatagtggatcagatctgggatcctgaaatgttctcaggttatttctctgtattcaaccagcattcactaaccctaaggcayagaatcacatcattttcccctgaaaaagcagtacagtcacactttttaggtctacattattaagcacatctttgtctctctgttttttaaggtaaaaaaatcctagactctgtagagcctatgctcgcttcaggttctgaaaggattagtagaggcacctggtgagctccatctcttgagatagt

SEQ ID NO: 118882 - DNA, 578 bp, Homo sapiens
gatcctgaaatgttctcaggttatttctctgtattcaaccagcattcactaaccctaaggcatagaatcacatcattttcccctgaaaaagcagtacagtcacactttttaggtctacattattaagcacatctttgtctctctgttttttaaggtaaaaaaatcctagactctgtagagcctatgctcgcttcaggttctgaaaggattagtagaggcacctggtgagctccatctcttgagatagttgatcttacttgattctcatcataaaactgaatttagttggattgttatcccgtttttcagtgggtaactggagtttagaatggctgagaagttgacccaagttctccctgctggtgacagcaggttttggacactgagctcaccctacctgccacataatcccacctcactgtggggcctgctgggtggagacaggactgtcttccttgtagtgttcaagttcctcaaaggcataaaatgcctgatgttgattmtgtctgacagcaaagtgactaaagcttagaggtatttgtggaatgaaatggatgaatgaatattaagagaataaa

SEQ ID NO: 118883 - DNA, 606 bp, Homo sapiens
tagaaaaatgactgaaagtaaatatcaccaatcttttaacagtcattatttctggatgatgagataatgagtagcaattttttttctatttttatttttctaggtaccctacatttttacamaaacatgtgtccttaaataaagctaaagtattgatatcaatattaaaagaactttacaataaatattaaaaccttgaagaatgaaaaatacatgttaaggcttatgatcagaaaaaatatcaataaaagtgtttgggctctttttcttaaaaaatcttatcagtaccttcacctacctgcttccactacctcaggtaacccccatcctactgcactgggtacagatagtatagcccatcagcctcaagatttcacaatatgagagaatatcacccaaatgttatctaagaaattaaaatgtagctttttctccagtacataaaaactatctacctcaactcataactgtactatatattcagctgctaattctttctgttgcaagtgattccccaacatgtcaaaaattcaggttacatgctaggatttcttactagaaaatgggagctggtcaaagcatcactgatccaaggggactagaaaa

SEQ ID NO: 118884 - DNA, 606 bp, Homo sapiens
tagaaaaatgactgaaagtaaatatcaccaatcttttaacagtcattatttctggatgatgagataatgagtagcaattttttttctatttttatttttctaggtaccctacatttttacaaaaacatgtgtccttaaataaagctaaagtattgatatcratattaaaagaactttacaataaatattaaaaccttgaagaatgaaaaatacatgttaaggcttatgatcagaaaaaatatcaataaaagtgtttgggctctttttcttaaaaaatcttatcagtaccttcacctacctgcttccactacctcaggtaacccccatcctactgcactgggtacagatagtatagcccatcagcctcaagatttcacaatatgagagaatatcacccaaatgttatctaagaaattaaaatgtagctttttctccagtacataaaaactatctacctcaactcataactgtactatatattcagctgctaattctttctgttgcaagtgattccccaacatgtcaaaaattcaggttacatgctaggatttcttactagaaaatgggagctggtcaaagcatcactgatccaaggggactagaaaa

SEQ ID NO: 118885 - DNA, 596 bp, Homo sapiens
agccaggagctgtgcatatgattacaaagttaagaaaagaaattgtagtagtggatacaaatttgagagtcgtcaggtttagataaggtwatagatagttaatacatagagtaagaaaagcagaagaccaatgattgtactctgaaaaacactaatatttcagggctggattaagaaggtaaaccatcaaaggagactgaatgtgagacactagaacataagagaaacatggaagtcagggcaggggacaactcaaagtaggaaagaatggttcacagggtcaaatattgagaatggttaggcattacttgacaatcatgacattaatgatgactttgattagagcgctttccatggagtagtgaaaaaaagatgaggaaggatggggccaatatggccaactagaagcagctacagtgtgtggctttcacagagaagagtgaaaggggtgagtaaatacaacacttttaactgaaacttccagatactccattgggactgatcagagaaacagctcgactcacagagaatagagaaaagcagggcaaggcaatggcccacctgggagcaacacagagccaagggaacctcccccc

SEQ ID NO: 118886 - DNA, 646 bp, Homo sapiens
ccctggcatgcagtagcatcacaataaataccttagataataattgtaccacttactctctctcaggctttcacagcccactgtgtctggaaccccaagataaaaagaaataacatctaaaaactcccacattttaatttctcatttcctcacccttatacttccaaccttttctctttccttcaaaggagatatcctatgtaatggcaataaccctgactcatgagaactatatattcacaccttccactgtttgctcacttctgcagaagaattagccttactctgtggtttgctagtgagtgtggagctgctgcatccctgataggagggcaacacataactccttcacatgtaccacatatccacaagcaagatcagatttgtgttgctgtttcattttcactaagaaatgaagtgaatcatgttttgtttgttttgttttgttacctatgtgatgaaaattattttccaaatcctctagtgaataataaaggcaggattattctagaaagtatactaattgcaaacagatctgtaaatattgcaaacataaacatatccgtttgcaagtattaactrcagtttctttacctatgcgtcaggaacaggtatggacggccatcatatgcattctgtcctaaca

SEQ ID NO: 118887 - DNA, 615 bp, Homo sapiens
atttttattttaacctttcctttctggttgcttattctcaccctactcggttattgtatcccaacttttctgcaatagcacaacgaatggactttagagagatgtattttcttttcatcttcaaatatgtacagttccataatgggccatctgtcattttgtgatcccttkttgacaacaatgccctaaagttttgttgtcatagcaaccacaccagagtctccaaagcaaacttgtaatcattcctactctcagaatctatccaacatggggtgggagcggaggttaacattccaggaaatttaagtccctaatatttgttatctgtttagaatgaatgcttagcctagttcacatccagtttcaatgaaccagattataataatattttttaaaatgagtaaaaggttcttatgaaagctgtgtgtgtgtgtgtgtgtgtgtgtgtgtgtgtgtgtgtgtgtgtgtttgtatgtgtatttcaggttagttttgttagagggaaattaagtcttggtttgaattctggagagatactttgatgtagcaatcaaaccttccttttcactttgctgaagaccaattttagaagagccaagaaaaaaatgcagctca

SEQ ID NO: 118888 - DNA, 615 bp, Homo sapiens
atttttattttaacctttcctttctggttgcttattctcaccctactcggttattgtatcccaacttttctgcaatagcacaacgaatggactttagagagatgtattttcttttcatcttcaaatatgtacagttccataatgggccatctgtcattttgtgatcccttttwgacaacaatgccctaaagttttgttgtcatagcaaccacaccagagtctccaaagcaaacttgtaatcattcctactctcagaatctatccaacatggggtgggagcggaggttaacattccaggaaatttaagtccctaatatttgttatctgtttagaatgaatgcttagcctagttcacatccagtttcaatgaaccagattataataatattttttaaaatgagtaaaaggttcttatgaaagctgtgtgtgtgtgtgtgtgtgtgtgtgtgtgtgtgtgtgtgtgtgtgtttgtatgtgtatttcaggttagttttgttagagggaaattaagtcttggtttgaattctggagagatactttgatgtagcaatcaaaccttccttttcactttgctgaagaccaattttagaagagccaagaaaaaaatgcagctca

SEQ ID NO: 118889 - DNA, 561 bp, Homo sapiens
tatcgtttggattctaagtaaaagacatcttagaagataggaaaatatctcaatgacatattgagggcattttccccctaacttcgtattttaaagtggaatataggcatatctatctatctatctatctatctatctatctatccacctaactacctatcatgacttaagaaaacctgtgttctgatttaatactctgaatcacgattgactactttgagtcaaccacaataacagcaaaattgtagtccctcaattcagttcaatgtagctgattcttccaatcagtcacagtaaaggggcattgggtgttttccacaataataaaaaaaattaaatgtagtatattcatgtaaaatacataaaattgtattacattttaatatataattactaatagtaataataatkttattattttaaaagttataaaggcattatatttcagaagttcagagaagaaaagaaaaaagaaaaaaagcattcctaatcccaccataacacaaccacaatgaatgttgagttttattttcttcctgtcttcattatacacaaccatat

SEQ ID NO: 118890 - DNA, 580 bp, Homo sapiens
atcacagttctaattattattattattatttttttttttttagatagggtctggctctatcacccaggcttgagtgcagtggcatgatctcaagtagctgggatgacaggcatgcaccaccacacctggctaatttttgtatttttagtagaaacggggtttcagtatgttgcccatgctggtcttgaactcctggactcaagtgatccacctgcctcggcctcccaaagtactgggattacagtcatgagccaccatgcccagtctactgttctgattttgtttcttaaaagatcttgcccataatttcttgcaaaaatctcctaacttgtattcatcctcattgttttgctcctgttcagacaatcgtccatcatrgtcaatcatactataatggagaatatttcagaataacagaatttttagaatgcaaatctgatcagatctatttcctatgttgagagcatccagtggcttccaatggttgcaagatgaaatgtaaattgcagttgtgttatcttagtccattttctgttactgtaacagaatgctttaggctaggtaatttataaagactgta

SEQ ID NO: 118891 - DNA, 586 bp, Homo sapiens
gtcacttgtccgaagaaaatgagagtcacctaaattagccttggacacaaactacatcttgaaaccaagaacagcctgtatcagtgagcttccacctaatccacaggttcttaagagtaataaataattattacttttagctactgggtgtgaggtagtaaaataatgtagcattattttagcaatagctaattgctmtaatacctgagtataacttaaatggtttggaatctgcctatgatttcatgccagaggatggaagaaagctcaaaagatgaattgacaatatagtgatggaaaaacataacattgatttttaattgacctccgtaaatatagcttattccatacttaatttcaatattaagtggccaagctaggacttgaagtcatttcttatgatgccgattattggctatttttgctaaatcatgcaatcacttatatctgaatagcaaatagcgagtgtttgatcaaaataatggctatttcatgatgatgtacacatctctttctctttctataatttttttttgtaaggttgatgacaaatcagcatggtggagagagagaaaaagcatgatgg

SEQ ID NO: 118892 - DNA, 577 bp, Homo sapiens
tataaacatattacaaatggttcattaaaagacttagttatattataaattattcattgttacaggattactcatcacatctaatcacccttttttttttttttttttgaggtaaggtctcactctgttgcccaggctggagtgcagtgggatgattgtagctactgcagccttgayctaggctcaagtgatcctcccactttagcttcccaagtagctgggactacaggcaggtatcaccacgcccagctaatttatttgtatatatttgtatatatatacacaactatatatacaacaggtggggtttcgctatattggattcaagctatccactgggttaaatctatcttctggcctcagcatctgaaagtgctggcattacaggcatgagccactgtacccagcctaacccatttattcctaataagactaacaaggtacatattaccctctttatcttaaaagaaataacaattcacagagtttaactaacaaatctaagaagtagattatagatacaggatttgaaccagagcatttgtgttctaaatgcatactcagccaatgttgtatt

SEQ ID NO: 118893 - DNA, 539 bp, Homo sapiens
ctcatctgagacaaggcaaggtccttccatctatgagcctatagaatcaaaagcaggttagttacttccaagatacaatgaaagtgcaggcattgggtaaatacactcattccaagaggagaaatcagccaaaaaaaagggggttacatgaccaatacatgtctgaaactcagcagggcaatcattaaatctttgagctccaaaataattttcttgaactccatgtctcacatccaggcctcactgatgcaaggtgtgggctcccaaggccttggctatagttcgatttgtataaaatagtgacaacattgccctatatatttataggttcatgcatatatatctgtgtttagatgtgygagaatatatttgtccttttataattacatgaacatggagacaatacagaagaatttataaattatttacataaattaagataaaaatgatagagatgaagaaggattgaacaaaaaattagctgtgactaatctcaactatctgcaaccctgtcagcagtgtttcagtttaggctctgc

SEQ ID NO: 118894 - DNA, 632 bp, Homo sapiens
ttacaactaacaggccctattagatatcttctggatgaggttaatatatcacaggatccactgtataatttaaagcttccaaatcccaaatttttaaataatatttgacaaataagaattgcaaatcatctgattaaaacttatataaaagatttttataaaacaaacagaagacaagaaacttgcaggaaataagattatgcattgatatcgtttatgtttctagagttaagagaagatattacagtcacgaaagaaaaacagtgtgcattaaaacaacaattattataaaataagagctatttgaaaatttttatttttttgaaatttttaaaaacaatagaaatttggaaaaattaatatgaataattttgtcaaaacaaaaatgaaacacagatattaaatatgcaaaataaaattggaaagttcatttcagaagaacaaatatgtaaataataagagtttcagagggagaaaaaagaagaattaaaagcaggaaattaaaaatgtaatagtawaacaacattttctcagaactaaaggatacgagtttctcaattaaaaagacccacagaatgcttaaaacaataaacaatgacctaggtaaaatgttggcaatgtgacccatgggc

SEQ ID NO: 118895 - DNA, 541 bp, Homo sapiens
ataaaaattggaacaaaacttcccattctacaaataaagtggagacaaatgattcataaaacagaatattgacatagtatattttaccttgaattgtcccttgtacggtacatactattatgtaatagcacagtaatcatgttatatgagagcaaaatgaaaaaacaagacagccatatctctaaatttttattatataagcttgtacaaataacttttttgatttatctaatactaaaatttttggtgatgttacatgaagtataaaaaatacaggtaattataatgtgggaaataaaagctatacctaatttaactaactataaatatttatttttaactaagattgaacatgaatattctttggacctgtataacatatatttaacctattgtgacagcatgttmtccggtaaaggaattcctcatggtaacagtcaggttggtgacttggtgaacttctcatctctgaaaagaacagagatgactggggtaattgtaaggaagatttgtgacaaatctaagattttacaattctcag

SEQ ID NO: 118896 - DNA, 584 bp, Homo sapiens
cattgcttagaggtaaggtagttgaggaagagctgacaaaggggttgagaaggagcagcccaaaaagtagaaagagagcaaacaaagtgatgtccagaagccaatggcaaaatgctccaagaaaaataaggtaccaactgtggctgcttaaggaaaagtatgatgaagtctaagaattgacccttggatttagcaacctgatagctggcgagcttggggcattaagcattttggtagaatgacattgaaaaatcgattggagtatgtttaagagatcagggagaagattggcaaaatgattacaaacccttccaaagaatactgttgtaaaggtaaacagataagtggagtgatagctagtagagttggctatagagtaaaaaaaaaaaaaaaaaaaaaaaaagcactttcttttttaaaatgaaaaataaggcatgtatgtattctaatgggaatgattcaattaaagggagaaarttaggatgcagaaaactagaatgagtaaaggggcactttgctgggaaagagacctaaaataagtgagaagtgatagaatctattatactggtgaggagcttggcctt

SEQ ID NO: 118897 - DNA, 581 bp, Homo sapiens
tgcaggatgggaaggagagatctgagaggaatgtggaggagagtatctcakaaggaaaaatcacatgcacaaatatatcagtgcattctatgaattagaggactgctgtagtgctagaggtacaaagttagaaaggccaggctagaagccatgctgcaggggaaactggattctatatgcaaggaggagccattgaattattatatttttacataaataaaatacaatggaagaattaaaataaacttgactagtatctctgcaaccaaacatcaaatcagtcttgttggtcattcgatttagacagtattcttatgaggagcatgtttactctgtatttttttcttcagctcaagagattgtacttttgcatttttcttcataatcattatcctattcatagaatcagtaattagtgaaattagtgaaaacaacattagtaattagtgaaaaacaagagtttgggacacttttattcatttaatctttgttaattgagaacatactatttttatagtatggggtactactgtggaagaacatatatgctggattctggggataaagcattaaacaagata

SEQ ID NO: 118898 - DNA, 633 bp, Homo sapiens
ttaatagttcttcagtgactacctctttagggttgtagagtcactgtcttagtctgttttgtgttgctataacagaataacacagactggataattaagaacagagatttatttcttatagttctggaggctgggaagtccaaggttgaggggctggcatctggtgagggtctttatgttgtgttatcccacagtgaaaggcagaagaataagacagtccacaagagagcaacaggaaaatggaacaaactcatccttttcattagcaacccactctctcgataactaacccactcccaagataatggcattaatccatttrtgaggacagagccctcttgaccaaattactctttgaagatcccacctcccaatgctattgcattggaattacattttcaacacatgaacttcgagggacacattcaaaccacagaaatcagtattttacgggtgaaaccagaaattaactgctcatgttgatttcacctatctctccttgtgtgcctctggagtgaatgcctaaagcaagcactatttccttgaagataagcaattgcatttggtcactcagaccgaagttttagaaaaacctgattttaaatgatcacataaagttatgagaggataatg

SEQ ID NO: 118899 - DNA, 633 bp, Homo sapiens
ttaatagttcttcagtgactacctctttagggttgtagagtcactgtcttagtctgttttgtgttgctataacagaataacacagactggataattaagaacagagatttatttcttatagttctggaggctgggaagtccaaggttgaggggctggcatctggtgagggtctttatgttgtgttatcccacagtgaaaggcagaagaataagacagtccacaagagagcaacaggaaaatggaacaaactcatccttttcattagcaacccactctctcgataactaacccactcccaagataatggcattaatccatttgtgaggacagagccctcttgaccaaattactctttgaagatcccacctcccaatgctattgcattggaattacattttcaacacatgaacttcgagggacacattcaaaccacagaaatcagtattttacrggtgaaaccagaaattaactgctcatgttgatttcacctatctctccttgtgtgcctctggagtgaatgcctaaagcaagcactatttccttgaagataagcaattgcatttggtcactcagaccgaagttttagaaaaacctgattttaaatgatcacataaagttatgagaggataatg

SEQ ID NO: 118900 - DNA, 478 bp, Homo sapiens
tttcaatgcatgtgttatttcaaatgcatgaattaataataaaactatatttatcaagtaagcaacccaaagttcacagtatcgcctgaggattaggtaaaggaaagttttctaaaccaagtgcaaatatacaaactaccaacattgatcccactgaaaaacttaraaaagcccatggtgaatgtcagttcatgagccgtctcccaataagacacatatgtatccactcactcacttatctgcttagtcattcatgcattaaatggacatttaagagccgagtatgtgccaaatggtgtgctaggtttagggtgctagatttgcaaccacgattacaaatcatgtttcctggtctggatacactttcttcctactttggcttgtaacaaggtggcaagaaattcaagctctcacatccactgccctgtacaccagcctcgctctgacctctgagggtgctggggaggtgcagagcaaa

SEQ ID NO: 118901 - DNA, 580 bp, Homo sapiens
cttaaaatattcaataaatccttcygtaaacagatctgggcttcgttgttccatttttagggcacaggcagagtagatttagcgtcattcttagaggctgtatgatttttggaatggtaaatgagcattggcttcaccagctgcactatcccctaacaagagagtcagcctgtcttttgaagccaggcattgaccttttaaaattttctccatatcagcgataaggctgttttgctttcttatcattcctgttttcactggagtagcactttcaattttcttcaataacttttcctttgcattcacaacttggctaattattttgcccaagaggtctagcttttggcctgtctcagcttttgacatgctttcctcaccaagcttagtcatttctagcttttaacttaaagtgagagatgtatgactcttcctttcacttgaacacttagaagccattgtagggttatgaattggtctaatttcaatattgctgtgtctcagggaataaagaagcctgaagagagggagagagatgtgcaatggccagttggtggaacagtcagtacacatacaacattta

SEQ ID NO: 118902 - DNA, 547 bp, Homo sapiens
atagaaaattcactagagcattgctgtggaaccaaagagtaaaaacccagtgtctaccaacagggaacaagataagtaaattggttcctattcatactatagagttctgtgcacttattaggaaaagcaaaggattgctctatgyggtaatatggactagttctaatcacctcctattcacccagttggtaaaggtggatcctctgccctaaataatatgagaaggtcagacaaacaacaccccacaccacttaaaagagacagatcgtggtttactagtcacatacacttgcagcctgggggaggaggacactgttcaccatacaggggctacagtccacagcagagcaaaccacaagggctgtgggaggccggctatgtagtaacaagggggagaggtgtcctcaggttcctacaggaggatgtgactaatgtcatgggctggccgggaggtgaaacctgttaggttgaggaatgggtacggcccagcaggcccagatgatagaggaaccatttaagtagggagcctttctctttgggaaggttg

SEQ ID NO: 118903 - DNA, 508 bp, Homo sapiens
gctttggttgagaacataaagatgaatctttgttctcttgtctataaaatggggatataataatctacctcctgtgagaattcaataattttataagataaagctcttagagcagtgcctggcccagagtggatactcaactaatgttaactaagaaaatgaaaatgaaaatccaggaatarcctctgcctgcaaaatgttttgaatgtaaggagggagatgagacgctgtgtatatatgcctctgttctgtatttttaatcaactactaaggccatagagaacaaagagttactcctttttaaggtaaaataaattatactcattgtccagcaaggaagaaatgaattgaaaatcctagaggcagaaaagtgcagagtttggagactaccaggtggcactgagactaaaagctttattttccatgttcagctcaagatttaatgggttgtatagtgtaaggggctaactccaggatctgctggaactcactctgggatccacagcaa

SEQ ID NO: 118904 - DNA, 508 bp, Homo sapiens
gctttggttgagaacataaagatgaatctttgttctcttgtctataaaatggggatataataatctacctcctgtgagaattcaataattttataagataaagctcttagagcagtgcctggcccagagtggatactcaactaatgttaactaagaaaatgaaaatgaaaatccaggaataayctctgcctgcaaaatgttttgaatgtaaggagggagatgagacgctgtgtatatatgcctctgttctgtatttttaatcaactactaaggccatagagaacaaagagttactcctttttaaggtaaaataaattatactcattgtccagcaaggaagaaatgaattgaaaatcctagaggcagaaaagtgcagagtttggagactaccaggtggcactgagactaaaagctttattttccatgttcagctcaagatttaatgggttgtatagtgtaaggggctaactccaggatctgctggaactcactctgggatccacagcaa

SEQ ID NO: 118905 - DNA, 508 bp, Homo sapiens
gctttggttgagaacataaagatgaatctttgttctcttgtctataaaatggggatataataatctacctcctgtgagaattcaataattttataagataaagctcttagagcagtgcctggcccagagtggatactcaactaatgttaactaagaaaatgaaaatgaaaatccaggaataacctctgcctgcaaaatgttttgaatgtaaggagggagatgagacgctgtgtatatatgcctctgttctgtatttttaatcaactactaaggccatagagaacaaagagttacycctttttaaggtaaaataaattatactcattgtccagcaaggaagaaatgaattgaaaatcctagaggcagaaaagtgcagagtttggagactaccaggtggcactgagactaaaagctttattttccatgttcagctcaagatttaatgggttgtatagtgtaaggggctaactccaggatctgctggaactcactctgggatccacagcaa

SEQ ID NO: 118906 - DNA, 508 bp, Homo sapiens
gctttggttgagaacataaagatgaatctttgttctcttgtctataaaatggggatataataatctacctcctgtgagaattcaataattttataagataaagctcttagagcagtgcctggcccagagtggatactcaactaatgttaactaagaaaatgaaaatgaaaatccaggaataacctctgcctgcaaaatgttttgaatgtaaggagggagatgagacgctgtgtatatatgcctctgttctgtatttttaatcaactactaaggccatagagaacaaagagttactcctttttaaggtaaaataaattatactcattgtccagcaaggaagaaatgaattgaaaatcctagaggcagaaaagtgcagagtttggagactaccaggtggcactgagactaaaagctttatttkccatgttcagctcaagatttaatgggttgtatagtgtaaggggctaactccaggatctgctggaactcactctgggatccacagcaa

SEQ ID NO: 118907 - DNA, 615 bp, Homo sapiens
caagtaagggcaaagacccttttgccaaatttagttggaaacactaaaccaagtcaaggtcacactattagtgaagtttactacagtcctcagcacaatgtaggcagtcataggcattaagtgaacgctgatttaagataatgcctccagcctcataactaatcatagtaccctttattatcaatattcattagctatcattacacgatgctcactgtgctgagctcagaactgtatgaatagcatttaaattaattctaacaattcattaagtaacgttattaacctcattttacagatatggaaactgagacttagaaaagcaacttgccaaagtcactcagtatgtcaggggcctgaacttgaattaagagtttgattcaagagccctgttcttaactacagttgaaccttgaacaacacgggggttaggggtgccaaacccttgtgcaaccaaaaatctgtatataatttttgactcccgcaaaactyaactactaatagcctactactgaccagaagccttactgataatataaagtcaattaacatagattttgtatgttatatgtaagagataatatattttttatacaaacatcaggaacaatatat

SEQ ID NO: 118908 - DNA, 632 bp, Homo sapiens
tctttactctgttcctttgctttgcagaagtttttagagtactgtagtcccatttgtctatttttgttttagttgtctgtgctttatgaggtcttagctataaagtcttttcctargttaatgtcctcaaatgttttccctatgttttcttgtattaatttcatagtttcaggttgaacacgtaagtcttttatccatcttgacttcacttttacatatagtgagaaatagagtcctagtttcattcttctgcatgtggatatcaagcttccctagtaccatttattgaagagtatgcctttcctcagtgtatatgcatgaattgatttttggattctctattctgttacattgatctatgtttcttttatttttcttaataacaaaaccatgctgtttgggttactatagccttttaatgtacttttgaagtcaggtaatgtgacacctgtagctttgttcctctttctcagaattatttttgctattcaggctctcttttggttccatgcaaattttaggatttaaaaatgtctgtgaaaaatgacattggtattttgctaagatttatattgaatttgttgattgttttgggcagtatggtcactttaataatataaagtcttccagtc

SEQ ID NO: 118909 - DNA, 632 bp, Homo sapiens
tctttactctgttcctttgctttgcagaagtttttagagtactgtagtcccatttgtctatttttgttttagttgtctgtgctttatgaggtcttagctataaagtcttttcctaggttaatgtcctcaaatgttttccctatgttttcttgtattaatttcatagtttcaggttgaacacgtaagtcttttatccatcttgacttcacttttacatatagtgagaaatagagtcctagtttcattcttctgcatgtggatatcaagcttccctagtaccatttattgaagagtatgcctttcctcagtgtatatgcatgaattgatttttggattctctattctgttacattgatctatgtttcttttatttttcttaataacaaaaccatgctgtttgggttactatagccttttaatgtacttttgaagtcaggtaatgtgacacctgtagctttgttcctctttctcagaattatttttgctattcargctctcttttggttccatgcaaattttaggatttaaaaatgtctgtgaaaaatgacattggtattttgctaagatttatattgaatttgttgattgttttgggcagtatggtcactttaataatataaagtcttccagtc

SEQ ID NO: 118910 - DNA, 632 bp, Homo sapiens
tctttactctgttcctttgctttgcagaagtttttagagtactgtagtcccatttgtctatttttgttttagttgtctgtgctttatgaggtcttagctataaagtcttttcctaggttaatgtcctcaaatgttttccctatgttttcttgtattaatttcatagtttcaggttgaacacgtaagtcttttatccatcttgacttcacttttacatatagtgagaaatagagtcctagtttcattcttctgcatgtggatatcaagcttccctagtaccatttattgaagagtatgcctttcctcagtgtatatgcatgaattgatttttggattctctattctgttacattgatctatgtttcttttatttttcttaataacaaaaccatgctgtttgggttactatagccttttaatgtacttttgaagtcaggtaatgtgacacctgtagctttgttcctctttctcagaattatttttgctattcaggctctcttttggttccatgcaaattttargatttaaaaatgtctgtgaaaaatgacattggtattttgctaagatttatattgaatttgttgattgttttgggcagtatggtcactttaataatataaagtcttccagtc

SEQ ID NO: 118911 - DNA, 503 bp, Homo sapiens
tggcctatcagagttcttaaataggccaccaagaccaccaccaccaccccattccccggctgaatggctttgtatacattatttatataaggataatgctagtttttttctgagagtagaaaaatgggattaatgtgaagatcaacactgaagctattttcatgagctcctkgtatatataaaccacgtttatggcaattactttagaaattagggctggccttcaccccaggtgagagtgagagttgtggtgaaaggcaagaaacttgttaaagggtttcatttcttttcctaggtaagcatcaccgcccaggagagagagggcactcgcatacctgataaataacgttgggtgttcacagttgctaatatgagaaaggtaatgaaacaattagtaacagagcgattaatgacattattaaatatactgtgtatgaattgccatcaagaaaattggttttgaaatatattttgtggaaaaatgcaacataaagcaaataaaa

SEQ ID NO: 118912 - DNA, 518 bp, Homo sapiens
ggagagcttaaagtatattgtttagaagagttatttgaatcaagtatctgttttttcagttcctcggaatattaaactaaataaaataatctctttttttcctagccatatcttcatatgcatatttagaagtgagttatttttgtactatattttatacagattttctatacaaactgaggagtttttaaaactttagtaaaaatggctatttaaaaagtgaatgaaaaaggcaatttataatctataattctctgaaaagaaagggaatcttagactgcaactttgtctctgcttttctagaaaccgaatctaacaatgacaattcaaaggaaaagcttactttaaaaataagattaaaaggataaactctgtcacagacatgtggaaaactattttgttctttggtatagaagagggagaatgaaattttataatcctgtgcttagaaaacaagtgccctgccagctttgtygaacagcagatggttgtagattggctctgtatcctgttccatt

SEQ ID NO: 118913 - DNA, 547 bp, Homo sapiens
ataaagtgcaatattttctctacagtatgtagaacatcaacaagtacattaagtaaataatgtctcttatacacattgccatgggaatccatgataagaaagctcatggtatctgtttgtgtataagcttaataatattctctactgtccaatagaatataaacacagacctcattgaaagcatggtactgtctcgtttaatctttgattttttgttttygaatgattttataatacctcattcaaaaatgctaaagtggcttcctttttttcctcttttgacaatggattgcaataggtacactgagttctatatcaaggactctaggctgtctatattgaaacatttaaaagggagaagttgtttattgtgaataatgctgctgtaattcagatgggcagtgggtatgtgaacttgagcattttcagtgaaacgatgcccagtaaatacacgagcattttttcagctctgtatattttgcataattggatggaatggaactgacaagtacaactaactaattccaaagtttctcctaattaagtc

SEQ ID NO: 118914 - DNA, 605 bp, Homo sapiens
caaattttttaaagtctggggaagatcaaataagtttatttactgtacaaggcattggtttacttttgtcttagttcacctttaaatttatagtgttaatttttagaagatttttccaattagttacctgttaaagacataaacagccccatttttctttattagatccctgagaaggaatggaagagaagtgggtaatgagaattgatgtaaatgggcatatagtttctggtgttaaggatagctagaaaaaaaaaaaagtrggaattcaaagaggtttaccacataacaaacgtgatggctgccaaattttccaaatttttagttccgattttccataagaaatcagacagcactacacagatttaagggaatttagttataatattaactatttatatggggcctttgatcagtggttttcaaacacacttttggtaatagaactctgctaaaataaaccaatgaaagagatgaggctttggttgaagtggagtgaggcatctgtagtccaagcactagttcttttccttttcttcaggcctctgagacacctctgatgactttagagatgctgctacaatctggttcctccagagtattga

SEQ ID NO: 118915 - DNA, 565 bp, Homo sapiens
tgggggctgtgtttgccccgtgactccagttctctcatacatcaggaagagttgttgattttcagtttgtgcagtaytttttcttgttgtatgaatgggagaattaatatctaagctccttacatgccgcaccagaaaataaatttcagtaacattttcaacatatgaatcttgccatattagtcaaaaccaaaagaaatgtcctattgcttttagaatataatattagaactttcttatttctgaagtgttttgtttttttcttgttcctgggcttgaagagaggacaggttagtgaataatttattatctgagaaatacacatgattatctgtttccatggagttttatcattctctacacattcataaatgtgaatgactattcaagtaaacagtgtttggcaaagcatttcaacaagcttgctctccatcctacaattcaaattgacagcaattaaatcttgccaaagaaggacttgctttttaaaagcaaaaatgagcatatcatgaaaaccagtgttttgaggtcagttactactctgaaaaatggtggtactcaacta

SEQ ID NO: 118916 - DNA, 629 bp, Homo sapiens
ttttgttggtttttaaaaattgagtgtagtagccataacgtgaaaggtttcaatggaaactactttcctactgacgttaatcaaagtagctcattttgcattatttaaactacatagctaattgttatattagtttcattcaaatatgaattttaaaagtcacttatttttagcattttataacttgtttgaacaccacaacctaatatatgattaagactcttaaatatacttgagatttctcagtttccaactatgtccctcattaagcattattcgaaaaattacttttcaaaatagctctttttgatgcctcatgaatcattgaactctctctgcagtcaatcaaatgccctcctgcttcagtcaaagcagtgactggtaatggttctaatagtgacagttccaccaactccctcctacatctcttctctactctaaacagtcaaattgaaaataaagcacgttctgcacaccaacttctctggttagcagagactattttattctgatttttaaaaactgtaagtgaagcatgcagtaaacatgagcttatactttgaaaatgaaatgcacaattttgtgatgtcagtcagatgaaaatkctgtttcatatcaacaaatggaaa

SEQ ID NO: 118917 - DNA, 510 bp, Homo sapiens
ctttaaatcatctctagatttcttatgataccaagtacaatgtaaatgttatgtagttagttatagtgtgttctttaggggataatgacaaggcagaattccatatgtgttcactttttcataaatgtttttccaaatatttttgatccatgggtggttgaatccacacatgcagaacctgtggatatggagggtccactgtacttttttctatcctcctaactacatattggtttctatttttgtctttattaaatcttaaattgtagtcatactacaaattcgatcttttgtgttgtttcatttttttctatttcttgaacagtattctgtttctgtttcaatgcattagtatccacttatttatgtttaccaaaatattacacagtcaaataattcaggaagactttgaaaatttaaagtcaacagatttgtattagcctcaattatatcrtctgtaataaatcagattatcctgtcattaggattaaatattaaaatctatttaag

SEQ ID NO: 118918 - DNA, 628 bp, Homo sapiens
ttgttacccaggttggactggactcctggcctcacattttcaaataattaatgcttatttagatttacccttacatttaacaggtttacagttgccacttgcttctcacacttgtcttttttagtgttttcttttttctttctttgttactttaaaaaggttgttcaatgaatccatgagtgtgctttcttaaaattytgtagacccaaaaagtctcagcactgtgtatagtattctatcttgcactgtatattttgcatttggaacttggtatgccattgcattattgtattagtttttcagtgaactagcttctttttaaaatattcaccaaatcagtgttctttctagtttggatttatttttatcaaatctgttcagaacttgtccaattcctgaatgtgaaaattttttttctttaatgacttacagaaaatttccagttattacctttagatattgcctcaataccatcttaaatgcacccaaagtatctaatataataataatttttgtccatcttgctctatattgataactttatttctctgtgatatatatttattatattaattttaatcatccatatctcataggtttttaaattcaattactatatttttatttt

SEQ ID NO: 118919 - DNA, 628 bp, Homo sapiens
ttgttacccaggttggactggactcctggcctcacattttcaaataattaatgcttatttagatttacccttacatttaacaggtttacagttgccacttgcttctcacacttgtcttttttagtgttttcttttttctttctttgttactttaaaaaggttgttcaatgaatccatgagtgtgctttcttaaaattctgtagacccaaaaagtctcagcactgtgtatagtattctatcttgcactgtatattttgcatttggaacttggtatgccattgcattattgtattagtttttcagtgaactagcttctttttaaaatattcaccaaatcagtgttctttctagtttggatttatttttatcaaatctgttcagaacttgtccaattcctgaatgtgaaaattttttttctttaatgacttayagaaaatttccagttattacctttagatattgcctcaataccatcttaaatgcacccaaagtatctaatataataataatttttgtccatcttgctctatattgataactttatttctctgtgatatatatttattatattaattttaatcatccatatctcataggtttttaaattcaattactatatttttatttt

SEQ ID NO: 118920 - DNA, 628 bp, Homo sapiens
ttgttacccaggttggactggactcctggcctcacattttcaaataattaatgcttatttagatttacccttacatttaacaggtttacagttgccacttgcttctcacacttgtcttttttagtgttttcttttttctttctttgttactttaaaaaggttgttcaatgaatccatgagtgtgctttcttaaaattctgtagacccaaaaagtctcagcactgtgtatagtattctatcttgcactgtatattttgcatttggaacttggtatgccattgcattattgtattagtttttcagtgaactagcttctttttaaaatattcaccaaatcagtgttctttctagtttggatttatttttatcaaatctgttcagaacttgtccaattcctgaatgtgaaaattttttttctttaatgacttacagaaaatttccagttattacctytagatattgcctcaataccatcttaaatgcacccaaagtatctaatataataataatttttgtccatcttgctctatattgataactttatttctctgtgatatatatttattatattaattttaatcatccatatctcataggtttttaaattcaattactatatttttatttt

SEQ ID NO: 118921 - DNA, 581 bp, Homo sapiens
ataattcatttacttttatttgatttgtcaggttttatttttcaaaacaagagtcagaataagtgatgtcttttagttggacttgtttctattgtttattaacatatccaaggaacacgtagaatgaattggcagaatataatcatattatcaaataattattagtttagtcagtttcataaacctagataatcaaatgaaaatacataataatataattatgtcataatttttatcaaaattttaaaattaatgaattaaatccagctaccaaagatargggtttgtgaaaagtagatacaatactagagtggaggttgtaatgaaaactcagaatgggctatagtattaaaaaaataataaagacctccagtatttttttttctcaaaatggcagattagagtcattgttagcatgcctctcctatttggaaagacagaattgtgtgtggagattcacactgtaaattttttccaagaagcaacacagaaaattaacaggaaaactgaaagaaagcacagactttttgaaagaagtgtcaggttgctgtctaaaatcatgagccaggaggaaaacttta

SEQ ID NO: 118922 - DNA, 521 bp, Homo sapiens
agtttctttcagtagaggcacaggtacagtgctggacttgggaaaatctacagaacggtcttgaagaaaaagactttcccccctcattcaccactgcagacacagctggtgcttctcttatgggaatttagcatgagtggacctgtagatagcctttctggaacacttcaagttamctgcgtccccagaggaggagtcccctccagattcagatttgcataaggcatagaatcacaatctctctctacttggaacgtgagaattcctgcaaataaaaagggcctgctaatctgaatagctagaactgtatttaggagtgtgacctgctttcctgggggcctggcaagggagctgaagtggctccctcccttccccgtgaaaagacctcagtgcatttcactaagagctcccacagatgcctcggtcaaggcttgggcttcttcccaccattgggtattgcatttaccaatctgctggttttcactcagggacacctcccctactggcctgaaatctgaatt

SEQ ID NO: 118923 - DNA, 414 bp, Homo sapiens
aattgtttctggctgtagctccttccatgctttgtacatcttacttgtggtaggcagaatcacagctctccacaratgatgtgatttggctgtatccccacccaaatctcaccttgaattgtaataattccatgtgaagaatggggtcaggtagagagaatttaatcatggggacggtttatcccatgctgttcttgtggtagtaaataagtttcacgagatctgctgggtttataaacgggagttctcctgcacaagctctcttgcctgccaccacgtgggatgcaacattgcttctcattggctttccaccatgattttgagggctcaccagccatgtggaactataagtcagttaaacctctttcttttataaattacccagtctcagctgtgtctttattagcagtgtga

SEQ ID NO: 118924 - DNA, 414 bp, Homo sapiens
aattgtttctggctgtagctccttccatgctttgtacatcttacttgtggtaggcagaatcacagctctccacagatgatgtgatttggctgtatccccacccaaatctcaccttgaattgtaataattccatgtgaagaatggggtcaggtagagagaatttaatcatggggacggtttatcccatgctgttcttgtggtagtaaataagtttcacgagatctgctgggtttataaacgggagttctcctgcacaagctctcttgcctgccaccacgtgggatgcaacattgcttctcattsgctttccaccatgattttgagggctcaccagccatgtggaactataagtcagttaaacctctttcttttataaattacccagtctcagctgtgtctttattagcagtgtga

SEQ ID NO: 118925 - DNA, 607 bp, Homo sapiens
gaattcacgagcaagaccctagactgtggtgtttgcaggaagaaaccaagcagggtaaacaagcttaggaccggctcgtttgaataatttcagtgggctctggggcataagagctgtccctggttctctggtttttggccctagcgtgattaggacagaagcacagtggcctggagtgtgacagccctatagagtatttgtttgggaattggttagtttgtatttgtaaagcccatcttcatgcgragttcaggggagacttcgtagccagaagctgaggcaaggtgactccagcatactatccatcttcaagaacaagatgtgtctgaattgctgtatgttataaagtttcgatgtctaatagagcaaatctttcatcctgttggttctctttgatttaatttgcttttttttctctctaagtactgttctcggaataagccaatctgatatgtgtgtcactattccaaggaatgagtagatcacactttatttttctgcttcttgtgaacattaattagttcagttttctgaaattttcaatgctattgtgattttttaaaattaacaatgctactttgcttattgtgtacttgtcaccagaaat

SEQ ID NO: 118926 - DNA, 597 bp, Homo sapiens
tgtccctggttctctggtttttggccctagcgtgattaggacagaagcacagtggcctggagtgtgacagccctatagagtatttgtttgggaattggttagtttgtatttgtaaagcccatcttcatgcgaagttcaggggagacttcgtagccagaagctgaggcaaggtgactccagcatactatccatcttcaagaacaagatgtgtctgaattgctgtatgttataaagtttcgatgtctaatagagcaaatctttcwtcctgttggttctctttgatttaatttgcttttttttctctctaagtactgttctcggaataagccaatctgatatgtgtgtcactattccaaggaatgagtagatcacactttatttttctgcttcttgtgaacattaattagttcagttttctgaaattttcaatgctattgtgattttttaaaattaacaatgctactttgcttattgtgtacttgtcaccagaaatgcaagagctaagatgtctctggaaatggaattcctgggtcacagggttggcacatgatcaacattattagataatgttaaattgttgtacaatgtaatcacatt

SEQ ID NO: 118927 - DNA, 597 bp, Homo sapiens
tgtccctggttctctggtttttggccctagcgtgattaggacagaagcacagtggcctggagtgtgacagccctatagagtatttgtttgggaattggttagtttgtatttgtaaagcccatcttcatgcgaagttcaggggagacttcgtagccagaagctgaggcaaggtgactccagcatactatccatcttcaagaacaagatgtgtctgaattgctgtatgttataaagtttcgatgtctaatagagcaaatctttcatcctgttggttctctttgatttaatttgcttttttttctctctaagtactgttctcggaataagccaatctgatatgtgtgtcactattccaaggaatgagtagatmacactttatttttctgcttcttgtgaacattaattagttcagttttctgaaattttcaatgctattgtgattttttaaaattaacaatgctactttgcttattgtgtacttgtcaccagaaatgcaagagctaagatgtctctggaaatggaattcctgggtcacagggttggcacatgatcaacattattagataatgttaaattgttgtacaatgtaatcacatt

SEQ ID NO: 118928 - DNA, 558 bp, Homo sapiens
aaaacattgtaggaaaataagtagcatttttatgaaccaaaatcattgcagctaataaccaaatcaagaacacaatccaatttacaatagccacaaagaaaatgaaatacctaggaattcatccaaccaagggggtcaaagaccactacaaggagaagtacaagacactgttgaaagaaatcagagatgacacataaatggaaaaatatccatgctcatggattggaagaatcaatattgttaaaatggatatactgcctaaagcaatttacagattcaatgctattcctatcaaaataccaatgtcattttttaaataattagaatgaaacctattataaaattcatctggaaccacaaaagagcttgaatagccaaagcaatcctaagcaaaaagaaaagccagaggtatcacattgccagacttcaaactgtactataaggctacagtgatcaaaacagcrtggtactgatacaaaaacagacacacagaccagtggaagagaatacagtacccagaactaaatttgcccacttacaactatgtgacctttgaag

SEQ ID NO: 118929 - DNA, 497 bp, Homo sapiens
cgcttatacattgtaggtgggaatgcaaactagttcagccactgtggagagaagtttkgagattcttcaaataacttaaaatagaactaccatttgacccagcaatcccactattgagtatatatacccaagggaaaataatttattttatctaagagacacatgcacccgtatgttcattgcagcactattcacaataccaaagcaatagaattaacctaagtgtccatcaatagagaattgggtaaagaaaatatggtatgtatacatcacaaaaaacaatgcagccataaaaatgaacaaagtcatgttctttgtggcaacatgaatggagctggagaccattatcctaagtgacctaatagaagaacagaaagccacataccacatcttctcacttatagatggtagctaaacattgaatacacatgttaagatgggaacaatagacattggggaccactagattggggaggaaaggtaggggttgtgggctg

SEQ ID NO: 118930 - DNA, 497 bp, Homo sapiens
cgcttatacattgtaggtgggaatgcaaactagttcagccactgtggagagaagttttgagattcttcaaayaacttaaaatagaactaccatttgacccagcaatcccactattgagtatatatacccaagggaaaataatttattttatctaagagacacatgcacccgtatgttcattgcagcactattcacaataccaaagcaatagaattaacctaagtgtccatcaatagagaattgggtaaagaaaatatggtatgtatacatcacaaaaaacaatgcagccataaaaatgaacaaagtcatgttctttgtggcaacatgaatggagctggagaccattatcctaagtgacctaatagaagaacagaaagccacataccacatcttctcacttatagatggtagctaaacattgaatacacatgttaagatgggaacaatagacattggggaccactagattggggaggaaaggtaggggttgtgggctg

SEQ ID NO: 118931 - DNA, 497 bp, Homo sapiens
cgcttatacattgtaggtgggaatgcaaactagttcagccactgtggagagaagttttgagattcttcaaataacttaaaatagaactaccatttgacccagcaatcccactattgagtatatatacccaagggaaaataatttattttatctaagagacacatgcacccgtatgttcattgcagcactattcacaataccaaagcaatagaattaacctargtgtccatcaatagagaattgggtaaagaaaatatggtatgtatacatcacaaaaaacaatgcagccataaaaatgaacaaagtcatgttctttgtggcaacatgaatggagctggagaccattatcctaagtgacctaatagaagaacagaaagccacataccacatcttctcacttatagatggtagctaaacattgaatacacatgttaagatgggaacaatagacattggggaccactagattggggaggaaaggtaggggttgtgggctg

SEQ ID NO: 118932 - DNA, 620 bp, Homo sapiens
tcattgcagcactattcacaataccaaagcaatagaattaacctaagtgtccatcaatagagaattgggtaaagaaaatatggtatgtatacatcacaaaaaacaatgcagccataaaaatgaacaaagtcatgttctttgtggcaacatgaatggagctggagaccattatcctaagtgacctaatagaagaacagaaagccacataccacatcttctcacttatagatggtagctaaacattgaatacacatgttaagatgggaacaatagacattggggaccactagattggggaggaaaggtaggggttgtgggctgaagaactacctgttgggtactgtgttactgcctgggtggtaggatcactgggactccaagcctcagcatcacacaattactcatgtaacagtctttcattaacctataataaaagttgaaattaattaaaaaaacaaaacaactacaytgtttcattgctctagatttctttttgtctccatttaattatggagagacttgcagagacagaaatgactgtcatgtgttcttatacacataaagccctagaaacaggagccacagcacatcatgcactggggccatatggggaagtacca

SEQ ID NO: 118933 - DNA, 601 bp, Homo sapiens
tccccacttaacccatacatgattattttatctttgaaattattcagaaagcatgatactgagcaaaatcttcaatctgagtccgatttgacaattcaatgctttttgtgggttcagattggcactgagagcaggattgtcttttagacccacacaccaaaatagtgaatgttttctttttctacctgggctccttttcaaaaggaaataatggaaaaatatgagaatttgttctcaggatagttggctgtacatttttggtatgaggtagtggaatctttgaggcaggttaagggaaataagtcttaccattgaaatctgggggccatagactacagtctgggagtacgggtctagggagtacatggacaaagggaaattgggtacaaatcccattgactgactcctgctagcatacytgtaaaagctaaccttttaataggttagtttttaataggaggagatgatagtgggagaaaaagctgcgagattacattttattcactggaaaaccttcttatccctccctggtttcttggagaaatttcatgtatccttagaaatgactcaaaatattgattattggacaaactatttatgt

SEQ ID NO: 118934 - DNA, 597 bp, Homo sapiens
ggctaatcattaaatggctgtaaacttttgagaaaacacttccaaatactgtgacagcatatcggctgcagttgttaaggtgagatttgtcagtcctatactgagaagggtaactgctactactcctctccaaattgccaattggattctccttttcacatgataggaatgatacaagtgtaaatgttgacaggctttatattttccagagagaaaacaccttagttaatgctattgatacaaataataagagatagagtgaatgggataagctaatgattctctgtcttacaagacttatataaccttgagggccaaatatatatattcagagaacagtaacaaacatacaggtttagttactatacatgggattatayggagaaaaagcatttatatcatgtgcacaacagggagaaattaaaaatcagaagagaaaatagaaaggcagctcacttgaattaatttacttttgaagaaaatataaataggatttaaaaagtaagccttgatagaatttttaataagaaaataaaagcacattatcaacttttgaatcagaggagaggagtactgtagcccccaccaatcccttaa

SEQ ID NO: 118935 - DNA, 497 bp, Homo sapiens
gagtctccatatgacttataaacatgtaaggagaaatagtaaaattgttgtaaaattaaaagaagaacagaaattcataaaataagctataacaatcaggttaaacaacaaaaacaaaaagcaaagcgtctatcagtaacatgattgaatagaagagccgagagagagttgtcagtggtaaaggaataaatattatctcatttgatagagtgattgtattagtccattttaacactgctgataaagacatacccatgactggacaacttacaaaagaaaatggtttattggacatacagttccacatggctggggaggactcacaatcatgrcaaaaaggagcaagacacatcttatgtgggtggcagcaggcaaaaaaagagcttgtgcagagaaaatcctgtttttaacaccactagatcttgtgagacccattcactattatgagaacagcatgggaaagacctgcccccatgattcagtcttctcccatcagg

SEQ ID NO: 118936 - DNA, 497 bp, Homo sapiens
gagtctccatatgacttataaacatgtaaggagaaatagtaaaattgttgtaaaattaaaagaagaacagaaattcataaaataagctataacaatcaggttaaacaacaaaaacaaaaagcaaagcgtctatcagtaacatgattgaatagaagagccgagagagagttgtcagtggtaaaggaataaatattatctcatttgatagagtgattgtattagtccattttaacactgctgataaagacatacccatgactggacaacttacaaaagaaaatggtttattggacatacagttccacatggctggggaggactcacaatcatggcaaaaaggagcaagacacatcttatgtgggtggcagcaggcaaaaaaagagcttgtgcagagaaaatcctgtttttaacaccactagatcttgtgagacccattcactattatgagaacarcatgggaaagacctgcccccatgattcagtcttctcccatcagg

SEQ ID NO: 118937 - DNA, 553 bp, Homo sapiens
tcagggtttggggctctttaagcaagaatacaaaactacaaactcaaaactggaaactcaaatgcaaatgaggtggccggaaatgtaagcctcataacttaggataagagaacaaaagctgataaacattttctataaagggcacgatagtagatactttaggcttgcaggccatattatttgtgttgtaaatatgcaactttgcctttgtagtgcttaagcagctgtaggcaatatgtaaaggaatgtctgtggctgagttcctataaaattttatttataaaaacccgtggcagcctggctttggctyattggctatagtttgcctacccctggcttaataaatctgcctctattcataagtaagattctgcttgtgttttgactttgccatgtgctcagggaaggtaagtaaaattaaaatgtctaggagaagaaagtgtaaataacaacaaattcctgttggcaacgtatttatgaatatggaagaagagatgccctcttatcctgtgagatggaaagaaaaaaagccaagaataaatacaaattaaag

SEQ ID NO: 118938 - DNA, 527 bp, Homo sapiens
tgtctgctttttcctggcttttatctttgcctgtaacattccaccccagaggctcacatggcttctcctttctcttcaagtcttgctaatcattccttgttgattccttaaaatcaacacatataaatgtgtatccctttcttaaacaagagatccctttcatcctttacctttctgtatttgttagtagaattaaccatctgctagtatactataaaatttacttatgtattatatatattatctattctagtgrtatgatttgtctccattcccacacaaaatctcatcttgaattataatcagatttataatccccatgtgttgggggagggacctccgggaggtgattagatcatggggtggttctcccatgttgttctcgtgatagtgagtgagttctcatgagatttggtggtttcatagaaagcttttacccccttcactctgcacttttccttcctgccacaatgtgcagaaggacatggtttgcttccccttctggcatgattgtaagttttctgagg

SEQ ID NO: 118939 - DNA, 527 bp, Homo sapiens
tgtctgctttttcctggcttttatctttgcctgtaacattccaccccagaggctcacatggcttctcctttctcttcaagtcttgctaatcattccttgttgattccttaaaatcaacacatataaatgtgtatccctttcttaaacaagagatccctttcatcctttacctttctgtatttgttagtagaattaaccatctgctagtatactataaaatttacttatgtattatatatattatctattctagtgatatgatttgkctccattcccacacaaaatctcatcttgaattataatcagatttataatccccatgtgttgggggagggacctccgggaggtgattagatcatggggtggttctcccatgttgttctcgtgatagtgagtgagttctcatgagatttggtggtttcatagaaagcttttacccccttcactctgcacttttccttcctgccacaatgtgcagaaggacatggtttgcttccccttctggcatgattgtaagttttctgagg

SEQ ID NO: 118940 - DNA, 631 bp, Homo sapiens
atctgaacgtttgtcacatgggtatactgtgtgatgctgaatattggacttctaatgatctcatcacccatgtagtgaacataagacccaatagatagtttttcaacagttggccagctccctctctcttcccttttggaatstccagtgtttatggttcccatctttgtgtttttgggtaccaaatgtttacctcctacttataagtgaaaacgtggtatttagtttgctgtttttgcattaattcgacaagcattttggataagcagttcttaaccggtaaaatgtgttgttgcatactaataatgaatcactaaaacataataataaattctattcacaatagaataatcacaagcatataattcttaggaataaaggcaacaaaatatgcgtagttcttttatctagaagctaaaaaatattattgagaaattttaagaaaaaatagaaaacgtagatctatacatgttcttattgatatgttatttatattaagatatccatccaccttatattgatctacaaatgtatttcaactctgatgaaaatcacatcagattttactgcaaaataaaaataaacaatgtgatgtcaagatgtatataaatatgcagaaatacaaaggaac

SEQ ID NO: 118941 - DNA, 631 bp, Homo sapiens
atctgaacgtttgtcacatgggtatactgtgtgatgctgaatattggacttctaatgatctcatcacccatgtagtgaacataagacccaatagatagtttttcaacagttggccagctccctctctcttcccttttggaatctccagtgtttatggttcccatctttgtgtttttgggtaccaaatgtttacctcctacttataagtgaaaacgtggtatttagtttgctgtttttgcattaattcgacaagcattttggataagcagttcttaaccggtaaaatgtgttgttgcatactaataatgaatcaytaaaacataataataaattctattcacaatagaataatcacaagcatataattcttaggaataaaggcaacaaaatatgcgtagttcttttatctagaagctaaaaaatattattgagaaattttaagaaaaaatagaaaacgtagatctatacatgttcttattgatatgttatttatattaagatatccatccaccttatattgatctacaaatgtatttcaactctgatgaaaatcacatcagattttactgcaaaataaaaataaacaatgtgatgtcaagatgtatataaatatgcagaaatacaaaggaac

SEQ ID NO: 118942 - DNA, 631 bp, Homo sapiens
atctgaacgtttgtcacatgggtatactgtgtgatgctgaatattggacttctaatgatctcatcacccatgtagtgaacataagacccaatagatagtttttcaacagttggccagctccctctctcttcccttttggaatctccagtgtttatggttcccatctttgtgtttttgggtaccaaatgtttacctcctacttataagtgaaaacgtggtatttagtttgctgtttttgcattaattcgacaagcattttggataagcagttcttaaccggtaaaatgtgttgttgcatactaataatgaatcactaaaacataataataaattctattcacaatagaataatcacaagcatataattcttaggaataaaggcaacaaaatatgcgtagktcttttatctagaagctaaaaaatattattgagaaattttaagaaaaaatagaaaacgtagatctatacatgttcttattgatatgttatttatattaagatatccatccaccttatattgatctacaaatgtatttcaactctgatgaaaatcacatcagattttactgcaaaataaaaataaacaatgtgatgtcaagatgtatataaatatgcagaaatacaaaggaac

SEQ ID NO: 118943 - DNA, 601 bp, Homo sapiens
gtgttgcacattgcctcaactggaggttcatgatgcatattaaaataagaaaggcttagagaattcttacagcaaggaaaacaatgtaagtttatttaatttagtgttttagctatatatttaataattattttrggtaggcagttgtttaaagacaatagaaattacttggaatttaaagcaagcaaaaatgaatgcgttggaaaagcacaacgcagctcttagaattgaaaaaaaaagtaggtgaaccagcctcaggcagtaatcagagagcaagtcagaaccagtatcagaaaaaggaagttctgcttttcatgtggctattgtcctgtcagtcatgaccgctggccactgccagcaaagcatgcacaggcattttctggaatgctgctgggctctgctttagcttgtcacttcccactttaccattggattcaaaaaatctatccatctgacaggaataatttcagactctctgcctacttcttaccttgcaaggttaaaaatgcaaggaatgagtggctattcttgggtctctggtttacattttagcctccagttggtgggaagagaaaaatctactcacaaacagcttcaaaac

SEQ ID NO: 118944 - DNA, 601 bp, Homo sapiens
gtgttgcacattgcctcaactggaggttcatgatgcatattaaaataagaaaggcttagagaattcttacagcaaggaaaacaatgtaagtttatttaatttagtgttttagctatatatttaataattattttgggtaggcagttgtttaaagacaatagaaattacttggaatttaaagcaagcaaaaatgaatgcgttggaaaagcacaacgcagctcttagaattgaaaaaaaaagtaggtgaaccagcctcaggcagkaatcagagagcaagtcagaaccagtatcagaaaaaggaagttctgcttttcatgtggctattgtcctgtcagtcatgaccgctggccactgccagcaaagcatgcacaggcattttctggaatgctgctgggctctgctttagcttgtcacttcccactttaccattggattcaaaaaatctatccatctgacaggaataatttcagactctctgcctacttcttaccttgcaaggttaaaaatgcaaggaatgagtggctattcttgggtctctggtttacattttagcctccagttggtgggaagagaaaaatctactcacaaacagcttcaaaac

SEQ ID NO: 118945 - DNA, 570 bp, Homo sapiens
attatgttacattttgagtaattattatgatattcaaccattaatttatacatttgtttttaatttaacatatattttgagtactaaatatatcaggcactattataggtgcttgtgctaattaacaaccagttttctagaatgtgtaaagtgccatagaaaatacctcttgggttctatgctcactacctggatgatgggttcagtcatacccaaacctcagcatcatgcagtatactctgtaacaaacactcacatatatcctcaaatctaaaagttgaaattaaaaaaaaaataaaaagcaaataattatattaagtatattaactaaaacaaaactgattccgttttagaaaaagaatttagaaatgarggggagtggagactagaataacacttatggtgttcaatcagaatcaaaactatcaatatatacttaagtttactttttttctacgttagatagaaattgaaaagaatgtgtagatatataaatagacctagacgcacgtttgtgtgtgaatgtgtatatatatatatatatatttttttttttttgagatggagtct

SEQ ID NO: 118946 - DNA, 496 bp, Homo sapiens
ttaagttaatctccataaagacaaagctgattgtttttacatctcttcttacacattttactgtctggaatgcagaagtattgctgaacttagccatgaggatgaaacactaagataggattataaagagaatacaagatgaaaatctcctggggcccgggatgaaytcatggaaaaaacatccccaccaactctcttaattgttggagagaaatataagcctacaataagggtcactccttatactcatcatttttgagttagagatattgacaagtgtatcaaactatatattttctcccacaagacattgaggggcacacttcttttattctccaaaagtaacaaaaaatgctttggtgtctaatttttagcctgcaagggctgtcatagtgttgttttcaaagacttacatgttttatttccttacctcactgcaacattataaatttatcttctgtgctaacatcatgatagcatctaatggttccaagag

SEQ ID NO: 118947 - DNA, 496 bp, Homo sapiens
ttaagttaatctccataaagacaaagctgattgtttttacatctcttcttacacattttactgtctggaatgcagaagtattgctgaacttagccatgaggatgaaacactaagataggattataaagagaatacaagatgaaaatctcctggggcccgggatgaattcatggaaaaaacatccccaccaactctcttaattgttggagagaaatataagmctacaataagggtcactccttatactcatcatttttgagttagagatattgacaagtgtatcaaactatatattttctcccacaagacattgaggggcacacttcttttattctccaaaagtaacaaaaaatgctttggtgtctaatttttagcctgcaagggctgtcatagtgttgttttcaaagacttacatgttttatttccttacctcactgcaacattataaatttatcttctgtgctaacatcatgatagcatctaatggttccaagag

SEQ ID NO: 118948 - DNA, 545 bp, Homo sapiens
gcagtgcacatggggttctgccactcacagtgtaggatgtttcaccatgtcttcctgaaatgatttgcaaatagtcaagaacaaatgactgtggtgatagagatgtatttattgctgccaccttgttcccacttcaccgttgcatatttgtacacaggacacatatttattcttttaagtttagattttactgagaaatgaggaccttatctggacttcactgggagaattatgagtggccagagatactacattttgagctggatgccagaccttgaaagaactctgcatttttcattttgagagaagtcrgtgtgttttataatgggaggaagattaaagcaggtattttggcatcagaaggactgaccttgacagagattggtgagataacattatttctttctttggaccacaaggaaatgctgtatttttcagcctcaattgcaggtaggatgagaccatttcactggtgaatgaaatgtaggtagaagttatatttcccacttttagactgagctataagatacctcacgcaatgcttc

SEQ ID NO: 118949 - DNA, 380 bp, Homo sapiens
tatctggacttcactgggagaattatgagtggccagagatactacattttgagctggatgccagaccttgaaagaactctgcatttttcattttgagagaagtcggtgtgttttataatgggaggaagattaaagcaggtattttggcatcagaaggactgaccttgacagagattggtgagrtaacattatttctttctttggaccacaaggaaatgctgtatttttcagcctcaattgcaggtaggatgagaccatttcactggtgaatgaaatgtaggtagaagttatatttcccacttttagactgagctataagatacctcacgcaatgcttctcatactcctctttatattaaatgcagaggattcagtgaaaa

SEQ ID NO: 118950 - DNA, 557 bp, Homo sapiens
tatttattgctgccaccttgttcccacttcaccgttgcatatttgtacacaggacacatatttattcttttaagtttagattttactgagaaatgaggaccttatctggacttcactgggagaattatgagtggccagagatactacattttgagctggatgccagaccttgaaagaactctgcatttttcattttgagagaagtcggtgtgttttataatgggaggaagattaaagcaggtattttggcatcagaaggactgaccttgacagagattggtgagataacattatttcyttctttggaccacaaggaaatgctgtatttttcagcctcaattgcaggtaggatgagaccatttcactggtgaatgaaatgtaggtagaagttatatttcccacttttagactgagctataagatacctcacgcaatgcttctcatactcctctttatattaaatgcagaggattcagtgaaaacctttaaggaatttcagaaagttaatcctctacagaattattatatgaatgagaagaaaaaaaattctgttaagt

SEQ ID NO: 118951 - DNA, 557 bp, Homo sapiens
tatttattgctgccaccttgttcccacttcaccgttgcatatttgtacacaggacacatatttattcttttaagtttagattttactgagaaatgaggaccttatctggacttcactgggagaattatgagtggccagagatactacattttgagctggatgccagaccttgaaagaactctgcatttttcattttgagagaagtcggtgtgttttataatgggaggaagattaaagcaggtattttggcatcagaaggactgaccttgacagagattggtgagataacattatttctttctttggaccacaaggaaatgctgtatttttcagcctcaattgcaggtaggatgagaccatttcactggtgaatgaaatgtaggtagaagttatatttcccacttttagactgagctataagatacctcacgcaatgcttctcatactcctctttatattaaatgcagaggattcagtgaaaacctttaaggaatttcagaaagttaatcctctacwgaattattatatgaatgagaagaaaaaaaattctgttaagt

SEQ ID NO: 118952 - DNA, 392 bp, Homo sapiens
agaagacatattcaaaatgaaacaaagggataaggacagctcaaaacaaaacaaaacaaaacaaaatctcaaggctgccaatacagccagataactcgtggctatagttatgcctgctaaggtttgtattcatggggcttggctttgattagctcccttggtcttattttcccaaacaaagaaatctctgggttatgggcacctatttactccgatcacctggaaggatttgcaggataattgttcagaattaaaatattgatccagattttttatattaytcatccctttggttcttttgagctgcagccgtacattgctggttggtccacaggaataagcagggtagtctaaaatgtaggcaaaaacttaaaaacaactaatgggattat

SEQ ID NO: 118953 - DNA, 518 bp, Homo sapiens
gaggacatgtgggattttgaatttttggacacctctgtaaagttatttggcaagcaataataaagctaccacttatttatcaagtgtttactaatgtactaagcattgccatatatggtttattacttctatcctatttagtattcaaatcaatatgatgtctatttttgttctgttttaaaaataaagaagctaacatgtccaagccacatatttagtaagtattggaactacatcaaaacaagaaagaaacatttcaatggtttatcctactgtctacttcctaaaggaaaattataaatttacagtaactgatccaaatacatttccagagttactttrgctttcacagtgttggccagcacaatgtgttttttgtttgtttgtttgcttgcttccttgtttttaaattgagaacattcccatagttgactatttcaatatttaattctccaatcttgtatttttggtttatcttgataaacatcaaataaggtggaggcagtttacactgaata

SEQ ID NO: 118954 - DNA, 593 bp, Homo sapiens
gtttcagcgcatttatatagcagcacccaagtttttataatctgttaagtattactatctaggattagctactgaagaatcaagaaccggtagttgatgaacttgaaagacaattatcctatatagtgtttcttgaggacactaatttcttaagatagaatgagaggaaaacataatatccacaaacagaaataaattttggaatattatatgctttagcttcctcttggatatttacaaaaatattagcatattaacgattacagaatgaagaaacctttttagctacatttaaactagtcctagagtttgratatatttcctccaaattcatgtttaagtttaatcctcaaagtgatgaggaagtggggcctttggaggcaattaagtcatgatggctgtgcactcataatgagattaatatcctaattaaggaagcttctgagagcttcctggctcttccatttcttctgccatgtgacaacatggcatttgtccattttgtccctttgcttttcctaccatgtgattaagtcatgcaaaatgacatctatgaaacaggccctcatcagacaatgaatatgttggtgcca

SEQ ID NO: 118955 - DNA, 593 bp, Homo sapiens
gtttcagcgcatttatatagcagcacccaagtttttataatctgttaagtattactatctaggattagctactgaagaatcaagaaccggtagttgatgaacttgaaagacaattatcctatatagtgtttcttgaggacactaatttcttaagatagaatgagaggaaaacataatatccacaaacagaaataaattttggaatattatatgctttagcttcctcttggatatttacaaaaatattagcatattaacgattacagaatgaagaaacctttttagctacatttaaactagtcctagagtttgaatatatttcctccaaattcatgtttaagtttaatcctcaaagtgatgaggaagtggggcctttggaggcaattaagtcatgatggctgtgcactcataatgagattaatatcctaattaaggaagcttctgagagcttcctggctcttccatttcttctgccatgtgacaacatggcatttgtccattttgtccctttgcttttcctaccatgtgattaagtcatgcaaaatgacatctrtgaaacaggccctcatcagacaatgaatatgttggtgcca

SEQ ID NO: 118956 - DNA, 553 bp, Homo sapiens
gggtaatgtgatatttaagctactggcatagtgtggtaaaccgaagatatgacctgaaatgtttgtaacttatatgataataagtggagagagctgaaaattaggtaaataaatagataaccacagattttgatctgttatacaaatacgataaatatggcaggaaggactgtaagctacggagtagagtaagagaaagcaattataaaaagattggcaactaaatgttatctaacaagtgatacttaaaggctgagatactttaaactrtaagacacagttttgtaaaaatcttggaaattgtgttttttaagttaatggtgcaatttatctaatgtgtaaatacaagtgctggtttgttgaaggagcagaaaaaaaaagattagtttgagtatggggaaagagaaggagattggagagaggtttaagaactaagcatatgccagtttatatagagtttatgtaacaaagaagagattttttgtatatcaggttgtattgttgcataatactataccccaaacttactggtataaaatagtaaacttgtatt

SEQ ID NO: 118957 - DNA, 541 bp, Homo sapiens
ctcaactgccatgaatataaatcaaattcatctgcatcccctatatcagactaaatgtgtttgtttctcagtattctgctatrttccttgtattaattttaatagaatcaaaactgagatatggaagaggatgttatatattgaacaccttttcttccatctagcatacccaatatttgccgcatgggccagaaatatgagaattagaaatgcgtctttatttggggtccttacttcattcacaattctagatagtcttctagttatgacaaagtctaagaattttatttttaaataaattattatcatatttttctgttaccattttttggttggttttccatgcagtttgtgcctacttccaggaggaagacacctacacacatttactcttctctgctttctttacaaatttgaatatgaaaaagagagccaggaattgccaaaagctggttactccaagaccctaggcattctgtcaaaatctaacttggatgatcatgtaaaatacttatcattttattaatatcagtatgttcat

SEQ ID NO: 118958 - DNA, 541 bp, Homo sapiens
ctcaactgccatgaatataaatcaaattcatctgcatcccctatatcagactaaatgtgtttgtttctcagtattctgctatgttccttgtattaattttaatagaatcaaaactgagatatggaagaggatgttatatattgaacaycttttcttccatctagcatacccaatatttgccgcatgggccagaaatatgagaattagaaatgcgtctttatttggggtccttacttcattcacaattctagatagtcttctagttatgacaaagtctaagaattttatttttaaataaattattatcatatttttctgttaccattttttggttggttttccatgcagtttgtgcctacttccaggaggaagacacctacacacatttactcttctctgctttctttacaaatttgaatatgaaaaagagagccaggaattgccaaaagctggttactccaagaccctaggcattctgtcaaaatctaacttggatgatcatgtaaaatacttatcattttattaatatcagtatgttcat

SEQ ID NO: 118959 - DNA, 541 bp, Homo sapiens
ctcaactgccatgaatataaatcaaattcatctgcatcccctatatcagactaaatgtgtttgtttctcagtattctgctatgttccttgtattaattttaatagaatcaaaactgagatatggaagaggatgttatatattgaacaccttttcttccatctagcatacccaatatttgcygcatgggccagaaatatgagaattagaaatgcgtctttatttggggtccttacttcattcacaattctagatagtcttctagttatgacaaagtctaagaattttatttttaaataaattattatcatatttttctgttaccattttttggttggttttccatgcagtttgtgcctacttccaggaggaagacacctacacacatttactcttctctgctttctttacaaatttgaatatgaaaaagagagccaggaattgccaaaagctggttactccaagaccctaggcattctgtcaaaatctaacttggatgatcatgtaaaatacttatcattttattaatatcagtatgttcat

SEQ ID NO: 118960 - DNA, 560 bp, Homo sapiens
aaactgtcataaaaataaaactgtactttcaaatagctgtagtccacagcacagctctaacccaaattgtcatttcaactgcttcacattattagaaaatacttaccttctagctttgaacatgaaagaaaagtactcttagtctatcagtttccctaactaggagattcatgtatttgttggggtcatataaagaaactgatagtgcaatttaataaggataatgcagagaggrtttggagactctttgcaaagctgttgaagggatgagaaagaacacaagagactgcagtaacctttggttagagtgatttttatcacccctagtttgaaagggccagtggcaaagcaagtttactaactttaggataaagtagactcatcaggaaaagagcaaccacctaagcttaagggacaaagccaatcacccctgggaagccagtgttaaaaatacttgatcttgctctctgctttcctgagaatacaaatcattcactttaactcattgaattcactcagcagtcagaagaaaaggaagcctcttgttggaattcatacta

SEQ ID NO: 118961 - DNA, 477 bp, Homo sapiens
atattcatcattacttcaatgatctcatttttagctttcctcttctttattaatggatgcagtaacttctggcattcccctgagaatattaattctacttatttggaagtactctttttattgctctctgctgtctttcttttgtatttkatacatctttcatttgctttatgttattttaatcttaccctatgcacttacaatgatggcacttctccgaatgactgttgattttcttcctttctttctttttttcatgttgtctacatttttttttcaaggtgagtttctgctagactgttattactgagcaatcctttggtggagaaggaggttcatgctgctacaggccacaatttgcctcatttgcagtcagatcaggctttttgtcagagagaggacatgcccattaggcaatatgtattcagatacttccaactgatcgctgccttttctttctgattcaaattcccattc

SEQ ID NO: 118962 - DNA, 477 bp, Homo sapiens
atattcatcattacttcaatgatctcatttttagctttcctcttctttattaatggatgcagtaacttctggcattcccctgagaatattaattctacttatttggaagtactctttttattgctctctgctgtctttcttttgtatttgatacatctttcatttgctttatgttattttaatcttaccctatgcacttacaatgatggcacttctcygaatgactgttgattttcttcctttctttctttttttcatgttgtctacatttttttttcaaggtgagtttctgctagactgttattactgagcaatcctttggtggagaaggaggttcatgctgctacaggccacaatttgcctcatttgcagtcagatcaggctttttgtcagagagaggacatgcccattaggcaatatgtattcagatacttccaactgatcgctgccttttctttctgattcaaattcccattc

SEQ ID NO: 118963 - DNA, 651 bp, Homo sapiens
ggtgcttggtccatgatggacactcagttaacattagtcctatgaatgaataaatgatctatgtatggggttttcttaaggtatgaaagctttgttttcaaagataaaatatttattttgtataagaaagataaaaaacaaacactgattggtgagaataatccataattcagacacgttattgatcaataaatacctgaaaaataaggtaccaaaaaagtgaattataatgtgtattcacatctgacaattattgtgcatttagcaataggtcagtaccatagggacaaaggaatctaaaaggccccctataatctaacttaatctagctgagctcatcttgttctcaaattggaccttctgctccagcttatctggcctgctcccctatactctgaatacagcttgctcattcctacatctttgcctttggtgataccattttctgttcatggaaaaatgctctcatcccgaaatcatatgcctccattaaaatccctccctagatagcccttttctacacagtgttccctagataacactactcttgaggaatttagagaggtctcactttgataagatcaaggcacagtccagggcctaccacgttctsacacaaatatgtgctaccatgaaatcactctctcactg

SEQ ID NO: 118964 - DNA, 438 bp, Homo sapiens
ttccacaaatgattctgatccatagccataagtgagaactacttgatctgggcttagtcctttccatagtgagtagggccacattttcagaggattcagcatcttgaaccaaaatccacaaactaagccaatagcctatcttttcaytaggaggtagggtcattgacatttacttttaattgcagaaagggaagatttggtgtgaatctgggcaatcctaccagggagaaatccaaggtcaaagtaaaacaatgacttataatgagaaacaggaagactacacaagtgagtggttattatcaccttgtttcccatgtctaagttagcttgatagactcttcttagattatttgatattaacattcaagctaatctttactgtcacatgtaacaggaccctagtactagctttataaataaaggtcaactgccaactct

SEQ ID NO: 118965 - DNA, 600 bp, Homo sapiens
taaaataaaagtttttaaaaaaaagttcagatgttaaaattcattccacaggtggtgtgttcatggaaaccactgtatattgtaatgacgaggaaaataaggatgaactaatgtatctacctatatattgctaaataccgtttagtcccatgaacaaaattcaacatgcaacatggttaaaaatctcacatgataaaagttttcatcaattacttgaaaaattcattctagatttatgttataaatattttacagaacattgacttaagctctttaggagcacatattaatgtcataatacatgatacatttgagtaaaaggcagttaggatttgcaytgatcactttaaattgagcaaggtattttttccctgacatgtttaattgcatccaattattctgtcttttacaatgtatacaatatatatcaaagcctaatagtggcagggtgaattaagtctatttatgactatcataaagtacaggtactaattttgaaatgattataaattctgtagactctgttttcctctcaaagcacaagtattcccgttgtcttcagaacaaagcctgttatatttacttacccaaattagtagt

SEQ ID NO: 118966 - DNA, 428 bp, Homo sapiens
tcagcttcccaaagtgctgggattatgggcatgagccaccrtgcccggccactgggtactattttctatacaggaaatacagcaaagaaaaagacacggtgtccctgccatcatggagcttataatatagtgacaagtggcagacaataaatgccattcaatataatgtgaagtataatgtgaggtatgtgttctggaaaaaaaatatataatgtaatgtaaggggaggaagtgggcctggagtgccttttttgatagggtgctcacggaaggtggctcatgagatgacaagagagcagaactgaatgaagtcaaaaagcaaaccacagagccatcttctggaagagcattcctggtggagaatacagacagtgaaatggccctcaagcaaaaaagtgtgcttgacaagctcaaagagatgcaaggag

SEQ ID NO: 118967 - DNA, 523 bp, Homo sapiens
gttaatagagaataccaatttttttagtgttcatgaattataattttataaataattttaataacactaagatgtatttaatactaaagctctatggaatggctgacttgttggtgattttaacttccataaaactactttaagtaaaatctactttttaatatttatgaccaagatattttcttcaattcagtataaaagactcagtggatttctggtcttggtatcttccaaaaaatgataataattccctaaatcctaatttcgaatgtaaaatccctgtgctctggggtttccataagggaaatctcattttaygctcatttcatatgaaaaaaattacaagatttctttgaaacaggccaagaggcaggcttgtttcatgtgtttcatatctttgaaactcagatatgtttcatgtgtcaaagtttccacctcataagcttctaggatattactgttcaaaaatttttctttcaagttgctttgtgatttattatattttggtgattatatgcattta

SEQ ID NO: 118968 - DNA, 595 bp, Homo sapiens
tgcatataacatatgcacatcctcccatatattttaaatcatctctagartatgtagaatatgaaaaatgtaaatgattgttatatagtattgtttatggaataataacaagaaaaaaagcctatacatgttcagtacagatgcaatttttaaaaatattttccatccgcaggtggttgaatctatggatgcagaatccatggatatcaagggccgactgtgtgtgtgtgtgtgcatacatctatgtatgtttgtttggggggtgtgtgtgtgtataatcactatggtatatgggatttggcataattacctttttttacatgtttatatgaaaacataaaaaactatgggaagaggggaggattcttaattctaataactcactgacaatataattggttttactcttagtttatttcctgttccctcattttctgttttttttctgagtattcaatttttttttcagataactgaaattggtaggatatagatacgaaatggtttttaattttctccgttagctacctgtaaatatgccttgtggaaacttatttccacctcctccagccctcctatccaccctcgcccagct

SEQ ID NO: 118969 - DNA, 573 bp, Homo sapiens
atggagaagtgaagtggtccaaggatgaagcccagaggatcacagtgtaggatttccaaacaaaatacagaacaccctcagttaaacttgaattttagatacataaggaataatttttagtataattgtgttacagatrttacatggccatgtttgtactaaaactattcactgtctgaaattcaaatttaactcagtgtccagtgctttcatttgataaatatggcaaccttactccaatggttagaggtcaggcagttgagaaggagcagcctgtgaggtcagaggaaagccgagaaggtgtggagtcacagaatccaaatgaagaaggtgtatccagatgccaagagtgtttctttttttttttttaacaacaaattttattgaaatataattcacataccataaaattctcccatttcaaatacgcaggtgagtggtttctagcatattcacggaattgtgcaactctcagcaaaatctaactttagaacactgatatcaccacaaaaaagaaaccctatacccattagcaataagtcccattccactctcctttccagccctaggaaa

SEQ ID NO: 118970 - DNA, 465 bp, Homo sapiens
aaaatgttccaaaatgtttctctgggtcttagagggtgttaatcataagagtaggtggtgttactcacaagaggaaatatttagtattctggcttgttctgtgccagcaccaagtgtaagatcccaagtgatagaggagcccaagagctatttaatgatgagtctatatttgtgataagttgaaccttctaaattcatcagtccccgagcgaaggtctccatgatctgggtttcagggtagtattgtgtgaaattkctacctgagtttatcaagtaaatgttttctcttaaagagcacagggatattagacatctgaagaaagacgttaggggagagcttacactgaatggtgaaaacagtgaaatgaatttggaggaacctaaagcaaaatatcatcttgactaaaatcttgtttgggagtttggcctagaagtattagtttattactcttgtttctatgtgag

SEQ ID NO: 118971 - DNA, 573 bp, Homo sapiens
atggagaagtgaagtggtccaaggatgaagcccagaggatcacagtgtaggatttccaaacaaaatacagaacaccctcagttaaacttgaattttagatacataaggaataatttttagtataattgtgttacagatattacatggccatgtttgtactaaaactattcactgtctgaaattcaaatttaactcagtgtccagtgctttcatttgataaatatggcaaccttactccaatggttagaggtcaggcagttgagaaggagcagcctgtgaggtcagaggaaagccgagaaggtgtggagtcacagaatccaaatgaagaaggtgtatccagatgccaagagtgtttctttttttttttttaacaacaaattttattgaaatataattcacataccataaaattctcccatttcaaatacgcaggtgagtggtttctagcatattcacggaattgtgcaactctcagcaaaatctaactttagaacactgatatcaccacaaaaaagaaacccyatacccattagcaataagtcccattccactctcctttccagccctaggaaa

SEQ ID NO: 118972 - DNA, 547 bp, Homo sapiens
caagattttctttaattcttacattaatctgaatctacaggtttcctaaccttgtacaaaacatctttgttgtcctggaacttttccaggatttctagattaggagcagacattctcccagtccctgtgaagcagctcccaaaatcktgagccacaaccgtcttgctaagctaacctattgcctgtggagaaaatgaaagacaaaagaaccagtacctcaattcagcagtggaaaaaccaattagcagtagcttgccccatgatattagttccaccacactttcaagaaaaggagattaatgattttaaagtgggtaagcattttattactgggaaatgtaaatatgtgatacgggagattcagttgttgatgggaaacagtgaagatttttccattccgcctctaatgtactgtttgggatggtttcacctcctctccccacagttccagcagacatctgagcatgctctcttttcttgctccgtggttgatgtctttgctcagctgaatcagagctttgaaattattaagaaactggaatgccct

SEQ ID NO: 118973 - DNA, 527 bp, Homo sapiens
aaatgttgggagagtgaagataccccagatcttgaagaactttgcttcccaggttgagaagtttagacttaatgtgctggtcaacttaggaaacgcagaacctttggagatttttatgcagggtagtgacataacaaacatagtaatttagggaaactacttacacagttctatstctggctgatctaaatataagtctgattccatggattgaatgatgactgaggttttaggctgttcattcaacaagtgcttgcctatatgcctcactcgcacacactataagccaccttgagggatgtagtcatgaataagcataatctgtgacctcagaaaacttgtatggaagggccaaagctgcaaacaactatgacaaagtcaaatgttataatcagagcatctcagaagttgaaagaggcccagaatatagataaagaagcagagacagacagagagacactaaactgtattatatttatttgccatgaaatattctgatctcatcttcattaattaagactaacctc

SEQ ID NO: 118974 - DNA, 527 bp, Homo sapiens
aaatgttgggagagtgaagataccccagatcttgaagaactttgcttcccaggttgagaagtttagacttaatgtgctggtcaacttaggaaacgcagaacctttggagatttttatgcagggtagtgacataacaaacatagtaatttagggaaactacttacacagttctatgyctggctgatctaaatataagtctgattccatggattgaatgatgactgaggttttaggctgttcattcaacaagtgcttgcctatatgcctcactcgcacacactataagccaccttgagggatgtagtcatgaataagcataatctgtgacctcagaaaacttgtatggaagggccaaagctgcaaacaactatgacaaagtcaaatgttataatcagagcatctcagaagttgaaagaggcccagaatatagataaagaagcagagacagacagagagacactaaactgtattatatttatttgccatgaaatattctgatctcatcttcattaattaagactaacctc

SEQ ID NO: 118975 - DNA, 650 bp, Homo sapiens
caattgtcagcaggatatagtgtaagaacaatgagaagcattttctggaaaagaagaaattagtgattttcattgaaaaagaaattctattttattggaatgatttaaaaatctcttgccagcatttctctttttaactcttgcagtaacttactatacagaataataaataaaaagcaaaatcaattaaacataaatataaaaataagaaacatcagtcaaatccattttaccattatcagcctttcctttttttttttttctttttgagacagagtctcactctgtcactggagtgcagtggcacaatctccgctcactgcaaccttcacctcccgggttcaagtgattctcctgcctcagcctcccaagagtagctgggattacaggtgttcaccaccayacccggctaattttttgcatttttagtagagacagggtttctccatgttggccaggctggtcccaaactcattatcagcatttctatctataatttgtattttatataacaaagtagataaaaatcgtttgtgtttactataattagccatttcacaagaactgcaaactattgcaatttgtttttatttcatcagatgtgactgactaattagtcttgaaaactctacgcttctaagtattggaat

SEQ ID NO: 118976 - DNA, 527 bp, Homo sapiens
aattcaatgctcattcctattcaaacctcattcatatttggagggtagctttaaaatgtgatttttcaaaaatatccacttcgtttgcaacaataacacatgtaagtcattaaaaattgccttttaaagcaaacaaaataagactgtgcgaaattagagtaaatgaatggagtcaatgagaaagagcacgattattcaattgaatgttctaggagragtttttactattggggaaaaagttaaacaggaatcatttgatatctgtatgtggaaaatcttttggaacttgaaatcaaatcacaaacttaaaaacaaaaaacatttgtaaatccatctgtcaactgggaaaatgttttgtaacagatgttacagagagacggttactatccctaatgtataaagaagtcatataaataaataaactctaaatgaagaaagaaatagacaattcacaaaaagaaatttaactggttcatgtggaaaatgtgtaacctttccacacctttaaggtatctagcattgcttat

SEQ ID NO: 118977 - DNA, 624 bp, Homo sapiens
tttctgactcagtaatttaggataggaccaaataatgtgcatgtccaacaagttcccaggtgatgcttataatggtgctgattccagaactacattccgagaaacaatgagttaagcatgtcataagcaacagcttattagtattaaagagctattgtgtgatagtggtttacttagctgaataaattagaatgaaattgaagttgcccacaaaatgtactttgcacactcattcaagtgtacattgtacattagtaaagaygggagttattacggcagtgtgcttgcaactcttataggcacacagctttaagctatattcttttttttttttttttttgagacaatcttgctctgtcgcccaggctggatatattctatatgactgtgcactttgtcttacctgcaggccatcctgacttgctaaccattggcatttgtaggctattacgtgtgagatcccaggattccttgtctctaagcataaattcaagggactaaggttttcctatgaagtagactcaagctgtaggccatagggcatacttcaagaattatcgtaaagggtatccagcttgctctttcttctttagaaaacgataacaaaggcaaaaaacaaaatct

SEQ ID NO: 118978 - DNA, 624 bp, Homo sapiens
tttctgactcagtaatttaggataggaccaaataatgtgcatgtccaacaagttcccaggtgatgcttataatggtgctgattccagaactacattccgagaaacaatgagttaagcatgtcataagcaacagcttattagtattaaagagctattgtgtgatagtggtttacttagctgaataaattagaatgaaattgaagttgcccacaaaatgtactttgcacactcattcaagtgtacattgtacattagtaaagacgggagttattacggcagtgtgcttgcaactcttataggcacacagctttaagctatattcttttttttttttttttttgagacaatctygctctgtcgcccaggctggatatattctatatgactgtgcactttgtcttacctgcaggccatcctgacttgctaaccattggcatttgtaggctattacgtgtgagatcccaggattccttgtctctaagcataaattcaagggactaaggttttcctatgaagtagactcaagctgtaggccatagggcatacttcaagaattatcgtaaagggtatccagcttgctctttcttctttagaaaacgataacaaaggcaaaaaacaaaatct

SEQ ID NO: 118979 - DNA, 632 bp, Homo sapiens
ctgggaacagaaaggtagctttgttagggtccctgccttcatgaaactcatagttggccaggggagccccacatgcaaatatattacaacaatttatttataaggtgtaccgatagcattttaaaaagtcaactgtctcctggaaaagattagtcaggggttaaacttattgtgttggaaagggcctgtgatttcggttcagataaacatgaattcaaatcacagtatgtcaccactgattctatgattctattttcttaagcttctgttttcttatttgtgaaatgaggataacaccaacctcttactatattcacattaacatatcttttatgaacatacacatttttccccaaactgaagcacatgctctagctatttgttaccaggcctttatcttttcacctaaaaatgtatcatggaggtcattccagttcagtgtagataaagctgycactacatcaacgactacaggcttggaaaataaaacattaatgtttgacatttaatccattatatgaatatataatttaaccatatttcaattgtttaattccttgctattataaactataatgaattattatgctacaaaagtttacagtatagtttttaaaagcatagtatttttg

SEQ ID NO: 118980 - DNA, 539 bp, Homo sapiens
atgatcacatcagtggtggtttcttactcagatctataggcttattgattccagaaggaattacaccagcaggtactgcactgtaaagtctcagtatcaaagacagacagtttggatcctggattacattcatgtatcttgggacctgaggctgtttaatttctccaaggctcagtttcctcatctgcatggagctatctacttcataggctgtgatgaggattaggtcaggtcaggtgtgtaaagtgatcagcaccataggtgcaacawaaatgtttcttatcattatactggtggtattgccagacacctggaaggttcctgcctttgtgtggtaaagagaatcatggaaatggagtctgaagtcctgtgtcttcattcttgattctgccattagttagcaatatagtctgaaatgaatgcttttaagctaaaatctaccttcttcttcttctaaaatacacagttttccaatggttaactatttaagggactttagtgcatagaagaaacaaggaaacagtatgaataaacctaca

SEQ ID NO: 118981 - DNA, 389 bp, Homo sapiens
gccacagagaacacagggtgaggagaagagtgagggctgccttgtctggcaaactgcctggctgtggaaatctgacctgtgcaaaaagaaagcctgacagaacttctaagtcagtttccaagaacaaatctatttttagataaccgtttctttcagcaacagacctccaggtgcagagaagtacttagaatttgtcgcaacaaaacaaatatggggttctaaggtttatattgttttataatattttctctttcacaaatggaactcttaatatggacacaaaccccctaaatccattgtccratgcattaattgggggtgagggagaatgattaataagaataaataagagccttatctactgaagaaaacaccagtgacttgttcta

SEQ ID NO: 118982 - DNA, 581 bp, Homo sapiens
cctaaaatttacctctaaagaactagttaaccaaaaatcttgccataaaagctgaagcccacatgcacaaaacaaaatgattgcaagaaagctctagatttcgagcctaattacatgtttcttgaaataatacatggtgctggcatgaatttgccatattgataaaagrgatgtcatattgctttattttttaaatcaaatcttgaatatagctctaagcccctaatctctatggtggaaaggaaaaaaaaatcagcctctattattcttggagcactttcttcaatctctctaaggaattagaaaagaatatggggtgtttgtggcatcagaaaacagaagcagagcttcaaccctggcccatcatcatcacctctgaatgtcattgcccaaaaccatgtaagacagttaaaggcagtaggatttccttcctctgtacaaagtgaggacacccagattcctcaccacaaaagccatagtgcttagaatctaatcatcatcaccatccacccaccttctaacatcaaggtagtactcattggaaagcctgccccacttggatgttgcatgccagtagggca

SEQ ID NO: 118983 - DNA, 481 bp, Homo sapiens
gcctaattacatgtttcttgaaataatacatggtgctggcatgaatttgccatattgataaaagggatgtcatattgctttattttttaaatcaaatcttgaatatagctctaagcccctaatctctatggtggaaaggaaaaaaaaatcagcctctattattcttggagcactttcttcaatctctctaaggaattagaaaagaatatggggtgtttgtggcatcagaaaacagaagcagagcttcaaccctggcccatcatcatcacctctgaatgtcattgcccaaaaccatgtaagacagttaaaggcagtaggatttccttcctctgtacaaagtgaggacacccagattsctcaccacaaaagccatagtgcttagaatctaatcatcatcaccatccacccaccttctaacatcaaggtagtactcattggaaagcctgccccacttggatgttgcatgccagtagggcatgac

SEQ ID NO: 118984 - DNA, 481 bp, Homo sapiens
gcctaattacatgtttcttgaaataatacatggtgctggcatgaatttgccatattgataaaagggatgtcatattgctttattttttaaatcaaatcttgaatatagctctaagcccctaatctctatggtggaaaggaaaaaaaaatcagcctctattattcttggagcactttcttcaatctctctaaggaattagaaaagaatatggggtgtttgtggcatcagaaaacagaagcagagcttcaaccctggcccatcatcatcacctctgaatgtcattgcccaaaaccatgtaagacagttaaaggcagtaggatttccttcctctgtacaaagtgaggacacccagattcctcaccacaaaagccatagtgcttagartctaatcatcatcaccatccacccaccttctaacatcaaggtagtactcattggaaagcctgccccacttggatgttgcatgccagtagggcatgac

SEQ ID NO: 118985 - DNA, 563 bp, Homo sapiens
ctcatctgtgttgcacataccagtagtttgttccttttttattcctgaggagtatccccttgtatgcatataccacattttgttgatctgttctcttattaatggacatatgggtcatttccagcttggggttattgtgaatatggtttccataaacattcttgtatgagtcttttagtagacgtgtttttatttctcctggataaatacatagaagtggaattgctgggccttaaagcaggtatagggtattattatcttgatttcagcatgatatgtgatggtttttcatatatccttgtgataaagaaaaagaagttcgagattatgagagcagagttaggagaaattatatctgaacaaatgtattttctcaaagtattaatcagaatcaaaatcagccagaaaagagatctttaaygatatgctctgggacctaggcctaccccttgtaatcaatatttttatagtaacttagataaagactcacattagacatgctcaataaatctttaacagacttaaaggacttgttgattctatcagtgccataaccatagtgt

SEQ ID NO: 118986 - DNA, 440 bp, Homo sapiens
aagcttttcttgttgcttctggttagttcatgaatgaaacagattagcacacaataatggtaatgtgcaggacctacttcccagacccggcatcatttttcacacttaattgttgatataacattcatgggatggcagtgtgtccactttaattatttcgatgagttacaaaagttgtagcattgtactttattagataagaatgaggagtgtcaatggaaaaaaagtctataacattataaaacamccccttcccaagacaagcactcgtgtctgttctgaaatagttgtattttttccaattacatcttgaatgaactcgatacgaggcatgatgggggaaatctactttctggcatctatgtttcatgtcctgcttagagatggtgaacattttcattgtccattttatccagtctttcaaagtgcagtatagaaat

SEQ ID NO: 118987 - DNA, 430 bp, Homo sapiens
ttggaaaattttgctggcgctctgtatatgtctgttttgtagtgaccctaaagagagcagataaactgatgrctagaaggaatgcaggccaccgagcctcctctgattctaaccctatttctcatcttgccctttctcactgctagtcttctgcatcattcactctccaggattctgcctgctcttgccctgtggaggatctgggagtggagatattagaggctctgggcagtaagttggaagacagtgctgcccacacacacagcaggctctgggtgtgggctccactcctgtcttggcagtttctcaaacttctgtaacttaccctgtccactctcctcctgctattctataggattccgtctaggaacaaaagcttacttactatctcatattcttctaaatttcttatctatgctcacatgaattc

SEQ ID NO: 118988 - DNA, 593 bp, Homo sapiens
tttcataaattcctcctcagtgaaagatagcatcttggcagcttcaatatgcatctgttaaaaaaaaaatcaatattgtctgatttagtattaagagtaggccaccaaacaacaggaagtttgtaaaaatgtgtggataatatattgtcagaatataagttctgttgtaggaatgtatactcttaattccaataagcatgatatttgaaatggtattgtccaacagtagtaytgaaccaacttacttttaagataataataattctataatattttaaatacctgacctttgcaaagaaggaaagtgtcagaactatgaatttttagagaaagcagcaatagtggtttggaagtgatgttcgctctaaggtttgaagaggcaaacagtcccctaatagtcattctttaatttggtactttctgtagttgagaagtacctatactgtattttccagtcccattttctacactaacttacttatgtgaaaatatccacttgcttagatgacacatatatctcactataaatgttagatttcatatgatttcatatgtatgatgcattttatatgaagttcagtgcgtaaagatgt

SEQ ID NO: 118989 - DNA, 599 bp, Homo sapiens
cgatatagggttccaaaattgaatccatcataaaaaaaaattgccaaccaaaaaaagccctgggccagagggattcatatccaattctaccagatgtacagagaactggtatcaattctactgaaactattccaataaatcaaggagaagggactcctccctaacttattctacaaagctagcatcaccctgataccaaaacctagcaaagacacaatgaaaaaagaaaactacaggctagtatccctgatggacatagatgcaacctatgttgaggaacctagtagtcctcaacaaaatattagcaaatcaatcaaacagcacattaaaaaggtaattcaccataatcaagtaggcttwattcatggtatgcaagtttggttcaacatactcaaatcaatacatttgattcaccacataaagagaattaaaaacaaagcccatatgatttctcaatagatgcagagaaagattttgataaaattccacatcccttagtggctatgaactttcaacaaactaggcattgaagaacatgcctcaaaatagtaagagccatctatggcaaactcatatccaacatcatactgaatgagcaa

SEQ ID NO: 118990 - DNA, 572 bp, Homo sapiens
cttgccaaaaaaggtggaccgcaatctaattgtgtctttatggctaggttctatttagaggaaatataacagatagggaaataaattaaaggaacatgaggaagcaaacacgtatattcagaatgtgggctactggataaaacaactggcttagtttagcaagctaaaaacatgaagtcaaaaaagaaaaacacggtgaaggaggggctgttttcaattaagagggacttaaacagacataaccaccaaatacaccgtatgaatgttccttggatcttggttaaaacaaaccaactgtaaaagcagatttttgacacaatcacagaaatgtgtttatggaatgggtgagataatagtattatggtactccatgtaagamaacatccatattttgttagatgtacacttaactatgtaggaaagagttggtgtgatacctgggatattctttcaaattaaagagaaaataataagaataggaaaaatatccaacccctaagatgtgctttctcagagttaaaaaaaaaaatcatatctaagcttttgaatttggaacacagaagggtggatat

SEQ ID NO: 118991 - DNA, 650 bp, Homo sapiens
caatttttaccacttcttttcaacgtaatagaagtgctagcctgagcaattaggcagtaaagataaatacagctgggcatggtggctcatgcctataatcccagcactttgggaggattgtttgagcccaggagtttgagacaagcctgggcaacaaaacaagactccattgcttaaaaaaaaaaaaagtataaaaaaaattagtccagcacagtggcatgtgtctatagttgaagctactctggatgctgaggtgygaggatcccttgagctcagaagttcaaggttgcagtgagctatgatcacaccactgcactctagcctgggtgacagagtgagaccctgtttcaaaataataaaagaaatgcagttgctcatgacataaaaacctatgttctaagaaatgtgttattagatgattttgtcattgtgtgaacatcatagagaatatttacacaaacctagatggtatagtctatcatacacccaggctatgtagtattgcctcttgctcctaggctacacacctgtacagcatgttactgttctgaatactacaggcaactgtaacataatggtaagtacttatatgtctcaacatagaaaggacacagtaaaaatacgatgatgtaaaagatttaaaatggtac

SEQ ID NO: 118992 - DNA, 650 bp, Homo sapiens
caatttttaccacttcttttcaacgtaatagaagtgctagcctgagcaattaggcagtaaagataaatacagctgggcatggtggctcatgcctataatcccagcactttgggaggattgtttgagcccaggagtttgagacaagcctgggcaacaaaacaagactccattgcttaaaaaaaaaaaaagtataaaaaaaattagtccagcacagtggcatgtgtctatagttgaagctactctggatgctgaggtgcgaggatcccttgagctcagaagttcaaggttgcagtgagctatgatcacaccactgcactctagcmtgggtgacagagtgagaccctgtttcaaaataataaaagaaatgcagttgctcatgacataaaaacctatgttctaagaaatgtgttattagatgattttgtcattgtgtgaacatcatagagaatatttacacaaacctagatggtatagtctatcatacacccaggctatgtagtattgcctcttgctcctaggctacacacctgtacagcatgttactgttctgaatactacaggcaactgtaacataatggtaagtacttatatgtctcaacatagaaaggacacagtaaaaatacgatgatgtaaaagatttaaaatggtac

SEQ ID NO: 118993 - DNA, 600 bp, Homo sapiens
ccctagctcccagacattttaagcaccctctgggccacaagggaagctgctgctttgaaggaaaggacccagtcccagcagcatttgtcatctgctaattgcagagcsctttggccctgaacaaccagcagagatacccaggtactacattgagggcctttggtgagcctctgagacttaatggtttcaggtgagacttagcacattaccagctgtggtggctatggggcaaaactccttttgcttgagaaaagcaaaggaaaaagtaaaggggattttgccttgcaccttaggtgccagcatggccaagaggggtagagtacaaagtgggctcttagggtccctgattcaaggatttgactcttggatgacatttctggacctgtcctgggccagatgggagcccactgacctgaaagatgagtcctaggtagcattcaccacaagctgtctttagagccattgggccttaagggaacatcattggtagtctggcagtactcctcctggcctgcagtagtggtggctactgggtgaggcccctcttccattggaaagaggaggagagagtgggaagaactttctcgtggtttgagtgcc

SEQ ID NO: 118994 - DNA, 597 bp, Homo sapiens
atttttttaagactttcttggatttttaaaaaatcaaaagctttaaacattatgagcaccatagttattgttatataatagaactttcatacatttattacaagtattttgtccatatcctataatctcaaccttttgtatttatacctgatatttgaagtatcttttagaaaatagatgtttaaagtatttgaatttgttgtcaccccccgccccccacccccaactttaagttcatctgaggcttttcctcttataggagtacagcaggtgctatcagtatccagctaacttcttgtaggccctcacagttctcaaacatgctgaaggcttattctaagcaatgggactcactacttgagggcttcctctggatgcactttgctcaatgtggacctggccaggaatgctagcaagataacaactccaggaacatccataccaatgacaaataggaattggtagacagataattcctacctccttgctcarcaagtgagacaactctaagggatgtcttgcctttaaagaaattcacaatatgttatacccttggataatctccttcacttgagtgtgggcagaacctgtgactta

SEQ ID NO: 118995 - DNA, 526 bp, Homo sapiens
acattttattgttggaatcacacagtgtgttgtcttttcagattgtygtctttcatttagccatgtacattttaacttcctacatgtcttttcatttatttttaaatgagctatatggctaaacaatattccattgcattaacataccagtttatctatggaaggataacttgattgcttccaaattttggaaattatcagaaaagttgctataaacatttgcatgcaggtttttgtgtggaggttttcggctttttgggtaaaacttaggaacatgttgctgaaaaataagagaagtttagttttgtaagaaatgacaaacattttttcacatgggctgtactattttgcaggtgcgtcagcattgaataagtttccggctgctgtacattgttgccagcatttggtgttgtcagtattttggattttggtcattctaatagttgtgtagtggtatctcattgttttaatttgcaattccctaattaaatataatgttgaacatttaaaaacatgctttgtgcca

SEQ ID NO: 118996 - DNA, 577 bp, Homo sapiens
ggcatcatcacttatttttctttgatatttattaagtgcacacagcattccaggtctgaaatagcctatggccaggaagcttctcctcctggactggcattatttctccctagatagwgagttatgaaactccaaagcggaaggaaaagttcagctgtatacgtatcatctgaagttccccatgggcagaccagttctgattcaagtcaggacgagaagagattagcgagtgggaagacagacatacggtgaatgtcagttgtctctgaatcttgattctaatgaaaagtcacagcttttactggtaatgccctgaagaccaggctaactcagagataacctttgcttaggaagacttcttgagccgcctcaggttcaccatactttttctcttgctctgaatcctcctggtacttatcctcacagtatctacctcactcatttgcattatcttgcctttttttattttagaattgttcccatcatcatatatgttcttggtcacaagcaacttgatcgtaaataatattaattttccttatgatctgattctttcagggccaatcaggttgtgcag

SEQ ID NO: 118997 - DNA, 577 bp, Homo sapiens
ggcatcatcacttatttttctttgatatttattaagtgcacacagcattccaggtctgaaatagcctatggccaggaagcttctcctcctggactggcattatttctccctagatagagagttatgaaactccaaagcggaaggaaaagttcagctgtatacgtatcatctgaagttccccatgggcagaccagttctgattcaagtcaggacgagaagagattagcgagtgggaagacagacatacrgtgaatgtcagttgtctctgaatcttgattctaatgaaaagtcacagcttttactggtaatgccctgaagaccaggctaactcagagataacctttgcttaggaagacttcttgagccgcctcaggttcaccatactttttctcttgctctgaatcctcctggtacttatcctcacagtatctacctcactcatttgcattatcttgcctttttttattttagaattgttcccatcatcatatatgttcttggtcacaagcaacttgatcgtaaataatattaattttccttatgatctgattctttcagggccaatcaggttgtgcag

SEQ ID NO: 118998 - DNA, 577 bp, Homo sapiens
ggcatcatcacttatttttctttgatatttattaagtgcacacagcattccaggtctgaaatagcctatggccaggaagcttctcctcctggactggcattatttctccctagatagagagttatgaaactccaaagcggaaggaaaagttcagctgtatacgtatcatctgaagttccccatgggcagaccagttctgattcaagtcaggacgagaagagattagcgagtgggaagacagacatacggtgaatgtcagttgtctctgaatcttgattctaatgaaaagtcacagyttttactggtaatgccctgaagaccaggctaactcagagataacctttgcttaggaagacttcttgagccgcctcaggttcaccatactttttctcttgctctgaatcctcctggtacttatcctcacagtatctacctcactcatttgcattatcttgcctttttttattttagaattgttcccatcatcatatatgttcttggtcacaagcaacttgatcgtaaataatattaattttccttatgatctgattctttcagggccaatcaggttgtgcag

SEQ ID NO: 118999 - DNA, 577 bp, Homo sapiens
ggcatcatcacttatttttctttgatatttattaagtgcacacagcattccaggtctgaaatagcctatggccaggaagcttctcctcctggactggcattatttctccctagatagagagttatgaaactccaaagcggaaggaaaagttcagctgtatacgtatcatctgaagttccccatgggcagaccagttctgattcaagtcaggacgagaagagattagcgagtgggaagacagacatacggtgaatgtcagttgtctctgaatcttgattctaatgaaaagtcacagcttttactggtaatgccctgaagaccaggctaactcagagataacctttgcttaggaagacttcttgagcmgcctcaggttcaccatactttttctcttgctctgaatcctcctggtacttatcctcacagtatctacctcactcatttgcattatcttgcctttttttattttagaattgttcccatcatcatatatgttcttggtcacaagcaacttgatcgtaaataatattaattttccttatgatctgattctttcagggccaatcaggttgtgcag

SEQ ID NO: 119000 - DNA, 449 bp, Homo sapiens
attgagataagttgacaccatataaaatcactgcagttgtgatacttttagcaatgtaaaaaacttggaaaggcattggaatagatccttaggacrgtgtctccattgattcaaagtgggttggagcagaaagaacctcacagatattgagatcaaataaccaagtatttatttactctaatgttgctgggagagttagccatgcacccccatttcctgcataaaattaaggagtacactgatctgcagtctgtcctatatctgaatgtcaattgtttaactcagccattaaataaacttcaaattagtaatgctaaaagctttccctattcaatctttgccttagtatttggtttatttctaaaacatttttaataagagtttaaagatctatgataagaaaatagatgaaaattacaccaaaaattctgacagttgaaaattaaacg

SEQ ID NO: 119001 - DNA, 479 bp, Homo sapiens
aaagtaattttaattcctgatccttttttatgtgatattttaatttcttctttcagggaagaaaaaratttctaggatcttcttcttatccttgacattctaaaatttcataaagctcatagtctccgcccaaaggctcctagagctgataaacaactttgacaaagttttaggatacaaaatcaatgtacaaaaatcagtagcatttctatacaccaataatgtccaagctgaaagctaaatcaagaatgcaagcacaatagccacaaggaaaatacaatacctaggaatacaactaactagagaggtgaaaggcctgtacaccaagaagtgcaaaacaatgctgaaaaaaatcagacaataccagcaaacagaaaaaacattccatgctaatgggtaggaagaatcaatgttgtcaaaatggctgtactgcccaaagcagtttatagactcaaggctattcttatcaaactgccaat

SEQ ID NO: 119002 - DNA, 502 bp, Homo sapiens
taataacaatagaatatttttataatacaggtatactaataaaagtaatatatttgggagggataataacatttcacttaaacaggattcaaagtgagtattccatatcatcaaaattgattgcaagtattcatctaacatataaggctgatgtggagtgagatttgcatatttcatttttcaawttttttttactttttatacatatagaaacttccaaataatgttatcaatccatgatttgttgtaagatacttattgaatgttatttgatctttctcttgatgaaattgttagtatctgtgatcctagtgatataagtaattgttcagatttttacaatacatgttaaaaagataagtgctattttgctttgtaatttcaataaaaaaacattaagaactttataaggtctgcagcaaaagttattttccaatgctatttaatgttttacattagtggttgagggtggtactctttcagaaaaaaaaaaaaaatctat

SEQ ID NO: 119003 - DNA, 596 bp, Homo sapiens
tgtccttacccttccccttgtttcattttcatagatgttttctaataacccggtttgtcgttttttgacttcaggccatcaaactcaggtcatgcaaccagagcctctgactacagccccttctgtcaggcatccttagataagcctctgagggagctctgactgcagttccccaaaacagtcagtaggatgcagttaagacccgtcttcatccttatccttttccttattctaagggcagttagatgcacttctttagagggggsaatgagacagacaggtggccaggggtcctcagaaaaactccacctgacttgcacacctggtggagacacagaagttcacgccattgtagcggggaggagattggccccttctcttcctgtggaaactgggattcaagctgcaagatgggaagtgcaccagcagggactctggccttctggagagtcactgttccctctttttttcattttcaccaataaaaccctgctttactcacccttcaaattgtctgcaagcctaaatttttgtggctgtgggacaaggaccctgtttttagctgaactaaggaaaagtcctgcaacaatgatatt

SEQ ID NO: 119004 - DNA, 672 bp, Homo sapiens
actttgaagatggaggaaggggctcaagagccaaggaatatgcacagcctctaataaatagaaaaagcaaaagcacaaattatttactagcctccaaaaaggggagacagccttgtcaaccccttgatccttagcccagcaagattggtgatggatttatgatgtagctcaaagataatacattatgttgttttaagccaatacatttttggtaatttgtgagagaagcaataggaaacaaatactgtatgtaaagctagagatcagagtattagaggacaatattccraactcagaagtacagcaagacaacattttaaatttttaaattcttcaaagccagaaattttaattctttggtctttactagtaggttgttagattgccttcatatttaaaataagtatatttgcataaataaatttatccacaaatagattcacactgaagttgatcaaataattattctcatggtaatttaatctattaaacaggacactcaaatattttctattaaaatgggtatttttaaaattacaaatgattatttttgttttttgattgtaaataatgataggaagaggaaaataattgggcttttttcttttttgccatgtctatctagttttcaatgttttctaactgttttattgatgttctgctttcacttgt

SEQ ID NO: 119005 - DNA, 560 bp, Homo sapiens
ttcagatttggtcatctaacattcttgaccttaaaatactattgatacatgatttcatttgagatatcttcatgatactagcaattgttttttaaatttcttttgtttcatttttaatccaagagtgtaattttctgaaaatgatttaggattaaattgctttaaaataatttacatttataaactactgtatgtcagacaggaccaaaagtcaatccatgggccaggtacgctggctcacacctgtaatcccagcactttgggaggccgaagcggacagatcaacttaggtcagraatttgagaccaacctggccaacatggtgaaacctgtctctactaaaaatacaaaaattagctgggtgtgatggcgggcgcctgtaataccagctacccgagaggctggagaggagaattgctggaacccgggaggcggaggttgcagcgagctgagatctcgccactgcactccagcctgggtgactgagcgagactccctcacaaagaaaaacaaaacaaaacaaaagtcaaaaacaaacaaacaaatacatcaattgatgg

SEQ ID NO: 119006 - DNA, 525 bp, Homo sapiens
tttctgaaaatgatttaggattaaattgctttaaaataatttacatttataaactactgtatgtcagacaggaccaaaagtcaatccatgggccaggtacgctggctcacacctgtaatcccagcactttgggaggccgaagcggacagatcaacttaggtcaggaatttgagaccaacctggccaacatggtgaaacctgtctctactaaaaatacaaaaattagctgggtgtgatggcgggcgcctgtaataccagctacccgagaggctggagaggagaattgctggaacccgggaggcggaggttgcagmgagctgagatctcgccactgcactccagcctgggtgactgagcgagactccctcacaaagaaaaacaaaacaaaacaaaagtcaaaaacaaacaaacaaatacatcaattgatggtatcttccaagtcccatctctttttgttcagtacctcgcataccataccaaggtttttatccaggtggcatcagattataatgaatcttaaggaag

SEQ ID NO: 119007 - DNA, 557 bp, Homo sapiens
gatgtgttctttaatttgtgactcacatggcttaattgatcagaatatacttaatgcagtaatatccatgaagcataatgtcaaattatggttaattgtatctggcaataattaccacaaaaggaagaagaagaagaaggaaaaaagaggaggaggagaaataaacgcaattattctttactcaaacactttcgcagagtacacaggaaaaagaggaatctgttcattgctattcacaattctgcttgtctgggaaggctggatkgacctccctttagtttacatgcatttttcgtaaggggttagtctgggcttctttctctggaagaataaaatagacgtttaatccttagagctcagtttgtgatgtgcaaagataaaactttcttctcttttagagaatatgtggatctgtttgtgcaatatgcatttcaaagtaattgggctttgcaacaggcattaatatacatggagtttttaggaaaaataaatttaagattcaattatagcaagattctactattttaaaaaggcatttcttatctataatttcaaaa

SEQ ID NO: 119008 - DNA, 629 bp, Homo sapiens
gatttttaaagcttataagacacaaaaattattaaaattattaaaatttattttaataactaaaaataaatttaattattttaaaagtattaaaatttctttgttttgatgagcatatttgattccaatccaaagaatctaagcttttaataagaaagtttccatttattctataaaacacaggaatattaatagaaaaaatatttgactactaacatrtaagtgttggcacgagtcctaggatatcaagtcaatggatattaggttgaagacaaagcctaatctaaaccaaaacttctagatataaattcagtggtttattaaaacctattcattttcattcattgagaagaaagtaagttgttgaaaaaaatcagagtataaaggtagaaaaagaggaagcaatgaaaattaaaatcgttgctttatgttaacattcatatattacatcagtataaacagaaagtgaaaacaaataaatataaaaatgaaaaaaatatgcaagcttctgattagggtttcattgttgaaaataaaaattaagctatgttttaacagttttcacgttttggtaccctctcttttatgaagatgtcttttatggaaaaaaaacataagcttaattattg

SEQ ID NO: 119009 - DNA, 629 bp, Homo sapiens
gatttttaaagcttataagacacaaaaattattaaaattattaaaatttattttaataactaaaaataaatttaattattttaaaagtattaaaatttctttgttttgatgagcatatttgattccaatccaaagaatctaagcttttaataagaaagtttccatttattctataaaacacaggaatattaatagaaaaaatatttgactactaacatataagtgttggcacgagtcctaggatatcaagtcaatggatattaggttgaagacaaagcctaatctaaaccaaaacttctagatataaattcagtggtttattaaaacctattcattttcattcattgagaagaaagtaagttgttgaaaaaaatcagagtataaaggtagaaaaagaggaagcaatgaaaattaaaatcgttgctttatgttaacattcatatattacatcagtataaacagaaagtgaaaacaaataaatataaaaatgaaaaaaatatgcaagcttctgattagggtttcattgttgaaaataaaaattaagctatgttttaacagttttcacgttttggtaccctctcttttatgaagatgtcttttatgraaaaaaaacataagcttaattattg

SEQ ID NO: 119010 - DNA, 632 bp, Homo sapiens
aacctgtatgctgcctcttacattctggtcagagatatctcagcatattgaatgaagttcaaatatcttgggctgagataaaaagaattcctagatttttaaattttttttcattatttcccatgacagtatactctcaaaatctcctcctkgatcagagttggagctgggggttggcagtcatttctctcacagtatcttttttagcattcagggcccaaataggacgtgccagggagaaacaagtgaaatgtttcctacaaaaactaaaatcgtttcataagctgtccagaattgaacttgatgcacaaaaatagcattacttttgggggtctgaatccgttctaaataggcttctgatggtcaatgatttcactaaacaaaattgaaactgcatcacattttgtaacacttgttccctctgcaaattttgtgtcatcagacattggtatctagttttatttttgaggttgtattcatttcattcacaatcaattaactattcatgtttttccttcactagagaaccagattcagaatttctcactaaccctggagctatgccttttccttcactactgactgtagctccaaattttcccactaaactctatatcaatcttcattggcca

SEQ ID NO: 119011 - DNA, 632 bp, Homo sapiens
aacctgtatgctgcctcttacattctggtcagagatatctcagcatattgaatgaagttcaaatatcttgggctgagataaaaagaattcctagatttttaaattttttttcattatttcccatgacagtatactctcaaaatctcctcctggatcagagttggagctgggggttggcagtcatttctctcacagtatcttttttagcattcagggcccaaataggacgtgccagggagmaacaagtgaaatgtttcctacaaaaactaaaatcgtttcataagctgtccagaattgaacttgatgcacaaaaatagcattacttttgggggtctgaatccgttctaaataggcttctgatggtcaatgatttcactaaacaaaattgaaactgcatcacattttgtaacacttgttccctctgcaaattttgtgtcatcagacattggtatctagttttatttttgaggttgtattcatttcattcacaatcaattaactattcatgtttttccttcactagagaaccagattcagaatttctcactaaccctggagctatgccttttccttcactactgactgtagctccaaattttcccactaaactctatatcaatcttcattggcca

SEQ ID NO: 119012 - DNA, 660 bp, Homo sapiens
acattcccaccaacagtgtaaaagcgttcttatttctccacagcctttccagcatatgttgtttcctgcagccatcactggagctccagtctgccatttttcccctgtgggtgccggggagactggacagtttggaggaattccccacagcgcagcgcagcacagcacagtgacacactattgctagactgcctctttagtgtttattgtctggtaactattatcattgtcattactattgagatgtttgagatgtgctaaattgatactaaatgagtatataagctcttacggtgagtgacatagtgaatgtttagtagcgtctactgccagtgtggtggtggtagaagaggattaaaaataacaatggaggtgtttcatttatttaaatactttcagatcaaacttttccaatcttcctataatgcacagaatttgagracattatcacctattcctagatgcgctggaacagcccacaagcttttaattttttaggagaaccttggtagaaattatttgggtccacctctgagtgaatatctgtggccttctggtcaggcacctgtcctttttaggcccctcacatttcatagtggttgttaatctcaccttctgtttcattgattgttgtagcatatggcttagcacaaactggca

SEQ ID NO: 119013 - DNA, 585 bp, Homo sapiens
aaaatcaaactagaaatcactagcaaaaagatagcagagaaatctccaaacagttagaaactaaatatcacacttctaaatcatcagtgggtcaaagaggaaacctcaagtaaaacttttttcaaatacactgaayttaatgagaatgaaaatacagcatatcaaaatgtgtgggatgctgctaaagctgtactcagagggaaatttgtagcaccaaatgattacattagaggaggaaaagcctcatatcagtaatctaaactgccacctcaaggaaccagaaaagggagagtaaaataaacctaaagcaagcaaaagaaagaaaacagaagctatcacaacagatcctaaagacaatggaaggataactcaaggactactaaaagatctctacacacatacatttgacaactgatatgaaattgaccaatttctccaaaaaaacaaactattgcaactcacaatatgaaacagatcatctgaattaagaaacagagctcatgattttaaaactctcaaaaaagaaatcttcagactcaaatggtttcactgtcgagttctactaaacatttaaataattatcac

SEQ ID NO: 119014 - DNA, 553 bp, Homo sapiens
tatcaggccaatgggaacctcccagaggaaagcaggactgggggagtatttccccagcttccacacttaatatgatccaaggaacagggcttagagccctctctccctctatggtctcttattcaatcttggattcaattcaactaataaattacaaattcaagctggggaaatttgagaatgtttagatgaagaaggaatttttgttgggtgtaggaggaacgtaggaattaaatagaggtcgaaaaaaagtcatagcttgcggggctgagaggctctcagaagcaaaggcctgccttcacaaactgcaaatgctgttgctgggattgaaatgcagtagagtgaggcgggaaatacaggtgaagattcattgtgcatttactcattcaccatatgccaggcactgtgctagacaaccagaatccagcagaaaaaaaaacagaggtgtyagctctggaagccacagtctagggaagaagccactgggagtcacagcaggccatggtgcccacaccctgtgggaacacactctggactaaggaagatcatatac

SEQ ID NO: 119015 - DNA, 600 bp, Homo sapiens
ataatcactttaaatgtcaatgatctaaatacaccagttaaaagacagagattgccacagtggataaaaaaataatgcccaactatatgttgtctctaagaaatccactttaaatacaaagacatgtatagattaaaaataaaagaatggagaaagatgttctatgctaacactactcaagagaacttgagtaagtactgcctttgctcctctgtaaaaattcagttagctatatctatgtgggtctatttctaagctcccgattctgtcccatttatctatttttctctcctctcaccaataccacactgccttaattactgtagctttataatatgtcttttttcttttttttgagatggtgtctcactctgtcacctaggctggagtgcagtggtgtgatctcagctcactgcaaccttcaccttccaggttcaagcaattctcgtgcttgattctaaagtttacataccagacagagcagacttcaaagcaagaaaaattatcagagataaagagggcaygacatactaataaaggggtcaattgtccaagaagacataactatccttaatgtgtacgcacgtaataatagagtgg

SEQ ID NO: 119016 - DNA, 627 bp, Homo sapiens
taattagagctcttttatatatatttagtagtgaaactttatgtatacaacacataaatacatagacatattaggcatgctgatagaagtacatcttatagattcataaaacctctttttatttcctattttagactcccagattctccataacctgtttcattaccctaggcagttgtcagctatgtagccctaaatttgcatattaaaggaaaaactcttaggtgaaaaatcatgtagcaaaatttacatctcaaattacagagagaaagtcagctggaggaaaattaaaatggatgtaattgtcaagttaaacataaaatttagaaatctataataggattgtacaaggacaccaattgttttgtacaggtagttctaattttactccctatcttttaactggacatctgagctctgcagagaactcacactgtgtattgggtctccaaatagagaattattataaggctagaccatccttttacagttttccttcccttttttttaatgaaracatttctctaagtgtctaagctacactctttcttactttaaacatctaagtgtaaaaaatcagacaacacattacaaatgaaagcaggttaaaatctgagaagaaacttg

SEQ ID NO: 119017 - DNA, 531 bp, Homo sapiens
gagttgacccactactgtctcctgagacccaacacttgaaagcacagagtgagataccaaggggatcaaggtttaaactttaattccccttaagccttggacttcctacttgaaaatgtaagtgagaaccctcacctgtcataaagaataaatggggaaatatattacaagaaactagaatgatcccaaaygtattacaggtaatcagtagaagaggttgaagatgataaattctcagctgaagcagaggaatgatgaccaaggtgtggtatgtggaaggtctccagagtcaacaggacctgctgactagatgaagagtgtcaaggggagggaaaacatacaggtaaagctcctgtttgggcttcattataaataatcatccactaagataaagtgcatgatagggagaagatttggatgaaagaagagttcacatttggacttatgaatgtgaaataaccatggggagacatctgggtggcagttagatacgtgggtcagttgcccataagacagaaaaaagctagaaat

SEQ ID NO: 119018 - DNA, 531 bp, Homo sapiens
gagttgacccactactgtctcctgagacccaacacttgaaagcacagagtgagataccaaggggatcaaggtttaaactttaattccccttaagccttggacttcctacttgaaaatgtaagtgagaaccctcacctgtcataaagaataaatggggaaatatattacaagaaactagaatgatcccaaatgtattacaggtaatcagtagaagaggttgaagatgataaattctcagctgaagcagaggaatgatgaccaaggtgtggtatgtggaaggtctccagagtcaacaggacctgctgactagatgaagagtgtcaaggggagggaaaacatacaggtaaagctcctgtttgggcttcattataaataatcatccactaagataaagtgcatgatrgggagaagatttggatgaaagaagagttcacatttggacttatgaatgtgaaataaccatggggagacatctgggtggcagttagatacgtgggtcagttgcccataagacagaaaaaagctagaaat

SEQ ID NO: 119019 - DNA, 607 bp, Homo sapiens
tttaaaatcaaatttaatgaaaatctatcattttttattatattcataaggctgaatttttctttgagatgacacttttatcagtatatagcttctatttccacttaattaaggtttttttttggtttgttgttgttgttgtttgacaagtctcactctgttgcccaagctggagtacagtggcaagatcttggttcactgcaacctccacctcctgggttcaagcgattctcctgccctagcctcctcactagctgggactacaggmatgccccaccaggactggcaaatttttgtatttttagtagagacagtgtttcactgtgttggccaggctggtcttgaactcctgaccttgtgatccacccgcctcggcctcccaaagtgctgggattacaggaatgagccactgcgcccggcctaattaaggtacttataacgaaatggacaagaaattttacctaacatttttattaaaattcagatgtttgtatatatttcctccttaaacatatttatttgatttatattcatgtacatatatttcctaattttgaattcttttggctttcttaaagcaacacaatttgagacagttttaatatgt

SEQ ID NO: 119020 - DNA, 607 bp, Homo sapiens
tttaaaatcaaatttaatgaaaatctatcattttttattatattcataaggctgaatttttctttgagatgacacttttatcagtatatagcttctatttccacttaattaaggtttttttttggtttgttgttgttgttgtttgacaagtctcactctgttgcccaagctggagtacagtggcaagatcttggttcactgcaacctccacctcctgggttcaagcgattctcctgccctagcctcctcactagctgggactacaggcatgccccaccaggactggcaaatttttgtatttttagtagagacagtgtttcactgtgttggccaggctggtcttgaactcctgaccttgtgatccacccgcctcggcctcccaaagtgctgggattacaggaatgagccactgcgcccggcctaattaaggtacttataacgaaatggacaagaaattttacctaacatttttattaaaattcagatgtttgtatatatttcctccttaaacatatttwtttgatttatattcatgtacatatatttcctaattttgaattcttttggctttcttaaagcaacacaatttgagacagttttaatatgt

SEQ ID NO: 119021 - DNA, 362 bp, Homo sapiens
cataaagaaagtaaaacaaatgggtaagtggacagcctcattctcaagacaaaactaaaattccaaatcacataaagaaatctgataaggcaacgaaatcaaaaatttaaagctgacaacattcaggtaataaaaagttatttaaaaaaattttatgcctagaatttgcgtaaagtcaattatgcatatttgcaaaaaggtcaatatggattattggggtttgggtttaaaaacttcctctattccaaaccaaaaaagaaaaatgtcrgataaataaaataaaaaagaaaagccacaataacatagcttggcaggagttaatctgcgggtttactagtgtgtttgcacagaagtaggcagta

SEQ ID NO: 119022 - DNA, 533 bp, Homo sapiens
cccccttcacgttcttccatgattgtaagtttcctgaggcctctccagccacgctgagtcaactaaacctcttccctttataaattacccagtctcgagcagttctttatacaagtatgaaaatggagtaatacaactatagagtatttttcaagctaaaatgactaaaatgatcaatcagtaactaatgtatagaagtaataaaaatatgtgtggtgatctataatrccaagaaaaataaaactttccaataacaaaactgaaacttgagactaatttttgacaaggtttttcttgcaataggaaattaaaaacttaggaagaaatgtaagtatctcagactcccaagcgctattattatgaagtttaatagtaagccacaaaaatgagattaattttttaaacaaacattggttgagctacatcaaaataatatgctttttacaaagcactgaacagaagtgtggttaagtagtatgccctcaattaatagtgtttattagtactagttacctggcacagttctaggcata

SEQ ID NO: 119023 - DNA, 612 bp, Homo sapiens
tactctgccctttattcaagcagtagtagagctccctgctcatggccccagaaaaggtatgttattcaaaaamataaaactagccctggagaactccatgggtttccagaggaagcaggaagaaaagtagaggagcagagaaggagtcttagagaggggcagcggagacaaaagacagcagaaacatgcaagaataccctccccttcccccgactagaaaaggactctgagatgcaatacgagtggaaagagagggctgtgttcccaatcaacagggatctagataccactttttggcactggagccaagaaagaagcaagacactgagagaaatgctgcagggagtgtggcacccgaggcatagggcccagaactcagcaaagatttccagagccccagcatattcaggaagtaacagagtccagcacccaaaaggaccatcaggacaaagacatagtaataatacctggaatcttgacccaggcccatgaggcagaagccaaagggggcagggttagaggaggaatcttcagaacagccaaatactaaaaaaccatcagaggaaaagcggctctagattataggttatagagtaactgacattccacaca

SEQ ID NO: 119024 - DNA, 578 bp, Homo sapiens
tcacattgacaggcaatttggatccgtaattttcttttaatttttgaccaagtaattctatttgtagaagttatcctttgaaaaaaatcagaaataagcaccaggatctaggtacaagtaggttcaactgaaataatatttataatgatgcaatcccagaaaattaaactctggtatagatgagtcaagttctcaacaggaagagataacattacagggtattcaagagagtgtttacaaagatgcgtgtggaaaaacsacaacagacagtgtagtaatcctggctgaaactccttagcctaaaaggatgaggggaggaatagttactggacctcagaaggagacaacccagtagagtgcctggtggaaagacctagccaacttgaggtgacctgccagggagagagtcaaagaaataaaatacctgccctttatctcctttctccctccctctcctcccatctcctgtcagggcttcccatttcccaaatccaagatgaagctgaaaggcacaggaactccttgatgttgtccatgagttcagcctccagaggcaaagagccaggtacagaggctgg

SEQ ID NO: 119025 - DNA, 578 bp, Homo sapiens
tcacattgacaggcaatttggatccgtaattttcttttaatttttgaccaagtaattctatttgtagaagttatcctttgaaaaaaatcagaaataagcaccaggatctaggtacaagtaggttcaactgaaataatatttataatgatgcaatcccagaaaattaaactctggtatagatgagtcaagttctcaacaggaagagataacattacagggtattcaagagagtgtttacaaagatgcgtgtggaaaaacgacaacagacagtgtagtaatcctggctgaaactccttagcctaaaaggatgaggggaggaatagttactggacctcagaaggagasaacccagtagagtgcctggtggaaagacctagccaacttgaggtgacctgccagggagagagtcaaagaaataaaatacctgccctttatctcctttctccctccctctcctcccatctcctgtcagggcttcccatttcccaaatccaagatgaagctgaaaggcacaggaactccttgatgttgtccatgagttcagcctccagaggcaaagagccaggtacagaggctgg

SEQ ID NO: 119026 - DNA, 578 bp, Homo sapiens
tcacattgacaggcaatttggatccgtaattttcttttaatttttgaccaagtaattctatttgtagaagttatcctttgaaaaaaatcagaaataagcaccaggatctaggtacaagtaggttcaactgaaataatatttataatgatgcaatcccagaaaattaaactctggtatagatgagtcaagttctcaacaggaagagataacattacagggtattcaagagagtgtttacaaagatgcgtgtggaaaaacgacaacagacagtgtagtaatcctggctgaaactccttagcctaaaaggatgaggggaggaatagttactggacctcagaaggagacaacccagtagagtgcctggtggaaagacctagccaacttgaggtgacctgccagggagagagtcaaagaaataaaatacctgccctttatctcctttctccctccctctcctcccatctcctgtcagggcttcccatttcccaaatccaagatgaagcygaaaggcacaggaactccttgatgttgtccatgagttcagcctccagaggcaaagagccaggtacagaggctgg

SEQ ID NO: 119027 - DNA, 524 bp, Homo sapiens
  misc_feature (1)...(524): n = A,T,C or G
caaaattacagttcattttatgctaattataaaattgtacctgattttccaataatarctatgactcataaaacacttctaattaatacctgtgaatgtgggtgcaattaaatattaatgagatttaacttttagaataatgcaccaccaatccattcatctccaaaaatgccagtagattaaaattggattattctaattangaagctgaaattaataactnttagagtttttgaataaaccaaacacagtgcgatgatgagttgttatttttataatgaattcttaatattcaaatcttcattaaacacttttaaaattggatacaagggagaaacaaaacaaggctattctttaagcaaaagtttatgcacgaatttgtgattgggtctcattgcctgggcttgactggaccaattctggttgattttcttcaaattcttattatttgcctgtaaatgataatatttacccaagtaattataattttggttttgaatggaaaatatactgttagagagttg

SEQ ID NO: 119028 - DNA, 540 bp, Homo sapiens
tcactttttatagctgggtaatatataaacacaaatgtccctcctttttacttgaaccccagaggaaagcagttttacagagctatggaagcagatcttattaattaaagtctattttttgttcctctaaatttatcttttactatcagtgtgttgtgtgctaaggaatggattctaagacttatgaaatgggaagcatctatcacagtgttcaatgcatgctaaataaatgttcatcctccattaatataaaggtactcactgagaccgagtgtggtggctcacgctataatcccagcactttgagaggccaaggtgggcggatcagaaggtcaggagttcgagaccagcctggccaacatgttgaaaccccgtgtctactaaaaatacaaaaatcagccgggtgtggtggcgggtgcctgtaatcccagctaytcgggaggctcaggcaggggaattgcttgaacgtgggaggcagagggtgtagtgagccaagattgctccactgcactccagcctgggtgacagagccagactgtc

SEQ ID NO: 119029 - DNA, 530 bp, Homo sapiens
caaaatgtcagtaatgccacagttgagaaactctcagataaagacataaggatgacttaaagggagataaaaatgaagaaagaataccttttgtattagtctattctcatgctgctaataaagacatacccaagatggggtaatttataaaggaaagaggtttaattgaatcacagttccacatggctggtgaggcctcacaatcatggcagaaggtgaatgaggagcaaaatcacatcttacatggtagcaggcaagagagaacatgcagggaactcccatttataaaaccatattatctcatgagacttattcactatcactaaaaatcacgggaaggacatgtccccatgattcaatcacctcccaccagtccttctcaggacacgtgggaattatgggakgtacacttcaagatgagatttgggtggggacaaagccaaaccatatctccttttaaagaggtgactgtactaaccctaactagaagagatagctccatgaattaaataatggttgaaatgagacga

SEQ ID NO: 119030 - DNA, 530 bp, Homo sapiens
caaaatgtcagtaatgccacagttgagaaactctcagataaagacataaggatgacttaaagggagataaaaatgaagaaagaataccttttgtattagtctattctcatgctgctaataaagacatacccaagatggggtaatttataaaggaaagaggtttaattgaatcacagttccacatggctggtgaggcctcacaatcatggcagaaggtgaatgaggagcaaaatcacatcttacatggtagcaggcaagagagaacatgcagggaactcccatttataaaaccatattatctcatgagacttattcactatcactaaaaatcacgggaaggacatgtccccatgattcaatcacctcccaccagtccttctcaggacacgtgggaattatgggatgtacacttcaagatgagatttgggtggggacamagccaaaccatatctccttttaaagaggtgactgtactaaccctaactagaagagatagctccatgaattaaataatggttgaaatgagacga

SEQ ID NO: 119031 - DNA, 530 bp, Homo sapiens
caaaatgtcagtaatgccacagttgagaaactctcagataaagacataaggatgacttaaagggagataaaaatgaagaaagaataccttttgtattagtctattctcatgctgctaataaagacatacccaagatggggtaatttataaaggaaagaggtttaattgaatcacagttccacatggctggtgaggcctcacaatcatggcagaaggtgaatgaggagcaaaatcacatcttacatggtagcaggcaagagagaacatgcagggaactcccatttataaaaccatattatctcatgagacttattcactatcactaaaaatcacgggaaggacatgtccccatgattcaatcacctcccaccagtccttctcaggacacgtgggaattatgggatgtacacttcaagatgagatttgggtggggacaaagccaaaccatatctccttttaaagaggtgactgtactaaccctaactagaagagayagctccatgaattaaataatggttgaaatgagacga

SEQ ID NO: 119032 - DNA, 576 bp, Homo sapiens
  misc_feature (1)...(576): n = A,T,C or G
tagagccccaaggttaatattaaaaagacaagaactagccatcaaataagttgaaattttacaccatagatattactattgactaaaagaggtagctgttaggtgcccttctcacaatgcaaatgaggagtgtggatctgggtagctgtgattacccccataatggtgaagttcccctctaagtcacttatgcaaattttagtagtaatgcttcccccatctaatattattctccacagaaatatmcacttattcactgccttttcatatgaatgtgtggtataaagctggactgacagaaaaggtaccttaatagaaaccagaaactgatatatttgctaaagctctgtattatttggcttctttcctgctacatgaagtaaaggccatttcactgtattcctaaaggcaatttactattagctatgaattttcaggtaggcttaattaatcaaggtcttaaattaaattgaagtatttattacaagttatgcatcacaaacatatntatataattnataaatagatttggggtatatttaacttggctgcaaaacacacagtaccttactgctt

SEQ ID NO: 119033 - DNA, 576 bp, Homo sapiens
  misc_feature (1)...(576): n = A,T,C or G
tagagccccaaggttaatattaaaaagacaagaactagccatcaaataagttgaaattttacaccatagatattactattgactaaaagaggtagctgttaggtgcccttctcacaatgcaaatgaggagtgtggatctgggtagctgtgattacccccataatggtgaagttcccctctaagtcacttatgcaaattttagtagtaatgcttcccccatctaatattattctccacagaaatatccacttattcactgccttttcatatgaatgtgtggtataaagctggactgacagaaaaggtaccttaatagaaaccagaaactgatatatttgctaaagctctgtattatttggcttctttcctgctacatgaagtaamggccatttcactgtattcctaaaggcaatttactattagctatgaattttcaggtaggcttaattaatcaaggtcttaaattaaattgaagtatttattacaagttatgcatcacaaacatatntatataattnataaatagatttggggtatatttaacttggctgcaaaacacacagtaccttactgctt

SEQ ID NO: 119034 - DNA, 241 bp, Homo sapiens
ctaagttttagggaagagacaaaacaaagacagaaaaaggaacttgaaggaaatagagaacattcaagaaaaagaacaatttttaaaatgtgtcttcagtattctcagagagaagagattttatatcaatgaagcttgaacacaataatatagagtaaaaactttgagaggagaaaaaagaactttgagaaatttttaatagtagtagaaatgaaamactcaatagaatgactgaatgata

SEQ ID NO: 119035 - DNA, 560 bp, Homo sapiens
aaataggaataaggaaagttactgtcacttagatgtaattaaaatctagcctaacagtgagaggaggttccagctgggcttcctgggttgattaggggctcagaaagctgtgaaactcactyctttcctgcatcaggacttactttggtcctggatgaataatattaaagatatgtgcttaaaataatattcctaacatcaaaacttgggcatgtgttttcttcccccaagaaagctataaacagcgaaacttttgctgtaagcttccctgtgtcctcgctccctctctcccttgccccttccctgaaactaaaaggaatgttaaaagcccattttcctgcgatcagcagaccttatctatgtcccaattccaattccttgtcaacacaatctgtaaagtcctgtgagatcctgtctcctttgccatgccgctgcaaggtcataaagcaggtaaaagttaagttaccatgccggttttcctcaagatctaagacatcttaatcgtctttgtttcttgctctggtaacatcttcccacctcgggtatttcccgccttaaag

SEQ ID NO: 119036 - DNA, 560 bp, Homo sapiens
aaataggaataaggaaagttactgtcacttagatgtaattaaaatctagcctaacagtgagaggaggttccagctgggcttcctgggttgattaggggctcagaaagctgtgaaactcactcctttcctgcatcaggacttactttggtcctggatgaataatattaaagatatgtgcttaaaataatattcctaacatcaaaacttgggcatgtgttttcttcccccaagaaagctataaacagcgaaacttttgctgtaagcttccctgtgtcctcgctccctctctcccttgccccttccctgaaactaaaaggaatgttaaaagcccattttcctgcgatcagcagaccttatctatgtcccaattccaattccttgtcaacacaatctgtaaagtcctgtgagatcctgtctcctttgccatgccgctgcaaggtcataaagcaggtaaaasttaagttaccatgccggttttcctcaagatctaagacatcttaatcgtctttgtttcttgctctggtaacatcttcccacctcgggtatttcccgccttaaag

SEQ ID NO: 119037 - DNA, 633 bp, Homo sapiens
tttgctgggactgacctgcactcaagggtcctcagctttgcacctgctgcagctctgtctccatctaatcttcagggagatctcccctgccagctcacacatccatgtgggagtgagttcccctgcaactaggatctcagaggtttgcagtaagattgagcagtctcccagtctcttaactcaccccttcctcaggcaccatttggtgctgggaaacagctggggtgctcaggtgctccaacttgggttcccagcttcctccctattcagcctcagcatgtgagtcttttttccatccacatttggtgttttctgtccagagattggttcaaattatgttggtatagtcgaaactgtgagctctrtctatgagagcagcagttcctggttgcgtctagtcagttgtcttggaaaatgtaagagttaaagaaaaaggaaagaaacatgaaaaatggctcagcagtcaaagacaggtttattttggagaataaactggagagcggtttctggaggatttcgggcaggagcactctgtcttacagactaagagtatttaagggttcagggtgagagagcttatcacagggtaggaagtttcctgtgtggaggaaaagtttattgcagggttggaat

SEQ ID NO: 119038 - DNA, 515 bp, Homo sapiens
gaaaattaagacattaaaacttactaaagtgttaaaaacaaagtatttgtgcaatgatagataattgtatcaataaaacagaatagaaatccaaaatagaaatacataaaaatgaaaatatattaaaaaatggcatttatattcattatagaaaatatgttttaataaatgaagctcacataatcaggttatataccctatcatatatcaaatacaaaaataaaatccaactgcaataaagatccaactgtgaaacaaaataaaatttcagaacatataggataatttttataaaacatttggaaggacaagscccttttaaataaaaaaggaattcctgaattcacaaaagaaatataggtacatttaataacacaatattttgtgtaacaaacaaaatgtagtaagagtctaggaaagacacttgcaatctatatggcaggaaaaagttaacaaaatcaacattcctgatatgtaggggacgctgaaaacttgatgagaaaataaaacagaag

SEQ ID NO: 119039 - DNA, 391 bp, Homo sapiens
atttttcatcaataaagcatgtattgaacacttcttaataattaatctggaactagaataaatggtaaacagtaggtgatggataagtgccctgaatcatgctatrgaatagagatcaacatatttaaaatatacataaagcaaaatgagataagtttttttcttactactacttcctcttgtagttccttagctaattatacctaactgtaatcagctctttaaccatgcaattatttctcagatatcagtacctttgcagattctttttctatgttttgaatatctatcttactcctttcaccctaatgaaactttaggcaacttttcaaaaccaatattgcatttgaaagttttctttcttcccgcttgttacacatttgtgaattta

SEQ ID NO: 119040 - DNA, 645 bp, Homo sapiens
tcctccttgccctctgccatgattgtgaggcttctccagccacgtgggctgcaagcagctctgctcctgtgactcagctgctttcaccagctggcattaagtgtctgtggcttttctaggtgtgcagtacaagctgttatttgttgattctggggtctggaagacagtggccctgcttctcgaaccttcactaggcagtgtcacagtgggaactcggtgtggggctctaacgcccgacatttcccttctgcactgtcctagcagaggtgctccatgagaatccctcccctgcagcaaacttctgcctggacatccaagcatttccatacatcctctgaaatctaggtggaggttcccaaatctcaattcttgacttctgtgtacccagaggcttaacaccacatggaagttcccaaggcttggggcttttaccctttggagccatggcctgaactgtgccttggccccttttagccacagctgaagcttctggaatgcygggcagcaagtccctaggctacacagagcaggggagccctgagccaggtccaggaaaccattttttctcctatacctctgggcctgtaatgggaggggctcctgtgaaggtctctgacatgccctggagacattttcccatttttc

SEQ ID NO: 119041 - DNA, 364 bp, Homo sapiens
ctctcagcccaaaatttcttaagctgataagcacttcaacaaagtctcaagatacaaaatcaatctgcaaaaatcactagcatttctatacaccaacaacartcaagccaagagccaaatcaggaatgaactcccatccacaattgccacaaaaagaacaactaggaatccaggctaactagggtcttgaaagatttccacaaggagaactacaaaccactgctcaaataaatcagagatgacacaaatgggaaaacattctatattcacagagaggaagaatcaatattgttaaaatggcaatactgctcaaagcaatttatagattgcatgctattcccattaaactaccattgacattctt

SEQ ID NO: 119042 - DNA, 364 bp, Homo sapiens
ctctcagcccaaaatttcttaagctgataagcacttcaacaaagtctcaagatacaaaatcaatctgcaaaaatcactagcatttctatacaccaacaacagtcaagccaagagccaaatcaggaatgaactcccatccacaaytgccacaaaaagaacaactaggaatccaggctaactagggtcttgaaagatttccacaaggagaactacaaaccactgctcaaataaatcagagatgacacaaatgggaaaacattctatattcacagagaggaagaatcaatattgttaaaatggcaatactgctcaaagcaatttatagattgcatgctattcccattaaactaccattgacattctt

SEQ ID NO: 119043 - DNA, 364 bp, Homo sapiens
ctctcagcccaaaatttcttaagctgataagcacttcaacaaagtctcaagatacaaaatcaatctgcaaaaatcactagcatttctatacaccaacaacagtcaagccaagagccaaatcaggaatgaactcccatccacaattgccacaaaaagaacaactaggaatccaggctaactagggwcttgaaagatttccacaaggagaactacaaaccactgctcaaataaatcagagatgacacaaatgggaaaacattctatattcacagagaggaagaatcaatattgttaaaatggcaatactgctcaaagcaatttatagattgcatgctattcccattaaactaccattgacattctt

SEQ ID NO: 119044 - DNA, 647 bp, Homo sapiens
tgcatgccatttgctaccttggtgttgacattatgtgcatttatttttttacaaagaaaaaataagctatttgaaaaaattcaggtttactttgaggaggttatttggtaaattttataaaaggaaattaattaatgtaacaacaaagaagggaattacctacttagcaaacagtgagtaaattatcaatcagaagtgaaattcaatatgkaacccattccattcaacttgattggttagtctcttccaatacattcttatttaaatgtgctttccatgagaaaacatacagtggttgctgtgtcaaaggactaaggtgaaatttctactcaaagttacctctgaatttgttccattagtgtcttcaaacattgaagctgaaaaacttcaacctttcaagaaacatccatcttaaaataattagaataaatgtttaactaatggaagtttcacggatcatatatatttataccctagagttctgcactgttaatagaagtgtttctaagtaactaatgttatactttattttatattaacacatcattatagtataaatatatcctaattaattaaaaaacaaattttcaggaatttatgaatgtaagcaaacaataacattaatataaatataattatatcataat

SEQ ID NO: 119045 - DNA, 581 bp, Homo sapiens
agtaaattccaggccagggtctagcaagtgcttccccactgtatttacttgtcactttgcctgtcaggtttttggagtaatgtttgcatcacattttgtgcaagcttctcagatggccatgttacacttttcttctttgcccttttacttggccctcttcagttatttttttctcttcctccttccttctcattccccagrtgtatgctcaaggaagatacagagataatagagtgtaaatggttaagaatggtgaatttcttggttccttagagaaatggccgattctaggttaggggcagaagatgaacaagatgagtctgtaacctcttgcttattgtgatagcaggaagctatcaactactgtatggggccttggtagcaagtctgaagagaagcggctcccactggccaaagatgggataaattaaatatccctccaccactccccaaaaaaacacacaaaaatcatcaacatttggaaacatataatatatgttacaacccatgctgagactaaaatgatgaagcagaaaagccattgatgatactaaaaaagaaaaagggtgtgggagatcctc

SEQ ID NO: 119046 - DNA, 581 bp, Homo sapiens
agtaaattccaggccagggtctagcaagtgcttccccactgtatttacttgtcactttgcctgtcaggtttttggagtaatgtttgcatcacattttgtgcaagcttctcagatggccatgttacacttttcttctttgcccttttacttggccctcttcagttatttttttctcttcctccttccttctcattccccagatgtatgctcaaggaaratacagagataatagagtgtaaatggttaagaatggtgaatttcttggttccttagagaaatggccgattctaggttaggggcagaagatgaacaagatgagtctgtaacctcttgcttattgtgatagcaggaagctatcaactactgtatggggccttggtagcaagtctgaagagaagcggctcccactggccaaagatgggataaattaaatatccctccaccactccccaaaaaaacacacaaaaatcatcaacatttggaaacatataatatatgttacaacccatgctgagactaaaatgatgaagcagaaaagccattgatgatactaaaaaagaaaaagggtgtgggagatcctc

SEQ ID NO: 119047 - DNA, 608 bp, Homo sapiens
agctaacatttatccaattttcttctacaagtggttcttcagctgacttaacagtgcaaaagaggaagcacttcttcgcagaaattggttatctaataaatgaagagagatgatgaaattaaaatatcactatgttgcagcttctgatgaattaatgaatctgggcattggtcrttgatgactaccatcatcgcaaggagactactactcatttgttggagggaagtaaaaaaacatcacgaatgaatagcaaataaataagtaaataccaaataaataaataaatatgtagtcaaatctgaatccaatcaaactgctcaatctcaccatcaattaaaatagagggacagaagaacatgttaaatgacacctcagaaatacagttagtaaaatctggattctggaatgctcttcatgaccaacaagttatttcttcaacaaaacttgtgagaaaaataatggagagggaactctagaataagagacttaagagatatctcaatcaatcacaatgagtagatcttaacatgaatcctcattcaaactgtgtaactgtgacaaagtgaaacgtggtttgtttttaaaatgtttacagatgaaataatatg

SEQ ID NO: 119048 - DNA, 535 bp, Homo sapiens
tacacaggtttatacagaaggtcataattctccatccccatcacacaaagratgtgagaaaatggactcaaagctccattcagggtgtttagacagaatgagacagtgagaactgccaaccctggactcagataatttcacccacaatctcattctgatggccctgattatattaaaatgtaatgagtttgatgcttttgttttcagtgttttgtggatgttctagtgatgtgaaaaaaaaaaaaaaaaaaaacttttttcaaccacagtcctctcccaggtggcttatctactcaaattcattcattcattcatgcttctatggaacatctatctcataggcactggcatggttgcccagagcattttccctcggaaaaccaggcaagtctgcccagcaaaggcctgcctctcagccacaggtataggcacctgaaccaggctgctgactaggctgccccaccccttgagattcaatcatggctccagaatgggcacctgatttagcagaaccaatcagagttcacggaagaca

SEQ ID NO: 119049 - DNA, 535 bp, Homo sapiens
tacacaggtttatacagaaggtcataattctccatccccatcacacaaaggatgtgagaaaatggactcaaagctccattcagggtgtttagacagaatgagacagtgagaactgccaaccctggactcarataatttcacccacaatctcattctgatggccctgattatattaaaatgtaatgagtttgatgcttttgttttcagtgttttgtggatgttctagtgatgtgaaaaaaaaaaaaaaaaaaaacttttttcaaccacagtcctctcccaggtggcttatctactcaaattcattcattcattcatgcttctatggaacatctatctcataggcactggcatggttgcccagagcattttccctcggaaaaccaggcaagtctgcccagcaaaggcctgcctctcagccacaggtataggcacctgaaccaggctgctgactaggctgccccaccccttgagattcaatcatggctccagaatgggcacctgatttagcagaaccaatcagagttcacggaagaca

SEQ ID NO: 119050 - DNA, 438 bp, Homo sapiens
  misc_feature (1)...(438): n = A,T,C or G
cctgcatgggtgacagagccagaccttgtctcaaaaaaaaaaaaaaattttactttcccttcactgcactcaaaacaagttctagacaaatattcattgctatagttatttgtttactgtttgtctcctttgttagacagtcagctccacgtgngagaggtctgtgtagttcaccaytgtatgttcaatgcacagcacaatgcctggcatatagtaagcactcaataaatatatgttgaatgaatggatacaaatcaaaaagtagacattccaaatggcaaaattacatttgttaattatgcatgattaacagtatctcactgttgatgaggcactctttcatgtgtcaaaagtcactcatgacatataagctactacctttctaacttacagagcctagaagttctagtccttgtattaataataataacacccaaa

SEQ ID NO: 119051 - DNA, 535 bp, Homo sapiens
aatgactgtgaaggccctatttgaagtgtgtgttcaagggaggacatagttattcctcctggctatccttgtggtgaagagggaaagtggggggcagggttgactgaggacaggtcatgaaaaacaggtgaacgatcttacactttagttgttaggtaatggaggtcactgaaaagtcagagctatagagaagccatttgtgctttaggaagataaaactggaggcaatgtgtagactggtatattaggaaaacacgaactaactccctctcttctactaaaccctcaacactcaacatgctctggccatcatagtgcatggaagctgaatccctgtacccscattgttgtctggcttcctggcttgagaaaagcagagtttctgttccatgttgagagaggggagagacagtgcagccagcgggatggcaggagagcagcccatactccatggcgagacccctgctgcgacgccaagcctgcaaaaaactaactggacttgctaaaagcttagcatgagggtatttattttttc

SEQ ID NO: 119052 - DNA, 556 bp, Homo sapiens
gtcagtataaaagctgagactagaccccaagggccctaacttagacctcagtgcyccattccctacactgtgctgccaataattctttccttgttttgctacaacaaataagaagtaaaagagacaccttaattagggtcttggaattcagatgagcttccttggccagaattggacaggcatctttaataagactgttgaggaggcttggagatacttgactgctttttggaaaaatggatctttccggtggctacctcagcccactcctgtggtgataggatttctctttagctcatggttgctgaaggatgcagtaagcagacccagatggagacattcttctaagccttgactggtataaagcagagtttggtgtagtgaaaagtacagactttgaagactgacctgagcgcgaatctcagctctccagtcaagccattgtgtgaccttcagcctgttccttaaccattaagaagaagagaaaaagaggcaaggcagacattcctataggccctcgttatttatactcctctttttctttaaaaatagaact

SEQ ID NO: 119053 - DNA, 556 bp, Homo sapiens
gtcagtataaaagctgagactagaccccaagggccctaacttagacctcagtgctccattccctacactgtgctgccaataattctttccttgttttgctacaacaaataagaagtaaaagagacaccttaattagggtcttggaattcagatgagcttccttggccagaattggacaggcatctttaataagactgttgaggaggcttggagatacttgactgctttttggaaaaatggatctttccggtggctacctcagcccactcctgtggtgataggatttctctttagctcatggttgctgaaggatgcagtaagcrgacccagatggagacattcttctaagccttgactggtataaagcagagtttggtgtagtgaaaagtacagactttgaagactgacctgagcgcgaatctcagctctccagtcaagccattgtgtgaccttcagcctgttccttaaccattaagaagaagagaaaaagaggcaaggcagacattcctataggccctcgttatttatactcctctttttctttaaaaatagaact

SEQ ID NO: 119054 - DNA, 536 bp, Homo sapiens
cactaatcagaaaagattgctaaatttggtcaagcacggtgctcacgcctgtaattccagcactttgggaaaccgaggcggatcacctgaggtcaggagttcacaaccagcctctactaaaaatacaaaaattagctaggcatggtggcgggtgcctgtagtcccagctacaccraaggctgaggcatgaaaatcacttgaacccaggaggcagaggttgtagtgagcccagatggcgtcactgcaatcgagcctgggcgacacagagaaactctgtaccaaaaaaaaaaaaaaggaaacagaaagaaaagactgctaaattaaacttcattaaaataaatagtttttttctgcatcaaaagacactattaattaggagagtgaggaggcaagccacagactggcatattcacagtatgtattcacagattttatccagaatatgttaaaaagttcaaatcatttttttttaaagacaatcagctccatgggggaaaaaggggtgccaaaaatttgaacaggcatgtcatatacag

SEQ ID NO: 119055 - DNA, 587 bp, Homo sapiens
ggagaacacacacacacttatgaaatataaatgtaaaattatcattatttgaaaatattattttctacttaaaaactataagatatgcacctaaaattctatctagaaaaatctaatcaagaaaaagaactcattctcaataggagtagaaattgcaaactatctttaaaatgagcttatttgctgaagaaaacattaaaatgttactagaggccgggttcggtggctcatgcctgtaatcccagcactttggaggctgggatgggcagatgctttgagctcaagaattcaagaccagcctgggcaatatggcaaaatcccatctctacaaaacaatacaaaaattagctggtcgyggtggtgtgcacttgccgtcccagctactcaggaggctgaggtgagaggatcacttgagcccaggaggttgaggctgcagtgagctgagatcttgccactgtactccagcctgggtgacagagtgagaccctgtctcaataaacaaaaaaatgttgctagagattatcaaagaataggtggattgataaacctgaatgagagcactcaatattcaaataagtcagattccc

SEQ ID NO: 119056 - DNA, 570 bp, Homo sapiens
ggccttttccagcttttaattattatgacatccataattctttttaaataaagtcttccaagattcaaataaaatgcactatatgttgattgtagacactttggagaatataaaaaagtaaaaataaaataaaaatcacctataatcttaccactcacagaaacatgtttcatccattgaaacatgttggaatatgttctaytttttttctttgctccctcccaagcttacatatgtgaatgtcttgatgtgaccagtcatgtcctattttttccatataaaattatatctgaagcattcttccatatagttgtttttcaaaagcatggatttaagtggattcatgagatgctatcatatagatgtgtcataagatacttactctcctgttgttggacagttgggttgaagtcttactttctttcttttttggctactgtaaaaatatagttattatattttcctggattgatgtttttgtcatgacgaaatgtacctgtttctcccagcaatatacttcttggcactttaacacgctttatctttagtttctatttggttaattcttgc

SEQ ID NO: 119057 - DNA, 570 bp, Homo sapiens
ggccttttccagcttttaattattatgacatccataattctttttaaataaagtcttccaagattcaaataaaatgcactatatgttgattgtagacactttggagaatataaaaaagtaaaaataaaataaaaatcacctataatcttaccactcacagaaacatgtttcatccattgaaacatgttggaatatgttctactttttttctttgctccctcccaagcttacatatgtgaatgtcttgatgtgaccagtcatgtcctattttttccatataaaattatatctgaagcattcttccatatagttgtttttcaaaagcatggatttaagtggattcatgagatgctatcatatagatgtgtcrtaagatacttactctcctgttgttggacagttgggttgaagtcttactttctttcttttttggctactgtaaaaatatagttattatattttcctggattgatgtttttgtcatgacgaaatgtacctgtttctcccagcaatatacttcttggcactttaacacgctttatctttagtttctatttggttaattcttgc

SEQ ID NO: 119058 - DNA, 558 bp, Homo sapiens
agaatacatttctgctgaatttgtagacttggctaagtagatttcaaggtaaaactttatgaagtccatctggtttcttgtagctctgcttgataatgtacaggtagagagaaaaactgaaaaaggaaatgttctgtctcaaagtagaaaatagagaaattatttctgaggcagcatttgttgtgttcagaaatgaaatgttttctaatctccaatctctcccaggaaaatactcttaaaataaaaaatgtcttgagggcaacgaatgaattygggacactggtcatgttttcaagaatgacactctgagactctcagttaaaccctcagaaacatgtaatgcagtggttcataaatcctctctgctagacaagcagtcctgtaatattctcaagggtattgccctaagatgctctgacttgggtgacttgtctaatgaagtggattataatttaaagtccaaaaatttttaaagtaattttacctattttggctaatttatgtataaattaaggtcaccatcttctatgggtgcagtttgtggtgccctaaaacaat

SEQ ID NO: 119059 - DNA, 621 bp, Homo sapiens
atgttcacactctttctgagttcatttgtcctctcttgcctaaagcattcatatttctatcgcaatttagttttttttaacatttattattaggttaatatggatgtctgttttggtggtattcgtttatttttcattgatcatagtatctttaaatcaatattgtaatttctctgaactttttaarccaacaggaactaaaaatgatgatagttgtttttataaagagcaaaatgggttatattctgagttataaaaataacttgaaactttgttccaataatgtaaatgtctttcttctgtttctatactctatattatttgctattttactttatgtgtgtcatttccatttttaacatttgcttcatatgcataatagcactttacttatggaagtcttcttaccaatttaagtctttaaagtacatttcttatgaattccctgcagcaacatatacatgatggaagatataatcagttctctaaatgtatcactttcttttaaaattcacttataaaactaatttcagacttactcaagtacttactgaagacaattacattttaaaataatgtttattgtttgaaattttaacatttttagtaagaaaaattttt

SEQ ID NO: 119060 - DNA, 627 bp, Homo sapiens
agcaagatggactaagaaaaaaagagagaagcctcagattactaaaatcagaaatgaagctgggggcactgctacaaattatacaaaaataaaaaatattattagagagtaccatgagcaatggtatatgaagaaattggataacctctatgaaatgaacaaactcctagaaaaacacaacctaccatgactaaaagaaatgaaaaatctgaaaagacctataagtagtaagattaaatcagtaaagaaaaaaaactcctgaaaaataataaaatataataaaagccctggacctaatggcttcaattatgaatctaccacatatttgaaggacaactaaccccagttcttttcatgcttttccaagaaaattagaaaaaaaaaagaggarggagtactttctgactcatcctatggagccagcattaccctgacaccaaagccagacaatgatactacaagaaaagaaaactataagctaatatctcttataaacattaatgcaaaaatcctctacaaaatactagcaaatggaattcaaagcatattgaaagatttatacaccattaccaagtgggatttattcttggactgtaaatacggctcaacatatgaaaatcaattgac

SEQ ID NO: 119061 - DNA, 627 bp, Homo sapiens
agcaagatggactaagaaaaaaagagagaagcctcagattactaaaatcagaaatgaagctgggggcactgctacaaattatacaaaaataaaaaatattattagagagtaccatgagcaatggtatatgaagaaattggataacctctatgaaatgaacaaactcctagaaaaacacaacctaccatgactaaaagaaatgaaaaatctgaaaagacctataagtagtaagattaaatcagtaaagaaaaaaaactcctgaaaaataataaaatataataaaagccctggacctaatggcttcaattatgaatctaccacatatttgaaggacaactaaccccagttcttttcatgcttttccaagaaaattagaaaaaaaaaagaggagggagtactttctgactcatcctatggagccagcattaccctgacaccaaagccagacaatgatactacaagaaaagaaaactataagctaatatctcttataaacattaatgcaaaaatcctctacaaaatactagcaaatggaattcaaarcatattgaaagatttatacaccattaccaagtgggatttattcttggactgtaaatacggctcaacatatgaaaatcaattgac

SEQ ID NO: 119062 - DNA, 596 bp, Homo sapiens
cagacaatgatactacaagaaaagaaaactataagctaatatctcttataaacattaatgcaaaaatcctctacaaaatactagcaaatggaattcaaagcatattgaaagatttatacaccattaccaagtgggatttattcttggactgtaaatayggctcaacatatgaaaatcaattgacgtaacagaccacattaacagaatgaagcacaaaaaaatatacataattatatcatgatacaaagaaataatttgacaaaatttaactctcttttatcaaaaaaatcaacaaaccaagaacagaagtaaactacttcaacataacagatttcatacatgaaaatctcactgttggtgaaaatgtagagaagttgaaacccttcaacccttcaaatgtggaagtaacccaagtgcccaagagaacatcacactttttggggaaagactgaatgttttgttcctttaagatcaggaacaaagcaaggatggctgctttcaccacttctattcaacatagtgctggaagtctagccagagctactgggcaagaaaaggaaataataggcattcaaatggaaaaggaagaaataaaa

SEQ ID NO: 119063 - DNA, 596 bp, Homo sapiens
cagacaatgatactacaagaaaagaaaactataagctaatatctcttataaacattaatgcaaaaatcctctacaaaatactagcaaatggaattcaaagcatattgaaagatttatacaccattaccaagtgggatttattcttggactgtaaatacggctcaacatatgaaaatcaattgacgtaacagaccacattaacagaatgaagcacaaaaaaatatacataattatatcatgatacaaagaaataatttgacaaaatttaactctcttttatyaaaaaaatcaacaaaccaagaacagaagtaaactacttcaacataacagatttcatacatgaaaatctcactgttggtgaaaatgtagagaagttgaaacccttcaacccttcaaatgtggaagtaacccaagtgcccaagagaacatcacactttttggggaaagactgaatgttttgttcctttaagatcaggaacaaagcaaggatggctgctttcaccacttctattcaacatagtgctggaagtctagccagagctactgggcaagaaaaggaaataataggcattcaaatggaaaaggaagaaataaaa

SEQ ID NO: 119064 - DNA, 586 bp, Homo sapiens
ttttggtgggtgattataagaaggcatgggaatatggtttctgttaaaggggatgtaattttgtctaattcagagggttttaaagattgtcttaacctgaaagagtaatgggacaaaactgaaggtgtaagcaagttgaaaagggtttgtgatagtttgatcttgtaaaaaaaaaaaaaaaaaaaagttctgtgggtataagcaagctagctaagatttgaaggggattatttagtttcttttttctgtaggttgaacatttaaataaaagcacactgatgcaggaccagaatctgggcccawgtgtctgaataacagggttttcttagaaaactgatctgctgtttaacagaaaactgtaaagggttctaaaagttttatgaaaatcttactttatggtcaaatgaattaaaactggacagatttctgaaattttatgaaaatgaagtgttattattaaagatgcagtaatgcaaacatgaaatttggttttcccttttgaaaacaatttttatgtaacattgacacaatgaaagatttttgcctttcaagtaaactacaaaaaagtggggggatgcatattcag

SEQ ID NO: 119065 - DNA, 654 bp, Homo sapiens
cccattaatcttttcaaatgcaccatttgttgaaggactgaagtcaccactgatcaggaactgaacagatggaagaatctcagtgaatgcccgcttcaatacaaaccactgagatggatgtttgggaggaccaaaatgacaagtcaagggtcatgctcagaacagatgaatttcatcctacagcctttattaggctttgaaaaggatggagaaagcaagaccaaacattagttttgcacttgctgtgtgtcattcaccagactatgtccacataattcctgaaacacagataatacgaacacataattaggttccataccacgatgcatcctcttttactctaatgtggttctgaaacagatttcattggtgaataccaaaaggactaaaggtggggggaaaaaaccaaaataatttactacatgaagttacttgacttatattcctatattcagttactttatcccaaagacttgagataagaaaagatgagaagagaaataatcaggtagaactggaaggattatttgggactgcctgtaaatgaaaagattgttgtttatattctgaaaattgcaaacaggttttttgtcaaaaccttgccatgtcatttttagggatcatggtcccaaawagcccttccaaagatgttca

SEQ ID NO: 119066 - DNA, 619 bp, Homo sapiens
atttctcaataaattatagatattattgttattcagatatattggatacatgtattgaacttcattgtacatattgaagaatcattattaataaaatcaggagactgaactcttaacttttggatttgtaaaatttgccttctattttaaataacatggataaacaaataagcaaaattgctctgacactatgtattttcgcaactttgaaattgaggatgtttagcttatcatatgctgcaaagtctatagatgcttagaataggaaatgaggccaaaggacttagtccagtttatttacaagaataaattctgaagtagctaagatgagaacctctttggtcaagtatgctggatattttctattcrccccttcaagtcctctctctgccttttatcatgctgctttatatcccagaagatcaacctcaaatgtctttaataactggttcccttgtctaatgactttggcttgagctcaaatacataaaatagggatttcagtcattggccatcagaacagtgatccctgaaagagggaaaacaaacaaaatgagacctgaaatttcccagtttccaggttgcagtgagaatgtagaatatcttcctgtactgagaa

SEQ ID NO: 119067 - DNA, 564 bp, Homo sapiens
gttgaaatcaaagtgcttacttgcacttgagaaaatgtctggtaacacaatatataagtcccactatttccttttaaatattcatttaagtgtgaatatgaaatatgtttacatacgcattgatgataatatctttagaacaaaaatgattatataaaaatcaacttacatgttgccaaagaacaaaaagtctttcatgttttctccctggttatcctatctaaatacaggaatacctcatcttattgcattctgctttattgcactttgcagatattgcatgttttacaaatggaaggtttatggcaaccctgcattcagcaagcctattgggggcattttttcaacaccatgtattcactttgtgtttctttatcccattttgtaattcttgcaatattttaaacttttttaaatgattatatctgttatggtagtctrtaatcagtggtctaccatcattgaattttgatgttactattatgttttggagcaccacaaattgcaccattatgagagagcagacttaactgataaaagttgtgtgtgttctgattcctccac

SEQ ID NO: 119068 - DNA, 483 bp, Homo sapiens
cctacaagctagaagggactggggtcctatcttcagcctcctcaaacaaaacaattatcaatcaagaattttgtatccagtgaaactaagcttcatatataaagaaaagatagtctttttcagacaagcaaatgctgagagaaactgccactacgaagccaccactacaagaaccgctaaaaggagctccagatcttgaaacaaatcctggaaatacatcaaaacagaacctctttgaagcataaatgtcacaggatgtataaaacaaaaatacaatttaaaaaacaaaaacaaaaaaccaaggtatacaggcaacaaatagtaggatgaattgaatggcacctcaaatgtcaattctaacattgaatgtaaatggcctaaatgctacaattataatacacagaattgcaaaatggataagaaatcaccaaccatctgctgcattcgagagactcamctaaaacataaggactcacacaaact

SEQ ID NO: 119069 - DNA, 446 bp, Homo sapiens
aagggtcaaattaaaagaggaggaaaataaagaaggctgcaaaatctgctctggttacaccaactcacttgacctccctttttccatatactcaaggcattttttatctattatctatcatatatctatttatctcttttaaaccttaatgataggaagtatgcttataattgagtataggacaagcatgtaagtcccttgagatctccccagttctgtattccttccacttgctagttctattcttaakttccaaaattaatccaaatttcaggaaggagggaatttaactcaatgccaaccctctggggcttgctatctgggaagtaaatagttaaaatagaagattttcaagtcattctctcccatctacaggacacctccagggggaaaaggacaaaagctgacctggtcaaatagccatgtaaataagctaaggataatac

SEQ ID NO: 119070 - DNA, 587 bp, Homo sapiens
cattttggacattggtcttggtaaagaatttatgacttagttctcaaaagcaattttcaacaaaaacaaaaacagaaaagtgagacctaagtaaactaaagtacttctgcacagcaaaagaaactatcaacagaataaatagcctaaaaaatgggagaaaatattcacaaattatgcatctgacaaaagtctaatatccagaatctatactaaaagaattcaacaagcaaaaataaataactccattaaaaataggcaagacatgaacagacacttctcaataggagatatacaagtggccaaaaaacatatgaaaaaaatgctccacctcactaatcatcagagtaataaatcaaaaccacaatgagaaatcattctaacaaccagtcagaatggctgttattaaaaatcaaaaaacaatagacatggataaaaggaaacacttatscactgttggtgggaatttaaattagttcagccactgtggaaagcaatttggcgatttctcaagggacttaagacagaactaccattcaacctagaaatcccgttactgtgtatccatccaaaagaacactcatatgttc

SEQ ID NO: 119071 - DNA, 499 bp, Homo sapiens
ttctaaggatttctgaaaatatactttgaaacacgacttacaccatccacttgaagacaaagcaggaaggtcatatagcaaatattctgatcatcacatgcaattgctaagaagaataaatcaatagaaacaattaaaaatgtgtcaaacataataaaaagaacaattatccaacaaacrgatgcttataatcttgatagcttgagatggaggttaagcccagaaagtacatttgaattcacgagagaaagaaatgcacttttaaaatatcaaaagataaatagcaatatttttcaaaatacagatgctcctcgacttatgatggggttatgtcctgataaacccatcacaagttgaaaatatcataagccaaaaatgcatttaacacatctaacctactgaacattatgcttagcctagcctaccttgaacatgctcagaaaacttacattacccacaggtggaaaaatcatctaacacaaagaccatttaataataa

SEQ ID NO: 119072 - DNA, 499 bp, Homo sapiens
ttctaaggatttctgaaaatatactttgaaacacgacttacaccatccacttgaagacaaagcaggaaggtcatatagcaaatattctgatcatcacatgcaattgctaagaagaataaatcaatagaaacaattaaaaatgtgtcaaacataataaaaagaacaattatccaacaaacggatgcttataatcttgatagcttgagatggaggttaagcccagaaagtacatttgaattcaygagagaaagaaatgcacttttaaaatatcaaaagataaatagcaatatttttcaaaatacagatgctcctcgacttatgatggggttatgtcctgataaacccatcacaagttgaaaatatcataagccaaaaatgcatttaacacatctaacctactgaacattatgcttagcctagcctaccttgaacatgctcagaaaacttacattacccacaggtggaaaaatcatctaacacaaagaccatttaataataa

SEQ ID NO: 119073 - DNA, 502 bp, Homo sapiens
tattattttagaaaagcctatctcttcctctggttttgtcaacatttgcttcatgtgttttggggctttgttatttgatgcatatatatttacaattgttatatcttcttgaaaaattgtcccttttaccaacatgtagtgtagttctytcttgtagaagttttgcttatgtctatttttctgaatttagtatagctactctagctctcttttgattataatttgcataaacatattttcaatcctttcacttccaacctatttgcgtctttggatctaaagtgaatgtcttatagatctcatatagttggatcctttttaaaattccactctacaaatctttgccttttgattagagtgcttaatccacttacatttaaattaattactggtaaggaaaaactgccattatgccatttattttctctatggtttttacctttgttgtccttcatatcctctattgtcattttctttgtgtttagttgattgtagtaaagta

SEQ ID NO: 119074 - DNA, 661 bp, Homo sapiens
gataggaggtatctatatgaggcgtgccaggccctaggtcagtgcacacagagtagtgtgccatgatggtactgtcaacctctgtattctcagcagaatcaagtacagagatggggcacgtccagacctctaaggataaaactgacaagagcaagacaatgtagtttaacaaaacaaggtacttgtatgtatatacaggtttaaatcaagacccacagctctccctttaaaatatacaactggcaccaaattaataaawgatagaagttctatgcagggaaatcaagacagaggccatatctaagccaaccattaggactggctttaataacctgaaattttccccagaacaccaggctctaccctgacagtattagatcagggtcctcagcagataataaagctgtgtccttgaggtaaagttgttctggttaggtgtactatagcaatagcttctctttggaaggatagccatggagaaatatagatgatgaacaaaaggagagtgaatcagagttgctagaatggctagatctcctcttagtaaaaatgccaggtgctcttcaatgggaggcatctgtctaggaataattcaaactacctagctgaggaatgctctgtatggatctgcccttccacagttagcactggtgaaaaatca

SEQ ID NO: 119075 - DNA, 612 bp, Homo sapiens
tgtgggaagagttgctcacttggttcaaaatgagtaacagtcacataatcatgactctactgtaaatactattttggagaacttcaatttgaaaatcagcctacagacaaaacacacacaaaaaaacaagtataatgagaacaatataaatgttataagccttgacaacatatatggtattaataaataaatacgaatatttgtggaaattctgatttgaaaaaagaataaaaaacaaaaagsaaaacaacaacaaagattaataggtgaagaaatgagaagaaatagaaacaattaaatatgtatttattctaccttctaacaatctctagcattggtaaatcaagaaatacaaatatgaatatatatcttttacagttaaaaagggaattactagaagaactaaaataatataattggcaacattgaagtataaagataagttatatacagtaaagtaattttaaaaattctaaaatctcttttttttaattttagaaatatgttactgctatgttgctgaggctggacttgaactcgggctcaagcaatttcttgccacagcctcctgagtaactgagactgcaggcatgcaccactgtgcctggctct

SEQ ID NO: 119076 - DNA, 612 bp, Homo sapiens
tgtgggaagagttgctcacttggttcaaaatgagtaacagtcacataatcatgactctactgtaaatactattttggagaacttcaatttgaaaatcagcctacagacaaaacacacacaaaaaaacaagtataatgagaacaatataaatgttataagccttgacaacatatatggtattaataaataaatacgaatatttgtggaaattctgatttgaaaaaagaataaaaaacaaaaaggaaaacaacaacaaagattaataggtgaagaaatgagaagaaatagaaacaattaaatatgtatttattctaccttctaacaatctctagcattggtaaatcaagaaatacaaatatgaatatatatcttttacagttaaaaagggaattactagaagaactaaaataatataattggcaacaktgaagtataaagataagttatatacagtaaagtaattttaaaaattctaaaatctcttttttttaattttagaaatatgttactgctatgttgctgaggctggacttgaactcgggctcaagcaatttcttgccacagcctcctgagtaactgagactgcaggcatgcaccactgtgcctggctct

SEQ ID NO: 119077 - DNA, 540 bp, Homo sapiens
ctcactctcctctgaacttgattcctcaggggccgcttgtgcagcatcttgccttggccttgctagagatggatagattgggacatagagaggtggaaactccctcttctcgggcaaggcctgcagaacaggttttttatgttttccttaaggcttttcctttctttccaccatccctttaggttcttttgctacctcagatctggcacgagctaccagggtcttacaggaagtctcataacaggcttgtaamcacttggggtgagtttgaatgatgctcagccaggagtcaatgtatgggaacgggtccaggtacccaggctgttctttgactctggttatgaccctaaacacaaggccaattatctctctgtctatcgttacttaggccagccacccaacactaaaagaaggccaatctatttcacagagagttctcaatctctgaggggttaatttaactccataatatccattaaaacctttcttgaaattctccaacatccactccaatggagtaggctttgatgcttttcctcc

SEQ ID NO: 119078 - DNA, 540 bp, Homo sapiens
ctcactctcctctgaacttgattcctcaggggccgcttgtgcagcatcttgccttggccttgctagagatggatagattgggacatagagaggtggaaactccctcttctcgggcaaggcctgcagaacaggttttttatgttttccttaaggcttttcctttctttccaccatccctttaggttcttttgctacctcagatctggcacgagctaccagggtcttacaggaagtctcataacaggcttgtaaacacttggggtgagtttgaatgatgctcagccaggagtcaatgtatgggaacgggtccaggtacccaggctgttctttgactctggttatgaccctaaacacaaggccaattatctctctgtctatcgttacttaggccagccacccaacaytaaaagaaggccaatctatttcacagagagttctcaatctctgaggggttaatttaactccataatatccattaaaacctttcttgaaattctccaacatccactccaatggagtaggctttgatgcttttcctcc

SEQ ID NO: 119079 - DNA, 562 bp, Homo sapiens
tacacttgttaagaagtcttatttgcaaaatggtactcttttgctaaggattgaatttgaaagtttgctttgtyttggaaattgttcttgattgaataatctcctgcctggtaggtattcagctgtatctgttacatgtaatttgagtacttaggaacatttgtcgctgttccagctttcacttgaatttcaaaagctgctgcttttagtttgatagaaaaacttcatggtaaaaatcaccaagatgccatgaactacagttggtataaaaattatgcaaatattaatgctgtatgtgcagatgtatctcattaaggaattggagattgtaaggtctaattgggaagtttgacagctgttattaaactatcatgggttccctttgtggatgtactcactggtattttcattctagacatgcaggagaggattcattgactagctttttggaagagtatagattcattatgctttttaaattaaactgatgtgtctttaagtgaggaaaaatatgcatggtgtttctctaaaccttcatcagtttgctttttcccacaaatgg

SEQ ID NO: 119080 - DNA, 475 bp, Homo sapiens
caatattaagactagaacatgtcaataaaatagtggaaagtgtacctatactgaactgttagaggatccattatgtgagtagggaatgaaaggaaatgctaggataagggagccaccttggcgcgggcgcacatgcgcattagcgcgcacacgcacacacacatacacgcacacacacatwcacacatacacacacacaacctgttatccatacatactttgcaaaatacctggccatcttcaaggctttcactagctttactgtggcatgcactgagcccagatatttagtttccggtgtcctcataatgagcagaattggcagtcatcaagttgagaaaaaaaaaagtgaaccaagtattttatcttatggtcagtttatactggttatttatatctggtcagaaataaatcaaaatgttcagaattggttttggcaagcatgaagacatctagcataaagtatctgcattaa

SEQ ID NO: 119081 - DNA, 428 bp, Homo sapiens
gggttagtgtgtattagtcaaaagtcaccaagtagtacatataagatttatgcatttcactctgtaaatttcacctttaagaaagtaaacaaatattgagctctagttaatgatactcatactgaaatatctagagggaattgcactgatgtcttcaacttatgaaatacatttaaaggattagatggttaagctaggcatggtggctcacacctgyaatcccagcactttgggaggccaaagtaggcagatcactcgagcccaggagttcaagattagcctgggcaacgatatcttgtctctacgaaaattacaaagaaattagccgggcatggtggcacgtgcctatagttccagctactccggaggctgaggtgggaggatcatctgaacccagggagatcgagtacgcagtgaggtgtaatcac

SEQ ID NO: 119082 - DNA, 428 bp, Homo sapiens
gggttagtgtgtattagtcaaaagtcaccaagtagtacatataagatttatgcatttcactctgtaaatttcacctttaagaaagtaaacaaatattgagctctagttaatgatactcatactgaaatatctagagggaattgcactgatgtcttcaacttatgaaatacatttaaaggattagatggttaagctaggcatggtggctcacacctgtaatcccagcactttgggaggccaaagtaggcagatcactcgagcccaggagttcaagattagcctgggcaacgatatcttgtctctaygaaaattacaaagaaattagccgggcatggtggcacgtgcctatagttccagctactccggaggctgaggtgggaggatcatctgaacccagggagatcgagtacgcagtgaggtgtaatcac

SEQ ID NO: 119083 - DNA, 428 bp, Homo sapiens
gggttagtgtgtattagtcaaaagtcaccaagtagtacatataagatttatgcatttcactctgtaaatttcacctttaagaaagtaaacaaatattgagctctagttaatgatactcatactgaaatatctagagggaattgcactgatgtcttcaacttatgaaatacatttaaaggattagatggttaagctaggcatggtggctcacacctgtaatcccagcactttgggaggccaaagtaggcagatcactcgagcccaggagttcaagattagcctgggcaacgatatcttgtctctacgaaaattacaaagaaattagcygggcatggtggcacgtgcctatagttccagctactccggaggctgaggtgggaggatcatctgaacccagggagatcgagtacgcagtgaggtgtaatcac

SEQ ID NO: 119084 - DNA, 614 bp, Homo sapiens
atctgaaaatgaatcacatagaatctctggaagtgaaaagtgcaatacttgaaaaaatgtcaataggttggtttaaaaacagattagacacttctgcagtcagaattagtgaactggcagatagaactaaaaattatgcagaatgtggtacacagagaaaaagaggcagaaaacataaaaagacatygagacatgaatgatagagtgagaagattccacatatataaaattggaattccagtaagaatgagaggtagaatggtgcaggaacaatattaaaagagttaatagtagagaactttccagaactcatgaaaaatgtatatctgaagatttaaaatgcacatccatttccaaagaagaaatctacacccagccaccttgtagataaatgtagaacaccagtagcaaggaatctcctaaaagaaaaagactgattatcaagaaaaggtaattaaactgagaacaactatagaagacaaaagaaataataattttaatgtgttgaaagaaaataactgtcactctggaattgcatgcccatgaagaacatagttcaaaccaagggcaaaatgaacacagttcagacaaaaaaacctgagtttgcgattaat

SEQ ID NO: 119085 - DNA, 614 bp, Homo sapiens
atctgaaaatgaatcacatagaatctctggaagtgaaaagtgcaatacttgaaaaaatgtcaataggttggtttaaaaacagattagacacttctgcagtcagaattagtgaactggcagatagaactaaaaattatgcagaatgtggtacacagagaaaaagaggcagaaaacataaaaagacatcgagacatgaatgatagagtgagaagattccacatatataaaattggaattccagtaagaatgagaggtagaatggtgcaggaacaatattaaaagagttartagtagagaactttccagaactcatgaaaaatgtatatctgaagatttaaaatgcacatccatttccaaagaagaaatctacacccagccaccttgtagataaatgtagaacaccagtagcaaggaatctcctaaaagaaaaagactgattatcaagaaaaggtaattaaactgagaacaactatagaagacaaaagaaataataattttaatgtgttgaaagaaaataactgtcactctggaattgcatgcccatgaagaacatagttcaaaccaagggcaaaatgaacacagttcagacaaaaaaacctgagtttgcgattaat

SEQ ID NO: 119086 - DNA, 656 bp, Homo sapiens
gtagaacaaatataaaacgaaaagaaaaccaactgggataggtttcatgggaatctgtgagagatctgatcagatcttaaagtcgtatgtcaaaaaagcttgcaaaattcaaaattcagccttacatttcattcattcatgaatgctcatttacttagtaggtattgaactaggtactgtgaagtcatggagggcacaatcatcacttacacaaataagatgaagttcaatgatttcattgactgagcagatacttactgaatggtcaccaataccattagcttattaaagatactgttttagagccattatyagttctttcaaatttttctttcagttctgcagtataattacaatttatgccatcatcccgactacagctgagattcaaagctataaatattcacaaacaaaaaaaattgaggatgtttgagctttatttcatgttgtctagggaaatacttctcttatactacctcattataaaacaacttgtttagataactgttacttgaatagctcttatacatttgtaaagcaaggaaataagcattgattaatctttcaaactatcttgaacattataaagtttacctaaaatattcatgcccacaagtcagaataaataaactaacagaacagttatgttaatatac

SEQ ID NO: 119087 - DNA, 548 bp, Homo sapiens
ttgctgcttgcttctttctcctccacttggaaactcaaattactctcaaaagaggtctctggcaagctagactccaggcccrtgtacctgatccaagccgcttaatcatctggcctggaaatttaagatgcatatccctggggcctaccccaaacctactgaaatagaagctttgagctttatgggaggtggtgccttagaattcaagaacctgcattttttaatagattccccagttgattgttaagcaaagtaaaaacaaaggttgccttcctttccagaaacacttttgtaactaacccttcttcaccacactgcttaattcttgtcattataagggtcaccatgtccaaagtgctgctgtcaagaggctgtgtcctgaacttctggagaaattttcatgaccaaatgatattaacagtgatggagctggtctaaggagttttcttaaatcaagatgggccaaactggacaggattaagcagacagggttaagctgttgaagttctgtatgctgtaaatggggtttttaacctggggtccacaga

SEQ ID NO: 119088 - DNA, 620 bp, Homo sapiens
taacagtcttgacaattactacatgcaaaactaaagttgtcatgttttgaagaaattttcaaagcaattttttaaatcaattaaatttcaggaaaaatgactttatatttattttaaaaatgtgaaatggtctmaggattctaaatatccttatctaaagccagaggatggtttgtgaaaatatgtggtagcattctatttctgagaaataaagatgaccaaaaaataattttactttttattaaaagagaaagcaatttttaaaagagtcaggctaaaagacattaacagtaaaaggacactggacataatttaatatttatttgataattaggaagcccttcagtattttgctgtactccgtttttaatcaagcaggagggaacagattttttttcctaagaaaaaaaaccagaatgatggatattttatatcgtgaaacatcatgcaatgttattagaaataaatacccaatgaaatatatttttaaataaaagcaacatttttctatatcaatatttcacttaatttatgccatttctagtgctcaatttttatggctcatattttaaaacattattgaatgaagagatagtgaaacccagatgctacacagtatt

SEQ ID NO: 119089 - DNA, 620 bp, Homo sapiens
taacagtcttgacaattactacatgcaaaactaaagttgtcatgttttgaagaaattttcaaagcaattttttaaatcaattaaatttcaggaaaaatgactttatatttattttaaaaatgtgaaatggtctaaggattctaaatatccttatctaaagccagaggatggtttgtgaaaatatgtggtagcattctatttctgagaaataaagatgaccaaaaaataawtttactttttattaaaagagaaagcaatttttaaaagagtcaggctaaaagacattaacagtaaaaggacactggacataatttaatatttatttgataattaggaagcccttcagtattttgctgtactccgtttttaatcaagcaggagggaacagattttttttcctaagaaaaaaaaccagaatgatggatattttatatcgtgaaacatcatgcaatgttattagaaataaatacccaatgaaatatatttttaaataaaagcaacatttttctatatcaatatttcacttaatttatgccatttctagtgctcaatttttatggctcatattttaaaacattattgaatgaagagatagtgaaacccagatgctacacagtatt

SEQ ID NO: 119090 - DNA, 620 bp, Homo sapiens
taacagtcttgacaattactacatgcaaaactaaagttgtcatgttttgaagaaattttcaaagcaattttttaaatcaattaaatttcaggaaaaatgactttatatttattttaaaaatgtgaaatggtctaaggattctaaatatccttatctaaagccagaggatggtttgtgaaaatatgtggtagcattctatttctgagaaataaagatgaccaaaaaataattttactttttattaaaagagawagcaatttttaaaagagtcaggctaaaagacattaacagtaaaaggacactggacataatttaatatttatttgataattaggaagcccttcagtattttgctgtactccgtttttaatcaagcaggagggaacagattttttttcctaagaaaaaaaaccagaatgatggatattttatatcgtgaaacatcatgcaatgttattagaaataaatacccaatgaaatatatttttaaataaaagcaacatttttctatatcaatatttcacttaatttatgccatttctagtgctcaatttttatggctcatattttaaaacattattgaatgaagagatagtgaaacccagatgctacacagtatt

SEQ ID NO: 119091 - DNA, 585 bp, Homo sapiens
atacatctccgtccccaccattatattctgctcaaagcactacacatgtcttatgcttggctttttatyactactaaaaatgatatttatgtgatttcatatttacaattccccccccacacacacacacactggaccataatttccataatgttaggcactataactattatccatcaccatggaatgaatctccaagacacaacccagtgcctggcatttgatgaataaatgacaaaatggagggagggcatcagctaggtggtaatacctaggctatcatcagttatcactgttcctgcatgtgggaaaggtagagaatcctcaggataattaatttaatgtgaggaacctaacatcataatttagaattatactaaaatgctttcctcttcaatcccagaatattgtactcctcctcaatgaagactggtgagcaaattttctaccacaaaaaaggacttgagagaccgtttactccatgcctcacattttataaagaatataaaactcagagatgttaagtgaccagcccagtcacatgcaagtgagcagaagagccaacgctagaacccacacatacca

SEQ ID NO: 119092 - DNA, 585 bp, Homo sapiens
atacatctccgtccccaccattatattctgctcaaagcactacacatgtcttatgcttggctttttattactactaaaaatgatatttatgtgatttcatatttacaattccccccccacacacacacacactggaccataatttccataatgttaggcactataactattatccatcaccatggaatgaatctccaagacmcaacccagtgcctggcatttgatgaataaatgacaaaatggagggagggcatcagctaggtggtaatacctaggctatcatcagttatcactgttcctgcatgtgggaaaggtagagaatcctcaggataattaatttaatgtgaggaacctaacatcataatttagaattatactaaaatgctttcctcttcaatcccagaatattgtactcctcctcaatgaagactggtgagcaaattttctaccacaaaaaaggacttgagagaccgtttactccatgcctcacattttataaagaatataaaactcagagatgttaagtgaccagcccagtcacatgcaagtgagcagaagagccaacgctagaacccacacatacca

SEQ ID NO: 119093 - DNA, 607 bp, Homo sapiens
gttgttgagtgcctgaagcttttctaggtgcgaagcttaagctgctggtagatttaccattctggggtcaggagtatggtggcccccttctcacagttccactaggaagtgccccagtggggacttgatgtggggtctccaacctcacatttcctcataacactgccctagtagaggttctctgtgagggcttggcccttgcaactggcttctgtcttggcacccaagttttcccatacaacctttgaaatctaggtagaggctgtcaagcctctttcactcttgctttctgtgtgcctgcaggcttaaaaccacatggaagccaccaaagctaatggcttgcaccctctggatccttgcatcctgagctgtacttgtgcccctttgagccaaggctggagctggagcagtggaatttgaggagcagtgtcctgaggctgtgtatggcagggggtcctgggcctggcccatgaaactattctttcctcctagtcctctgggcctatggtgggaggggctgctgcaaatgtctstgaagtgtcttcatttcagaaatgcctttgcctttcaaaaggcctctgaaagcccttttcccattgtcttggca

SEQ ID NO: 119094 - DNA, 661 bp, Homo sapiens
aataaaggccatatgtaacaatcccatagataaaattattctcagtgttgaatgaacagttgaaagcttttcttgtaagattagaaacaggacaagaatgctcattttcgtcacttactttcaacatagtacaactgtaagtcttaaccagagcaatgggaaaagagaatgaaataaaagggatcctattaggaaargaagaaacaaaattgtctctgtttattaacaacatgaacttatacatagaaaatcttaaactccaccaaaaaactgtgaaaactgataaacaaattcagtaaagttgcagaatgcaaaatcaacatacaataattattagtgattctaggtactaataacaaattatcctacaaaggaaagtaagaaaacaatcccattcatcataacaaccaaaaaaattaaatatttgggtgtaaattttacaaaggacgtaaaagagctatgcactccaaactataaaacactgatgaatgaaactgaaggaaacacaagtttggaaagatatcccaagttgatgaattaaaagaattaatattttgaagagtctgtattacccaaattgatctacagatttaatgcaatctctgtcaaaattccaatgccattttttacagaaatagagaaaaacaattcatgaatttgt

SEQ ID NO: 119095 - DNA, 661 bp, Homo sapiens
aataaaggccatatgtaacaatcccatagataaaattattctcagtgttgaatgaacagttgaaagcttttcttgtaagattagaaacaggacaagaatgctcattttcgtcacttactttcaacatagtacaactgtaagtcttaaccagagcaatgggaaaagagaatgaaataaaagggatcctattaggaaaggaagaaacaaaattgtctctgtttattaacaacatgaacttatacatagaaaatcttaaactccaccaaaaaactgtgaaaactgataaacaaattcagtaaagttgcagaatgcaaaatcaacatacaataattattagtgattctaggtactaataacaaattatcctacaaaggaaagtaagaaaacaatcccattcatcataacaaccaaaaaaattaaatatttgggtgtaaattttacaaaggacgtaaaagasctatgcactccaaactataaaacactgatgaatgaaactgaaggaaacacaagtttggaaagatatcccaagttgatgaattaaaagaattaatattttgaagagtctgtattacccaaattgatctacagatttaatgcaatctctgtcaaaattccaatgccattttttacagaaatagagaaaaacaattcatgaatttgt

SEQ ID NO: 119096 - DNA, 661 bp, Homo sapiens
aataaaggccatatgtaacaatcccatagataaaattattctcagtgttgaatgaacagttgaaagcttttcttgtaagattagaaacaggacaagaatgctcattttcgtcacttactttcaacatagtacaactgtaagtcttaaccagagcaatgggaaaagagaatgaaataaaagggatcctattaggaaaggaagaaacaaaattgtctctgtttattaacaacatgaacttatacatagaaaatcttaaactccaccaaaaaactgtgaaaactgataaacaaattcagtaaagttgcagaatgcaaaatcaacatacaataattattagtgattctaggtactaataacaaattatcctacaaaggaaagtaagaaaacaatcccattcatcataacaaccaaaaaaattaaatatttgggtgtaaattttacaaaggacgtaaaagagctatgcactccaaamtataaaacactgatgaatgaaactgaaggaaacacaagtttggaaagatatcccaagttgatgaattaaaagaattaatattttgaagagtctgtattacccaaattgatctacagatttaatgcaatctctgtcaaaattccaatgccattttttacagaaatagagaaaaacaattcatgaatttgt

SEQ ID NO: 119097 - DNA, 591 bp, Homo sapiens
ataaatactgagattgagatttggtagaaaactaagttatgtttacatatccttgagtataaattgggcaactcaaaaaatgttgcttaaacaattgactaaaaggaaaaataraaattaattcctagtttatactattctaaaagaatgtatatgaattaaagacctactatatccatgtaatccctgaatccaaaattttaaaaaaattaaataagaagccctagtgtaaaaattaacactgaattttctagaacaaaatacttgtcttcattatatcagagagcaaagtattttttaaaaaaactcaaaattcacaaattataaaagcctgttaaatttgattacagcaacatgaaagctattacatgacaaatgatctgataaatgaatttaaatgacacattacaaagtgacaacacaaagcaatgtttagctgacaaaggatttgtatctaaaatctacaaataaaccaataaggaaaacacaattgcatagaatatgggtaaaatatatgaatggaatcttcacagaaaagaaaacctaactgtcaaataaatacagatgttcaaccttgctaaaatgaggaat

SEQ ID NO: 119098 - DNA, 591 bp, Homo sapiens
ataaatactgagattgagatttggtagaaaactaagttatgtttacatatccttgagtataaattgggcaactcaaaaaatgttgcttaaacaattgactaaaaggaaaaataaaaattaattcctagtttatactattctaaaagaatgtatatgaattaaagacctactatatccatgtaatccctgaatccaaaattttaaaaaaattaaataagaagccctagtgtaaaaattaacactgaattttctagaacaaaatacttgtcttcattatatcagagagcaaagtattttttaaaaaaactcaaaattcacaaattataaaagcctgttaaatttgattacagcaacatgaaarctattacatgacaaatgatctgataaatgaatttaaatgacacattacaaagtgacaacacaaagcaatgtttagctgacaaaggatttgtatctaaaatctacaaataaaccaataaggaaaacacaattgcatagaatatgggtaaaatatatgaatggaatcttcacagaaaagaaaacctaactgtcaaataaatacagatgttcaaccttgctaaaatgaggaat

SEQ ID NO: 119099 - DNA, 564 bp, Homo sapiens
gcactggtacaaaagggagactattgtaaaaagaatttagttgtacattttaaaataactaaaagattataattggactgttacacaaaggataaatatttgaggggatggatacccaattttctgtgatgtgattattacgtattgcattcctgtgccaaagtacctcaggtactccataaatatatacacctcctattaatatgtacccacaaaaattaaaaattaagaaaatgataaaaataccttattgctaatgatcatcagaggcttcagtgagtgataaatttttrctggtagtggtattcacctcaatattgttttttgctgacatcaggatggtggttgctgaaggctgtagtggttgtggcagtttcttaaaataagagaaaaataatgtttgtcacatcaacactttccttcacaaaagatttctctgtagcatgcaaagctgtttgatagcattttgcccacagtagaactttcaaaactggagtcagttttctcaaaccccgctactgctttatcaactaggtttatgaaatattctaaatcctttgttgt

SEQ ID NO: 119100 - DNA, 581 bp, Homo sapiens
atactttaacataatgaattaggaaaatatcaaagaaaaattgttgtccaagatgattttacatctgaaagaaaacaattttatggtgcttaaaagtacatttataaattttgactaatttgggtttatgccaggaatttaaggatagcataacatcagaaatatttacgtgatccatcacattaacagactgaagaaaagttgtagataatttcaatatatgcagtaatattggaaaaatttaataattcattattttcaaaaatcttaaaaaactaggaattgaaagaaacaccyttaagtcttatctattgtaaacagtgctacaacaaacgtaggagtgttattatttcttcaatacactaatttactttcttttgggtatataaccagtagtgggattgctggatcatatggtagctcatcttttagttttatgagaaacctccaaatggttctgcatacctatatgtccatcaaacagatgaatggatttgaaaaatgtggtacatatacacaatggagtactattaagccataaaaaaggatgagatctagtcatttgcaacaatatggatgaa

SEQ ID NO: 119101 - DNA, 581 bp, Homo sapiens
atactttaacataatgaattaggaaaatatcaaagaaaaattgttgtccaagatgattttacatctgaaagaaaacaattttatggtgcttaaaagtacatttataaattttgactaatttgggtttatgccaggaatttaaggatagcataacatcagaaatatttacgtgatccatcacattaacagactgaagaaaagttgtagataatttcaatatatgcagtaatattggaaaaatttaataattcattattttcaaaaatcttaaaaaactaggaattgaaagaaacacccttaagtcttatctattgtaaacagtgctacaacaaacgtaggagtgttattatytcttcaatacactaatttactttcttttgggtatataaccagtagtgggattgctggatcatatggtagctcatcttttagttttatgagaaacctccaaatggttctgcatacctatatgtccatcaaacagatgaatggatttgaaaaatgtggtacatatacacaatggagtactattaagccataaaaaaggatgagatctagtcatttgcaacaatatggatgaa

SEQ ID NO: 119102 - DNA, 629 bp, Homo sapiens
tttgttgtttgcatttatgtcttattatactatgtcttaaaaagttgttgtagttattattcatcttttagtcttcctactcaakatatgagcacacagaaattacagtgtcatagcattctgtatttttctgtatatttactattaccagtgagttttgtacatccaaataatttcttatagctcattaacacatttttctttcagattgaagaactctctttagcatttttttgttggacgggtctagtgttggcaaaatttctcacctttcgttagtctagaaaagtctttattgaccttcatgtttggagtatatatttgccggatataatatgctatgataaaagttttctttttctttgtaacttcaaatatgccatgccactctatactggcctgtaagttttccactgagaagtctgctgtcaatgtattggaactgtttcacatgcttttttttttctcttgctgctttttggaatttattattgactttgggagtttgattattaaatatcttgaggtagtcttacttgggttaaatctttggagttctataaatcttcttgtatttgaatattgattatttctctaggtttggaaagttctctgatattatatcttta

SEQ ID NO: 119103 - DNA, 563 bp, Homo sapiens
gtagtttgcatcctgcacctggaaaagccataggcactcaatgccagcccttgagatcagccatgggggctgaactttgcaaagccacaggcacagagctaccaaagcctggggagaccaccactttcactaatgtgccctagatgtaagacatagggtcaacagaggttattttggagccttaagatttcttgactaccctgctggattttggaactgcatggaccctgtagccccttacttttggcstttttctccattttggaatgggaatatttactcaatgcctgtacccccattgtattttggaagtaactagcttgctttggattttgtaggctgataggcagaagggacttaccttgtctcagatgagacagaacttttgagttaatgctggaatgggttaagacttcaatggattgatgataaggcataattgtatttttcagtgtgagaaagacatgagatttgggaggaacctgggatagaataatatgatttggatctgtgtcccgaccgaaatctcatgttcagttgtgatcctcaatgttggaagtggg

SEQ ID NO: 119104 - DNA, 632 bp, Homo sapiens
ggaactctctactcataaaataacaattcctatttcaacctttcctccaccctgggcaaccacaattctgctttctgtttctatgaatttgaatcatttagacacttcattatcattatttttgattgctcaatatttattaaatgcttcagatagtggcagtggaaaaagtaygttaaaagatgtatgctttatgttggacacatgcaaatctcactttcactgcccccatcccccttccaaaacatacacgcgtgagagaaacagaggtaaaaatttattgtagaaatcagcaacctaatttaaagctgaaagcaatcttaccttgggtaacagaaaaaaaaaaaaaaaaggtaaccttctctttgaaacataaatcactcctgaaaggaccatgtgggaattcctagaattcctctctttctatttttgactcttgtagaagaggttgaaaacagaagcatgattggaatattaggagccttttcctcttggtaatcattaaaaaaggaaagtctgaaagaaacttctaatttcccctatagctgtgtaaactccagttaaatataaattgttttgttctctctcgattgttacatttatatttcttgaggtcaaagtgactttccata

SEQ ID NO: 119105 - DNA, 632 bp, Homo sapiens
ggaactctctactcataaaataacaattcctatttcaacctttcctccaccctgggcaaccacaattctgctttctgtttctatgaatttgaatcatttagacacttcattatcattatttttgattgctcaatatttattaaatgcttcagatagtggcagtggaaaaagtatgttaaaagatgtatgctttatgttggacacatgcaaatctcactttcactgcccccatcccccttccaaaacatacacgcgtgagagaaacagaggtaaaaatttattgtagaaatcagcaacctaatttaaagctgaaagcaatcttaccttgggtaacagaaaaaaaaaaaaaaaaggtaaccttctctttgaaacataaatcactcctgaaaggaccatgtgggaattcctagaattcctctctttctatttttgactcttgtagaagaggttgaaaacagaagcatgattggaatattaggagccttttcctcttggtaatcattaaaaaaggaaagtctgaaagaaacttctaatttcccctatagctgtgtaaactccagttaaatataaattgttytgttctctctcgattgttacatttatatttcttgaggtcaaagtgactttccata

SEQ ID NO: 119106 - DNA, 568 bp, Homo sapiens
aattgttatcctcaattaaaggattctaattaattatttaaataagccttaactttgattcatcagtttgattatctgtactatctcaaactttaacgtagctgtttttttcttcccatttgattgcatttttaggtcagctggcatttcatatactgacatgtcaaaattttatgtgygtcctcaagagcagactgttttttagaactgccactgccattaactatctgggtgaccttgcctaagtcccttaacccctcagatactcagtttcctatcgtagaaggtgataggattggtcaggaagatctctacatttctttccaattctaaaagtccacgatctaagcctcaattatttcccagcactgagttcactcaggagttcaaaaccagttcaaacccataaattaattactgggattttaattcatttttgccagtattataatgcctgtctgtgcatgtggcactgtgaaatttaatttggcagattagtaacatatatgattaacattcttgtcaaaaagatatgctccctgaagccctacatttattatttcctagc

SEQ ID NO: 119107 - DNA, 568 bp, Homo sapiens
aattgttatcctcaattaaaggattctaattaattatttaaataagccttaactttgattcatcagtttgattatctgtactatctcaaactttaacgtagctgtttttttcttcccatttgattgcatttttaggtcagctggcatttcatatactgacatgtcaaaattttatgtgtgtcctcaagagcagactgttttttagamctgccactgccattaactatctgggtgaccttgcctaagtcccttaacccctcagatactcagtttcctatcgtagaaggtgataggattggtcaggaagatctctacatttctttccaattctaaaagtccacgatctaagcctcaattatttcccagcactgagttcactcaggagttcaaaaccagttcaaacccataaattaattactgggattttaattcatttttgccagtattataatgcctgtctgtgcatgtggcactgtgaaatttaatttggcagattagtaacatatatgattaacattcttgtcaaaaagatatgctccctgaagccctacatttattatttcctagc

SEQ ID NO: 119108 - DNA, 568 bp, Homo sapiens
aattgttatcctcaattaaaggattctaattaattatttaaataagccttaactttgattcatcagtttgattatctgtactatctcaaactttaacgtagctgtttttttcttcccatttgattgcatttttaggtcagctggcatttcatatactgacatgtcaaaattttatgtgtgtcctcaagagcagactgttttttagaactgccactgccattaactatctgggtgaccttgcctaagtcccttaacccctcagatactcagtttcctatcgtagaaggtgataggattggtcaggaagatctctacatttctttccaattctaaaagtccacgatctaagcctcaattatttcccagcactgagttcactcaggagttcaaaaccagttcaaacccataaattaattactgggattttaattcatttttgccagtattataatgcctgtctgtgcatgtggcactgtgaaatttaatttggcagattagtaacatatatgattaacattcttgtcaaaaagatatgctccctgmagccctacatttattatttcctagc

SEQ ID NO: 119109 - DNA, 575 bp, Homo sapiens
aatcatgtcattatataatgaaaaagcaatccaggaaaaggatataacaattctaaatatataagacccaacactggagcatccagattcataaagcatatattacaagatctaaagagatctagtaaatctttcactacatggcagtgctggagtctctctgaatctgctgtgattctggggctgcctgattcatgaatcatttattgcttaatgaaactcctttcaatttaattcagctgaacttttaacaggtagatccactgatatcttgcaccttgyccctggaagagctgcaggcactcaacaccagtctgtgaaggcaggtgcaggggctgtacctgctaaaatcacagaagcagagctctccaaggctgtgggagcccacttcttacattaggtgtcctggatgtgagacatggagtcaaaggagatcatttttgagctttaagatttaatgactgtcccactggattgtggatatgcatggagccaatagcccctttgttttggccaacttctcccatttggaacaggagcatttatccaatgcctgcacacccattgtatcttgg

SEQ ID NO: 119110 - DNA, 575 bp, Homo sapiens
aatcatgtcattatataatgaaaaagcaatccaggaaaaggatataacaattctaaatatataagacccaacactggagcatccagattcataaagcatatattacaagatctaaagagatctagtaaatctttcactacatggcagtgctggagtctctctgaatctgctgtgattctggggctgcctgattcatgaatcatttattgcttaatgaaactcctttcaatttaattcagctgaacttttaacaggtagatccactgatatcttgcaccttgtccctggaagagctgcaggcactcaacaccagtctgtgaaggcaggtgcaggggctgtacctgctaaaatcacagaagcagagctctccaaggctgtgggagcccacttcttacattaggtgtcctggatgtgagacatggagtcaaaggagatcatttttgagctttaagatttaatgactgtcccactggattktggatatgcatggagccaatagcccctttgttttggccaacttctcccatttggaacaggagcatttatccaatgcctgcacacccattgtatcttgg

SEQ ID NO: 119111 - DNA, 516 bp, Homo sapiens
gacaattggatgacttagtgttggtatttttctaagtggtgtaacaaaaactcaggaagcccaggagactttggagtactggcaggcatgttattggtgtcctagacttcagggcctgatgagtttaaaggaatagttgaacaaaaaacatcaaagttgggaaagttgtaatcaaagagttagatgtctgaattggagatgttataagagtcacttccatgataccaaggatgaatgtgtggctgaggtggagatggaagaagtacatctagaaatgaagatcagtgaattgggtttttaacttctaaagtgttttgagatmgtgaaatatttcataatccaaccagaaatttcaagtcttaatacttaactaaaaataagaacagataataattagcttccaaatcccaaaccgtgagtgtaattagtaggtgtaatcataatggtagcatgtcatttttgtggaggccgtagaattgcatctctgaattatgaatgatacaatgaaagcttatt

SEQ ID NO: 119112 - DNA, 542 bp, Homo sapiens
  misc_feature (1)...(542): n = A,T,C or G
ttactctcatcatccttattgnacaggcctggatactctgctntattgtgagtccttgagagcgggagccgcggctcatttagttcaccatccccactgattagcataattcctggcacatacatagtagataatctaatgagttttccaaaaaggaagaaattgatgatccccctggaaatcaagtccctgaatgggtgacaccgttcaaaggtatgaacatggtcttaaggctcaagtgaaaactccatgatraacagtgacggctgtcacataaggaagatgcctggaagcaaactgaagggatgtgccattatgagtctgcactgctgggttcaaaacaaaacaagtagaaagaagccacctaattttggccttgtcaacccttcatgagatgtatgacaacaggcaaatggatacaattttgacttaaacatgaatacagtaatttgaaatcctgccaggatttcattttaacctctgtagatgacaagtagaggacaaatgtaattctctctcactgctcttctggaagaattgtc

SEQ ID NO: 119113 - DNA, 507 bp, Homo sapiens
attaaagtgccagtggccatcctacaaagaggacagctcatcttccccgatagtctctgacccttctggttttgccaggcatagccctctggcttgggcctgcagtgcagacaccctagccctggatgattactctgattggtagtggatctgtgattctcccagaggcaactgagagcccytctatgactgcctactgtggtacccacccttgctgttcctgggctggagaaggaacaaataccctgattgctttgcttctttgttcatgcctccaatacatcgcagccaccctgtggagagacagccaaactgtcttccctgtgtgtcccattgaaagttttcagaaatgaagccaagtgactaaacttaccccacagttaaaagaacatccgtcctcccagatgagaaaaaactggtgcaagaactctggcaattcaagcagccagagttctctcttacctccaaactagtccactagctcccccgcaatagtcttcaccagtc

SEQ ID NO: 119114 - DNA, 518 bp, Homo sapiens
ttataaaaatcattttaatttttctattacagtcctggagcagaacaatttttccccgaatgcaagaacgcagaaaggtacatttttattttcaatgttctgatattagtacaatttatattttgtgtctgttttaaggcatgtaaaagaatagtggcatttttgcagaaaataagccataaattcagccataaatatttrtaaagaaagattatgaggcagcatttccttttctccagtgagtagaaatactcacttaaaatcattctaccctctttctcccaattaacagaggtttcctactgctgtgagatgataccaaataaataattttactattctaaaaaagcagttgtgtatcagcgatgttcaacacatgtgtagagtgtatttttgtttgttcatttgctttatatgggaacacaattagggaggagaggctaacccttgtctgtgcatgtgtgtatgactgactcagttattaaaaatatacatttataagcctgtaaggatgcgta

SEQ ID NO: 119115 - DNA, 568 bp, Homo sapiens
attatgttcattacataatggtttcattaaatattaggatgaggaatggctaataaaatccccaagatttatttaaccttgtgcattttatttttaatataaaaattattctagaraatgttacttgattatttcccacattttaagggggataaacaaaacaaccttgtattttaacattgaaatattcttaaaagtaaaatttgaaatacgctaattatactgacatcttttgtaagtgataacacataattgaatggctcctgtaccagaagaatcacaactatggaaaaagacaaagagcctaatttattctgactaatcaggattgatgctaattaaagaagagtgcaagataatgacttcattactacctgatagatggaaatagattgttcttctaggtaaaatagcaattaaataacttttttaaaaggatttcttttctgaagactttcttctataaatggtgaagtattcatataaaggtctttttgagaaatcaactagaaaaaatagatttcatcaaaggctgtttattctttagtattttgtcacatttcctgga

SEQ ID NO: 119116 - DNA, 644 bp, Homo sapiens
aaataaggttatgtattgattggttgaggaaaatgtgaacataagctcccaggaacctaaccctagatttcccctagaactaatgctttagcactcactaattcagcatttgtggtaactttatagaacatgagcactgcaaataatgagaattgactgtatttgatatttcaatatacacaatttatctggggtggtatatgtaatataatgtaaacaagagcattggaaagattaactgatagatgtaggcacaaaacaatataaaagaagycaattatcccgaactcagatttatggtggttatttggaacatggcctggaggctgaaattcaggaaaggtgaccctgttcaataaatggtgctgggaaaactcgatagccatatgtaaccatatgtaaagaactgaactcctatctctcaccatagaaaaaaatttaactcaagatggattaaagatttaaatgtaagatctgaaactatggaaagaaaatctagaaaaaattatttaggacattggcctaggcaaagaatttataactaagatctcaaaagcaactgcaacaaaaatagaactggacaaatgagacttgattaaactaaaggctttccgaacagcaaaataatcaataaacagacaact

SEQ ID NO: 119117 - DNA, 618 bp, Homo sapiens
atattctgggttactctaaagcaaattatcctatttgtttgcttttctcttgttctagatactggagatcttacaactgatcattattctctttctgggtttgttacttgaaaactcagggccaagttgggatgcccgtttagtaataccrtaggctctgtggtatggtttccataaactaccagatctattgtatttttgcattcttatttttattttgttaccaatttatttctttagctgtatttcccgattgtattatattcctataacatatataaaattcctttaggaggaaatcaaggggtgtgcgtgtgtgtgtgtgtgtgtgtgtgtgtgtgtgtgtgtgtgtgcatgtgtgtgtgtgtgcacgcgtgcagtattaaactttacctgatggtatttacccacatttttttcctgaaatatattttacaattatctaaaacagtgcttatgtccacagtaaatggtatttcttttaccacatgtgaggttaaatttcaaccatcaatatttagtgacctcaaggggtcatatgagccatccttatatctctagagagtattacattcaaattaatacagatcaatggccaattattttgctgaagtatat

SEQ ID NO: 119118 - DNA, 650 bp, Homo sapiens
acctcttgtgtagagcgtcataaaaagggtaggaaagttagacattaagcacatagagcaagtcatgtggctcctgtgaactgctgttctgcttcataagcacatcacaagcacgctccaagaattatcagaaataccatgggtagggtggggtagaagcctgcaagtaaaggtggtagttaaatacaggaaataagactttacaattaatgtgacaatattcgtatttaaagtctaataaagctgagacatttgaatcatacatttaagggcttagaacgctgaaatgcacacattttacccaccgtttccagcacatgcagacacacrcatctcatattcaattctagaacaggtagatttttctgtgttttattgatactggtggtacaaagagatgtgatagatttaacttcatcaggatttagtgtatcctttagaactatgaagatttattttctgaaaccttgtgtgttacaaaaattcactattgggaacattggaagcaaatctatagactgggactaatattcagccattgtataaaaatataacatattggttgttaaaacataaaaatgattatgaactagttttatacaacatctttcctaagtcaaactatctcctatcgcttattgcctcacttc

SEQ ID NO: 119119 - DNA, 548 bp, Homo sapiens
aattttctgtataaaggtattggctaaaacaacagcactgtctcagattttgagggtatcactgccttatcttcacgtatctggtgttattaatgagtcgtgtgatttagtctgatatttttatgacaggtactttgcattttatttcttgtggctcttgctattttctttatctttggcrttcggacatgtcaccatgctgtttataggcatagatgtgctgtccccacgccccaccaccctgaatccttctacccaccagtctgaggatctcttcaatctaaagactagagtcattattctatttcctcaattatttgttcatcttccccacgctgttctttctcaatacctccacaaaaccatacatttctctagatctacctccatgacacttatctttgctctcatgtgtttgccttggatttttgcattcagctctggatgtagcactctgaaccatcacccagtccagtaatgcggtcttcagtaatgtccactctgctatttagttcagtcatttctttctcttttttatcaaaaagttt

SEQ ID NO: 119120 - DNA, 614 bp, Homo sapiens
ccttggggcagaccatctgtgtatattggtgatctgcccaagtaaaggcaaaaagatactggctattctgctctacaggtgtactgaagaaagtgctgcataagtcaatgacagagaagtggctggtggtaataggaatattggacagaaagatgttgagggtaggaacaacaggatgtctagggttgttttatttataggtctttgggcctgaatgaatctccagccttttctatttggctttttaggtgggaggattggtgtactgcaagggctgatgcamggaattatgagtcctttgtctaaatagtcctgaatgattgggttgactcccagtaaagctttatattgaaggggatattgcttaatgtttggcagaggcttatatttatctatggttatttctagaggaactactgacataattattttgatatctggcccatgaagaatctggtactttggataagaaaggctctaattatcacttcaaattcttgattaactttagcaagtataatattacctgtgggtttttgtaagtcttctgtgtctcccaaattgaggatcatttctcccttctctgaaaatgagatgtggatattacaggtctt

SEQ ID NO: 119121 - DNA, 586 bp, Homo sapiens
tcaaatcttttttttcccgacatcgcatctccacatcctttctgaacagtacactgtaatttttagattgccaagtatgatctatcaaaatgagaacttgggtgtggtacttagcaacttttagatataccaataaaacaacaacctaatgcctaaagaaaactgggtaattttatattaatattttatggtatttttggaacctcatatgagtatgcaccagaggagggttagaagttgaaatgcattattatatgtcaagctggtatcatatatcaaatgattttagaggacagggagctaagaacaggagtactgggaaatacaagatagaatttcaaaggcaggaagaagcctgatgggaaaaaaattaagggtgaattggtggaaattcatggataattgcaaggaatgctcaagggagataaactttatattcattggaaagggttaagaatgaagactgttacaaatactagacacagaaggtctggaaacatagaccatgattttatgatggattaatccatagtttcagacttgttcaacaycctgcagatatgatcaatgtgtaaataagtgtttt

SEQ ID NO: 119122 - DNA, 635 bp, Homo sapiens
tcaggcaccatgaaggtatctttgtatagtatttgctgattttctattggccaaarcaagtgtggaagaagtcactgtgaaaagagacaacacatggatgtagatgataggagaaaatacttattggggttctttattgtaatcatctaccacaaatacaacttttgagcctccctcgctttagtgaaattttaatttatgtgaaatgctttcattaatattcatgctcatgaaatgggcatataatggtacctgattttaaagctttaatcaacatacttccttatttagaattattgcccaattttaacttttatgtcagaatgtgaatgagccaaatattagtagctatgattggtgataaatattaagaaggtttattcctcccttgacaatgatgattatgctaatgatggtgattacacctaattttaaaggagccctcaatgtgtgtcacacactgtgctgaattctttacatactaccttatttcgttcctgccatagcccttttattttttaaattcaaattggaaaatgaaataccaagaggcaaatgaacttccctgggttgtgtacaagcagatggtggtgatagttcatatctgttgttttgatgccagaacacatactttt

SEQ ID NO: 119123 - DNA, 635 bp, Homo sapiens
tcaggcaccatgaaggtatctttgtatagtatttgctgattttctattggccaaagcaagtgtggaagaagtcactgtgaaaagagacaacacakggatgtagatgataggagaaaatacttattggggttctttattgtaatcatctaccacaaatacaacttttgagcctccctcgctttagtgaaattttaatttatgtgaaatgctttcattaatattcatgctcatgaaatgggcatataatggtacctgattttaaagctttaatcaacatacttccttatttagaattattgcccaattttaacttttatgtcagaatgtgaatgagccaaatattagtagctatgattggtgataaatattaagaaggtttattcctcccttgacaatgatgattatgctaatgatggtgattacacctaattttaaaggagccctcaatgtgtgtcacacactgtgctgaattctttacatactaccttatttcgttcctgccatagcccttttattttttaaattcaaattggaaaatgaaataccaagaggcaaatgaacttccctgggttgtgtacaagcagatggtggtgatagttcatatctgttgttttgatgccagaacacatactttt

SEQ ID NO: 119124 - DNA, 635 bp, Homo sapiens
tcaggcaccatgaaggtatctttgtatagtatttgctgattttctattggccaaagcaagtgtggaagaagtcactgtgaaaagagacaacacatggatgtagatgataggagaaaatacttattggggttctttattgtaatcatctaccacaaatayaacttttgagcctccctcgctttagtgaaattttaatttatgtgaaatgctttcattaatattcatgctcatgaaatgggcatataatggtacctgattttaaagctttaatcaacatacttccttatttagaattattgcccaattttaacttttatgtcagaatgtgaatgagccaaatattagtagctatgattggtgataaatattaagaaggtttattcctcccttgacaatgatgattatgctaatgatggtgattacacctaattttaaaggagccctcaatgtgtgtcacacactgtgctgaattctttacatactaccttatttcgttcctgccatagcccttttattttttaaattcaaattggaaaatgaaataccaagaggcaaatgaacttccctgggttgtgtacaagcagatggtggtgatagttcatatctgttgttttgatgccagaacacatactttt

SEQ ID NO: 119125 - DNA, 635 bp, Homo sapiens
tcaggcaccatgaaggtatctttgtatagtatttgctgattttctattggccaaagcaagtgtggaagaagtcactgtgaaaagagacaacacatggatgtagatgataggagaaaatacttattggggttctttattgtaatcatctaccacaaatacaacttttgagcctccctcgctttagtgaaattttaatttatgtgaaatgctttcattaatattcatgctcatgaaatgggcatataatggtacctgattttaaagctttaatcaacatacttccttatttagaattattgcccaattttaacttttatgtcagaatgtgaatgagccaaatattagtagctatgattggtgataaatattaagaaggtttattcctcccttgacaatgatgattatgctaatgatggtgattacacctaattttaaaggagccctcaatgtgtgtcacacactgtgctgaattctttacatactaycttatttcgttcctgccatagcccttttattttttaaattcaaattggaaaatgaaataccaagaggcaaatgaacttccctgggttgtgtacaagcagatggtggtgatagttcatatctgttgttttgatgccagaacacatactttt

SEQ ID NO: 119126 - DNA, 536 bp, Homo sapiens
tgttttgatgccagaacacatacttttgaccactatactgtaccatatcacaaatgttacatatgtggatgtgaatgtatatatctttacatatgtatatatataaaatattcaataacgatatgtagttataatcttttatattatcttattagttataatgctactgtagtttttgattccccagaatctcaacagtaakttcagtgaatactgggagttgatgtcacaaaaacttatacaattagatcaatgtcctaaaatgtatcattttcaccatagcatctacttgctttcataaagatataacttagtgaaaacattcaaattatcagtgaataatagcttaataataatagtctcatcctgtcatggaacatcagtggtagcattaagaaatggctcttgagccttgaacttggcagccacttttaagattccatttggcttgctaagcatagtaaaggccaaaagggaaaaggggagagcaggaaaggactttgtatttatgggtgggctttagaaatgaaagtgtt

SEQ ID NO: 119127 - DNA, 536 bp, Homo sapiens
tgttttgatgccagaacacatacttttgaccactatactgtaccatatcacaaatgttacatatgtggatgtgaatgtatatatctttacatatgtatatatataaaatattcaataacgatatgtagttataatcttttatattatcttattagttataatgctactgtagtttttgattccccagaatctcaacagtaagttcagtgaatactgggagttgatgtcacaaaaacttatacaattagatcaatgtcctaaaatgtatcattttcaccatagcatctacttgctttcataaagatataacttagtgaaaacattcaaattatcagtgaataatagcttaataataatagtctcatcctgtcatggaacatcartggtagcattaagaaatggctcttgagccttgaacttggcagccacttttaagattccatttggcttgctaagcatagtaaaggccaaaagggaaaaggggagagcaggaaaggactttgtatttatgggtgggctttagaaatgaaagtgtt

SEQ ID NO: 119128 - DNA, 578 bp, Homo sapiens
tgtgtcagtggatgggcatgagggagaggcagaaattgccatcagttaagaaatttaagggatatgagcaagaggagatattgaatggtcaaatttcttgacggagaagagagaaaggaaatggcaaatgaagacttatccaggctgtctattttttcccctcccagctaataaaaataaacttagctcacgtttatcacactagggaaaagaaggagctggaggaaaaggaagacagtgargaaacaggaaatagaagaaattataattactttaaaagaaggtgtgaaaaatctttcagttcctttcacacatgaacaccacctttttctctctcttcatttcctctcaaaggaaaacttaactcccactttggtacaactctaagtcaccaacaaagctattctttttatcttagtctcagaacttggctcacactttctctagtggctggccaattttatttcccaattatcttggcctaaatacacattcatcaacttgctgtctaatgtggataatggccaagggaatgtttttaatattaggagaggataattttagcatttaaaatgtat

SEQ ID NO: 119129 - DNA, 516 bp, Homo sapiens
ctactattggtggggatgtaaattagtataaacattatggtcaacagcactgaggctcctcaaaaaaataaaaatagaactatcatatgatccagcaatcctactactgggtttttatccaaaagaagtaaaatcaatacgttgaagagacatctgcagtcccaccattatagcactattcacaatagccaagataaggaaccaaccyaagtgtccatcaatggataaatggataaaatattgttgtatatatacagaatggaatactattcagccacaaagaaggaggaaatcctgtcatttgtgacaacatgaatgaacctgaaggacattacgttaagtgaaataagctaggcaaagacaaattacccatgatctcgcccttattcggaatataaaacaattgggtttcataaaagtagagagtagaatagtatttaccagagtcttgtaaaggtagcagagagaggagatggagagaagttggtcaataaacactatgttacaatgtcctta

SEQ ID NO: 119130 - DNA, 595 bp, Homo sapiens
gcttacaaattatcttttaattttayactcattcatgcaaatgcagctacttatttaaaatttcacaactttgaatagtatgtaataatatactctatgtgacattaaagcaccaaatatgaacataaatttcaaagattaaaaaaagcatatacacacacatggggcgcacacacacacacacacacacacacacacacacacacacagttggcccttcatatccatgggtttcacatacacagattcaagcaaccatagaatctatgactccactggaccattgagtcatcagcctttgttgggataagactttcactcaaggataagcaacgtaagaaagggtgctcaaacggcaggggaaacaggatcctctcttattttgtatactattgctgattatgtcggccagctttgaaaaaattttgtctaatattggaagtttacttctaaattctgaagtgctacagaaagaatggactattgtgaaacatgagctttagctaattaccatatagcaacgtactgttaagtgagaaagcagaaaagaaagctgtatacataccacaatagcaacaaagtaaaccatacctat

SEQ ID NO: 119131 - DNA, 595 bp, Homo sapiens
gcttacaaattatcttttaattttatactcattcatgcaaatgcagctacttatttaaaatttcacaactttgaatagtatgtaataatatactctatgtgacattaaagcaccaaatatgaacataaatttcaaagattaaaaaaagcatatacacacacatggggcgcacacacacacacacacacacacacacacacacacacacagttggcccttcatatccatgggtttcacatacacagattcaagcaaccatagaatctatgactccactggaccattgagtcatcagcctttgttgggataagactttcactcaaggataagcaacgtaagaaagggtgctcaaacggcaggggaaacaggatcctctcttattttgtatactattgctgattatgtcggccagctttgaaaaaattttgtctaatattggaagtttacttctaaattcygaagtgctacagaaagaatggactattgtgaaacatgagctttagctaattaccatatagcaacgtactgttaagtgagaaagcagaaaagaaagctgtatacataccacaatagcaacaaagtaaaccatacctat

SEQ ID NO: 119132 - DNA, 594 bp, Homo sapiens
gagttgtgaaactttgttttttacttctatttgaaattagccttactagacttatattaattttatgacataataaaaatgaatataatatacctttggttcaaaaacaattaaaaataatgattttaagtttatggaaagtataaaagtgtttagggtacaaaaaataagtggaaagaggaagaataaaaatatgttatatggccataattactattatgttaaaaattaaaagcaatctttaagaaattatgttatattcaaaatcaggcaatatcactttacagagctgctgcagacagagagggagtggagtggggtgggacactagattaaacaaaaaacatgacycatttttcaaatacctcaaatcctaaagaggaaattatttctcctgacataaaatatctaaaatgttcccttttgcccctgctgcacgcacacacaaaatactaattgagaagaaaataaaatggcgaaaggcagggagccctgaggttagaagacggctatagaattaagtggataagcaggcattcttaggcagtacagcatcctagaaaatgtagtcaagggagtgcactttaattaatt

SEQ ID NO: 119133 - DNA, 594 bp, Homo sapiens
gagttgtgaaactttgttttttacttctatttgaaattagccttactagacttatattaattttatgacataataaaaatgaatataatatacctttggttcaaaaacaattaaaaataatgattttaagtttatggaaagtataaaagtgtttagggtacaaaaaataagtggaaagaggaagaataaaaatatgttatatggccataattactattatgttaaaaattaaaagcaatctttaagaaattatgttatattcaaaatcaggcaatatcactttacagagctgctgcagacagagagggagtggagtggggtgggacactagattaaacaaaaaacatgacccatttttcaaatacctcaaatcctaaagaggaaattatttctcctgacataaaatatctaaaatgttcccttttgcccctgctgcacrcacacacaaaatactaattgagaagaaaataaaatggcgaaaggcagggagccctgaggttagaagacggctatagaattaagtggataagcaggcattcttaggcagtacagcatcctagaaaatgtagtcaagggagtgcactttaattaatt

SEQ ID NO: 119134 - DNA, 594 bp, Homo sapiens
gagttgtgaaactttgttttttacttctatttgaaattagccttactagacttatattaattttatgacataataaaaatgaatataatatacctttggttcaaaaacaattaaaaataatgattttaagtttatggaaagtataaaagtgtttagggtacaaaaaataagtggaaagaggaagaataaaaatatgttatatggccataattactattatgttaaaaattaaaagcaatctttaagaaattatgttatattcaaaatcaggcaatatcactttacagagctgctgcagacagagagggagtggagtggggtgggacactagattaaacaaaaaacatgacccatttttcaaatacctcaaatcctaaagaggaaattatttctcctgacataaaatatctaaaatgttcccttttgcccctgctgcacgcacacacaaaatactaattgagaagaaaataaaatggcraaaggcagggagccctgaggttagaagacggctatagaattaagtggataagcaggcattcttaggcagtacagcatcctagaaaatgtagtcaagggagtgcactttaattaatt

SEQ ID NO: 119135 - DNA, 594 bp, Homo sapiens
gagttgtgaaactttgttttttacttctatttgaaattagccttactagacttatattaattttatgacataataaaaatgaatataatatacctttggttcaaaaacaattaaaaataatgattttaagtttatggaaagtataaaagtgtttagggtacaaaaaataagtggaaagaggaagaataaaaatatgttatatggccataattactattatgttaaaaattaaaagcaatctttaagaaattatgttatattcaaaatcaggcaatatcactttacagagctgctgcagacagagagggagtggagtggggtgggacactagattaaacaaaaaacatgacccatttttcaaatacctcaaatcctaaagaggaaattatttctcctgacataaaatatctaaaatgttcccttttgcccctgctgcacgcacacacaaaatactaattgagaagaaaataaaatggcgamaggcagggagccctgaggttagaagacggctatagaattaagtggataagcaggcattcttaggcagtacagcatcctagaaaatgtagtcaagggagtgcactttaattaatt

SEQ ID NO: 119136 - DNA, 620 bp, Homo sapiens
gagttgtgcattggagttcaaacccacacaggggctgcatgcccaaagaggggtggttctattacaggcactaagtgagggagtatagagaaagaactttgagaaatgcccaaatttagtgggtaaaaggacaagaaagataaaccagcaagggaaagagggagagtcacaagctggttgagaatagtgcagttgccatagcccatgtctctttctctgcatgatgtccagaacagtcttcatgattcagtctttcaaagtgaaaatagtgtgtggctcttccttcacaatgtaaattctctctcgctatgtatctctgtccttctctgtctgtgtatatgtatgtgtgtgtttgtgtgtgtgtgtgtctgtgtatgtgtccctctttctctcacacatgcacatacgtatacattagcatttgacawtgtctttgctagtttcattgtcagatcaaattagttcattagagttaaatgatctttgataaagcactatttaccgacagcactggttcctcttaaattgatgctagttaggaaaaacttaattacctttctcattctatatagaacattttaattttaaagcctgattctcctctgagaaatcgtacttca

SEQ ID NO: 119137 - DNA, 441 bp, Homo sapiens
tctttttttttttttttaaacctagtttcaattgtcccagtctgttttactgcaataagacttagaatgatctggacagtctggcccactggggagcatatcctttctcagatyttttccacattttctgcttatgtgttttggccttaattctccactcttacttctcaaaggaccattagaagggtgatatcattgcaccacagtgtgatatgaagtatgaaagaggaatggctgtttttcatcctgaggcaagtgcttaattcataattgtatatgagaggcagtgtggaggggcagaattagagatgtgaaaatgtttataagtaaaaattaagatatagtctattacctgatctcttttacacctgtttttccctgtgtggattttttaattttgttttctacagcttttcagctacttttttttcattttttgaa

SEQ ID NO: 119138 - DNA, 441 bp, Homo sapiens
tctttttttttttttttaaacctagtttcaattgtcccagtctgttttactgcaataagacttagaatgatctggacagtctggcccactggggagcatatcctttctcagattttttccacattttctgcttatgtgttttggccttaattctccactcttacttctcaaaggaccattagaagggtgatatcattgcaccacagtgtgatatgaagtatgaaagaggaatggctgtttttcatcctgaggcaagtgcttaattcataattgtatatgagaggcagtgtggaggggcagaattagagatgtgaaaatgtttataagtaaaaattaagatatagtctattacctgatctcytttacacctgtttttccctgtgtggattttttaattttgttttctacagcttttcagctacttttttttcattttttgaa

SEQ ID NO: 119139 - DNA, 607 bp, Homo sapiens
tgaaggtcaagataaaaatttaggagccactaaacagttttccattatcattcaccaccatcaccagaagaagttcctggtgtttgtcaaaatgcatcagcaatacaaggactccacagtaaggtgttagcagaggttaatgaagtcacttctttaattttatcagacggcatatgtgcattttaacagggccttcaacgcctccctcctggtaaagaagtgactcaaaaggtcaaattcccaggccttgacaggctatggagcgtttgacattttcataccaggagggcccttccacagaatgacctgggtgtgttaatgagggcaaggttaggagtggaaggagggggatgaccttgtagacaaattcaaatgccaagactctactccccatgacccgtgaggctccttcaggaaagattctagcaggtttggccaaaactaactctagggcaacttccaccttctatttaccagttatggggtccaacttccacttgaagttatggaggactttgaaaagctagtccctgcatgggtaagaagagggagtactaggggctcctcttttatwtgaggtgagttcacagccctgactaataaaatt

SEQ ID NO: 119140 - DNA, 652 bp, Homo sapiens
ccagtacttgaggaaggtaaatagggtgaaggaatctgaagaggaagtaggtagagtcaggctggatcattgaagaacagagactggtaggttgggtctggggtgtggaattgaggggagggccaccggggccatccccctctaaaaatgttgctggaagtcagtctccagatgaccctactgtaaagggtcatccataaagagcatccatgagggtagtcaggaggcaggaacacaggcaggatacaggaacatgatataggcaaacactcctccactgagacagctggtcaacccaggcccagcctacctcagggcgctgtagggcccaatgggtatgttgatccggctctgcagccagctgatgtaatcctcttgaggcatatggatgatgtgttctcgcacaaactgtgaggcagacayagtggcaatctcagaatttgctctgaaaagtagactccaccttctctccctcccctcaagatcctggaagatttgtgactgagactggtggccccaggaataccatttgggcattcataatcttggagcatcagattggggtggtcctttggtgaagaggacccctttccagcttcctggctcagcaggctaatgttaagccccttcttgttgctatcgatgcaaggaa

SEQ ID NO: 119141 - DNA, 471 bp, Homo sapiens
atttagcagccttgtctcttattaaatctaattagtttcttggctgctaagatattgagggcatccctcaaaatgaaaatgtgtagccagagtcagatttagcaaaggaccatgtccagagttttctgccatccccttcagaggttcttagtgaagagggactcaaggggcaacccctctcccctrttatcaattgtttgcaggatagtggactttttagaagttgaaggatcttagaatgtgtacagtatcatcagtctgcagttgaggaaacagttccagtgagaggaaatgacttgctcaatgttaaacagcaaatcaggatcagaggtggagctggaacacaggtcttctgactcctaatctgttggctacatcaagatgagcatccactgtagagcttggatgccatcaatgcatgaaaatattaatgagtgaattatctactttaaaaattaatccccatgcaaa

SEQ ID NO: 119142 - DNA, 471 bp, Homo sapiens
atttagcagccttgtctcttattaaatctaattagtttcttggctgctaagatattgagggcatccctcaaaatgaaaatgtgtagccagagtcagatttagcaaaggaccatgtccagagttttctgccatccccttcagaggttcttagtgaagagggactcaaggggcaacccctctcccctgttatcaattgtttgcaggatagtggactttttagaagttgaaggatcttagaatgtgtacagtatcatcagtctgcagttgaggaaacagttccagtgagaggaaatgacttgctcaatgttaaacagcaaatyaggatcagaggtggagctggaacacaggtcttctgactcctaatctgttggctacatcaagatgagcatccactgtagagcttggatgccatcaatgcatgaaaatattaatgagtgaattatctactttaaaaattaatccccatgcaaa

SEQ ID NO: 119143 - DNA, 579 bp, Homo sapiens
atctttactccttgtgttttccaagtgcttgagaaagcatcactgtagctccctacatctggcagtaatcttcatcaagatgataacccttgccctgtctgcatcacaatgttgttaagagaatcagagggaaatatggctaaaaacatatcttggaatggttaaaagggattattattattattatcataatcaaataagcatgttgtgttggttgtggctcttttcgtaacaagcaacataaagcccaattcaaaccagcttaggcaaagagagaaatgttggctagaagtctgtggcagtagctgttttcagacatagtttgatccaacasgatttattttctacctacctcttggtcctgatgtcctccaagttgctttatttcttaacaaatgactgctagtagtttcagatgtacatcctcctaggttctctttctctaacaaatttaaacaaaagtccttcatctgactgttacgggcttaagttaggcaacatactcatttcataactaatcattatggctaagggcacataatgagctgattgtccaggactaggtcacatgatgaccct

SEQ ID NO: 119144 - DNA, 579 bp, Homo sapiens
atctttactccttgtgttttccaagtgcttgagaaagcatcactgtagctccctacatctggcagtaatcttcatcaagatgataacccttgccctgtctgcatcacaatgttgttaagagaatcagagggaaatatggctaaaaacatatcttggaatggttaaaagggattattattattattatcataatcaaataagcatgttgtgttggttgtggctcttttcgtaacaagcaacataaagcccaattcaaaccagcttaggcaaagagagaaatgttggctagaagtctgtggcagtagctgttttcagacatagtttgatccaacaggatttattttcyacctacctcttggtcctgatgtcctccaagttgctttatttcttaacaaatgactgctagtagtttcagatgtacatcctcctaggttctctttctctaacaaatttaaacaaaagtccttcatctgactgttacgggcttaagttaggcaacatactcatttcataactaatcattatggctaagggcacataatgagctgattgtccaggactaggtcacatgatgaccct

SEQ ID NO: 119145 - DNA, 579 bp, Homo sapiens
atctttactccttgtgttttccaagtgcttgagaaagcatcactgtagctccctacatctggcagtaatcttcatcaagatgataacccttgccctgtctgcatcacaatgttgttaagagaatcagagggaaatatggctaaaaacatatcttggaatggttaaaagggattattattattattatcataatcaaataagcatgttgtgttggttgtggctcttttcgtaacaagcaacataaagcccaattcaaaccagcttaggcaaagagagaaatgttggctagaagtctgtggcagtagctgttttcagacatagtttgatccaacaggatttattttctacctacctcttggtcctgatgtcctccaagttgctttatttcttaacaaatgactgctagtagtttcagatgtacatcctcctaggttctctttctctaacaaatttaaacaaaagtccttcatctgactgttacgggcttaagttaggcaacatrctcatttcataactaatcattatggctaagggcacataatgagctgattgtccaggactaggtcacatgatgaccct

SEQ ID NO: 119146 - DNA, 604 bp, Homo sapiens
  misc_feature (1)...(604): n = A,T,C or G
acagatcaggttctcctgaagcaaacagggatggggtgtggggtctaagaggttctctagaaatcagaccctgtgaaagcaaaaggggaagaagcaggattgggcagagggggagatacaccattttaggctccacaaagcctcatccaccctggcaaggagctctgcagagaatgctgtccatcgttgtcctgtgtcaggctaaaatgactgtacttttatatccccacctcacttaagtcacaggatgtagattgccctgggacagacagaagcttgagcaaggtggctctccgcagccgaggcagaccctgaaggagaaaacaggtggaggcagcctgctgaccacactccccacagctggacagcaagrcctcccttggagaggctgtgggtaacgcatctccatgtctacaacattccttaccctgctttatatttcttccctaggactagcgccacctgacattgnatatatgnacatatctatgnatttccctgtttacatatttctgcatcctgagactgtgatttttccagggacataggctatgactgtgttgttctcattgcctacaacagcatttggcatgcagcaggtgcc

SEQ ID NO: 119147 - DNA, 567 bp, Homo sapiens
aggctcatagcttcagcttctttacagtactgctttctgatgtcttactttgcagataggaaaactgaggcacagggaatgtgaagaatgagtcgtsgttaagagactgggttctagaggacaaattctttttgacagggtctcgctctgtcacccaggctggagtgcagtggtgcaatctcggctcagtgcaacctccacctcccaatctcaagtgaacctcccacctcagcctcctgagtagctgggaccacagctgcgcaccaccacacctagctattatttttgtattttttgtagagacagggtttggcagtctttacagcctgttgctcaggctggtctcaaactcctgagctcaaataacccacttgcctcggcctcccaaggtgctgggattacaggtgtgagccaccatgcccagccactagagatcaaattcatttgtggtatcaccttgggcaaattacttaccctctttgagccttggtttgtacatttataaaatggattagtgtgaggattaggagagaatagatgtgatgtgtttagcatatgcttgtcatg

SEQ ID NO: 119148 - DNA, 588 bp, Homo sapiens
gaatcagtaaatgagctcattctytgggtggactttgcacatccatatgagggatgctcctctgaaagagcattttattttattttatttttttgagacagggtctcactctgtcactcaggctggagtgcagtggtgcgatcacagctcactgcagccttgacttccccaggctcgtgatcctcccacctcagcctccctaatagctgggaccacaggcatgcaccaccacacgcagataatttttatattttttgtagaggcagggtctctctatgttgcccaggctggccttgaactcatggcaccttggcagatcacttgcaatcccaaagtgctgagattacaggtgtgagtgactgcacctggcctgaaagaacattttaacaggggacttctggagacaatttcctcatccaaggatgactccactagggaaggtcctagttcagcaagtgcttaggtgggtgatattttgagaagtttctaagggcctctcaaattctcctatctcctagttatctgttgacttgctacagtctggatgaaagattggaacaggatatgtatggggcgacccccaaggga

SEQ ID NO: 119149 - DNA, 588 bp, Homo sapiens
gaatcagtaaatgagctcattctctgggtggactttgcacatccatatgagggatgctcctctgaaagagcattttattttattttatttttttgagacagggtctcactctgtcactcaggctggagtgcagtggtgcgatcacagctcactgcagccttgacttccccaggctcgtgatcctcccacctcagcctccctaatagctgggaccacaggcatgcaccaccacacgcagataatttttatattttttgtagaggcagggtctctctatgttgcccaggctggccttgaactcatggcaccttggcagatcacttgcaatcccaaagtgctgagattacaggtgtgagygactgcacctggcctgaaagaacattttaacaggggacttctggagacaatttcctcatccaaggatgactccactagggaaggtcctagttcagcaagtgcttaggtgggtgatattttgagaagtttctaagggcctctcaaattctcctatctcctagttatctgttgacttgctacagtctggatgaaagattggaacaggatatgtatggggcgacccccaaggga

SEQ ID NO: 119150 - DNA, 580 bp, Homo sapiens
acacaatatagtatattgtctaataattttacttggtggtctgtgatttaaagttatgaagccttaactgaacaatacttatttgctccaaaaaatcatttctctgaaaatataacatcataactaaattttataatataaagtagagccttgcatttcatattgtttaattactctgtcacataagaatcttagaatttttcttagtttgttcaattgctgtaaatgacttctgaaagtaatataattataacttgtaatggtaaatgcattcatagaattcatggagcaagctgaatatgtaactgttcatttggaactgagttgattaccatttgaaaacagttaatggaatagctgattagaatacattgcaaagaatcatgatttaattttacatcacctagaaaaaatctgatgccatgcgtgtyaatggcagttttgagggacataaggattgacatattttcctgagctaagcaatatacgcaatgctggctcagtgaaaaacatatttcaaagtacatgaagtaagttatacaatataactttatgtgattaaattcatgtgagtattaca

SEQ ID NO: 119151 - DNA, 621 bp, Homo sapiens
tatctcaccattaaattatgctattgatgttacactaaaagcccagactttaccactatgcaatatatccatggaacaaaattgcatttgtaccccttagatttataggaataaaaaaagaacagaacaaaagaatttaaaaaagaataaggagccagccaagcctgaaagggaaagcattaagtcataagactatgcaaaagccttgagatcagaaactacagtttcaattttcatggaatctagcttatcttagtccaagaaaatcactctatagaatgttaccatacaactaaacagcttacttctttgtaaataacacatggtaaaccagtgggaaatggcatacaactaacgatggatcctgcggtattgatccatgatgagggatgaatraacgaacatatacctagtgcctactaaatgctttgcactgataaaggttcttttatattctgctcactttgaacaaatgcatccattatttatttaacaaatttgtattgagctcctctacatacttggtatggtacttggcattaaattcaattatgactccattcagtacttcttgcagggtgcgtatgctcaattaagggtgcacatgctcaattaagacaa

SEQ ID NO: 119152 - DNA, 621 bp, Homo sapiens
tatctcaccattaaattatgctattgatgttacactaaaagcccagactttaccactatgcaatatatccatggaacaaaattgcatttgtaccccttagatttataggaataaaaaaagaacagaacaaaagaatttaaaaaagaataaggagccagccaagcctgaaagggaaagcattaagtcataagactatgcaaaagccttgagatcagaaactacagtttcaattttcatggaatctagcttatcttagtccaagaaaatcactctatagaatgttaccatacaactaaacagcttacttctttgtaaataacacatggtaaaccagtgggaaatggcatacaactaacgatggatcctgcggtattgatccatgatgagggatgaataaaygaacatatacctagtgcctactaaatgctttgcactgataaaggttcttttatattctgctcactttgaacaaatgcatccattatttatttaacaaatttgtattgagctcctctacatacttggtatggtacttggcattaaattcaattatgactccattcagtacttcttgcagggtgcgtatgctcaattaagggtgcacatgctcaattaagacaa

SEQ ID NO: 119153 - DNA, 552 bp, Homo sapiens
tgaaataattttttaaagttgttttgttttcattaaacaagtcatatatgttgtacattatttaggaactatagaaaatataaagaaagtggaaatcacccacattcatagaaactggagatatccatcaytgatattttctatacttctttctggtatttttttccatgtttacactgattagtctattcatttagcaaaaatttagcacttactatgtgccaggcaatgtgctaggtgttgcggatacaacagtaaagaaaacagacatgaatttctaaccaaatggaacttatattttagatggtgagaacagaccataaacccccaaaatgaataagctgtatagtatattagaaggtggtaagcgctatggagaaaaatatagcagagaagacggatgcaatgtgttggcctgagtgaaggttgttattttaaataggatgagtcagtcactaagaaggtaacattttagcagaaacatgaaatgggtgagggacaaagccacataggtatgtcatggaacaacttcaaactcatgtgaatacaaaa

SEQ ID NO: 119154 - DNA, 574 bp, Homo sapiens
caatggcagaaatggaagccccagtgttgcatgaagagacacagcaaattcaaacgagcatgaaaaggtcaggccttagttttatatgctacttgaaaagtgatatgaggcagtacttaaataatatgatttttttttaataataagtgatttagcagtacttaaataatatgatcatgctggttttcattctgaaattcatgccaccctaactaaatagaagaataaawgaaagaacacaactgtgttgtgacttacgacacacttttataatcgacaaaagtgcagttgaggttatttttttattaatctcactgaacaaatgttccaaaactagacctctttttccaattaaacataatctctatttcataaattaaagttaacaaagtcaaatgcaatttagttatgaaaatctgtctttcttttctcagctcacagttgaccaatcccatgtgcataagataaaaggacagggaaacaagtggctttgctaaacattttggtatgcagagaaaccattacgccattgatgctgtgggactgcaatcacattcacatagaatgaaacatg

SEQ ID NO: 119155 - DNA, 616 bp, Homo sapiens
cattctccctctgaatgtacctgtctctgtgtccaaattccccctttttgtaagaacaccagtcatattggattagagcccaccccaatgacctcactttaatttgatcatctacaaagaccctatgtccaaataggtcacattcacaggtactgggggtcaggactttgacatcttttagggaaacacaagttaacccacaacagtaacttaataattcttagactagtggttctcagctgatggtacattatcaattgtggaatgtgaagtttactagattaaatgaamatttttcataaaatttattttcatttgttttctcctatttccaccttaacaataaaatatatccccaataatagtactgaaacttactgtttttgtgttttccaagttatcataacatttaaatgtatactccaaagtattatttcaattttaaaaaacagtaatagagttattattttggtttgtttgtgcattatagtttagcagaaactcccaacaagataactgcaatggtataaattatattcttataattgatatccttataattataaccttacaatttttatccttataattttaaattctttaaaaggcataaatt

SEQ ID NO: 119156 - DNA, 616 bp, Homo sapiens
cattctccctctgaatgtacctgtctctgtgtccaaattccccctttttgtaagaacaccagtcatattggattagagcccaccccaatgacctcactttaatttgatcatctacaaagaccctatgtccaaataggtcacattcacaggtactgggggtcaggactttgacatcttttagggaaacacaagttaacccacaacagtaacttaataattcttagactagtggttctcagctgatggtacattatcaattgtggaatgtgaagtttactagattaaatgaacatttttcataaaatttattttcatttgttttctcctatttccaccttaacaataaaatatatccccaataatagtactgaaacttactgtttttgtgttttccaagttatcataacatttaaatgtatactccaaagtattatttcaattttaaaaaacagtaatagagttattattttggtttgtttgtgcattawagtttagcagaaactcccaacaagataactgcaatggtataaattatattcttataattgatatccttataattataaccttacaatttttatccttataattttaaattctttaaaaggcataaatt

SEQ ID NO: 119157 - DNA, 467 bp, Homo sapiens
tctggatgctccttctttggatctttacatggctgacatttccagtctcagtccaaaggtcattttccagacctttcccagattggcttccatgacgatcttaatcaaaagaccactayaggttattccagtgtctctatagcatcaatattatcccggaaacctagaaaagcacctttaaagtcacctgctctcctggcagctagcttgtatttggttgaaagccatagataaccaaatagtgaagcatatattttttctcacagacaagaatcatgggtttggacagttcagggctagtacaacagctcagtgaggacattaggcctgtgtcctttccttcttcctactccaccatccttagcacatggcagttatcttcgtgatcacaaaatgggagttttacctccaaggcacttcaaggcattatatctgtcaaaagaaaggggaaagaggaagggtgcaaa

SEQ ID NO: 119158 - DNA, 534 bp, Homo sapiens
aaatcactaaattagtctctccctttttttaaaccagactcattaattatttataagcctcatgaactattctgtgacttattttacaagtttaattcaattaatttgcatggtatgatcaaatcaaaatttgactcttatattcctttagctttcaaatataaaataaaagccttccagttaaaaaggaaatgaggaataatactaatatttatyaatgcaagttaaaaaatatctcaatgaaaagtattatccagttcctaattttcatgtttttggtaataggctttaaatgatgatcaatacagaagacccactctttttcaatctgtggctttctacatgtgagctttttattcatcatggtttcatagtacctcctccaggcctggtgctgtggctcacacctgtaatcccaacactttgggaggccaaggcaggaggattgcttgaggccaggagttcgaatccagcctggacaacaagcaagaccctatctgtaaaaaataataataataataaaaattagtcagg

SEQ ID NO: 119159 - DNA, 545 bp, Homo sapiens
ggatcacaggagactgactacctagtggagcagtgtttctcaactgatattatagmccttattaattagtctttatttgggggtaggagggggtgggatagagaggagatatcatggacactagaaaatctaatgaagtttgtgaagttatcccaagaaaaatccactcatgtgtgtaaatgttcatatcatttatttatttgtttgcatttgtcattgagttatttcacattttacaaataattatgtgactcatttttcttgtgaaaattgatgacctctttctaaataaaacataaatgcaaattactaaccaaatcatataaaaaaagaaaacatatattctgcttaaaatagttttcaatgagaaggctgttttatttggcttagtaagaagttaaaatttaggctactctggaacactttgcctatgggatagccctgctgtgtctatggagcagcccaaaaaaaaaaaaaaaaaaaaaaaaaaaggaagaagttaaaatttagactgagccttcctttataggaaaatatcggtgtta

SEQ ID NO: 119160 - DNA, 545 bp, Homo sapiens
ggatcacaggagactgactacctagtggagcagtgtttctcaactgatattatagaccttattaattagtctttatttgggggtaggagggggtgggakagagaggagatatcatggacactagaaaatctaatgaagtttgtgaagttatcccaagaaaaatccactcatgtgtgtaaatgttcatatcatttatttatttgtttgcatttgtcattgagttatttcacattttacaaataattatgtgactcatttttcttgtgaaaattgatgacctctttctaaataaaacataaatgcaaattactaaccaaatcatataaaaaaagaaaacatatattctgcttaaaatagttttcaatgagaaggctgttttatttggcttagtaagaagttaaaatttaggctactctggaacactttgcctatgggatagccctgctgtgtctatggagcagcccaaaaaaaaaaaaaaaaaaaaaaaaaaaggaagaagttaaaatttagactgagccttcctttataggaaaatatcggtgtta

SEQ ID NO: 119161 - DNA, 545 bp, Homo sapiens
ggatcacaggagactgactacctagtggagcagtgtttctcaactgatattatagaccttattaattagtctttatttgggggtaggagggggtgggatagagaggagatatcatggacactagaaaatctaatgaagtttgtgaagttatcccaagaaaaatccactcatgtgtgtaaatgttcatrtcatttatttatttgtttgcatttgtcattgagttatttcacattttacaaataattatgtgactcatttttcttgtgaaaattgatgacctctttctaaataaaacataaatgcaaattactaaccaaatcatataaaaaaagaaaacatatattctgcttaaaatagttttcaatgagaaggctgttttatttggcttagtaagaagttaaaatttaggctactctggaacactttgcctatgggatagccctgctgtgtctatggagcagcccaaaaaaaaaaaaaaaaaaaaaaaaaaaggaagaagttaaaatttagactgagccttcctttataggaaaatatcggtgtta

SEQ ID NO: 119162 - DNA, 545 bp, Homo sapiens
ggatcacaggagactgactacctagtggagcagtgtttctcaactgatattatagaccttattaattagtctttatttgggggtaggagggggtgggatagagaggagatatcatggacactagaaaatctaatgaagtttgtgaagttatcccaagaaaaatccactcatgtgtgtaaatgttcatatcatttatttatttgtttgcatttgtcattgagttatttcacattttacaaataattatgtgactcatttttcttgtgaaaattgatgacctctttctaaataaaacataaatgcaaattactaaccaaatcatataaaaaaagaaaacatatattctgcttaaaatagttttcaatgagaaggctgttttatttggyttagtaagaagttaaaatttaggctactctggaacactttgcctatgggatagccctgctgtgtctatggagcagcccaaaaaaaaaaaaaaaaaaaaaaaaaaaggaagaagttaaaatttagactgagccttcctttataggaaaatatcggtgtta

SEQ ID NO: 119163 - DNA, 595 bp, Homo sapiens
ccatatgtacttgcagtatcaagatttttgttccattaggagttccgcttgataacatctgttgggaggaggcaacgcacacacacacacacacacacacatacacacacacagacacacacacacacatcgacattcaggtgagagataaaaatcagagttttactgaaacaatcatagttttcactcagttgcatgccaaatgggaatgccacagctgttattttcactataactggctttgaaatattggcaaaataccagagttcaagagtaggttctatcaagtgaacagaggtgctattaattttttttattctaatcaaccaaccagctcaagcatttctagagtacttgaaatgataaagctttctccagttatttatggtttcttttgattggaaacatgtcaaaagtttcatgttagtgcaaatataagttttggtaaatttccmtccttttaaaattgaacttcttctccaggggaaaaaaatctatattgtgtgatttattttcaggatgctcagaaataagctttcttgacttcatcctatcattggcaggaaacttatcacacaagaaacagtctggcttt

SEQ ID NO: 119164 - DNA, 519 bp, Homo sapiens
tgttcccatctcttgggcaaatacctaagaatagaattgctgaatcgcatggtataatttgttttccaactgtagctacaccagtttacaacctcaccagcaatgtatgagtgttccagtttgttttctttttattttctttcttttcttttctttttttttttgagacagagttgctctgtaaccctgtaacccaggctggagtgcaaagtcacaatcttggctcactgcaacctccacctcctgggttcaagtgattcttgtgccttagcctccgggtagttgggattactgccatgtgccaccatgcccagcaacttttttgtgtttttaggagagacagagtttcaccatgttggscaggctgatctcaaactcctgacctctagtgaaccgcctgtcttagcctcccaaagtgctaggattacaggtgtgagccaccacacccagcccagtcttccagtttctcacctcctagccaacacttgtttttgtcgtctattttagtcatagaagtag

SEQ ID NO: 119165 - DNA, 520 bp, Homo sapiens
ttctagttggaaagcaaacttcgtatggtttaaatccttttaaatatactgatagttattttatggcataacagttagtctatactagagaatgttccatttatacttgataaaagtgtgcattctgcttttactaggtcrgtgttctgttgatgtctattagatcaagtttgtttatagtgttttttgagtcttttattttcttgttcttctgattagttgttctatccgttattgaaagttgagtattgaagttattgtacttttcaactccagaaattgtattttgcctttttaaataatttctgtttcttcactcatattctatttggtttcttttagttctttgaacataatcataatagttgatttaaagtcattgtctagtaagtccaaattttgactttcttagggccaatttttaactgcttttttttatgtgttcaggccctgctttcctgtgtgtgtgtgttttatgatttttcaatttaaaatactagacatgtaaaataacataatg

SEQ ID NO: 119166 - DNA, 520 bp, Homo sapiens
ttctagttggaaagcaaacttcgtatggtttaaatccttttaaatatactgatagttattttatggcataacagttagtctatactagagaatgttccatttatacttgataaaagtgtgcattctgcttttactaggtcagtgttctgttgatgtctattagatcaagtttgtttatagtgttttttgagtcttttattttcttgttcttctgattagttgttctatccrttattgaaagttgagtattgaagttattgtacttttcaactccagaaattgtattttgcctttttaaataatttctgtttcttcactcatattctatttggtttcttttagttctttgaacataatcataatagttgatttaaagtcattgtctagtaagtccaaattttgactttcttagggccaatttttaactgcttttttttatgtgttcaggccctgctttcctgtgtgtgtgtgttttatgatttttcaatttaaaatactagacatgtaaaataacataatg

SEQ ID NO: 119167 - DNA, 587 bp, Homo sapiens
gcctcttgctagctacaactgttataactccctcagccagctgcaatgttaaacaattgtcattattttctacaacttccctggagacaatactcacatagagggaggtttgagttaggtcaaataaaggcaagctctaagaatggagctttacttagaacctgctagaaaagtcaaatggtaacatttctctggggatggcacttttaggaagctccaaaccctccattggctggtagactgctggttgaccactaacatagttgtgagcctgttagatttcaatgctgctatggaataagaaagagggtagtgggagtagtgcaagttaaaatgtcaaaaagttcattgttcttactgagattcagccatttttcttgcataaaagctgcrattgttgcatgtctttggttaattttcagtttttaaacagttgattttgtctattattgccagttttcccattttctcattgcttttatgagcagcattgttttatgacctattttcagagatttttactctgccattatggaagtgcaaattctccgtgaatgtctcagtgctttattaatatctcaaaatgg

SEQ ID NO: 119168 - DNA, 587 bp, Homo sapiens
gcctcttgctagctacaactgttataactccctcagccagctgcaatgttaaacaattgtcattattttctacaacttccctggagacaatactcacatagagggaggtttgagttaggtcaaataaaggcaagctctaagaatggagctttacttagaacctgctagaaaagtcaaatggtaacatttctctggggatggcacttttaggaagctccaaaccctccattggctggtagactgctggttgaccactaacatagttgtgagcctgttagatttcaatgctgctatggaataagaaagagggtagtgggagtagtgcaagttaaaatgtcaaaaagttcattgttcttactgagattcagccatttttcttgcataaaagctgcaattgttgcaygtctttggttaattttcagtttttaaacagttgattttgtctattattgccagttttcccattttctcattgcttttatgagcagcattgttttatgacctattttcagagatttttactctgccattatggaagtgcaaattctccgtgaatgtctcagtgctttattaatatctcaaaatgg

SEQ ID NO: 119169 - DNA, 539 bp, Homo sapiens
caattttaccttttgaaaccctctaaccctgccctgtctaatagggacacatgtggctattgatcacttgaaatgtggccagtcccagttgagatgtgccataagagaaaatatacactggatctcgaagtctgggtccaaaaaagagagggaaataactcattgatcttggtttgttttttttggttttttttttgttttttgagatggagtctcactctgttgccaggctggagtgcagtggtgcaatctcagctcactgcaactctgagttcaagcaattcccctgcctctgcctcctgagtagctgggactacagatgcgcaccaccacgcccggctaattttttgtattttagtagagatagggtttcaccatgttggccaggatgctctcratatcctgacctcatgatccgcccacctctgcctcccaaagtgctgggattacaggcgtgagccaccgcgcccggcccattgatcatttttaatgttgaaatagtaataatatggatacattagggtaatatatttattaac

SEQ ID NO: 119170 - DNA, 502 bp, Homo sapiens
ccaaactgttcttcatagtggtggtactaatttacattcccactaacactrtacaagggttcccttttctctacatcctttctagcatttgttattgcctgtcttttggataaaagccattttaacttggatgagatagtatctaattgtagttttcacttgcatttctccaatttagtgcactttttcatatacctgtttgccattttcaagtctccttttgagtgagaaatgtctattcagatcttttgcccattatttgatcagattattagacttctttcatatagagttgtttaagctccttgtatgttctgattattagacccttgtcagatggatagtttgcaaatattttctcctattctgtgggttgtctctttactatgttgattatttcctttactgtgcagaagctttttaacttgatacgatgccacttgtccatttttgctttggttgcctgtgcttgagaggtattactcaagaaatctttaccgag

SEQ ID NO: 119171 - DNA, 618 bp, Homo sapiens
gctgataatatcttttatgtctctggtttaatgtctcatttaaggaaatcacttggcatccaaatagaaaggaaaaagtgaaattgtctgttttttgatagcctgatctttatatgtcaacaaccctaaaaactttactaaaaaaaaaaaaaacagaactaataaacaaatacagtaaggttgcaagatacaaaagcgacatacaaaaatcagtgtttctttaacaaccaactatgtgaaaaagaaattaaggaatcaatcccattcacaatagcatcaaaaasaatacttaggaataaaatttaaccaaggaggtaaaaaaattatatactgaaaactataaaacaatgataataaacagcagacaataaaaatatatggaaaattatttgtgttcatgaattagaagaattaatattgttaaaaggtccatacagcccaaggtgatctacagattcagtgcaatccctatcaaaataccaatgttatttttcacagaaatagagaaaacaattgtaagatttgtatggaaccacaaaagactgcaaatagccaaagccatcttgagcaaaaagaacaaagctagaggcacagcaccacccaacttcaaattttatt

SEQ ID NO: 119172 - DNA, 664 bp, Homo sapiens
ggacatggatccacaagatagaattctagattcctgagtcaccactggaaggaaaaacatccaggtgagtcttctgactttctattacacgtagctattaatgttccaacaggttttcacaattctcaatctctaaccaaaatgaggagagaatgtgctattaggacactaaagataaaatttaacattcattgagcactaaatatatgccaggcacttcctaagtgctcctaaacattatctcatacatttctcataagaccttgagctttataatctctatgaggaagctgaagctaggagaaatgcaataaagttccaaggttatacagcaagaagaggcagagcttgattgaaacttgaaagtttctctacagagctcacatgacaacagtgcatgggattcctattcagtacatcccaggaactatgctagccaatttggatccagagaataaatagagtgtccgacttttagcaacttacagccaagtgggaaaatgattgatatttcaaggactcaatgaactacsctaatgaaaaactaaaacaatacaagtggaataaaaagaatttccaggaaatctggtacttcatggggacattgtcactattctccaattgactgaatggaaccaactcataggcatcatcctgagacctt

SEQ ID NO: 119173 - DNA, 522 bp, Homo sapiens
catctaatgagaaaggtggtctgaaatttgttcctgactttagttgaagtcatcaatgacacagcctaggtaggtcctggaaattattcagctctgcctcagctcagtatccaaggttgctatggatgatagcagtgtcccagacttactcatttcagtattaatgcatcctgatgtggctgaattaatgccttaaatcaaatggaaaggttcatgcagaaactcaagaagaaagccattaggttttctaagataaacccagatgttttgtggaattggtttgattagctaggcctggggtcctggagggtatggtagggaccctggaaatcctatttcaagtgagaaccacttgaaatcctattaatattcaccttaaataccgtatgagacaaatgacacagatttgggccagcttctgccagccagattaaatagaatggccaagggaatggcatactcatgygaaaattcaaaaaactaagatagtatagaaataaggggtggatataatttggaggc

SEQ ID NO: 119174 - DNA, 582 bp, Homo sapiens
cagaccactaaaggccaccaccttaggaatggagagaaaacaaaattaaatcagctcttgcaaaaactgactcacagatttgaattagctcacactctaactgggttaaggtgaatggcacacaccttaactgcctgacagatgcaaaagtaatttacctggggmtgtagaaagcactgctcagagcctcaatctatccctacagttgttcatacctgatgttctatagtcaatcaaacaccgctaggcgcatcagaaaacaagaccatgtggcaaaaaacaaaagacaaatattacagaaatagactcatagaagaaacatatactaagttatcagacacacacttttaaatgtctcttattaatatgttgaagaaaatagatgaagagatgggatattttatctaaaaaatgaatcaagtggaaattctagaactgagaaattgagaaatgcgttcactaatagttgggttcacagtagaaatagactctcggacaaagatgatgagtgaactgaaaagccaaaagaaaatattcagactgaagcactggagacaaaaggatggaaaaatacagagtggg

SEQ ID NO: 119175 - DNA, 582 bp, Homo sapiens
cagaccactaaaggccaccaccttaggaatggagagaaaacaaaattaaatcagctcttgcaaaaactgactcacagatttgaattagctcacactctaactgggttaaggtgaatggcacacaccttaactgcctgacagatgcaaaagtaatttacctggggatgtagaaagcactgctcagagcctcaatctatccctacagttgttcatacctgatgttctatagtcaatcaaacaccgctaggcgcatcagaaaacaagaccatgtggcaaaaaacaaaagacaaatattacagaaatagactcatagaagaaacatatactaagttatcagacacacacttttaaatgtctcttattaatatgttgaagaaaatagatgaagagatgggatattttatctaaaaaatgaatcaagtggaaattctagaactgaraaattgagaaatgcgttcactaatagttgggttcacagtagaaatagactctcggacaaagatgatgagtgaactgaaaagccaaaagaaaatattcagactgaagcactggagacaaaaggatggaaaaatacagagtggg

SEQ ID NO: 119176 - DNA, 521 bp, Homo sapiens
ttggggacccattgtccgattttctgtatgactgtacattcacctaatagtaggcttctactttagacattagtcaaaatggttacaatttttatctattgatttttgggggaatcatttcacttttggagaggcttatttttccatcctcactgtgtgtatgtgatatatatatataatgtatataactccaatcttagaaggtagaagacctgggrcgtatgaaatctttgacagacggctctggcacaggcacagattgttgactgctgggaatatttaagctgggaataaatgaggcagaggcaaggacactgttgtgcttcattttttaatgcactattttttttctttggttttgtgactaaatttaaatgtgggaggatcttgtgggtgtatgtatattctacgtggaaaaaaagttgtttaatggtgctatgcaattttcatttcttcagccaggtacatagaaattcacatggtcttaagctgcaaacattacctcataaatggaaatgtat

SEQ ID NO: 119177 - DNA, 521 bp, Homo sapiens
ttggggacccattgtccgattttctgtatgactgtacattcacctaatagtaggcttctactttagacattagtcaaaatggttacaatttttatctattgatttttgggggaatcatttcacttttggagaggcttatttttccatcctcactgtgtgtatgtgatatatatatataatgtatataactccaatcttagaaggtagaagacctggggcgtatgaaatctttgacagacggctctggcacaggcacagattgttgactgctgggaatatttaagctggraataaatgaggcagaggcaaggacactgttgtgcttcattttttaatgcactattttttttctttggttttgtgactaaatttaaatgtgggaggatcttgtgggtgtatgtatattctacgtggaaaaaaagttgtttaatggtgctatgcaattttcatttcttcagccaggtacatagaaattcacatggtcttaagctgcaaacattacctcataaatggaaatgtat

SEQ ID NO: 119178 - DNA, 521 bp, Homo sapiens
ttggggacccattgtccgattttctgtatgactgtacattcacctaatagtaggcttctactttagacattagtcaaaatggttacaatttttatctattgatttttgggggaatcatttcacttttggagaggcttatttttccatcctcactgtgtgtatgtgatatatatatataatgtatataactccaatcttagaaggtagaagacctggggcgtatgaaatctttgacagacggctctggcacaggcacagattgttgactgctgggaatatttaagctgggartaaatgaggcagaggcaaggacactgttgtgcttcattttttaatgcactattttttttctttggttttgtgactaaatttaaatgtgggaggatcttgtgggtgtatgtatattctacgtggaaaaaaagttgtttaatggtgctatgcaattttcatttcttcagccaggtacatagaaattcacatggtcttaagctgcaaacattacctcataaatggaaatgtat

SEQ ID NO: 119179 - DNA, 541 bp, Homo sapiens
tagaatgctttcgcttgttttatctctgcaagtctctcaatatttattgcatcatccaatactctgaaaattgagagtatgtgttgggtagattaactgtttgtacaaagctcaatggaatgttaaaggaacaaagatcgtgcctacaggtgtggttgatgacataccaccaagaaaatgtagaggttaagaactcaaaattcttgggagcttgtttttgccaaggaatgtgggcgcagtatttggaactgccaagttatgcagctgagaggtctgaggttgacttctagttcagtgtgataataacctcataataaaatcccargttttatctatgagactcagaatgcttatggataaccaaatgcaagccacttaaggtttccctttacctcttaacaaagtgagctttcatccaatttgcatacctctattttaacaacgtaaagagcttcacaaaatcaattgctatattttcattctatttttactatatttaacatgctggccacgtgaggtggctcacgcctgtaatcccagt

SEQ ID NO: 119180 - DNA, 605 bp, Homo sapiens
actgctctcctaattccactccatttatgctacaagcattctaaaatctcactacagccagccaagaactctgctgctgctttttttttttttttttaaacagggtctcactctgtcacacaggctggagtgaagtggygcgatctcggctcaccacaacctccaccacccgattctcctgcctcagcctcccccgtagctaggattacagaactgtgccaccatgcccagctaatttttatgtctttagtagaggtgggatttcaccatattggccagactggtctcgaactcctgacctcagttgatccacccacctcagcccctcagagtgctgagattacaggcatgagccaccatgcccagcctgctatgttttaatttaatgtttagagagtgtatttcagtcagactgcttatatataattcctgactttaccactttgctgtgtgatcttcatctctctgtgccttagtttttgtacctatgaaatgcatgtaacacaagtatctatttcagggagtggtgaggattaatttaggtaatttatttaaagctctaacaaacacccaatagatgtcagcaatctttaccagtttgactc

SEQ ID NO: 119181 - DNA, 573 bp, Homo sapiens
taacaattgttgtgttttatttatcacgctttttgcattataacaactagaattgtcctaataaataagcaatgattatattcctttacttttgatgagtctaaaggaaattgactcatgtcaccatctgtttaagcatccataagtatgccatcaaagttatggagaattatctatccagaatgcacagatgataggcaatacgttttttattggctttctgttcttttttctcttagctagtagaaatacattcagcatcccagtggtatgttacagccaaaattcaaaagtttctctgcaggggtcrgtatagtgtgctgtagtttttagaattttatgtttccacaagaagcttaatgccccttttctgcctgctgccccagtataatgttttcttatattaccatctaggccttatgtctaaaaaagaagacataatctcatgtggcctgattactgaagtataagatgacttctcatcaggccacatgaggttatgtcttcttttttagcagagggtcagtcccttcagacttcagcatctcatgttgggggttagttgaatataga

SEQ ID NO: 119182 - DNA, 644 bp, Homo sapiens
ctgtagtttttgcttcaggggaggcctttgtttcagaaaacagaacactcttggtatatttcaaaatgggtacctttctttctcccccttccgtagtacttggacatttgtctctaattttcccagtgagaaccttgtgggcttcccccaggaattttaactctcrtgctagtcaacattcaggatgcagcaatttgtcaattacatattttaatgttccttccagtttctggcctctctggcttctgctggtggtaagctgtgattctcagtgaactcttctttctctaggttttggagcagcagtctgtcctgtgacctcagttctctgataaatctaagactagttgttgacttttagtttttctgctgtcttcttgttatgatgatggaagtgatgatttccaagctcttcacacagggtagaaattgaagatgccagtttttgtactttttaactccagaattttctctttcttttttttttccacaatctttatctctttattgatattctctactcagtgagttactgttgtcacactttccattaacttataaatataattttctttagttctttgaactgatttataatagctgtttaacatctttgtctgctaagtccaacatctaggtcctct

SEQ ID NO: 119183 - DNA, 584 bp, Homo sapiens
acctttctttctcccccttccgtagtacttggacatttgtctctaattttcccagtgagaaccttgtgggcttcccccaggaattttaactctcatgctagtcaacattcaggatgcagcaatttgtcaattacatattttaatgttccttccagtttctggcctctctggcttctgctggtggtaagctgtgattctcagtgaactcttctttctctaggttttggagcagcagtctgtcctgtgacctcagttctctgataaatctaagactagttgttgacttttagtttttctgctgtcttcttgttatgatgatggaagtgatgatttccaagctcttcacacagggtagaaattgaagatgccagtttttgtactttttaactccagaattttctctttcttttttttttycacaatctttatctctttattgatattctctactcagtgagttactgttgtcacactttccattaacttataaatataattttctttagttctttgaactgatttataatagctgtttaacatctttgtctgctaagtccaacatctaggtcctctagtagacagtt

SEQ ID NO: 119184 - DNA, 584 bp, Homo sapiens
acctttctttctcccccttccgtagtacttggacatttgtctctaattttcccagtgagaaccttgtgggcttcccccaggaattttaactctcatgctagtcaacattcaggatgcagcaatttgtcaattacatattttaatgttccttccagtttctggcctctctggcttctgctggtggtaagctgtgattctcagtgaactcttctttctctaggttttggagcagcagtctgtcctgtgacctcagttctctgataaatctaagactagttgttgacttttagtttttctgctgtcttcttgttatgatgatggaagtgatgatttccaagctcttcacacagggtagaaattgaagatgccagtttttgtactttttaactccagaattttctctttcttttttttttccacaatctttatctctttattgatattctctactcagtgagttactgttgtcrcactttccattaacttataaatataattttctttagttctttgaactgatttataatagctgtttaacatctttgtctgctaagtccaacatctaggtcctctagtagacagtt

SEQ ID NO: 119185 - DNA, 613 bp, Homo sapiens
gtttaattcacaaacaaggttttatagccattaaactggaaccagtccattacttatacacctttgtggttttttcaaaacactttacctttaaacactttgaacctaatggatcctggatgaaggtgcaggtagagtcatttcccgtgatgaaatacctgcattagtcacgagycattatttagtaaagacaggaaataaacaaagatgcatatgaaacaaaattattctgtgacctccacctgaggctttttgctttgtgacaaaatcaaataatcgacttatttaaaaattatgtattattaactttctaattgaggcatctggtagacatttcgtgaagattttttgctatttaattaattaagggtggatgtggtcctgtggtttgtaactattcttaaagatctctgtcatcttcttttaaagctgagatgcccaccttaagttgggttccctcagaagcaaacaggcctgaggcaagaatttgaatgcaaatagttttttcaatggctaccccaagaagaaccggaaggaaagccaggaagcaagatgggaaaaggaaaaaaaaagaaattcaccaaattttgatgagcaagttacaactttagga

SEQ ID NO: 119186 - DNA, 563 bp, Homo sapiens
tgaatcctaattggatcctgaactaacacaacaacagcaaagctatcaaaagatactcaggctttttgggaatgctttatacatgggatagtgtcttakatgataccgtggaattaatgttcatcttgttcttgggatatgcatgttgaaatatttaggagtggagtaccataatgtttacaacttacactcaaatggtgtgaaagagaaatgttaacattaggtgactgtaggtgacatatatcttagagttcactatattattctttcactgtttctatgcatttgaaaattttcagaacaaaaaagaggaggaaaaaaaagctttcctcaaagcaggaagtgaccatgtgacccagctcttgagcagaacagcacagtacttatgtgggatggggcacaaggctgagctctgcctttttctagactggcccctcaagcaattcgtggaatatctctgcgcctctgttttctgaaggatgtgagaatgctgccaacattacctggagtatttgtccagagagcttggtactaagggatctcattcagcaacagctgttgtt

SEQ ID NO: 119187 - DNA, 612 bp, Homo sapiens
taagtagccaacaaatagggtttaatggaggtaataatgaaggtgattaagatgataaaattaaatagtgaatataaagtgcttagcatttaataaatttattgtaagatttcaaagcacatggttttacctacactgctataaagctgyttacaatagtcaaagctaatagaagctctcgtcagagctaatagaagccttgtgtatgtaattatttaaggattctgtaaatatacataataaggaaggaatgagaaaatctttagaggaaatattcaagtacgtttgatttccagcaaatccagatagacagttttggcaacaaccaagtcataattttaagtcttgttataggagctagaattttattcaagggacaactgatttgattagattagttgctgtgcactgcatgtttgcatcaacaaatgcacatgttgaaactcttacaatagaatggcattagaagggggacctttggaaagtaatttggttttgatgaggatggagttccacaatggggttagcatcctaataagaagagtaggagactagagccctcttctctcagccatgtgaagatacaacaagaacacctgcaaaccagtaaga

SEQ ID NO: 119188 - DNA, 612 bp, Homo sapiens
taagtagccaacaaatagggtttaatggaggtaataatgaaggtgattaagatgataaaattaaatagtgaatataaagtgcttagcatttaataaatttattgtaagatttcaaagcacatggttttacctacactgctataaagctgtttrcaatagtcaaagctaatagaagctctcgtcagagctaatagaagccttgtgtatgtaattatttaaggattctgtaaatatacataataaggaaggaatgagaaaatctttagaggaaatattcaagtacgtttgatttccagcaaatccagatagacagttttggcaacaaccaagtcataattttaagtcttgttataggagctagaattttattcaagggacaactgatttgattagattagttgctgtgcactgcatgtttgcatcaacaaatgcacatgttgaaactcttacaatagaatggcattagaagggggacctttggaaagtaatttggttttgatgaggatggagttccacaatggggttagcatcctaataagaagagtaggagactagagccctcttctctcagccatgtgaagatacaacaagaacacctgcaaaccagtaaga

SEQ ID NO: 119189 - DNA, 425 bp, Homo sapiens
tttaaggattctgtaaatatacataataaggaaggaatgagaaaatctttagaggaaatattcaagtacgtttgatttccagcaaatccagatagacagttttggcaacaaccaagtcataattttaagtcttgttataggagctagaattttattcaagggacaactgatttgattagattagttgctgtgcactgcatgtttgcatcaacaaatgcacawgttgaaactcttacaatagaatggcattagaagggggacctttggaaagtaatttggttttgatgaggatggagttccacaatggggttagcatcctaataagaagagtaggagactagagccctcttctctcagccatgtgaagatacaacaagaacacctgcaaaccagtaagatggccttcaccagacactggctctgct

SEQ ID NO: 119190 - DNA, 425 bp, Homo sapiens
tttaaggattctgtaaatatacataataaggaaggaatgagaaaatctttagaggaaatattcaagtacgtttgatttccagcaaatccagatagacagttttggcaacaaccaagtcataattttaagtcttgttataggagctagaattttattcaagggacaactgatttgattagattagttgctgtgcactgcatgtttgcatcaacaaatgcacatgttgaaactcttacaatagaatggcattagaaggrggacctttggaaagtaatttggttttgatgaggatggagttccacaatggggttagcatcctaataagaagagtaggagactagagccctcttctctcagccatgtgaagatacaacaagaacacctgcaaaccagtaagatggccttcaccagacactggctctgct

SEQ ID NO: 119191 - DNA, 411 bp, Homo sapiens
ttaaggattctgtaaatatacataataaggaaggaatgagaaaatctttagaggaaatattcaagtacgtttgatttccagcaaatccagatagacagttttggcaacaaccaagtcataattttaagtcttgttataggagctagaattttattcaagggacaactgatttgattagattagttgctgtgcactgcatgtttgcatcaacaaatgcacatgttgaaactcttacaatagaatggcattagaagggggacctttggraagtaatttggttttgatgaggatggagttccacaatggggttagcatcctaataagaagagtaggagactagagccctcttctctcagccatgtgaagatacaacaagaacacctgcaaaccagtaagatggccttcaccaga

SEQ ID NO: 119192 - DNA, 403 bp, Homo sapiens
gtagcagtgttctggaatcctatrtgagggacacacattcagatcccagcagcagtgttctggaatcctatttgagggacaatcattcagatcctcatagcagtgttctggattctgggtcagggacaaacgttcataccctcgtgtcattattctggaatcctgtgtgaggaaaaaacattcagacaacagcaggattgttgtggaatgcccggtgaggaacaaacattcagaccctcgtagcagtgttctggaatcctatgtgactgacaaacatttagacaacagcagcagtgttctggaatcctatgtgagggacaatcattcaaacaacagcgggagtgttctggaatcctatgtttaggaaaatcattcagaccctcgtcgcagtgtactggaattc

SEQ ID NO: 119193 - DNA, 413 bp, Homo sapiens
gaattctgtgtgattgacaaagtttcagaacctcgtagcagtgttctggaatcctatatgagggacacacattcagatcccagcagcagtgttctggaatcctatttgagggacaatcattcagatcctcatagcagtgttctggattctgggtcagggacaaacgttcataccctcgtgtcattattctggaatcctgtgtgaggaaaaaacattcagacaacagcaggattgttgtggaatgcccggtgaggaacaaacattcagaccctcgtagcagtgttctggaatcctatgtgactgacaaacatttagacaacagcagcagtgttctggaatcctatgtgagggacaatcattcaaacaacagcgggagtgttctkgaatcctatgtttaggaaaatcattcagac

SEQ ID NO: 119194 - DNA, 401 bp, Homo sapiens
tagcagtgttctggaatcctatatgagggacacacattcagatcccagcagcagtgttctggaatcctatttgagggacaatcattcagatcctcatagcagtgttctggattctgggtcagggacaaacgttcataccctcgtgtcattattctggaatcctgtgtgaggaaaaaacattcagacaacagcaggattgttgtggaatgcccggtgaggaacaaacattcagaccctcgtagcagtgttctggaatcctatgtgactgacaaacatttagacaacagcagcagtgttctggaatcctatgtgagggacaatcattcaaacaacagcgggagtgttctggaatcctatgtttmggaaaatcattcagaccctcgtcgcagtgtactggaatt

SEQ ID NO: 119195 - DNA, 547 bp, Homo sapiens
gaattctatgtgaggaacaaactctcagaatactgcaggagtgttttggaatcctatgtgagggacaaacattcagaccctcgtagcagtgttctggaatcccatgtgattgacattcagaccacagcaggagtgttctggaatcccctgtgaggayccaacattcagacctctgtagcagtgttctggaatcctaagtgagagacaaacatttagaccccagcagcaatgttctggaatcctatgtgagggacaaacattcagaccctcgaagcagtgttctggaatccaatgtgtgggataaacattcagacaatagtagcagtgttctgtaatccaatgtgagggacacacattcaggccctcgtcggaatgctttgaattctatgtgagggacaaacactgagacaatcttagtactattcaggaatcctctgtgaggtacaaatttttagaccacagcagaagtgttctgcaatcctatttgagggacaaacattcaaacaacagagggaatcttctggaatcctatgttacggaccaacat

SEQ ID NO: 119196 - DNA, 547 bp, Homo sapiens
gaattctatgtgaggaacaaactctcagaatactgcaggagtgttttggaatcctatgtgagggacaaacattcagaccctcgtagcagtgttctggaatcccatgtgattgacattcagaccacagcaggagtgttctggaatcccctgtgaggacccaacattcagacctctgtagcagtgttctggaatcctaagtgagagacaaacatttagaccccagcagcaatgttctggaatcctatgtgagggacaaacattcagaccctcgaagcagtgttctggaatccaatgtgtgggataaacattcagacaatagtagcagtgttctgtaatccaatgtgagggacamacattcaggccctcgtcggaatgctttgaattctatgtgagggacaaacactgagacaatcttagtactattcaggaatcctctgtgaggtacaaatttttagaccacagcagaagtgttctgcaatcctatttgagggacaaacattcaaacaacagagggaatcttctggaatcctatgttacggaccaacat

SEQ ID NO: 119197 - DNA, 610 bp, Homo sapiens
tttcattttatttttaggaaggacactaagcttcaaaaatttaaatttgaatgaaagagggtcttaaaaatctattgcaaaaaggactcagctgaataatctgtggcacasgtttaaatcgccttggaccacaccgccatgttccagggctcaccaggagccatccagatgagagacctcccagcccttgtgacttgactaagaaattaaatccatgttatcagcacgtttttaactggatgtgatataagtttaacatattttgtaatcattttatttataaatattttgtctaaatgttatgatattccaggttttccaaaagaatcaaccaaaaagaagttataaataaacgttatatttggtacgggagttaagctaaccaaatttataacccagatttaaatacacaagaaaatcagtttttaaagttttgtttaatagaaaccagtgtaatacatcaaacattaaacaactaaaaatgtatatgaatatttattttcacacacaaggtccctcagacattgattcttaaattcaaaacaccaaagtcattatatgtaccttttcatgttttctaattgtgaagaaaataaattttacttaaact

SEQ ID NO: 119198 - DNA, 535 bp, Homo sapiens
tttgtttcaggagaaaacggaaagattttaagatggaccaatgaaattaccactgagtgtctttaatggaaatctcagccttgtctagaataacctgggttatctgtttctatggggtctctgtgccttttgttttctttgttatttgcaattctgttagttgtagattactgatagtaatgcaaatattcttatctatagacaggcaaatgattgattttggtggaastataattaatttccctttttccaccttccatcaagaagtcagttttgaacctatcaagcaaatttatttcagtgttccttagtgcctagatatgtgtggcacttaattttccataaaactcagtataacatcttactggctccctcattaaataaatgagttaaacaaaaatcttagacaagtgttcattttatatttgcaagtcataatttacccaattttaagcaattttcctttatcattcctaaaaatacagattcctatgtcccatgatagacctattgaatcaaaatctcaggcctaagg

SEQ ID NO: 119199 - DNA, 618 bp, Homo sapiens
cactgacttttgtatgttgattttgtatcctgcatctttactgaatttgtttattagttataacaattatttggaagattttttagtttttaaaaaaagtacataaagtcatgtcatctgcaaatagagacaacttcttccttactaatttggatggcttttatttctttcctttgcctaacggctcattaraacttccagtactatgttgaataaaagtggtgaaaataagcatgtttgtcttgttccaggtattaaaagaaaaggtttaatttttccccattgaatattctgttagctatggcctttattgtgttaaggtacatttcttttgtacctaatttattcacagttttttaatcattaaaatatgttaaattttgtcaagtgctttttctgaatatattgaaatgatataattgtgtctttcattctgttaatgtggtgtattacatttattgatttgcatatgttgaatcatccttgcatttctgggatgaatcccacttgatcatggtgaaggatctttttaagatactatttaatttgttttactggtaatttgttgagcatttttgcatctttgttcctcagggatgttggcctgtagcttttttt

SEQ ID NO: 119200 - DNA, 606 bp, Homo sapiens
ttgtaagaaacagaaatgtccttaattgatgttcttagttgaaaggtggcgaggacaagagatttgggaaatcttatggaaacagactgtaaaaagtatagttggggctgatggaggatgggaacaggaaagctctaaggaatagtctttctgcctttggagtagggtggtcagtcactgcctctactgagggtctgatttcattcatctatctttgtggcttctctgatttcattcttttaaatttatattttattttaatactaaaatattgtatattttagtgcagacctatttatctaatttatacatatataaatatacatatatttgggggacatatactaaaattatttttaaaactattgggatgcacaattaawcgagattggagactagttgcttaaaatgattgtgaatatggagaaaactcctggcatctataatacagtattattttcatgcctgtattttacagcaaattggctctccaaaatactgtgggacttcaccagattcttgattacatgtcactgatgtctactctggtttttttcctcattcttaaaatttaattatgtttactaagtaattcataattcataa

SEQ ID NO: 119201 - DNA, 613 bp, Homo sapiens
atgagcaatgttaattagcctaatttctccaatttcctatcaggtttttactttttcatctttctattttctctgtatgtgcctgaagacagacatacacagaaacaggagaaaaactacatatgacttacacagacaatgtatgacatgcttgaattttctgcttggtcttaaattctctcgtgttaaaaaaaacagtcattttattttaggacaaaaatttaccatagtccataatttgaatcaacctttagataaattctgaattagacaaaattattcttttttcataaggacagaaattctctggcacattttatatacagaattatatgttaactacagttcttattcttagtaaccttaaattttagtgaaaatcactaggaagtaagaaatcctgaactatcagatattastattttatatttgagaacattctacagtttttaaaaatacttttgtctatatcaaaaccttttttaaatgaaaatgaccagacatccaaaataatttggatgactcatcatcaaaataattaagattttaaattacacaaaaagttcacctacaagcatttatcctatttacatgtactcaattctttaatttt

SEQ ID NO: 119202 - DNA, 463 bp, Homo sapiens
ttacatcaattcaagccaatatcccatgacacacacacacacatgcacacatgcatgcacatataaatctgggcctgcaacatgtgatagcttttgtcatgtatcatatgacctgtttgtcaacagcttagttggtcacaaatggtgtccaggattattcaagggacatatgggggtcatacattcagactaatcctgggaatagtttattggtgatggcttccaaatgagcatctaaagtctgtgaaaagattaaatggaaatcctccaaccaaagcaggaaatgaaratttatgggaattattttgtactccaactacccaaagagcattctattagcaagttattgccaggctaatgcaaaagctgttatctatgacagcagcagctcttagaactttagcaagagcaactgtttacttcatcagaatagccaagaaaattctcgttatatttttgttga

SEQ ID NO: 119203 - DNA, 471 bp, Homo sapiens
ttttaattataaattcaatttccttagtagatacaggattatttgcaattactgtatcttcttgatcaattttgggaaggtgcgtttttaaaagagtacttctatttcttctaaattgtcaaattttgacaaaaaatcattcaaaggagctttttatttctgtatttttaatactggtagtacgtaccatgatagtctctctttgattcccagtgtgagttttgtgttttctctatttatatttttcttcattggtattgctaggaatttatcaattttattatcttttcaaaaatataaatttcatcattattgttatttttctattgkacctttgcttttttttttttttttgagacggagtctcgctctatcgcccaggctggagtgcagtggcgtgatctcagctcactgcaagctctgcctcccgggttcatgccattctcctgcctcagcctcccgagtagttag

SEQ ID NO: 119204 - DNA, 502 bp, Homo sapiens
cactgtgcctggcctttagagtcctcttaagagggatcttgcaactatgaccagtccattttcatgctgctcataaagacatacccaagatgggggcaatttataaaagaaaaaggcttaattggacttacagttccatgtggctggggaagcctcacaatcatggcagaaggcaaggaggagcaagtcacgtcttacatggatggcagcrggcaaagagagagaacttgtacaggggaactcctctttttaaaaccatcaaatctcatgagacttactcactatcatgagaacagcatgggaaagacttgcccccatgattcaattacctcccactgggtccctcccacaacacatgataattcaagatgagatttgggtgggaacaaaggtaaactgtatcagtgacaaaaaacttggggtggcacaaggaaagaaactcatttacatacagatccccattccctaaattacttttatgcttttattaacaatgctacta

SEQ ID NO: 119205 - DNA, 502 bp, Homo sapiens
cactgtgcctggcctttagagtcctcttaagagggatcttgcaactatgaccagtccattttcatgctgctcataaagacatacccaagatgggggcaatttataaaagaaaaaggcttaattggacttacagttccatgtggctggggaagcctcacaatcatggcagaaggcaaggaggagcaagtcacgtcttacatggatggcagcgggcaaagagagagaacttgtacaggggaactcctctttttaaaaccatcaaatctcrtgagacttactcactatcatgagaacagcatgggaaagacttgcccccatgattcaattacctcccactgggtccctcccacaacacatgataattcaagatgagatttgggtgggaacaaaggtaaactgtatcagtgacaaaaaacttggggtggcacaaggaaagaaactcatttacatacagatccccattccctaaattacttttatgcttttattaacaatgctacta

SEQ ID NO: 119206 - DNA, 502 bp, Homo sapiens
cactgtgcctggcctttagagtcctcttaagagggatcttgcaactatgaccagtccattttcatgctgctcataaagacatacccaagatgggggcaatttataaaagaaaaaggcttaattggacttacagttccatgtggctggggaagcctcacaatcatggcagaaggcaaggaggagcaagtcacgtcttacatggatggcagcgggcaaagagagagaacttgtacaggggaactcctctttttaaaaccatcaaatctcatgagacttactcactatcatgagaacagcatgggaaagacttgcccccatgattcaattacctcccactgggtccctcccacaacacatgataattcaagatgagatttgggtgggaacaaaggtaaactgtatcagtgacaaaaaacttggggtggcacarggaaagaaactcatttacatacagatccccattccctaaattacttttatgcttttattaacaatgctacta

SEQ ID NO: 119207 - DNA, 502 bp, Homo sapiens
cactgtgcctggcctttagagtcctcttaagagggatcttgcaactatgaccagtccattttcatgctgctcataaagacatacccaagatgggggcaatttataaaagaaaaaggcttaattggacttacagttccatgtggctggggaagcctcacaatcatggcagaaggcaaggaggagcaagtcacgtcttacatggatggcagcgggcaaagagagagaacttgtacaggggaactcctctttttaaaaccatcaaatctcatgagacttactcactatcatgagaacagcatgggaaagacttgcccccatgattcaattacctcccactgggtccctcccacaacacatgataattcaagatgagatttgggtgggaacaaaggtaaactgtatcagtgacaaaaaacttggggtggcacaaggaaagaaactcatttacatacagatccccattccctaaattacttytatgcttttattaacaatgctacta

SEQ ID NO: 119208 - DNA, 570 bp, Homo sapiens
ggtttgttacatatgtatacatgtgccatgttggtgtgctgcacccattgatgcatcatttacattaggtatatctcctagtgagcacactctttatgactctgcgccctccctgtttagggtggactactggaattccaaaaacatctctgagcaaaactgctctttggtagatctccttaatcaattatgatggtgctgctgtgtgatgtttggattgttgcaggcgtaaatagggcctaatgaggctggtaatagggcaggatgagcagggtggtcatgtcagatgggggctcagttggtggggtgtggagtgggctgcctgtttccagtagcccaggagagcatgggtgtcgttggcttccgtggccgtcagttttgggctggttactactcccccagcacaggctgtaaggagaagacatggttgtcatggttctgatgggtgctagagcctgtaataatargtctaatcaatcttgctgacacttcttgtttcagctgttgctgtgacaaattggttctttgctgaagttcaacccaagtatcagtggtgtgtgtgtgtatgtg

SEQ ID NO: 119209 - DNA, 553 bp, Homo sapiens
aattcagcacttatttctgataaaaattcctggaatattaggaatagattaatgtttcctcaaactaataaaagcatatgcatcaaattaacagtcattattatactgtgagtcagatttaatgaaaaattattgtaataggctaaaatcaaattttaaatacattaaaatttagacaatagagaaaakaagtaaattatggcatgaccatacaatgttaacttttgtagtcactgaatatcatttttttattgtggtaaaatatacataacctaatgtgccatcaccactattatctagatccagaatattttaatcactccaaaaggaaaccccatacccattaagcagttactcctttcccccccaccccttatctactggcagcaattaatctactttttgtctatggatttgcctattctggacatttcttatgtagggtaatcacacaatgtgtgacctttggtgtctggcttctttcacttaacataatgtttttaagttttatccatatagtagcatgtgtcagtactcccttcccttttatggc

SEQ ID NO: 119210 - DNA, 553 bp, Homo sapiens
aattcagcacttatttctgataaaaattcctggaatattaggaatagattaatgtttcctcaaactaataaaagcatatgcatcaaattaacagtcattattatactgtgagtcagatttaatgaaaaattattgtaataggctaaaatcaaattttaaatacattaaaatttagacaatagagaaaagaagtaaattatggcatgaccatacaatgttaacttttgtagtcaytgaatatcatttttttattgtggtaaaatatacataacctaatgtgccatcaccactattatctagatccagaatattttaatcactccaaaaggaaaccccatacccattaagcagttactcctttcccccccaccccttatctactggcagcaattaatctactttttgtctatggatttgcctattctggacatttcttatgtagggtaatcacacaatgtgtgacctttggtgtctggcttctttcacttaacataatgtttttaagttttatccatatagtagcatgtgtcagtactcccttcccttttatggc

SEQ ID NO: 119211 - DNA, 553 bp, Homo sapiens
aattcagcacttatttctgataaaaattcctggaatattaggaatagattaatgtttcctcaaactaataaaagcatatgcatcaaattaacagtcattattatactgtgagtcagatttaatgaaaaattattgtaataggctaaaatcaaattttaaatacattaaaatttagacaatagagaaaagaagtaaattatggcatgaccatacaatgttaacttttgtagtcactgaatatcatttttttattgtggtaaaatatacataacctaatgtgccatcaccacyattatctagatccagaatattttaatcactccaaaaggaaaccccatacccattaagcagttactcctttcccccccaccccttatctactggcagcaattaatctactttttgtctatggatttgcctattctggacatttcttatgtagggtaatcacacaatgtgtgacctttggtgtctggcttctttcacttaacataatgtttttaagttttatccatatagtagcatgtgtcagtactcccttcccttttatggc

SEQ ID NO: 119212 - DNA, 579 bp, Homo sapiens
aatgaaggaaagggggaaaaagggactaagggaggcttatggaagctgccacattgtactttcacttgcatcctattggccagaatttagttacatggctgaatcctacctgcagggaaggctgggaaacacactttttattctaagcagttgtgtgctccactaaacatttcactacttagaaagggkcacagaatggctctgaggggaaaccagcagtctgtcactctcatggatcatggagtagaaacaagtggctaccagaagtgtcaaagctggagtatttacttttgtgtatgagttgtttcttccttgggattgattgtctgaattaactgtgcccccattctcttctctaacttgcagggctgctcttgctagggaccacctgtggccattgtcttcatactttgacagactatccatctgtgttgggtacaacctgtggcaacaggatccctaattcctttaggattatagcatgctgcctctttagagtctttaggaagcttgaaatgtgccctttcactgatttcccccccaaaaatgctgcaaactacggatcgttatatggggctc

SEQ ID NO: 119213 - DNA, 649 bp, Homo sapiens
ttcaaatcttggctttgctagtttttagctgcgacgctttgggaaagttaacaaactcctttctctgtctgtttctttatttgtaaaacagggataataatagtaccttagtcagagggtggtcataagggttaaataaatagctctccagaaagcacttagaatgctgcctggcacagagtctgcacacagtggaaaactgtgtgtttgtgacttattatcrtcattcactcatatgttatactgtctacctcgatatttactaatgtttagcatgtgctaagacatggggacccaaaaccaaagagttaggtgggaaagatttttatcacctatttatgtaggcaccaggctgggtgcttcataagtgtattttattaagttcttagaaggattcagtagggtagatgttattctctctggttacacgtaaatagtgtctcttttctcaaaaagctcatagagtatggaaaacattacaaatgataacagttgtttggtaattttataacacactcatatacattattaactcatgggaacttcatgtttttgtcatacctatgaagcagctgaagacactgatgtgcagagaagtgaagcatcgggaggtcacacagctagtgtgaacagcctgcactaggaccaa

SEQ ID NO: 119214 - DNA, 586 bp, Homo sapiens
ttgtgatatctgcattcaactcacagaattaaacctttgttttgattcagcagtttggaaacactcttttgtaaaatctgtaaagggatatttcagagacaactaggcctatagtaaaaaacctaatatctcacaataaaatctagaaagaaggtatctgaaactgctttgtgatgggtggattcagctcaaagagttaaacttttcttttgattcaggaggtttcaaacactctttttggggaacctgagaagagacatttcrgaccacaataaggattttagtgaaaaactgaatatcgctgataaaaaccaaacaaaagttatctgtgaaactgctttatgatgtctgcattcacctcacagagccaaatctttcttttgactcaccagttttgaaacacactttttctaggatctgcaaagagacattttggagtgcagtgaggcctatagtgaaaaacagaatagctcgtgataaaaactagaaagaagctgtctgtgaaactgctttgtaatatctgcatttgtctcacaaagttaaaccttcttttgattcagcagtttggaaaaataaatttttgtag

SEQ ID NO: 119215 - DNA, 626 bp, Homo sapiens
ttacttttaattcagcagtttgaaaaaacactttttgtataatctgcatagggacattttggagggtatggaggcctatagtgtaaaaaacaaatatcatgtgataaaaacttgaaagaagttacctgtgaaactgctttgtgatatgtggattcagctcacagacgtaatcttttcttttgattcagcactttgsaaacactctttttgtagaatctgtgaagagacatttcagagtgcagtgagctctacagtgtgaagccaaatagccagaaataaaaactagaaagaagctatctgtgtaactactttgtgatatgtggattcagctcccagagttacactgttctttagattcagcagtttggaaaaacttttttcacagaatctgcaaacagacatttttaagttcaataaggtcaacagtgaaaaacggattgtcctgtgataaaaattagagataatttatctgtgaatctgctttgggaagtgtgcattcggctcacacatttaaatttttttttcattcagcagtttggaaacactctttttataggatctgcaaagggacatttcagagggcatcatggcctatagggaaaatggaataacccacgataaaaaac

SEQ ID NO: 119216 - DNA, 626 bp, Homo sapiens
ttacttttaattcagcagtttgaaaaaacactttttgtataatctgcatagggacattttggagggtatggaggcctatagtgtaaaaaacaaatatcatgtgataaaaacttgaaagaagttacctgtgaaactgctttgtgatatgtggattcagctcacagacgtaatcttttcttttgattcagcactttggaaacactctttttgtagaatctgtgaagagacatttcagagtgcagtgagctctacagtgtgaagccaaatagccagaaataaaaactagaaagaagctatctgtgtaactactttgtgatatgtggattcagctcccagagttacactgttctttagattcagcagtttggaaaaacttttttcacagaatctgcraacagacatttttaagttcaataaggtcaacagtgaaaaacggattgtcctgtgataaaaattagagataatttatctgtgaatctgctttgggaagtgtgcattcggctcacacatttaaatttttttttcattcagcagtttggaaacactctttttataggatctgcaaagggacatttcagagggcatcatggcctatagggaaaatggaataacccacgataaaaaac

SEQ ID NO: 119217 - DNA, 427 bp, Homo sapiens
tagtgaaaaactgaatatcccatgataaaacctcaaaagaagctatttgtgaaactgctttttcatgtgttgattaagcttgcagcattaaacttttcttttgattcagcactttggaaacgctctttatgtagtatctgcaaagggacgtttcagagcccactacaccctacagtgaaaaacagaatatgccatgataaaaataaaagaacctatctttgatactactttgtgatcactgcattcagctctcaaagttaacctttctttctattacacagattggaaaaaatgtttttgtagaatctgctaagggtcatttcaaagcccactggggcccataggggaaaaattgaatatcttgctataaaatctagaagaaastacctgtgaaactgctttgtgatttgtggattcaacttacaga

SEQ ID NO: 119218 - DNA, 625 bp, Homo sapiens
catctgtgaatctgttttgcaatgtgtagattcatctcacagagttaaatttttattttaattcagcaggttgaaacactctttttgaagaatctgtgaagggatatttgggagcccattgaagcctatggggaaaaaccaaatatcttcagacaaaaactagacaaaagctacctgtgaaactgcattgcgatttgtggatttatctcacagattttgacattgtttttgattcagcaggttggaaacacttttattggagaaactgtgaggggacatttgagagcccaatgtggcctatggggaaaaaccgagtatctccagataaaaactagaaagaaactgtccatgtaatcactttgtgatttgtggattcaattatcagagttaaacccttcttttaattcagcagkttggaaacactcttttttgagaatctgcaaaagaacatttgggagcccattgtggcctatgggaaaaactcaatatctccagataaaaactagaaagaagctatctgtgaatctgctttgtgatgtgtggattcatctcacagagccaaacctttctcttgtttcagcaggttggaaacactgtatttggagattgtgaaaagacatttggg

SEQ ID NO: 119219 - DNA, 462 bp, Homo sapiens
aggccaattgggaataaccaaatatctccagatgaaaacaagaaaaatattctctgtgtaactgctttgtgatgtgtggattcacctcacagatttaaaactttcttttgattcagcaggttggaaacctctttttggagaatctgcaaagggacatttaagaggcctttgagttctatggggaaaaccaaatatcaacagataaaayctagaaagaagccctctgtgaaactcctttgtttgtgaggattcatctcaaaaagacttaaaactttcttttgattcaggaggttggaaaccctctttttggagaatctgcaaagaaacatttgggagcccattgttgcctatctggaaatactgaatatcttctgaaaaaaactagaaagaagctttctttgaaactgctttgcgatgtgtggattcatcacaaagagttaaacctttcttttgattcagcag

SEQ ID NO: 119220 - DNA, 462 bp, Homo sapiens
aggccaattgggaataaccaaatatctccagatgaaaacaagaaaaatattctctgtgtaactgctttgtgatgtgtggattcacctcacagatttaaaactttcttttgattcagcaggttggaaacctctttttggagaatctgcaaagggacatttaagaggcctttgagttctatggggaaaaccaaatatcaacagataaaatctagaaagaagscctctgtgaaactcctttgtttgtgaggattcatctcaaaaagacttaaaactttcttttgattcaggaggttggaaaccctctttttggagaatctgcaaagaaacatttgggagcccattgttgcctatctggaaatactgaatatcttctgaaaaaaactagaaagaagctttctttgaaactgctttgcgatgtgtggattcatcacaaagagttaaacctttcttttgattcagcag

SEQ ID NO: 119221 - DNA, 462 bp, Homo sapiens
aggccaattgggaataaccaaatatctccagatgaaaacaagaaaaatattctctgtgtaactgctttgtgatgtgtggattcacctcacagatttaaaactttcttttgattcagcaggttggaaacctctttttggagaatctgcaaagggacatttaagaggcctttgagttctatggggaaaaccaaatatcaacagataaaatctagaaagaagccctctgtgaaactcctttgtttgtgaggattcatctcaaaaagacttaaaactttcttttgattcaggaggttggaaaccctctttttggagaatctgcaaakaaacatttgggagcccattgttgcctatctggaaatactgaatatcttctgaaaaaaactagaaagaagctttctttgaaactgctttgcgatgtgtggattcatcacaaagagttaaacctttcttttgattcagcag

SEQ ID NO: 119222 - DNA, 619 bp, Homo sapiens
tctcttgttccctgaacattgcttttatcctgttcttttttcaagttggccagatttcatattgttcaaacacacatgctctacaatttgtrcagttaatgcaattgtcacagggtcctgaggtgacatacatcctcctcagcttatgagatgacaggattaagagattaaagtaaagacaggcataggaaatcacaagggtattgattggggaagtgataagtgtccatgaagtcttcacaacttatgcttagagattgcaataaagacaggcataagaaatcataaaaatattaatttggggaactaataaatgtccgtgaaatcttcacaatccacattcttctgccatggcttcagctggtccctccatttggtccctgacatcctgcaacagttgcttttcctatttaaaaaaaaaaaaaaaaaaaaggtaatttaaaagggattgcattgaatctgtagcaccctaggaagtatgaacatcttcacaatattaagtcttacaacccttgaacatgagcatgctcaaaagtgagttgtttaatttccatatatgttgacatttttgttttcttgttaccaatttctagttttattctattttgatcagaaataa

SEQ ID NO: 119223 - DNA, 572 bp, Homo sapiens
agggaagtatagtggaaagatgttcaatctaatatatggtcaaaagtttctattttaacstgggaaagaggctatgcttgtgtttccccaggtgcacatcaatctccgtttggattcctgctagacacctgaaattgtgtcctggagatgcatgcgacaacgagacagagaaatttgctgaaaaaacaccacagaaaaaaacaactaacacatccaactgtcaaaaaaaaaaaaaaaataaccacgctaactcctttacaacagacaatccagtcagccatcctgaacaactcatctccagagatccaggtctggctcgacctctgcctcctcctgatgacactgatccttctaccctctgtcactccacagactattaaaaactgtacaaattgggcctatattccatttcatcctcttatttgagccatgacatggatggacgctcctatcgaagtttctgttaatgatagtatttggatgcctggttctgtagatgatcattgtcctgcccaactttcagaagaaggaacccctttcaatatcattttaggttttaggtatctactttt

SEQ ID NO: 119224 - DNA, 572 bp, Homo sapiens
agggaagtatagtggaaagatgttcaatctaatatatggtcaaaagtttctattttaacctgggaaagaggctatgcttgtgtttccccaggtgcacatcaatctccgtttggattcctgctagacacctgaaattgtgtcctggagatgcatgcgacaacgagacagagaaatttgctgaaaaaacaccacagaaaaaaacaactaacacatccaactgtcaaaaaaaaaaaaawaataaccacgctaactcctttacaacagacaatccagtcagccatcctgaacaactcatctccagagatccaggtctggctcgacctctgcctcctcctgatgacactgatccttctaccctctgtcactccacagactattaaaaactgtacaaattgggcctatattccatttcatcctcttatttgagccatgacatggatggacgctcctatcgaagtttctgttaatgatagtatttggatgcctggttctgtagatgatcattgtcctgcccaactttcagaagaaggaacccctttcaatatcattttaggttttaggtatctactttt

SEQ ID NO: 119225 - DNA, 572 bp, Homo sapiens
agggaagtatagtggaaagatgttcaatctaatatatggtcaaaagtttctattttaacctgggaaagaggctatgcttgtgtttccccaggtgcacatcaatctccgtttggattcctgctagacacctgaaattgtgtcctggagatgcatgcgacaacgagacagagaaatttgctgaaaaaacaccacagaaaaaaacaactaacacatccaactgtcaaaaaaaaaaaaaaaataaccacgctaactcctttacaacagacaatccagtcagccatcctgaacaactcrtctccagagatccaggtctggctcgacctctgcctcctcctgatgacactgatccttctaccctctgtcactccacagactattaaaaactgtacaaattgggcctatattccatttcatcctcttatttgagccatgacatggatggacgctcctatcgaagtttctgttaatgatagtatttggatgcctggttctgtagatgatcattgtcctgcccaactttcagaagaaggaacccctttcaatatcattttaggttttaggtatctactttt

SEQ ID NO: 119226 - DNA, 603 bp, Homo sapiens
aaacacctaatttgtgtaataatgatatatttgatagacatggagttactaggagctgaacacatgtttcttaaggtaaatgtatattctatgtaaatccctcccaaatgttgatccccaaagcatgtgcagcttttgtaaacacttttatgcgttgcattaagttaacaatggatgtcaagtgttgcaataatctaatacattttttctgaatatcaacaccaggtttttacctgtttctcaaatgcacaattgccaccctctctttccctggcatttttttaggccactggcaaggggttgctcagcttgccaaaatgataggattaaatgactggttttgagattccagtttgcctcttaccagccatgtggctttacttatttatttattctttctaggcagctgctcacaatgagacaacattttatcttcttgtgtaaaattggaataatgactcccttaatccttgagttttcctaacgattaagtcaactcacacctgtaagctcctgctttagcacagtrcttggcagagaatgtgcccttaagtagctgcatgtattttcttctgtagataacagatagtaaaatattcaaag

SEQ ID NO: 119227 - DNA, 547 bp, Homo sapiens
ggaccctaggttaataatattgtgttgtagtcacgatttttgctaatactatgaattataggtgctcttgtaacaaaaagtaggggtggttaaccatgtgagatgatggatatgttcatttgcttcactatagtagtcattttactatgtgtaagagtatcaaaacatcatgctgtacatctgaaatgtacactaaataaattgaaataaaatcctgaataaataaataaataaataaaatcagtgagcagctgtttaatgggttcaactccccatctccttggacaaggggtaggatcayaataccaccaagcatggcccacagtgagctatggtgagagcaggcacatgggagtctctagagacaggggcctgacaaggccaggatgggcccaaaacccagacccaaacatggactccctctgggctctgtcttagagcttttgtctctgagtgaaccaaagttctgccgtcaaaattctggccttcattaatcccaatgccaacttggttaggtgtaaagtccctgtttacatacttgtagaaa

SEQ ID NO: 119228 - DNA, 548 bp, Homo sapiens
aggtgctgacaattgaagaatgaataaggcagggagttttattgagtgataaaatagctttcagcagagaggggacatgggggtggtccccctacccaaaggcagaaaagtccctctaatatggttgagtctggggcttttatgggctcagaataggggaggggcaggccataggtagtattgraaaaggcaacaattgattggttaaaaggcattattcagaaagaatcagtcagataaaggaggggaaacaggaacagaagttcttactctgggtcacaggtttcactgggaccagcagtcgggtttttcagccttcaggctgtttttggcttgaaggtggggtttcacaggtacctgtccctatctgcctaggcatttggctgcctgctatcattgtcaatgtctgtagagatagataaaaatccttgccatttttaatatttatttatgccacaatatcttcattaaaatcagtacatattacactattaaagtacaaaaataatcaaacatcagaagaaaacaatttattctggaataaatcc

SEQ ID NO: 119229 - DNA, 548 bp, Homo sapiens
aggtgctgacaattgaagaatgaataaggcagggagttttattgagtgataaaatagctttcagcagagaggggacatgggggtggtccccctacccaaaggcagaaaagtccctctaatatggttgagtctggggcttttatgggctcagaataggggaggggcaggccataggtagtattgaaaaaggcaacaattgattggttaaaaggcattattcagaaagaatcagtcagataaaggaggggaaacaggaacagaagttcttactctgggtcacaggtttcactgggaccagcagtcgggtttttcagccttcaggctgtttttggcttgaaggtggggtttcacaggtacctgtccctatctgcctaggcatttggctgcctgctrtcattgtcaatgtctgtagagatagataaaaatccttgccatttttaatatttatttatgccacaatatcttcattaaaatcagtacatattacactattaaagtacaaaaataatcaaacatcagaagaaaacaatttattctggaataaatcc

SEQ ID NO: 119230 - DNA, 595 bp, Homo sapiens
tacccttggtaaccactattctttatttctataattttgtcatttctattatgttacataatagtatcatatagtatgtaacctttgggtattgagtattttttctcagcatcattctctggagattcattcaggttgttttatgtatcaataatctgtgcctttttattgctaaatagtatttcatggtgtgaatgtactgactctttaatcgttcacccacctaaagacatctgagttttttccagttttggtctgctataaattactagccaaaataattcatagtttataaataagcttctataaactttacatacaggtttcatgtaaatgtaagtcattgtttgtctagggtaagtatccaggagtacaattgctaggttgtgtagtagttgcatgttgaaattttwaagaaataacaaaactgtttccaaaatggctgtattatttcacattcccaccatgagtgcatgagtgactcagtttctatgcatccttaccaggttttggtgtagtaactattttttatactagcgattctgtttggtatggagtaataacttgttgtggtttttaatttgcatttccccat

SEQ ID NO: 119231 - DNA, 541 bp, Homo sapiens
gtaggagaatgtcttgaacccaggaggcagaggttgccgtgagccgagattgtgccactgcactccagcctgggcgacagagtgagactccatcttaaaaaaaggaaaaaaaaatttactcagaaaaacaccttataagtaagtaatcaataaaatgcaaagtggaataagaggtcccttgctgcctgtcaagctagcagtggttagaaagaacagtggtcctcacttacagggctgtagagaatgtacatcattaagaggtgcgatgctgtcaactggcaaaaagtataataaacaaagcatgggctctatgcaaataaattcaaaacccaggatgacaaagataacttgctaaattaytacaattgattccccaaaagaccaaaacactaactgttcccataaacaccaagaaattggaaatatgctcaaacagctgtaggcaaagtcttcaaaaacttctacgtatgaagatttccaaagctgtttaaattttttctgagcacagagggaaaaaagggggaacttccaaattgtcttt

SEQ ID NO: 119232 - DNA, 534 bp, Homo sapiens
aaagtaaaagcataaatatactgttaagaaatatgtatgatcatgtaactgatcccaagacaataatagtagtaataatggcagctgtattaggtatcaaatgctgtgtaacaaactattccagaacatagtggcttctaccagcaacyacttactcagtgggtgatttgggttggaaattcaggctgggcttggctgggtggctctcttcgctgagctcattcatggtcgtgcattgatggcctcacatggttagtatggcttgcctgtaagctggggcgggcaggggtgatgggctgcattgtcaggatggctgcctgtaaactggggtgagcaggggtgatgggctttgtagtctcatcccccagcaggctgggcttcttcacatggagacagcagagtttcaggagttgtaagaggcaggctcctgtgtgtaggtgacttcacgtttgccacagctccattggtcagagcaaatcacacagtcaagctgagctaccccaggtggagacggatttcctctttccatgggag

SEQ ID NO: 119233 - DNA, 583 bp, Homo sapiens
aaatgttccatgtatgcttgagaagaatgtgtattctgctgctgttgggttgagtgttctatagatgtcaagttgattggtttatagtgttgttcaagtcttctgtttccttgctgttattctatttgttctattcattattgaaattgaggtatttaattctccaactattattgttgaattccctattttgtatttcaattctgtcaattttttgcttcaggtatttttaggactctgttggtaggtgtggtatatttataattgcagtattttcttaatgacttgaccwttttattagtgtatattgtgctgctttgtttttagtagcaatttttatcttaaagtgtatttcatctgatattagtgtatacactccagctctattttggtttctgttcacatgaaatatccttttctttccttttactttcaacctgtttttgtcttttaatctaaagtgagtctcttgtagacagcatacagttccacaagtttctaatttattctgccaatctctgcctttctcttagagagtttagttcatttacacaatatgtaattaccaattaggaagaattta

SEQ ID NO: 119234 - DNA, 561 bp, Homo sapiens
cccctcccccttcatctaaatgggttgcaacatcttccaaagttggaaaaccatccgagtcaaaacatatctactgcttgtttcctggtaaaaggggcactttgagagcagagccaccagaattaaggtatgttgaactatcagtatttttgaatttcttgagtaattgatactgaactgattcctttggatatggcacttacttcatagaggcttttcttgggatgggattctgygctgtgaggatagagaatgtctgagccttaggtcaagtttttgtttttgttttttcctggtggcctttcattgtacatacagtaacaatgaaaatagttcattgggagatgcaggcaagagatcacagattagtgtgatctgccttggaccaggtagtgcaatgttgaatgtgatatccaggcaagagctaaatataacaaaataaagtctgattgataatttgttctgaagttgcgtcaacattcatgtagttaaactagagtttatggacaactgaacataatcatctagggttacactgtccaatatggtagctactaacca

SEQ ID NO: 119235 - DNA, 372 bp, Homo sapiens
tagaacagagactctggagataggcagcatcagtatgattactagctctgtcagctactagctgtgtggtgttgggcaagtcacctagggcaagtcacctaacctctctgtgttttagtttccttgttggcaaattagaaatcatagaattcacrtaggattcatgaattcatgtaaggattgaatgtgttaatatatcataaaatactttgaatagtcttcggcatatactgagtgctgtataagtattgggtctttctatcagctatattgccttcagtatggtcttgtactttgtagatgatcaatatattttgttgaatatataaatacagtaataaatatagagcaggtaggctagctgatattcca

SEQ ID NO: 119236 - DNA, 534 bp, Homo sapiens
gagttctgatgtccaagggcagaagaaaggtgtgccaactccagaagacagagagggaatccacctttcctcctctttttttttttttttttttttttttaaatccaggccctcagccaactggatggtttccacattgacgtggatctttctttgttcactgattcaaatgccaatctcttctggaaacacccccacacatatccagaaataatggtttaccagctgagtatccttcagtccagctgagctgacacctgacattaactaccacaaaatcccttatcagatacatgatttgcaaacattttatcccaatctgcgggttttttcactttcttgatggtgytttttgaagaataaaagtttttaatttatgaagtctatttttcccttttgtcatttatgtgtttggttttgtaactaagaagccattgtggaacccaatgtcatgaagatggacttcaatgttttcttctaagtgttttatagttatagatctatgatcattttaggttaattttttatgtacag

SEQ ID NO: 119237 - DNA, 545 bp, Homo sapiens
tacctgagcgttgcacacatgtaacaaacctgcacattctgcacatgtctcccaaaacttaaagtaaaataaaattaaaaaagaaattaaaaacactagaaattattagtacataataacatttcacacataaattagatttatatgtagtaaggaagttgtagtaacagagctatgaagcatgcttagtttcaggaaaatagtttttctcaattaaaaaatttgtttatggtatctttacataaaaatacttgatagtgtgtaatcaaaaccattaatattcctccttatgatatyagttttcttaaaaagtttttatcatttctaaggtcacaaaaatatttttctataattgtatcagctttatagttttaattttcacatttatgtctttaatttctcttcagtatgcctctctatggagtataaagtgtatattcaatagtattttctccatatggccaggaagttaagaaaaaacacatcttttcaacagtgggatacgtgatctctcttgttcaaatttataatcaaaggcttgataa

SEQ ID NO: 119238 - DNA, 629 bp, Homo sapiens
tctagtggttaccaaactttgttcctcaaacactcccaaaataattttgtaaaattgtatatcatctcatatacttgtgaattgacataaacattcatcataagtttaaaccgttgcaaaatgtaattttcagcatattgtaaattttgccattttaaattgtctgttgtattactcttaatagtatccattagagtctgaataataccgagattcaatgctcgtcattatctatttaaaaatatttgatatatctcttgcacaactctaaaaattttgtgccatttttttctttttaatttctattttcattctcatggatttcactcttttattatatatcatatgctcaaaagtatttaattatctaataatgcattttagttataaaatggttataatttaattttaaacatttcckataaggttttaagtgttaattatttttctagaatgagttgtcaataaaatttttattattgaacacttgaataaatctatataactacatttcaaattctgaaaaaattgttactgacaaaagaagtacaactttattggcaatgtatagcttaatgtaacagacgggcttttaaaattttaatccctctacctttgggagaatgtta

SEQ ID NO: 119239 - DNA, 633 bp, Homo sapiens
tctgcacctgagccaaagaaacctgaggaaaatccagcttcygtaagtgttgaaggctgctcccaatttttcattctaagaaaaattcttagaattctaagtattcttactaagaattaaaaattcttagtattctaaactttttgccgttggacttctttccatttggaatacaaagtgtttggaaataagacattggtctttactgaaatagcgaaagaagtttagctttttcctggtttctgtcttcctttgttctcatcccttctgcaaggtgtagaggtggtatgagactatagtaagatcgcatgtgcctctgaccctcttccctagctcctctccaatggacaatgctgatgagcaagcaagtgggtgtcatctgactgtcatcccccattgccaaaggatcagtatcctgtgtcttgggttttgatgtgataattcagggccttcattatcctgtcactctcgttgtgttacagaagttcagttctgcaagcaagtatgctgctctctctgttgatggtgaagatgaaaatgagggagaagattatgccgaatagacctctacatcctgtgcttttctcctagtttctctccaccctggaacattcgagagcaaatcaaaacctc

SEQ ID NO: 119240 - DNA, 633 bp, Homo sapiens
tctgcacctgagccaaagaaacctgaggaaaatccagcttccgtaagtgttgaaggctgctcccaatttttcattctaagaaaaattcttagaattctaagtattcttactaagaattaaaaattcttagtattctaaactttttgccgttggacttctttccatttggaatacaaagtgtttggaaataagacattggtctttactgaaatagcgaaagaagtttagctttttcctggtttctgtcttcctttgttctcatccsttctgcaaggtgtagaggtggtatgagactatagtaagatcgcatgtgcctctgaccctcttccctagctcctctccaatggacaatgctgatgagcaagcaagtgggtgtcatctgactgtcatcccccattgccaaaggatcagtatcctgtgtcttgggttttgatgtgataattcagggccttcattatcctgtcactctcgttgtgttacagaagttcagttctgcaagcaagtatgctgctctctctgttgatggtgaagatgaaaatgagggagaagattatgccgaatagacctctacatcctgtgcttttctcctagtttctctccaccctggaacattcgagagcaaatcaaaacctc

SEQ ID NO: 119241 - DNA, 633 bp, Homo sapiens
tctgcacctgagccaaagaaacctgaggaaaatccagcttccgtaagtgttgaaggctgctcccaatttttcattctaagaaaaattcttagaattctaagtattcttactaagaattaaaaattcttagtattctaaactttttgccgttggacttctttccatttggaatacaaagtgtttggaaataagacattggtctttactgaaatagcgaaagaagtttagctttttcctggtttctgtcttcctttgttctcatcccttctgcaaggtgtagaggtggtatgagactatagtaagatcgcatgtgcctctgaccctcttccctagctcctctccartggacaatgctgatgagcaagcaagtgggtgtcatctgactgtcatcccccattgccaaaggatcagtatcctgtgtcttgggttttgatgtgataattcagggccttcattatcctgtcactctcgttgtgttacagaagttcagttctgcaagcaagtatgctgctctctctgttgatggtgaagatgaaaatgagggagaagattatgccgaatagacctctacatcctgtgcttttctcctagtttctctccaccctggaacattcgagagcaaatcaaaacctc

SEQ ID NO: 119242 - DNA, 598 bp, Homo sapiens
aataggaaaggcttgttgaaagaggtttatgatggctgtgtacagaaagggtagagaggaaggccctatgtcccaaaaggtactctaaagtcagagaaaacctgggctgtaatatggccacatcctcatttaaatttaaaaagacgtgtgtggccaggtgccatggctcacagctgtaatcccagcactttgggaggccaaggcgggcasatcatgtggtcaggagttctagaccagcctggctaatagggtgaaaccccgtctctactaaaaatacaaaaattagctaggcatggtggtgtacacctgtagtcccagctactcaggaggctgaggcagaagaatcgcttgaacccgggaagtggaggttgcagtggaccgggatcgcaccactgcactccggcctgggtgacagagcgagactcttgtctcaatggttgctcacacctgtaatcccagcactttgggaggatgaggcaggagaatcgcttgagcctagaagtttgagactagtcagggcaacatggcaagaccctgtctctacaaaaaaatagaaaaattatccaggtatggtggtgtatgcccatagttgcagcta

SEQ ID NO: 119243 - DNA, 501 bp, Homo sapiens
aatgccatcagcctttcttttgatgaagttagacattcacttctgatcacacacatttacagaatattaaatttcaatcaagttggagataaatattatcaggttttattaattatttccaagctgataccccaggtactctgaaaagactgttatttcttcctcctttgcttattaactttaaatcatagtttcttcacttacatctgtctctttttcatttgtacatgctgccaagtattaattatcatttttaaagattggaaaaagaggaagttttcttgcacagaatgatgacccacrcttgaaaagtcatatagatacaaacacacggcacaagaaataaaaaactataccttatgaaagtcctcagccaaaccataagcatagaaagaagacatttaataccaagtatactatgaaaaagagccaatgcacagctttcagaactttaattattgcctgtgtcaggaaaaaataactgtttccagcacactgtgt

SEQ ID NO: 119244 - DNA, 552 bp, Homo sapiens
tatctcattgtagttttgatttgcatttctctttttaaaaaaaaaagcaataacaatactttttaaaataagacatacctaataaaagaaatggtttttttgaattatgggaaaaaagaatgatagttttatccatttctaaatgcagatggttttatattaatttgactagaggaagcaaaatcagctagggcttcatttctgtagtctctgttggagaaatccatctttagtcttaaaaggatagacaaatattttaccagaaaataggacccaatatgcgcccattctttcacccattcatccaaaaaaaaaagataggctcatacaacacactaggtacttggcagagttaggaaagtgacatgaayatggcatagaagataaaaaatgtgccaaggatctaaagttgaacaaaatcaagtggcatctgtttcctcaagaaggtcagttatttagcataagagacacattaattcaattgtcagtcaaacaaatgtaaaattatatttgtcatgtgttgcgaagaagtatgtggtgctatgacagcat

SEQ ID NO: 119245 - DNA, 552 bp, Homo sapiens
tatctcattgtagttttgatttgcatttctctttttaaaaaaaaaagcaataacaatactttttaaaataagacatacctaataaaagaaatggtttttttgaattatgggaaaaaagaatgatagttttatccatttctaaatgcagatggttttatattaatttgactagaggaagcaaaatcagctagggcttcatttctgtagtctctgttggagaaatccatctttagtcttaaaaggatagacaaatattttaccagaaaataggacccaatatgcgcccattctttcacccattcatccaaaaaaaaaagataggctcatacaacacactaggtacttggcagagttaggaaagtgacatgaatatggcatagaagataaaaaatgtgccaaggatctaaagttgaacraaatcaagtggcatctgtttcctcaagaaggtcagttatttagcataagagacacattaattcaattgtcagtcaaacaaatgtaaaattatatttgtcatgtgttgcgaagaagtatgtggtgctatgacagcat

SEQ ID NO: 119246 - DNA, 450 bp, Homo sapiens
tctggaggttgtctattcactctgatgatagtttattttgctgtgcagaagctctttagtttaattcgatcccatttgtaaattttctttttgttgcaattactttagctgttaattattcaagaccaaaaggcataaaaagagacatatgtccacccaagtgataaggcaatttgggaaactacatttcctagcatgccctgccccttgaaagttaaaaatcttgactggcacagagcaccctggggcacctgtggctagcaccatttagaagtaaatggtgtagggctgtgttctgatgtgaaggcttcctgtttccatgggacacttaaccagacacaggacacaacaccagaggtgaaatttcagtggatattaagcctggggtagagcttctctccccccacaattctagcttycaaagatgtggagttggtggagctgtccatt

SEQ ID NO: 119247 - DNA, 608 bp, Homo sapiens
tttgaccctcaaactcctaaacacagtctgtcgaatctttatctcaaaattatctcacattcctttgctctagagggactgaggccctttagcaccaaagccacagctctctcttcttccatcccaatcatttatttcctcctgctttcatcttagggggagagaatcccttcatctcagaatctgtaccatcatgcgtcacttttggtcaaaaggaaataattagtttgatcctgattcaaacaaactatatgtaaaaagacatctggagataactgaggaaaattaaatgatgtctggatactgtattacagtgagaaatggacgttaacttgttaggtctgataatagcattgtggttatgaaaaccaaggatcttattagttaagaggtgcatatgaaattatkacgagtgaaaaggcacacagcatctggaatttgttccaaatgctttggcgactttttgttccaatgtagggcatagatgaaacaagctttaggaaatgttggtaattgtcaaaactgtgtgatgggtagctagaaaataatagattctctctaatcttgtgtatatttgaaaatatcattctaaaaattagaaaagccaa

SEQ ID NO: 119248 - DNA, 580 bp, Homo sapiens
aaaatatatgagtcctataatcactatattttctgatatgtttacatacattttacacttcgtaaggctctttggatgatttacttattaggctgagttttactcctatatccgttttcttcctatcatgatcattttgctttccagctgcctaagaaaagcaggtgcccatgcaaaatttgattaaaaagccattgccawctataaggctgttggtttcctacattactctagttatgtgaaataagataataactgggaccatattttttatgggatcattaagaattctttctaatgaacaggtccccatttgtttgcaggagaacctgaagacttgaggtgagtaagcctagctgaggcctgataaactgttttcagcatttctagggtcagcctatatggaccaaagccaaatcgtcaagacccatttactttcccccaaattttgtgagtggtgtgtgggcagatttgggggaaagaagcaaattatattagcctcctggatctggataagcaaacgaaaacaagccaatcataggtcactaaattcactacattctcctcttcttccctcccc

SEQ ID NO: 119249 - DNA, 571 bp, Homo sapiens
cacacacatatgtgcacacacacgtgcccacacacacaagcaaacccaaatggaaatgttacatcatcaacttccagagtcatctggttactattttgttgattgctttacaatattgaaaagtatgtagaaatcagtttggagtatcatatttaccactcttgatgaatgactggaaaaggaacctggaaggtaacaaacacaagccctatcattctttttgtactctgggtttactccatcccccaaatcaatttgctttagtcaaaaattgaagacaatttgtgctcacccttattataaatagcaaamaatataatgaattttgctgaacattactgggctatatcacacttctctagcttaggaaagggaatcatgagtaggaaagtgagaaagagaggaattgtgagcctcttttaatcaacaactaaaagtggatacacaggggaaaagcctccactacagaaataccagagttttttctcaaattgtgttctgccaatagggattttacagttctaagctaatggactacccccacaactgaccccctctacaatttactcac

SEQ ID NO: 119250 - DNA, 571 bp, Homo sapiens
cacacacatatgtgcacacacacgtgcccacacacacaagcaaacccaaatggaaatgttacatcatcaacttccagagtcatctggttactattttgttgattgctttacaatattgaaaagtatgtagaaatcagtttggagtatcatatttaccactcttgatgaatgactggaaaaggaacctggaaggtaacaaacacaagccctatcattctttttgtactctgggtttactccatcccccaaatcaatttgctttagtcaaaaattgaagacaatttgtgctcacccttattataaatagcaaacwatataatgaattttgctgaacattactgggctatatcacacttctctagcttaggaaagggaatcatgagtaggaaagtgagaaagagaggaattgtgagcctcttttaatcaacaactaaaagtggatacacaggggaaaagcctccactacagaaataccagagttttttctcaaattgtgttctgccaatagggattttacagttctaagctaatggactacccccacaactgaccccctctacaatttactcac

SEQ ID NO: 119251 - DNA, 617 bp, Homo sapiens
ggttggtatcacaccgattggatggaattttgtgtggcaggagacaaaactggcttacttgttggaatactgtgatttcaggagctctagggaagcccattgctcaagaaaaacccttccccagcttctgtttaatttctgaaatactccagagtatcctccctcaagcgggtagcttttagccctgttgaattcttcatgaggggattgatagttctttttttttaatttttttaattttgacagagcctcgctctgtcgcccagtctggagtgcagtggcaygatctcggcttactacaagctccacctcctgggttcacgccattctcctacctcagtctcccgagtagctgggactacaggtgcccgccaccacacccggctaattttttttttgtatttttagtagagacggggttttgccatggtggccaggctggtcttgaactcctgacctcagatgatccacccgcctcagcctcccaaagtgctgggattacaggcgtgagccactgtgcccaccccaataattctttatatttgttggttaataaagtgcctaagagcattgagaaaaattgagaagaatgacaacagaggtgacggcaccagaga

SEQ ID NO: 119252 - DNA, 584 bp, Homo sapiens
ccagacagaacattgtcacaatggtctgggaggaaaatgttgggattgtgaatcaggacaaagacagtggagatagargacaggtcaattttaaaagactttttggggctgggcgcagtggctcatgcctgtaatcccaccactctgggaggcctaggtgagtgggttatctgagctcagaagtttgagaccagcctgggcaatatgacaaaaccccatctctgctaaaaaatacaaaatattagccgggcaatggtggcacgtgcctgtaatcccagccactggggaagctgaggcatgagaatcccttgagccagggaggcagaggctgcagtgagccgagatggcgccattgcattgcagcctgggagacagagcaagactctgtctccaaaaacaaaacaaaacaaaacaaagacttttcagagatataaacgaaagatgcttgggaggagaacaagagtggaattaagaatacgtttgcaataaagagtggggtaaaagtcatgttgtggagtaggaaagaggtggaaatagaagcctctctcaagcagtagtgaatgaaggctctttcctcatccctg

SEQ ID NO: 119253 - DNA, 576 bp, Homo sapiens
tctgaaatgatctctgttgactccatgtctcacatctgggtcatgctgatgcaagaagtgggttctctggtcttggacggctctgcccctgtggctctgcagggtgtagcctccctcccagctgctttcatgtgctggtgttraatgtctggcttttccaggctcatggtgcaagctgtcagtggatctaccattctggggtctggagaatactggccctcttctcacagttccactagttgttgcccaagtagagactctgtgtgagggctgtgaccccacatttcccttccataatgccctagcagaggttctctatgagagccctgcccctgtagcaaacttctgcttggatatccaggtgtttccatacatcctctgaaatctaggcagagatttcctaacctcaattcttgacttctgtgccccaacaggctcaaaaccacgtggaaacttccaagccttggggcttgtaccctctgaagccacagcctgaactgtaccttgcccccttttagtcaaggggtggagcaactgggaggcagggcaccaagtccctaggctacatgcagcacg

SEQ ID NO: 119254 - DNA, 570 bp, Homo sapiens
ttccaggctcatggtgcaagctgtcagtggatctaccattctggggtctggagaatactggccctcttctcacagttccactagttgttgcccaagtagagactctgtgtgagggctgtgaccccacatttcccttccataatgccctagcagaggttctctatgagagccctgcccctgtagcaaacttctgcttggatatccaggtgtttccatacatcctctgaaatctaggcagagatttcctaacctcaattcttgacttctgtgccccaacaggctcaaaaccacgtggaaacttccaagccttggggcttgtaccctctgaagccacagcctgaactgtaccttgcccccttttagtcaaggggtggagcaactgggaggcagggcaccaagtccctaggctacatgcagcayggggaacttggcctggcccacgaaaccattttttcctactaggcctgtaggaaacgtaatgggaggggctgctgcaaagacctctgacatgccctgtagacatttaccccttgtctttgggattaacatttggctcatcattacttatgc

SEQ ID NO: 119255 - DNA, 570 bp, Homo sapiens
ttccaggctcatggtgcaagctgtcagtggatctaccattctggggtctggagaatactggccctcttctcacagttccactagttgttgcccaagtagagactctgtgtgagggctgtgaccccacatttcccttccataatgccctagcagaggttctctatgagagccctgcccctgtagcaaacttctgcttggatatccaggtgtttccatacatcctctgaaatctaggcagagatttcctaacctcaattcttgacttctgtgccccaacaggctcaaaaccacgtggaaacttccaagccttggggcttgtaccctctgaagccacagcctgaactgtaccttgcccccttttagtcaaggggtggagcaactgggaggcagggcaccaagtccctaggctacatgcagcacggggaacttggcctggcccacgaaaccattttttcctactaggcctgtaggaaaygtaatgggaggggctgctgcaaagacctctgacatgccctgtagacatttaccccttgtctttgggattaacatttggctcatcattacttatgc

SEQ ID NO: 119256 - DNA, 258 bp, Homo sapiens
gcctgtgataggaggggttgccttaaaggtctctgacatgccttgttgacatttatcccattgtcccattgtcttggtgataaacattcagctcctgattacttatgcaaatttatggagmtggcttgaatttattctctaaaatgggtttttccttttctattgcattaccaggctgcaaattttccaaatttttatgctctccttccattcaaatgctttgctgcttagaaatttcttctgctgaatatcctaaac

SEQ ID NO: 119257 - DNA, 523 bp, Homo sapiens
aaggaattaaacaatataaataaagaagtaaaatggttcagaacaaaaagtaaggcaagtagacaatasacaaagaattgcatatgcattattggattttctgaaaaagaaagataaaacaatgacacaattaatatttaaacctatactctaaaaacacttaaaaattagtaaaaacctgagtatatatattaaaacattctactgggtgcctaggaaaattaagcacaacaatcaatttcaagatattttctagtacaactgttagatttttaagataaagaaacaattttcaaggctcaggcacagtgatttgaaaactcacgaacacaaaattgcttctgtcatcaggcttttcaaaaaccacagaaaaacaaggaacacgcaaatgcatcaacactgtttcttgaaactcaatgaaagaaggtataaatattttatatccagtgcacttattattcaagtatcaagtttataaaacaatcactttatggatgtaaaaatgtaagaaatgattctgtat

SEQ ID NO: 119258 - DNA, 658 bp, Homo sapiens
tttagacagagaaatcaaaatagctatgttgaggaatctcaaagaaattcaagataacacacagagagaattcagaattctaacagaaaaatttaacaaaaagaataaaataattaaaagaatcaagcagaaattctgcagctgaaaaatgtaattggactattgaagaatatttcagtatctctaacttttagaactgatcaagcagaagaaagtattactgagctttaagacaggctatttgaaaatacacatcaaagagacaaaaggaaaaataataataataaagcatgcctcaaatatctagaaaatagcttgaaaagaggaataataagagctttggccttaaagaggaggtagacaggaataggggtagaaagtttattcaaaagataacatcagagaacttcccaaaattagagaaagatatcaatattcaagtaaagaaagttatagaataccaaacagatttaatctaaagaaaactacctcagggtattaaataatcaaactcccaaaaatgaaggataaagaaagsttccttaaagcagcaagatgaaataaacacaaaacatataatagagctccagtatgtctagtccagactttcagtgaaaacattatgggccagcagacagtgttatgatatattaaaact

SEQ ID NO: 119259 - DNA, 553 bp, Homo sapiens
ccttggagtctattatttgtaatatttttaaaggaagcctttccccaagtaacttctagtttaaaatataattggcacaaaaaaggacatcttgctgagaaaaaaaaaaaaaacctcatcttgaaaggcatgtgttactcaattcatatagcactccctaaatttggaaaaaataatagagctataaaatctatttagtgggtgccaaaagagagggacagggaggatggctgttattacaaaggggtagcataaagaagatctttgtggtgatgaggtagttctatattctgattgctstgttggtaaaatgaacttatacatgtgataggtgacacggaactacataaacattttaaactaatggcatgtttctggtttgacattattttatctgtatatgaatcgtaaccaatggcgaaaattatataaagcatgaataaaacttctttgcatgatctttacaatctcctatatgcctagaactatttcaaaattaaatggttaaaagtgataaaaagactatcttttaaaaataattataatacagaac

SEQ ID NO: 119260 - DNA, 553 bp, Homo sapiens
ccttggagtctattatttgtaatatttttaaaggaagcctttccccaagtaacttctagtttaaaatataattggcacaaaaaaggacatcttgctgagaaaaaaaaaaaaaacctcatcttgaaaggcatgtgttactcaattcatatagcactccctaaatttggaaaaaataatagagctataaaatctatttagtgggtgccaaaagagagggacagggaggatggctgttattacaaaggggtagcataaagaagatctttgtggtgatgaggtagttctatattctgattgctctgttggtaaaatgaacttatacatgtgataggtgacacggaactacataaacattttaaactaatggcatgtttctggtttgacattattttatctgtatatgaatcgtaaccaatggsgaaaattatataaagcatgaataaaacttctttgcatgatctttacaatctcctatatgcctagaactatttcaaaattaaatggttaaaagtgataaaaagactatcttttaaaaataattataatacagaac

SEQ ID NO: 119261 - DNA, 257 bp, Homo sapiens
tgtcaaaataaataataatctgactgtgtctttgaaactgatagtcattattaggtgtagggaattttacgttgatgctaagtgttcttagcatctgagatagtgttctatctcatctaagtgagayagatgttattaatgcaaaagaatctgactgacaaaatatttgaagttcaatgtctactcctttttaatatcatgtaacacaaaaaattaaaataccgaaatacattaggagtgttgattaaaaaaatgtg

SEQ ID NO: 119262 - DNA, 656 bp, Homo sapiens
gtataatactgatattaacacacatcaaagtggaggcatgtactttattcaatatattaaagctctgaagaaaggaacaaagaaatgcaagagcaaagaaaattttgtagagtagcatttgaatagcagcctatttacacttgagataaacttatttttgttgtttaataaggtactcacttaaactataatatatgtacataaatgaatgcacattgtatttacatattatgttactgatatatttgcttcccccaaatcacaaactacagcagtccaacactattagagcattggtctcagtgacctaatttatccatccaagtgcatacacatacatgtatttactcacacaacatatgcaaacattcacattcagacacatgaacacacaaaattgatgtttgttaaccaattgtatgcataaaaagtgtaaaataacttttttaaacaattttatacaggctgtttatatcacagcratattctattagataattgtaactatttataaataaatgtttggctttgtatggcatcgttaatggactaatgtcatatatttgtgtgcatgtgtctttatgcatgtatgcctttgtgacatgtgcatgcatgtgtgttagtatatttctaaaaaaggcagttgaaacagcatt

SEQ ID NO: 119263 - DNA, 487 bp, Homo sapiens
aatcatttttagaatattttcatattataaatttttcaccccaaaaagaaatatggtagcaattagcatatttctgatgcaattctgacttcatccctactttctatcactataaatctgctttttctggacactttacatacaagggatcatataatatgtgatctgttgtgactggtttctctcacttagcatgtttgcaaggttcatccatttttgcagcatgtatcagtacttcatttttttttaaagtaagttctttaacgttttatttttttttaattatattttaacttctagggtacatgtcacaatgtgcaggtttgttacatatgtatacatgtgccatgttggtgtgctgcacacattaactcgtcatttwcattaggtatatctcctaatgctatccctcccccctgcccccaccccatgacaggccccagtgtgtgatgttccccaccctgtgtccaagtcttctcattgttca

SEQ ID NO: 119264 - DNA, 597 bp, Homo sapiens
aacattttattataaacacttagtagccatcatagagtgaagaaattgaagatagagtgaaatcaaatcaaaggtgaaattatcaacgtgacttacacgaagttcacatatttgcattaacccaagtatatggaaaatcagtatctgctgaccttgagtttggaaatgaccaataatgtatatttaaaaactgaggacacggagaaaaatatttgcaataataaacatattcctattataaaaaaaggaaagaaaaagaaaaaaaaaacagtgtcttctatggaaaaggtgctttcccatagaaaagcacttattgtataaatcgttattttaattttaaaagtgaaattgcttrttaattattcatcccttcatcaaacaattttgagtacctccaatgggctaggcaatattttttatttttatttttaatttttgagacagggtcttgctctgtcacccaggttgaagtgcagtgtcgtgatcatagctcagtaatgcatttcttccacagctgaataaaactgcattttcatgtacaaattgcatttcatatccagacagcaaccattactagcagcctttctgtctcagctt

SEQ ID NO: 119265 - DNA, 597 bp, Homo sapiens
aacattttattataaacacttagtagccatcatagagtgaagaaattgaagatagagtgaaatcaaatcaaaggtgaaattatcaacgtgacttacacgaagttcacatatttgcattaacccaagtatatggaaaatcagtatctgctgaccttgagtttggaaatgaccaataatgtatatttaaaaactgaggacacggagaaaaatatttgcaataataaacatattcctattataaaaaaaggaaagaaaaagaaaaaaaaaacagtgtcttctatggaaaaggtgctttcccatagaaaagcacttattgtataaatcgttattttaattttaaaagtgaaattgcttattaattattcatcccttcatcaaacaattttgagtacctccaatgggctaggcaatattttttatttttatttttaatttttgagacagggtcttgctctgtcacccaggttgaagtgcagtgtcgtgatcatagctcagtaatgcatttcttccacagctgaataaaaytgcattttcatgtacaaattgcatttcatatccagacagcaaccattactagcagcctttctgtctcagctt

SEQ ID NO: 119266 - DNA, 543 bp, Homo sapiens
aaagtataaacacaagcttctgatttcagaaaatacatctaagcattgaaaaagcccaccatggttgttattgcactgaaatggcctccagccataccctgaaatgcaaaaatatatgtttattgctaactattataaagmcagcaaaataagattttatagtttaactgtacagctaatacccaaatatatttttgtaaaaattcaaacaacagggaagatgtacaaaagaaagggcccttttgacaacctccttctcccctcacttgcactttccttcccagaattagcctcttttaagggtgttttattcctctagatttctgtgcaattgcaaaacaactatatccttatacaaataggataaaaagtagcttttatttaaatatcactgaaatactttggatatttgttcccctccaaatctcatgttgacatgtaatccccagtgttggaggtggggactagtgggagatgtctggatcatgggggtgggtccctcatgaatggcttatcaccttagtgatgagtgagttcacgcaa

SEQ ID NO: 119267 - DNA, 543 bp, Homo sapiens
aaagtataaacacaagcttctgatttcagaaaatacatctaagcattgaaaaagcccaccatggttgttattgcactgaaatggcctccagccataccctgaaatgcaaaaatatatgtttattgctaactattataaagccagcaaaataagattttatagtttaactgtacagctaatacccaaatatatttttgtaaaaattcaaacaacagggaagatgtacaaaagaaagggcccttttgacaacctccttctcccctcacttgcactttccttcccagaattagcctcttttaagggtgttttattcctctagatttctgtgcaattgcaaaacaactatatccttatacaaataggataaaaagtagcttttatttaaatatcactgaaatactttggatrtttgttcccctccaaatctcatgttgacatgtaatccccagtgttggaggtggggactagtgggagatgtctggatcatgggggtgggtccctcatgaatggcttatcaccttagtgatgagtgagttcacgcaa

SEQ ID NO: 119268 - DNA, 571 bp, Homo sapiens
caatgcaagaacagtcgaatatcgttgcttgctcatggcactggctccaagtgcatggggctggatagcggtttcgtactgatgtgtaaggtctttttattaatgctaaacgcgtcctttttttgctataaatgttgctaaattttctcccagctatgagacttctaaattttgtttctcttttgtcatctaaaagttttcactttttagggagtcaaggctattaatcttttttatacaatgacttctggggttcatattttgtttttgaaatctttctccttcgtatgattataaaaacgcttgcctatatttttgtgtratggctttgttctttatttatttttgctgtggtgagagataaggatcatgtcataaatgcagtatgtctcaatgaccattctgaccttccagacttccatagaaccagggtttagggatgcgagtctcattctaccaatcagaggttctcacaagagactgtgatttgaactgagttattttgagagaaagaaagggcatggggcattcactttgcaggtttgggtcatggtggaagtagcaaggtctg

SEQ ID NO: 119269 - DNA, 529 bp, Homo sapiens
actgaataatccatttattcagaaaaggtcttcaagcagtggaaagcggacaagctcgctaaggtaaattcaagttatctaaaatgttaagtttcgctgaaaagcttgaattttgatttgactattttactttatttgatgttttttcctgaaaaatacatatcgagcccctcccatggactgaaccctgttcttagtcctgggtatgactacacgaagttgcaacccttacattttgatgaggttgagaggtgacaacgtgctagcagccctcactcgctctcggcgcctcctcggcctcggtgtccactctggccgcgcttgaggagcccttcagcccgccactgcgctgtgtgggccccactttgggctggcccaggccggagccggctcctgcttgcggggaggtgtggagggagaggcgcgggmgggaactggggctgcgcgcggcgctcgagggccagcgcgagttccgggtaggcgcgggctcggcaggtcccgcactcggagcggccggccggcactgccg

SEQ ID NO: 119270 - DNA, 623 bp, Homo sapiens
agatggcaataacaaatattctctctttttaaagatgaaacactactgagcatctgtcaaataagatggcaacgttttcctcctctcagaagcaggaaaagaatgtaaaattatcgctatgggaaaaaaaaactcacctgctacagtcatcagctcagtttatttgaaagaaatcctagcttgtcaactttgctttcctcaacaaatgtccctgaaagtagcgggatttagagatttcaagaaaatgtggaagtaactctgttcagctcagctctatggacagaggatggggaaagaagagggtggtagttccatatcaaggtctgttgctcaaccttgaaaatagagactcatacttaatcacagatgattttgatgctattgttggcaaaacaataggaaaccacatagaacatgcctttattttctaaagactaaccagaaagaatgatttagttaaaattttcatgattgtcaccacaattcatttcttatcaaragctacccatatctagaaaaagtgaaaatcaataaaaaacagtgaaatattcctgaaaggtgcatgtaggctcttctcccctgcccctgcctatttatagtacttataggtgaatacatccact

SEQ ID NO: 119271 - DNA, 563 bp, Homo sapiens
aataggttataccatacagcctaggcacgtagtaggctagaacatctaggtttgtatcagtgcatgctatgatgttcacataatgacgaaattgcctaatgacacatttctcagaaggtatcctcattgtcaagtgacacatgactgtattttgaatatgtgattgtattaatgattcaaaaccagatgattaaagttttaaaaaatggagtgctctattcttgagagcagagcttagatgcctctgaagagtataattmtttttccattattgtcagtcctatgagcctttatgctctttggttgtctaggggagtccaaatcatcctacacttttacatatttcacctcatcatcttcaaatattaatcaaatataacaatattaaaagactcttacccctaattcagattattctatgccatgagagaaaaaaattgaatgaaccaattacacaggaaggagggaattgcataattaagaacattcatgatggttttactgaacagcattaaaacagtccattttccaatcattcattgcttttattggacaccatcctg

SEQ ID NO: 119272 - DNA, 605 bp, Homo sapiens
aatgtctaggttaatagaaaacagctaggttcttatatctgctctatccttctcttcagcctatagaattatgccatttggttgaagaataatgaagaaaatctagcttcaaatcctatgcaattggaaaatggggaaatagttcaatggttaaaacaaattaattatgtatgttctttgatcgtatacccaaatttgacaagtgctagtttcttaaaggttagttgcaatgtggcatctaaaactayataagtggatttttaataccctgttacattaaaatccattggtcttcttgaactttgaaaggatcttttactcacccatgatgttacattggaaaatagtgattctctgaattatgcaaatctttcaatgttgtcatatttcattctagaatatcaaaaaatcacatgtgagaaaatcaccactgatgtaattagaaaaaagtctttaaatattgggaactgtcaagcacataatggtgaatacatattttccaaaattctaattatttgctttaaagcacaaattttacaatgggcgacaaatgctatcaattgttttccttgcagtgtcaggctctcttcattcatttttgagaa

SEQ ID NO: 119273 - DNA, 605 bp, Homo sapiens
aatgtctaggttaatagaaaacagctaggttcttatatctgctctatccttctcttcagcctatagaattatgccatttggttgaagaataatgaagaaaatctagcttcaaatcctatgcaattggaaaatggggaaatagttcaatggttaaaacaaattaattatgtatgttctttgatcgtatacccaaatttgacaagtgctagtttcttaaaggttagttgcaatgtggcatctaaaactatataagtggatttttaataccctgttacattaaaatccattggtcttcttgaactttgaawggatcttttactcacccatgatgttacattggaaaatagtgattctctgaattatgcaaatctttcaatgttgtcatatttcattctagaatatcaaaaaatcacatgtgagaaaatcaccactgatgtaattagaaaaaagtctttaaatattgggaactgtcaagcacataatggtgaatacatattttccaaaattctaattatttgctttaaagcacaaattttacaatgggcgacaaatgctatcaattgttttccttgcagtgtcaggctctcttcattcatttttgagaa

SEQ ID NO: 119274 - DNA, 605 bp, Homo sapiens
aatgtctaggttaatagaaaacagctaggttcttatatctgctctatccttctcttcagcctatagaattatgccatttggttgaagaataatgaagaaaatctagcttcaaatcctatgcaattggaaaatggggaaatagttcaatggttaaaacaaattaattatgtatgttctttgatcgtatacccaaatttgacaagtgctagtttcttaaaggttagttgcaatgtggcatctaaaactatataagtggatttttaataccctgttacattaaaatccattggtcttcttgaactttgaaaggatcttttactcacccatgatgttacattggaaaatagtgattctctgaattatgcaaatctttcaatgttgwcatatttcattctagaatatcaaaaaatcacatgtgagaaaatcaccactgatgtaattagaaaaaagtctttaaatattgggaactgtcaagcacataatggtgaatacatattttccaaaattctaattatttgctttaaagcacaaattttacaatgggcgacaaatgctatcaattgttttccttgcagtgtcaggctctcttcattcatttttgagaa

SEQ ID NO: 119275 - DNA, 604 bp, Homo sapiens
ctgatacatctcattgttagcaatacatttttaattgttcattttactcaagcaccatttgaacacaagtcaatttgcaatttcattagagaaccaaaaaggcctggggtctattcctgtttttgtttgtttttttttaaagaaaaggataaaaagcaggcaaaatttcatgaaggatgttaatcctctaattaattttatgtaatcaagcaagaattaatgtgtgctgctatttgagccgaagtctttttgccaagaagtgcattttgtcataccttccccyccagagaaacgtctttacaagctttgcagccaaataccctggcaactaatgactagctttggagcaacattcacagaccatttgctttgatgacatttggaggctttgctctcctcattccaattctattgtaaatagagtacacatgccatacagcctttgaaaactaatcaatacagtaagatttgtcaggttgcagctgactagtatcacatcttttaactcttttcttagctgacttgtacacatttttaagtcaaaccttatgaagggagttgggtagatcatcctttccatatttacaggctccctgctgtaaca

SEQ ID NO: 119276 - DNA, 560 bp, Homo sapiens
ttctgagatagactgtatgataggccacaaaacaagtgtaataaatttttwaaaattgaaattatatcaaatatcttctcagaccacaatgcaataaagctagaaatcaattctaaaaggaactctcaaaactctacaaatacatggaaagtaaacaacctgctcctgaacgatctttggatcaatgatgaaatcaaaatggaaactaaaaaatttttcaaaataaataataaccagtgacacaagttatcaaaatctctggaacacagcaggagtgctatgtggggagtttatagtgctaaatgcttacatcaaaaaggccaaacaatcacgaattgacaacccaacatcacacctcacagaactaaaaatacaagaacaaaccaaacccaaagctagcagaagaaaagaaataacaaagctcagagcaaaactaaatgaaactgaaaccaaaaaatcacaatacaaagactcaatgaaacaaaatttgattatttgaaaagataaacagaattgataggccaatagctaaattaaccaaaaaagagagagaggattca

SEQ ID NO: 119277 - DNA, 560 bp, Homo sapiens
ttctgagatagactgtatgataggccacaaaacaagtgtaataaattttttaaaattgaaattatatcaaatatcttctcagaccacaatgcaataaagctagaaatcaattctaaaaggaactctcaaaactctacaaatacatggaaagtaaacaacctgctcctgaacgatctttggatcaatgatgaaatcaaaatggaaactaaaaaatttttcaaaataaataataaccagtgacacaagttatcaaaatmtctggaacacagcaggagtgctatgtggggagtttatagtgctaaatgcttacatcaaaaaggccaaacaatcacgaattgacaacccaacatcacacctcacagaactaaaaatacaagaacaaaccaaacccaaagctagcagaagaaaagaaataacaaagctcagagcaaaactaaatgaaactgaaaccaaaaaatcacaatacaaagactcaatgaaacaaaatttgattatttgaaaagataaacagaattgataggccaatagctaaattaaccaaaaaagagagagaggattca

SEQ ID NO: 119278 - DNA, 571 bp, Homo sapiens
taaactcacattgccaaaaaaaagatggactttaaaggcaaaaagacaggggcaaacttaacattgctgcttgttaattatgtgctcttagggaagataaaaaaagctttgttttcttcatctataacaaagattaaaacaaacaagctttcaggtttgtgaagaataaacacaaagcacttaaaacaatgcctggcactgcttgagagaagacagtgatagttaatgaagacacttaaatatatacatcatacttgcttcagtggagaatggatggaggggagcaatggagaactgaggggaccagttagcaggttactgcaaagcctggatggaaaggatggtgtcttgagtgaggaagggggcagaaggaaagaaaagaagtcaatgatagagcaaagggctggatatycctgctgatttaacactgaggaggaactgctagtaaattatattggtccgtaaagtaagacatcaatatttgaaagaggtggccaaattatctttacgtatagataatataactgaacatccaaaaagccaaaattaatcaatgggaaaactcttagaa

SEQ ID NO: 119279 - DNA, 578 bp, Homo sapiens
cacagtgagacccccgtctctacaaaaatttcttttaattagccagatgtggtggcacacgcctgtagtcccagctactcaggaggctgaagtgggaggattgcttgagtccaggtgttctaggttacagtagactacaattgtgcttcttctgcacaccaacttgggtgacagggcaagacccagtctcaaamaaaaaaaaaaagaaaaaagaaaaaaaaatactctttagtagcttaggaagaggattagatgagctcaaagtccataaaagctgagatttagctggtgtcaacataccataaacggaaagtagtatgggacacccattaccccaagaatattattgtataacttgaatacaaataggatctagcaaggttttgataggtggtcactttataatgggttgtgaaagggaagttaaggaggttcaggaaatattctcaagatcttttaactttgatatgagaaatgagaattactacactctccacatccaacaaaacagtaaaatgttaatcaatgaaggtattccaagtcatatggatctttggttagatcctgaaggtttgatc

SEQ ID NO: 119280 - DNA, 581 bp, Homo sapiens
agaagaaaggtacgagtatatgtaagataatgtcctcagatatataatcctcctgggaaagtgactcctaattatgaaagaatgcactgctccagagagcccctgagagattctgcccttgaggcatcgttgttaaagaaaacagcatgaaaccatctctcttgaagcatcatttattcrcaaaacattcaaaccctaaagaaaactattcacattataagaaaacagagggtattagcaacttacaagcagttaatcaagactggctttagagagcttttataaattaatattgctcactactaaagctaggaaatcttatatgacaaaaagggttattgcgtctgctacaaaagtgaaaagctaaaaggatgttgcctggtaagtctgtcagtgcaattgtattaaacccttacagatataattatagagtttataaaactgcagaaggcattgttcagatcatggcaaaagtaatggtagaagatattacttacagactcattatgtacatatggttctagtcatttgcaatcataacaaaaataacatatttgatgaaatgatggcacattaagaga

SEQ ID NO: 119281 - DNA, 589 bp, Homo sapiens
agttttgtctatttgttcacagctatactctaagcatctagaaatctgacacacaatcaatactcaataaatatttgttgaattcacacatacatagctagaatagaattctagataaraggaaaagcagagcaaatacttaaaattttaagaaggaaagatttttaaaaattcattagtgatctgctgaggctagattataggggaaaggaaaaaaagtggtgtgagatgaggtaagaaaagataaataatagtgagtctcaaaagagggcataacaggcttttgagttagaaaaacctatgttccactggaaaatctacctctaattttggtatgttaaaattatttttgtataaaaggatatcttaaatagcactttataacatttttatgggaattaaaattacatgcattaaatttttctcacaaagtctagaacattgtaggtactcagtaaatgttcatttctcttataaagttaagaatttgaactttaagtccaaaatgagaaagcatcaaaagttagcaatttaatgacttcatatctacactttaatatcacgtttcaggaaaccaagtagaaaatgg

SEQ ID NO: 119282 - DNA, 521 bp, Homo sapiens
gtagagtcattttataaatctgagttatgcttaaaatgtggacttcagttttctagtaaattatgaacatcctcagtaaattatgaatgttattgtaatggtgtgtataatatagccccatctgaaaataataatgtgcatatatcaatcaggcacctaatttaaaagaagtaatgctcttccctttcattccagaattatttggcagtggcagtttggaaatcctatcagtctttcaagactattgtctaactgaaggatcccctaacctaacaaagttttagaacaattggtctagatttcaaaaagcaagacagccggaacatgtggaaataattcaagacctgggttcattgtagctcgcatttccaaacaaagttcttttcaatttctagggaaaacataaaaaaatggagcctcaaaactttccaagagcccagtggaagtgataaaaattcaaagcaaaaagtccaaatgttagtwtaaaaagattctagaaagcacggggatacttgtaagag

SEQ ID NO: 119283 - DNA, 573 bp, Homo sapiens
  misc_feature (1)...(573): n = A,T,C or G
nnnattatatttgttgaaatgtccatttctgttttttcaattttgtcagattttacttcatatattgtaaagctctagtgttaagtacctttataattgttatcttttccttccgtgttgacctttttttaattawaagatccctctttataactagtaatataccttagtttaaaatatgtttttgtctgattttaatatagcctctctaactctcttatggttatgtttgtatggtacagatttttaaatcaagttacttataacctatttttatatttcaatctaaagttagtctcatctcttatagacagcacatagtcatatctttctcttttaaacaagttagttaccatatccatcacctcccttacctatcatttaagtagaataatattctattataaatagtatttctgtatgtggagcattaaggataatataatgagggctcaaaagaagacaaaaaagactaaaaaaatgtttaaaacttcttagagattggttcagttgtcatgaccagaatgctgacagaaatattaacagtaaaagccattcagatgagacctcaga

SEQ ID NO: 119284 - DNA, 652 bp, Homo sapiens
atctgacctactaaacgaatatgtctgattcatctgaaacacaatacttatattttatattattaaagaacattgcctgaattattttgatcagtatttaaaaggtttcttatgtcatagagaaagttgggtaagaacaaatgatacttacaggggccactcccatatgacatgtaaaagttaaaaaaagaaggaagacaaatgtctatggaaatgatgaagatctatggaaaagtcagaaagactgggaaatgctggggaagaatacaagcaggcacagataccttgcaagcagaatcacagttcactttcatctctsagaatacaggagaatacagttaccatacgtgtcatcattatcttgagcatttatacccagaaggcagtcacaaggacactcctaagtgaacgaggttcaatcagcattgacttacattgggatgggagagaaaagccttaggaattagagagtgtgggagccacagcccctatttaaccaatttgtttaaactgaaggcctagatatgggggcatgctacagcactttcataggtcacaaattaatgtcacacctaaatacattttcctgcctttctcaattcagatgtcctcatgtaatagccctcttaggattaagcaaagtaggccaaca

SEQ ID NO: 119285 - DNA, 520 bp, Homo sapiens
gaaatccctagtatgccaagaagagcaacaggtgattccctggaactgtaaaacagatgtagtgtatttgacttttcctttttggcttttgcttgaatggatgaattaggcttcacaatactaagtgacaagctattaggttttcttcattaaagagcttgaactatagattattatttttccaatttatattttggaacttataaagtcaacatagttaaatacacttctgaaaagagacttttctgtgaattttacattttactatatttttccaataactataaagaagcaacttcatattgkgtttctaaaagtaaatctgagaatacacgtaaaaacatttcggggtgaagagaacaactatgaaagagaatttcaagagaatgaaaaatttttttgtttgtctgaaagtgaataatgtgaaggtgctttatagggccctgtatattttacattttaataataataaagacaatagctaaaagtaaatgagctccgtaatttgcttggtgatttc

SEQ ID NO: 119286 - DNA, 667 bp, Homo sapiens
acctattggtatttattagctcccctgtggcttctatgttgagaataaaaagatgaataaaacaagtttacactaatatcttgtcatctcaaacgctcaaaatagtcagtcttaaatgactgatttgatgcttttttttttagtaaaatttaaaacctagtgactaaaagggcattctttggagtggcagagatgttctatgttttgattgtgatggtggttayatgcttgtatatatttgtctattaaattttccattaaatactgttaacatgggtagattttgttatatgaaaatttgactcaaagtaagttgatgttggtcaaaaggtgcagtttcagttacacaggatgaataagttctgaagatctttcatacaacatggtgactatagttaaccgatatcatattttatacttaaagactgctaaaaagaatagattttaaatgttctcaccacacttataagcaaaaactggtaactctgtgaagtaatggatgtcttaaccagtttgattgtagtaatcatttcacaatatacaggcacatcaaaacatattgtacaccataaatatatacattttttccaactatacctcaataaggattagaaaataaataaaaatggtttattttctctctcattatataatagatgataatgtg

SEQ ID NO: 119287 - DNA, 667 bp, Homo sapiens
acctattggtatttattagctcccctgtggcttctatgttgagaataaaaagatgaataaaacaagtttacactaatatcttgtcatctcaaacgctcaaaatagtcagtcttaaatgactgatttgatgcttttttttttagtaaaatttaaaacctagtgactaaaagggcattctttggagtggcagagatgttctatgttttgattgtgatggtggttatatgcttgtatatatttgtctattaaattttccattaaatactgttaacatgggtagattttgttatatgaaaatttgactcaaagtaagttgatgttggtcaaaaggtgcagtttcagttacacaggatgaataagttctgaagatctttcatacaacatggtgactatagttaacygatatcatattttatacttaaagactgctaaaaagaatagattttaaatgttctcaccacacttataagcaaaaactggtaactctgtgaagtaatggatgtcttaaccagtttgattgtagtaatcatttcacaatatacaggcacatcaaaacatattgtacaccataaatatatacattttttccaactatacctcaataaggattagaaaataaataaaaatggtttattttctctctcattatataatagatgataatgtg

SEQ ID NO: 119288 - DNA, 597 bp, Homo sapiens
ctaggtggcttgtaaacaacagaaatggatttcttacagttgtgtaggctggaagtccaagatcaaggtggcaagctgattcaatatctgatgagggtccgcttctggtttacaggtagccatctactttctttgtcctcacgtggcagaaaggagcaaaggtcctctctggagtccctcttacaagggcactcatcccattcttgagagttcatgatctaatcatgtctgaaaggccctatgtccaggtaccatcacattaggattaggttcagcatgtgaattttgggaggacacaaacattctgtttatggcagcaggtaaggaactgcaggtcagaagggccccagcaaagtatcattctgaaatgaatgacagatgggacaggcacraagcttgaaagcgaggaataagggtgtgtcttgcttgactgtgaccgtcttgcttacctgctgaggcagaggtgctaggtatgccttctcttcaaggcagggcctcatcatgtaaaggagcttctgggtggaggctgagtgctttctctatatagccagaggcctcactccaatgcttggggtgtgagatctaagttttgcacag

SEQ ID NO: 119289 - DNA, 591 bp, Homo sapiens
atggcaggatgtccactgtctgcggccccttcttttgccattcttttacattcattgctgtagagggtataaataggaataaggaactgatggctatgtgaaggtgaatttcaaactctttgagttgtgattaacttccagaggcctcaaaataactgrtttacataaagtatgatgcagaaactaagccactcatttacatcttcaccatattttttgcatgtaaggacatatgttggttacctttggtcttgacaataacttcaaggaaggaatgctttgtctaatccttgttccttcttcaaggcccaactcaaacactttctcccctggaatccttcccagagctctttagtcagaattaatgatcctatatacctttccatagctctttgttcatatctcttcacatatttggttattcacatgtgtgttcatttccttcattcaactcatatattgtttttttttacactcagaagctgaaattagtagacacttagtgctacatgctgattgtaaagtgtatatctagaggaaagccagtacagttcaatgtacccagtgtgaagtactttcatcctagtactt

SEQ ID NO: 119290 - DNA, 591 bp, Homo sapiens
atggcaggatgtccactgtctgcggccccttcttttgccattcttttacattcattgctgtagagggtataaataggaataaggaactgatggctatgtgaaggtgaatttcaaactctttgagttgtgattaacttccagaggcctcaaaataactgatttacataaagtatgatgcagaaactaagccactcatttacatcttcaccatattttttgcatgtaaggacatatgttggttacctttggtcttgacaataacttcaaggaaggaatgctttgtctaatccttgttccttcttcaaggcccaactcaaacactttctcccctggaatccttcccagagctctttagtcagaattaatgatcytatatacctttccatagctctttgttcatatctcttcacatatttggttattcacatgtgtgttcatttccttcattcaactcatatattgtttttttttacactcagaagctgaaattagtagacacttagtgctacatgctgattgtaaagtgtatatctagaggaaagccagtacagttcaatgtacccagtgtgaagtactttcatcctagtactt

SEQ ID NO: 119291 - DNA, 591 bp, Homo sapiens
atggcaggatgtccactgtctgcggccccttcttttgccattcttttacattcattgctgtagagggtataaataggaataaggaactgatggctatgtgaaggtgaatttcaaactctttgagttgtgattaacttccagaggcctcaaaataactgatttacataaagtatgatgcagaaactaagccactcatttacatcttcaccatattttttgcatgtaaggacatatgttggttacctttggtcttgacaataacttcaaggaaggaatgctttgtctaatccttgttccttcttcaaggcccaactcaaacactttctcccctggaatccttcccagagctctttagtcagaattaatgatcctrtatacctttccatagctctttgttcatatctcttcacatatttggttattcacatgtgtgttcatttccttcattcaactcatatattgtttttttttacactcagaagctgaaattagtagacacttagtgctacatgctgattgtaaagtgtatatctagaggaaagccagtacagttcaatgtacccagtgtgaagtactttcatcctagtactt

SEQ ID NO: 119292 - DNA, 495 bp, Homo sapiens
actttaaagaagaaaacattggtattttaaatcccagtttggcatttaactgtgttaagtcattctgttacattggcatcacttaaatagccttaaaaataaaaaataaaataaaccagattgtactacacatcatagaagcttaatatagatgctttaaacccaagggaaattatgtccaatgcaaattattttcccgatattgcctttctaagttccgtaattgcaacttgcatatagctatattgaaacaggtcacaggttgatataaaaacaaagatgactattatcaggrcaaagggaagagatatgtctgaagtagtgtatctctaggggtaagttaatcaagggaaacaagagttggcagacagagtagtttccaaaccaatttgccaacctattcttgccaggaaaaccaggtgcagtccttaaccacatgatttgggtacaccattataataattaaaaatagaaaggcctaagcatggtatagct

SEQ ID NO: 119293 - DNA, 457 bp, Homo sapiens
tttaagttgtatgataccaaggactagatcagttttactcccaaccctttagccagtatacagcacagtgcctggaaaagtgggcactcaatacagaatgatgagtgactgcctgaatgaatgccaattaggtatagagcaggcttcctccaagggcaacaacctcagtgggaaaattaggaaaaatctttgatgcccaatatcccagataaaagggaaacagagtgtcaggctgaattccctgggtgcttcaatcctggactgtggatcaggacaacatattgcctaaggacagatggagctagtaccctggacatccagctcaggaagcttgttgagatacctgggaagcagtggcagsaccatcttccaaattctccaccaatatctggatgagtaactttgggttctgtggatccctagatcagaaaggaggagggagagatgaggatttgcc

SEQ ID NO: 119294 - DNA, 558 bp, Homo sapiens
atcaatataataaagatggagaaaatttgtccttcatattctgcttctcagaatctttgtgaaatggagtgagattccttaaaataagaaatgttagcattgaggcttctacaacaaaagttgcataaaggaaccaaataatgaggtagttaaatgcaaggcacctttcccttcctcttttctcaagccaccctccatcccagagagtcgtggtctcacagacatagcgttggaggcctatgggtccctctgctagaaactgggacaggcacgtctcctaaatcattcstaggcagtaggctctcccaagcccttgtcctgacaagtctgcgtaagacctttaaaagcaagctctgattgcagagtgtgtcaaaaataaccccatttcaaagactggatgccttacttatcactagggtgggtgtcatgctgtggatgctttctacctcatgaaaaaatacattaattatctggcttttagaatgttcttacttggataagaaatctccatattacacatttaccatcattgtctagtgagcacaaaatttctagaca

SEQ ID NO: 119295 - DNA, 389 bp, Homo sapiens
aaagctcttccacactcagtgcatacatagggtttctctcctgtatgaattttctgatgaacaatgagtattgatttctggttgaaggctttcccacattcgtggcattcatactgtctctctccagtgtgaattttctgatgtatattaagatttgacttctgagtaaaggcttttccacaagtattgcattcataaggcttctccccagtatggattctctgatgtgtaatcaagtctgacctctgggtgaaggcctttccacatttggaacatatataagatttctctcctgtatgagttttctgatgtgtaatgagatttgaccggttggtgaatgccttcccacatttattgcatayatagggcttttctcctgtgtgaattcg

SEQ ID NO: 119296 - DNA, 423 bp, Homo sapiens
gcttcctactcatttaggttaataggcagaattcagtttcttgcatctgtaagtccaatgtctccatttgcttgctggctgtaagcaagggccattcccagcttcaagaggctgccacattccttggctcacggcccccttcctccatctcaaaagccagcaatagagggtcaagtccttcaaacattgcatctctctgatccagctgggaargtgttgggaaaaagctgagggttaggagaagctgaggcagggcttgcatgtctgacataatgtaaaagagtcttggaacatgtccggggtccagggtctaaaaccccttgtggcctttggaacaccaagctctatgctaaagggtggaagcctaccatcatgcaccataatctaagcccagggcataaaatcccttgtggcttggataga

SEQ ID NO: 119297 - DNA, 513 bp, Homo sapiens
atactttttaagtcacattttctctgtttaattttgaatttctattactacatctttaaatttactaatcttctattccaaatgtataatcgtccattattcccatgtagtggagttttcatttcagcattgtagttttcatcactagaagttctatttaggtctttgcataatttctttatctctacttaacatacccartctttcctgtagcttcttgaacttatggaatacagttacaagaattattctaatagccttgtctactacttctatcatctgtatcattttcaacagatttttagtcctaagtatgaatcaaattttcttgcttttttgattggctgtcaatttttgattgaacacaagataatgtgattcacgcttttgtgtgctagatatttttgtgggcctgtaattatttttgagctttgttttgtgaagcagttatttagaaatggggtgaatctttctggtctttatgttaagctttgtttgatagagccagaacag

SEQ ID NO: 119298 - DNA, 513 bp, Homo sapiens
atactttttaagtcacattttctctgtttaattttgaatttctattactacatctttaaatttactaatcttctattccaaatgtataatcgtccattattcccatgtagtggagttttcatttcagcattgtagttttcatcactagaagttctatttaggtctttgcataatttctttatctctacttaacatacccagtctttcctgtagcttcttgaacttatggaatacagttacaagaattattctaatagccttgtctactacttctatcatctgtrtcattttcaacagatttttagtcctaagtatgaatcaaattttcttgcttttttgattggctgtcaatttttgattgaacacaagataatgtgattcacgcttttgtgtgctagatatttttgtgggcctgtaattatttttgagctttgttttgtgaagcagttatttagaaatggggtgaatctttctggtctttatgttaagctttgtttgatagagccagaacag

SEQ ID NO: 119299 - DNA, 637 bp, Homo sapiens
tactataatcaccaagtcacagtaaagtcagagatttacttcagattttctctttccattgcattctttttgattcattagaaggcaaatcaccttgattttcatattgcttagcagcataatttgtttttcagctcttggagtatctgtgttttcccataatcttcacttttttaaaatctttttttaacattttcaaagtcaacaaaagcccacaaatataacattttatttctatttcaggtttgtaatggtatacccatgaagactaattttttacagtataagcattcatccttgaaaacataacattcccaaacacacaaatgactttaagagcagcatttttctacaactgacattcagcttgagaatcatggtagttactcaataggggataaaygccatggcactaagatagaaatattttatccttctaactttgtggattaggatatttctaatttaatggtagaatcatttacctcatctaggcaatcggagattatgatcccatgatttaccatatttcagctcccttttttcttttattaattgaaagaacatggacgctactattggtagccaatagatgcatctttcactatgtcttcttatcatagttttcaaatattca

SEQ ID NO: 119300 - DNA, 637 bp, Homo sapiens
tactataatcaccaagtcacagtaaagtcagagatttacttcagattttctctttccattgcattctttttgattcattagaaggcaaatcaccttgattttcatattgcttagcagcataatttgtttttcagctcttggagtatctgtgttttcccataatcttcacttttttaaaatctttttttaacattttcaaagtcaacaaaagcccacaaatataacattttatttctatttcaggtttgtaatggtatacccatgaagactaattttttacagtataagcattcatccttgaaaacataacattcccaaacacacaaatgactttaagagcagcatttttctacaactgacattcagcttgagaatcatggtagttactcaataggggataaacgccatggcactaagatagaaatatttyatccttctaactttgtggattaggatatttctaatttaatggtagaatcatttacctcatctaggcaatcggagattatgatcccatgatttaccatatttcagctcccttttttcttttattaattgaaagaacatggacgctactattggtagccaatagatgcatctttcactatgtcttcttatcatagttttcaaatattca

SEQ ID NO: 119301 - DNA, 637 bp, Homo sapiens
tactataatcaccaagtcacagtaaagtcagagatttacttcagattttctctttccattgcattctttttgattcattagaaggcaaatcaccttgattttcatattgcttagcagcataatttgtttttcagctcttggagtatctgtgttttcccataatcttcacttttttaaaatctttttttaacattttcaaagtcaacaaaagcccacaaatataacattttatttctatttcaggtttgtaatggtatacccatgaagactaattttttacagtataagcattcatccttgaaaacataacattcccaaacacacaaatgactttaagagcagcatttttctacaactgacattcagcttgagaatcatggtagttactcaataggggataaacgccatggcactaagatagaaatattttatccttcyaactttgtggattaggatatttctaatttaatggtagaatcatttacctcatctaggcaatcggagattatgatcccatgatttaccatatttcagctcccttttttcttttattaattgaaagaacatggacgctactattggtagccaatagatgcatctttcactatgtcttcttatcatagttttcaaatattca

SEQ ID NO: 119302 - DNA, 637 bp, Homo sapiens
tactataatcaccaagtcacagtaaagtcagagatttacttcagattttctctttccattgcattctttttgattcattagaaggcaaatcaccttgattttcatattgcttagcagcataatttgtttttcagctcttggagtatctgtgttttcccataatcttcacttttttaaaatctttttttaacattttcaaagtcaacaaaagcccacaaatataacattttatttctatttcaggtttgtaatggtatacccatgaagactaattttttacagtataagcattcatccttgaaaacataacattcccaaacacacaaatgactttaagagcagcatttttctacaactgacattcagcttgagaatcatggtagttactcaataggggataaacgccatggcactaagatagaaatattttatccttctaactttgtggattaggatatttctaatttaatggtagaatcatttacctcatctaggcaatcggagattatgatcccatgatttaccatatttcagctcccttttttcttttattaattgaaagaacatggaygctactattggtagccaatagatgcatctttcactatgtcttcttatcatagttttcaaatattca

SEQ ID NO: 119303 - DNA, 495 bp, Homo sapiens
tgactgcatcatatggctctgtgctgcattgaggtcaggtcaggggttgctggaaggaaaaagtggtcaactacaaactgattcattagcactttgatttacggtcttccacttgaatacatctactcctacatatgtatcagagttctaattagctattctattctttctgtccagattttacacctgcattcagaaagaataagtgaaggaagtgtccrtattctattcaacccagagtcagaactagtcactttagtttttatcttcctcatttcttatctagactgtttccaaagccttctaaattatctgtggggtcagttttgccctcttcaaatctatgctctaatttactactacagtgatctatataaaatgaaaatcttactctgtcacgtctccatttaaagaacccaaagctcttccttgatctagcaggtaacattaaagcttattttcatggtgtaaaagacctttcatgactctccttgt

SEQ ID NO: 119304 - DNA, 610 bp, Homo sapiens
tgtacataatttacaataccatgacaatggccaactctccagctaaataattaaacaaatattaatttatttgttttacctttcttctgtatgacaggttgtgcctatagaaacagcctgaggtttctattgtttccatttgttcttaattaacatgtaataattgtacatatttgtggggtacagagtgatgttttcatacatgtttacaatgtgtaataatcaaattaggataattagcatatccatcacctcaaatatttatcatttctttgtggagaaaacattcagaattccctcttctagttattttgcaacgtacaatatattactgttaactatagtcatccargtgtatattggaacaatagggcttagttctcctatcagactataactttgttgctttaaataacccctcccctttccccttctcccttagccttatcttgtctctgttaacaactattcaactctctactactttaagatcatttttttagattccacttttgagtgagctgatgtagtatttgtctttctgtgcctggccattccacttaacaatgtcctccaggctcatccatgttgctgcaaatgacaatatttc

SEQ ID NO: 119305 - DNA, 612 bp, Homo sapiens
tagaattccggtttgtgtgacctgcttcaggggagaaggagacttgggagacaggagggttgagaagaccaaagagacacattgcctctgaggccttccaatcccctttagtcgaaagtactcagcaacaccaaagtgccattttttggaatcttgtttttctgtgccccaaaacctcaaaattcttatttattattccaaaaagttcaagyctatcatcattaaactcagagtcagccttcctcatttgaatcctctttttcttagacctcatgctttgaattttagcaataaccctgaatatgcttgttaagtcctcattggtgaaatcatcttcagtgaagttacaattagtaaactagtgtattggatgttgtgcatattggtggcatttaatataaagactaacattaaaagggtgaaaatgtaacatgaatcaggcaaaatgcaacattaaacactcaggatcggttgtgtgataaatcatatcttgcagttctttctttttcccttttcagtagccttgtctttgtaccaatagtagcattaacaaaacttatcaatgagtgctttttgccagaatttattatcagatggagaccaaatattaga

SEQ ID NO: 119306 - DNA, 585 bp, Homo sapiens
tttctagttattaaatacagccatcattaaagattaattatagaaacttatgatcaagcatataatatttaaaaaggaaatgaattctcaaaaccatcacttcctaatggttttctattctttattaatatttgtgtctatgaagttattyatatctagttgctgtgtatggtagaaataacatctcccattgtcagctaaaaatatgctatgttgggagtatttgcaccataagaaattccatgaaattttttttttctacattaactttattggttgagcagccataattccctgaaaatctgtggttaatttctcaggttcaattaatgtattaagaaaatatcaatatcatagctgttatgtagctatatttctttttaatttttttccttttatttatttttatttttaacttctatttttggttcagggatacacgtgcaggtttgctatacaggtaaactgcatgtcacagaggtttggtgtacaaatagttttgtcacctggataataaacatagtacctgatgatactttttctgatcctctcactcctcctactcttcaccctcaagtaggtccc

SEQ ID NO: 119307 - DNA, 585 bp, Homo sapiens
tttctagttattaaatacagccatcattaaagattaattatagaaacttatgatcaagcatataatatttaaaaaggaaatgaattctcaaaaccatcacttcctaatggttttctattctttattaatatttgtgtctatgaagttattcatatctagttgctgtgtatggtagaaataacatctcccattgtcagctaaaaatatgctatgttgggagtatttgcaccataagaaattccatgaaattttttttttctacattaactttattggttgagcagccataattccctgaaaatctgtggttaatttctcaggttcaattaatgtattaagaaaayatcaatatcatagctgttatgtagctatatttctttttaatttttttccttttatttatttttatttttaacttctatttttggttcagggatacacgtgcaggtttgctatacaggtaaactgcatgtcacagaggtttggtgtacaaatagttttgtcacctggataataaacatagtacctgatgatactttttctgatcctctcactcctcctactcttcaccctcaagtaggtccc

SEQ ID NO: 119308 - DNA, 542 bp, Homo sapiens
gggttagggcttcaacagttccatccatagcaaattcytaaattaacattattactatatgcatggctatacatttttataattctgtacttttacttttggaattaccctgtggtatgttgtaagcaacttgatgggaaagggttctgacgactgaaagtagcaagcctgcctctagttttagctgccacttactaatctgtatgaccttaggccagttactttacctctcaaagactgttttttatttgcaaaatgaggctaataatattatacatactgcaaagtttcagataggcacgtacaataagcacagaataattaatatcttctaaaataaaatttcccttaaaatagagaattgtttttctttagatgacagcacttttaaattgctaatttaccccaattttttactaatattttggttccttctaaaccttaaaaaatatttataaaaagacatttaaaatatggcaatgataattgataaatatttgtatcaggaaataattcacataaaagcaaaatattaaaaggtt

SEQ ID NO: 119309 - DNA, 518 bp, Homo sapiens
tgccttccttttatgtaagagtctttgaaactgaaattagtgaaagctgatggaggggaaaaaatcatagagtttgaaccctggtttaacrtttcatagcactttcaaagttataaaatgtattcacattttcagttcaaagttatttatgtattttccacattccattcacgtggcctgctccatcctgaacagggatctattctggctacttatgattttccacattaaaggtaagcattggtgctgatttttagatcagatggagcttggaatatttttcctcaaagttttccaactttaatttccaaggaactatccagtttagcctcatatgagctttctgcctcttttaaattccaggagagaaatgtgagatttcacaaacagagagattgcttttccatcagtcacagcccatgcctgacatgtgcaaggggcttcgtaaacagatgggtaacatgcaggtctttttatttaatttattttattttattttaacaaaatgcaagattaac

SEQ ID NO: 119310 - DNA, 518 bp, Homo sapiens
tgccttccttttatgtaagagtctttgaaactgaaattagtgaaagctgatggaggggaaaaaatcatagagtttgaaccctggtttaacatttcatagcactttcaaagttataaaatrtattcacattttcagttcaaagttatttatgtattttccacattccattcacgtggcctgctccatcctgaacagggatctattctggctacttatgattttccacattaaaggtaagcattggtgctgatttttagatcagatggagcttggaatatttttcctcaaagttttccaactttaatttccaaggaactatccagtttagcctcatatgagctttctgcctcttttaaattccaggagagaaatgtgagatttcacaaacagagagattgcttttccatcagtcacagcccatgcctgacatgtgcaaggggcttcgtaaacagatgggtaacatgcaggtctttttatttaatttattttattttattttaacaaaatgcaagattaac

SEQ ID NO: 119311 - DNA, 575 bp, Homo sapiens
gagcaaacagcaggatttgataagatggctaaaaactaggtcacctaatctgacacagagggtgggagagaccagggacttggataagcaaagtagctgagagggaggcttgaactgtgtcaaggaaaccaggagaccatctgggatttaggagagacaatcaggggaaaggaagtcttaggcaaagggaacctcacatgcaaagacacagaagcagagtgcacaccaagattcagagcagctgagtgtgtcttatcttagygttagattgaccatacacccaatgcttgctatgcaaccacagcttaaagcattatcagtgctctgttgtgcataggacaaaagggggaaattcctattgtggcctacaagacctgcctggccgtcttgcccacatcttaactctccagtttcatctcgctgcatcctgttgggagacaattatccgtgtatatctcacattgccgcacttcttagaaaaagatgcaataactgccattttgttccagattatcttttcaagagtacagggagttgtcctggaagttagagacagtgtttgcctctggagcaga

SEQ ID NO: 119312 - DNA, 575 bp, Homo sapiens
gagcaaacagcaggatttgataagatggctaaaaactaggtcacctaatctgacacagagggtgggagagaccagggacttggataagcaaagtagctgagagggaggcttgaactgtgtcaaggaaaccaggagaccatctgggatttaggagagacaatcaggggaaaggaagtcttaggcaaagggaacctcacatgcaaagacacagaagcagagtgcacaccaagattcagagcagctgagtgtgtcttatcttagtgttagattgaccatacacccaatgcttgctatgcaaccacagcttaaagcwttatcagtgctctgttgtgcataggacaaaagggggaaattcctattgtggcctacaagacctgcctggccgtcttgcccacatcttaactctccagtttcatctcgctgcatcctgttgggagacaattatccgtgtatatctcacattgccgcacttcttagaaaaagatgcaataactgccattttgttccagattatcttttcaagagtacagggagttgtcctggaagttagagacagtgtttgcctctggagcaga

SEQ ID NO: 119313 - DNA, 546 bp, Homo sapiens
acttaatctgcctcttactagactctaacccccttgggggttagacttggactttatattcctagctcatagcacagtactttgcccataataggtactcaatgctcatgaattgcatggcaaatatattcatggaggttttgtaactggttctataagggtacatggggctttcttggaagcctaaatgtgatacaataagggatttttgacagatttgaggatgggagattttttttttttttttttttgagacagagtcttgctctgtcgcccaggctagagtacastggcgcggtctcagctcactgcaagctccgcctcccaggttcacgccattctcctgcctcagcctcccaagtagttgggactataggcacccgccaccatgcctggctaatttttttggtatttttagtagagacggagtttcaccatgttagccaggatggtctcgatctcctgacctcgtgatctgcccacctcgaagtgcccttctcttcagtcttttgtcttgatgcccaaaaaatcttttagaacagttta

SEQ ID NO: 119314 - DNA, 561 bp, Homo sapiens
tatgtttctaagtctgatcaaaaagagaaaaaaagaaaggccctggtcaagggctacagatttgcatgggacctcatgaaccaaatccagcttctagattccctttcttctctgagctcaagggtgaagatacagaattctgaatttcagggaagctatgcagggagaagagtacctgagatcctttcaagtcaatagcaacagaggtctttttttgtatgtttgtttgtttgtttttcatacatagcattcctctttttttctagcaaatatcttgttggatttacaagtaattgggattatttttgttgatactggaatactggaaaagagttcacacagtcgggtgctgaatgggggagcaagtctaataggaatattggtaccaaattcctaaaatctcatcaggaattagaagagggcatccagttttgtttttgattyttttaaatagactcttcttgaagttgtaattaaatgcaattaaataattaatgaaataaaacatatggatcatcaattttagattgtgaaaagttgtctccatatagcacatggaaa

SEQ ID NO: 119315 - DNA, 532 bp, Homo sapiens
gtctttgggccctgatggccaggccgatcctcatgaaagtggaaagctgccatttctcattagcccctgctgtttgttatcacaaaaccatctccaaggttaagtagtgtaatagtgatccctgaggtctgcctttgctttttgcctttgatggaacatttgtgagcatgagcccaagctaggcttttactattatcttactaccacaagaggagtatmatttaatataatcaataatctactatatttcagggatacattccacgataatcacaatcataagtcattagtgcttctaattggaaaataaaggatactcctgtgcctttacaaagaaaatcacatttgttataaatgtatttacagccttgatataatgagcatgttacattaagcagttaagcagcctgtttaaccaggtatgacaaaatgtagtaacctcaggggatcaaagtgattgtctcacaagaaagacaggaaaaagcaataaagctgggatccccatttgaaatgcacacaggggccaagtggt

SEQ ID NO: 119316 - DNA, 609 bp, Homo sapiens
tgtaatcatgaattcttttagattaatataatcatgaattcttttgtgctttttttcttcaaaaatgttaagtttctgaaattcaactatgtttagtctrtgctgcttattaattttctttgcttaaactctcgctttgaatgaatatactaaaaaatttgttcatatatctggaagaacatatacagaatatttgcatatgtacttaagagaaaaatcactacatgagacagattgtgggtcttaaaatgtgttaaataatgtaaaactgttttctgagatgattgaagcaatttacattctaattaacagaatatgaagatactaggtgcctacaatcttgccagtagttacctatcatgtggaaattttggccattctggtggataaataatagcaacatgtagtctttttaatatttatttttttttatcaccaatagtatgaaaaatatttccatgtgtttattggccttttgcattttttcacatttgaagaacttgcgctagtcctagttacctccctttttctcgttgactggtgtggattccttatatattgtaggtactattcatcctctatcttatgtgtaacaataatcttctcctt

SEQ ID NO: 119317 - DNA, 609 bp, Homo sapiens
tgtaatcatgaattcttttagattaatataatcatgaattcttttgtgctttttttcttcaaaaatgttaagtttctgaaattcaactatgtttagtctatgctgcttattaattttctttgcttaaactctcgctttgaatgaatatactaaaaaatttgttcatatatctggaagaacatatacagaatatttgcatatgtacttaagagaaaaatcactacatgagacagattgtgggtcttaaaatgtgttaaataatgtaaaactgttttctgagatgattgaagcaatttacattctaattaacagaatatgaagatactaggtgcctacaatcttgccagtagttacctatcatgtggaaattttggccattctggtggataaataatagcaacatgtwgtctttttaatatttatttttttttatcaccaatagtatgaaaaatatttccatgtgtttattggccttttgcattttttcacatttgaagaacttgcgctagtcctagttacctccctttttctcgttgactggtgtggattccttatatattgtaggtactattcatcctctatcttatgtgtaacaataatcttctcctt

SEQ ID NO: 119318 - DNA, 554 bp, Homo sapiens
gttttctcccatctttttttcctgctagctcatcttcagagcatacccatacttgtatccttcatgatgtaagctttatatgggaagtcactctgttcctatatttcacctaaatcttcacttcactgatgtatcatgaaaatctcaggagcaaatttccttaaagggaaaccaacctaccaactgaatctctatcaaattccacatttgtctcttgacttaatttaattcgtctttttcctcaatgtactttcaaaattcatataagtagagaaacaatgttctgggcaggaagggttgtgaacaagaaaaccacgtgaggaggaaaagaaaatttaactcagtgtrtctattattggaggatttcaaactcttccaaatgactctggggcacagaaataagaggaagtacttgtaatagaaagtttaccaaattttagaatagagacacattttaaaactcgattttaatgtttgttttgagatttttgcataattcagagagcacagagacactgaatgagtatagtcatttttacaacaggtaataagga

SEQ ID NO: 119319 - DNA, 571 bp, Homo sapiens
caaggcaagggaaagaaccaaccaaatggattagaggaaagggtacatctatttctcctgatcaaagcataaaatctaaaaatttacaggacattgaagagtatctacaaggttgttgcctcagcagtggtgaagatttaaccttagattaactgctcctttggtttaacagatttttaaaacattgtactttttaccaatgaatacataaaaaaaaacacattgtttccaaacacaaaattgtgtcccagaatacagctcaagagtatttgtaagaatatataaatatccagcacacaacgatgtacaatctacaatgtctggatcaaatcaaagatctccaagaatgcagagaaacaaaaaaatacaattggccctctgtatacacagttttcacatttctgaatatggaggttcaaayaaggaacttgagcatccatgaatttttgtatctgcagagatcctggaaccaattctccatgaatatagagggccaaatatatgtcctaaagtgaggagaaaataaattgattgactttgacaataattgaaacaaatattacagttagca

SEQ ID NO: 119320 - DNA, 545 bp, Homo sapiens
atcacacttccctgaaggagtctagagtagttaattttgagcttgtaaaggtttttgactactcaagataatttttagagctaactatgacataaaccctaaaattcctgttccctggwaggtggagaccaaaaatactgtcatgtggttacaaggtcaagctcccaagatcataaaacaagatagagaccccatctagttttttggcttgtttcagagacctgtaggaaagtttgttactgaacagcttgctgggccatcttgactgcaagcttatggggtcctaagcccatgttttatcctaaggtaccccccgaaacagaaaaacaaactcatagcacatcagtttaaggactagcctcacagttctttttctcattaataaaaaatttacagaagagataaacagtgatttttaccattcattcgactgtttgcacagaaagagagaagccaaaaatctgactggtaagaaatttttacgtttttgcccacacgccaggcttctgggttccctttctctgagctgccctagtgactcagct

SEQ ID NO: 119321 - DNA, 545 bp, Homo sapiens
atcacacttccctgaaggagtctagagtagttaattttgagcttgtaaaggtttttgactactcaagataatttttagagctaactatgacataaaccctaaaattcctgttccctggtaggtggagaccaaaaatactgtcatgtggttacaaggtcaagctcccaagatcataaaacaagatagagaccccatctagttttttggcttgtttcagagacctgtaggaaagtttgttactgaacagcttgctgggccatcttgactgcaagcttatggggtcctaagcccatgttttatcctaaggtaccccycgaaacagaaaaacaaactcatagcacatcagtttaaggactagcctcacagttctttttctcattaataaaaaatttacagaagagataaacagtgatttttaccattcattcgactgtttgcacagaaagagagaagccaaaaatctgactggtaagaaatttttacgtttttgcccacacgccaggcttctgggttccctttctctgagctgccctagtgactcagct

SEQ ID NO: 119322 - DNA, 545 bp, Homo sapiens
atcacacttccctgaaggagtctagagtagttaattttgagcttgtaaaggtttttgactactcaagataatttttagagctaactatgacataaaccctaaaattcctgttccctggtaggtggagaccaaaaatactgtcatgtggttacaaggtcaagctcccaagatcataaaacaagatagagaccccatctagttttttggcttgtttcagagacctgtaggaaagtttgttactgaacagcttgctgggccatcttgactgcaagcttatggggtcctaagcccatgttttatcctaaggtaccccccgaaacagaaaaacaaactcatagcacatcagtttaaggactagcctcacagttctttttctcattaataaaaaatttacagaagagataaacagtgatttttaccattcattcgactgtttgcacagaaagagagaagccaaaaatctgactggtaagaaatttttacstttttgcccacacgccaggcttctgggttccctttctctgagctgccctagtgactcagct

SEQ ID NO: 119323 - DNA, 634 bp, Homo sapiens
tccttatagcaatgatgataatataggttttggaagatagatagttacatacagagacattttataaaccacatcaatctagaggtgatgtgaaaaatggattacaagagagagttgcagaaaaatggaatcggatagactaatacttaccaaagaaatgcttctgcttatgaaggaaattttagacttagcaattcactgaatgatgaacaaagaattagaaagattattactttaccaaatcataatttagagaaatgttatggtgaaaaatggctttctgtgaactacacagatcactgctttaaaaaatactgaaaatgtgcctgatagctccactaattaaaagcatgtggaaataaaatagaaataaatcttaaggtttgtggtaattgtatatgggtatttaaatataagcattgggtgctatttagtatatggtttccactgggccatgtaattcttcattgtcaagacactgtttatatgaatcttaaccaactcacccttgctattcagaraaaaagggtaagtggagctgcatcattagaggaaaactgagaaacaaaagctctcataccagctaatggctaagagagatttttgtcacagataaggtgataagtcagcaatt

SEQ ID NO: 119324 - DNA, 584 bp, Homo sapiens
agaggaagtcacactgtccacacacctgataacagccttgctgtctgtggaccttgaagtgcaccctcatcccaatgtcagccttactgataaaagtattagaggcattctagtctaccaagagaaaagacaggatgaatgcccacttgagcccctagtaaaagacctgccaactgcagaccctagtgtgaacccagtggcaccacatgatccagctccaattccactcaaccgtgatcccaaaggcaatccgataagcctggaaatgcaccaggagaaggtctttacttactgaaaccagtctgtaaagactggaagaagtgtttgctccttcaaatgcacagacaccaacacaaggctacacagatgaaaaagatacaggcaaacataccaccaaaggaaacttgtaaatcttcagtaacctaaatttgtgggatacagcaaaagtagttctaagagaaaagtttatagcaataaatgccaacattaaggaaagggtaaaatctcaaataaagaactgagcttcmcacctcatggtactggaagagaaagaataaataaagtcccaaatcagcaaaaagagg

SEQ ID NO: 119325 - DNA, 595 bp, Homo sapiens
cgccagtctaatggagaagcttccagaacctcttggatatcttaaatgatagatgactgttatctggcacacaaaaccatctctgactctagttgtggtcattaacatgtgggcccagaaacaggcaaaaacctaatatgaatcattaagggttgaaagaaaccaaaccatagtgggagcaatgtttgggccactggttgagctcagccatgccagtttttcaggcaccgttactgaaagatgtcgtgttcttacctgcttagcattcaaagattactgattctttaactataaataattttaaaaatcaacttttggaattctaaaaatgtatatttttataaccatctcaagttttttgaggaacaatgagtaaacaaactgcaaaaacccacaaattaggagaaattaatgaatgagttattcactagcacaattttatgcaacaggaggcatcatgaagaagagaaaaagcatggaactgataagcacattgagactggatggtaaaattgtgattccaaaggtctcaayactacagaacaattcatttaagtacattgagcaattcatttaacatctctgagattatttc

SEQ ID NO: 119326 - DNA, 582 bp, Homo sapiens
ctcttctgttaatatgttcatcctatttttctgccagtaatttttctagaaacagaataaatgtgtacatttgaaaatgattaacatcattaacttcctgtagttgtagatcaataatgaggaactgtacctattgaggcaattaatagtttttataatgataattctaaaatgcatgctaataactgtggtcacaaattgatcagatgctcttctctcataattggacatagatgtttttaataatgctaaacataaaatgaacattttgaacatagttacccaattgtaatcatttttacaatagttttttttatagttaatgatcaattttgaattcagaagtattaggcaatacttctaaatagatttttcaaatttttgactgacatcattraaaaattagctattcgttttgatacgtattctcagttacaagttattctatattatcaatacttaatcaggtttctgctcctggaaattaaaagttggaactgattgaaaacatttttgtatgggagtggatgttacggaaaatgaagaagagactgatggctaagctattagggctactcattc

SEQ ID NO: 119327 - DNA, 546 bp, Homo sapiens
gggtttcatggatcagtaacaacaggaccagaacgtatatcattttattatctttctgttttgatagtacactgagtgccacagctctaagcattagatccaaggacagaagtagagggataggcttcatcagctctacctgttcttttccagaattccctatggtcaacctttgctttcatttcattggcaagaattttgttgtatgtttacaccaagatgcagagagactgaggaagttgttacttaacgttttaaaaatcactagtgtgttaggggtaatggagtaggaacaactgttgcttcagtcagcctgggacttggacgcagtgtggtgagggtgagggataaactaaactaaaaccagcaaagaaaaataacttgtctcaggattagtttcattgcttttaggagaaaatattattttaccaattactacgaaagctggaataagcaaatgttaaacacktatcagcttcatttcagagaagccttacataaataactcttctcattttctttccattaaagatattttagaattat

SEQ ID NO: 119328 - DNA, 542 bp, Homo sapiens
agaaacatccaataataggtgtccatacagggttattgcttattgtttactttaacaaaaataattataggatttgtagtcctttagtattctttgaaacataatcagatcatagaatcttaaatttaaaatgtacactgaagatcatctagtactgccttctccttctacaggtatcccttttgcaatacttcrcgcaggagatgatatagtctttacttaaataccttccagtggcagagaaatcattactttatgaagcatcccattctatgttatacacgaatttaatactgtgtgtatgttccttatacaatagatagaaaaatttgccttcccagaaattcctaaaatttctgtatttggcctttttccaccatattttggatgacaattttactctttccagcttacaacccttcaatattttaaagacagttctggaatcctggggctctcttttctaggcataaaattcctcagaaaagaatcatatgattctctgaccattcaccagtctaaattgctttgtctccatttca

SEQ ID NO: 119329 - DNA, 542 bp, Homo sapiens
agaaacatccaataataggtgtccatacagggttattgcttattgtttactttaacaaaaataattataggatttgtagtcctttagtattctttgaaacataatcagatcatagaatcttaaatttaaaatgtacactgaagatcatctagtactgccttctccttctacaggtatcccttttgcaatacttcacgcaggagatgatatagtctttacttaaataccttccagtggcagagaaatcattactttatgaagcatcccattctatgttatacacgaatttaatactgtgtgtatgttccttatacaatagatagaaaaatttgccttcccagaaattcctaaaatttctgtatttggcctttttccaccatattttggatgacaattttactctttccagcttacaacccttcaatattttaaagacarttctggaatcctggggctctcttttctaggcataaaattcctcagaaaagaatcatatgattctctgaccattcaccagtctaaattgctttgtctccatttca

SEQ ID NO: 119330 - DNA, 565 bp, Homo sapiens
tctcaaataactaaaaatagaactaccattcaatctactactgggtatctacccaaaggaaaagaaagcattatacaaaaaagatacctgcacttatatgtttactgcaatactattcacaatagcaaagtcatggaattaaacctaagttgaccatcaatgggtggttggataaagaaaataagtaccacatgttctcacttataagtggcagctaaacaatgggtactcatgcacataaagatggaaataataaacacggggcactctaaaagaggagagggtgggaggagggtatggattttaaaaaattacttactgggtacaaagttcactatttagtgcgatggttaaactagaagcccaaacctcaccattacgtgatatatccatgtcacaaacctgcaygtgtgtcccctgaatctaaatttcttttaaaacagaagacagcatagtgccatgtgccattgactctttagatgattcctactaaaatgttgcactaaaatgaaccctgttctatatttacctttttttgaagttatcattcaaaatactcagaatt

SEQ ID NO: 119331 - DNA, 553 bp, Homo sapiens
cttgtgtatatatttacataagaagttcaaagttcctaggtatgcgagttaatagtggaattatttaattgataagtccaagtttatctagcagtgctgtaaggaagtccaggtgcagtcgcttatgcctgtaaccccaacaccttgggaggccgaggcaggaggatcgcttgagtccagaagctcaagaccagcctgagcaatatagtggagaccccgtctttaaaattttttgtttaattagctgggcatgatggcagatgcctgcagttccaactactctgaaggctgagacaggaggatcacttgaggccaggaattggaggctgtagtaagctaygatttcaccactgcattctagcctggatgatggagcaagaccctgtttctaaacaagaataaaaataaacagtaatttttttttttttttgagactgagtctctctttgctgcctatgctggattgcagtgctgcgatctcagctcactgcaacctccacctcccagagtcaagcaattctcctgccttagcctcctgggtagctgggattag

SEQ ID NO: 119332 - DNA, 551 bp, Homo sapiens
gtttcctgccacaatcaagaaattcctggtcaaatcaggaagctaccactacaaccaatgaatccaaagcaacaccacattgctgcagtccagtcccctgcccttctcggctccaaattcaagtctccccctggtgtagctggttgatatcatctacatcacaaccagagatgtagctgcaagggagttyggaagtgtcattcttagcttcccagactctagaataatagggactctagaggaccagaggttgaaataaaggctaagggatcccagccatgctatcttccacactgagagagagggagatacggtttggaaatttctccctttcaaatctcatgtcataatttgatttctgctattggaggtggggcctagtgggaagtgtttgggtcatgggggcagatgctacatgtacatcttagtgtcatcctcagagaaatgaatgagttctcactctattagatcacatgagagctggttgtttaacagagcatgacacctccccccgcctcctgtgccctctctcgccatgtgacatgctggct

SEQ ID NO: 119333 - DNA, 534 bp, Homo sapiens
gctctgtcctgtgggtttaaaaagttgaaagctctttagaaaaagcacgtattagagtttggatgagatgatcctcctctgcaaaatatctttctacttagctccctgatgactgcaattctatgccagcgcctcctcccctggagtctggagtcaaataagggttttgtctgcttggacaaatgcaatcactgatgaatcactgagtacatcatggctctgggaaggctgaaagaggaaagaccagcactggggtgagaggagaagagaacacagacagcggaggctgccagacctcaatacagcttccaccttccagcatttgccaagggccaggccattgtccaccgaccgacaaagtgtctgtgcactggtwgagagggagagaggaactcaggagctcactgtgtacccttgggaaggccactctgtctcaccaggtctgtaaaataagagcactgggctgtttccactgtgaaactgactatgtgtctgcatgggaggatgctgcccaaggcatcagagaagccagca

SEQ ID NO: 119334 - DNA, 541 bp, Homo sapiens
cattccacttgtgggaagttgtttggtggtttgtttgtttctgcttttttttccagcagaggaacatgtgcatgctgggctcagcgaggaaagtctgtagctatagctcaacaatcaggcagccttgatgctcaagaagagtcttggakaatggagacttattttccatctcatacactactgcagacacaatagtactgtactcagagccagtgtactgaggtgagtggccataaaacctactgagacaccagccaggacagctaaaggagtacttgcattaccactcccccaaccccaggcagcacagcttgcagctccaaaaaagaccgcttccttctgctagaggagattagaggaaagagtaaaaaggactttgtcttgcatcttggatatcagttgagccacagtaggatagggcactggtcagggtcatgaggcccccattgtggatgtaactaactttttttttttaattttataggctgataggcagaagggacttgtctcaaataagactttggacttggagttttgagtt

SEQ ID NO: 119335 - DNA, 493 bp, Homo sapiens
ttgcagctccaaaaaagaccgcttccttctgctagaggagattagaggaaagagtaaaaaggactttgtcttgcatcttggatatcagttgagccacagtaggatagggcactggtcagggtcatgaggcccccaytgtggatgtaactaactttttttttttaattttataggctgataggcagaagggacttgtctcaaataagactttggacttggagttttgagttatgctggaatcagttaagactttgggggactgttggaaaagcatgattggctttgaaatatatataaaagacatgagatttgggaggtgccaggagcagaataatatggtttggctctgtgtccccacccaaacctcatctcaaattattatccccacacatcgacagagggacctgtaatcgccatgtgtcgaagaagtttacttcatgttatcctcatgatagtgagtgaattcttaggagatctgatggttttaagagta

SEQ ID NO: 119336 - DNA, 236 bp, Homo sapiens
tttcgaagtcaattaggaaactcagaaatcactcttgctaccattaagaggaagaacaggagcctgtgaatggcatccctggcctacctgagactccaaagatatttctctgtggcttctgacagcagaaatctctgtgattttcagaaaggyagggacagctcctgccagcccatccttctgcagaatgtgtcccagcagatcagtggcatggaaccatcatggacagcacaaag

SEQ ID NO: 119337 - DNA, 618 bp, Homo sapiens
tcaggatgtctttattgtcacctgctttctttattatttttgaaatgcacatgcaataatmattgatctcactttatacatctatcgtttgccaggcaatatagtaggaactgaagtaaaattgttatacacaaacagtacataattaatggatatagtttggcaagtttgcacatatatattatcttgttaccacaccaatatccaggtaataatatatccatcacctccaaatgtttcctacgtccctttgttgttgttgttgttgttgtcagaacccctaagatcgaccctcttaacaaattgttaaatacaaaatacctcattgttaactataggtactatgttttggagcctatctctgtaattgactcattttgtatagctttaacccttgaacaataactccccatattgctctttccccactcaataaaacaccaaactcttttaaagcacattctatataatccactttatgaagcttttcctaacactcttttatctgttcccccccagtaaagggaactactaatataacaattacctattttggattattgtgtcttttacaaacattccttcatgaacccatttaacacttatctcccattatct

SEQ ID NO: 119338 - DNA, 564 bp, Homo sapiens
gacaatcttggatagacagctcaaaactcttagtactaaaataatcctaataataattttccttccaaagttaccaccaacaatcagatctcttaagggttggtgccttaggttttcgagccttgtgtatcttttggctttcttttttggttgtgtgstatttatctcatagaaagaaacctcttcttcatcctatgccagtgctgtattgtaggggcttgttgacatcttcctgatatgtagcaatccaggtgactggcctctggcttcttaagagcaaggccatcacatgcttttttttttctttgtctgcttgtttccttgtaagggtcccacatacagtgggcgcttaacaaaaatttgatcaactgaactcattttctatctccgttctctccacttcaatctttcccttttacttcttccagattagttttcctacagcaaaatgggaattgtccaaaaactgcccttcatctttataacttgaaggattcatttaccctaagccgtccttttaaatttactatcacagactagatagaaatgtctgggttcacgaag

SEQ ID NO: 119339 - DNA, 577 bp, Homo sapiens
caaaggggaaaggctgggatattgagaagtacacaattttcatgtaaaaggtgggtagaaaaaatagtcattcatgcatttttctggctcagtgaatctggatttttttacataacatgacataaacaaatgaggcagaggaataatgcaggaaagctgcattttacataagacaacataggcaraatgggggcagggaaacaatcagatatgcatttgtgtctggtgaacttgggatgactgcacctgtaaagacaagttatcagtttgcattgccgtggtgtaattttaacagctcatgaggaatttccttgtgggcaaaatatgggggaggcatgtagcttttcatcttgtagtcatattatttaggaaccagaagggggaggcaggtttgtgtgacccagttcccagcttgatttttccctttggttaaatgagtttggggtcccaaaatttaatttcctttcacacaagaaacattggaaagatttcaactggggtctaccactgaatggttggtctaggattcaaaggtagtgaaattaatgtatagatatatgtgggtaaaccattaaga

SEQ ID NO: 119340 - DNA, 577 bp, Homo sapiens
caaaggggaaaggctgggatattgagaagtacacaattttcatgtaaaaggtgggtagaaaaaatagtcattcatgcatttttctggctcagtgaatctggatttttttacataacatgacataaacaaatgaggcagaggaataatgcaggaaagctgcattttacataagacaacataggcaaaatgggggcagggaaacaatcagatatgcatttgtgtctggtgaacttgggatgactgcacctgtaaagacaagttatcagtttgcattgccrtggtgtaattttaacagctcatgaggaatttccttgtgggcaaaatatgggggaggcatgtagcttttcatcttgtagtcatattatttaggaaccagaagggggaggcaggtttgtgtgacccagttcccagcttgatttttccctttggttaaatgagtttggggtcccaaaatttaatttcctttcacacaagaaacattggaaagatttcaactggggtctaccactgaatggttggtctaggattcaaaggtagtgaaattaatgtatagatatatgtgggtaaaccattaaga

SEQ ID NO: 119341 - DNA, 577 bp, Homo sapiens
caaaggggaaaggctgggatattgagaagtacacaattttcatgtaaaaggtgggtagaaaaaatagtcattcatgcatttttctggctcagtgaatctggatttttttacataacatgacataaacaaatgaggcagaggaataatgcaggaaagctgcattttacataagacaacataggcaaaatgggggcagggaaacaatcagatatgcatttgtgtctggtgaacttgggatgactgcacctgtaaagacaagttatcagtttgcattgccgtggtgtaattttaacagctcatgaggaatttccttgtgggcaaaatatgggggaggcatgtagcttttcatcttgtagtcatattatttaggaaccagaagggggaggcaggtttgtgtgacccagttcccagcttgatttttccctttggttaaatgagtttggggtcccmaaatttaatttcctttcacacaagaaacattggaaagatttcaactggggtctaccactgaatggttggtctaggattcaaaggtagtgaaattaatgtatagatatatgtgggtaaaccattaaga

SEQ ID NO: 119342 - DNA, 577 bp, Homo sapiens
caaaggggaaaggctgggatattgagaagtacacaattttcatgtaaaaggtgggtagaaaaaatagtcattcatgcatttttctggctcagtgaatctggatttttttacataacatgacataaacaaatgaggcagaggaataatgcaggaaagctgcattttacataagacaacataggcaaaatgggggcagggaaacaatcagatatgcatttgtgtctggtgaacttgggatgactgcacctgtaaagacaagttatcagtttgcattgccgtggtgtaattttaacagctcatgaggaatttccttgtgggcaaaatatgggggaggcatgtagcttttcatcttgtagtcatattatttaggaaccagaagggggaggcaggtttgtgtgacccagttcccagcttgatttttccctttggttaaatgagtttggggtcccaaaatttaatttcctttcacacaagaaacattggaaagatttcaactggggtctaccactgaatggttggtctaggattcaaaggtagtgaaatkaatgtatagatatatgtgggtaaaccattaaga

SEQ ID NO: 119343 - DNA, 637 bp, Homo sapiens
gcaatcttcaattatttttagagtttgggatttggaggaaatgcctttacagttttagttacattgcaaattaaattctaatttatacgaagctaactcagtctttcttctttccaggaaatgtaacagaaagctgtaagggcattagccaccttgagtctttttatcaaggtgtgttcagatggggaaaggcacctaatagaggtttagtaaagactgaagtttagtaaaaactttattatcaaaatctattttattataattattttcttgcacttttctaattgacttcttttcaaatggttatttacatactgcycttcctgcatcatatttctcattttaaaaagcttttgccaaaagccttttcccccttctttgaataggaaaaagattttttggttcttaattgaaaagacatttgctttggcaactctcttttctcttcgattaactgtgaagcattctgaggtctgagaaagaagttttatccctaagaagatcaatccccagttgttggtagtttaacccatcttggtggaaaagaccaggagaaggggggagaaacaaggggtcttaggtttacactgataagaaaagactgtaaatattgaattatattgtatgacagttaagg

SEQ ID NO: 119344 - DNA, 622 bp, Homo sapiens
ctttcctcacttaattcctccagtttcacagccaacatagtggctttgtctgggtttagggctgaccctataattcactctcagaagatagacctaagccagggttaagttggagctgggactgaatcaccttctcaccacctacagcaccaagtgcaggatccaatatgtagcaaaggcttcatcaatatttgttgtatgaaaacgtgaataagagactgttagccaggagaggagtgttgatgtttaaggggctcagttctcaacacctctctattctgtttgacttatgaactaactgagaagtaggacaaaagagtaagtcagatggraaacaaaataattcccaatgaagctaataaaatagaatatggtttaaatgtgcgggcaagtgaacttccaaatactcatcctcagaactagataaacttacctacccaggtacaaaaagtactggactaccagatgccttctcccaaaaagaaatggggatagaaagaaacaagtttatatgtatctagtttttttcagatttacccatcagattgaatgttgtgtctttttgaagagaagcaaatgaaggggtagagagaggctaagagcatcacactggtgggattcc

SEQ ID NO: 119345 - DNA, 622 bp, Homo sapiens
ctttcctcacttaattcctccagtttcacagccaacatagtggctttgtctgggtttagggctgaccctataattcactctcagaagatagacctaagccagggttaagttggagctgggactgaatcaccttctcaccacctacagcaccaagtgcaggatccaatatgtagcaaaggcttcatcaatatttgttgtatgaaaacgtgaataagagactgttagccaggagaggagtgttgatgtttaaggggctcagttctcaacacctctctattctgtttgacttatgaactaactgagaagtaggacaaaagagtaagtcagatgggaaacaaaataattcccaatgaagctaataaaatagaatatggtttaaatgtgcgggcaagtgaacttccaaatactcatcctcagaactagataaacttacctacccaggtacaaaaagtactggactaccagatgccttctcccaaaaagaaatggggatagaaagaaacwagtttatatgtatctagtttttttcagatttacccatcagattgaatgttgtgtctttttgaagagaagcaaatgaaggggtagagagaggctaagagcatcacactggtgggattcc

SEQ ID NO: 119346 - DNA, 608 bp, Homo sapiens
ggcaacacaaacgttacctaaactagtaattttttaaataaataaagtacaaataggagtctgtttttctcaggataagttttctgctaataaatattrgtctaagtttaatcaacttttttttaaagaaacttctcatgcatattcttccgcacactgtgcctgtaggtgtactaaaaccactctctcatgaaaacttgcaaaactttctttttcacacagcaatgttatgtgagggaaccattaatcagaccactgttgatttagttgcaaaccgtgggacacaatgtaattcatcactacaagcctgtgctgtggtcctctttcctgttgtttcctggatgtttccttgcctgttgacagcacagtgattgatttttactttctctagtatcaaaagaaagtagacacatgttattgttgcatacgctttggcattttacagataatattaaaaatgaacataaagctaacataaatttgggacatattgctttgttgaaagtgttaagaaatcagaatgataatttgtaatccaaatcatgaatatattttataatagtccttgaaattaaagtgattaattagaaagcaaaatcaccatttct

SEQ ID NO: 119347 - DNA, 608 bp, Homo sapiens
ggcaacacaaacgttacctaaactagtaattttttaaataaataaagtacaaataggagtctgtttttctcaggataagttttctgctaataaatattggtctaagtttaatcaacttttttttaaagaaacttctcatgcatattcttccgcacactgtgcctgtaggtgtactaaaaccactctctcatgaaaacttgcaaaactttctttttcacacagcaatgttatgtgagggaaccattaatcagaccactgttgatttagttgcaaaccgtgggacrcaatgtaattcatcactacaagcctgtgctgtggtcctctttcctgttgtttcctggatgtttccttgcctgttgacagcacagtgattgatttttactttctctagtatcaaaagaaagtagacacatgttattgttgcatacgctttggcattttacagataatattaaaaatgaacataaagctaacataaatttgggacatattgctttgttgaaagtgttaagaaatcagaatgataatttgtaatccaaatcatgaatatattttataatagtccttgaaattaaagtgattaattagaaagcaaaatcaccatttct

SEQ ID NO: 119348 - DNA, 608 bp, Homo sapiens
ggcaacacaaacgttacctaaactagtaattttttaaataaataaagtacaaataggagtctgtttttctcaggataagttttctgctaataaatattggtctaagtttaatcaacttttttttaaagaaacttctcatgcatattcttccgcacactgtgcctgtaggtgtactaaaaccactctctcatgaaaacttgcaaaactttctttttcacacagcaatgttatgtgagggaaccattaatcagaccactgttgatttagttgcaaaccgtgggacacaatgtaattcatcactacaagcctgtgctgtggtcctctttcctgttgtttcctggatgtttccttgcctgttgacagcacagtgattgatttttactttctctagtatmaaaagaaagtagacacatgttattgttgcatacgctttggcattttacagataatattaaaaatgaacataaagctaacataaatttgggacatattgctttgttgaaagtgttaagaaatcagaatgataatttgtaatccaaatcatgaatatattttataatagtccttgaaattaaagtgattaattagaaagcaaaatcaccatttct

SEQ ID NO: 119349 - DNA, 608 bp, Homo sapiens
ggcaacacaaacgttacctaaactagtaattttttaaataaataaagtacaaataggagtctgtttttctcaggataagttttctgctaataaatattggtctaagtttaatcaacttttttttaaagaaacttctcatgcatattcttccgcacactgtgcctgtaggtgtactaaaaccactctctcatgaaaacttgcaaaactttctttttcacacagcaatgttatgtgagggaaccattaatcagaccactgttgatttagttgcaaaccgtgggacacaatgtaattcatcactacaagcctgtgctgtggtcctctttcctgttgtttcctggatgtttccttgcctgttgacagcacagtgattgatttttactttctctagtatcaaaagaaagtagacacatgttattgttgcatacgctttggcattttacagrtaatattaaaaatgaacataaagctaacataaatttgggacatattgctttgttgaaagtgttaagaaatcagaatgataatttgtaatccaaatcatgaatatattttataatagtccttgaaattaaagtgattaattagaaagcaaaatcaccatttct

SEQ ID NO: 119350 - DNA, 572 bp, Homo sapiens
tatacacacaatgttcttaaatgtgatttttcagaaataatatcatataagtattagagtaaaatttaagtgactgtgttaggattctccagagttacagaacgaataaggtaaatagataatgatatatgagagattttttattagaggaactggttcatgtgattatggaggttgagaagycccatgatagatcaggtgcaatttgaagaaccggggaaatcagtagcatggctgtccaagtttgaaagcctcagaaccagggaaactgatgttgtaactcccagccccagggcctgagagtcaggagaagggagtgggtggtggtggagtggtgtcactggtgcaggttccagagtccaaaggatggaaaacctggatttttaatgtctgagggcaggagaaaaaatgtgtcccagctccaggagagagagagaacaaattcgtctttcctctgctttttgttctacactaccctaccctttttgttctaccctgtaatccagtcaagttgacacctaaatttaactagcacagtgaatatgcatattgtagtaagaaaaacctcttca

SEQ ID NO: 119351 - DNA, 572 bp, Homo sapiens
tatacacacaatgttcttaaatgtgatttttcagaaataatatcatataagtattagagtaaaatttaagtgactgtgttaggattctccagagttacagaacgaataaggtaaatagataatgatatatgagagattttttattagaggaactggttcatgtgattatggaggttgagaagtcccatgatagatcaggtgcaakttgaagaaccggggaaatcagtagcatggctgtccaagtttgaaagcctcagaaccagggaaactgatgttgtaactcccagccccagggcctgagagtcaggagaagggagtgggtggtggtggagtggtgtcactggtgcaggttccagagtccaaaggatggaaaacctggatttttaatgtctgagggcaggagaaaaaatgtgtcccagctccaggagagagagagaacaaattcgtctttcctctgctttttgttctacactaccctaccctttttgttctaccctgtaatccagtcaagttgacacctaaatttaactagcacagtgaatatgcatattgtagtaagaaaaacctcttca

SEQ ID NO: 119352 - DNA, 500 bp, Homo sapiens
gaacgcctcttgagggcaaagatttttactgtcgtttacattgctgtattaccaaaaccaaggctcttgaaaaacactgattaaatcaaygaaataattagtttcataataaacaaacaaaattaagtatttcttataacacatcaagcattcacttaaatcttagccatgtatatagtaacagatttttttaaatctaatttttaaaaacaggagaaaaatgggcagggtagaattttttaagaaaagaagagtacattttatatcaatgactcaggagtacaaatgaaaataaaaccatattacgaaggagtgtactttcacacattctgacaatatttttcaatttcaagatgtatcatttctagcacacaaattagggaaacaaatgcaattggcagtaatgagtaggagtggaatgtaggcagaagatactgcgttatttctcataagccaacacttaaaatgtttcttcaataaaccatgaaaactgacccata

SEQ ID NO: 119353 - DNA, 591 bp, Homo sapiens
aaagacttttcgtgccccttgcttgtaaacagtcgaataagtccatggaaaagtatatacataggaggaatcatgaaatctcaaactaaatatccctagtcaggataaaagagtaaatttcgggcagaaattcaggaaactactggaaaaaaaatctgtttccaaatctgaactttagaatacaactcataaatcagcccccaattacctcactggccttgtggcctgcaatcctcccacactggcccctcctggctgcttgaatatattagggcttctcactcgctggtgctactgcctagtatgctctgtgtaagtgtggctttctccctcacttccttcagatgtcagctaacatatcacttcctagctttagtcctgaaggggttttcctcattacacttattatttcctgactaattacacatgcgtgwatgcttggttgttgcttatcttccctttctagaatgttagctccttgagggaaaggactttgttttgttcagtgttaacattctggaacttgagatggtgcttggctcatggaaaatacacactggtatttgttgaatgaataaatgaaaagtataa

SEQ ID NO: 119354 - DNA, 444 bp, Homo sapiens
aacttgagatggtgcttggctcatggaaaatacacactggtatttgttgaatgaataaatgaaaagtataaaagaatgggaaaaacagaatgtgtggtgatgtgacgtcccacccagatccctctgtaaggaaggaggacttgttgccccacagccttcagctgtcagccctttcagatcacctcagctgcagaggtgagctgccaaggytacatcattttgtgggtgggccacacacaatgactgattgaggcaaaggtgtgaagaaaaggccatgtggttttaacacaggaaaaatatgaagttgagccacattaactccgagatggccaaggctgctggtctgaatcataggtgggttcctcccttgatcgaccccacatttcacctctccttccacaggtattgatccaagtgacactccctagtaaacatctcaaaacc

SEQ ID NO: 119355 - DNA, 550 bp, Homo sapiens
ggatctctctctctgctccaagttcacatttcctmttatgcaaaagtctcttagagcctttatttctttccatattgaatgaatcattatatttatacctttgctcttttagtaatctgtgctttttttatggtgggggagatgaggaggctcttttttattatatgtcatcttccagcttgtgtctcagctttcaactcatagctgaatccctgttgtgactaaagacagaatgagtgaaagcaggagacacacctttcagcctctcctcagattcttaagggaaatctttttttccttctttgcatcattattacagctcctgcagctcagtagtacctgccacatagtaggagctcagaacttgtgaacagagtgaatacataaaagaacaaatgtattgggtgggctggggagaccttggtcaaaggacaccaaattacagtcaagtaggaggactaagttcaagagatctgttgtacagcatggtaactagagcttatgactacatattgtattcttgaaaatgctgagagagcgaatgttaatc

SEQ ID NO: 119356 - DNA, 496 bp, Homo sapiens
tggagtcattaacactttctctaatgatgcctctgaaatcatttgtatatatagatagctaggcaagtattgcagtgtgcaactatagggcagtgtgtgtgtgtgtgtgtgtgtgtgtgtgtgtgtgtgtccttctaacagtatattataatgggaacagttgtagggggaacaaaactcaaaataggctctgatacccagcaggcctgaggtcaaatctcacaccagcctcttaaaaggtacatgatcttggtcattttacttagcctctttgatcctcagttcctgtatctataaaacttggrtaatatgtgccatgcaagtttgatgtgagaatgaaatgagtttcagataatctgtttgaaacgcctaggacagtatgtgtcacagaatcagtgctcagaactttttatttcctccctaaggggtttgaactccaggcttcactcacatccacacactgcctcaaatgcctgagtaaccaggagctgccaca

SEQ ID NO: 119357 - DNA, 630 bp, Homo sapiens
tttgtcttagttttcgctgatctaacatgttggtttccatagcaacctagtgtggcctggataacaagtgaagctcatttcagagagttcytcagagccaggcagagcattttcaatgaaagttccttcttgtctccaaggaactgcagtcactggatttcaggaggtattaatacatgtgaacttggtaacaaagacattctctagcctggaaaaataaaactccctgctccttttagttttgagattctaaaattagcaataagagaggaaggctttacaaaatccatgttatccctgcttaaacaataagacaaatattctaaaacaaaggatcatttatcctctaaagcggagatcaaattgttttcaagggtcatgatcacaagagagggtgaaaaattagaagaggtcagactggaggaaagggtggataaagatgacaaattttggtgggagtgttacagaaacttaaattgctggtaaagagttaaagagtagattgtactagtaaaatgtataaataggtttattaggttcttccataactgataggagctataaacttctacatcacggagatataacttgagatgtcatgtaagttgtctttatcaaaaacaagcacct

SEQ ID NO: 119358 - DNA, 630 bp, Homo sapiens
tttgtcttagttttcgctgatctaacatgttggtttccatagcaacctagtgtggcctggataacaagtgaagctcatttcagagagttccwcagagccaggcagagcattttcaatgaaagttccttcttgtctccaaggaactgcagtcactggatttcaggaggtattaatacatgtgaacttggtaacaaagacattctctagcctggaaaaataaaactccctgctccttttagttttgagattctaaaattagcaataagagaggaaggctttacaaaatccatgttatccctgcttaaacaataagacaaatattctaaaacaaaggatcatttatcctctaaagcggagatcaaattgttttcaagggtcatgatcacaagagagggtgaaaaattagaagaggtcagactggaggaaagggtggataaagatgacaaattttggtgggagtgttacagaaacttaaattgctggtaaagagttaaagagtagattgtactagtaaaatgtataaataggtttattaggttcttccataactgataggagctataaacttctacatcacggagatataacttgagatgtcatgtaagttgtctttatcaaaaacaagcacct

SEQ ID NO: 119359 - DNA, 630 bp, Homo sapiens
tttgtcttagttttcgctgatctaacatgttggtttccatagcaacctagtgtggcctggataacaagtgaagctcatttcagagagttcctcagagccaggcagagcattttcaatgaaagttccttcttgtctccmaggaactgcagtcactggatttcaggaggtattaatacatgtgaacttggtaacaaagacattctctagcctggaaaaataaaactccctgctccttttagttttgagattctaaaattagcaataagagaggaaggctttacaaaatccatgttatccctgcttaaacaataagacaaatattctaaaacaaaggatcatttatcctctaaagcggagatcaaattgttttcaagggtcatgatcacaagagagggtgaaaaattagaagaggtcagactggaggaaagggtggataaagatgacaaattttggtgggagtgttacagaaacttaaattgctggtaaagagttaaagagtagattgtactagtaaaatgtataaataggtttattaggttcttccataactgataggagctataaacttctacatcacggagatataacttgagatgtcatgtaagttgtctttatcaaaaacaagcacct

SEQ ID NO: 119360 - DNA, 632 bp, Homo sapiens
ttctcctggggcctctctccttggcttacagacatctgcttcttactatgttctcacatggcctttcctcagtgcatgtgagcctctcctgtctttccctcttcttataaaggcaccagtcatagtgaattaggaccccaccctgtggcctcatttgaccttaattacctctttaaatgccctatctctaaatacagtaacattctgaagtattataggttagggctttaacatatgccttttggggacacaatttggcccatatcaaaagcagatcctcccttaattgagcctgaagataactacattacagtgacacttmagtttctaaccttgtgagagaccctgagtcagagctgctccaccaagccatgtctagttactaccccatagaaatatgtgagatagaaattaggtattgtttaagcagctaagtttggaggtaatgttttacacagaggtagataactaataacagatattggtatcaggagtgggatgcactttaaagatatctaaatatgtgaagttggcttcagaaacaggcagaaggtagagactgaaaggattttgaagaacatgttacagaaatcctaaattgcttgcactaacagattgttagtgcaaatata

SEQ ID NO: 119361 - DNA, 544 bp, Homo sapiens
atacacactctacaaaatttaggtctcatgattcatcttctgctagcctttttcaacttctgtatataataattgagatattcaacctctacaataccataaatcaaggtatttctatatattcagttgtacttgtgtctatatcctgccaaattttgagcccctaacatctggcatcctgtcttacccaattttgtatcctctcaacatgtgtaacagagccagttacagaacaagtatttctgttgcaattttggtaagtataacatctgtgtaatctccagtgatgtcccctcttaygttactgatattgctaataaattttgtctcattttctctttattaatgtagctgaaattttatagattttatcaatcttttaatgccaaaatactttggtttattgttgttttttctcttgcttatacatttctatttcattgggttccactattttctttccttttttttttccttattatttgggcataacttgctcttttttttctgtactcttaaggtgaagcttagaacattggtttta

SEQ ID NO: 119362 - DNA, 577 bp, Homo sapiens
tggggaggccacaggatcatggtggaaggcaagactctggggatgggacatcaactgtgttattccagaagattccctttactctatcaactctccagaacctggttgccctagyggttcttggatgcttttttgatctggcatttttgttttgcacagtaggaatgttggtctgtcacttgtagtattgctagaagtggaagtcaggagacaaatgtttctaaatatctgaatcaaaaaggaaaaaaaaataataggggaacctaggaattaacaggttgggtattaaactataggaactcgaatggcctttctgcatgatagtgcatagttctttgtacaccttaatccaaattcctgaaagccatatcttttgaccagtttcatgaaatagatagattttaataatgagggtgtgtggtataatggaaccagcaaaagcttttgcacaaaggtagtctaagttctcatccctgtaccaaccagctaggtaacattagggacttctcttgacattgctgagccacaggttttccctcttttatagtgcttgctctattaagatttatgtcccaaa

SEQ ID NO: 119363 - DNA, 577 bp, Homo sapiens
tggggaggccacaggatcatggtggaaggcaagactctggggatgggacatcaactgtgttattccagaagattccctttactctatcaactctccagaacctggttgccctagtggttcttggatgcttttttgatctggcatttttgttttgcacagtaggaatgttggtctgtcacttgtagtattgctagaagtggaagtcaggagacaaatgtttctaaatatctgaatcaaaaaggaaaaaaaaataataggggaacctaggaattaacaggttgggtattaaactataggaactcgaatggcctttctgcatgatagtgcatagttctttgtacaccttaatccaaattcctgaaagccatatcttttgaccagtttcatgaaatagatagattttaataatgagggtgtgtggtataatggaaccagcaaaagcttttgcacaaaggtagtctaagttctcatccctgtaccaaccagctaggtaacattagggacttcycttgacattgctgagccacaggttttccctcttttatagtgcttgctctattaagatttatgtcccaaa

SEQ ID NO: 119364 - DNA, 577 bp, Homo sapiens
tggggaggccacaggatcatggtggaaggcaagactctggggatgggacatcaactgtgttattccagaagattccctttactctatcaactctccagaacctggttgccctagtggttcttggatgcttttttgatctggcatttttgttttgcacagtaggaatgttggtctgtcacttgtagtattgctagaagtggaagtcaggagacaaatgtttctaaatatctgaatcaaaaaggaaaaaaaaataataggggaacctaggaattaacaggttgggtattaaactataggaactcgaatggcctttctgcatgatagtgcatagttctttgtacaccttaatccaaattcctgaaagccatatcttttgaccagtttcatgaaatagatagattttaataatgagggtgtgtggtataatggaaccagcaaaagcttttgcacaaaggtagtctaagttctcatccctgtaccaaccagctaggtaacattagggacttctcttgayattgctgagccacaggttttccctcttttatagtgcttgctctattaagatttatgtcccaaa

SEQ ID NO: 119365 - DNA, 618 bp, Homo sapiens
tagaaagagactctttggagatgtaattaagttagagatcttgcaaggaggagcttatcctggattatccaggtgggctgtaaatgcaatcagatgcattttgtaaatgtcctatagaggagaagacatgcatacagatgaggtggaygcaatgtgaccaaggagtcagagactggagaaatggagccaggcaatggtcaactttatgtgtcaacttggctgggcatactggccagatatttggtcatacagttttggaatgtttccttgtgggtgacttttttggatgagattaacatttagatcagtggatatcaaataaagcagattccctccataattgtggaatcagtttagatcaatggatatcaaataaagcagattccctccataattgtgggtgagcctcatttaatcaactcagtccttactagaacaaaagactgacctctcctgagcaagaggaaactttgccagtatgttgctttcagactggaattgtaattctttgctgggtctccagcctgctggcatatcctgaagattttggacttaccaacatctataatcatgaagccaattccttaaaataaatatctctacatttttttctgtgtc

SEQ ID NO: 119366 - DNA, 618 bp, Homo sapiens
tagaaagagactctttggagatgtaattaagttagagatcttgcaaggaggagcttatcctggattatccaggtgggctgtaaatgcaatcagatgcattttgtaaatgtcctatagaggagaagacatgcatacagatgaggtggatgcaatgtgaccaaggagtcagagactggagaaatggagccaggcaatggtcaactttatgtgtcaacttggctgggcatactggccagatatttggtcatacagttttggaatgtttccttgtgggtgacttttttggatgagattaacatttagatcagtggatatcaaataaagcagattccctccataattgtggaatcagtttagatcaatggatatcaaataaagcagattccctccataattgtggktgagcctcatttaatcaactcagtccttactagaacaaaagactgacctctcctgagcaagaggaaactttgccagtatgttgctttcagactggaattgtaattctttgctgggtctccagcctgctggcatatcctgaagattttggacttaccaacatctataatcatgaagccaattccttaaaataaatatctctacatttttttctgtgtc

SEQ ID NO: 119367 - DNA, 578 bp, Homo sapiens
ttttgtagtgccagaatgtaataacatactcaaaaaagaaaataaaacaaacaaaaaaaaccccaacaataatagtatgtcaaaaggacacaaagccaactaaaagagcttccaatagtcaaggctgaaacaatttgagcaaggacatacataaagtagtgttagattttaacccaacataaaataaatattcatgtgcctatgttgacataaacatataatttgagttgatcaatggcaaggaagatacaaatgtcctctgcagaaaaatctgaaataatttagatagctagctastctgttatgaaggaggttaaacatagctcctcacttcttaactgtgggctatacatagtgatttccttccaacaaatacaatatggaaaagggaaaaagagtaaatttacagtgaagaaacctgataaaaactacctcaaccagatgatcaaggttagcatcatcagtgataactcatttgcatagtgtctaccctcgatatgatgtactgagaattgtactttatctatgtagtcttctgccccaacacccataactttgaccctgaaaaaatttgcaaa

SEQ ID NO: 119368 - DNA, 597 bp, Homo sapiens
gttccagttatgtattttgaaaatcctgtaacctctctttcacttatgcaatgctatgtatgacatcatttctctgtcccttgaatawcaattggaatttttaatgaaacaaaaattgatgtactcaatattttaatgtgcccaccaataatgcatatatttatgtttgtgccaggaagtgagaaataccaaataaaactcaaataaaataacagcttttggaaacaattggaaattgctatttaacctcattttgatgaaagccactacaatggaggggtcaggctcacatttgattcaactctattgatcgaatatagcattattaaaagtgagagaatcaatcattttgtgcctcctggtatgaagtaaacagcagtaaacatcatcatctttaaaaattttgccaaatatattaaaactatatttaatcatgcttatggacctatttaacagttttcaggaaataaagggactagaaaaaaataactatcagacttgaagctaaaactgttgggaatatcctgctccagggtgactataacattcctgcatccatattagttactacaggtacaatcccagaaaaacagccca

SEQ ID NO: 119369 - DNA, 576 bp, Homo sapiens
tagttacattttttataacgtattgtaaacaccatttccctttcaactttttttctttagaaaacaagataactaatgaaaattacccaagaaatattatacatataaatagtatagtcctaacacgagctaactacaataggcaaactttactattaatataacattaaacttttaccatactagccctaataaaactctgagactattttctatcacaatgacagctgatgaatttaatgtgcctcacaaactataggaattgtgataggaagytgactctgtcctagaggccactgacaaacctgataaggctgtagcaggggtcagtctctataggaaacttgggctatatgagcatgtatgagttctgtggttaagaatctgaagcactcagtatagcaaacaaaattccaaagctgagtaccaatgtaatacgctggatcgctgtacctacttggacaagagtacatgcaacaggcacatacaatatacatctggttaaatgtaaaatcatccattgctaaagcattttaaacttctaggagaaatctactggcaatgtgttaacagcaa

SEQ ID NO: 119370 - DNA, 591 bp, Homo sapiens
acacactaattcactcccattaagaggaagggtccagcatttgggttgcatatttagagcaggtagtggagagaatatggcaggatctattagagttagtgttctttgctattaaagagagaaaaaaccagtgggaagatcacaacaccttggtgccaagtactgttaaaagacaaaagagccagttgtccaggaaattggctactccaaggaggagagagccaagaaggaaatctactggccagcctaagcctagagccaggtccagtcagaaatgcagctgtgaaaaagtggtgtgtgggagaaaaaagctgagatttaaataaagtgaacttgacttctttactcaggacttctcagagcctttaatttgctaattctcatagtaaatctccaaaaaggagatttaaaactgtggatcacctataagactctcctaaaacaacattccaaggaacatactttgggaaattctkcagtaaagcattctcatatcagatcacccaatagcccctatgcttctactatcccctctcttcctacatctcactgaaatacttacaaagggcaaaagcactcaatcctaatgat

SEQ ID NO: 119371 - DNA, 606 bp, Homo sapiens
taagaatgaagacaatctattctgggatctgagttggtaggagaataagctaragtatgaatctgtatactccaagagtgaaaaactccagagaaagattagttttatcacactgatagctgtagcaaacaccagcatggagtaggctgtataaatctgggaataaaagaaaattcatcattgcccaaaatagcatccccaggaaactgagtgagcaggtgtgctccacagatttatcacaaaacagaaattattaaaaataactcagacagaaaattaaaactagtttaatgacatcctgtaactatctcctagattttgctaagttgccactctgttgtgtgtttcatacaacacctggtgttttgacccttagagcatgttttttcttagatttcaatgagaagttttaaatagtctttaatcttcctgtggataatacaaatttatccataccttgaaattttaacaagataatagccatttattttaacagtccccttttgcaaatgaaaagatggcagggttttttttgtcagctcattgtcaagcttacacaattattgaacatcctccgtgtcttcatggaagtaaggacataccaaa

SEQ ID NO: 119372 - DNA, 606 bp, Homo sapiens
taagaatgaagacaatctattctgggatctgagttggtaggagaataagctaaagtatgaatctgtatactccaagagtgaaaaactccagagaaagattagttttatcacactgatagctgtagcaaacaccagcatggagtaggytgtataaatctgggaataaaagaaaattcatcattgcccaaaatagcatccccaggaaactgagtgagcaggtgtgctccacagatttatcacaaaacagaaattattaaaaataactcagacagaaaattaaaactagtttaatgacatcctgtaactatctcctagattttgctaagttgccactctgttgtgtgtttcatacaacacctggtgttttgacccttagagcatgttttttcttagatttcaatgagaagttttaaatagtctttaatcttcctgtggataatacaaatttatccataccttgaaattttaacaagataatagccatttattttaacagtccccttttgcaaatgaaaagatggcagggttttttttgtcagctcattgtcaagcttacacaattattgaacatcctccgtgtcttcatggaagtaaggacataccaaa

SEQ ID NO: 119373 - DNA, 606 bp, Homo sapiens
taagaatgaagacaatctattctgggatctgagttggtaggagaataagctaaagtatgaatctgtatactccaagagtgaaaaactccagagaaagattagttttatcacactgatagctgtagcaaacaccagcatggagtaggctgtataaatctgggaataaaagaaaattcatcattgcccaaaatagcatccccaggaaactgagtgagcaggtgtgctccacagatttatcacaaaacagaaattattaaaaataactcagacagaaaattaaaactagtttaatgacatcctgtaactatctcctagattttgctaagttgccactctgttgtgtgtttcatacaacacctggtgttttgacccttagagcatgttttytcttagatttcaatgagaagttttaaatagtctttaatcttcctgtggataatacaaatttatccataccttgaaattttaacaagataatagccatttattttaacagtccccttttgcaaatgaaaagatggcagggttttttttgtcagctcattgtcaagcttacacaattattgaacatcctccgtgtcttcatggaagtaaggacataccaaa

SEQ ID NO: 119374 - DNA, 591 bp, Homo sapiens
gtgtgcatgtatgtgtgtagacacacatgctggaattccttgccttctgattagaacatgcactgcagtagcatcctcagtgtaggctccaaggtggcagggacagtgtgcccttggatatagtcctagtggccaaactgaggaatctttccccacttctctcatccgaggctaccttggccaaggagatgataactttcctacactggktacacattaccaccatgctattggattttttccattctccttagctggctttttctgagctttgggagctcaatattctttaggcataacaatggggttcagttaaatttctcttgttatctctccacctttccaagtggcagtgcaatgctgtatgtttcctgttggtgctgtaacaaatgactacaaacttagtggcttaaacaatccaagtgtgttatcttagaacaatggagatcagaggtccttaatgagtctcattggactaggggtacagggggctctcttcaaagtttcaagaaagttcagctgtggtccagcttgcaggctcctcagcaaaaccaaagccctagaggtaacaggaactaccctttctagaag

SEQ ID NO: 119375 - DNA, 591 bp, Homo sapiens
gtgtgcatgtatgtgtgtagacacacatgctggaattccttgccttctgattagaacatgcactgcagtagcatcctcagtgtaggctccaaggtggcagggacagtgtgcccttggatatagtcctagtggccaaactgaggaatctttccccacttctctcatccgaggctaccttggccaaggagatgataactttcctacactgggtacacattaccaccatgctattggattttttccattctccttagctggctttttctgagctttgggagctcaatattctttaggcataacaatggggttcagttaaatttctcttgttatctctccacctttccaagtggcagtgcaatgctgtatgtttcctgttggtgctgtaacaaatgactacaaacttagtggcttaaacaatccaagtgtgttatcttagaacwatggagatcagaggtccttaatgagtctcattggactaggggtacagggggctctcttcaaagtttcaagaaagttcagctgtggtccagcttgcaggctcctcagcaaaaccaaagccctagaggtaacaggaactaccctttctagaag

SEQ ID NO: 119376 - DNA, 558 bp, Homo sapiens
tcaaggcaaatgtttatgtgagctgactgatcaatgacatcaaacgtttaccatctgctccagtacatgcaagataccacctacatgcctattggatttattggaggtacagggtagcgggagtgggcgaaaggaggtgttcctatcacctttatctagtaaataagaaacaaatcaagactttacagtccatccactaggcttaaataccaactttgtcactcacttgctctatgactaggcaagttatatattatcagcctcattgtcctcattgctaaaatagaaataatgacagtacctgcctcatgaagttcttgaagactgttgacaaatgtaaagtgrccacacagagtaatctctcaatgaatgtaggctaaaagtattaagttattatattctctcttgtggcttctcttgcacctctgtgcagaaaattctccactgggggaaaaatacgccactttgatctaccaccctcacaatttaccacaactccatttccttaagtgccaagttattttaaagtctccatgcgttgtcctgcccttactccca

SEQ ID NO: 119377 - DNA, 598 bp, Homo sapiens
ttaaaacaattgaactcatggaaatagagagtagaagtatggtaaccagacactgggaagggtagttgaggtggggggaayagaaatggttaatgggtacaaaaatacagttagatagaatgagtaagatctagagtttgatagtacaacagggtgactgtagtcgacaataatttattgtacattttaaagtaagagagtataagtggaatgtttgtaacataaagaaagaataagtacttgaggtgatgacaacccatttaccctgatgggattattatcattgtatgcctatatcaaaatattttatgttccacataaatatatagacctactaggtacctataaaaataaataataattttgaaaaataaattgctgtgttaaattcccctatcaaaggggaaaaattctcggattgttttagaaagtaacccaactatgtgctacatataaggaagaacacctgaaacaaaatggcacaaagagactaaaagttaaactattgacaaaacaataataataaagaaaaatgttggtaatataaacatctaattgaacagaattaaaggcatgaaagcgtcattttatgaagcag

SEQ ID NO: 119378 - DNA, 617 bp, Homo sapiens
aaaagtgaatttgtaaaatgagaaagaatatttacaataaaacctaactatttggaatctcccaagaaagcctctaaaacataaaagatgcagcacaagctcaataattataaactgttacaattattactctttaaaaatgagtcttctataagaattttgacagggattaatacacaaaattacaaatatacagaataagtaaacttttaagtctttatctttacagtatatttttcaaataaagctttaagagaatttccagcaattcagatagagctcacccacacttatagtacaatctatttgctccaaaacatataatcatatgataacctgagtagcaaatgcagagaaakgtctgccttctcaatacatttttgatttacgacattttaaacttacattggcttttagaagtttatttttcaaaacagtttaaagctatatggaaattgaaacctggtaaacagatcacatttctattttctttcctaaaagttgtaatacacaatttaagaacatttcatatgtgataactgattatttctgtcttcttgcctttcaaaaaggctgtatctatagatgcaaaatcactccttatgttcccatttata

SEQ ID NO: 119379 - DNA, 662 bp, Homo sapiens
caagtaaatagcggatgggtaagaagtgaatgatagccaccactcgtgtctttaatgaagttttactaaaatccagaactcctttcttcaaatatgcattttaccttagattggtactacttacaaggcaacattcacaccggcacattatacttcagtatgggtacctcgggagcctctggcatgaagagctctagttgtcttcctgtttattctcatcagccactttctcctggccagagagcacgttgatctctcctgaacaccaagttggacacttatgcctgctcaaggcaatcagtgtctatttcagtcagcagaaacagccaagtatcatccctaatagttttcattcccagcaaattttcttccatagtcaaagtrcaaggatacaataagagccaataaaatgacaaaagttttcatcacaaacaaattaactgactctggaatggatcacagtatacctattttctaatcaaaatatcaaattcagtggtgttgaaatttgggctatatccttaatcctcggactttctagcatctcttccctccacatactttgctcatttgaaaacttttgtaaactctaaagagaaaatgaaaagaatcaagttattaatatagtttactttttaaagcctctttcttcttggttagtg

SEQ ID NO: 119380 - DNA, 474 bp, Homo sapiens
tcaacctttctacttcctggctctgggccaaagaagctggccacctgttcttaatctattcttatcagctggaaaataactgagagatgccaacagtaacctggctgaggactagggcatgggactccatgttaaggaagccacagtccacagggaaattatgggacagctgtcaggcagagawgtaaacaggaataaagatgcaacaagttgctgatgtgattgggaacgtttttccttcctaggtttccctctacattataatatagttttcttggaagaggcacaatagagaaattaaaaattagataagagggacagcaacgttgttgccagtgacaggaacatggaggacagagatagaaaacaggtctgaggtagcaggaaacaattaactataaccctgattagctaagcctctggccaaaaaaggtgaaaaaacagaagtcaggtagctgtataggttttccagat

SEQ ID NO: 119381 - DNA, 542 bp, Homo sapiens
tttattaactttgattatagcaggtagtgttgttcatggatagttggtgaaagagagcagtaatatagtcaaatagtttagggccggagatcaggggttttacatgcactgctaagtttttgtcctttattcttgggaactgaagcaccataaggtttgaaagcagaaagtgaagtgatgacgtcagccctatattacagaatgagaaagtggaggagaaactaagtttcataagctagctgggtgattatttcaataattcaggcaagaaatgcatgtgcctgggaacccagtcttgctttccaatggagaaatcagatgacaaactgcccagtatactccatgagactctagagtgctctctagcctctagccccaacgcagtggttgaaatcctctgatggcctgggtttggtgatatttctggagcaatttgatgatgggatgggacacaatccaagtatagggccrttgaaaaacacacgtaaaaaatcacagtatattctgctcaaaactcagccatttctgatggacaaaacttg

SEQ ID NO: 119382 - DNA, 608 bp, Homo sapiens
aggcaggggatgcacaatttattccataccaggaccatgttagaacattggaaccttggtgataagaaagcctctcccacctccacagtgtggcaggcacgggaaagagcagcaaaacaccaagggatggagggatatgacaaggaggtagcaaggggctggagcaggtggctggggggacgaggtctgctccttcggaggtkgtcaggtcttctcatcatctgccatgcaatagtgataggaagaacagggtaacttcagtcctggggggatcagaggtggaattttctccattaccataaagatgaacttgtagtgactctccagcacagtgacccactcatagagctctatcatggaaagggaggagctctggcagagtggggctcttagcattttcactggcagaggcttggttttgtttttaaaattattcatacctttctcaggcttgtgagaggtaatcctctgcaccactatccttttgtctcccagtccgcttcaatcctcacctgtctatcagcccccatcacttgctgtttgtttaccttacaagtgatgggggccgatagacaagtgaggattggccaaggggagtaggagagaga

SEQ ID NO: 119383 - DNA, 616 bp, Homo sapiens
ctggcttttgcttttttaaatttttttgctcagaataatttctttgagatccattcaagttgtagcatgtatcaataatccattccattttattgccgcgtagtttcccatggtacagaagaggtagcacggtttattttacccattggatgatatgaaggatatttgcgttgtttctagtttttggctatcaggaataaatctgctataaatgtgtgcataggtttgtgtgtgaacataagttttcatttttctgggataaatgtccaggagtgcagtttctgggttgcatgtgggaagtacatgtttagttttgaaagaaaatgacatactattttccggggtggccatataattttacaattctttcagcagtctgagtgacccagtttccctgaatccttgacagcatttgatattatcaaaaatttacatgtagccattttgataggtatgtagtgatatcgtatcttatggtggttttaaaaacttttattaagttattattgktacataatagttatatatatttgtggagtacatgtgatgttttgatacaagcacacaatgtatgatacattgggataattggggtatccatcacctcaagcattta

SEQ ID NO: 119384 - DNA, 576 bp, Homo sapiens
gtgagccaccacacccagcctatttctttaaaatttttacaaatactttaaaaaattacactaagaagaaaagcactgtgctaattaatacaggaaatactagacaagttttcaaagagtttatggaggtaagacaaatatataaataaccataataaggatcaaatatatttgtcaagaactctccatcctgtttcattgttatttaatacttaagctatatttaacatattattaaagtaatcataataaacatgtttaagccacactagagaggctacccacctaccccacacaggtaactaccctttaaaaaaattaagtctttacttttagagcagtttaggtttacagaaaaattgagcagaaggtacaaatagttyccatatacctctataactgatttttaaattttttgatatttagttgttatgatgttcatcattacaaccttaaatggtcactaatactttcttttcttgatttattaatgctagattttatttattgacttcctgacatgaaggatgacctatttgtttcacttatattttctcccagcctctcttctttttt

SEQ ID NO: 119385 - DNA, 570 bp, Homo sapiens
ctctggacctcagtctcctccttcataaaatgtttagggtttactaccacctcctcaggcaacttcatgctgggtgatctccaaggtttattttgaatattctgtctcttttgatgagactgcctttaacaacacaccaagcatttctgtaagcaaaaagaatacaaggaaatagaatgcagtgttagtctgtttaggaaacaatattctccatgccatagatttrttcagcctaagaaggagtggaatgtccttcaatggtaaatgatttaagtgaggtagtcttactataatagtatttcaactaaagagtgtacttaagggaaactgttgtgagtatgtggaatgacacatccataaaatatatctccagtattctgtgtttttttagtggctggggcaatgttcagattgaatacctcagtttaaaagggacatggataaagaggagtacatgtaaaacaataaattgaggaagatttaggggtgtgcaggaggagtggtaggggaaggtatagagaaaccacagtgcaaaagaaaaaagtaagaggtgtgcatagcaacatgtgt

SEQ ID NO: 119386 - DNA, 592 bp, Homo sapiens
cataatttcagcacgatacacatttcaggctggataattctttgttgtgagagcctagtctgtgcattataggaatatttagcagcgcccctggcctctrtccagtagataccagtatcctgtgccacacttccctagttgtgacaatgaaaaatgtcttagcattgccaactatgccctggggaatcaaaattgtccctgattgaggacttcccagcagctagtttattttctactctcctatgtgcttttcaggcaggaagagggagagagaaagctgtaggtgacatgaaatctgcttttggcttctgaaacaacatgagagaaatgaaagagaaaacgaatacttactagcatctgttgtgcactagaatacactccatttgtgcttttacataaatttgggcttcttaaactagagagtgggccagagttgcactaaaccagaaggtaaacatatagcatcaattttacttgatggtaaaaattctgaaatatttatttttctttaaatcacatgcatacagagtagaatataatgtgtgtgttaatattgaagttaaagtataaaactacaaataaattttgcatg

SEQ ID NO: 119387 - DNA, 591 bp, Homo sapiens
gaggctgcaactcaattctcaaatttccactcatcagcaggaagatttcaatagctaataaagataatcaggatgtattatgcaattttctcattcttttatattaccgtagctaaagtcacagtgacatcctacatcctaagcttttactggaaacatctttgtaatttattctctgctcttttctatgaaaactacctattttgcaagcacagcttttggaattataagaatgttatactattgtatacattatatgttttatttgcacagcaattttctaccaagatgtgcaacatgtttaaaatttttaaattgctaccatccaaactgagtccatcctaagcccaatccacaaaaccctaaattctggctaaaaccataatctaggggttcttctgaggaagggcctgggcagagaacccaaagcaggtctttagtctttacatgcatgagtcacctttacttgtcaaggtatacaactccatagtgcctcaaacagtcstcagagtttagtctctggacaagcagcagtacatcccctgggaacttgtgagaaatgcaaattgtctggccaaccccaacctactg

SEQ ID NO: 119388 - DNA, 433 bp, Homo sapiens
aagaggacagattgaaaagtttcaaaaatttcaaaagtttcaaasggaccaaagaaaatggaagggaaaaatatttaaaattttattttcatttcagaacataaaagaggcaagaatatttaaagttctcattagaaaaaatgaaaaaaatcctttctgtggacccattatagcaaaatttcgagacatcagaaaaatctgaaaatcctccaaagaggaaaaaagtacccattaaggagcaataattggagtaacatagaacttctcataggtaagaatgaatgcaaaataatggagaagtatcttaaatagtttaaaagagaaataatttttgttagaatttcaaatcatgaaaaagcaaaataaagacattttcagatactaaaatgtaattttcaaaaactcactctgaaagattagctagagtttaagg

SEQ ID NO: 119389 - DNA, 509 bp, Homo sapiens
  misc_feature (1)...(509): n = A,T,C or G
aatgaataagaactaaagaccagatatgaagacatttattgtaaggttttgtccttcaagctaggaaagcactggccagctgtttttagctgtccaggagcagaatagaatccagcaaatagacacaagaatatgtaaactagatatatgacagaagtggcattgccaataattcagtaaatggggctatgacaattggttatccaaaggtaaaacattaaataatatgcctatcctatgccatactccaaaataaatcncaaggaattaaagccaaaatgttaaaaacaaaawtttttaatgtttaaaagagaatatagaatatgtttataaccttgttataaaaaagaattcttaaacaatacaaattacataaaccacaaaggaagatattaataaagtggactttaatacagcaaagggtaaagtctgaaagaaggtatttgcaacacgtcactgaaaaagaactagtacctagaataaatgcaaaaattcctgaaaattaataa

SEQ ID NO: 119390 - DNA, 509 bp, Homo sapiens
  misc_feature (1)...(509): n = A,T,C or G
aatgaataagaactaaagaccagatatgaagacatttattgtaaggttttgtccttcaagctaggaaagcactggccagctgtttttagctgtccaggagcagaatagaatccagcaaatagacacaagaatatgtaaactagatatatgacagaagtggcattgccaataattcagtaaatggggctatgacaattggttatccaaaggtaaaacattaaataatatgcctatcctatgccatactccaaaataaatcncaaggaattaaagccaaaatgttaaaaacaaaaatttttaatgtttaaaagagaatatagaatatgtttataacsttgttataaaaaagaattcttaaacaatacaaattacataaaccacaaaggaagatattaataaagtggactttaatacagcaaagggtaaagtctgaaagaaggtatttgcaacacgtcactgaaaaagaactagtacctagaataaatgcaaaaattcctgaaaattaataa

SEQ ID NO: 119391 - DNA, 540 bp, Homo sapiens
atgctaagattaattcatgagttcagaagatgaaactctgatcccttcactataaagttgtccttcagcattttccctcataattttgacatctattgatgaccattgtctgaatcagatttttcacttagaagctgcaaaatgttgattttccaactctctcattcctttcacatttggtagttgagattcctttttattgaactgcctctcatccattaatgctacaaggttactctgccaattcacttcaaaaagtcagaataaaagctgaattatttttctttagtaagtaacttttagaggaacgagttggagtcagaagttgatgccatggtgtatcactgacctcccttcaggaatgaagcactcattccacagctgtgggaaatgttaraagctgctgctcaaagctgaaccctccacaagaatgtcctctgcagaaggcagctgtattacccaaggttatgcaccagcctcttccctgcagacagacggatccaatgactggtcactgggatgggagggggaaaagtcctg

SEQ ID NO: 119392 - DNA, 575 bp, Homo sapiens
gtttaaggaaaaaataatcaaaaattcaggaaacattggacacacttatagcaatgcaaaatgctctggaaagtctcagcaatagaaccaaacaagtggaagaaagaaattcagagcttcaaattaacccaatccaataaagacaaagaaaaaagaataagaaaatacgaacaaagcctccaagaagtctgtgattatgttaagcaatcaaacctaagaataataggtgttcctgaggaggaagagaattctaaaatcttggaaaacatatttgggggaataattgaggaaaacttccccagccttgctagagacctagacatccaaatacaagaggcacaaaggacacctgggaaattcatcacaaaaagaccatcgcctaggcacattgtcgtcaggttatcagaagttaaggcaaagraaagaatcttaagagctgtgaaacagaagcaccgggtaacctataaaggaaaacctatcaattaacagagatttctcagcagaaaccctacaagctagcaaggattgggggcccctatcttcagcctcctcaacaaaacaattatttagccaag

SEQ ID NO: 119393 - DNA, 623 bp, Homo sapiens
tctagttcagtgatttgggcyaaacctgctaaagataataaaaaagactagctaatattttttaacttcctaaatgcattaaagaactaacaatgcaattaggaattatcaaatttaggagaaatttggaagaaaacaggaatctaaagagatgagcctaacattcaaaaccaccccaccagtgggcatttgtaaatccaaaaagagatgattaaaaggttgtgcaacactttttataacatcacttgaataggaacatataagtaggggtcaaagttggggaaaatagaaaagaactccctatttaatttggggctcagaagggctgaaaactgcattccatgaataagaaaactggaaataatcaaagaactatatggactgcagcatctctctgccatcagatttcctgggtaacacagaatatctcaaatcctaaaattagatttaggagatcctagattagtactgccaccaggcacataaaagaaacaagagtaaatcttccctggaggaattcacatcatcttaggcctcaaattatttctataaataattttttcaaatacactatgcagcacctaatcaaagataacgaaaaacatgaggaaacaagataaaat

SEQ ID NO: 119394 - DNA, 623 bp, Homo sapiens
tctagttcagtgatttgggccaaacctgctaaagataataaaaaagactagctaatattttttaacttcctaaatgcattaaagaactaacaatgcaattakgaattatcaaatttaggagaaatttggaagaaaacaggaatctaaagagatgagcctaacattcaaaaccaccccaccagtgggcatttgtaaatccaaaaagagatgattaaaaggttgtgcaacactttttataacatcacttgaataggaacatataagtaggggtcaaagttggggaaaatagaaaagaactccctatttaatttggggctcagaagggctgaaaactgcattccatgaataagaaaactggaaataatcaaagaactatatggactgcagcatctctctgccatcagatttcctgggtaacacagaatatctcaaatcctaaaattagatttaggagatcctagattagtactgccaccaggcacataaaagaaacaagagtaaatcttccctggaggaattcacatcatcttaggcctcaaattatttctataaataattttttcaaatacactatgcagcacctaatcaaagataacgaaaaacatgaggaaacaagataaaat

SEQ ID NO: 119395 - DNA, 623 bp, Homo sapiens
tctagttcagtgatttgggccaaacctgctaaagataataaaaaagactagctaatattttttaacttcctaaatgcattaaagaactaacaatgcaattaggaattatcaaatttaggagaaatttggaagaaaacaggaatctaaagagatgagcctaacattcaaaaccaccccaccagtgggcatttgtaaatccaaaaagagatgattaaaaggttgtgcaacactttttataacatcacttgaataggaacatataagtaggggtcaaagttggggaaaatagaaaagaactccctatttaatttggggctcagaagggctgaaaactgcattccatgaataagaraactggaaataatcaaagaactatatggactgcagcatctctctgccatcagatttcctgggtaacacagaatatctcaaatcctaaaattagatttaggagatcctagattagtactgccaccaggcacataaaagaaacaagagtaaatcttccctggaggaattcacatcatcttaggcctcaaattatttctataaataattttttcaaatacactatgcagcacctaatcaaagataacgaaaaacatgaggaaacaagataaaat

SEQ ID NO: 119396 - DNA, 389 bp, Homo sapiens
gaattcaattttgaggaacaagatttgctgagctatctgagtgatgcaaagctggtctgtagttcatctttacttgtttatttttggttcattattaccattagggtacgtcctttcaggattcctacctaaagggtggtgttttataaggaccaacatcctttgctattgtacctcaacctttggttcctaacattataggactgtcaaagatgccagtctttcagctaccagtgttatytgagcccaaaaatgacaggcttaactctctgaatttcatagtcttccaagatcttaagcaggtaattcttcactatttttaaacttcttcatttttttgagaatatgtttttgtattttattcagtttttctagttgttctcagtagg

SEQ ID NO: 119397 - DNA, 417 bp, Homo sapiens
ggaattccaagccagtgtgtcttaacttttgaggtgccatgggaagtggggcctgcagaatgacactccttgactccctggattcagcccctttgctgggcatatgtacaggcagatctccccccttgccagggatcctggagctggggtacataaagctcctgggtctttgtgtgtgcccaagtagctgttctgctgagactccacacagctttgtgtatcggactcaaggtcctgatgacatgggctcaygagaggatctcctgatctgcagattgcaaagatccgtgggagacacctggtttcccgggatgtggtttggggttcatttggctccgtggtgctcctgggtgggccatcgccccactttgcttttcttcattctctatggattgagttgtttgcctagtcagtccc

SEQ ID NO: 119398 - DNA, 660 bp, Homo sapiens
gtagcccagggtgagcagaaacattccaattagaggcagaggctgtgtgaatggacaagcctcttcacayagggagaagtcattgttatcattcctccacctccaagtagaatgtccttataccccaatccaagcctctgcagctgggtattcacccccaatgctaaaaggcttcatgaaaaccctgaaatttctctctgccccactggcttcctgacctctgctcatgcacacacatttccctaaggcttggggacacctctgatccagatgtctgtgggccacagccttctctcctcaggccctgtgggtctggctgaccgtgtgctttggttttacaggatgtcaggagagctgcagagccatgtgagcatctgtaagtagcagagcccaggggcagagagaggctggtggtgctgggtggagggagggccaggaggtggccagcagagaacggaaagtctggcattttagcttccagtcctgtgcaatagacaccaaagtaagcaagtgtaatggcaaagcctggaagaattcatttgaaataaatggttatgatttcaggtctgcttatcttaattgttatgatgcctttttattaaatgatgcctaggaggaatcagcagcggctagaactctttagggtacatattcaataaa

SEQ ID NO: 119399 - DNA, 657 bp, Homo sapiens
gaaagcttcaaaatcgctggtgcctgggcccacacctaaggagtagagtttaattggtctggggctatggtctggactttagaatttttaaaaggtggttttaatgtgcagcaagtttggagaccactgacctggaggaaacaggacaaatgaaacagcctctttagattccattcagtctaaggacacagataggagtaacaatcattatcataatagtgaacttcaccaggtgatttccatggaccatgcactgtgctgtctataacatggaaggtctcgtgaaatctaaataccaacatcataaggaagatattcttactatgttcattttgcaaatggagaaagtgagacttggaaagagaatcttgtcaaagaatacactaatgaaaatagtggaatggagatttgaacccgcgcattcccacttcagaacctacatgtcttgcagaagagatggggtcgttggagagagatgtgcccgcttcctcctctccccacctgccmccttaaaaggaaagtgggaagttagttgaaggctgcagctcacccagcccatctcccagttactgaaacccagggctgccaagaaggtgagggcccagagcaactatcagccacctggatcacagttccagacagcagcgggaagcaggg

SEQ ID NO: 119400 - DNA, 685 bp, Homo sapiens
tcccagaaaatgtggccctgacttatctcttccgaattcttgattttgtcctgtcatggaggcctgggggacagatggagggaatcatgtgcctgaatctgaagaatattggaatagagattccacaaggyaggggcaggagaaataaaggacagaaaggagaggagttggtcaaagaaggcatctcaacgtctaaatgagaagtcttaattcgatgttcagggaaagaaagagtaactttagggacctaaacaaggaggactagcactaagacactgaagagatttcctgaaatagacaatatttccatcagagacaatgagaaatcccatcaggagaaaatgtctctcactttcagctcaccccagtgaaaacaacaagcaattctataaaccatgtaggaaatgcccacacatgcattatctcacctgagtcccactcacctgggagtgcggagaccaggtgtgggggtctgcagtccttctagggaccatggagtgctccatccctgcccctaatcaatgctattcccacaaggcagatactcagagggagagccaagcaggctcattcatcaataaaccaagaggctggcaggagggagcaaacacccgggttggtgagagtcccagggaaagtctgccagctgctctttgctctgagaggcagggtggcagggtggggc

SEQ ID NO: 119401 - DNA, 685 bp, Homo sapiens
tcccagaaaatgtggccctgacttatctcttccgaattcttgattttgtcctgtcatggaggcctgggggacagatggagggaatcatgtgcctgaatctgaagaatattggaatagagattccacaaggtrggggcaggagaaataaaggacagaaaggagaggagttggtcaaagaaggcatctcaacgtctaaatgagaagtcttaattcgatgttcagggaaagaaagagtaactttagggacctaaacaaggaggactagcactaagacactgaagagatttcctgaaatagacaatatttccatcagagacaatgagaaatcccatcaggagaaaatgtctctcactttcagctcaccccagtgaaaacaacaagcaattctataaaccatgtaggaaatgcccacacatgcattatctcacctgagtcccactcacctgggagtgcggagaccaggtgtgggggtctgcagtccttctagggaccatggagtgctccatccctgcccctaatcaatgctattcccacaaggcagatactcagagggagagccaagcaggctcattcatcaataaaccaagaggctggcaggagggagcaaacacccgggttggtgagagtcccagggaaagtctgccagctgctctttgctctgagaggcagggtggcagggtggggc

SEQ ID NO: 119402 - DNA, 685 bp, Homo sapiens
tcccagaaaatgtggccctgacttatctcttccgaattcttgattttgtcctgtcatggaggcctgggggacagatggagggaatcatgtgcctgaatctgaagaatattggaatagagattccacaaggtaggggcaggagaaataaaggacagaaaggagaggagttggtcaaagaaggcatctcaacgtctaaatgagaagtcttaattcgatgttcagggaaagaragagtaactttagggacctaaacaaggaggactagcactaagacactgaagagatttcctgaaatagacaatatttccatcagagacaatgagaaatcccatcaggagaaaatgtctctcactttcagctcaccccagtgaaaacaacaagcaattctataaaccatgtaggaaatgcccacacatgcattatctcacctgagtcccactcacctgggagtgcggagaccaggtgtgggggtctgcagtccttctagggaccatggagtgctccatccctgcccctaatcaatgctattcccacaaggcagatactcagagggagagccaagcaggctcattcatcaataaaccaagaggctggcaggagggagcaaacacccgggttggtgagagtcccagggaaagtctgccagctgctctttgctctgagaggcagggtggcagggtggggc

SEQ ID NO: 119403 - DNA, 685 bp, Homo sapiens
tcccagaaaatgtggccctgacttatctcttccgaattcttgattttgtcctgtcatggaggcctgggggacagatggagggaatcatgtgcctgaatctgaagaatattggaatagagattccacaaggtaggggcaggagaaataaaggacagaaaggagaggagttggtcaaagaaggcatctcaacgtctaaatgagaagtcttaattcgatgttcagggaaagaaagagtaactttagggacctaaacaaggaggactagcactaagacactgaagagatttcctgaaatagacaatatttccatcagagacaatgagaaatcccatcaggagaaaatgtctctcactttcagctcaccccagtgaaaacaacaagcaattctataaaccatgtaggaaatgcccacacatgcattatctcacctgagtcccactcacctgggagtgcggagaccaggtgtgggggtctgcagtmcttctagggaccatggagtgctccatccctgcccctaatcaatgctattcccacaaggcagatactcagagggagagccaagcaggctcattcatcaataaaccaagaggctggcaggagggagcaaacacccgggttggtgagagtcccagggaaagtctgccagctgctctttgctctgagaggcagggtggcagggtggggc

SEQ ID NO: 119404 - DNA, 612 bp, Homo sapiens
gggaaggaaaaaaaaaagagaaagaagaatctggaggacttgtaaggagaatggggaaagaaggcagccttgggatctccaggttggaagtggtccaatttccgaaccagggctggactctctgctcaagtgcccttgccttgggaaagacccttctacttgtttctccaagtcagcttaactcctctcacaagacagctcctgcactgtggggcaactgggccggggtgaaagttcttctttagagtgactcctgtaacttccaagcaagaagaggctgactctcttccctacaaactatrgtgtggtttatcttcattgaaagtgaccattggccaggtacagtagttcacgcctgtaatcctagcactttgggaggccaaggctggtagatcacttgagctcagaagttcatgataagcccatctctaaaaaacatggaaaaccccatctctaaaaaagaacaaaaattggctaggtgtggtggcgtgtgcctgtagtctcagctacttggaatgctgaggtgggaggatcgcctgcacccagggaggttgaggctgcagtgagctgagattgtgccaccgcactccagcctgagcaacagaacagcac

SEQ ID NO: 119405 - DNA, 612 bp, Homo sapiens
gggaaggaaaaaaaaaagagaaagaagaatctggaggacttgtaaggagaatggggaaagaaggcagccttgggatctccaggttggaagtggtccaatttccgaaccagggctggactctctgctcaagtgcccttgccttgggaaagacccttctacttgtttctccaagtcagcttaactcctctcacaagacagctcctgcactgtggggcaactgggccggggtgaaagttcttctttagagtgactcctgtaacttccaagcaagaagaggctgactctcttccctacaaactatagtgtggtttatcttcattgaaagtgaccattggccaggtacagtagttcacgcctgtaatcctagcactttgggaggccaaggctggtagatcacttgagctcagaagttcatgataagcccatctctaaaaaacatggaaaaccccatctctaaaaaagaacaaaaattggctaggtgtggtggcrtgtgcctgtagtctcagctacttggaatgctgaggtgggaggatcgcctgcacccagggaggttgaggctgcagtgagctgagattgtgccaccgcactccagcctgagcaacagaacagcac

SEQ ID NO: 119406 - DNA, 572 bp, Homo sapiens
ttgaccttttaacaaccgaatggttagggggcatgacccctcttgcagttgaaaattcaatataacttttgactacctaaaaacttgactactattagcctactgctcaccagaggccttattgataacataagcagtcaacatatattttgtttgttttatatatatgttattgctgtattctcacaataaagtaagctagagaaaagaaaatgttgttaagaaaatcataaggagagaaaacacgtttacagtactgtactgtatctatcaataccataagcttacatcatgtgtttgcaagatgaattatctatcmtgtcagaaatggcaggcaactgcagctgcagacctcaatctacggtacatatcaagcaattcagctttttttttgtaatgtcatggtttttctctgcttcttgggagcacttccagcatcactagtgccactctgcatgggtcccatggtgttattcaaggtttactgtaaagcactaaacatgatgaaaaatatgcgagaacctccagagatcactttttactgctataagcaatttactgggggagctaat

SEQ ID NO: 119407 - DNA, 586 bp, Homo sapiens
cttcttctaattcatcatatttttctttcttgtggtgtttttgtgtcctgtttaagaatcctgctctatgctctcaaggccatggagacattctctgatttcttctaaaatctctactctttggcctttcacactgggggttttataacatttcatttaaaacatgaaaagacatataaatctacttaatcttggtggtgaacacacaggtgttwgctctattgttttcagtatgattgaaatattctatagttaaaaataaaatgaaaaatattgaaaaatattaaaaaataggtgtttccctgggttctttcttttttgctctgttcttttcatgttgcatattgttcctgggtgagtttgcctactctagtttcactcatacatttattcaaatttcatctagcaccaatctggcccatgtaccatgggggcggtggccacagagatgactataacatggatgcccccttaaggaacttacagtctagtgtatatcgggacacacaaatgcaggacatacaaatcctattcccaggaacagctattccaaagaacagctcagagctcatgctgtcttgaacat

SEQ ID NO: 119408 - DNA, 586 bp, Homo sapiens
cttcttctaattcatcatatttttctttcttgtggtgtttttgtgtcctgtttaagaatcctgctctatgctctcaaggccatggagacattctctgatttcttctaaaatctctactctttggcctttcacactgggggttttataacatttcatttaaaacatgaaaagacatataaatctacttaatcttggtggtgaacacacaggtgttagctctattgttttcagtatgattgaaatattctatagttaaaaataaaatgaaaaatattgaaaaatattaaaaaataggtgtttccctgggttctttcttttttgctctgttcttttcatgttkcatattgttcctgggtgagtttgcctactctagtttcactcatacatttattcaaatttcatctagcaccaatctggcccatgtaccatgggggcggtggccacagagatgactataacatggatgcccccttaaggaacttacagtctagtgtatatcgggacacacaaatgcaggacatacaaatcctattcccaggaacagctattccaaagaacagctcagagctcatgctgtcttgaacat

SEQ ID NO: 119409 - DNA, 621 bp, Homo sapiens
cagagaagaggtttatcagctctactttacaatgggctaaaaggaggcccagaggagcctggagactggaacttggggctcttgcctttatccagggtgctttccatggcattgttctgcccgcctcctggggtaggtaggtctgcgcacattgaagaggctgcctcactccctgggccttctccttctgggctgggccaagtttcgagctgcagctgcctggcccaagaccttttttcctaagtttcagatgccatgaggctggccctcttcagtgagactcagctcagaggtcasctggtattgaagaacagtttctggccaggcccggtggttcacacctctaatcccagcgctttgggaggccaaggcaggtggataaccgaggtcaggagtttgagactagcctggccaatatggcgaaatcccatctctacaaaattacaaaaattagccgggcatggtggtggctgcctgtagtcccagctacttgggaggcctaggcaagagaatcaattgaacccaggaggcagaggttgtagtgagcggagatcacaccactgcactctagccggggtgatagagtgagactccatttaaacaaaacaaaacaaaaccaac

SEQ ID NO: 119410 - DNA, 621 bp, Homo sapiens
cagagaagaggtttatcagctctactttacaatgggctaaaaggaggcccagaggagcctggagactggaacttggggctcttgcctttatccagggtgctttccatggcattgttctgcccgcctcctggggtaggtaggtctgcgcacattgaagaggctgcctcactccctgggccttctccttctgggctgggccaagtttcgagctgcagctgcctggcccaagaccttttttcctaagtttcagatgccatgaggctggccctcttcagtgagactcagctcagaggtcacctggtattgaagaacagtttctggccaggcccggtggttcacacctctaatcccagcgctttgggaggccaaggcaggtggataaccgaggtcaggagtttgagactagcctggccaatatggcgaaatcccatctctacaaaattacaaaaattagccgggcatggtggtggctgcctgtagtcccagctacttgggaggcctaggcaagagaatcaattgaacccaggaggcagaggttgyagtgagcggagatcacaccactgcactctagccggggtgatagagtgagactccatttaaacaaaacaaaacaaaaccaac

SEQ ID NO: 119411 - DNA, 621 bp, Homo sapiens
cagagaagaggtttatcagctctactttacaatgggctaaaaggaggcccagaggagcctggagactggaacttggggctcttgcctttatccagggtgctttccatggcattgttctgcccgcctcctggggtaggtaggtctgcgcacattgaagaggctgcctcactccctgggccttctccttctgggctgggccaagtttcgagctgcagctgcctggcccaagaccttttttcctaagtttcagatgccatgaggctggccctcttcagtgagactcagctcagaggtcacctggtattgaagaacagtttctggccaggcccggtggttcacacctctaatcccagcgctttgggaggccaaggcaggtggataaccgaggtcaggagtttgagactagcctggccaatatggcgaaatcccatctctacaaaattacaaaaattagccgggcatggtggtggctgcctgtagtcccagctacttgggaggcctaggcaagagaatcaattgaacccaggaggcagaggttgtagtgagcggagatcacaccactgcactctagccggggtgatagagtgagactccayttaaacaaaacaaaacaaaaccaac

SEQ ID NO: 119412 - DNA, 616 bp, Homo sapiens
gccacaaaaccagcaagtttttattagtgattttcaaaggggagggagtatacgaatagggtgtgggtcacagagatcacatgcttcacaaggcaataaaatatcacaaggcaaatgggggcagagcaagatcacagaaccagggcaaaattaaaattgctaatgaagtttcgggcacatattgtcattgataacatcttatcaggagacaaggtttgaaagcaraaaactagcctgactaaaatttactaggcaggaatttcctcgtcctaataggcctgggagcgctacaggagaccagggcttatttcatcccttatctacaactgtataagacagacattcccagagcagccattttagagacctccccctaggaacgcattctctttctcagggctgtttcttgctaagaaaaagaattcagcgatatttctcctattcgcttttgtaagaagagaaatatggctctgttccgcccagctctcgggcagtcagatttaatggttatctcccttgttccctgaacatctctgttatcctgttctttttgcaaggggcccagatttcatattctttaaacacacatgctttacgaacaatttgttcagttaac

SEQ ID NO: 119413 - DNA, 616 bp, Homo sapiens
gccacaaaaccagcaagtttttattagtgattttcaaaggggagggagtatacgaatagggtgtgggtcacagagatcacatgcttcacaaggcaataaaatatcacaaggcaaatgggggcagagcaagatcacagaaccagggcaaaattaaaattgctaatgaagtttcgggcacatattgtcattgataacatcttatcaggagacaaggtttgaaagcaaaaaactagcctgactaaaatttactaggcaggaatttcctcgtcctaataggcctgggagcgctacaggagaccagggcttatttcatcccttatctacaactgtataagacagacattcccagagcagccattttagagacctccccctaggaacgcattctctttctcagggctgtttcttgctaagaaaaagaattcagcgatatttctcctattcgcttttgtaagaagagaaatatggctctgttccgcccagctctcgggcagtcagatytaatggttatctcccttgttccctgaacatctctgttatcctgttctttttgcaaggggcccagatttcatattctttaaacacacatgctttacgaacaatttgttcagttaac

SEQ ID NO: 119414 - DNA, 561 bp, Homo sapiens
gggtaacaggtggcagggcatggcacctacagctcagtaatcgggggggcggggtgcggggaaggggagggatgcacaggcrcagactctgtgggtctcaggctgatgggaggctgcttgccagctcctagatcagggatggatgcagcagcggaagtgacggaagccccagaggaagagagctttgcactacccatctcttccacctctgaagccaaattcaatactgtggttggttctattgaggccatcatcatggatcccgagttccagtaccacagagaaatttcatggacaaatactaccaggaatttgaagacacagaagagaataaactcacctacacaccaatctttaacgaatacctttctttggtagaaaaatatattgaagaacagctgctggagcggattccagaattcaacatggcgaccttcacagcaacattaaagcaccataaaaatgaagtggctgatgacatattcaacatgctagtcacatttacagactttctggcatttaaagagatgtttctggactacagagcagaaaaagaaggcc

SEQ ID NO: 119415 - DNA, 561 bp, Homo sapiens
gggtaacaggtggcagggcatggcacctacagctcagtaatcgggggggcggggtgcggggaaggggagggatgcacaggcacagactctgtgggtctcaggctgatggraggctgcttgccagctcctagatcagggatggatgcagcagcggaagtgacggaagccccagaggaagagagctttgcactacccatctcttccacctctgaagccaaattcaatactgtggttggttctattgaggccatcatcatggatcccgagttccagtaccacagagaaatttcatggacaaatactaccaggaatttgaagacacagaagagaataaactcacctacacaccaatctttaacgaatacctttctttggtagaaaaatatattgaagaacagctgctggagcggattccagaattcaacatggcgaccttcacagcaacattaaagcaccataaaaatgaagtggctgatgacatattcaacatgctagtcacatttacagactttctggcatttaaagagatgtttctggactacagagcagaaaaagaaggcc

SEQ ID NO: 119416 - DNA, 568 bp, Homo sapiens
gggagacatggagatgacctgaagaacagcaagatggagattgcagagctcaaccgcaccgtccagaggctgcaggcagagatcagcaacgtgaagaagcaggtgggacrggtgcttagggagggctgaccaagccctgcacctcctacaatgccctgccagatcgagctctggaaacttaaccattaaatggtctccaactgtctctggagcagattgaacagatgcagtcactcatttcggatgctgaggagagaggcgagcaggccctccaggatgcgtggcagaagctgcaggacctggaggaggccctgcagcagtccaaggaggagctggcccggctgctgcgtgactaccaggccatgctgggggtcaagctgtccctggatgtggagatcgccacctaccgccagctgctggagggcgaggagagcaggtgggtctggcagctgtgtttctggggctaaggcttgagatgcacccatgaagctgtgggactggctatttggagaaaagataagccccacctttttgggaagattggtagcccagggtgagcagaaacatt

SEQ ID NO: 119417 - DNA, 581 bp, Homo sapiens
atcttttgctgtgtaacaaacccaccccaaacgttagtggctttaaggcaacattattttttttatttctcatgattctggagtcaggcatttagatggtatttagctcttgtccagagctgctgaaggacagaagtayactcggtttggacccacaggcccagtcttggcttctggaaaaaactacaccaacaatacatttggccccttcaccacaaggtttgtttcctccgtggatctggcactaagaaattatatctattcgtaactcttgcctgatgagtaacttggatcctaaattctccctgcccttaatggctgtgtggtgtttgagaaattgctttaactttggggtcttggattcctcatctattaagtgggagcattgaagttctactagatgactttaagacatattttttactcctgaaatctgttatttaagaggggcatttatggagtgtggattatggaaaaaccagcataagtgggagtcaaaactttaagaatttatttcagcctaaaatgcctatttttgaagggaacctaatcaaaactttttaaaaatagtttttaattat

SEQ ID NO: 119418 - DNA, 612 bp, Homo sapiens
gggtggcatgatcgtgactcaccgcagccttgaactcctgggctcaagtggtcctcctgcctcagtctccaaagtagctgggactgcaggtacatgttaccatgtccagataattttaaaacgttttttgtttgtttgtttggttttggagagacagggtcttgctatgttgcccaggctggtcttgaactcctggcctcaaacgatcctctcgccttggcctcccaaagtgctgaaactacagtcatgagccactgtggctggcaataatgtttttttctttttccagctaacttctgacaaactgtraaaccttggccaccattttcagtatgtctttgaaattgtactttgcccttatgtggccagaacaatgggtaatattttctgacatcacagatgcagaattttggcatagcttagttctaaaaaccacttaagatagaaatcttcaaggaaaatatttgaagtaaaatagtattcacaaatacagtgataattttgcttatgaaaatgaatctattcttatctctctccctcaaaccttattaatagtcacaactattttgagagtcgttgaaaatgtttgaaattagttttacaaaacccatc

SEQ ID NO: 119419 - DNA, 576 bp, Homo sapiens
agctatgaatctttcacactcagattctaagtaattgtcccttactctttaagttcaatatccttgatagatacaagaaggaaagagttaaaattcatagagaattactttataaactgattgcaaaagaggtcacaagcaacagatgtgagaagataaaagcacttcaggtgttgagctgccctttgatgcaagcaggccaaattcaagtggctctaaaagtattaatttagggccgggtgtggtggctcacacctgtaatcccagcactttgggaggcycacaggggaggattggttgagcttaaaagttcaaaaccagcctgggcaacatagtgagacttcatctctacaggaaaattttttaattcgctgggcatcgggtgtgcacctgtggtccctgttacttgggggactggggcaggaggatcacttaaacccaggaagtcaaggctgcagtgatctgtgattgcaccactgcaccctagcttgggagacaaagtgagactctgtctcaaagtaaatgaataaataaacttgttaattcaggttcaattatgcatagaagagcataatt

SEQ ID NO: 119420 - DNA, 576 bp, Homo sapiens
agctatgaatctttcacactcagattctaagtaattgtcccttactctttaagttcaatatccttgatagatacaagaaggaaagagttaaaattcatagagaattactttataaactgattgcaaaagaggtcacaagcaacagatgtgagaagataaaagcacttcaggtgttgagctgccctttgatgcaagcaggccaaattcaagtggctctaaaagtattaatttagggccgggtgtggtggctcacacctgtaatcccagcactttgggaggctcacaggggaggattggttgagcttaaaagttcaaaaccrgcctgggcaacatagtgagacttcatctctacaggaaaattttttaattcgctgggcatcgggtgtgcacctgtggtccctgttacttgggggactggggcaggaggatcacttaaacccaggaagtcaaggctgcagtgatctgtgattgcaccactgcaccctagcttgggagacaaagtgagactctgtctcaaagtaaatgaataaataaacttgttaattcaggttcaattatgcatagaagagcataatt

SEQ ID NO: 119421 - DNA, 567 bp, Homo sapiens
gaattcctatgctcaaacaatccacttgcctcagcctcccgaagtgctgggattacagccatgagccaccccacctggccaaaaatatcacgaggcctttttttcttttttttaartttgagacttcctggaaaactaaatgaatgtgtgaatgtgtagagaatgactcactcttattagtttgtgcagtaatacacagggttgacttacatatgtcaaggcagataatgtaagtcttacaaaacatggcgcagtaacgactcaaaggacagaagcccggagtaggtacagacttggccttcctctcagaaggggcctgggtccatcagagacaaattcctacctattccttttcccactgggatgaattgtggtttctgagaagcattaacaatgtgtgccaaacataagagctcagaggcagctgtttaggacttgttagttatcactagctgccatcacaaatggccataaatttagtggcctaaaacaacaacacttatgatctcacaattctttaggctggacatttgttaggctcagcttgtttatctgctgtggatgccg

SEQ ID NO: 119422 - DNA, 559 bp, Homo sapiens
ctttcccctaatgccaacttaaagacttttaggtccgcccatgttaactctaagccagataagtacttatcagcaacttctgacctggctcttgtgggctcctcatacccttggacacagaaatagaatttcaaagcacctactgacttcatacagcccaaggctattttgtggggggaaacctattcctgctctccagctgtgatctcctttcactatcttcaatcccaattatctctctttttcctcaattattaacaaacttttctaacttcctagrtggagtgccctgtatttggaaatatatgagctaatatcatttacggttttattgaagtataatttaaggagaaatatttagaaatacacatttcagttcacctaattagtagattcctcctactaccacttcatttagccaatcatgtgccaattccaaattctaaaatttcatcaagtaacattcctcttgaacttgcctctttctctcttattgggtgtcaccttccttctaaactctatgtctcttacctcaagacttgtaggctaatacagttat

SEQ ID NO: 119423 - DNA, 597 bp, Homo sapiens
acaggttttttttattatttaaggttaaaatgcattgctcattgcctgtaaaatttaaagagtgaactttgtattctgtaaaagttttgttcatctgtaaaccagagtggtctgcaaaatggtagctatttggcttggaagcatatctttttatttgtgaatcctagaatgaaactaaacaacctcacaacagtggactaataatatttaatgtttattgaccactaaatatatgccaagagttcttccaaatgctctaatatatgaacctatgtaatcctcacaacaattatttgagacaggtattacaattattgttatacccattttacagatgatacacatgtgaacaattaacttgcacaaggtatagtaagtagcagagtgagaattcaatgcagacattctgcctccaaattccacatttgtaattaatatactgtagtgtttctatgtaataaatgttcaattgaaccatgtcatctatagttccacatcactggttttgttttktttttttttaaatcaccaaattagataacatggagcatcctattggtctgtaacagctgagtcctgcttgcaaaggaggtcata

SEQ ID NO: 119424 - DNA, 564 bp, Homo sapiens
tcaagattctaggaaatataggtatatatccacttttctctattcctgtaagcagtgtatgtatttcaagatagagataatttcttcaatgtttgatagctcccactatggcacgttatctcccaccaatgcacacatacacacatacactgactatttgttatatattcgcttttattcaatgagtttaaagttatcacctggtgactcaaaacttaacgtatgcatatctactttccacaacatattgagtaatattctaatagctgacccagggatagtctttatgaatgttataggtattataaatatcttactaaagttatgcataacagcataatcagttataggtatactatcaatagaatgcagaaatatgattcaacataacaatcacagttaattctgaaaggagatcacrtaagaaatatcagcatatttttcagaaggaacagttatgacaaaagaccaaggcacaaatatggtgaggacgacttaagggagggggtgaaagtggatgcaaattaaatcttggacctcctataacgttctgagacatggagt

SEQ ID NO: 119425 - DNA, 540 bp, Homo sapiens
attgattatgccaagagacaatgtgggaaaaaactttcaaatgctaagacatggggcacacatgtactgtgaattttaagtatagttcatctttcagagcttcatttttgcaagctctattgctctaggaaaaaactcacttattttcaaacaagagattcaacttatgtccaaaatgtaattttactttgccagccacacatagccccaaagtattttatgtcacttagggaacctaggattctatggggcagaagtccatgaactggttttggttcctctaattctcttctttctttttctcaaatctctccaattcattgatgttctaatttgtataactttcatgaaaaaaaaaaagtgacagcttgaacacatctagaggccaataactgyagttggcttgacttcaaatactgagaaaggaattgaaatccagttattttccctatcttattgctccctatcttattgccctatcttattgctggtaggctgacttcagcatctgttgaaataagccaaactcagtataatata

SEQ ID NO: 119426 - DNA, 490 bp, Homo sapiens
tgtaacacataactttcctgaaaactgccctctacatgatgtttcctgacatttttcacacacaaaaaacaaaaatagatggcatttcatcactcttccaatattacctcatcacttccatatctctggttatcatttatgctgatgatttgcgaatttatttctagccatgtccttctttgaatcccaaagttrtacatttggctgcctcttggaatctttacttgtaatttggcaacttaaatctactatctaaaagtggataccatttttttttcctccaaaactgtcttttctcttatcttcttcttagtgaatgctattgttatttatccagtctcccaagttactctatattcctccctgtcaccagccaccaatgatgaccaagtactgttgattatatcagcttatcacctaccatggtaatcttctttcctgcatttccacggcttctatgtaagtcaagcttccatcatttttgacttat

SEQ ID NO: 119427 - DNA, 580 bp, Homo sapiens
tatcatttatgctgatgatttgcgaatttatttctagccatgtccttctttgaatcccaaagttatacatttggctgcctcttggaatctttacttgtaatttggcaacttaaatctactatctaaaagtggataccatttttttttcctccaaaactgtcttttctcttatcttcttcttagtgaatgctattgttatttatccagtctcccaagttactctatattcctccctgtcaccagccaccaatgatgaccaagtactgttgattatatcagcttatcacctaccatggtaatcttctttcctgcatttccacggcttctatgtaagtcaagcttccatcatttttgacttatctaccaaaatagacttctaatttgtcataytacctccagtctttttctctttcacttatcatccacaccattgctacagcaatattttcatttcttaaactagttttcataccattttctgcaacctgttggttattgaaaactatataaataattacatggtttttatgatctgtctctggttacctttaaaacctcagttcttacaggccctcaccac

SEQ ID NO: 119428 - DNA, 611 bp, Homo sapiens
ttgctcagaaacatggtttccagcttaaaaagagcatggagaataaatcaagttttttgtgctattatgaacagaggagttgttgataaaagtttatattcatgattaacaattaatattcttagcaaacttgagtataaaggaactctctaaatggtaccttcactatattaagagcaaatttcatacttaaaagtgaaacattgagagctatccctttataggggatagtatcattaacaacgaattagaaaatgaaattttgaaaagatatcttttataatatagtcagaaatatagtcagaaaggctatgaaatttaattgagggacattaaagaagacccaaacaaamagaggtatataccacatttatgacggaaatacccaatatcataagactgtaagttcttcccagactattttatggattcaatgccatcccaaacaaaatctttactattttggtcaaacttgagcagcttattttttaatgtacaaaataatgaaaagggcttacatagccaaaatgctcataaagaagaagaaggtaggtagaattgtattaatatatttcaatgcttattataaaatatgatcattgggacagtgt

SEQ ID NO: 119429 - DNA, 611 bp, Homo sapiens
ttgctcagaaacatggtttccagcttaaaaagagcatggagaataaatcaagttttttgtgctattatgaacagaggagttgttgataaaagtttatattcatgattaacaattaatattcttagcaaacttgagtataaaggaactctctaaatggtaccttcactatattaagagcaaatttcatacttaaaagtgaaacattgagagctatccctttataggggatagtatcattaacaacgaattagaaaatgaaattttgaaaagatatcttttataatatagtcagaaatatagtcagaaaggctatgaaatttaattgagggacattaaagaagacccaaacaaacrgaggtatataccacatttatgacggaaatacccaatatcataagactgtaagttcttcccagactattttatggattcaatgccatcccaaacaaaatctttactattttggtcaaacttgagcagcttattttttaatgtacaaaataatgaaaagggcttacatagccaaaatgctcataaagaagaagaaggtaggtagaattgtattaatatatttcaatgcttattataaaatatgatcattgggacagtgt

SEQ ID NO: 119430 - DNA, 598 bp, Homo sapiens
ggatagtctctgaggttgagcatttttgttcagtgatgaggcatttgaattaccaacatgcttaatgctatggaaatctatggaacccatttctttaagaaatggattcatatcttaataaagaacaacttttttattgtttaattgccgaaacaagatgtcarcctattaccctaagtaaccagttcaatcatagccattcacatcatctagtaccaagtgatatttttcacggaaatgaacatgtggaggaaaagtccttgactggaaaaaaaattgatacatataatcattacagagctgtatatttatataagactaactgtgagatgaatggagaaagctctgagattcactgttgagtagcttataatttccaagtcctctgctagacatgaaaactatttagtgtagaacaaaaatatgatgctgtatctcacaactcctatataaatgtttccattcctactttatttctgctttcattttcacggtgcatctacagtctctcttccagcctcccatttgtattttacaacatgcataattacagatttattctttaattatttcattttcatatgatttttatatctct

SEQ ID NO: 119431 - DNA, 593 bp, Homo sapiens
aagctgcttcgggaggcaaaagaagaaaatctctagtttctttttcaccaaattttaagattaaatggaagatatagtaacaagttcaacccactcaaaggcacatccacatttatctatttaattcctactatgtacatgcactatctaaaatcaaagcaaaataaaacaactagtggtaagacccataaactgtttaacagtatgtagtgcccttttatcctcaacctaaaggtgaaaaagttgagtctttattgccttttcccccaggagataatagggctaggtgttccagtgttagtgaaacaatggaagtcagaaatttcatgtccctgcacctttcttctgctgtctctagcttatgggactgtaggattttccccaraagttcccattgctctaaccaattgatgacggaggttaacagcggaacaaagacaccactcatatatttccccactttgtgagattgacaatcttattaatatagagatttttcagatatctagttaaaatatttgtgttactgagttgactttgggtaactctgcaatacaagaattacttttgttacagagtacacaaatacattt

SEQ ID NO: 119432 - DNA, 386 bp, Homo sapiens
agtggttgcctgtgaggaggagagagaggaaggaaaataacgaaagagggaaggaagttcctcccccacattgagtgacccggctccggccccaggacattcagggatctatttcagcatgttctccccacccccacctccctttctatttccccttactcrgcctctccagttcatcacagctggccacgcaatctcccacctgcagcctgggcccagcctctttcccagaccaatctgggcttgaggcaggaagcaattaagcagacctatcaagtccctccttacttccagacatcctcatggatctgcttgctaaccaaggatgcaagtccctctgctaatgcttgagctgctgcattgcactggggatggcaacaagccct

SEQ ID NO: 119433 - DNA, 341 bp, Homo sapiens
tatgctaattgtcctcattataataaaatttgggagtaaaaagaaatcgttgcaggcttttgtcagtgtgctgatgatctgtctcctgttttgtagccaactggacacsgttgtggagattttacataggttcactagattttcttgagtagaaaagaaacccacagtctctctgtgtactaaacagaccgttggcaatatctaaacagctgttggctgtatgatacatatttggctaaaaacaaacccatctgtatttaatgcattattgccaaagtgtactaacatgctgtttccagtctgaaaacactggtaccctcatgtgagacgatcaaattgaa

SEQ ID NO: 119434 - DNA, 593 bp, Homo sapiens
aatatacatcttcactatgctaatatcatgtctctccacacaggaatgtaacttcaagagaatcttaattctttttttttttttaagctgctaagtccacagcacatagaaaactaccttgcataaaccagtcattagtaaaagatttgttgaactcataattaaatttcatcaactgcttgattttatagatgaggaaggtgaagtcctgagagatkaagttgttcatggtcagagtaatttaatttttaattttaaatttattttcttttttttttttaagagattgattctcactttgtcacccaggctggagtgcagtagtgcaatcatagctcactgacacctcgaattcctgagttcctcctttcttggcctctcaaagtgttgggattacaggtgtgagctcccatgcctggcctagagtaattaaatgacatgaaatgtcattaagttgaaagtaaataggagtcacaatgagtgacacaatcattgggtcctgtagagcatagaggagaaagagataagaactgggttctggtgggaaagtgttgcaggagagagaccataaacaacaggtagaaagcctgtag

SEQ ID NO: 119435 - DNA, 560 bp, Homo sapiens
cgcctgctgcttagtgcttgaccactctttaccctctgccacccacactataataagaaacagacagcagtgctcccaagagcaggcctataacctcattgatgcttcttaagtggccataaagaagttgactragcatgaaatttcatcattaaagtttatgcctttagttggggggaggggaggagaaacaaaaatcatgactaaattaaaaagaggaggaggaacaaatgataacagctcgtatgaaaagatgatgtggttcctaggagatagttaagtcttagcagggaaccaaagatactttcagttctaaatccaatgtgtgctgctgactcttacccttcctgttattcagaagagagaaggagggagagtgcaaagaagttccgctgttgatacccgagcatgacatagcagctagtgttttgctgaattgtgatgaaggaatgttgacaaccttttcaaaacttacaaggaaagggactctgttggaggaactcaaagaaaaaagtatccattgaaaggataagttagtatttatattttagtgcaattgt

SEQ ID NO: 119436 - DNA, 560 bp, Homo sapiens
cgcctgctgcttagtgcttgaccactctttaccctctgccacccacactataataagaaacagacagcagtgctcccaagagcaggcctataacctcattgatgcttcttaagtggccataaagaagttgactaagcatgaaatttcatcattaaagtttatgcctttagttggggggaggggaggagaaacaaaaatcatgactaaatwaaaaagaggaggaggaacaaatgataacagctcgtatgaaaagatgatgtggttcctaggagatagttaagtcttagcagggaaccaaagatactttcagttctaaatccaatgtgtgctgctgactcttacccttcctgttattcagaagagagaaggagggagagtgcaaagaagttccgctgttgatacccgagcatgacatagcagctagtgttttgctgaattgtgatgaaggaatgttgacaaccttttcaaaacttacaaggaaagggactctgttggaggaactcaaagaaaaaagtatccattgaaaggataagttagtatttatattttagtgcaattgt

SEQ ID NO: 119437 - DNA, 591 bp, Homo sapiens
gccacgtctattaaaaagatggatgttcaagttcagcaaaatcatttttactttaatatttttaaacttttaaaaggagccactaaggttgtatatgtgtgcatcccagtagggggacagctggctatattcatatgctagagccgctataaaaaccacagactggctgggcacagtggctcacacctgtaatcccagcactttgggagggaaattaagtctgaaattaaggtgtcagtagagccttctgagggctgtgaaggaaggatgtgttccaggcatctctccttggcttatagatggccatacggccatcttttccctttacgttcacattgtcttccctccctccgcacatgtcagtgttcaaattcttctaacttataagaacaccagtcacatcgcattagggctcaccccaaggacttcattttaacttaattactgcattgaggaccctcccaatacagtcwcatgctgaagtactggggctggaacttcaacatgtgaattacaaaggcaagggagggaattcaggctatgcagtgggtgtgacttctcaatagaatgtgaaggccattcccacaggaa

SEQ ID NO: 119438 - DNA, 668 bp, Homo sapiens
tcagctttctcatttgtgcaatgcggagaattaccactgaattagtgttagacaatgaatgtaaagtccctgctctacaagtgcttgttttactgcccccttcattccactgcacactatgcttctatggcctctaacctcactaccagctgatggagttttcacacttctacaatcatcagtatgtaagttcttacacctaaagcacctcattctgaaattagttcatttttatgcaggcttttttggaccaccttctctgttcaagttttcttcttaaactaccagggctgtactttccaatactgtaatctccagccacacgttgctgatgagcacttgaaatgtagctattttgaataaagatgtgcgctaagtataaaacayacatcagatttttttttaagatttcatatacaaaaatgtaaaatacctcactgaatttttttgtattgattatatgttgaaatatataatcctttagatgcactggattacatattatttaaaataacttcacctgtttattctttttaacatgaatactaagagattttaaattacacatgtgcttacatctctggcctgcatcgtatttctattgaacagccctgtaatagagatatctctgactccaaattatatgtttcaaacttctcctgcaacag

SEQ ID NO: 119439 - DNA, 630 bp, Homo sapiens
gacagtttaaaagtatatatcctcttgtaactatctagaatatatatctatccacttttaagatgcaaaaatgactagatgttggttaagaaatgtgagggtcagtaaatgcattttttttttcatgtactaaacctgaggaaactaatcccaggttgtccaagaggaagatgtaatttgggccctataatcactagtcattttcctgcacataaacatacacagagtacaaattttaactaaattttgtttgttatggctatctaattttactcaacgcatactgatagttattgcagctctatgtacattaaaacatacacacacasagagatgtatatttctatcatctgtccacctaccaaatggattttctacagcaataaagtgactgtaaactagatgcattgacgcagcccttcacgtcttataattaggaaacattatttgaacctcaaactctcaagaagttccaaaggcttcccctttgagtaggaaagcattagcaatgttgggagaaatgtctgaggaaatgtagccgagctatatattctctgcagggactttggggtctcttccaacagtaaaactcagtgtcctttccattttttgataaacagcaagaatatt

SEQ ID NO: 119440 - DNA, 608 bp, Homo sapiens
tggaatccaggctctgccacgtattagctgtgtgatactgaacaaattgtttcacttctctgtgccacactttaaattggaaataatattactggaaattcaaagtgcggttttggggtttacaagagctgatggatgtaaagtgcttagaagaatgcctaggacagagtacgcactattccacaggcttagcttctgtgtgtctgtgtctatgtatgtgtttctgtgtatgcacaagctggtataaaaaattacatatagttgtcatttcasagtaggatccagtcatttctgaataaatcaatgtgcctttttcacaaagcccgttggacttctgcagttatttttaaacatggggacctgagctgggtgcactatacttgacaagatcagaagaggtataatgaccacaactggaaaaacaaacagtatcatcccttcaagtggagtttctcagagcatggaacttaggccatttgcattgaaatcacctggggtgcttatttaaatgcagattctcaaatcttatttctaaggttaccatatactttattgttcaaaccaggacatttttgagagtgaaagagattgctataaataatcatgcc

SEQ ID NO: 119441 - DNA, 581 bp, Homo sapiens
cgtcattattttcccccttctgccttaatagaggtctgctcttctttattctgcctgtctgatctcttagtctctgctttcctaattctrttgcctgccagataattcctatctagtgttgctaatctctgactaaacaattcctttattcagtcacttttttaaagaaagcaccctcacaaaccagttttagaaattctctgattctcgataaattacatgcttgcccattttttcccacagcttacatatcaattactggagcataatttccccttacattatgaatagcaaatgttgagcagaacagccctgcccagttgcagaagcctggggaatgcaacacagcaaagacctttgaaatgtttcctatgcagagatttaagaaagttctggtttgggctggagtgttccctgtaatgaccagagttggaaataatttgaagagaaaattgatgttttagcagaggagaggagttataaaccaaagatctgtgccaaaaaaacaaactatatttagaatagtgtctagtgagcagtgcagagatagggatgccaggtacgagttggaacacaaagtg

SEQ ID NO: 119442 - DNA, 608 bp, Homo sapiens
acatgacccttcttgccgactgagtcaacatctcaagatagagattaaaaaaaaaaaaaaatccactcagcttttatctgtaaaatgaagagctaattttgctggggcattctgggaaatattttcttctataacaaaacaaaatacactttgggaggccgaggcgagtggatcacgaggtcaggagttcgagaccagcctggccaagatggtgaaaccccgtctctactaaaaatacaaaaattagccaggtgtggtggcatgtgcctgcagtcccagctacttgggaggctgaggcagagaattgcttgaacccggaaggcggaggtttcagtaagccgaaatcgtgccactgcactccagcctgggcaacagagcaagactctgtcccccaaataaaataawaaaataataataataataaagtgctgtcttgatgccctcactgactcctacacccctgtctccttcgtggcctttgtgtaatatcatatgaggacacgatgctagaaactgctgcagccatccagtgaaaagagagaaccattgtctaaggatgccagaaaaagtttgagattatattctgtagaagcagaactaagacagag

SEQ ID NO: 119443 - DNA, 608 bp, Homo sapiens
acatgacccttcttgccgactgagtcaacatctcaagatagagattaaaaaaaaaaaaaaatccactcagcttttatctgtaaaatgaagagctaattttgctggggcattctgggaaatattttcttctataacaaaacaaaatacactttgggaggccgaggcgagtggatcacgaggtcaggagttcgagaccagcctggccaagatggtgaaaccccgtctctactaaaaatacaaaaattagccaggtgtggtggcatgtgcctgcagtcccagctacttgggaggctgaggcagagaattgcttgaacccggaaggcggaggtttcagtaagccgaaatcgtgccactgcactccagcctgggcaacagagcaagactctgtcccccaaataaaataatamaataataataataataaagtgctgtcttgatgccctcactgactcctacacccctgtctccttcgtggcctttgtgtaatatcatatgaggacacgatgctagaaactgctgcagccatccagtgaaaagagagaaccattgtctaaggatgccagaaaaagtttgagattatattctgtagaagcagaactaagacagag

SEQ ID NO: 119444 - DNA, 581 bp, Homo sapiens
cgtcattattttcccccttctgccttaatagaggtctgctcttctttattctgcctgtctgatctcttagtctctgctttcctaattctgttgcctgccagataattcctatctagtgttgctaatctctgactaaacaattcctttattcagtcacttttttaaagaaagcaccctcacaaaccagttttagaaattctctgattctcgataaattacatgcttgcccattttttcccacagcttacatatcaattactggagcataatttccccttacattatgaatagcaaatgttgagcagaacagccctgcccagttgcagaagcctggggaatgcaacacagcaaagacctttgaaatgtttcctatgyagagatttaagaaagttctggtttgggctggagtgttccctgtaatgaccagagttggaaataatttgaagagaaaattgatgttttagcagaggagaggagttataaaccaaagatctgtgccaaaaaaacaaactatatttagaatagtgtctagtgagcagtgcagagatagggatgccaggtacgagttggaacacaaagtg

SEQ ID NO: 119445 - DNA, 544 bp, Homo sapiens
ggctaagggctctggttttggagttagacacacttttctacttagttgcttgggtgagttattcagactctctagagatcaatttgctcatttgcaaagtgtaaaatgggttataggaattaaatgaaatagcacacttagcatagtgtctggtacggaaggattcaacaaacactattaaaaacatgtcagaaacagtattttgggcttgcttgcaaaatggaattttggagtgaagttcgtgggtgaggcactaacagtgaggtcctgcgtgaggatggtggctggtcgagaggatgttaggaaggcagggatttaaaaggacttggggaaaaacaaccaagacctagtgagaggctggacaagtagaggagaaagaataaatcgaggatgacccaaagattttgacattgagataatagtggtcctaaaaaaaaaaggagaagtcaggtaggtgagatgggatgattgaatttataatttcatgatgyataattatacaaatttataaaatagatgccatattcaaaagatagaaatttct

SEQ ID NO: 119446 - DNA, 556 bp, Homo sapiens
aagaaactgcttcctatacaagtaagggggaaagggggcagttttacctttgattatcaattgtccattttccttgcttccgagtcaggaaaagatccaaattgcaggcttttttttaacctgatgtcactctgggtatctgatgttcaactgctctgaaacataacaatgcaataattagatgtaataactagcctgaaacaaaaagacacttaaaaatgatctcataagaactattctgacasacattatattcaatgctgttaagaagagagtttcatagaaaatctacatggccgtgttcttgcatgatgtcacactttgtatttttatgcttttcagaaaataaaatcaatcacccagaaaaaaaacaatgttgctgtaataaataggcttgatattctacaatatacatttcctatcatttattttctttaaaaagcaataaaatgcaagcatcaatgatccaattctgtaagacataatatacatatgcgattgtattcacttcctgagcgttatttgttttctcaacagtacaactaagccagtgtga

SEQ ID NO: 119447 - DNA, 615 bp, Homo sapiens
ttgaatgtaaaaaaaaatgaagtaatgtgtactcaaacataaccaggtattttccagttaattgaaaagggccttacaatcacgaaatacataggcttatttcatttctttaaagttcaccaaaaagaaaagcactttaaaataggtagtgctagttggaaacttagtctccattctcttgtttgtacttttttttggtctgcgttcttctctcttatccttatatctcagtccgcctgtggaagcttggcagcttcaggaatttggctaaaggactctgctgaaatgttaaggtactgcctcccacaccaactcacttcttygcaaataagatgattttgggatcctccatgaacagaaagtgcgtaatgactcattgtgatatcacaactgttgtcttgttacaaaaagatttacaatttatttacaactaagatattgcactatttggtaatatcttataatctgtgtgcagaagaataaaaatccttttccctaaggtagaattcttggctaaaaggaggtttatcaaacaagcattgggataaactggagattttgatatttgttgtcaatcacttatgtgggaactctccatgtcttacatttgcaagg

SEQ ID NO: 119448 - DNA, 589 bp, Homo sapiens
agaataatgatagacaagaaagtggcaaaaatgtgggtaaactgatacaggcactcactgaataaaaccataataatgtctaatttgggggagttaaaatgtagaaagaaaataagaggacatagttaaaatattggaatgaccataaacagaaaagaaataaaagaaatgataaacacatattaaagatttttgctgggtatggtggtacaaatatgtagtctcagctactctggaggctgaggtacgagaagcacttatgtccaggagattaagaccatcgtactagcaacatagcaagacccctgtctctctaagaaaataaaataaaataaaatactgttattattttctttttaaayggtgtgtgaagcatttagtacatttttatactttataccctacagatgttttataaatattgctgacctttaaattaatatttaataaacatataaaaatacattttcttatctccagctgagtttgaaacatgtttatgcaggaataaaatgtataatttattagagagtgagactggcctagttcactgtttcttatattttccaaatggaagaagtattccaag

SEQ ID NO: 119449 - DNA, 589 bp, Homo sapiens
agaataatgatagacaagaaagtggcaaaaatgtgggtaaactgatacaggcactcactgaataaaaccataataatgtctaatttgggggagttaaaatgtagaaagaaaataagaggacatagttaaaatattggaatgaccataaacagaaaagaaataaaagaaatgataaacacatattaaagatttttgctgggtatggtggtacaaatatgtagtctcagctactctggaggctgaggtacgagaagcacttatgtccaggagattaagaccatcgtactagcaacatagcaagacccctgtctctctaagaaaataaaataaaataaaatactgttattattttctttttaaatggtgtgtgaagcattyagtacatttttatactttataccctacagatgttttataaatattgctgacctttaaattaatatttaataaacatataaaaatacattttcttatctccagctgagtttgaaacatgtttatgcaggaataaaatgtataatttattagagagtgagactggcctagttcactgtttcttatattttccaaatggaagaagtattccaag

SEQ ID NO: 119450 - DNA, 595 bp, Homo sapiens
caaggcagtaagaatcatgtgaaaaagtctgttccactggaatcgtcttttccttttcctagctcagcataaatgaggcattaatgataactcttgagtctacttttccgatcagtagtgtcccaatcaacaaaaagatatccaagactctctatgagctgagtacatttccaccttcatctcccatcactctctgtttagaacttaatatctctgattattatacaatgcctcttccattcatgtattcattcatttattcatcagatactacacaacaccttttaatgaccatactcttgataggggagtgaatttgatagtgartataactggtgccacccttcagggagctaacaggccagggaaggactcagacaatgaattgactttttaaaattacgattcatgagagaggacgtggagcattccatgggaacaaatggaaggtgtaattcacccattctgtgtggttaggggaagtttctaaggatgtgaattttaaacccaaacagaactgctaaagataatttaagctgaattagggcatgttcaagtcccatgaaaaaccatataatggctcaggaagagaagt

SEQ ID NO: 119451 - DNA, 575 bp, Homo sapiens
ttgccttttcaattcttagtacattaatattgtgtgtataaatgcaaatttataaattcagttagatgaaaagcagagtatgattagtatcatccattttctgtattgttgctgtgagatctgggctatttctatgcaaagttatcttattgaaaatttgactaaagaaagtaatgtgggttgttaaataatattttaaattaaattgtcagctgggcgtggtggctcatgcctgtaatctcagcaatttgggaggctgaggtaggtggatcgcctgaggtcaggagtttgagatcagcctggtcaaatggtgaaactctgtctctattaaaaatacaaaaattagccaggtgtggtggtgtgcacctgtaatcccagctatttggaagtctgaggcacgagaattacttgaaccctgggaggyagaggttgcaatgagcagagatcgtgccactgcactccagcctaggagacagagtgagaccctgtctcaaaacaaaaacaaaaacaaaacaaacccattaaattgtcaatttaattttattgttttaagaaaaaattctataacaaattta

SEQ ID NO: 119452 - DNA, 521 bp, Homo sapiens
ggctctctttataatctgccaaagctgtctgcctcttctacaaagaaaagtgcaggattctcttgaacaaccctccagagatgctgaggttttcctcactttggggcaaggggtkgggggggtggttctcaagctattctgcttactcaagtcagtactcaggcaataactgcaatgggaccctctccagctccctctattcttttcacctcctttacttctgaagggagaagacagtgtgtcagagcagaatagcaatgaaaagcactatgactctggaaactagtgaaacttgagtgggcctttctcactctgtgggtttttcactctaacaggaaatgagcatgaggatcatggtctttgtctcctaattcccatccttgtgccacaattaaagtgaagttactcacacccttttaatgacttacctaattgattgtcctcttgtgggactgacctttagaacagcagagtaaaggtcagaaaattgcatcaaagatagcccagcatgatgaacaaga

SEQ ID NO: 119453 - DNA, 563 bp, Homo sapiens
taagaacacatggacacagggaggggaacaaacacattggggcctgttgagggagggcagggggtgcagagcattagggaaaagagctaatgcatgctgggcttactgcctaagtgatggtttgataggtacagcaaaccaccatggcacatgtttctctatgtaacaaacctgcacatcctgcacatgtaccccagaatttaaaaaataaaatacaataaaagtaactggatttcatcaaaggagaggtaaacacaagcctcagtacacaccagatcaagataagggctcataaatacctaatgtaaactgaaaagcatggcctgctaccttggtaatgaatttctctaaactgcaggtgtttacaccctgatgccagtccttgacatttagtcttacaatggtttatgtctcatggtatcaacttctaaggtgctagccatgcagacactcagggaggcagtacatayattttgtacacaccccaagtgactgactgtctcaggtcacatgcctcctttgcagaaagggctcctctaaccttacaacactgctaacaacag

SEQ ID NO: 119454 - DNA, 558 bp, Homo sapiens
acctcgtctcaactcagcatacagataacataatcccaattaaaatcacaacaatctatttcatagatattaacaaactgattctaaagtgtatgtagaaaagaagaccttgaacacataatacaatgctgaagaggaagaacaaagttagaatgtttatactacctaatttctataactctgtagtaaaatctatagaaattcagacagtgtggtactggtaaagaatagatacgtagattaatggagcaaaatagcaaatccagaaatagacacacaaatttgtcaagttacaaaggaacaaaggcaagtcaatagagaatgtagagtcattttaacaaacggttctgaaatgattgaactttcatatacaagatagaatagaaagatatgcacacacatgcgcgygcacacacacacacacacacacacccctacacagaccttatacctttcacctaaattaagtcaaaaggagcataaacctaagtgtagaacatgcaactataaaaattctagaagaaaacatggaagaaatgatgtgactttggaactgat

SEQ ID NO: 119455 - DNA, 517 bp, Homo sapiens
agtaatcagtctacccaaaaggaagatttatgattaacacactgggacacatctgaatgacccaaggcaataaggggcctaaatggggcattagcttcttaatatggtccaagtatccagagtcctcagaaagtcactaatttgtccagcttgaatggagtgtctagccacaaacaaattttatctgctaagggtcatggacatgttttgatatgggatgcctattaccataatcattcaaataactgaagtttggagataaatttgataagttgtcaattcaaacaaaattaagtgctgaaagccactttcctaagtaatcaattttccagttgattaatatgttaaaatttccagttgttaaatatgtaaaattcaccaaatatactagatatcaaaaatgtttccaacaggtttgatgggtcagttwacagctttaacaaggatgtatacatttcatcactcctgacacataatttaatacatgcacacagagacacatctatacatacacatg

SEQ ID NO: 119456 - DNA, 322 bp, Homo sapiens
ccatgaagtcaggaagaagtgactcccctttcaagtgcacagacaagtgcacaagggtataagaaatataaaagcataataacaccaaaggaaaaaaaagtctctagaaaagaagttccaaagaaatagagatstttgaaatgcctgacaaagaattcaaaatgttttttaattggcacattataattgtacatatttatggtgtacaatataatatttcaataaatatgtatgttgcataatgataaaatgaaggtaattaccatatccatctcctcatgcttttaaattttttgtggtgagaatattcaaacgcctctcc

SEQ ID NO: 119457 - DNA, 568 bp, Homo sapiens
aaaagacaatatactgtataattccaattatacaacattctggaaaaggcaaaactatggagacagtaaaaatgtcaatagttgtcaggcactggtgatggcaggtatggatgaataggcagaattcgaggatttttagagcagtaaaagtattcastatgatactataattgtggatatgtcattaaatatttgtcaaaacccacgaaatgtacaagagttatccctaatgtaaactatgggttttgagtgataatgatgtgtcagtataggttcattgattgtaacaaatattccactgttgtgtgggatgttgatagtgaaggaggctatggatattgggggcagaaggcatatgagcagtctctacaaattctgctcaattttgctataaaccaaaaagtacttaataataaaatatattgaaaaaagtttggggaaccaagataaaatccaaaaaatttgatataaagtaaaaacaaaactaaactaaagcacacacatacacagagagagagagagagagaggagagaaagagacatatttaatattgacctttactcactc

SEQ ID NO: 119458 - DNA, 531 bp, Homo sapiens
caaaaaaagacatttttacttttttcttatttggaggccttttatttctttttcttgcctagtttctctggctaggatgttgtgcatcatgttaaatagaagttgtgagagtaggcatccttgttttatccatgatcttacaggaaaagtttttgatttttcactattgaatatgaaaaatgaaactggaccattatctcccaccatatacataaaagaactaaaataaatttaaaaacttaaacataaggtctgaaactgttaaactgctagaagtaaacatagcaagaaagcttcacaatatttgtctagrcaataattttttttgcatttgaccctaaaagcaccgtaagcaaaagacacacacacacacacacacacacacacacacacacacacacacacacacaaagtaaagtagaatttcatccaactaaaaagtttctacagagcagaaacagttaacagccaggtgtggtggtctgaaactgtggtcccagctacccaggaggctgaggtgggagggtggtg

SEQ ID NO: 119459 - DNA, 582 bp, Homo sapiens
atgcatgtatttatagccaaatgattttcgacaaaagcatcaagaatatacactggggaaaggatactctcttcaaaaaacggtactaggaaaattggatatcaacttgcagagaagcctagttaaatccctatctctcaccatttacaaaaataaaatcaaaagggattaaaaactttactgaaaaacctgaggctgtgaaactactagaagaaaaaataggtgtaatgcttcagggcaatggcctaaacaaccatttcatgaataagacttcaaaagcataggcaacaaaagcaaaaatagacaaataagattacatcaagctgaaaagcttctgcatggcaaaggaagcagtaaagagtgaagagacaacctgcagaataagagaaaatatttgcaaacyattcatctgacaagagactaatgtgaagaaaatataggaaactcaaacaactctatagcaaaattataatagtaagaataataatatttttcattaaaaagtgggcaaaagatctgagtagacatttctcgagtgaaacatatgaggggcgagtatatgagaaaatactcaccatcact

SEQ ID NO: 119460 - DNA, 568 bp, Homo sapiens
atggctggttttaaggtagttatctatatggtcgggaaaaatgcttatattaatttttttggattgctgttgaatcgaaaacaaagttaagcaattctcctggagaagccagagatcccttagaaacagcttctactagtcctttctttttcctccttctcaccccagcacaggraaggcggaggtgctaataccctagtccccctggcaggtgtatctcttggtccttccacccttattcctctgctctctcaccttctcctctttgcactgcatcagtgccctccttaactcaagagccctggcttttctgtatcctgagctgcttcctgactcaggctgatccagaaggttctgtctccatccttgcccatcagccctgatgcctgggatactctcttcattctttccaaccccaactatattaagtaatccctgagtcacacatctgaacatgtttctgccatataacgacaagctgaggtttcctgagaacattttcttactcactacaactctctactgatatcaccctctcacatctgcatgaccagagcagtccaggtct

SEQ ID NO: 119461 - DNA, 589 bp, Homo sapiens
acacaataggcatttgatagttgtgattattgcgtttcttttcttttcagactatcttccctggaccctacaaacacttctctccctccctggcctctctggttcagtcctagggctgtgatcatagttcacttgtcattgtgagttttttggtgtctgtgatggtagcttttctgcattggctatttggttggatttatgtgtgtgtgtgcgtgtgtgtgtgtgtgtgtgtgtgtgtaatatttcatttgactttcaaaagccaaaaacctagctttttgttaagttattaaggtcaatgctatttcatatagttttttattctatttataaatctagtaagttartctactttcgtagaggtctctgattaatttttgttgacacaaacaagttatttacatatccttttacattttaagctgcgctattacatttgatatgctttagacatttaaactatgttaaataattgttataataagaaaatctttcttattttaaaataattctagttcatcgaatacatcaactttatatgttgagtcttaaattttcctaaatatgtcaatactgttttcatcacggt

SEQ ID NO: 119462 - DNA, 589 bp, Homo sapiens
acacaataggcatttgatagttgtgattattgcgtttcttttcttttcagactatcttccctggaccctacaaacacttctctccctccctggcctctctggttcagtcctagggctgtgatcatagttcacttgtcattgtgagttttttggtgtctgtgatggtagcttttctgcattggctatttggttggatttatgtgtgtgtgtgcgtgtgtgtgtgtgtgtgtgtgtgtgtaatatttcatttgactttcaaaagccaaaaacctagctttttgttaagttattaaggtcaatgctatttcatatagttttttattctatttataaatctagtaagttagtctactttcgtagaggtctctgattaatttttgttgacacaaacaagttatttacatatccttttacattttaagctgcgctattacatttgatatgctttagayatttaaactatgttaaataattgttataataagaaaatctttcttattttaaaataattctagttcatcgaatacatcaactttatatgttgagtcttaaattttcctaaatatgtcaatactgttttcatcacggt

SEQ ID NO: 119463 - DNA, 576 bp, Homo sapiens
tctcaacacatcaagtgtatgttaggggctgggctccgttggagtcaaatcttcctggtaaacaaagctacactgcagtcatatttggcatatgtgacatataggcccactgcatttccttccaaaggcaagatgccaagggaaggtgccagtaattttatgaccaawatgacaccattttgtggtgtttgtaagttgaaacaatatatttccctgcattacacaagtttataaaaaacaaacaaaaaaagaggccccagctgtggttgatcgatgatgaattgaatagagcctaaccttccaggcttctcacttgcacaggcccttccaaggtcctgggagggcccctggaaatttttgtagtcataatttttttaatgtttttactagataaggctcaggccccacaaaatcctgaaatcatccctgggttccaatagttacaacccagtaaatctcttgaatgaagcctctatgttattgacaaatactgactggccaagttagcagggtgatagggtcagtctattttgaatctgaaatccatctcaaagacaggccaagagcttattagtg

SEQ ID NO: 119464 - DNA, 550 bp, Homo sapiens
ccatctagcacaggctatccacatgcacatggtcatgtggcaaggccttacaagcagatgagggcttgtgtattctaaagaaattgtccagaacacttgtctttagaacagcaatcctctcctagaacctgggcaactcataccatacacacatgtgtgcacatatccagctcactcagcatcacacatgagtctctggaaactgttctgagatgcaaagctgagaaccctcctgggcyctcatggcatccctttcccacccacctccaccacgctggcactagtggagacagcttaggacaaatgttgaatatattgctttattttgtctttaatctcagaggccctggcttttgttagcaagcttaagagatcaaaaaaggtatttctaattggttttagtgtttctgattttagactcttttgtataaatatggaaagtcagcacctagagtccactgcaataaagcaccacaggaagtgttgtgtctcctccaaaagaagaaagaagaagatgagatggagggttggcaggggctcagaggcatgt

SEQ ID NO: 119465 - DNA, 572 bp, Homo sapiens
acataaaagtcaaacttctaatttggtaagtaaataatcctaaacttaacacagtggttctttaaaatgtttaaatatttgtcttagatgctgaatatagacaaagagaactgtcatcttaggagtaaacacactataactctgtaaaaagaaatcatagaaaagtaaggtagtatttctcaaataagtcctcccatgctaaaaccacagtgacgcgcagacactagcctagaacctattccagtactgcaagtactgacaggctgcaaacaccagtaacaacctgcctggagccttgaccttgaaaacaaatggctgttgtgaactgatgtgaccaaaccaagagatggttccttacaaaaacaaagcaaaacacaagatgaaaatcaagcagaaaaagaaaataatataaccttattttgagaacacgacttcatctcaaaggatactttttgtatattaatcctcacagattaataagagcasttaaaataattttgtgtagatccagaatacaacaggtgactaagttaatgactaacacaatttacagacttcaaaatgataatact

SEQ ID NO: 119466 - DNA, 560 bp, Homo sapiens
gaattcggcctcattttacctagctcctattcaagatgcagttgctctggtttcaatgcctctgacaagtgggtgagtagyatctccgagcccacagaaccataggatattagaagccacctccgctaagcctcttcgtgtgctaaagtgaaatcagtatctaataaccacagatccatggtgtacatcccaaatgcatgagctggcatttatttccataacaatgctgtcgtgatcacactctgtgggctgtcagccttacttgtaaattaagtctaaatcaacaaaatatgaaatctggtttgcattatacatttcctactttatcctcaaattggaaaacaatacaaaattatttaaatgtgtatctttttgactctgacatgcaatattgagtggagattctagaatttgttttttcttgtaataaaaatacatgattaaaaaaaccagagatcacaaacaagtaaagagaatatagagaacaagtaagtccacctacccacaagtgacccctttattaatatcttcaagcagaccttccctggtcctttcttatg

SEQ ID NO: 119467 - DNA, 535 bp, Homo sapiens
aattataagtcattttgtattatttcaataaatcttaagaattagtttttagggtaaaaatacaccccagttttctaaaatagccaggaataaaagaactttggatcttatgcattagtcatgagatctgatttaaaccatcttcatttcttggcattgcagattagcacaggatgctatttctaacctcataatgtcagcgataagaagctatatttttcttcaattaatcagttctatatagtgaacgatatttttaatattcactggatatatggcaaaatgggcagcaaaatatttaatacggtgtgaggctacttctaagcagtaaaaccaacttaagagagtgtatatttcattgaagttgccacactttttctgaaggctatttagttaatatacaaatttctgtatcaaactgcccttcttcaagtctcagtcagaaaatttaactggactasgtctgtagcaaaagagcccgttcagattctgaaaatatgtagagaattttaagaaattagaaaaagaggtagca

SEQ ID NO: 119468 - DNA, 630 bp, Homo sapiens
gggtctctggacacggcaagatgagtagagtttgcgaccagaaactttcggtgtttgggttgtgttctctggtttccgccctggtggagggagggctcgggtgcgcgcgcctggtttgtgatacactcgcaggtggaagcaagcccagcctcctgaccttactgggaagaagacagcaagcccaagccacagcttacttttgaaaatagaaagataatgcttgcttcaatagacagagacatcagctgtagatttcatagtgaatcccagtttagcaaattagcaacaaatagacttgaaagatgactgcstgaaaataaaattttctgtcattttatgacaatgatttagcctgttgattagacttacgcactaataaatgccagggctgtgtacagaataggagtgtattttagcttcagctgtttcacatgcatctctcactggtatgtgtgatgagtgtgatgaatgtaatgtaagccttaactcttaagcagagttgcaagtaaattctgtgtaccaaaaaaaaaaaaaaaaaagaaagaaacatgctctacaagttatatttccttttaaaataattagtttaaaagttaaccttggcttctgagagtattttaacagtctgta

SEQ ID NO: 119469 - DNA, 630 bp, Homo sapiens
gggtctctggacacggcaagatgagtagagtttgcgaccagaaactttcggtgtttgggttgtgttctctggtttccgccctggtggagggagggctcgggtgcgcgcgcctggtttgtgatacactcgcaggtggaagcaagcccagcctcctgaccttactgggaagaagacagcaagcccaagccacagcttacttttgaaaatagaaagataatgcttgcttcaatagacagagacatcagctgtagatttcatagtgaatcccagtttagcaaattagcaacaaatagacttgaaagatgactgcgtgaaaataaaattttctrtcattttatgacaatgatttagcctgttgattagacttacgcactaataaatgccagggctgtgtacagaataggagtgtattttagcttcagctgtttcacatgcatctctcactggtatgtgtgatgagtgtgatgaatgtaatgtaagccttaactcttaagcagagttgcaagtaaattctgtgtaccaaaaaaaaaaaaaaaaaagaaagaaacatgctctacaagttatatttccttttaaaataattagtttaaaagttaaccttggcttctgagagtattttaacagtctgta

SEQ ID NO: 119470 - DNA, 615 bp, Homo sapiens
ttaagttttaaaattatgaaataaatgaatttcaatacacagaatcaagtttctgaagagcagggccaagactgccaactagaagcagcagtgattggagactacaataaaaaaagaaccataatagtgtgtgaatcctgtaccagcaaccaagccatctaggttctctctcagaactgactatgtggctggggtgacccatggagaagaaggaagagcagtgtggtacggcacccacttgaaagctacctagggcagggacccccccatcccccagccaagagaggcagtgagtgagggtgctactcagctgggaaaagcatgctttttctacagaactgtgcagcccacagataggaagatccccctcttgaacccaagccaccatggcctagggtcccaaccctggagctatgcagattctcaacagcttctcagctggaatctgcttaagcctgtttagttcccaggtggaggggcaaccagcaccccagctaccgctgtctgctgtcyaagccatttgagcttcttgggggaggtgcagcagccagcactgggactgacagctgcctaacatgctaagctcccagcgcagggaagggcagcaaccatctc

SEQ ID NO: 119471 - DNA, 208 bp, Homo sapiens
ctactcaaaattattaaaaataacrtcccaaggactgcttcatacatactaaataatccctgtattacttttggacatttgggtcattcctaaacatctcaaggtaaagaatcaacccatcatatttctgagttaggaattgcctatattccgtgtaaaataaaaatagattttatttctgagtcatttgttatgcataattttagac

SEQ ID NO: 119472 - DNA, 208 bp, Homo sapiens
ctactcaaaattattaaaaataacgtcccaaggactgcttcatacatactaaataatccctgtattacttttggacatttgggtcattcctaaayatctcaaggtaaagaatcaacccatcatatttctgagttaggaattgcctatattccgtgtaaaataaaaatagattttatttctgagtcatttgttatgcataattttagac

SEQ ID NO: 119473 - DNA, 208 bp, Homo sapiens
ctactcaaaattattaaaaataacgtcccaaggactgcttcatacatactaaataatccctgtattacttttggacatttgggtcattcctaaacatctcaaggtaaagaatcaacccatcatatttctgagttaggaattgcctatattccrtgtaaaataaaaatagattttatttctgagtcatttgttatgcataattttagac

SEQ ID NO: 119474 - DNA, 498 bp, Homo sapiens
  misc_feature (1)...(498): n = A,T,C or G
ttgctgatgatatgattgtaaacctagaaagccataaagactcatctaaaaagctcctgtaactggtaaatgaattcagcaaagcttcaggatacaaaattaatgtgcacaaattagtaaccctgttataaaccagcagcaaccaaaccaagaattcaacccttttcacaatagctgcaaaaaaataaaaataataaaatacttaagaatatacctaaccaaggatgtgaaagtcatctacaaggaaacctacaaaacactgctgaaagaaatcacaatgtcgtattatttttccagtattcatgaagtgacataatattttcttaagcagatattaaatttccagaaaaaacaaatttacacaccactacatttttaatatacgtaagtatatatgcagttgcccctcagtacacacagggattggttccacaacacctgtttataccaaaarctgtgtactctcatgtccttnnnnnnnnnnnnnnnnnnnnnnnn

SEQ ID NO: 119475 - DNA, 636 bp, Homo sapiens
tttagtaacatggtcaattataatataaacataaaaatgatgttttgcccatatcctactataacgggaaagcaaacacattaataatagcaaccaaaatataaatttaagcaataattttaagacataaattccttcctatatggaggaaggggggttctctaaaactttactgaatgacgaaagatatttgagtaaatgcagaagcaacatgttcataatggtaaattctcaagattcaggttctctcctaatatgcaactttactgttaatccccaaattcaataaatctttagagagaccaaaaaaaaaamaaaaaacccacaaaccattggcaagtctaatcaaaaaaggaagagaaaacatacaggagataaggatgattttctaggaaatataaattacctaacttgactctaaaataatgcatatggggcaagagaacagaacatttggaaagggtaaacaagggtgaagaaactggacccatctaatattaaaatattttaaagctacataaagcagtgacatatacagtacaagaacagacaaaaagaactcctaaaaaataaaggtcagggcttcaagatggctgactcagaactctcctccacaaagaaggaccaaaacagtga

SEQ ID NO: 119476 - DNA, 601 bp, Homo sapiens
gagaaaaaacatacaaaggatcataaaaatgaaaggtttttttttaaaaaaaataaccaaaattgataaactgctagctagactaaccaagaaaaaaagagagaagatccaagttaacaaaatcagaaaagaaaaatattttacaactgacaccacagaatacaggagatcactggagactatcatgaacaactatatgctaactaactggaaaacctagaggaaatagataaattcttggacacatacaacctacaaagactgaaccagatagaaacagaaaatctgaacagaccaataatggggaacagattgaatatgtaataaaaagattcccatcaaacattaaagaaaagcccagggctgcatggctttactgctcaattctatcaaccttataaagaagaactagcatcaattcatctcaaactattccaaaaaattaaagaagagagaattcttcctaacttattctacgaggccagcagtactctgatacaaaaccagacaagcacacaacaaaaaaagaacactacagaccaacatcwctgagaaatacagacacaaaaatttttaacaaaacactagctaacaaaaatcc

SEQ ID NO: 119477 - DNA, 564 bp, Homo sapiens
tagcccttctgctctccatttagtgtggtctggttattctttcctgagtattgttcactcctttcttcctcagtatgtttgctcatgtttgtcccacacaggtgttttcttaccttctttccttattctttcagaatcccagatatgaaatggctctcagcagtcacctaagccacctttgttcagtccataagtttcatgaaaatttgcctaaattttctctttggttcacatgtgtcttttctcccatagaggttttcaaactccgtgaggtgtcaacactaccattttggaattcactaatactgtctcatacaggggtgtacatgatggtttctttcatcactgaaggaatcgttytgactgtcgctgtgtgccccacattttgctcactgctggggatataaagaggagaaaacagtggtccctgatgtcatacatcgttcttatggtgaagggcaacacgtagtaattatagttgcacacttgcatgcttgcaacaaagggcctggacctaagctggagggtctttggaagcttcctcccagaaataatggtttatcc

SEQ ID NO: 119478 - DNA, 520 bp, Homo sapiens
ggggctgcagtcacttgcatgtctgttctgttcttgctggccatcatggtgtgcagtggcttccaggaacactcccaccacccaccagcaccatgacactgtgaggcagagcccgaggtcatgagggacatcaacgtgtccagcagaccttggcactggcggcatgtggacagtggtgaagaarccaggaatgaaatggacagagccagatgctgatacgtggaaaacacttccgatcaccagactgtgcaaagttgcaagtggaagatttggttctcttcgatgtgtactccacgtggaagtttcctcctgtcaggggcactcagtgaagctgcaggtttaactctaaaggcaccgttcgttttattctctttccttatgacaatcatacagaattcaacttctcagaattcccgtgtttttggcaaacgtgtagcagtattacaaacaacagatacatctgtgcattaagctatatgttttacgcatcccaggtgatggaaccacaagttagaatacc

SEQ ID NO: 119479 - DNA, 656 bp, Homo sapiens
gttccttggacactccagacagggagccccttgaaccaattcttctctgggtcctctatgccaagctaagtgtttggggaaagtttgctgattggtcagtaattagagagagagagagagagagaaactaacaaacaaacagaaaaaccaggaactgggaaaggtacagcctgtcactgtgtgtgtctttgggcaaatcactgcatctttgaacctctgttccctcctggtaaaatgggactcatgatccctgcytccctcacagccttgctgggaagaagaatatgaaagggccgtcctttacagagtggtccactgcatgtcttcaaattcactatgtgtctctgggcaagatatggccatctttgggacctctttacctctgatgaccagatgacactgaggttcctcctggctctgcccacctccagatgctgccctgactccagcacatgaaagtctggtgtgttgagggcctggatcttccccgtgtctcagcccacagaggccccagcaggcccaggccggggcccttcctgggagtctcggggctccagacttcctggagccagggagggaggggctggggctgggtcggacctggagccccacagaagctgctgctgctgctgtcctaccaacccacacaggagcgg

SEQ ID NO: 119480 - DNA, 656 bp, Homo sapiens
gttccttggacactccagacagggagccccttgaaccaattcttctctgggtcctctatgccaagctaagtgtttggggaaagtttgctgattggtcagtaattagagagagagagagagagagaaactaacaaacaaacagaaaaaccaggaactgggaaaggtacagcctgtcactgtgtgtgtctttgggcaaatcactgcatctttgaacctctgttccctcctggtaaaatgggactcatgatccctgcctccctcacagccttgctgggaagaagaatatgaaagggccgtcctttacagagtggtccactgcatgtcttcaaattcactatgtgtctctgggcaagatatggccatctttgggacctctttacctctgatgaccagatgacactgaggttcctcctggctctgcccacctccagatgctgccctgactccagcacatgaaagtctggtgtgttgagggcctggatcttccccgtgtctcagcccacagaggccccagcaggcccaggccggggcccttcctgggagtctcrgggctccagacttcctggagccagggagggaggggctggggctgggtcggacctggagccccacagaagctgctgctgctgctgtcctaccaacccacacaggagcgg

SEQ ID NO: 119481 - DNA, 305 bp, Homo sapiens
gtgggcggatcaaagctgccgcccgccttataaagcagtttgggaggctcgcgccggagatcgcgccaggcgaggaggagagctcsggcgagcggcgagcacaggccacgggagctgagcgcagcagagagcagccggagtccgcgcctgactccgcgcgggtcctgagccggccgcagcttgccaggatccccggcgtccttctcgcgccgcttcacgaagagggcgccttcaccgctcgcccagccggagtgcgcacgggcccgctggaaaccgcactcgccgctccctgggcaggccggggc

SEQ ID NO: 119482 - DNA, 495 bp, Homo sapiens
gggggctagggaggaggaaagtcctgtccccggccccgaggcacatctgcaaccgcccggaacatctggctgagctcgcgcacgagctccacgcctcccacccccggggctgaagtgcctcggtgtccctcaaggccctgggcgtgcagggtccggctccagggggttagcaggagggatctcgagtgctcccacccacccttcccacttccaaaacaacccgtctcccgggtgacccggcgccgcgtgcgcagccaagcagacgwctctcgaaagcctcacggctggggtcaaagccgggtggcaggcccggcctcgccccgccccgcaggtaaccttgaagccgtcgctcggcgtccctggttggcggggtcagctccgtgagctgcgtggcgggaggcttcgggacccgcccgtgccgaccttgcgcgccgcgcggacaatcggccccggtgcacggtgcccgtggggcgtcggggtagggggggaccccgc

SEQ ID NO: 119483 - DNA, 576 bp, Homo sapiens
caacaaaaaaccctgagtggggaggatgcccagagtcacgtctcttagacacatctgccaagaggattcattaatttcttattttctaggcacttaatgtcagatcagaacaaaatattttgtaacagctttattcaataatgtttaaaatataatttttgtttcactgtttaatttctcagttcatttttctgtgctctatgaaaaaccctgagttaaataactgtcctggctaatttgaaaaatacatttaatattttagttagagsaactctaattgatgattgcaatagttcttatgtgtaaattcgtttaaagtttctcaacggcttttcattcattggatttaaatccaagttcctcaacattgtttttaaggaccttgccttttttaaaatacatagaggtggtgtctatgctgaccaggctggtcacaaactcctggcctcaagcgatcctcccatctcagcctccgaaagtgctgggattacaggtatgagccactgtgcccagccatggcccttgattttttatccttctatattctctctcaaattatgcaaaaatactgaattc

SEQ ID NO: 119484 - DNA, 550 bp, Homo sapiens
ttcattgttttcatttgtaattttttttgctgttatcctcstcatcattgtaattcttttttagttgtacttctctcacaccattgagttatagatgtcagatgggttccaagagtttagttaggttcgaggttcatcttgcatcttctgagttctgtttcttgttgttattgttgttgttgtttattctcacaagcatggagaaaaataattctctaattttttaatctgtagaaatgatagtaatattatccacttcataggactttcattaagtttaaatgacctaatgtattaaaaagcacatagcacaaggttaagtacttgataagcaaatccaaattgttatgacataaatcattctctggagatactttccattgggatgtgctcgcctatatcctctgatagggtctattctgaagttatagttcctgctttctggaatagaaaaaagtatggaagcattttccatgtaaaagagaggaaaaaggccatctagctccacatttggtagttaagcaaactgaggtgatcagacatgtgaagt

SEQ ID NO: 119485 - DNA, 550 bp, Homo sapiens
ttcattgttttcatttgtaattttttttgctgttatcctcctcatcattgtaattcttttttagttgtacttctctcacaccattgagttatagatgtcagatgggttccaagagtttagttaggttcgaggttcatcttgcatcttctgagttctgtttcttgttgttattgttgttgttgtttattctcacaagcatggagaaaaataattctctaattttttaatctgtagaaatgatagtaatattatccacttcataggactttcattaagtttaaatgacctaatgtattaaaaagcacatagcacaaggttaagtacttgataagcaaatccaaattgttatgacataartcattctctggagatactttccattgggatgtgctcgcctatatcctctgatagggtctattctgaagttatagttcctgctttctggaatagaaaaaagtatggaagcattttccatgtaaaagagaggaaaaaggccatctagctccacatttggtagttaagcaaactgaggtgatcagacatgtgaagt

SEQ ID NO: 119486 - DNA, 316 bp, Homo sapiens
ttttaaagcagtttccagaatgctttacttatgggattgtgcaatcctatgttgtcaacctattttgccaggtttgtctggcattgttttttttgggggggaggggtggtaataaatccaaactatcttttaacatacacttgccttttagtgcgggcagtctctcgtgtagtctyattttatgttccagcccacattctcttgactattttactgtcctgcgtttatggtgccttccaatttagtgtcattttcgaattgcatttgcatgttatttattccattttgcatgttagtaatgaagatactaaaattc

SEQ ID NO: 119487 - DNA, 588 bp, Homo sapiens
tttctgtggtattgataatgagtctcatctttcatttctgattttgtttatttgactcttctctatttctttctttgttagtctagctaaaggtttgtccattttgtttatcttttcaaaaaactaacttgtaattttgttgactttttgtatttttttmtaatctctattttatttatgctccgatctttgttatttccttttttctgctaaatttgggcttactttgttcttatttttctagttctttgggatgtaacattaggttgtttatttgagatctttctctttttgtgatgtagacatttattgctataaacctctctgaggactgcctttgtcgcatcccataagttttggtacattgtgtttctatttttgtttatctcaagatatttttaatttttccttttgatttctgtcacccattggttgtttgggagcatgctgcttaatttctacatgtttgggaattttccaagacttcctgttattgatttctagttttattctattgtgatcagaaaaaaattctcaatatgatttcagtcttctgaaatttaagacttgtttgtaacctaatacatg

SEQ ID NO: 119488 - DNA, 588 bp, Homo sapiens
tttctgtggtattgataatgagtctcatctttcatttctgattttgtttatttgactcttctctatttctttctttgttagtctagctaaaggtttgtccattttgtttatcttttcaaaaaactaacttgtaattttgttgactttttgtatttttttataatctctattttatttatgctccgatctttgttatttccttttttctgctaaatttgggcttactttgttcttatttttctagttctttgggatgtaacattaggttgtttatttgagatctttctctttttgtgatgtagacatttattgctataaacctctctgaggactgcctttgtcgcatcccataagttttggtacattgtgtttctatttttgtttatctcaagatatttttaatttttccttttgatttctgtsacccattggttgtttgggagcatgctgcttaatttctacatgtttgggaattttccaagacttcctgttattgatttctagttttattctattgtgatcagaaaaaaattctcaatatgatttcagtcttctgaaatttaagacttgtttgtaacctaatacatg

SEQ ID NO: 119489 - DNA, 590 bp, Homo sapiens
ttcccaagaagatacacgaacggtcaataatctcataaaaagatactcaatagcatcactcatcaggcaactacaaatcaaaaccacagttagatactctatggctacaactggccactttggaaaatagtttgatggcttctaaatatattacatatagaattgtcatatgacycagaaatttattcctaggtatacacccagattattggaaagaggtgttaaacacaaattgtacacaagtacttttagcagcagtatttaaaatagccaaaggctgaacacaactcaaatgtcaataaaaatattattgggtaaacaaaatgttatatccatgaaattgaatattatacagttataaaaagaaataaagtaccaatacgtacatgaaacttgatagcattatgccaactgaaagaagccaggcacaaaaggccacctattgtatgattctatttagattgaaaatagaataggaaaatctatagagacagaaaacagatttgtggttgcttaggattgagtaggggatgggtgcataggaggttaacagcctggaccgcatctttctggtgtcgcccatcaccatc

SEQ ID NO: 119490 - DNA, 229 bp, Homo sapiens
aattttacaggaaagacttgggatttctagaagtattcttggtatgayggtcatacaagtccatagaaagacgcacaggtattataatggttgagtttgttccatggaaacagtgggactaattataaatctcattaaaggatatgagcgaagactgaggaccaaactcctgtagaggttaagtgtgtgtacatagatcttctatttacttagaactcttcaggaaatt

SEQ ID NO: 119491 - DNA, 229 bp, Homo sapiens
aattttacaggaaagacttgggatttctagaagtattcttggtatgacggtcatacaagtccatagaaagacgcacaggtattataatggttgagtttgttccatggaaacagtgggactaattataaatctcattaaaggatatgagcgaagactgaggaccaaactcctgtakaggttaagtgtgtgtacatagatcttctatttacttagaactcttcaggaaatt

SEQ ID NO: 119492 - DNA, 587 bp, Homo sapiens
gttccttagaaggggagggctggggcagcaagttgcatgacacctcctcagctggctcctgggaatgaagacaagaggctgtttaactacagacacactcagcaccatgagaaagctaaaacaaacaaacaaaaagctacaggcatatcttggagatattgcaggtttggttctaggccaccacaattaagagagtcacacaaattttttggtctcccagtgcatataaaattatgtttacattatatggtagtctatgaagtgtgcaatagcatatgtctaaaacagtgtacacaccttaattaaaaatactttacttytaaaaaatgctaacaaccctctgagccattagcaagttgtaatcttttggctgcagagccttgcctcagtgttgatggctacttactgatctgggtggtggttctgaaggttggggtggctgtggcaatttcttttttcttttttctttttttttttttttttttagagacagggtctggttctgtcacccaagctggagtgcagtggtgcaatgacagctcactgcagcctcaaactcccaggctcaagcgatcctcctgccttag

SEQ ID NO: 119493 - DNA, 396 bp, Homo sapiens
cttccatgaatcatgaatgttcttaacagcatctagaacagagactcctttccagtaggttttcaayttactttgcctggatccattagaggaatcatgatctatagcagctatagccttatgaaatatatttcttaaatgataaggcttgaaagtctaaaactaccccttgatccatgggctgcagaatggatgtgtgttagcaggcatgaaaacaacattaatctccttgtatatctccatcagagcttctgagtgactacgtgcattgtcaataagcagcaatattttgaagagaatctttttttctgagcaataggtctcaatcacaggcttaaagtgttcagtaaaccatactgtaaacagatgagctgtcatccaggccctgttgcattc

SEQ ID NO: 119494 - DNA, 396 bp, Homo sapiens
cttccatgaatcatgaatgttcttaacagcatctagaacagagactcctttccagtaggttttcaacttactttgcctggatccattagaggaatcatgatctatagcagctatagccttatgaaatatatttcttaaatgataaggcttgaaagtctaaaactaccccttgatccaygggctgcagaatggatgtgtgttagcaggcatgaaaacaacattaatctccttgtatatctccatcagagcttctgagtgactacgtgcattgtcaataagcagcaatattttgaagagaatctttttttctgagcaataggtctcaatcacaggcttaaagtgttcagtaaaccatactgtaaacagatgagctgtcatccaggccctgttgcattc

SEQ ID NO: 119495 - DNA, 396 bp, Homo sapiens
cttccatgaatcatgaatgttcttaacagcatctagaacagagactcctttccagtaggttttcaacttactttgcctggatccattagaggaatcatgatctatagcagctatagccttatgaaatatatttcttaaatgataaggcttgaaagtctaaaactaccccttgatccatgggctgcagaatggatgtgtgttagcaggcatgaaaacaacattaatctccttgtatatctccatcagagcttctgagtgactaygtgcattgtcaataagcagcaatattttgaagagaatctttttttctgagcaataggtctcaatcacaggcttaaagtgttcagtaaaccatactgtaaacagatgagctgtcatccaggccctgttgcattc

SEQ ID NO: 119496 - DNA, 396 bp, Homo sapiens
cttccatgaatcatgaatgttcttaacagcatctagaacagagactcctttccagtaggttttcaacttactttgcctggatccattagaggaatcatgatctatagcagctatagccttatgaaatatatttcttaaatgataaggcttgaaagtctaaaactaccccttgatccatgggctgcagaatggatgtgtgttagcaggcatgaaaacaacattaatctccttgtatatctccatcagagcttctgagtgactacgtgcattgtcaataagcagcaatattttgaaragaatctttttttctgagcaataggtctcaatcacaggcttaaagtgttcagtaaaccatactgtaaacagatgagctgtcatccaggccctgttgcattc

SEQ ID NO: 119497 - DNA, 204 bp, Homo sapiens
gaattcctcaaactcttgcatatttaaaatgacatttttgagccttgatgcttgaagtgtagcttgggtaaygggtgggctttaagccaattttggcatgcaaggggttgagtttattaggcatcagcacctctgaaaatcgtggggatgcaggcttaatttcaacacgcttctaaatacttgaaagatattgtataattcttt

SEQ ID NO: 119498 - DNA, 622 bp, Homo sapiens
gtacatggtgttaatgtatgagcaagaaaaagcagagggaagcagtggagagtctgataaacctgagggcagtaaaacacacaataaatggccaatgtatacccactgggagagcatactaagccaatttgaaaacaacaactagaactggaagggttctacccactccaagagtaggtgctgcaggaaattatacttaaaaagagtagaacagtatraatcttatgaaccccaaaactgatcatccaaggctccctttcttttcttcttttttttttctttttttgatggagtctcgctctgtcgcccaggctggagtgtagtggcgtgatctcggctcactgcaagctccaccttctgggttcacactattctcccacctcagcctcctgagtagctgggaccacaggcacctgccaccacaccaggctaattttgtttttgtatttttagtacagacagtgtttcactgtgttggccaggatggtttccatctcctgatccacccgcctcggcctccaagtgctggggttacaggcgtgagccaccgcgcctggccctcaaggctccctttcatgatgtggtccaaaaatgaggagacactgatgggaatggaattcaa

SEQ ID NO: 119499 - DNA, 405 bp, Homo sapiens
gaattcagctggcatccacaaagagagcatttggaccagccctagccagaggggaatcatccatcctaacaatcagattctgagttctgtatagccctactatctcaagctaaagcactctggagttctaaataaacttgaaaggcaatctaggccacaaagactacaattcctgggcaagtcctggtgctatactgaacttaaagcyggtggacatgaggtccatgtgatccaccaagacactggccagagtggccaaggaagtgcttgtgtcaccactcccccaaccctaggagtgcaggtcacagctctaagagagactccttccctttgcttgaaaagaggggagggaagagtaactttccccttgcataccagcttggtatgcaacttggataccagctc

SEQ ID NO: 119500 - DNA, 405 bp, Homo sapiens
gaattcagctggcatccacaaagagagcatttggaccagccctagccagaggggaatcatccatcctaacaatcagattctgagttctgtatagccctactatctcaagctaaagcactctggagttctaaataaacttgaaaggcaatctaggccacaaagactacaattcctgggcaagtcctggtgctatactgaacttaaagctggtggacatgaggtccatgtgatccaccaagacactggccagagtggccaaggaagtgcttgtgtcaccactcccccaaccctaggagtgcaggtcacagctcyaagagagactccttccctttgcttgaaaagaggggagggaagagtaactttccccttgcataccagcttggtatgcaacttggataccagctc

SEQ ID NO: 119501 - DNA, 495 bp, Homo sapiens
  misc_feature (1)...(495): n = A,T,C or G
tattctctcacgcacaaattcagccgtgtgcattccagtacagccagttcacaaaatcatcagggactccctgcagcttgcagcttcccantgtctggagtgaggcttcgatcancatggagttccagccactgctttacatcacaacgggaggaaggaggaaagagaaggagaaaagttttgccctccctttaagggcacttccaaaagctgcatattacactgtccctaagtcccactggccaaaattcaaccacatggccttatccagccacaagaggggctggaacatgaagtctttactctagatggtgtgcgcccctcackgagggctgtggggagaacagatagtggacaagtagcaatctctgccacaagttatgagaaaaacaaacaggcaatatagaacccatgtaatgtgagggtattcacatttgacttgctccatcttctctatttttaagagcaatttcatcttaaaaacaaacaccaatt

SEQ ID NO: 119502 - DNA, 573 bp, Homo sapiens
tagaggtaagagtttagggcactacctatgcatgacatcttatatgttctgctccttcttttaaaatttgtctcctcatccactaaagaaattcattgggaaatttagaatatgctgtttccatagggataatagctgtttaaatgtatatgatatctattttaaagaaagcaaatacatataacaatatattttgcatctttccttataagaaaatacagatttgtatgtgtgtgtatgtgtgtgctttaaaaaggccagttggtctaagaggtttccttttaactctacgtacaagtgcaaatccagttaattctattaatgactaaaagaacaatgaaagcaaatttgtaaatggattttatgtcctagtatgtataaagcactttaagaatgtctcgtagctctcagaatcttccctgacctcagrtcaatgctagaggtgatctttacgttatgtcaacatttccaccagtgatgtcacagtctatctgctgggccaccaaaagaatgccaggggagagagtagttactggtaactattttctcgtagtgtgtatcaaaatggacagc

SEQ ID NO: 119503 - DNA, 573 bp, Homo sapiens
tagaggtaagagtttagggcactacctatgcatgacatcttatatgttctgctccttcttttaaaatttgtctcctcatccactaaagaaattcattgggaaatttagaatatgctgtttccatagggataatagctgtttaaatgtatatgatatctattttaaagaaagcaaatacatataacaatatattttgcatctttccttataagaaaatacagatttgtatgtgtgtgtatgtgtgtgctttaaaaaggccagttggtctaagaggtttccttttaactctacgtacaagtgcaaatccagttaattctattaatgactaaaagaacaatgaaagcaaatttgtaaatggattttatgtcctagtatgtataaagcactttaagaatgtctcgtagctctcagaatcttccctgacctcagatcaatgctagaggtgatctttacgttatgtcaacatttccaccagtgatgtcacagtctatctgctgggccaccaaaagaatgccakgggagagagtagttactggtaactattttctcgtagtgtgtatcaaaatggacagc

SEQ ID NO: 119504 - DNA, 605 bp, Homo sapiens
ccataggctgtacaagaagcgtgactggggaggcctcaggaaacttacaatcatgccagaagacaaaggggcagcaggtacatcttcacatggtcagagcaggaggaagagagagcaaagggggaagttctattcacttttaagcaacaagatttccaagaactcactatcacaagaacatgaagggggaagtctgcccccatgattcaatcacctctcataagcccctcctccaacactgggtattacaatttgacatgatatttgggtggggaaacagagccaaaccatatcagcatcacataataataaacgattcgattcaacaaggagacttaactatcttaaatatatatgcacccaacaatgcagcaacgagattcatttaaaaattccttttagatctacaaaaagacttagacagccacacaatcattgtggggggatttcaactcccaagtgacagcatgagacagatcatagaggccaaaaaccaacaaattctggaattaaaygcaacatttgactaagtagacctaatagacatctacagaatacttcccccaggcaccacagaatatacattcttctcgtctgtccacagg

SEQ ID NO: 119505 - DNA, 575 bp, Homo sapiens
gttagctgtttcaccccttaaagacaggtagtagagaattgagtagagaataaagtagagctggttccctaaaatctctgtaaaacatgaaaaaatataagcaatcatagcctatgtagcagaatgtagtactttccataattttgataattattgacctctgtggtcacattactgaagtagcaaaccaatccagcctctgtgtacaatgaagaaaaaaaaataactatataagagctgaaacatcagagcattagaagaaagacatatcctcacaatcgctggagtaggagaaaagataaatggaggactacwtgtgttatccaagaagagtatgcaagaggaaatcgtactctctgcttatcagttgaataaatgctttcagcgatccccatggggacagcttgaagtctgttggagaaatctgagagatgtcaaaacttctgaaatcttatggatagtggcaacaccagaaaaatactattttattactctggagtcattatatttactcctagactagtttattttggaaatttgggtaacaaatatctattgtttgggaatttcttctt

SEQ ID NO: 119506 - DNA, 596 bp, Homo sapiens
ctaaaattctacaatttgacaaacaaggaagtttgaggtcctttgaaccaagtgggtactgtggaagttagctaggatgaggtcattctgaaagtactaccctacttacccccttataaaaaaattatgacttgccatggtgaagactttgtgtgatgttctgtcagaggtactagttgagaacaaactccaaaaggtcaattcaagattatcacattatcgtcagagaatatgtaatattgaaaggcactgtggggtagatagacaagggtgatccataaaaattctaacagcacatacttcataaaagtttgaaagtcttcatgtctgccatgacagaggggaataatctgccagttattgctacctaagaattgccaatagttccacctaataaaaaagaacwtttctttcttctccttttaatcttcttcattatgtttggtttttggaagaaccatgaagatgagaaggaagagtggcctacataacagagcgagactgtgtctcaaaaaaaaaaaaaaatgtatgtggcctacaaatggaatcgtggtattgattcagcctggatgttgttcatttcatttatgattgca

SEQ ID NO: 119507 - DNA, 433 bp, Homo sapiens
tcttctgcaatatcatcgttagcaacatttcctgtgtgatttcatatttttgttctctattcaaattgtttcaataaaattagacattataatatttacagctctttatataaatcagcctttaaacccggaacaaaatgcacatgggctttacaatcagaagaaaacraaaagaagacttaggcatttatactgtgcaaaggtttaaatcatatataatttgttaatatccctttattgacttatttttaaaaataaaaaaatgaaaatttttattacataaaagaaaagcaaaaacatctcttgctgtgacaaaatactatgcattatttttctaaaattgcatctccctttaaatagagcagagaagaaaacaaaacagttaaaaaaaaattagttggtattgccacaatatatgcaaccccctgagctt

SEQ ID NO: 119508 - DNA, 619 bp, Homo sapiens
aattaaccactttaaagtgaacaattaagtggcactaagtacatttgcaatgttgtgcaacccaccatttctatctgttttcctcactccaaaataaaaacccatctgcactcattatgcagccactctccactcttcttcccaccatcctggcaaccagcaatctgcattctgtctctacagatttacttattctggacatttcctataagtagaatcacatgatatttgtccttctgtgtctggcttctttcacttggcataccgttttgaggctctacttattgttgtatgtatcattacttcgttcttctttaccggctgaattaatattccattgtgtgtaagcaccacaatttgtttacccattcatcttttgatgggcgtttgggttgtttctacctttgggctattgtgaatagtgctgctatgaatattcaagtgtatgtgcctttcttaaaggctgtagtgcttaataaatatcaaagagggaagccaagatccagggtcctgtgctgatgactagaagagtccttgcctcygcaggatcccacgaaaagattactcatagctttatttttcatgaatgacagggcttttcaaatctgtgctaatctaa

SEQ ID NO: 119509 - DNA, 629 bp, Homo sapiens
ttacctctctgggggacttctttgagtgagaccattcatctttgggtctgagagaatgtaaggataaattccttgcagagtagggatttatgtagccctggtgctttggctgcagctctagcccagacctgatgccttgccaaagggatccctgccccagagctgtccacccctggttggatctggaggagggtggggcagagtgagaggcatgcccatcagcctgggagttgctcatgcagagatgggccaagccgggccttcttccttgggggtgggatccgatgcaraagtggtctagatagcctagattgctattcagttttcttttgacatcagaactggaatagatcttagattgcctggaccaaactgtgtcagggagagccatcggctgttctcattcttgctcccactcccacccacattccattacaaaggtgacagtcctatttcccagtgttatcgaatctgcctccttatttccatccatcataccctgttcttactctgaggctatgccttctctccccaccactgcaatggatgtctcactgatctcctggcctccagtttcaccctcctttttatcattgctgcctctggagagaactttccagagcatactt

SEQ ID NO: 119510 - DNA, 557 bp, Homo sapiens
tgactgatcaaagccatgcactttctggtcacagcaattgctcagagatgggaatgtgaccttggctggaccaatgaaagcattacttgagaatttcgctaaacatattacagaagagaaagtcattccctactggaattgccaagctattagccataagcccagatctgccaacaatcacttcattaagagtctgctgagaatgatgaagaaaagtggagctgaaagttragggacaaagagacagagagattgcaccctaatagttgagccctttgatctaattatatgtgaagccttttggtacagccttttcagttatgtgtgcctataaattcccttttttccccttaagctgcttatgtttggtttatgtcacttacaaatgaaagagtcacagctaataaagaatcattatgctccagccacatgaatcttgtctcctcagagaagcccttcctcagggccttgtggagttgaagatcccctccaccacagtgtctgcctgctccatcccattttccactggcttggattgacagacacgctcccacata

SEQ ID NO: 119511 - DNA, 584 bp, Homo sapiens
ttcataaaaactttgttagcgagagctaaaaaatggggagattccaagtagccgtcaataagagaatgagtaaacatactttagtatattcatacaatggaaaattactctgccaggaaaaggagcaaattactgatgcatgcgacacatgaattaacttcaaaaacattatgctgagtaaaagaatcctcacccccaaaatgtrttctgtatgttttcatttaaatgaagttttagaagaggcaagaactaatctacagcagaaaaaaaatcaaaacagttgtttcctctaagggaagtgggagcagagattgactggcagggacacaaaggaaccccctgggctggtggtaaagttcagtgtcttgttagaggtttgggttacacacaaatacagatttttcaaaattcaacaaatgtatacatgagatatgtatatttcattttatgtcaattttacacaaaaagaaaaaatgctgtgaacaaatatgaaactctagcaaaataatatgcatgctgaattatttaggaagaagtatactgatgtctgcaatttacgttaaaacactttgtaaaagatgaat

SEQ ID NO: 119512 - DNA, 555 bp, Homo sapiens
ttagaaaatttcaaaggaaaaaaggagtcaaaatgggttttttttaaatgaggtaacatttcaagaagaacatatttttatcttggacaaaaatctccaaataacaaacaactacaaacacaatgttttactgctttttatttatatttggattttctacttcccaatgtgtcagctctcccagaggtaccctagattgtggcttctgtcaacagtgcaaactgtatccaacttttaaggccaaacagtgttttctctcattaacgtttatggtctttggtttgactaatttcaaataaacttagatctctaaaattagtgccacaagacaggcactttacccattatcagtaggtgaaaaaataagctgtcaacatcaatttcagtttgaaaaagaagtttagtctgtatttaaatacagatgttgaggcctccaacacaaaaatactttctcttagctaagcctttattttttcctaagaaggacaactgtgttagcagcttgtttatawaaaaaaaatcaatatagaaacacatagcagcatgtggcctgaa

SEQ ID NO: 119513 - DNA, 607 bp, Homo sapiens
catgatggcatgcacctgtagttttatctacttcagaatgaggcaggaggatcatccaggagtttgcggctacagtgagctatgactgaatcactgccctccaggctgggcaacagagcaagaccctatctctttaaaaaattttaaaaaagaaattaaatctcagtgatattaagggatttaataaaggccattaattaataagtgyttgaactgaaccagaacttgaagcccagactccaaattcagttttctttcaattattcttttcatgaagatttttgggagtaagtatacttagcactctacataagacccgaatattacatttcagattctttaagccattatatttgacatgagatataggaagcctgaaaaataaacaaaaacaaaaaaaaaattgctggcaacataaaagtcttgctgatagctgtatcatttaccattaaaatttttaaactcgttgcttaaaaattatgaaatctttttatttcttattactcatggttctgagactcatttgaaaatgtgagatatagccccatattctctttggaaaagctatgttataaatttatttagttttaatataatatatagtttt

SEQ ID NO: 119514 - DNA, 607 bp, Homo sapiens
catgatggcatgcacctgtagttttatctacttcagaatgaggcaggaggatcatccaggagtttgcggctacagtgagctatgactgaatcactgccctccaggctgggcaacagagcaagaccctatctctttaaaaaattttaaaaaagaaattaaatctcagtgatattaagggatttaataaaggccattaattaataagtgtttgaactgaaccagaacttgaagcccagactccaaattcagttttctttcaattattcttttcatgaagatttttgggagtaagtatacttagcactctacataagacccgaatattacatttcagattctttaagccattatatttgacatgagatataggaagcctgaaaaataaacaaaaacaaaaaaaaaattgctggcaacataaaagtcttgctgatagctgtatcatttaccattaaaatttttaaactcsttgcttaaaaattatgaaatctttttatttcttattactcatggttctgagactcatttgaaaatgtgagatatagccccatattctctttggaaaagctatgttataaatttatttagttttaatataatatatagtttt

SEQ ID NO: 119515 - DNA, 611 bp, Homo sapiens
gcaaaccatggcatgtgtatacctatgtaacaaacctgtgcgttctgcacatgtatcccaagacttaaagcataataataataataataataataataataataataataaataatgcaaagagacatatacaaaaacatctagagaaatactgttaatttaggacagaactctggataacttttaatcacaaatgaaaagtcaaatgtagaaagaagcaaactcccaaataagataaatacatgcacaaaagwgtaagtagacagaattaccaactcaacttggctttggtcaaattatttgacttgctcataatttggccaaacctgctataaaattaaaagggaatataaaaccaacatattatagaacacaagaggctgcatctcaatgagattctcttatgtgaattactttctaacaaaattttaaaaagaagtcaacagaaattgagtgtttaataaaagtaaatataaacgtgtgataatgataaatctgtctaatcggcatgtttaaggtgttattttagaactcagatccttatgtttcttaatatcaacttactggttatatttgcctttccataatactcagtaaaaacatatccatta

SEQ ID NO: 119516 - DNA, 577 bp, Homo sapiens
taaaccagtttgtaggcacacacatcattaatgtgggcagccaagaacggagattgcttaacaaagatggcacaaggtagttagccatatgtttgaaatgatttaggcgaagtttgccagaagtggaaatggactaaatgacctctggaggcactttccaatcctgtctttctcatttagtcgaaacgtaattaaaaaaatctatatgggagatacaaatttattttacttcaaaatgccttgggttttgttaggtgacagacaattamaaacaatgtatttcttgtaagcaaacgtttgaattcaatgctaacgtagctgttttgatcaaatacaaattactttaagttgtaggataattaactttactgtttaaacattcattagacaactgcctaagaaatttttatgtatttgcatttttagaacaatggaaaaaattctataatattgaaatatgtactttatgtgcatgaagagaaatgaaacttttccaaagtatgcttgtaatttgtaaattaaactttcttcccctccctgtcccccatacctacactacaactgagacattttactt

SEQ ID NO: 119517 - DNA, 578 bp, Homo sapiens
ttggtattgtatagttctagactatgtgcctattgtctgaattaaaagaagtgagcttcattcattcaacatttattgcctgctttttatctgctagatactatcctgactgctggtgatatgttaacataaaygtgaaaggaccttgtttctggagttgaaagtaagaaaatagtaattctgtctctgaaattagaagaaagttttagagatgatatggtgacttttacaccagatcttgatgaaagaataagaaacgttcagacaaagaaaataggcattcttgaaagaaacggcagaggaaaagccatataggcaaaaaccaggagtttgccttgggaaatgttagaccagaccagtttgatataactgtagtttgggatgaattaggtagaatggcaagagatgaacctgtaaatagtagacttagatcgaattataaaattgtgtatgcaatgccatgattttttaatttatccttagtcaacagcagcaatttaaattctttaagagagcggtgttgggaattgaggtcctgtttataatactcctttttcccatccaagataagaaaaaac

SEQ ID NO: 119518 - DNA, 578 bp, Homo sapiens
ttggtattgtatagttctagactatgtgcctattgtctgaattaaaagaagtgagcttcattcattcaacatttattgcctgctttttatctgctagatactatcctgactgctggtgatatgttaacataaacgtgaaaggaccttgtttctggagttgaaagtaagaaaatagtaattctgtctctgaaattagaagaaagytttagagatgatatggtgacttttacaccagatcttgatgaaagaataagaaacgttcagacaaagaaaataggcattcttgaaagaaacggcagaggaaaagccatataggcaaaaaccaggagtttgccttgggaaatgttagaccagaccagtttgatataactgtagtttgggatgaattaggtagaatggcaagagatgaacctgtaaatagtagacttagatcgaattataaaattgtgtatgcaatgccatgattttttaatttatccttagtcaacagcagcaatttaaattctttaagagagcggtgttgggaattgaggtcctgtttataatactcctttttcccatccaagataagaaaaaac

SEQ ID NO: 119519 - DNA, 626 bp, Homo sapiens
ttctatcagttcagctgcagcaggaatctgtctaatggcagacctttactgagacagacagttaatgggaacagtagcagccctgaggtgtgtttatacagtcagactcacttcctctacttctgtgatatatgaactacttcggaagtttcccagctgtttcagtggataaatcatagcagtaggagctcatatttaaccttcactgtactggctcaatactttgtagtccttttcttttatctctttggctgtatgcaagagatttcaaacagacttgtccatgtgcaaacgacattgttctctctatctgctccctctgacctcctttcatccagctcagggaaattctgattctcttctgaggatttgcctatatgtcagtcamaataagatcaacactctgctagaagtcaagtggtttaaggattcatttcctgacaataaagcaaaattgcttctgttggggaaggggtgttgtgcatgcattcagtgaaatctcctggtacacagtagatatcgttatataccaggtatttcctattgttttagggagctctagccacagtcagtaaattttcctgggtaataacagacctcaatttcccaccacctttccactggtt

SEQ ID NO: 119520 - DNA, 626 bp, Homo sapiens
ttctatcagttcagctgcagcaggaatctgtctaatggcagacctttactgagacagacagttaatgggaacagtagcagccctgaggtgtgtttatacagtcagactcacttcctctacttctgtgatatatgaactacttcggaagtttcccagctgtttcagtggataaatcatagcagtaggagctcatatttaaccttcactgtactggctcaatactttgtagtccttttcttttatctctttggctgtatgcaagagatttcaaacagacttgtccatgtgcaaacgacattgttctctctatctgctccctctgacctcctttcatccagctcagggaaattctgattctcttctgaggatttgcctatatgtcagtcacaataagatcaacactctgctagaagtcaagtggtttaaggattcatttcctgacaataaagcaaaattgcttctgttggggaaggggtgttgtgcatgcattcagtgaaatctcctggtacacagtagatatcgttatataccaggtatttcctattgttttaggsagctctagccacagtcagtaaattttcctgggtaataacagacctcaatttcccaccacctttccactggtt

SEQ ID NO: 119521 - DNA, 553 bp, Homo sapiens
tgtttaatctgttgatagtttctttggctgtgcagaagctctttagtttaattagattctgtttgtcactttttgcttttgttgcaattgcttttggtgacttaatcattgtattggtctgttttcacagtgctataaagacatatctgagactgggtaataaaagaggtttaattgacccacagttcctcatgactgggtaggcctcaggaaacttacaatcatggtggaaggcgaagaggcgtgtcttacgtggcagcaggcaagagaactatgtaaaggagtaaccatcaaacccttataaaaccatcatatctcatgagaactagctcactattataagaacagcatggggraagacacctacatgatccaatcaccttcaacctggtccctccttcaatatgtggggattatggggattacaatttgagatgagacttgttggggcccagagccaaaccatatcattctgccccttgccccttccaaatatttcacatccgttttacatttcagaaccaatcatgccttccaaagagtcccctggagt

SEQ ID NO: 119522 - DNA, 553 bp, Homo sapiens
tgtttaatctgttgatagtttctttggctgtgcagaagctctttagtttaattagattctgtttgtcactttttgcttttgttgcaattgcttttggtgacttaatcattgtattggtctgttttcacagtgctataaagacatatctgagactgggtaataaaagaggtttaattgacccacagttcctcatgactgggtaggcctcaggaaacttacaatcatggtggaaggcgaagaggcgtgtcttacgtggcagcaggcaagagaactatgtaaaggagtaaccatcaaacccttataaaaccatcatatctcatgagaactagctcactattataagaacagcatgggggaakacacctacatgatccaatcaccttcaacctggtccctccttcaatatgtggggattatggggattacaatttgagatgagacttgttggggcccagagccaaaccatatcattctgccccttgccccttccaaatatttcacatccgttttacatttcagaaccaatcatgccttccaaagagtcccctggagt

SEQ ID NO: 119523 - DNA, 632 bp, Homo sapiens
tctaatgaatattagctgtcaataatcaggtttgcagaatgtattattttctgctgccctcatttgttgactctcctcatcttcctctttctctttggactttccttctacaattcttctttgcgactctaccatagtcagccatttaaatatttgcttgtagaacttagtcccatttctcttaatctaaattttctccctggacattctcacctactccactgactttcattactttcttcatactgatgatccccatatttctatcttcagcccacatcattctttctgagcttttcacccatacatctaactgcctattgaatatctccactcataagtttaaaggcccttcaagtcyaacaggttcaaaattaaagtcatccttttcccagaaggagcttctccacttgtgcttcctcattcagtgaatgaccaccaatagcacttagctactccaggaagaatgctgagttatgacatgatctggtcaacagaatgtacacagaagtaagagtgtgtagttctaagcctaggcattaagaggcatcacatgttccacagtttccacattttactgctgctaatctcacgggaacaggtcccagcaaaggtaagagacacttaaggaa

SEQ ID NO: 119524 - DNA, 595 bp, Homo sapiens
agcttgtctataatcttaacttttctgattccacctgacagatattgaagagatcagtgccacaaatatttcattgcaaagaaagaaactaattgttctatcaatttacagagtgacattttcacaacaaatactattttgaagattttgctgcctgagctgtccaaggtgccctgcttctgttctcaaagtatctaaatcctacttaaactttcatagctcctcaatcttccrtgaagcctttcatgatggctagtcacttcagactacttttctgtgaaatctgtggtaacatttctccactgaactctttatgttttactaggaatttagatacagttttgaagttcattattaatgtggagtttaatcgctttaacaaataattagcaatttatggttgagcaaatttttttccaaatttgaattctttgcgttctcaactagattctgtttctttcacaaaagtctcattcatgtaaagctgtttcagagaataacagactgggaataaaatatatatatatatatatgagatacacaaggacagtaacattctctggattaattcccaaacaggttcattacagcaata

SEQ ID NO: 119525 - DNA, 613 bp, Homo sapiens
ttgtatcctgcaacttcactgaatctgttcatcagttataaaatttttgttagagtctttaggtttctctactttgggtgcagtagtctctcrtcatttatggttttactttctgtggttttggttacttgatgtcaacttctgcccaaaaatattaaataaaaaatttcagaagtaaacaatttataagttttaaattgctgtgccattctgagtagcatgatgaaatctcatcaatccctctctgtcctattgggaggtgaaccatccatttgtccagtgtgtccatactgcatatgctacccacccattagtcacttggtagctatcttggttatcagatccactgtcttcataacacagtgcttgtgtttatataacccttattttacttaattacagccccaaagtgtaagagaagtgaggttggcgatttggatatgccaaagagaagctgtaaatgcttcctttcagtaaaaaggtgaaagttctagacttaagaaaaaaatcatatactaagattgctaagatctaaggtaaattttcactaagatctatctaagatctgaagatccatagacaaatcttctatctgtgaaactgtgaagaaaaa

SEQ ID NO: 119526 - DNA, 613 bp, Homo sapiens
ttgtatcctgcaacttcactgaatctgttcatcagttataaaatttttgttagagtctttaggtttctctactttgggtgcagtagtctctcgtcatttatggttttactttctgtggttttggttacttgatgtcaacttctgcccaaaaatattaaataaaaaatttcagaagtaaacaatttataagttttaaattgctgtgccattctgagtascatgatgaaatctcatcaatccctctctgtcctattgggaggtgaaccatccatttgtccagtgtgtccatactgcatatgctacccacccattagtcacttggtagctatcttggttatcagatccactgtcttcataacacagtgcttgtgtttatataacccttattttacttaattacagccccaaagtgtaagagaagtgaggttggcgatttggatatgccaaagagaagctgtaaatgcttcctttcagtaaaaaggtgaaagttctagacttaagaaaaaaatcatatactaagattgctaagatctaaggtaaattttcactaagatctatctaagatctgaagatccatagacaaatcttctatctgtgaaactgtgaagaaaaa

SEQ ID NO: 119527 - DNA, 568 bp, Homo sapiens
tcatggttctggaggttgtacaagaagcatggtaccaacatctgcttctggtgagggcttmaggctgcttccactcctggcagaaagtgaaggggagctggcatgtgcacaaatcacatggcaagagagagaaaaaaagatacgaggctctttttaacaaccaggtctcttgggaatgaagagagtaagaactcattaccatgagggtatcaccaagccattcatgagagatccacccccaagacccagacatctccctttaggctccacccctaacactgaggatcaaacttcaacaggagatttgcaagggtcaaacaagccaaactatagtagtgggtaaagaaccgatttaaaaaggatcaatgtacaaaaacaaatgttagttactgactatgtagctgctgtctctgaccatcacaattgatatggccaaaagagcaacaaatgttgaaaagcaatgaaaactaaaataaataaacatatcaaaatatcatactagaagaaataggttttatttataacaaaagtagtaaagcagaagaatgatttaatatgatatataacc

SEQ ID NO: 119528 - DNA, 568 bp, Homo sapiens
tcatggttctggaggttgtacaagaagcatggtaccaacatctgcttctggtgagggcttaaggctgcttccactcctggcagaaagtgaaggggagctggcatgtgcacaaatcacatggcaagagagagaaaaaaagatacgaggctctttttaacaaccaggtctcttgggaatgaagagagtaagaactcattaccatgagggtatcaccaagccattcatgagagatccacccccaagacccagacatctccctttaggctccacccctaacactgaggatcaaacttcaacaggagatttgcaagggtcaaacaagccaaactatagtagtgggtaaagaaccgatttaaaaaggatcaatgtacaaaaacaaatgttagttactgactatgtagctgctgtctctgaccatcacaattgatatggccaaaagagcaacaaatgttgaaaagcaatgaaaaytaaaataaataaacatatcaaaatatcatactagaagaaataggttttatttataacaaaagtagtaaagcagaagaatgatttaatatgatatataacc

SEQ ID NO: 119529 - DNA, 592 bp, Homo sapiens
tactcattatttcatgtcatttctgtaaaacaaatcttgtttttaattatgtctctgaatttgaaatgacaatattgttctgatcctaaaatttgtgcatgattatgttagtgctagtctgtattttagactttgtaaaggaatwgttgtcaatcatataatctatttgcttttgaggaaatgaaaatccaattggataaatgctctctaatttatgttgccatctttaaatgtttcaacaatgtttcaaggttgttgaaaacggtgaaaaaattgatagtacagtacaatgttttgatagcaattagactatccctggcatatccctctgtgtgtttaagttctataattattttgaagaatggttaatgtgaaacgaaacataaaatttgtgttatttatttttgtaatattaagtaattcatggtgactgtaaaaggccaaaaatactagaaaatgcagaatgaaaaaaaaggaataaataaagttgaaaaaagccaaaagaaagaaaggggaaaggatgggatggaaaagcagaaggaaaagagagaaataaagagaaggaggaacaaataaaaaggtggcaaagagt

SEQ ID NO: 119530 - DNA, 592 bp, Homo sapiens
tactcattatttcatgtcatttctgtaaaacaaatcttgtttttaattatgtctctgaatttgaaatgacaatattgttctgatcctaaaatttgtgcatgattatgttagtgctagtctgtattttagactttgtaaaggaatagttgtcaatcatataatctatttgcttttgaggaaatgaaaatccaaytggataaatgctctctaatttatgttgccatctttaaatgtttcaacaatgtttcaaggttgttgaaaacggtgaaaaaattgatagtacagtacaatgttttgatagcaattagactatccctggcatatccctctgtgtgtttaagttctataattattttgaagaatggttaatgtgaaacgaaacataaaatttgtgttatttatttttgtaatattaagtaattcatggtgactgtaaaaggccaaaaatactagaaaatgcagaatgaaaaaaaaggaataaataaagttgaaaaaagccaaaagaaagaaaggggaaaggatgggatggaaaagcagaaggaaaagagagaaataaagagaaggaggaacaaataaaaaggtggcaaagagt

SEQ ID NO: 119531 - DNA, 661 bp, Homo sapiens
aatgctgaaatgagttaagactttgggggattcttgggaaggcatgattggttttgaaatgtgaagacatgaaatttaggaagggacaaaggtagaataatatggtttggctgtgtccccacccaaatctcatcttgaattgtaactcccacattcccatgtgtcataggaggaacctgttttgaggtgattgaatcatgggggttggtctttcctttggtgttcttgtgatagtgaataaatctcatgagatctgatgattttaaaaatggaaatttccttgcacaagctctctctttttctgctgytgtctatgcatgacgtgacttgcctttcaccttccaccatgattatgaggcctccccaaccacatggaactgtaagtctattaaacattttttttttttttgtaaattgcccagtcttgtgtatgtctatcagcaatatgaatgaaactaatacatatataagtgagtatgtgcaatacttgtctttctctgcatggcttattaacttaagccattaacataatgacctccagtttcatccatgtttctggaaatgacaggatttccttgtttttatggatgaaaaatattccatagtgtatatgtaacacatttttgttatcctttcatccattgaacatatagtttgactc

SEQ ID NO: 119532 - DNA, 602 bp, Homo sapiens
ccctaatcatgtgttcagccacagctcacccatggattaacattgtgatcagcacaataaaggtctaggcctcacataggtayggtaaattcttcttataaagatgtcttagaaacctggaaatccctcagccctgtggaaaggtagtgccaggacacaagtcattgctaatgagccccagaagaaaaagtaacacagtaatgtgaatgtaaaccttattcagtagcagtttttccagcagctcccatttgctgaacattatgctagaacctggggaatccccatcctttgggaaattgttcaatgcacctttaatgattaagtgcaatgtgataagtaccataagtgatacatccacattttgtggaattgagataagaaacaattcacaattcacaatatctggaagaaatagagtcttgaactatggattcaagtaaatcccaggaagggatcactgggtaaatccagtgatttacccagaaaaactaagggtaaatgcaggttgattattcctcatctgaagtgcttgggaagaaaaatgtttcagatttcagattttttttcagattttggaatatttgcatatgcataatgaggta

SEQ ID NO: 119533 - DNA, 538 bp, Homo sapiens
gggtgcctgtgttccaaacatactaccccctccctgcattttgaatagcagccacattaatagtgcatgaaagaagtcccttttgtgggacaagtttagccaaaagtaattaggtagtaaagaacaaagccaatccatcgtttctacctccaggaatttaagacttctatcttcagagcctagatcaaggaccagcgaagtttttcttaaacagcaaaacagtaaatattttaagatgagaccaaatctaagatataatgtgggcacttatgaaaaccatttaaattgataccacttaaaaacataaaagccaaccttagctcgtgaaccataaaacaaaacaaaacraaacaaaaaatgggtcactaacaagatctagccattactgattgacaattatgagatgccatgatgtgatgtcatcaggagaatcctctttacccttacaaggtatttgcacctggcaaagccattctagggaaacattctcattagacagggaagaaatgacatcttcttgtggaaaaaccgtgttggt

SEQ ID NO: 119534 - DNA, 600 bp, Homo sapiens
agcttcttaatgcctgaacccagaactttcccactgtcacttctgtcatctgttgatctaaaccagttttaaggacagtccaaatctaatatgcaagggaatatgccttctactacccaaggcctgaattaggagggcatgatccccttggggaatgttttatagcaatttaccacaagcacctagaataacacctggaacatcataagcacagaatgcctgctatctaatctgaataatgttcactgaacatctactaggaaaattacttatgtatgtatttatgtatgtatgtatatatgtatgtatgtatttattttgtgatagagtttcgctcttgttgcccaggctggagtgcagtggtgatctcggctcactgcaacctctgcctcctgggttcaagcatttctcctgcctcagccccscaagtagctgggattacaggcacctgccaccacacccggctaattttttgtatttttggtagagatggggtttcgccatattgaccagggtggtctcgaactcctgacctcaggcgatcagcctgcctcgacctcccaaagtactgggattataggcgtgacccaccacgcccgg

SEQ ID NO: 119535 - DNA, 613 bp, Homo sapiens
cgacttaggttttctggacccatctgcagaacttggagccactgcagatctcagggcctatcacctgcctacctccagcatctctccaaagtcctaagcaattttcagctataaaatttctaaaaatgaatgaagtctctgtccaaagcctgacttccctgtcttggaattagaaatcaatttcattttcccctgtagttattacctaatgttccaggggctcctaccrcaaatccatagtcattcttagtcgctgttcatatcagctcccaaaaggaatagcagccacttaggttattttcctcagcctcctttccttcgtcaggcggatatgggttggaataacattttcgagtcccaagtcagaaagaactttgtgagagtgaccattctgatgtgagaattctttatatctctcaaaaggagattgatttaacttgtgcattctttttcaacacataagaaaataattactcaaaccgattaacacgttttgtattatttccttacaaacagaaaaacaaaagcaaaatctcaactttttttctttttccccatttccttttctttcgactactgtaaatgtactaccctcccttcctcagtcatcact

SEQ ID NO: 119536 - DNA, 602 bp, Homo sapiens
gtaacattaagcagcatttcaaattacgtaggacatttaaaagctgagagcatttgagaaaatagttgtaaactacaatacagtcctagggatatatggactcctacctcatgcaagcaaactgcgttgtgtgccactatctgcatatgtacatggaatgagtgatctaattgggcagaagtctttaaggccamatctttaagacttctattcaggaaaaaatatcaaaccaagggtttactgaaaaacttgacatcatgttgttcttcaataaatattttcctcacgtctgttggaaattccagaccacatcgctgagatgagaccaatttgaagccgtctcatctctgagggttctcaggaacactcattctgaacatatgtgcttcattatattatttaactattctatgatccttggtcttaacttcagcaaatgttaggactcaggtttgtccatccagctctgacatgcagttccttgacacaataagctgcaataagccatgaagcaagaaacataaatgtcagttataagctatgaaacaatgtttcaagatagaaagaaaggcaaatccagaaagatccatcttacttcaaaa

SEQ ID NO: 119537 - DNA, 585 bp, Homo sapiens
taccacttatttgcagcatgggcaatggcagcattttaatcagataggaatgtcttcattaagcaacagtaccccagcttatacctggtatcacctgatggtaaacgaaggcctgactcgtcccctccctaacccctcccctcttcccattgttctgcgatgtacggtgtgtccttatataagtgaaattacttgtacgtgtttcggtatacagtcaagaaaatactgtgtgtgtcgacaataaataaaaccttatgttataaatcattatgcattgtgcmgagcatttttaggtacacaggtagattatatttatttcagtgtttttctgaatactttctagtaagggttacttctttcacgaatatatgaacacttaaagtgtgtacatggtttattgaattgatttgttttttgaaaaaaaaattgcagatgggctcacagggaaagaatcaataagcctatgtaatgaactcataatattttgatttaaatatcactttaaagactcttctgattaaggtgactcatgaaaatggaactaagtatcaccaatgaagagtttagtgcctttatttgcctaaa

SEQ ID NO: 119538 - DNA, 599 bp, Homo sapiens
aaaacattctgttgctttccttttttataggacaagtgtgcaagtggctttacatggctgaataaacatttggggttcargccccaagcattcttagcttaggtgctgggtgttaggggaatgttggggaatgccagctgcccacacctagggatattagggggctctggttctatgaggtgttgagttggaacgcagcttttctttgggggatggagaagggaagtcccagtatcagttagttcattatcagggaaccctgaaacagctttaagggtagttgaaattacaagacattcttgcttgtcctcacaaaagcacttccgctcctcaaagtgcaggcctgactcctggctcatggatccactccggagaatggggaaaggctgttctcacacttctgtgatgccactttattcaggccttcgatcctcggatatgttgaagcttgggggctggagataaagaaaggggtttaaagattttctcttaacggattaagctataagaccttcattggctggtgatgactgttgcatagctggtgtttaatgctgcctccttgtggaggcataagatgtcttctaacatgactcttt

SEQ ID NO: 119539 - DNA, 599 bp, Homo sapiens
aaaacattctgttgctttccttttttataggacaagtgtgcaagtggctttacatggctgaataaacatttggggttcaggccccaagcattcttakcttaggtgctgggtgttaggggaatgttggggaatgccagctgcccacacctagggatattagggggctctggttctatgaggtgttgagttggaacgcagcttttctttgggggatggagaagggaagtcccagtatcagttagttcattatcagggaaccctgaaacagctttaagggtagttgaaattacaagacattcttgcttgtcctcacaaaagcacttccgctcctcaaagtgcaggcctgactcctggctcatggatccactccggagaatggggaaaggctgttctcacacttctgtgatgccactttattcaggccttcgatcctcggatatgttgaagcttgggggctggagataaagaaaggggtttaaagattttctcttaacggattaagctataagaccttcattggctggtgatgactgttgcatagctggtgtttaatgctgcctccttgtggaggcataagatgtcttctaacatgactcttt

SEQ ID NO: 119540 - DNA, 599 bp, Homo sapiens
aaaacattctgttgctttccttttttataggacaagtgtgcaagtggctttacatggctgaataaacatttggggttcaggccccaagcattcttagcttaggtgctgggtgttaggggaatgttggggaatgccagctgcccacacctagggatattagggggctctggttctatgargtgttgagttggaacgcagcttttctttgggggatggagaagggaagtcccagtatcagttagttcattatcagggaaccctgaaacagctttaagggtagttgaaattacaagacattcttgcttgtcctcacaaaagcacttccgctcctcaaagtgcaggcctgactcctggctcatggatccactccggagaatggggaaaggctgttctcacacttctgtgatgccactttattcaggccttcgatcctcggatatgttgaagcttgggggctggagataaagaaaggggtttaaagattttctcttaacggattaagctataagaccttcattggctggtgatgactgttgcatagctggtgtttaatgctgcctccttgtggaggcataagatgtcttctaacatgactcttt

SEQ ID NO: 119541 - DNA, 569 bp, Homo sapiens
aggggaagaaaatctgctgccagcacaaggcatctgtaaagcaacttgaaacttgcccattttggcctgggatctaggtagaaagaatgtctactcagagatttttacctgaacatttaccttctttatggtctggaatttaagtttaggctatgtctgggagtctagaaatcttcaaacttaaaaaaaaagtcatacaaaattattttcagactggtgacacttctgtagcatytgtaatacacacattcaagtcatttcaaccatgcaacacgggactcccacagataaagtccagctgaatataacctcacaattcaacattataaacatataagaaaataatccattatgagaagagtcagcaggcatagcagacattagtatcaaacccctatgaatttcagatttagaactaagaaattttaacgtaagtatgtttaaaatttattgaaatgtaaaaggactataaacatccaataagacagtatcaacaaggaaaagaaaacaaccattaaaaagatccaatagaatcactagaaaagaaaaatatagtcagtaaaaccaga

SEQ ID NO: 119542 - DNA, 555 bp, Homo sapiens
gtttatatatattttatctgtacatacatttttcctgtatatcatgaaatggtatgggtctgtagactgagtatttaaaatctgttgaatttcaaaagataaattaaactaaccagttttctagttttcctacttatttctcaattcctattttctgcrtcactttgggaaagagggcagagctgcttacactgctaccaatctctatctctggctactttaaccactgtagggaacttgcaagattaagttacgctttgtgcaaaaagggtagcacccaactgccttacctgtctacagcaccacttgcaggggagggggaggaggcagttctttaggaagggtagtgcaatgcttcctcctcttctgcaagcagtgctggagattctgtagaaggaagggcatccgtgagcggggtggaacaaacagtggagggcatgaagaatgttagttaaaagtaccttttgcccacctatgctaaatacggtgcccagggtataaatacctatatcagcaaaaagatgtatatttcaggatccaaaaatgaatctgatt

SEQ ID NO: 119543 - DNA, 511 bp, Homo sapiens
ctgtgtatggtgagggcctgctttccagttcacagacagccatattctcactgtgttctcacagggttgaagggcaaggggcctctcgagagtctctttttacraactgtgcttatcccatttatgagggcctcaccttcatgacctaatcacttccaaaagccctacctctaaataccatcacattggggattaggtttcaacacatcaattttgggggagccatagagattcagtccatagcaactactaatgttaataatagcagttaccatttactgagtagttacatatggtagccactctatttagtgctttccatttaatcctcactgccatagaaaagagataagtaacattgttattcccattttcaaattagcaatgtgagtgttttaaccataaacttgtccgagatcaagagttagaaaagagaagagtcagaattccacgtgtgccccatgacttgagattctgcacttttatttgcagggtgaaacatctcacagtg

SEQ ID NO: 119544 - DNA, 559 bp, Homo sapiens
ctcacccaagggtgggctcccacaactgcagtgagagagatggtcagttcaaagcacatcaaccaagtcagtgcaaaaggaggaaaatgaatagccagaaagttttctctgccccaatacgtagtgctgagctgggctgggctgcacgatatgatcaggaaaatatagaggtcacagtgtggaagtagaaagaacagaaaggttatttcgtagtatagtttcaacagaagagatcagargcctcagtcttctctttacacctgctacatggatccaagaaatctatgtcaattttctgatattcaaccccatctagacatttcacaaaaaatttataactagagtctgatgctttagtttgtatttccctccttcttttagtatcagcaacctcctccaatgcagaactgctcttctgtctctccatgtgattccaaggatgcttgtcccagaattgtccttctctggtgcataacccagacctggccaatcatagttcccttccacttggcaacaatgtttgatgtgagaatgagagtataaccaaagccattcatgt

SEQ ID NO: 119545 - DNA, 601 bp, Homo sapiens
tcaacatggcaccaagaatacacaatgcggaaaagagagtctctttaataaatggtctgggaaaactggattttcacatgcaaaagaatgaaattagccccttatcttacaccatacatcaagtcaacgtaagatggattaaaaacctaaatgtgaggcctgaaacygtaaaactcctggaagaaaacagggaaaaaccttctcgacattgactttgcaatgatttcttggatttcacaccaaaagctcaggcttcgaaagtaaaaataaataaatgttcaacatcaaactaaaaagtttctgcacagcaaaatgaacaatcaccaaaattaaaaggcaacctacagattgggaaaaaatacttgcaaaccatatatcagataaggaataaatatacaagattcttaaagcactcatatctttcaatatcaaaaatatatatcatctgatttaaaaaggacttgaatagatattctccaatgatgacatgaaaatggccaacagatatttggaaggtgctcaacgtcgctaatcctcagggaaattcaaatcaaatccattatgagataccacgtcatacctgctaagatcgctattatca

SEQ ID NO: 119546 - DNA, 601 bp, Homo sapiens
tcaacatggcaccaagaatacacaatgcggaaaagagagtctctttaataaatggtctgggaaaactggattttcacatgcaaaagaatgaaattagccccttatcttacaccatacatcaagtcaacgtaagatggattaaaaacctaaatgtgaggcctgaaactgtaaaactcctggaagaaaacagggaaaaaccttctcgacattgactttgcaatgatttcttggatttcacaccaaaagctcaggcttcgaaagtaaaaataaataaatgttcwacatcaaactaaaaagtttctgcacagcaaaatgaacaatcaccaaaattaaaaggcaacctacagattgggaaaaaatacttgcaaaccatatatcagataaggaataaatatacaagattcttaaagcactcatatctttcaatatcaaaaatatatatcatctgatttaaaaaggacttgaatagatattctccaatgatgacatgaaaatggccaacagatatttggaaggtgctcaacgtcgctaatcctcagggaaattcaaatcaaatccattatgagataccacgtcatacctgctaagatcgctattatca

SEQ ID NO: 119547 - DNA, 601 bp, Homo sapiens
tcaacatggcaccaagaatacacaatgcggaaaagagagtctctttaataaatggtctgggaaaactggattttcacatgcaaaagaatgaaattagccccttatcttacaccatacatcaagtcaacgtaagatggattaaaaacctaaatgtgaggcctgaaactgtaaaactcctggaagaaaacagggaaaaaccttctcgacattgactttgcaatgatttcttggatttcacaccaaaagctcaggcttcgaaagtaaaaataaataaatgttcaacatcaaactaaaaagtttctgcacagcaaaatgaacaatcaccaaaattaaaaggcaacctacagattgggaaaaaatacttgcaaaccatatatcagataaggaataaatatacaagattcttaaagcactcatatctttcaatatcaaaaatatatatcatctgatttaaaaaggacttgaatagatattctccaatgatgacatgaaaatggccaacagatatttggaaggtgctcaacgtcgctaatcctcagrgaaattcaaatcaaatccattatgagataccacgtcatacctgctaagatcgctattatca

SEQ ID NO: 119548 - DNA, 601 bp, Homo sapiens
tcaacatggcaccaagaatacacaatgcggaaaagagagtctctttaataaatggtctgggaaaactggattttcacatgcaaaagaatgaaattagccccttatcttacaccatacatcaagtcaacgtaagatggattaaaaacctaaatgtgaggcctgaaactgtaaaactcctggaagaaaacagggaaaaaccttctcgacattgactttgcaatgatttcttggatttcacaccaaaagctcaggcttcgaaagtaaaaataaataaatgttcaacatcaaactaaaaagtttctgcacagcaaaatgaacaatcaccaaaattaaaaggcaacctacagattgggaaaaaatacttgcaaaccatatatcagataaggaataaatatacaagattcttaaagcactcatatctttcaatatcaaaaatatatatcatctgatttaaaaaggacttgaatagatattctccaatgatgacatgaaaatggccaacagatatttggaaggtgctcaacgtcgctaatcctcagggaaattcaaatcaaatccaytatgagataccacgtcatacctgctaagatcgctattatca

SEQ ID NO: 119549 - DNA, 545 bp, Homo sapiens
tagccagagcccaagcccctgtttctagctacttctccatgctgctcacatgtatgacttccttcgtctctccttccctccagcctaacaaatgctgcccagcagactgaccttcagattacagctactcactgctcactccgttttctgactgtgcttatcttacataaaatccctcctgggatttctaaaataattcttttctttctttttaaaagaacagtgccrtggtacagatcttggggtcatgctggctggagtcttccaccttccatcattgcttgaattgcatgttaccctgtatctgctttagacttacctattttgctttctctgctttgggtttggtttttcttcaggaatagaatctataatctccaaagaataatttacttcacattattttatgtttctgagaatgtttttaatggtagatattttaatgttctattttaaggaagtgacaggccctttagctaatccgcttgcagttagatgtatttgctatctgagcctcagaagatcaagctttttttttgaactga

SEQ ID NO: 119550 - DNA, 545 bp, Homo sapiens
tagccagagcccaagcccctgtttctagctacttctccatgctgctcacatgtatgacttccttcgtctctccttccctccagcctaacaaatgctgcccagcagactgaccttcagattacagctactcactgctcactccgttttctgactgtgcttatcttacataaaatccctcctgggatttctaaaataattcttttctttctttttaaaagaacagtgccatggtacagatcttggggtcatgctggctggagtcttccaccttccatcattgcttgaattgcatgttaccctgtatctgctttagacttacctattttgctttctctgctttgggtttggtttttctwcaggaatagaatctataatctccaaagaataatttacttcacattattttatgtttctgagaatgtttttaatggtagatattttaatgttctattttaaggaagtgacaggccctttagctaatccgcttgcagttagatgtatttgctatctgagcctcagaagatcaagctttttttttgaactga

SEQ ID NO: 119551 - DNA, 552 bp, Homo sapiens
ttctatctgggcctaggaccaagattctgagttgcattattggtatccagatataataaccagagaacaaaggtcaaatgttgccgaatcatttttatttgaaagtggtttacccttttcttgccttaaaagatctccccagtgccatacaaaccagtgggattgtatgctttcagagtaaatgggatgagagaagttttcactagacactgtgcttaccctgacctctgatatattctccagaaagcaagcttgagtgttacattgcagcacttaaattttccctgcacatcaaacttccatatggagaaccagtgtgatatttgctttgtatcagacgggaattctcagtgtttacatttgtactgtttaaccatactagaaaaaaaagaattcatctgttaatgtacattgctttaagcattgcaagagaatggttactgtcatattgttttagaatcagtaacacaccatttagaaatctgcaacytactgttaataaagtgtgtataaccattctctggagatgcaataaccctttaaaattaatat

SEQ ID NO: 119552 - DNA, 577 bp, Homo sapiens
caccaccatcattaccataatgacgatcaccatcaccaccatcaccatcaccaccatcatcactgtcaccaccatcatcatcaccatcactgtaaccaccacatcatcataccatcaccatcatcactatcatcacyatcatcaccaccaccatcatcaccatcaccataatcaccagcaccatcaccatcacccatcaccatcaccaccatcatcttcatcaccaccttcataccatcaccattatcaccaccaccaccaccaccatcatcatcaccataagtaagcactttgcctacattaactgatttaattctcataataacgtcataatgttttacaagtgaggaagtgggacttcacaagattatgttttgtgctgagggtaacattgacaagaatctaaaccttggcagggtcctttggttgattttgtttatgttgttgagcaaagtgcaagatggtatctgttcctgctattcataaatttcatcttttagtcagcactttacccttattttacactatcttttggattcctggttctgtcatctcaaatgttcctgcttctagcttc

SEQ ID NO: 119553 - DNA, 612 bp, Homo sapiens
taacacactgccaaaaatctaaatgccaaaaatgtattatctttctagttctggaggctcgaattctaaaatgagttagcttggctgtcatccttccatatgctctagggcagaattgtttccttgacattttatgttatagaggctgtaagttccttggcacatgttcttggctcatggctccacattgcgcttacctctgattccattgtcacacctctttctctggctctgactctcctgyatccctcttataagaactcatgtgattacattgggtttgcctgaataatctgggataatgttctcaactcaaaattcttaatcacatttgcaaaatccctttttcacataaaataatgtattcacagtctattaggattaggatgtggatttctttgaaataccattattaagcctacagtgggctaaattatgcccctgcaaaactcacatgcctacgccctaacccccgatacctcagcatttgactatatttggagatagggccttaaatgaggtcaattagggtggtccctaatacaatctgattagtgtccttataagaggaagagatactaaaggttcatgcacacagagagaaagaccatg

SEQ ID NO: 119554 - DNA, 572 bp, Homo sapiens
gtgaattaagatttttcataaaggatccacaatcattttggtaggaattttttagcctttatcttcctctctggtgttctaatatagttgaaatcatggtgcacatacacatgcaagctgatttttaacctaastaagcattagcctatgccattctgttttttataaaaactatcattgttccccattatttgctatcaaatatacgaattatattttatattaatactatactaattatatttataatactatactaattatatgtataatactaagtatattttgtaattagtatatttgtacatacagccctttgcatgattacagttattttcatgtgacaggcatatataacaggtgtccatttcaaccaatttttaagtttattggcatttaataggattatatgtagcatgctgctgtggttttctttgtttttaaaatgtatgtttgtaaggtatacatgatgttttgatatacttattttgatatatatagtgaggtgattactacagttaaacaaattaatattccgttgtttcctatagttactttcatgtgtgtgtatg

SEQ ID NO: 119555 - DNA, 572 bp, Homo sapiens
gtgaattaagatttttcataaaggatccacaatcattttggtaggaattttttagcctttatcttcctctctggtgttctaatatagttgaaatcatggtgcacatacacatgcaagctgatttttaacctaactaagcattagcctatgccattctgttttttatmaaaactatcattgttccccattatttgctatcaaatatacgaattatattttatattaatactatactaattatatttataatactatactaattatatgtataatactaagtatattttgtaattagtatatttgtacatacagccctttgcatgattacagttattttcatgtgacaggcatatataacaggtgtccatttcaaccaatttttaagtttattggcatttaataggattatatgtagcatgctgctgtggttttctttgtttttaaaatgtatgtttgtaaggtatacatgatgttttgatatacttattttgatatatatagtgaggtgattactacagttaaacaaattaatattccgttgtttcctatagttactttcatgtgtgtgtatg

SEQ ID NO: 119556 - DNA, 572 bp, Homo sapiens
gtgaattaagatttttcataaaggatccacaatcattttggtaggaattttttagcctttatcttcctctctggtgttctaatatagttgaaatcatggtgcacatacacatgcaagctgatttttaacctaactaagcattagcctatgccattctgttttttataaaaactatcattgttccccattatttgctatcaaatatacraattatattttatattaatactatactaattatatttataatactatactaattatatgtataatactaagtatattttgtaattagtatatttgtacatacagccctttgcatgattacagttattttcatgtgacaggcatatataacaggtgtccatttcaaccaatttttaagtttattggcatttaataggattatatgtagcatgctgctgtggttttctttgtttttaaaatgtatgtttgtaaggtatacatgatgttttgatatacttattttgatatatatagtgaggtgattactacagttaaacaaattaatattccgttgtttcctatagttactttcatgtgtgtgtatg

SEQ ID NO: 119557 - DNA, 572 bp, Homo sapiens
gtgaattaagatttttcataaaggatccacaatcattttggtaggaattttttagcctttatcttcctctctggtgttctaatatagttgaaatcatggtgcacatacacatgcaagctgatttttaacctaactaagcattagcctatgccattctgttttttataaaaactatcattgttccccattatttgctatcaaatatacgaattatattttatattaatactatactaattatatttataatactatactaattatatgtataatactaagtatattttgtaattagtatatttgtacatacagccctttgcatgattacagttattttcatgtgacaggcatatataacaggtgtccatttcaaccaatttttaagtttattggcatttaataggattatatgtagcatgctgctgtggttttctttgtttttaaaatgtatgtttgtaaggtatacatgatgttttgatatacttattttgatatatatagtgaggtgattactacagttaaacaaattaatattccrttgtttcctatagttactttcatgtgtgtgtatg

SEQ ID NO: 119558 - DNA, 536 bp, Homo sapiens
gtctctttgttgttgaaaaaataataaaacccacccagatgttgagggaatcaaagctttttcctaacccttcgctcttaaatttcttgtgtgtagctctgtgaacatgggatctagaaggacaagtcaggtaccctgcaaaacacctccagggaggtttaatggggctgcttcaggtggcattattatgatgaaggccagcagcatgacctcatgtctcagctcaraaaaagcaattctgcaaagaacctgactgtgtagtttcttgattattcaccaagctccattcagttctagaaccaggatatctacaaagcaaagttggaaaactggtttcatctcatgagctactctgatgactaggtctggagtcttgtggggttttgtttttattttttgtttctgtttttgtttttgtttttagagacaagggagcttgggtttcctttctacccagcaggcatggctcagtggcagacaccaaccactggcatctgggttgtatttcataatttgcacagtacttgcagaacctt

SEQ ID NO: 119559 - DNA, 643 bp, Homo sapiens
atgtcctgcagagtttcctcaatgttttctttcagtagtttcatagtttgaggttttaaagtctttaatacattttgatttgatttttgtatatggcaagagataggtgtctaatttcattcttctgtacatgagtatcaagtttcccagaaccatttattgaagagactgtcctttttcyaatgtatgttcttggcatctttggtgaaaatgagttaactgtagatgtatgaacttattttggtgttctctattctgttccattggtctatgttggtgtctgtttttatgccagtaacatgctgttttgattactatacttctgtagtataatttaaagtcaagtgatataattcctccagtttgttctttttgcttagaatagttttagctaaccttggtcttttgtggtgccatacacatttgcctatctctgttttttttctttgtttaatacttcaagttgaagaaaccatacacatttgagagtttttttttctatttatttgaagaatggcattagtattttgatagggattgcagtgaatttgcagatagctctgggtagtatggacattttgacaatattaattctttcaatttataaacatgtgtagtagtctgttctcacactgttgtaaac

SEQ ID NO: 119560 - DNA, 634 bp, Homo sapiens
acatcctctgttccctgcttttgtgcattgcatatcttatttttcctgcctggattacacttctcttgcatgtttttctggtgatcacatttcaacatttaaagctcaactcaagcacatcctcttttataaaccctttcccgttgcacccccctccctgtaggaagacatctcarcatcatctctactttgtgtgtctgtgtgtatgtgtgtgtgtgcatataatgcacacagtattttgttgttgtctttatgaggaagttttaccactagttgtttattaccagactgttacctcatcacctaatttttttatatccagcttactgactagtaatgaatgtctactgaaaaaaaccatgtaaactaatgctattgtattgtctaacattctacttttgagaagaacagcttaggaaattgttctaaatgtatgatttttcttctccaagttctgtgggtttatatgaatgttatttcattatgatttgttacttaacatctccacagtggaaggacaactctcatgagaggtagtatcctgtaatatctaagagaaatatattttcctttttagccagaggtttgtgctttaagctgataatgaaacagatgatcatttacattgctgatt

SEQ ID NO: 119561 - DNA, 544 bp, Homo sapiens
tttattcattctaaatctctccaaagggtttacttaaaattttagagatagagacgcatatgacttctatatacagcttttgaaagaagagtaaaatcttgtttaataatagggagatcactataaaactttgtactttaaagctttttacacattctccatctagaaaaaaatacaggtagcaccgaggtctctgcaataaaatgaagggaacrcaccaatatttagaatctattttgtttgtctcaaattatgaagcatttctctgcagtcttacttggtcttccagcatgttgaatgttgctcatgaggagagtgatctcacttgtatgtttgagaaaccaagtcatgttgcttttactgatatcaatagacaaagacatggcaaacagcatgaggattcgatgtagttttgcatcaactattgcatagatcatacagctgttccctactctttttctcagggaagaaagtaaaacttagctagggaaagaaaacaaaacaaacaacaactagaagaaacattgtcgtgtaacaatggttt

SEQ ID NO: 119562 - DNA, 545 bp, Homo sapiens
tagtattaatttctggctgtttatagcaaaaaaaaaatgctttaaaagtatgtacaagttacaatcaaattgatgaagattggcagcaacagttgaatattaaaaagtatttaatagtaacaatgaggaatctgggatatcaccatggagatggctttatcttctttgagatcaaagattttagtctattggtttattcataagaaagactttgcaggtaaacaggaggcarcatcaatttggcttaaccttttgtgtccatttcacagtcttgggtttatgagcatggatcattttagcatatgatctggtatataactactttatatgatgggtatgtattacatagtaaaggagatgtgatagtacaattatatggtactgcaccaaagtctgtaccagaaatcattttaagaatgggaaaattgagacttacgcatctataaaaaataaacgaatgttcttaatctaatgctacttacccagactaaaatagaaatacatatttcacgttgaaaacattaggatttttctgggaggagcca

SEQ ID NO: 119563 - DNA, 569 bp, Homo sapiens
tcctttgtgcagctacttcagcctgggttgcctgccttcacccatcttgttacagaagaaaaagacacctctcacttgtttaagccactgaagtagtttttttgtaattgtgtttgttgttgttgttgttgctgttaactaaaaattaatacaatcttactcaatagatctttattaataaaaatcctgaaatgtaagtataaagaaaataacacaatattgaagtattaatgcattcttaaatgatcttcaaatatgatcattatatctagagatattccaaaaatattcagtgaaaggaggaatcggtcttttttacctagtatcactgccatggaaagacgatatcactggatgggtgtcctggcagctctttctttcctggaacattgcacatgccctgctttaaatgaaggaagcttttactttargcacttagtgttttttgaatatgctttctcatcctttcacgtgataaaattgatgttagactgggaacaatctagatccctttgacaggatatgccagaggtgggaagaaaaagtggttcaagaaaggatgaatttga

SEQ ID NO: 119564 - DNA, 514 bp, Homo sapiens
gctggtaagagatagtcacacttgctgacacttgatatgcatgtatcagctgtgtttacrtaacagaaactattctgttgtatccagaaaattataaatctctcaagaatgctttgagcacacagtttgcatgggaccttatagttcatgaggcttggaagatactcagaggccagataatgggatgactccagtgccatgttttaactttaaccaaaaggtaaatagagtcacaaaagggtcttttttctctccacataggaacttacgcatatttgtgatatttagattttgttttgttttcttttttgagacagggtctcactctgtcactcaggctggagtgcagtgacacgatcttggctcactgcaacctctgcctcccaaactcaagcaatcttcccgcctcagccttccaagcagttagagctaaaggtgtgtgccaccgggcccagctaatttattttttattttttgtagagatgaggtttcaccatattgcccaggctggttt

SEQ ID NO: 119565 - DNA, 518 bp, Homo sapiens
acaattcaagttgagatttcggtggggcacagccagatcgtatcacccattcttgggcatgcaccaaactaactttaggaggaacttcgttcatagtgtaactttgaaacaaagatgatagcagccctttcctgaaacaaaccccttccttgcctggggaccagactgyctttgtaaaactaacaaattaggcacaagattagaaattatggtttaggacatgcagccagaccgacaagaatcctaacctccccagttgcttctagggatagcatttttattataaaacctaagactggtgctccagaatcagaccttgcattctcattcaccagctggtgccaccaagatcagccatctggttcaaccagttctgcgatcccactcacaaacagaagacagcaaaaagaacccagttccaccccctatgatttcccctctgacccgaccaatctgacccattccctgccctccactgacctgccaaattgtccttgaacaaccccagtctccgaatt

SEQ ID NO: 119566 - DNA, 565 bp, Homo sapiens
atattttggattatctcaaaatgtcatctgaagcaaatcaggatattaaaagctttttactactaaatccctaaaatggtaagagaattgtgacaacaaggctctttcatcaaacactcctttgtttgcaataggatcgtttccacaatagtgatgcaacataaattttgtcagatgattatagatttggaagaacaatataaaaagagatctccaaatattacattttgattacacatattgagatatcaaacctattaataatgaaacccacagaaccaaaatgcagttttatcttctcacaggctttttgmgaagcataaaaaagtaatgcttgagaaattgctttgaaatccataaaatgatttaataataaaaaacattattactaatctctgagaatgaatacctacaattgaattactagaatggttttgaaagtttagtgtaattgaaaattgtagtacaaacatacaactattactattcaatttgtcctgtgagaccttaacgtttgttagaatttgaaagctatcttctatataatttgaatttctggcataca

SEQ ID NO: 119567 - DNA, 565 bp, Homo sapiens
atattttggattatctcaaaatgtcatctgaagcaaatcaggatattaaaagctttttactactaaatccctaaaatggtaagagaattgtgacaacaaggctctttcatcaaacactcctttgtttgcaataggatcgtttccacaatagtgatgcaacataaattttgtcagatgattatagatttggaagaacaatataaaaagagatctccaaatattacattttgattacacatattgagatatcaaacctattaataatgaaacccacagaaccaaaatgcagttttatcttctcacaggctttttgcgaagcataaaaaagtaatgcttgagaaattgctttgaaawccataaaatgatttaataataaaaaacattattactaatctctgagaatgaatacctacaattgaattactagaatggttttgaaagtttagtgtaattgaaaattgtagtacaaacatacaactattactattcaatttgtcctgtgagaccttaacgtttgttagaatttgaaagctatcttctatataatttgaatttctggcataca

SEQ ID NO: 119568 - DNA, 577 bp, Homo sapiens
gaatggatgcgaaaatcattgagtaaaaatttgatagggaaatggatagtcacttgcttctagttacaggagaaatcacaaggagatttttcatttcttaattgcaatgaaaaaagataaattttaagtggacagatgttgcagatgctatcttatccaagtgatcaaayttaggaccactaataatgaaagaaactaatattatgaactttctgatgagatataatagaaagcacacaaattacacattacattttcccaaatatgtttaatttcaatgttattagctaacaatcagggaaactcacatttgacacgttctatgagacaactgacttggggccttcaaaaatataaatgtgataaaaacaaaaaaggtagaatactcttctatattaaaggagattaaatatctagacaatgatatgttactggtcatatttgactgagtcttcagtcaaaaatgcatctaaaataccttttgagatatttggataacttaaaattatggactttaaaataaattattgtcttgttaatgctaaatttctgggttgcaataatgatattgtggtta

SEQ ID NO: 119569 - DNA, 577 bp, Homo sapiens
gaatggatgcgaaaatcattgagtaaaaatttgatagggaaatggatagtcacttgcttctagttacaggagaaatcacaaggagatttttcatttcttaattgcaatgaaaaaagataaattttaagtggacagatgttgcagatgctatcttatccaagtgatcaaatttaggaccactaataatgaaagaaactaatattatgaactttctgatgagatataatagaaagcacacaaattacacattacattttcccaaatatgtttaatttcaatgttattagctaacaatcagggaaactcacatttgacacgttctatgagacaactgacttggggccttcaaaaatataaatgtgataaaaacaaaaaaggtagaatactcttctatattaaaggagattaaatatctagacaatgatatgttactggtcatatttgactgagtcttcagtcaaaaatgcatctaaaataccttttgagatatttggataacttaaaattatggactttaaaataaattattgtcttgttaatgmtaaatttctgggttgcaataatgatattgtggtta

SEQ ID NO: 119570 - DNA, 663 bp, Homo sapiens
  misc_feature (1)...(663): n = A,T,C or G
nnnnnnnnnnnnnnnnnnnntcctgaagaggtgaatgggttgagagggtttcttatattaccatcttggggaaagactattccagggaaaggaaactgaaaatgcaaaaattgtgaattgaaagtgtgcctcgtcttgaatgctttaaaaagaaccagaaggttggtttggccaaaatatagtgagccaggaggacagacatgaggtagctatgataaggattttggctttgctgaaaagatgggaaatcattacaggtcttggagcagaggagctgaacatgtgacttatgaagaccaaaacgctttgggtgctgtgttgaaagggaaagaggggtagggacacagtaagggaattaattaggaagctattgtaaaatacttagtrcagaaatgatagagatttggaccagtgcagtaaagagaaggcactgaagtaggtagattctggatatattttgaaggtagactagacagaatttatggacagataagataggggggtgcaaagaaaagagagcagacaaggatgactctgagacttttggcataaatgactggaaagataaaggtgctttttactgagatggggaagataatgggacatgctggatattttggccctcaaggtttgctatttggggatgtgaagataaagcaggtg

SEQ ID NO: 119571 - DNA, 567 bp, Homo sapiens
attacattaataaatacaaatgaattaaatattgtcaatttaaatgtttatcagtatcattatttattgagctacatttcactgaccacaaatggaaattaactggacattttcaacattatgtttgaatgctctaatctgcacgaaatcattttccccaggtgtcaccccaaggcagtgattaaagacattctagtaaaacttactttggcagtctaaaattaaaatgtcatttctatgggtgagaataattttctgctaaatacagctttctgtcggtaatgagatgctcagtgaagtattttaaacatttttaaaagcaacccagagcaaaaagagtatatgttagaatgatttagataatagagaaaagtgartgagtgtgtgtgagtgtgtgtatttttgctcttggtttcaaagtgtcaggagaaataactattattagtcaccagctataatcagatttatatattgccaaagggcaatacaacagtcatattggtgaacatatatatcttttgaggacctattcccatatttctttttattttatttttccttaaggag

SEQ ID NO: 119572 - DNA, 486 bp, Homo sapiens
atggaacagcatgtcatcgaccatgtattcagtgtctgtcacgtacggcgcactacacctgaaatccaaaaagggatattttcattcattgtggtcagtcaactattcaaaaagtattttttaaacatctgccaggcgctagggatcctgtgatgaagaaaatgacatgtggcaaatacaccgagcagcacagcttgagtaatgcaagaccactttcacaccacatccaagtccaggctgcttggcccctcctgccttagaagrggctgtatagatgggattaaagccatggcccatgtctcccactcaaactgactttttgcctgcaagctatgtcatcttcttggaggaactgaatgttatagactcatcatttccccacttccttctctccctacctgacaacatccttgagagaatgagacaaacagcaactcatctcagataggggagaactgagagacagagaaagtagaagaggttttt

SEQ ID NO: 119573 - DNA, 609 bp, Homo sapiens
gctcatcacaattaactaataaaagtagttcaccaaatacaatttctttttttgtgacagacacttaattgtcattggattagtttattgagagtttgttccctggtgttcagagaagtgtattcactcattctgttttgcaacaaactatactcagtatcactctgtactcagtgctatgggagataaaaagaattgtggcccgtggggagactacagtccagtacaggctgcattcacttatataatatccgctattcaaaatgataccaaccayggacaattaggtgacctggaatgtgtgaaatgtttctgtagatgtacgtaaaaaaagtctggaagtaggcataacaagatgttctactgagatgaggttatctttcggaaatgggagtatgaataatttttatttttcagaataaatatataatattttgaaagttatgttttaaagctcaaatattagctaggcatagcaactcacaactgtaattccaacactttgagaagccaaagtgggtgggatcacttgagcccaggagtctgagaccagcctgggcaacatggcaaaaccccatctctacaaaaatacaaacattagctggtcat

SEQ ID NO: 119574 - DNA, 609 bp, Homo sapiens
gctcatcacaattaactaataaaagtagttcaccaaatacaatttctttttttgtgacagacacttaattgtcattggattagtttattgagagtttgttccctggtgttcagagaagtgtattcactcattctgttttgcaacaaactatactcagtatcactctgtactcagtgctatgggagataaaaagaattgtggcccgtggggagactacagtccagtacaggctgcattcacttatataatatccgctattcaaaatgataccaaccatggacaattaggtgacmtggaatgtgtgaaatgtttctgtagatgtacgtaaaaaaagtctggaagtaggcataacaagatgttctactgagatgaggttatctttcggaaatgggagtatgaataatttttatttttcagaataaatatataatattttgaaagttatgttttaaagctcaaatattagctaggcatagcaactcacaactgtaattccaacactttgagaagccaaagtgggtgggatcacttgagcccaggagtctgagaccagcctgggcaacatggcaaaaccccatctctacaaaaatacaaacattagctggtcat

SEQ ID NO: 119575 - DNA, 623 bp, Homo sapiens
ttctcactctttttctgtcctccagccaaggcctcctttcaattcccaaaatgcatcaaactctcccacccttcacaaagatcctctgcctggaatgatattcttctctcttctgtttattccattctattctaccccatttctaaggctgagctcaaagacagcctttgctgacttaggtggttgtaccccgtgcttctcagcatctaaatgtaatttttaataataatataatatgcaatgagttatgttttacttgtgtgctctgctagagcaagggttctcaaagtacatggtacctggaccaagagcatcagaatctcctgggaaattgtcggggatgtaactcctccagacytactgaatcccacactctggatgtggggcccagcatggagggttttaagcaggcttcatgtcattctgctgcatcctgaaatttgagcaccactcagacagagtcttaactccttgagaggcaaggagcacatctgcttgttgtattgccacatcctcattgtctacctcagcatcctatgagagatatgcacctgataagtatttgttggataaatgagtacatggcccatgaacctgaggcggagctctctgcacttagaggt

SEQ ID NO: 119576 - DNA, 623 bp, Homo sapiens
ttctcactctttttctgtcctccagccaaggcctcctttcaattcccaaaatgcatcaaactctcccacccttcacaaagatcctctgcctggaatgatattcttctctcttctgtttattccattctattctaccccatttctaaggctgagctcaaagacagcctttgctgacttaggtggttgtaccccgtgcttctcagcatctaaatgtaatttttaataataatataatatgcaatgagttatgttttacttgtgtgctctgctagagcaagggttctcaaagtacatggtacctggaccaagagcatcagaatctcctgggaaattgtcggggatgtaactcctccagacttactgaatcccacactctggatgtggggcccagcatggagggttttaagcaggcttcatgtcattctgctgcatcctgaaatttgagcaccactcagacagagtcttaactccttgagaggcaaggagcacatctgcttgttgtaytgccacatcctcattgtctacctcagcatcctatgagagatatgcacctgataagtatttgttggataaatgagtacatggcccatgaacctgaggcggagctctctgcacttagaggt

SEQ ID NO: 119577 - DNA, 603 bp, Homo sapiens
ttttggctatatctctactttagtgtagtggccaatagcatgaagggaacattttaggaagcacatctcatcatacctgcatcagacaagtcattagcattgcacattgattttttttcatggaaaaactgaaattattctcgtctgttgacaggtaaatacacttcactaagtaaatatttgcagggggtagggggaaaggggagggagaacattaggacagatacctaatgcatgcagagcttaaaacctagatgacgggttgataggtgcagcaaaccaccatggcacatgtatacctatgtaacaaacctgcacgttcagcacaggtatcccagaacttaaaataaaataaaaaataaaataaatatttgcaatcataaagyatttggacatcagctatgtgcaagacactgtgtatgatactttgacagactgaataaaagatggaagatttattcttcaggtttcccaggttttaaaatgtgtttccttgtttctacccttcaatgtttctcttagagacattcaatttatgtatctcggaatgccataaaaaaggtcacattttggtttatttagcacatcttttttttttttttt

SEQ ID NO: 119578 - DNA, 619 bp, Homo sapiens
gcatcatgcatagaaccctaggggaaaatgacaaagtagaaaatattgcctctgttttactgaattggccacaaattgggattaaaaacccatacttggccaacaattaaaaaaaaamcagtttctatttaattgcataaatgtatagcaaagactgtgtgcagaatacgaaagaaaggcagatttcttgagacctggagtggtcaaatgtgggttggaggcagacatgtgggcaactggggaaatctcaagcataaggagtaagaaagtggaggtacaaggacaagagctcacacaaaaaccatcccacaccttaaccattctcaataaatttaggctaaatgaattcaattcaaataagaacaagacataattacttgtgttaaattaagtttagcctaaagctgcctccttacatattttaggtttggcttaaaggtttctctgtatattgtgaactataagaagtgaaggtgtaaacagactgtagcctacacttatgtcagttaccaagttttggccaatcaaatgtagccaactgtttgaaccatgttcagacaaggcaaacgtcaacctgtaaccaatccagctgtttctgtacctcacttctgtttctgta

SEQ ID NO: 119579 - DNA, 615 bp, Homo sapiens
aaagacctaatgtcttccttctgcttatactgttctgacagaattttaattttggcagagatcactctcgatgttatgatgtactgattcagaggtcccaaatcagtaacctgatcctagatagatcctcaaaggtcaactgccactaggtgtccccttcttgatcattcttcatgctgcctggattggggcatggctaagcactcaagtcaaaggattagttggcaatatcctacattgtcaacaaagctttgaagaaaaacagagacagaaactggtatttactaagtacctaggtgataaattattttcataaacattaccctataaaacagacaactctcctgtcccaaatccaaacagatctttttcctttatttacagataaagaaaatgggcttagagaggttataaaatttgtctaaggtctaaccaaatgctgataagcaaattaggtacaactctgagccaggtctcgatgagtccaaagtgtgttttataatatcwtgctgtctcttgatcattacaaaatttcatttgtttacaggagcacaaatggcctatttatgccttttctctcagcatctagcaaaacatctcaacttttattacacc

SEQ ID NO: 119580 - DNA, 615 bp, Homo sapiens
gattgtacattacaaaccagctttaattcattccaaaacatatctatgaatmtcttcctaatggcttacgtatttggatctttgtggggatggggtgtgagagaaaggatgaaagatttgcataagatctataaattctatcaaggagttgggtcagggttgtcacttatgtaaaattttcatctatgtctgctagccaatttgtttatagaatgaaacctagcctttttgttcagtgctctacagagagattaatctagtatgtttttggtttactttgggtccatgctctaaaacatcacagctagatgctttgtaaagaaatgggttgatttctctgtagccattgtagttattcccattgttgtaaatattctgcacgtatgtgtcattttcttcaggattttaatataaatgtctatcaaggtggccaccagaaataataagctcttgacatttagctccccgtctagattccctgacaccaacattccttgtcaggagagccacagagcctacatgcaaggacaattgagtctttacagattaagcagacgaggagatttgtatgagttacactaaaatagctgaggtgtcaaacagggctcaattttc

SEQ ID NO: 119581 - DNA, 615 bp, Homo sapiens
gattgtacattacaaaccagctttaattcattccaaaacatatctatgaatctcttcctaatggcttacgtatttggatctttgtggggatggggtgtgagagaraggatgaaagatttgcataagatctataaattctatcaaggagttgggtcagggttgtcacttatgtaaaattttcatctatgtctgctagccaatttgtttatagaatgaaacctagcctttttgttcagtgctctacagagagattaatctagtatgtttttggtttactttgggtccatgctctaaaacatcacagctagatgctttgtaaagaaatgggttgatttctctgtagccattgtagttattcccattgttgtaaatattctgcacgtatgtgtcattttcttcaggattttaatataaatgtctatcaaggtggccaccagaaataataagctcttgacatttagctccccgtctagattccctgacaccaacattccttgtcaggagagccacagagcctacatgcaaggacaattgagtctttacagattaagcagacgaggagatttgtatgagttacactaaaatagctgaggtgtcaaacagggctcaattttc

SEQ ID NO: 119582 - DNA, 615 bp, Homo sapiens
gattgtacattacaaaccagctttaattcattccaaaacatatctatgaatctcttcctaatggcttacgtatttggatctttgtggggatggggtgtgagagaaaggatgaaagatttgcataagatctataaattctatcaaggagttgggtcagggttgtcacttatgtaaaattttcatctatgtctgctagccaatttgtttatagaatgaaacctagcctttttgttcagtgctctacagagagattaatctagtatgtttttggtttactttgggtccatgctctaaaacatcacagcyagatgctttgtaaagaaatgggttgatttctctgtagccattgtagttattcccattgttgtaaatattctgcacgtatgtgtcattttcttcaggattttaatataaatgtctatcaaggtggccaccagaaataataagctcttgacatttagctccccgtctagattccctgacaccaacattccttgtcaggagagccacagagcctacatgcaaggacaattgagtctttacagattaagcagacgaggagatttgtatgagttacactaaaatagctgaggtgtcaaacagggctcaattttc

SEQ ID NO: 119583 - DNA, 574 bp, Homo sapiens
tgagggtggaaattctttctggagattataaaaatatggtaataacagatttgatgtcatattttttcctaaggactgaggggtacagttgattccttaagtagtcgggcagcttgtggattctattgwcataattcagtcctgtattgagtttcaaatatctactgttcccaaatgttcagtgtctaagttcctgagactttcctctcaggatctctccagtattcagcagtaatatatcaagtgttcatcttcaagtgtatcagcagccattcaatcatttttccaaagaaattgatcaaatatcagaaacagtagaattcccagattgttttctcttcctaggtcagacttcatcatttctaggatttgtttgaagtctttaaaaattttataacttagactttcctcctgacttctcccggcaaagtattggtcttaacaagtttctattttcttccccatgtcgtttaccttcaaagtggcttcatattttatctttgagtcctgaacacagaacacagaggtaaaatatagctatgctagattttaagagatgatgaagctgttttaa

SEQ ID NO: 119584 - DNA, 604 bp, Homo sapiens
tcttctaaacaatcacacaaatatatatatttccaaaccaaaacagatattcccatgcttgaaatgctatttctaatttctaatttattcttaagggctaatttgcaaaatgaaattgtttggatgattggtttgcagtaaacatggtgtaccaaattggtttctaaatttagagaaaggttgagtctcctcttataataatcaagaaataatagaagtattaatgataatgaagcttccataattaaaaagtcaaattctgaaataacaagcagaaatgaacattagcaggtagcagctacataatttataattctcacaaagttatttkgagctctttttataggataacataacctccaacatgtagtttactaaattatagtataagtactatatgtgccataattaagttccataatttgggggaatttagtactattaaatataacttaaagatacaggaaatatagtgcataaaattctaagaatcacaaaagaaaggcaaagttgttttaatagatgctatgatttctatgtctgatatttcaaacattttagaaagtagtaattattattatccatatacatgttttcaaagaaa

SEQ ID NO: 119585 - DNA, 437 bp, Homo sapiens
ctgcttccaaaaatctttgactaagatagggctcagaagtttcctctctgacaccttctctgacttctccagtcggggttagccattcattcccttcttcttcctagggcaacccttagacattcattacagagttgatcccaccctggtggcattgttgctacacatgctactttccttccccagtaggctcttttgctcacttcctccagacaagatcagcctatcttgctctgatgtagcccaggcaccatacgcagagccagaatataatatatgttccataaatattggttcaattaataaatgaattatgcctctttagagtccctagcaaagtatgccgcacaaagyagagacataagcggatgaatggatggtttcctggtttttaaataattaaataattatttagcttctctccttagatttgtaaa

SEQ ID NO: 119586 - DNA, 622 bp, Homo sapiens
aaaagtaaaataagctactataataatatgtctaaattattttacttactagaacttaaactttacatatattgtcatctacattctcactttctgagtaggtgcgtatgtgtgttaagcaacttttaaaattgcactttgacatctgtagatggcagcaaaaacatgactttcccttagcattctatttccaacccccttaaaatcatcggctattaaaatatggcccacttaaataccagcttaaagccctgagctccttggccctcctctgctgccttttttgggcagcctcccttgccatctccttgcccaagctatacttctactgaattayagagatggaattcatcctttcaaaagagtaggcacctgggttctcaggggagtattagctctccacctctgcctttcatcattgaaagatttagctttctctgtggcatcagtcacaaatgtcctttacccttagtgtgcacacctgcattttccaaggtggagacaccttcactagaccttttacattctggattctggtatttactgcgtgttcaccctgcatcaggtcttgtgctaagtgctttatatgttttaggtcatttagacctcacaacaatcacat

SEQ ID NO: 119587 - DNA, 480 bp, Homo sapiens
aaagaacttcaggatttgagaattacaaaaattaaaatgttggtaattgtaaagaaaattcagcaggtgagttaaatagacggttaggcayagttgaagaaaaaaggcatgtataataatgtatagtagaactgaaaaaaatctaagaatgcagtacagaaagaaagaaatggcaaatatataagcaaaagtaagaaatcaagagaataaagtaagaagatccaatatatttctcagaattccagaaggaaagaatagagagaacaataaagaggcaaaattcaaaataaaatgactaagaaatttccaaagttggtaaaagacaatgaatattcaagaagcacagtataaagatatatcacaagtgaataaatgtaataaggctgtctaagaaaactaagagaaaatgttaaaaggaagcaaaaaaggaaagacagattccttacgaaggagcagttagatggatagcacatatctcaa

SEQ ID NO: 119588 - DNA, 505 bp, Homo sapiens
tatgacaacctgaaaagataaattaacttattagttgttcttccattattgagacaccagagtatttatacccagggtaatgcctattggattgatgcaggaaaattccattttaaatttacagcctttgatcctgtagaaatactccctggtgtgtctaccttcttctcttctctctagtattttagatttaatcattctttctgatagctatygatgtgtcagtcatatcttctcactgcattcctgagtctgataaactgtgctttaaaaataacttcagtcagctatgctgtcttgagcaagaatgcctgaactgccggattcaaagatttaggacttcttggcagatacagtcttatattggagataagaacatggggctacacggtctccctgctggtagccattaccatactcaactcctttgctgagtgactcatcactcaccacagaaccttcttagagccacttaactcctgtagatcagagaagcccacgtaga

SEQ ID NO: 119589 - DNA, 565 bp, Homo sapiens
ctatttttaaaatgaggattcctgggcctgccctaggctctctggaggtagggttctggaatttgcattttcatattacccatcaggtgayatttttgctctctaaagtttggaaaccactaccttcctgggaatggtgtccattgcatgggaactatagaaaacccagcaacaacgagatagaaaattgttatagtgaccagccccttggatattgctttatgctttgttatttctgccctgtgcaggtaatatattgaaatgcctggtccacagttcacttgattttttattttgaatggtcccatgtgcttgaactcctctgactattatgttattctctttccagcatcccatcccccatctgctcatccacacttttttggttcctgccacaagcccctgataattgtgcatgtcccataacctgctggttactcctgagctcactttgatagttctgcatgtgctacagtctctgcttgtctcgctgggatcaattcactccatgctggtcctgggtccatctgagaccctccctaccccagcttctagccatcaatgc

SEQ ID NO: 119590 - DNA, 675 bp, Homo sapiens
tgtaacttctatagggtggagaccttgtttttatggtttgtaaaacatcatgaataaccatggcactctgtaaataaatagaaaccacatgaaacagaaaatagatgctgttcaatggccacctccccagcacattcaggaatgtatcccttgttccaaagtgcttggagtaaatgaatgccactctggagaggcggcctatgtgatactgtcagaacctttatccctctttaaaaggaagtgtaatcgtgttttctagtattttattcatctttaggggcactctacraggagagtccttggtgttgctcttgttaatgaaagagtaaagatcagtgcacagagagatgaaatgatttgcataaagccatagagcaaaccagaggtgaaatgggaccttgtccaaatttggttccaatttcagcctgttgttcttcctgtaatacttctggaatagagtagtagcagttcttcataagaagccccatcatggctctcagagagcagctatgactttggcccccgctacccgcttcagccatgaagtggtgactgggccctggacctctggtctggctgccatgactacttctaagcactcagatctccccaacctcgcttctcttaacttcattttgtaaatctagttggaaggaagtctagaaaataaagttt

SEQ ID NO: 119591 - DNA, 675 bp, Homo sapiens
tgtaacttctatagggtggagaccttgtttttatggtttgtaaaacatcatgaataaccatggcactctgtaaataaatagaaaccacatgaaacagaaaatagatgctgttcaatggccacctccccagcacattcaggaatgtatcccttgttccaaagtgcttggagtaaatgaatgccactctggagaggcggcctatgtgatactgtcagaacctttatccctctttaaaaggaagtgtaatcgtgttttctagtattttattcatctttaggggcactctacgaggagagtccttggtgttgctcttgttaatgaaagagtaaagatcagtgcacagagagatgaaatgatttgcataaagccatagagcaaaccagaggtgaaatgggaccttgtccaaatttggttccaatttcagcctgttgttcttcctgtaatacttctggaatagagtagtagcagttcttcataagaagccccatcatggctctcagagagcagctatgactttggcccccgctaccygcttcagccatgaagtggtgactgggccctggacctctggtctggctgccatgactacttctaagcactcagatctccccaacctcgcttctcttaacttcattttgtaaatctagttggaaggaagtctagaaaataaagttt

SEQ ID NO: 119592 - DNA, 675 bp, Homo sapiens
tgtaacttctatagggtggagaccttgtttttatggtttgtaaaacatcatgaataaccatggcactctgtaaataaatagaaaccacatgaaacagaaaatagatgctgttcaatggccacctccccagcacattcaggaatgtatcccttgttccaaagtgcttggagtaaatgaatgccactctggagaggcggcctatgtgatactgtcagaacctttatccctctttaaaaggaagtgtaatcgtgttttctagtattttattcatctttaggggcactctacgaggagagtccttggtgttgctcttgttaatgaaagagtaaagatcagtgcacagagagatgaaatgatttgcataaagccatagagcaaaccagaggtgaaatgggaccttgtccaaatttggttccaatttcagcctgttgttcttcctgtaatacttctggaatagagtagtagcagttcttcataagaagccccatcatggctctcagagagcagctatgactttggcccccgctacccgcttcagccatgaagtggtgactgggccctggacctctggtctggctgccatgactacttctaagcactcagatctccccaacctcgcttctcttaasttcattttgtaaatctagttggaaggaagtctagaaaataaagttt

SEQ ID NO: 119593 - DNA, 648 bp, Homo sapiens
aatttgcaaattagaattaacattgtccatatttgacatattttagagtcttcattyatcaccacatttttagttttatgctagaagatgttcatactgtacagttttctaaatttcagttcctaggcactttgtagtaacatagttaatatagcttaataatttggtaaacctaaccaataatattataattgtgaaaacataaaattcagactcaaatcttttatatttattgctttttaattaataatatgtctaaacttttatataagaaaattaatatcttgtattcaaccatgtagttatatattttatttaaaaatatttacatatataaaacattcaaaggacaacatatttatagaaaaatcaagtttttacttatattattaattatataagtagctaattatttttcaaatggctaagataactctctccaataaaagcctatgcgagaataagtaatcttctatttataacattttttatcaaaatcattgttactaataatgatagcatacaagtgcaaattgttttataattaacaatgttttttaattttaactttctactagaaaatgtcccattagttcagcatttcatttatctgttaatatgccaactgttatgaaattttcagtaatt

SEQ ID NO: 119594 - DNA, 648 bp, Homo sapiens
aatttgcaaattagaattaacattgtccatatttgacatattttagagtcttcattcatcaccacatttttagttttatgctagaagatgttcatactgtacagttttctaaatttcagttcctaggcactttgtagtaacatagttaatatagcttaataatttggtamacctaaccaataatattataattgtgaaaacataaaattcagactcaaatcttttatatttattgctttttaattaataatatgtctaaacttttatataagaaaattaatatcttgtattcaaccatgtagttatatattttatttaaaaatatttacatatataaaacattcaaaggacaacatatttatagaaaaatcaagtttttacttatattattaattatataagtagctaattatttttcaaatggctaagataactctctccaataaaagcctatgcgagaataagtaatcttctatttataacattttttatcaaaatcattgttactaataatgatagcatacaagtgcaaattgttttataattaacaatgttttttaattttaactttctactagaaaatgtcccattagttcagcatttcatttatctgttaatatgccaactgttatgaaattttcagtaatt

SEQ ID NO: 119595 - DNA, 648 bp, Homo sapiens
aatttgcaaattagaattaacattgtccatatttgacatattttagagtcttcattcatcaccacatttttagttttatgctagaagatgttcatactgtacagttttctaaatttcagttcctaggcactttgtagtaacatagttaatatagcttaataatttggtaaacctaaccaataatattataattgtgaaaacataaaattcagactcaaatcttttatatttattgctttttaattaataatatgtctaaacttttatataagaaaattaatatcttgtattcaaccatgtagttatatattttatttaaaartatttacatatataaaacattcaaaggacaacatatttatagaaaaatcaagtttttacttatattattaattatataagtagctaattatttttcaaatggctaagataactctctccaataaaagcctatgcgagaataagtaatcttctatttataacattttttatcaaaatcattgttactaataatgatagcatacaagtgcaaattgttttataattaacaatgttttttaattttaactttctactagaaaatgtcccattagttcagcatttcatttatctgttaatatgccaactgttatgaaattttcagtaatt

SEQ ID NO: 119596 - DNA, 569 bp, Homo sapiens
tgacttcctcggcagccttctctcaggactccatgtttgctgttctcccgccactctagcctgtcaactgcttaaatgcacaaagctctttcctgctctggcctctacccacagtcttcccttcgtccctctgcttagaacattttttctcagccacaggatctatccctgcaccgacttgtccttagctcaaatgttggcatctttgcaaatgttttactgaagctctaccctaatccaaattagaacmtttgctttgttttctgcattttataatactcatcacatttctaatcatgtctttttgtgtgtttatgtgttcatgtttggttccctctctggttttatgacccatgaggagacaaagtgtacaatactttttaaaaattttttaatttttaatttttccataagttattccagtacaggtggtatttggttacatgagtaagctccttagtggtgatttgtgagattttggtgcatacatcacctaagcagcatacactgcaccgtatttgttgtcttctatatcttgccaccctcccactcatcccccaaagtgccca

SEQ ID NO: 119597 - DNA, 543 bp, Homo sapiens
tttacttagaaataactgtatagtttcccagagagcatcttgctctaacatagggataactgaaatttccgtctccacctatttgctttctctctgtttctccatccaccccacgctaaggcatgtgtttctgagttggcagttgttttgctaggtctcctggggcacccaggagactcctcagagcatgctacaaccaagcacacagaactgctgctaggttattttaamaggcctgcctcctcccttgggctgggggagctggagcagggttgtatcacccggctgacagataaatataaagtaaaacctcagatgcttttctgtggtgatctgggtgagcaccagcctgtgggagcagtaatttgtgacactcttctctgaatctagctctcttctagaggttacctttttatgctgaagcccgcagtgaatttactcccttgatatacagatttccaatttgcaaacacatttagttaagagtgaatttgccatggatagtgtttgttctctgttggggtcctaaatgtgacacttaat

SEQ ID NO: 119598 - DNA, 543 bp, Homo sapiens
tttacttagaaataactgtatagtttcccagagagcatcttgctctaacatagggataactgaaatttccgtctccacctatttgctttctctctgtttctccatccaccccacgctaaggcatgtgtttctgagttggcagttgttttgctaggtctcctggggcacccaggagactcctcagagcatgctacaaccaagcacacagaactgctgctaggttattttaaaaggcctgcctcctcccttgggctgggggagctggagcagggttgtatcacccggctgacagayaaatataaagtaaaacctcagatgcttttctgtggtgatctgggtgagcaccagcctgtgggagcagtaatttgtgacactcttctctgaatctagctctcttctagaggttacctttttatgctgaagcccgcagtgaatttactcccttgatatacagatttccaatttgcaaacacatttagttaagagtgaatttgccatggatagtgtttgttctctgttggggtcctaaatgtgacacttaat

SEQ ID NO: 119599 - DNA, 571 bp, Homo sapiens
attggattagtcagttcacactgctataacagaataccacagactgggtagctaaacaacagaattttttttcttgtagttctggaggctgagaattctaagatcacgatgccaacagatctagtgtctggtaagggcacctttccggggtacagactggcattttctcctagtatcctcatatggtgtataatatacacataaaaacctatatcttatctttttataagggcactaatatcattcatgaaagctccaycctcatgatctaattacaccccaaaggtcccacctcctaaaaccattacattgagggttaggatttcaccatatgaatttggaggcagtgacaaaaatgttcagtttatagcattctgattctggccttccaaacttcacatcctactcacaaactaaatacatttatttcatcccaacagccccaaaactcttaactcattctagcatcaacttgaaagcctaaagtacaaagcctcatctaaatgtcatatgaatcatatatgggtgagactcaaggtatcatttatcccgaggcaaaattcctccccac

SEQ ID NO: 119600 - DNA, 474 bp, Homo sapiens
cagcctggcattcactgtttgctttattgcaaggccacttggaattagaggggatctcagattcgagtctgagctggaggtaggaaggggcccctgcaccttggatagaastcgggctctccccggggttaggggcctgggctctggtgcagccccaccacttcattaggtcaccccaggcagtttcagcctcagatttctcatccccgggatggcatgtttgcagcctcgtggcctgctatgggcattgaatgagatgtgtttgtgaggcagtaaggcagccaagatgtcacttacatgaaacttacattgcaaccccagttttagcatgatgtgggatattaagtattaccgtctccttgaatactcccagtcagcagttcgcttcatgttacaagatgtttagttctaggctgggcctgtaatccctgcactttgggaggccaaggtgggaggatcacttgaggccagggg

SEQ ID NO: 119601 - DNA, 549 bp, Homo sapiens
agaagtgagaccaagagatgaaaaacaaattaaggccgggaatggtggctcacacttgtaattccagcactttgggaggctgaggcaggtgaatcacttgaggtcaggagttcatgaccagcctggccaacatggtgaaactccgtcactactaaaaatacaaaaattagccaggtgtggtagtgggtgtctgtaatccccactactcgggaacttaaggcaggagaatygcttgaacctgggaggtggaggtgtcaataagcagagattgtgccactgtactccaggttgggtgacacagcgagaccctgtctcaaaaaataaaaaaaagagagaaaaaagaaaagagaaggaaaacacattaaaatgacagtagtaagagaggcgatgaagttgggaatgtacaatattgccagaactaacacgaattagacaggagggctcacaaaggagtgaagaaataccatccatttctggactgaaggaggagcagatatcgctgggcagaggaaaaaagcagaaggggctgactatagggaagggggaagt

SEQ ID NO: 119602 - DNA, 549 bp, Homo sapiens
agaagtgagaccaagagatgaaaaacaaattaaggccgggaatggtggctcacacttgtaattccagcactttgggaggctgaggcaggtgaatcacttgaggtcaggagttcatgaccagcctggccaacatggtgaaactccgtcactactaaaaatacaaaaattagccaggtgtggtagtgggtgtctgtaatccccactactcgggaacttaaggcaggagaattgcttgaacctgggaggtggaggtgtcartaagcagagattgtgccactgtactccaggttgggtgacacagcgagaccctgtctcaaaaaataaaaaaaagagagaaaaaagaaaagagaaggaaaacacattaaaatgacagtagtaagagaggcgatgaagttgggaatgtacaatattgccagaactaacacgaattagacaggagggctcacaaaggagtgaagaaataccatccatttctggactgaaggaggagcagatatcgctgggcagaggaaaaaagcagaaggggctgactatagggaagggggaagt

SEQ ID NO: 119603 - DNA, 541 bp, Homo sapiens
agaaatgtatgtttctttatatttaatgcaactgcactaagaaatgtatcattcttttcctttgctccaagcattttgtaatctgatttttctattggtggaatttatactacattattttaattcccacatgcttatatgtttatccctgttgtaaatgagaaagatcttttattttattttgtggatgtttattactggtataggggagtttgttattttcttgtctttaccaagaaacatagcgctttgctgaacccatgattgtcccagtccatttgctcaagtgaatcccttggattrcatgagactgcattacctacaagtagtgaatgtgcaccctttgtgacactcagagcctctgatccttttctttcattcctgttttcaagaggagcattctattatagctctgggaagaattgtggaggctcttggtttaagtctgtgtccttttccatgttaaccaaatgctccagtgatttcccctctgtaaattgaactgtgaagtggtttctagattccatgggattaaaacccc

SEQ ID NO: 119604 - DNA, 624 bp, Homo sapiens
acttcagtggaggaacgaactgcagatgtggtggagatagcaagagaactagaattcgaattggagcctgaagatgtgactgaattgctgcaacctcatgttcaaacttgaatggatgaggggttgcttcttatcatgagcaaaaaaagtgctttgttgagatggaaactactcttggtgaagatgctgtgaatgttgttgaaatgacaacaaaggatttagartattccacaaactgataaagcagtggcagggtttgagaggattgactcccatttttaaagaagttctactgtgggtaaaaagctatcaagcagcattttatgatacagagaaatcttttgttaaaggaagagtcaattaatgtagacaatttcattgttgtcatattttaagaaattgccacagtcaccccaaccttcagtaaccacaaccctgatcagtctagcagccatcaacatcgaagtaagactctccaccagcaaaaagattacaactccctgaaggctcagataattgttagcacattgtggcaataaagtagtattaattaagatatgtacatttttgagacatacagctgtagcatacttaatagactatgatataaacataacttgtata

SEQ ID NO: 119605 - DNA, 502 bp, Homo sapiens
aattggctgactaaagtgggagctagttaagccaggcaggcagtcaggaaggtcttggacagtctggaacccaggggcaggagcttcttggagtctctgagctccaggaaggcttcaagttctcacctgattaggtcagaccaccccggtcatttcccttttgatgaacttaaagttaatggagaagggactttaattgcaaaacgtcttcacagcarcaccagggctagggtttgaactggggactgtacttcagcctgtcagggtgaccataaacagaccatcacggtcccccacttgccgatgtggctcccatagacatctccctaaaccatgcctcctctccagataaaggcagtgacaaggtcataccgccactgagcatgatacaagaaccctgtacaaccccagacatgctgaccccttccccagaaggacaggcaaagggtgttcactcttcttccatatcctataattttattttttatttttttgaaaatag

SEQ ID NO: 119606 - DNA, 502 bp, Homo sapiens
aattggctgactaaagtgggagctagttaagccaggcaggcagtcaggaaggtcttggacagtctggaacccaggggcaggagcttcttggagtctctgagctccaggaaggcttcaagttctcacctgattaggtcagaccaccccggtcatttcccttttgatgaacttaaagttaatggagaagggactttaattgcaaaacgtcttcacagcagcaccagggctagggtttgaactggggactgtacttcagcctgtcagggtgaccataaacagaccatcacggtcccccacttgcsgatgtggctcccatagacatctccctaaaccatgcctcctctccagataaaggcagtgacaaggtcataccgccactgagcatgatacaagaaccctgtacaaccccagacatgctgaccccttccccagaaggacaggcaaagggtgttcactcttcttccatatcctataattttattttttatttttttgaaaatag

SEQ ID NO: 119607 - DNA, 502 bp, Homo sapiens
aattggctgactaaagtgggagctagttaagccaggcaggcagtcaggaaggtcttggacagtctggaacccaggggcaggagcttcttggagtctctgagctccaggaaggcttcaagttctcacctgattaggtcagaccaccccggtcatttcccttttgatgaacttaaagttaatggagaagggactttaattgcaaaacgtcttcacagcagcaccagggctagggtttgaactggggactgtacttcagcctgtcagggtgaccataaacagaccatcacggtcccccacttgccgatgtggctcccatagacatctccctaaaccatgcctcctctccagataaaggcagtgacaaggtcataccgccacygagcatgatacaagaaccctgtacaaccccagacatgctgaccccttccccagaaggacaggcaaagggtgttcactcttcttccatatcctataattttattttttatttttttgaaaatag

SEQ ID NO: 119608 - DNA, 582 bp, Homo sapiens
tcgtgctcctatgagaatctaaagctgccrctgatctgacaggagcccgagatcaggcagtaatgtggggagtggctgtaaatacagatgaagcttcactcacacacccgctgctcacctcctgccgtgtgcccaatacaggcctgtgacccagggattaggggcccctgctcaagtgcatccaaaaggacccttcccacaccaatcttcatagtggtcaagtgcagcaactacttagctcccaaggtatgtgcctcagctggcaattcatcacaatcaacagtaagtggtagcttgagtcattgtgaggtcacttcctggaaatgaccagcatcccatatcccattggcaaggagctcagcgctgccccttggataaccaaacctatgcccaaatcccatctgtgtgggtccatctcctggtacccttcctagcatcaattctttatttgtaggagtccaatcaggagacacaaaccactcgaaaatttaaagtggtaaaattcaaaacaaaaaagtattaattataacaaggcaacagcataatgagagattggctaccaaaaagcaaagagaaggctag

SEQ ID NO: 119609 - DNA, 582 bp, Homo sapiens
tcgtgctcctatgagaatctaaagctgccactgatctgacaggagcccgagatcaggcagtaatgtggggagtggctgtaaatacagatgaagcttcactcacmcacccgctgctcacctcctgccgtgtgcccaatacaggcctgtgacccagggattaggggcccctgctcaagtgcatccaaaaggacccttcccacaccaatcttcatagtggtcaagtgcagcaactacttagctcccaaggtatgtgcctcagctggcaattcatcacaatcaacagtaagtggtagcttgagtcattgtgaggtcacttcctggaaatgaccagcatcccatatcccattggcaaggagctcagcgctgccccttggataaccaaacctatgcccaaatcccatctgtgtgggtccatctcctggtacccttcctagcatcaattctttatttgtaggagtccaatcaggagacacaaaccactcgaaaatttaaagtggtaaaattcaaaacaaaaaagtattaattataacaaggcaacagcataatgagagattggctaccaaaaagcaaagagaaggctag

SEQ ID NO: 119610 - DNA, 582 bp, Homo sapiens
tcgtgctcctatgagaatctaaagctgccactgatctgacaggagcccgagatcaggcagtaatgtggggagtggctgtaaatacagatgaagcttcactcacacacccgctgctcacctcctgccgtgtgcccaatacaggcctgtgacccagggattaggggcccctgctcaagtgcatccaaaaggacccttcccacaccaatcttcatagtggtcaagtgcagcaactacttagctcccaaggtatgtgcctcagctggcaattcatcacaatcaacagtaagtggtagyttgagtcattgtgaggtcacttcctggaaatgaccagcatcccatatcccattggcaaggagctcagcgctgccccttggataaccaaacctatgcccaaatcccatctgtgtgggtccatctcctggtacccttcctagcatcaattctttatttgtaggagtccaatcaggagacacaaaccactcgaaaatttaaagtggtaaaattcaaaacaaaaaagtattaattataacaaggcaacagcataatgagagattggctaccaaaaagcaaagagaaggctag

SEQ ID NO: 119611 - DNA, 609 bp, Homo sapiens
tagcgtaactattaaacagaagaatcaacagaaacatgccaatgactggcccttaccttccacagtgacctcaatttcaggaagattttcattactctcaggccttcatggtctttttggggactgaaagttgtaaaataagcacagaattactttagtatgttgtaggaaaaaaatacaaaaggagatgttttataagagtagagtattaaaattcatacagtttgactctttkcgaagaaacctgcagaattaaacttgtagtgtagtcctctacaggcggctcaaaaaagccatggaaacatgcataaagtaggattgcaaatgtgacatttccagtgaaatttaaaaaaaaaaaaaaaaaaaagaaaaagaggtccattaaataacataacttaaaaagctaagaaactaactgcaagtcccacaaagatattggccaatgactctctatgattttaagaaatgctgataaagaatgtcttaatgcagtgaaatataacaggaagtacatgtaatctcttacctttagtgtggcaagtaggaaataattagttcaagtcaagaaagaataccaagaaatgttatagtagccagtacaatggtggt

SEQ ID NO: 119612 - DNA, 609 bp, Homo sapiens
tagcgtaactattaaacagaagaatcaacagaaacatgccaatgactggcccttaccttccacagtgacctcaatttcaggaagattttcattactctcaggccttcatggtctttttggggactgaaagttgtaaaataagcacagaattactttagtatgttgtaggaaaaaaatacaaaaggagatgttttataagagtagagtattaaaattcatacagtttgactcttttcgaagaaacctgcagaattaaacttgtagtgtagtcctctacaggcggctcaaaaaagccatggaaacatgcataaagtaggattgcaaatgtgacatttccagtgaaatttaaaaaaaaaaaaaaaaaaaagaaaaagaggtccattaaataacataacttaaaaagctaagaaacyaactgcaagtcccacaaagatattggccaatgactctctatgattttaagaaatgctgataaagaatgtcttaatgcagtgaaatataacaggaagtacatgtaatctcttacctttagtgtggcaagtaggaaataattagttcaagtcaagaaagaataccaagaaatgttatagtagccagtacaatggtggt

SEQ ID NO: 119613 - DNA, 521 bp, Homo sapiens
atgaaactagattggcaaaatatcattgttgaagttggatgatgagtatatggaattcattatatttgtctctctacttttgtgtatatgtaaaaagtttcttgaaaatgataagagccrgtcatattacggcagtacactattcccataatggcccaggtgccccacctcttcctggtagggtggagccagaagaggctgagtgagaagccaggacttttaccacctcccagggatagtgagcccctcctctccctcagtgtcagtggagggcatgcagacaccagtaatgaggggcccctaccccctgccagccaggcggtgccagcagaagcctgatgtggagcctgccccccatccaccccaggagtaacaaagcacccccacaagtgtcactaaaggctgtgggggagctggactttcaccctcacttggcagttacaggcaaggccccttccccttggcgatgtgaaaccagaggagccctaaatcaggagatttaaataagatccagagtctca

SEQ ID NO: 119614 - DNA, 521 bp, Homo sapiens
atgaaactagattggcaaaatatcattgttgaagttggatgatgagtatatggaattcattatatttgtctctctacttttgtgtatatgtaaaaagtttcttgaaaatgataagagccggtcatattacggcagtacactattcccataatggcccaggtgccccacctsttcctggtagggtggagccagaagaggctgagtgagaagccaggacttttaccacctcccagggatagtgagcccctcctctccctcagtgtcagtggagggcatgcagacaccagtaatgaggggcccctaccccctgccagccaggcggtgccagcagaagcctgatgtggagcctgccccccatccaccccaggagtaacaaagcacccccacaagtgtcactaaaggctgtgggggagctggactttcaccctcacttggcagttacaggcaaggccccttccccttggcgatgtgaaaccagaggagccctaaatcaggagatttaaataagatccagagtctca

SEQ ID NO: 119615 - DNA, 521 bp, Homo sapiens
atgaaactagattggcaaaatatcattgttgaagttggatgatgagtatatggaattcattatatttgtctctctacttttgtgtatatgtaaaaagtttcttgaaaatgataagagccggtcatattacggcagtacactattcccataatggcccaggtgccccacctcttcctggtagggtggagccagaagaggctgagtgagaagccaggacttttaccacctcccagggatagtgagcccctcctctccctcagtgtcagtggagggcatgcagacaccagtaatgaggggcccctaccccctgccagccaggcggtgccagcagaagcctgatgtggagcctgccccccatccaccccaggagtaacaaagcacccccacaagtgtcactaaaggctgtgggggagctggactttcaccctcacttggcagttacaggcaaggccccttccccttggygatgtgaaaccagaggagccctaaatcaggagatttaaataagatccagagtctca

SEQ ID NO: 119616 - DNA, 545 bp, Homo sapiens
attgagattttctacttattgctttattgttaaacaataggaagtttaatttctttataacagtcatcactcaattaaaatatcttactgaattagttatctttttccttctctactgtctgcacccccccaccccacccccacttcaatagaatgaaagctaggtatcttatttgtcctgtacatccctctttccctagcacctatgtaatgcctggaccatagtaggtgctccataagagttattaaatgaacacatgagaacttcacaaggtagagttttttaaaaaccctgtgttatacatgagaaaattcagagaggttaggaaacttgctcaaagtcacacagcaaataaatggaaaaaactggtwatttgcccacagaatgtctttaccaaaaccatttgcaaggctgctgctggaaaggaaggcaagtcacactgaaacctaacaggtgtgctacatagaaagtttgctatttatactagtgtttactgatactgtactgatataagatgcaatgagatatataaaacgagcaaaga

SEQ ID NO: 119617 - DNA, 577 bp, Homo sapiens
ttcagcaatgtaaaaaataatagcatgttttagacaggagataaaaaggcttaaacagatttaatgaatctgcattttcctggaagacggtaaacatatttatgagcataaaaagtccraagtcaatggtgaatttctagccaaagaagtagggcaaggaaaaaaattgtaagaattagaaataaaactagtattactcacaaattataaaagtatgtgtgtgttccaaagaaatctacaaagaatattcaattttatatgtgaattttaaaaggtgactggatacaaaatcaatatataaaaaccaattatagatatacaaatgagcaagcatatcaaaagatgttaagtatcactgtcaccagagaaatacaaattgaaaccacagtgagatattgctcattaggataactactatcaaagaaacagaaaataacaagtattgacaaggatgcagaaaaattagaaccactgtgcaccgttgagggtgtcataaaatgatgtaacctttataaaaaaacgtagaggtgtttctcaaaaaattaaaaataaaactgctatattactcagcaagccc

SEQ ID NO: 119618 - DNA, 557 bp, Homo sapiens
tctactcaataatatgtatgcacttgttcctttcttcttgtgcacttgtatccatgaagaaacttaccagggaaaagataatcatggcctaggatacgaacaaggatattgccaccattgcttagagctgacatgcctaggggcaacatgagcctttgcttttctaggcacaggaaaagacaaatgaacttattatatccattcattcagcccacaatgtcttgttgggactcactgtgaattagggactgttttaggcattgaagacacctggaaaccaaaaggakacatgatctctgcccaagtgtgctactcgactcctaccttctactctatggacagctccaatcactacaaaattaaccactttttaaaatttaaccccatatttaaattaacacaattaaccacatatttaaaatttaagaatcacaggactcacatcagggaggagtctgcattggcaagtggataatttgtagtggtcaattatcattattcctcacccttagacagggtgccaaggttggaataaaaaataagagcagaaatgcaat

SEQ ID NO: 119619 - DNA, 557 bp, Homo sapiens
tctactcaataatatgtatgcacttgttcctttcttcttgtgcacttgtatccatgaagaaacttaccagggaaaagataatcatggcctaggatacgaacaaggatattgccaccattgcttagagctgacatgcctaggggcaacatgagcctttgcttttctaggcacaggaaaagacaaatgaacttattatatccattcattcagcccacaatgtcttgttgggactcactgtgaattagggactgttttaggcattgaagacacctggaaaccaaaaggagacatgatctctgcccaagtgtgctactcgactcctaccttctactctrtggacagctccaatcactacaaaattaaccactttttaaaatttaaccccatatttaaattaacacaattaaccacatatttaaaatttaagaatcacaggactcacatcagggaggagtctgcattggcaagtggataatttgtagtggtcaattatcattattcctcacccttagacagggtgccaaggttggaataaaaaataagagcagaaatgcaat

SEQ ID NO: 119620 - DNA, 570 bp, Homo sapiens
gttccagttacttctgggcataggcatttttataacattagataatccttctatttacctttcttttattttttttaaagtctcttaagtaccaaaagatcaaacccaaaggactaaagttgtttatgtaactcaaaagaaactccagcataatataaaaaagatgataagtcaggaaaaaggaaaccactgtcaccactctcaaattagtctgttcaaaatgtttactgtcaggatcatttttcccaaggaacatatacattttcccattctcctgttacagctgacattttttgaggtgggggggagggcggaaaaaaatttatggaattaaccattattataactttctgtttttctcattgtattcatcaattttttgattttaaatattgtgaaagataaagagaggatcaaayagtttatcttcacatgaggtaagactgtttatgtctgataatgagagttgccagtgttgtaccttcaaacttttagatgttgcatttgttattgtttaaagaataatccgtggagtgattctaaaatgtacacagttggtccttcatatct

SEQ ID NO: 119621 - DNA, 589 bp, Homo sapiens
agttatctgttaatgagccctgttcccctctggtccttccctacagcaattctccatagcagggaggaggttgatacatggctctagatttggggaaggagggtggactaagcaagtttgagataatgttaagactgaaatagagggtcttttggtcacaagcatgctaccctcaattcagttctctaagggtaggttgatatttgatgttcaatgttagaaagaatataawaatatgggcaagacagcccccatttacttagcactcacaatgtacaagccattgtttaccaatcacatcttatcattaaatccttacaataacaccatgaataagtattacagtaatcaccatttaaaggtgagcaaatggaagcttagaggggttaataacttgcttacttgagacataaggttgcaaagctggttagtagcattgctaggatttgaacctgagtgtgtctgagcccaaaaccttagtttttagccccgtgcaatgctccatcacctaaacagagaatattggggagaatcagagcagggagtgagaaaaaagcattttcttacttctatacgcaaaagacaacaa

SEQ ID NO: 119622 - DNA, 617 bp, Homo sapiens
tgtttcttggaggcttttttcattcttttttctctaatcttgtctcatgctgtatttcagtaagttgatcttcaatctctgatatcctttattctgcttgattgatttggctattgatacttgtgtatgcttcacgaagttatcgtgctgtgtttttcagctccatcaggtcatttatrttcttttctaaactggttattctatttagcagttcctgtaaccttttttcaaggttcttagcttccttgcattgggttagaacatgctcctttagctcagaggagtttgttattacctaccttctgaagcctacttgtgtcaatttgtcaaactctttctctgtccagttttgttcccttgctggcaacgagttgtgatcctttggaggagaagaggtgttttggtttttggaattttcagcatttttgcactggtttttcctcatcttcatggatttactttggatggggttttgtttgggggcattttttgttgatgttaatgttattgctttctgtttgtttgtctttcttctaacaatcaggtccctcttctgcaggtttgtggcagtttgctggaggtccactgcaccctattttcttagccaccagccaagg

SEQ ID NO: 119623 - DNA, 617 bp, Homo sapiens
tgtttcttggaggcttttttcattcttttttctctaatcttgtctcatgctgtatttcagtaagttgatcttcaatctctgatatcctttattctgcttgattgatttggctattgatacttgtgtatgcttcacgaagttatcgtgctgtgtttttcagctccatcaggtcatttatattcttytctaaactggttattctatttagcagttcctgtaaccttttttcaaggttcttagcttccttgcattgggttagaacatgctcctttagctcagaggagtttgttattacctaccttctgaagcctacttgtgtcaatttgtcaaactctttctctgtccagttttgttcccttgctggcaacgagttgtgatcctttggaggagaagaggtgttttggtttttggaattttcagcatttttgcactggtttttcctcatcttcatggatttactttggatggggttttgtttgggggcattttttgttgatgttaatgttattgctttctgtttgtttgtctttcttctaacaatcaggtccctcttctgcaggtttgtggcagtttgctggaggtccactgcaccctattttcttagccaccagccaagg

SEQ ID NO: 119624 - DNA, 591 bp, Homo sapiens
tctttactttaaaattttataaatttataatagtttacatacttatgagatacrtatgatattttgatacaagtatgcttgcttttccattttctagtcttaatgtttgtgttttcaaaatcattatgtcactgtgtttgttactgtatctcataaatgctaaaataggtagccacccctctatgttattttcagaatgtttctgtgttttcccatttatttaattttttaaataaattttaactcttgtttgatttcaaacaaattattgttatttgatatactcataagtaatttttaaagtatgattaatatttaatttttatttcagggcttttttttccagtttcattatcagtgttgactaatttacaaaaattatggtagatttctttttttcatgctctcaaaataatattctatactttaacttttttctctaatttttaattataatttatctattaaatgttttttaaataagagttttctgtaggtatatgaattcttttaaaaaccaatttattattaataataattagttttctcatattttctatgttttgtaaaaaaactttggtagtttttttt

SEQ ID NO: 119625 - DNA, 591 bp, Homo sapiens
tctttactttaaaattttataaatttataatagtttacatacttatgagatacgtatgatattttgatacaagtatgcttgcttttccattttctagtcttaatgtttgtsttttcaaaatcattatgtcactgtgtttgttactgtatctcataaatgctaaaataggtagccacccctctatgttattttcagaatgtttctgtgttttcccatttatttaattttttaaataaattttaactcttgtttgatttcaaacaaattattgttatttgatatactcataagtaatttttaaagtatgattaatatttaatttttatttcagggcttttttttccagtttcattatcagtgttgactaatttacaaaaattatggtagatttctttttttcatgctctcaaaataatattctatactttaacttttttctctaatttttaattataatttatctattaaatgttttttaaataagagttttctgtaggtatatgaattcttttaaaaaccaatttattattaataataattagttttctcatattttctatgttttgtaaaaaaactttggtagtttttttt

SEQ ID NO: 119626 - DNA, 591 bp, Homo sapiens
tctttactttaaaattttataaatttataatagtttacatacttatgagatacgtatgatattttgatacaagtatgcttgcttttccattttctagtcttaatgtttgtgttttcaaaatcattatgtcactgtgtttgttactgtatctcataaatgctaaaataggtagccacccctctatgttattttcagaatgtttctgtgttttcccatttatttaattttttaaataaattttaactcttgtttgatttcaaacaaattattgttatttgatatactcataagtaatttttaaagtatgattaatatttaatttttatttcagggcttttttttccagtttcattatcagtgttgactaatttacaaaaattatggtagatttctttttttcatgctctcaaaataatattctrtactttaacttttttctctaatttttaattataatttatctattaaatgttttttaaataagagttttctgtaggtatatgaattcttttaaaaaccaatttattattaataataattagttttctcatattttctatgttttgtaaaaaaactttggtagtttttttt

SEQ ID NO: 119627 - DNA, 467 bp, Homo sapiens
gtgctctgacggagatgtacaaggagatgaatgttgttgtgcttgttaacccaacatgaattctgctgcccatgggtcagggagtaattttcacttttaagtctttttayttaagaagtaacattttacaaggctacatctgccatagttattcctctgagggaactgggcaaagtaaattgaaaaccccctggaaaggattcaccattctagatgccattaagaacatgtaccctagaacttacagtgtatatatagatatacactttatatgtatatatatatttatgaaagaacatttgtgattcatgggaggaggtcagaatatccacataaataggtgcttgaaagaagttgattccaaccctcacagatgactttgagggttcaagacttcagagggagtaactgcagatgtcatgaaaatagcaagataactagaattagaagtggagtctgaagatgtg

SEQ ID NO: 119628 - DNA, 599 bp, Homo sapiens
cctattttgtgtgtgtgtgtgtgtgtgtgtatatatatatatatgggagtaataggatatatatcattttatatatatataggagtttattaagtattaacttacacatgatcacaaggtcccacaataggctgtctgcaagcttgaggggcaaggaaggccagtctgagtctaaaaactgaagaactttgagtttgatgtttgagggcaggaagaatacagcaggagagaaagatgtaggctgggaggctaggccagtcttgctcgtttacatttttttcttcttgctttatattcactgagagctgattaaattgtgcccaccagattaagggtgggtctgccttccccatactgctgaytcaaatgttaatctcctttgtcaacaccctcacagactcacccaggggatcaatactttgtattcttcaatcaagttgtcactcagtattagccatcatatgggcatatacaaagggaaagaagtcattatgtcaaaaagatacctgcactcatatgtttattgtcacactattcacaatagcaaagacacagaatcaatctaaatttttatcaacagaggattggataaagaaaat

SEQ ID NO: 119629 - DNA, 599 bp, Homo sapiens
cctattttgtgtgtgtgtgtgtgtgtgtgtatatatatatatatgggagtaataggatatatatcattttatatatatataggagtttattaagtattaacttacacatgatcacaaggtcccacaataggctgtctgcaagcttgaggggcaaggaaggccagtctgagtctaaaaactgaagaactttgagtttgatgtttgagggcaggaagaatacagcaggagagaaagatgtaggctgggaggctaggccagtcttgctcgtttacatttttttcttcttgctttatattcactgagagctgattaaattgtgcccaccagattaagggtgggtctgccttccccatactgctgactcaaatgttaatctcctttgtcracaccctcacagactcacccaggggatcaatactttgtattcttcaatcaagttgtcactcagtattagccatcatatgggcatatacaaagggaaagaagtcattatgtcaaaaagatacctgcactcatatgtttattgtcacactattcacaatagcaaagacacagaatcaatctaaatttttatcaacagaggattggataaagaaaat

SEQ ID NO: 119630 - DNA, 578 bp, Homo sapiens
agtacttagtatagtatctggcacacagtaagcatgcaacaaatcttacctattattattatttaattcctgctttctctgccataaaattccatctgtttcttccagcattagctttcatttttaaaactaatagaaacttctacttccatatatttttttgaaaatcttcctgaatctgaacagatagacttttcccaccttctgcacgaacttggaacacagaatgctagagctggccatataaagcagctaattaattccatgactgagtaaatgagttgttctggcttcctttacaggtagggatgaatatcgtaacaaaaatcagccacatctcccttgtcgcatttcttggctactaatctccttcagggaaaaataaaataaactcaargtatggttcttatgaaccagaagcaccataaagattaagaaacaaaaaaatcttaaaaccacttttacactgcaatagtattacataaaaattattattcagtgcataagtaaaattagacagtgaagaaaatctacataaattaaatacccacgggtttgaaccaatagcccacaaatgt

SEQ ID NO: 119631 - DNA, 618 bp, Homo sapiens
agtggactttacaatattaactttcaaaagcatctgtggaaataagttctgatattcaagcacgccctcatttcatagatatccttaaactgtcttctaaaagctaatttacactgggtggctcaggagatattccccaagaatgggtacaaagagcaagacataatcacccttgggcttaggtagaaaaacgaatctcagaaaatgatgagtaggaatgtgtttgagacagtgaggctataaaagacatacttcccactgattaagaaatttgcttccaagaagagctgtactccaagagggagttaaagacacttaaaggcaagtgtcattatttttgaatgaagaagtacacgaaagctatctatggcgactaatttcttaaaaagcatgtttctattctaaaactattccaagagtgaaataaatgtttgcattttctacagaagtccaagaaaataaccaaaatacataaaacaggcrattggttgattaaatgtgccaagaccatacaatggaatgttgcacaatcattaaacttaatactctagaaatatttaatagaaagatgttcactatttatttggatttaaaaatatgtcccaaaacaataaccca

SEQ ID NO: 119632 - DNA, 532 bp, Homo sapiens
agatattttgacttaggtttcagaatatctgaaaggtggaaatggtttgtgcttagaactggtctctccatctgacatgcagagtctaacacggagccagctcccaactggaatcaaacccagaagtaaagaaccagcctctgtcagtctgatctcccaagcccaaatctatgaagtgtttataagtgcgacccccttccaaccccttcaaaatgtatgttttcatgtctaagagaaaagatttgattaaaaactaaggagctgcgtgtggtggctcaygcctgtaatcccagcactttgggaggctgagatgggtgaatagcttgaacccaggagtttgagaccagccttggcagcatggcgaaactctgtctctataaaaaatgcaaaaaaaaaaaaaaaaagccgggtgtggtggtgcaggcctgtagtcccagctactcagggggctgaggcaggaggattgcttgagactgggaggcaaagggtgcagtgagcagagattgaggtgttgtactccagcctcagcaac

SEQ ID NO: 119633 - DNA, 604 bp, Homo sapiens
cagtatgtgccgtattagattgaagccgactggatcttgtgagtttggttgccagttaggttgaaccctccttactcactgcaatgctggtgtccaactttcccttgatcctggcagcctttgagggacctaggtgagctctattaattccatttgtcattttaattaagtttatacctatattgacttagaaatccaagacaaacttgatgttccaattagtgttgaaatagctttattttcccatttcagccaaagggaaaggcagccaaaagggtttaggacttttatattgagtcaggtcctcagtcaaatgttctcaatcagataatgtcacaaggaacagccacataagacycactttttattgatagcaagttctgactatgtcatcttgaacatttttacattgttactagatgcattaattctgagactaataagacatttcttaaatcaaaattagcatgactgatgttcatggaagttatggatacccctggctaaaggaagtagtcctaacctcagaatatttagtagcttctccaaagagatggagcccaaaggtccagctaagatgtcacttagtattatctgacattgc

SEQ ID NO: 119634 - DNA, 563 bp, Homo sapiens
ggtcatatatactctgtaacaacatttaaacttagcatagctacaccattatgtttctacccaaaatttctaacattagtatcttaatatttatctttgaattttggtttatcaaaagggtacaaagaaaatggcttattccatgcacatgccaaaatagatgtatckctttgcttaaattttgaaatctcttctttctaatccattaaatatataagcatatataatgaattataagtccttatttaatactccaattattttaaaagacagggaaagagatttgggtatatgtgtgtgcatgtttgtgtgtaagaaaagtatttatactcaatagttttagaagtggttttatgtgatgtcctacaccatctttatttcaaaatattttttagaaaaactctgggactttagattaatttgcctgtttgctatactaaatttgagcaacaataaagtaatttaaggaaaattttaatagaccctttaccaagagaatatttttaaaagtctatgaaactttatcttaaaagtgtatcatattggtgaggaaagaatttata

SEQ ID NO: 119635 - DNA, 611 bp, Homo sapiens
ttggctttaaatagtgatgatcttgaaatggcccaaggactaaatgaaaagtggaatgttcacaccactgacactcttgtattatgagggcatcttatcagtatgccttactattatacmccagtttcctgattctcaagaatgccttgaaagtatgtgcaatataatcaataacatctgtccccaccgaacttactttgcaggtactctttgagcacatcaaattcttccattgccgctcttctctgtgccctttatccgcacttcccagctcacagcactgacaaccggtgagtctagtgattctgtcttcaatgtgatacttattaagttctctaaggggatcatttggttgtattttggtttcatggaattatttccaaattagcattgttttgttctccaacttagttatattcctggctaaatcttttaagaaaattatctcacaaagtattagaccagaggataactttggacacctgatgactgaccagtcttccaccattctcagatctatagaactgctctaaacccaaaaggagatcaagtaaagttgtctttagggaaaaaatcatcaggtaaaggatagttgccaagggaagttcagg

SEQ ID NO: 119636 - DNA, 611 bp, Homo sapiens
ttggctttaaatagtgatgatcttgaaatggcccaaggactaaatgaaaagtggaatgttcacaccactgacactcttgtattatgagggcatcttatcagtatgccttactattatacaccagtttcctgattctcaagaatgccttgaaagtatgtgcaatataatcaataacatctgtccccaccgaacttactttgcaggtactctttgagcacatcaaattcttccattgccgctcttctctgtgccctttatccgcacttcccagctcacagcactgacaaccggtgagtctagtgattctgtcttcaatgtgatacttattaagttctctaaggggatcatttggttgtattttggtttcatggaattatttccaaattagcattgttttgttctycaacttagttatattcctggctaaatcttttaagaaaattatctcacaaagtattagaccagaggataactttggacacctgatgactgaccagtcttccaccattctcagatctatagaactgctctaaacccaaaaggagatcaagtaaagttgtctttagggaaaaaatcatcaggtaaaggatagttgccaagggaagttcagg

SEQ ID NO: 119637 - DNA, 602 bp, Homo sapiens
  misc_feature (1)...(602): n = A,T,C or G
gtccttaatgcccttctgaataakccaggtgattttctctgcacagtcctgaggctacatccactgagactggctctgtacaaagatgctaaacgccagacactccccagatacctctgtgccccctcccctattgatggagagcagaagagatatgagtctttcacggaggctgacatcacatgcagactttggcctcaagtctttgtcacgtgccaaggacagaagaaataccgtgaactagaaagcttttgtgagtataaggaggagaaaaaaattagccagagttgcaagatgctttatgttgtttcaagtttgttctcatctctaaaggtaaactatagaacccaccttctggggcaggtagatgagataatcctgcattagtgaactgtagcatctgactttcatagagaatggttttcttagtagaaattggggcgcaaaaaaatgaatgcagttatgggaactttgcgatgagatgcaaaatatctgggtagaaagcagataaattaccctcatgtatgtattttagtgtaaagtggacatgattactaggtaaaatgttcagaatttctcagttttcattgatggtatgnnnn

SEQ ID NO: 119638 - DNA, 602 bp, Homo sapiens
  misc_feature (1)...(602): n = A,T,C or G
gtccttaatgcccttctgaataatccaggtgattttctctgcacagtcctgaggctacatccactgagactggctctgtacaaagatgctaaacgccagacactccccagatacctctgtgccccctcccctattgatggagagcagaagagatatgagtctttcacggaggctgacatcacatgcagactttggcctcaagtctttgtcacgtgccaaggacagaagaaataccgtgaactagaaagcttttgtgagtataaggaggagaaaaaaattagccagagttgcaagatgctttatgttgtttcaagtttgttctcatctctaaaggtaaactatagracccaccttctggggcaggtagatgagataatcctgcattagtgaactgtagcatctgactttcatagagaatggttttcttagtagaaattggggcgcaaaaaaatgaatgcagttatgggaactttgcgatgagatgcaaaatatctgggtagaaagcagataaattaccctcatgtatgtattttagtgtaaagtggacatgattactaggtaaaatgttcagaatttctcagttttcattgatggtatgnnnn

SEQ ID NO: 119639 - DNA, 602 bp, Homo sapiens
  misc_feature (1)...(602): n = A,T,C or G
gtccttaatgcccttctgaataatccaggtgattttctctgcacagtcctgaggctacatccactgagactggctctgtacaaagatgctaaacgccagacactccccagatacctctgtgccccctcccctattgatggagagcagaagagatatgagtctttcacggaggctgacatcacatgcagactttggcctcaagtctttgtcacgtgccaaggacagaagaaataccgtgaactagaaagcttttgtgagtataaggaggagaaaaaaattagccagagttgcaagatgctttatgttgtttcaagtttgttctcatctctaaaggtaaactatagaacccacctkctggggcaggtagatgagataatcctgcattagtgaactgtagcatctgactttcatagagaatggttttcttagtagaaattggggcgcaaaaaaatgaatgcagttatgggaactttgcgatgagatgcaaaatatctgggtagaaagcagataaattaccctcatgtatgtattttagtgtaaagtggacatgattactaggtaaaatgttcagaatttctcagttttcattgatggtatgnnnn

SEQ ID NO: 119640 - DNA, 602 bp, Homo sapiens
  misc_feature (1)...(602): n = A,T,C or G
gtccttaatgcccttctgaataatccaggtgattttctctgcacagtcctgaggctacatccactgagactggctctgtacaaagatgctaaacgccagacactccccagatacctctgtgccccctcccctattgatggagagcagaagagatatgagtctttcacggaggctgacatcacatgcagactttggcctcaagtctttgtcacgtgccaaggacagaagaaataccgtgaactagaaagcttttgtgagtataaggaggagaaaaaaattagccagagttgcaagatgctttatgttgtttcaagtttgttctcatctctaaaggtaaactatagaacccaccttctggggcaggtagatgagataatcctgcattagtgaactgtagcatctgactttcatagagaatggttttcttagtagaaattggggcgcaaaaaaatgaatgcagttatgggaactttgcgatgagatgcaaaatatctgggtagaaagcagataaattaccctcatgtatgtattttagtrtaaagtggacatgattactaggtaaaatgttcagaatttctcagttttcattgatggtatgnnnn

SEQ ID NO: 119641 - DNA, 590 bp, Homo sapiens
aaagaaaaaacaaaaccgacatttatataatataaattggctgcattttcagattagtgtagtgattyaatgggttatctcagatctaatgagttgtcagtgagtgatcctgaaagtccacatatgcatctgtgatttttacacacaaatatgaatgcaatttccaattttcagttaatttattgttctctaccccaaagccaactgctagtgcttgtaagagaggagactatatatttaagaggttttgttttaaaaaaaattctagtttttcactaaaaaataaacacatttttgataaatctgtgtggcaagtcaaattcaatggaggctgacagcaatgctggaaaccaccaaatgcgctaaagagcaacaaggcaatcagggccctgttttagagaatgttctaatcactgccaaagttccatacattatatgaaatgtgcaaatcagggaatctgcaaagatttaaggaagtatttattatcaatagcaaaggtctgccataggtgatcaaatgttaaattgaataaaaacgaaacacgaaaacctttgaaataacatgtttttccccaaaaatgaggataaaa

SEQ ID NO: 119642 - DNA, 590 bp, Homo sapiens
aaagaaaaaacaaaaccgacatttatataatataaattggctgcattttcagattagtgtagtgatttaatgggttatctcagatctaatgagttgtyagtgagtgatcctgaaagtccacatatgcatctgtgatttttacacacaaatatgaatgcaatttccaattttcagttaatttattgttctctaccccaaagccaactgctagtgcttgtaagagaggagactatatatttaagaggttttgttttaaaaaaaattctagtttttcactaaaaaataaacacatttttgataaatctgtgtggcaagtcaaattcaatggaggctgacagcaatgctggaaaccaccaaatgcgctaaagagcaacaaggcaatcagggccctgttttagagaatgttctaatcactgccaaagttccatacattatatgaaatgtgcaaatcagggaatctgcaaagatttaaggaagtatttattatcaatagcaaaggtctgccataggtgatcaaatgttaaattgaataaaaacgaaacacgaaaacctttgaaataacatgtttttccccaaaaatgaggataaaa

SEQ ID NO: 119643 - DNA, 590 bp, Homo sapiens
aaagaaaaaacaaaaccgacatttatataatataaattggctgcattttcagattagtgtagtgatttaatgggttatctcagatctaatgagttgtcagtgagtgatcctgaaagtccacatatgcatctgtgatttttacacacaaatatgaatgcaatttccaattttcagttaatttattgttctctaccccaawgccaactgctagtgcttgtaagagaggagactatatatttaagaggttttgttttaaaaaaaattctagtttttcactaaaaaataaacacatttttgataaatctgtgtggcaagtcaaattcaatggaggctgacagcaatgctggaaaccaccaaatgcgctaaagagcaacaaggcaatcagggccctgttttagagaatgttctaatcactgccaaagttccatacattatatgaaatgtgcaaatcagggaatctgcaaagatttaaggaagtatttattatcaatagcaaaggtctgccataggtgatcaaatgttaaattgaataaaaacgaaacacgaaaacctttgaaataacatgtttttccccaaaaatgaggataaaa

SEQ ID NO: 119644 - DNA, 651 bp, Homo sapiens
ttgcagaaagcctgaaactcatcctttaaggcctaaggacttgagggaagccttcagcacctgcagctggggaggcaggagttcttgtcagtctcttggtactggtaacsggcagtgcacacgttgacgttaatgagacttaaaaagctgcagcatctggctgcctggccaggtggaaagaaaacccacagcagcatgtggacgaaggcactgcctctatttccctccagaaagcaacacaactcaggtgagagctgccggctcacctggctacacatacaaaagcaaagccaagatccaagcacacacgcttattccaaggtggaagttcatctccaaagctgtgcaggagggtgctaggggctggcgcagtaagtaagcaattcaaattaatgaattggctgattgactccaagttcgatttaaattcacaacaaccaggttctgtatttgtgctcagggatgccccatccctctcacgggactggcttccggcttcttccagggtttgctccttattccagttaggtattcagtgtcgccaagccagggcagcctcgtgactacagtgagttgctaacagcagggcagcactgtttcaaacagacacccaaacacctgtttttcttgttaagtaaaaacaagttaata

SEQ ID NO: 119645 - DNA, 605 bp, Homo sapiens
atgtagaactttatattaatgaagccacatatggcatatacccttttgtataagacttctttcagcgttttcaagatattgagtatattaatagttcatcctttttattattaggtggtacagattgagtatttcttatctgaaatgcttgggaccagaagcgtttttggattttggaatactcgaaattatacttactggttgagcatccctcatctgaaactctgacatctgaaatacttcaatgagcatttcctttgggcatcatgttaatgttcaaaaaggtttggattttgagcattttggattttggattttcggattagggatcctcaacttgtgtattccatttgcaatcctattaggtrgggctggaattactgaggcatagggtagatggtatatttagttttattagaaatgataaatcttttcccaaagcagctgtaccatttgacacattgaccaacagtgtttgagagtgttggctgttgcccatctaaccgataattaatggtgttagttttttaagttttagtgctgctgatgaatacgtaatgatatctgactgttgtttaaatttgcatttctctgctgactgttaa

SEQ ID NO: 119646 - DNA, 618 bp, Homo sapiens
agttagaatggctattgttttttaaaaaaacaatgacacatgctgggaaggctgcagagaaaagggatcacttacacactgctggtgagagtgtcaattagttcagccactgtggaaagcagtgtggagatttctcagagaacgtaaaagagaactgccatgtgacccagcaatcccattactgagtatatctatctaacagaaaataaaytgttctatcaaaaagacacgtgcactcacgtgttcatcccagcactattcacaatagcagagacatggaatcaacccaggggctcaccaccagtggattggataaacaatcaccagcctgatgagcagcagggcaggttttcatttcctcagtccaggctttctctgaacttatgtaaggttgtactgaaagcatagtgagacccactgctgcagctttgagattggtgccacccaggtgagtttgttcaggggttaggaaattgcaaagaaattctggcattttagagaacaactgaggatttgagaatggaaaagtgaacagcactgggagctcagaggaggtaaccagagggctagaaattctagaagcaaagcctagtccctgagtggcagtgggtggttttg

SEQ ID NO: 119647 - DNA, 610 bp, Homo sapiens
ctcagacataaagatctgttcaaaagatgagactcaacattctggtggtagtctgaatttagtaaatattcccagtcctgagaagaataaaaagaatattaatttttaaaaataatacctccttataatatcataagaaaattaattcacttaaaacaattcaagtttcattttcacattaagttgatctaagagtatgttaaaaaaaaaaaagacaatgctaagaatgaagtaactataaaatagcaagccagttataaacgttaaggcaagccacctttaaaaaccattaaaaaaaatmttttcatgaccttttaggaaagacattgggagaagaattatactatttaggtagagattgagagagaaaatttaagattatctcaggctaggttttataggaaaagtagatggcaagttagtggccactacactgaactgtgttttggtaagaaggaaggtccacctgcattcagctggtgtattcatctttccacatgtataagatgccggggctagtaatataatctaataatcaactgatttttatattcagactgattggactacattttccaaatattcaagtctattttggttctacttgtga

SEQ ID NO: 119648 - DNA, 610 bp, Homo sapiens
ctcagacataaagatctgttcaaaagatgagactcaacattctggtggtagtctgaatttagtaaatattcccagtcctgagaagaataaaaagaatattaatttttaaaaataatacctccttataatatcataagaaaattaattcacttaaaacaattcaagtttcattttcacattaagttgatctaagagtatgttaaaaaaaaaaaagacaatgctaagaatgaagtaactataaaatagcaagccagttataaacgttaaggcaagccacctttaaaaaccattaaaaaaaatattttcatgmccttttaggaaagacattgggagaagaattatactatttaggtagagattgagagagaaaatttaagattatctcaggctaggttttataggaaaagtagatggcaagttagtggccactacactgaactgtgttttggtaagaaggaaggtccacctgcattcagctggtgtattcatctttccacatgtataagatgccggggctagtaatataatctaataatcaactgatttttatattcagactgattggactacattttccaaatattcaagtctattttggttctacttgtga

SEQ ID NO: 119649 - DNA, 610 bp, Homo sapiens
ctcagacataaagatctgttcaaaagatgagactcaacattctggtggtagtctgaatttagtaaatattcccagtcctgagaagaataaaaagaatattaatttttaaaaataatacctccttataatatcataagaaaattaattcacttaaaacaattcaagtttcattttcacattaagttgatctaagagtatgttaaaaaaaaaaaagacaatgctaagaatgaagtaactataaaatagcaagccagttataaacgttaaggcaagccacctttaaaaaccattaaaaaaaatattttcatgaccttttaggaaagacattgggagaagaattatactatttaggtagagattgagagagaaaatttaagattatctcaggctaggttttataggaaaagtagatggcaagttagtggccactacactgaactgtgttttggtaagaaggaaggtccacctgcattcagctggtgtattcatctttccacatgtataagatgccrgggctagtaatataatctaataatcaactgatttttatattcagactgattggactacattttccaaatattcaagtctattttggttctacttgtga

SEQ ID NO: 119650 - DNA, 610 bp, Homo sapiens
ctcagacataaagatctgttcaaaagatgagactcaacattctggtggtagtctgaatttagtaaatattcccagtcctgagaagaataaaaagaatattaatttttaaaaataatacctccttataatatcataagaaaattaattcacttaaaacaattcaagtttcattttcacattaagttgatctaagagtatgttaaaaaaaaaaaagacaatgctaagaatgaagtaactataaaatagcaagccagttataaacgttaaggcaagccacctttaaaaaccattaaaaaaaatattttcatgaccttttaggaaagacattgggagaagaattatactatttaggtagagattgagagagaaaatttaagattatctcaggctaggttttataggaaaagtagatggcaagttagtggccactacactgaactgtgttttggtaagaaggaaggtccacctgcattcagctggtgtattcatctttccacatgtataagatgccggggctastaatataatctaataatcaactgatttttatattcagactgattggactacattttccaaatattcaagtctattttggttctacttgtga

SEQ ID NO: 119651 - DNA, 526 bp, Homo sapiens
tagccctgcgacttaactataatagctgtataaccttgggcttaatccctctgtgccacactttccttatttataaaatagggttttaatagtagctatttgatatggctgttcattcatgttaaacacacagaatagtgcctgacacagagcatgcatttaataaattactattattatcatagttattgttggaaaagttcttaagtacaataatgacagtattcaggtatttacagttccagtttcaattatataactaatatttttctttattgttaaatgtmactaactctaaagctcttatgtattttaagacagtacttaaagttgaacattcatgtattaaaacttttatgagaattattaatatttattaactcatgattaatgtttgctttaaattggaaataaaaaaaacaaaacccaaaataacctgctttgaagttagttcatttttatatttgttatgggtatgtgttgtggatcttccttcataaaatttcttttcactcgtctgttattg

SEQ ID NO: 119652 - DNA, 573 bp, Homo sapiens
caccgatttgaagatcaataataaaatcactatttgttacagtgtcaagatatggtgtgactgtccttgctgctaaatgtaaacattaacttacagtattttactttattatatatatattacttattatatacagattttatattcattatattttattatttattttatcacataaaaagcaaacagagccacagtcagtctttacaatctgcaacaatgaaaaaggaagcagatccacctttgaagtttatagcaatgggcgaggaagccrgcaatttagaattatttctttccgtttttaccaatcaataatactaccttgaaagcccgggcttcagagttcctgttagcaacagtctgagccaacaaactttgccatcccattggatcttctttgtaggagagctgacccgcccggagtttaacatataaaaccccatccttggaaaggatggacctgaaagaaaaggaatgaatttaatataaggtattactggcagttcttggctggaaatagtgttttcccaataccatgttcacaggagatgaagcttttaccattttccacta

SEQ ID NO: 119653 - DNA, 573 bp, Homo sapiens
caccgatttgaagatcaataataaaatcactatttgttacagtgtcaagatatggtgtgactgtccttgctgctaaatgtaaacattaacttacagtattttactttattatatatatattacttattatatacagattttatattcattatattttattatttattttatcacataaaaagcaaacagagccacagtcagtctttacaatctgcaacaatgaaaaaggaagcagatccacctttgaagtttatagcaatgggcgaggaagccggcaatttagaattatttctttccgtttttaccaatcaataatactaccttgaaagcccgggcttcagagttcctgttagcaacagtctgagccaacaaactttgccatcccattggatcttctttgtaggagagctgacccgcccggagtttaacatataaaaccccatccttggaaaggatggacctgaaagaaaaggaatgaatttaatataaggtattactggcagttcttggctggaaayagtgttttcccaataccatgttcacaggagatgaagcttttaccattttccacta

SEQ ID NO: 119654 - DNA, 592 bp, Homo sapiens
gcagcaaaccaccatggcacatgtatacctatgtaacaaaactgcatgttctccacatgtaccccagaatctaaagtataaaaataaaaaaaaaaaatcaaaattcttatcctgacatccatggctcagtataattcatccctacttttcaaactcagacacttctcagccctatgccacctgtactgtttcttggccaaactgrccagtcagagttctttaggcatatcctaagttcatccaactgcatgatttgcatatgcgctgctgcctaaaatgcattttctcttcttacctttgcttatttgacttccattgttcctttaaaagccaaatccattaacaccaatggcctttttctccctctggatccacacaacactctgtaccacttaactacaataaaatcatatgttagttgagtagttactattttctctaactatcttataggcagctcttgtcatatatgtgtccctctaaggtaaatatttgcacccaactttcaattactatcaacttttagtcattgggaacttcagaccagttagacaaatcagaaatcacaaagaacaggttttcaggcagttaa

SEQ ID NO: 119655 - DNA, 575 bp, Homo sapiens
cagcagaaacaaataacagagtcagctctatgctatgaaaaccgctatgttgactgaggctccacggttttaacccattcatttttccccccttttttagaattcttacttaatctttttaaccagcttacaacaggcaggcaagcaccatataaaccatgctccctgcgccgggggatataaaacaagtttcttaagtcccttgggtagatacttccttaggaatgccggtgtaagacaaaagttcacattttaatgccatatgttgtcagtcaccaggaaaaagctccttatgggcacaagccaggtccccagcctttgtcacacagcaaaaataaacacccttcgaggagttaattaggcggtcagcagccacctcagtgtcctaggagggctgcccgcagaccttttacacacacacacacacacacacacacacacacacacacacacacacacgacmcaaaaggaggcgtttgttaaatgtcacaagctgggcatctggagtcggattcgaaaggtaaatacattccgcggaagcattcctcagatgtcaggccacaaaactgctggtt

SEQ ID NO: 119656 - DNA, 617 bp, Homo sapiens
acattatactgcaattcctgacacaacgtctggctcattcgacaaagttgataactgtttgctgtattaaatggacaaatacacaaattatcctatttggccaaatgtagttcataaataaatatctgttcacttgcatggaatataaaaatgaaaaacttaggcaaatataaccaaagtaggaggaaaaagtgacattttaaatatctttggtttgttagatatccaaaacttttctattaatgaatgtttggatatttttccagattgttgagataaattgaattaaaataaattaaataatagttgctaacatttgtgagtgcttatatgtgtcacgaattcttcccttaagcctttgtatttatcatctcacttaattcttatatcatcccttagatatctactactattattattattattatactttaaagatgaggacctgagccacagagatggtaaggaattgccctcagattagacagcagctacttggtggcagagttggaattgaaacccggacaacttctctccagagcccaggtaactagtcactttcaggycttctaaaccccaatctagtactccttagttatttaaaaagtgaagaataa

SEQ ID NO: 119657 - DNA, 609 bp, Homo sapiens
acagggggcccttttgtaggtgattaggtcctgaggacacagctctcataatgggattagtgcctagaaaatataggtccaaaggtgcttattctccccttcctctatgtgaggacacagcaagaaggcatcatctatgaatctgaaagtagtccttcaccagacactgtatctgcccacagcttgatcttggacttccctgtatccaggacagtgagaatgaaatttatgtggcttataaggtaccctgtttatggtatttcttatatcaggattaatacactaaaaaaacataatttatttctacagggaagctgatatgatttggctgtgtccccactccaatctcatcttgaattgtagttcccataatcaccacatgtcatgagaargacctggtaggaggtaattgaatcataggggcagtttctccacgctattcttgtgatagtaagttctcacaagatcttatggttatataaggagtttatgccttcgctcgattctcattcttctcctttcttccgccatgtgaagaaggatgtgcttgcttttccttccagcatgattgtaagtatcctgaggcctcctcagcccttcttaactgtg

SEQ ID NO: 119658 - DNA, 516 bp, Homo sapiens
gcgtcaggggatctaagagaattgtaattataggatataattacatctaatctttttttacacatttatttgacatccccatctgccttcccacaacaggtgatggaggtggaagaggaattcccaaacttggtttctgcctattcatcaaataaaggagttcatattattagaatttagtccattaaaaacaaagaaggctatattcttgaagatgsgtttgtgagaatgacacatcctgatgtagaagggagtgtagctctctcaagaaagagagatggaggaaaaacaataatttcacactaagcagaccttgtgggcggttctaggccatcttaaacattttttgttttattcgtgaaataataggaaatatattgatgcttcaatattgattgtagaaacagatttgcattttcaaaagattccattagatgcagagcggagtttggatttaaaagaaaagagattgtgtgtatggaacaggatggaaggagatggggccaaacagacaat

SEQ ID NO: 119659 - DNA, 558 bp, Homo sapiens
ggacccagacaacagactgaccctcagatacctagcttccagaccagcctctgcagacmtaaactctagaactattccagtaccagaccaggcttggaatccccacatgccagaatggcacccacagaccaatgctccaggcccactccagtggacctcatcactaggttgacccctgagtacccaggctctatgcccaccctcatggactcaggcactaaaccagctcaccttaagaaacataactgcaagcccacccacagaccctgccatccagcccacccagagtctctggatgggctggctggtgaaggactttcgttgccaaaactagtctgtaaagattggaagaggtgcctactccttctaacacagagataacaatacaaggccataaggatcacaaataatcaaggaaacatgcccccaccaaaactaacaaacaaacaaaaaataaataaataaagcactggtaaccaaacctgaagaaatggagattacctaacaaagaattaaatatgatcaacctgaagctcagtgagctatagagaacgcaga

SEQ ID NO: 119660 - DNA, 558 bp, Homo sapiens
ggacccagacaacagactgaccctcagatacctagcttccagaccagcctctgcagacataaactctagaactattccagtaccagaccaggcttggaatccccacatgccagaatggcacccacrgaccaatgctccaggcccactccagtggacctcatcactaggttgacccctgagtacccaggctctatgcccaccctcatggactcaggcactaaaccagctcaccttaagaaacataactgcaagcccacccacagaccctgccatccagcccacccagagtctctggatgggctggctggtgaaggactttcgttgccaaaactagtctgtaaagattggaagaggtgcctactccttctaacacagagataacaatacaaggccataaggatcacaaataatcaaggaaacatgcccccaccaaaactaacaaacaaacaaaaaataaataaataaagcactggtaaccaaacctgaagaaatggagattacctaacaaagaattaaatatgatcaacctgaagctcagtgagctatagagaacgcaga

SEQ ID NO: 119661 - DNA, 558 bp, Homo sapiens
ggacccagacaacagactgaccctcagatacctagcttccagaccagcctctgcagacataaactctagaactattccagtaccagaccaggcttggaatccccacatgccagaatggcacccacagaccaatgctccaggcccactccagtggacctcatcactaggttgacccctgagtacccaggctctatgcccaccctcatggactcaggcactaaaccagctcaccttaagaaacataactgcaagcccacccacagaccctgccatccagcccacccagagtctctggatgggctggctggtgaaggactttcgttgccaaaactagtctgtaaagattggaagaggtgcctactccttctaacayagagataacaatacaaggccataaggatcacaaataatcaaggaaacatgcccccaccaaaactaacaaacaaacaaaaaataaataaataaagcactggtaaccaaacctgaagaaatggagattacctaacaaagaattaaatatgatcaacctgaagctcagtgagctatagagaacgcaga

SEQ ID NO: 119662 - DNA, 558 bp, Homo sapiens
ggacccagacaacagactgaccctcagatacctagcttccagaccagcctctgcagacataaactctagaactattccagtaccagaccaggcttggaatccccacatgccagaatggcacccacagaccaatgctccaggcccactccagtggacctcatcactaggttgacccctgagtacccaggctctatgcccaccctcatggactcaggcactaaaccagctcaccttaagaaacataactgcaagcccacccacagaccctgccatccagcccacccagagtctctggatgggctggctggtgaaggactttcgttgccaaaactagtctgtaaagattggaagaggtgcctactccttctaacacagagataacaatacaaggccataaggatcacaaataatcaaggaaacatgcccccaccaaaactaacaaacaaacaaaaaataaataaataaagcactggtaaccaaacctgaagaaatggagawtacctaacaaagaattaaatatgatcaacctgaagctcagtgagctatagagaacgcaga

SEQ ID NO: 119663 - DNA, 599 bp, Homo sapiens
tcttcttctcttgaaagcatgaaggaatatgatacttatcattatctctgtccaagcagtgatactcttccacttcctattccagtctacacmataatagtggtttatacttctctttccctcatctttctcccttattttctttgagggctaccagagatcagccttcaatgttggttgtaccttcaggtgaatttagttccaggagttcatgcatgtaatatattttcttctgtaatcagcttatcacagattagcaatctcaggctttctagcatcttcagtgggcttcatattttccacatcactttgcattaccattgtcaatggatacagcccaaccctttcacaaacatccatattgcagaacaatttttgttctccttagcaccttttgtagcaagccaatttaggccaaattagatctcccctgatttaattaaaattcctgctgttcaggagacattttgtgacatgcagccagcatgcccagcagaaatccgtgtgtgtgtgtgtgtgtgtgtgtgtgtgtgtgtgtatttaaaaggtgctttcgtggtttgtaccttctgggtgctagagttttgacctagcaaaaa

SEQ ID NO: 119664 - DNA, 599 bp, Homo sapiens
tcttcttctcttgaaagcatgaaggaatatgatacttatcattatctctgtccaagcagtgatactcttccacttcctattccagtctacacaataatagtggtttatacttctctttccctcatctttctcccttattttctttgagggctaccagagatcagccttcaatgttggttgtaccttcagrtgaatttagttccaggagttcatgcatgtaatatattttcttctgtaatcagcttatcacagattagcaatctcaggctttctagcatcttcagtgggcttcatattttccacatcactttgcattaccattgtcaatggatacagcccaaccctttcacaaacatccatattgcagaacaatttttgttctccttagcaccttttgtagcaagccaatttaggccaaattagatctcccctgatttaattaaaattcctgctgttcaggagacattttgtgacatgcagccagcatgcccagcagaaatccgtgtgtgtgtgtgtgtgtgtgtgtgtgtgtgtgtgtatttaaaaggtgctttcgtggtttgtaccttctgggtgctagagttttgacctagcaaaaa

SEQ ID NO: 119665 - DNA, 599 bp, Homo sapiens
tcttcttctcttgaaagcatgaaggaatatgatacttatcattatctctgtccaagcagtgatactcttccacttcctattccagtctacacaataatagtggtttatacttctctttccctcatctttctcccttattttctttgagggctaccagagatcagccttcaatgttggttgtaccttcaggtgaatttagttccaggagttcatgcatgtaatatattttcttctgtaatcagcttatcacagattagcawtctcaggctttctagcatcttcagtgggcttcatattttccacatcactttgcattaccattgtcaatggatacagcccaaccctttcacaaacatccatattgcagaacaatttttgttctccttagcaccttttgtagcaagccaatttaggccaaattagatctcccctgatttaattaaaattcctgctgttcaggagacattttgtgacatgcagccagcatgcccagcagaaatccgtgtgtgtgtgtgtgtgtgtgtgtgtgtgtgtgtgtatttaaaaggtgctttcgtggtttgtaccttctgggtgctagagttttgacctagcaaaaa

SEQ ID NO: 119666 - DNA, 599 bp, Homo sapiens
tcttcttctcttgaaagcatgaaggaatatgatacttatcattatctctgtccaagcagtgatactcttccacttcctattccagtctacacaataatagtggtttatacttctctttccctcatctttctcccttattttctttgagggctaccagagatcagccttcaatgttggttgtaccttcaggtgaatttagttccaggagttcatgcatgtaatatattttcttctgtaatcagcttatcacagattagcaatctcaggctttctagcatcttcagtgggcttcatattttccacatcactttgcattaccattgtcaatggatacagcccaaccctttcacaaacatccatattgcagaacaatttktgttctccttagcaccttttgtagcaagccaatttaggccaaattagatctcccctgatttaattaaaattcctgctgttcaggagacattttgtgacatgcagccagcatgcccagcagaaatccgtgtgtgtgtgtgtgtgtgtgtgtgtgtgtgtgtgtatttaaaaggtgctttcgtggtttgtaccttctgggtgctagagttttgacctagcaaaaa

SEQ ID NO: 119667 - DNA, 638 bp, Homo sapiens
cacagatggtcatccaggtcctactgagccacttctagggtagggcattcaggaatttgtcattttaagtaaagtcaccactagcaccaccaccaaccaaatggtttacttctcagaatttgaaatatttgaaccaagatagtctcatctgactttgaaagcttttcatcctcagaaccacattttgtcaccaaatgctattttcttagtatggccaagaataaccatacaaattagttatgatcatcctgggaataaatggaatgtttttccctcttccttctgatttttccaaaagaggctcagtaactgcatgaagcaatcactcctcccgtccttttcatctgtgtttctttcaatatttatggagtttttagcaatagtgtatcacacaatttagaccatgatctgagagagttgttcggaaatgtttgttcctatccaacmatcttatatggccaaaattactactccatgagtactggttttgcatccttggtataatgaaagcaaagagcattggctgaattgtataaaatgatatttttgtgtatctgttttttctactagttctttgagagcaggaattatattttagtcaactacccccatcccctagagcactgcctaatcacaat

SEQ ID NO: 119668 - DNA, 575 bp, Homo sapiens
tatcactttgtgtcagacatgattcttaactttagaaatctacaataataatgattatgagagtagacaaatttcttgcttttagggaacttactttctagggaaataaggcagaaataaacgaataagaaaataaatatataacattccaaacaaaatttggaatgagtgttaggaacgttcattcaacataattatttcacatttattatgtgccacgtgctatctcagatcttgaaaatacaaagaagcaaaaaacgttctacccttgggaatttacagtggsaaacatacacaggaaaggttaaaaaaaaagtttcgcagaacagatgtaaaatgcaggaatttatgacattctggttactcagattctatcctagtgtcatgataattcggaagagaccatcagggtgagccatctttgattcatcctcagagctgggggcaatgttgtagtccagtaaatacagtacctgatcaattggcagccacatgcttgatgatatgacttctcattactgaatttagatatatttttataatgtcaaagcaactgagaagtgaaagagctatgg

SEQ ID NO: 119669 - DNA, 563 bp, Homo sapiens
tccgtcagtctcggcctgccaaagtgttggtattacaggcrtgagccaccgtgcccggccaaaaaatgttttttattaaagtaagaattttagagggatccatttccaaggttttctatattttaatggcccctgcttggcctttgcttttttttttttggcaccaggcaccttagtggaaatagggcaggacaggctcaggagtcctgggtctcaggccggctctcccacttgctggctgagtccctccccttccccaggcctcatttccacatccgtgagatgagcaggttagcctagatcacaaatcccccgcaataatatgaaaaaatgagaaacatgtactcatcatatgtatatattcatttataaactgtatacatttactactatactaatctgatataatatcaaaataaaaaaatttaaggacaagctaaaaactacataaaatatttaacaaacaattttccctttaatggatatagtaagatttcttccttacactatgctattgtttacatatagctaataatattgtaagggaaagcaatgtggttgga

SEQ ID NO: 119670 - DNA, 606 bp, Homo sapiens
agggtgtggggcaaggggagggagagcattaggacaaatacctaatgcatgtggggcttaaaacatagatgaggggttgatgggtactgcaaaccaccatggcacatgtatacctatgtaacaaatctgcatgttctgcacatgtatcctagaactcaaagtaaaattaaaaaaattagtgctaaaagaattgaagctgtgaaagaacaaattaaatcacaagtcaaagamaataagaaatgaggtcaagaaagtatttgaaagaaagagatataaaaacaattaaaattttttaaaaaatagtcatagataatttcataagatatataaaatacggaaatatgaaattttaatattcttaaatgaaaaattcaaatggatttgagttaaagtattagatatagcatatgagacatgataaatgaacaaactaaaataggattttttccccctacaaagcaaaacaattcaacagaaagaaatgtaatttttaaatgtaactgaaaaaaaatctactgtaaacaaaattttgcagtgtcacagttcatacataaagtaacacgaagtgacccacagattgacatatcacaggaaaagtagtgtttt

SEQ ID NO: 119671 - DNA, 606 bp, Homo sapiens
agggtgtggggcaaggggagggagagcattaggacaaatacctaatgcatgtggggcttaaaacatagatgaggggttgatgggtactgcaaaccaccatggcacatgtatacctatgtaacaaatctgcatgttctgcacatgtatcctagaactcaaagtaaaattaaaaaaattagtgctaaaagaattgaagctgtgaaagaacaaattaaatcacaagtcaaagaaaataagaaatgaggtcaagaaagtatttgaaagaaagagatataaaaacaattaaaattttttaaaaaatagtcatagataatttcataagatatataaaatacggaaatatgaaattttaatattcttaaatgaaaaattcaaatggatttgagttaaagtattagrtatagcatatgagacatgataaatgaacaaactaaaataggattttttccccctacaaagcaaaacaattcaacagaaagaaatgtaatttttaaatgtaactgaaaaaaaatctactgtaaacaaaattttgcagtgtcacagttcatacataaagtaacacgaagtgacccacagattgacatatcacaggaaaagtagtgtttt

SEQ ID NO: 119672 - DNA, 284 bp, Homo sapiens
ccctggctgaaatatttgtagtctatttatgacaaccctgacagctgttttttgttttgtttttctttttttctaatttcagtttctattttggattcaggggatacatgtgcaagtttgttacatgggcatattgtgtgatgctgatgtttgggawatgattgatcccatcacccaggtagtgagcatagtaccaaaagagaattttgcaaccctttccaccctctccctctaccctctctactagtccccagtatctcttgttcccatctttatgtccacac

SEQ ID NO: 119673 - DNA, 510 bp, Homo sapiens
tgaaactttttgagaggctgcctgcgacttctgtgcttcctttcttatctcagccaccttctttctgtagtagagaaattctctgctattcttatcctgcaaaaatgcaaatgccgggttttccttgtagtcctctatagctacttttttctatcgcggggccttcttctgccacaaagtgggccaatttctctattactttccgagtctcggttccctctgagggtgaaactttgagctgggattacaggcgcccaccacgacgcccggctaattttttttttttttttgkatttttagtagagacggggtttcacagtgctggccaggtgggtctcgaactcccgacctcaggcgatcctcctgccttggcctcccaaagtgctgggattacaggcgtgagccactgctcctggcctctacagtgcagttctatgggaagaaattcactttattttataaaatgttactgtaaaaaaataatataaaaacgtattttcaaggcagtta

SEQ ID NO: 119674 - DNA, 656 bp, Homo sapiens
tgggttaagaagataatttgaagcatataattctatatcaacatttgtcaataccctcatgatacttgggctgtcacaataagcagaatcactgaatgactgtgacagaactgaatctaatccttctcaatcacactacatcctactccagtagctacatgaagtgaaacatgcttgtgctgatcatcttatgaccttcccaaaattttaataatttacaagctattcaaacctcctggttaccactttctttttgtgaggaaattggaatgaagtaccttattatccwaaaattgtttccatagataatatttatagtttataaattaaagatatttcagaatatttgtacacatcgcatacacatttacaaacaaagcatagttttcaattacaaaattaatagatatctaataattctaaaagagactttatagattcccttggcattttatgtccctgtagtgtgttactacatatgctatgtggaaggaaaaattatattttgacagtttgcttttctcaggttgttgcttagcagtgcagatgctatcatttctttcattgtttttatcacatgcataattttcaaagacacagtgcttgtaatggctttaagaaattattaccttccagaattttactatactattagt

SEQ ID NO: 119675 - DNA, 618 bp, Homo sapiens
aacagaaaaccaaagaccacgtattctcactgggagccaaacattgagtacacatggacataaagataggaacaagagacactagactactcgtggggagaaagggagaggtggggagagagggagaggaggaaaagggctgaatgactacctattaggtactatgctcactaccagggtgacaggtttaatcataccccaaamctcagcatcatgtgatatacctttttcacaaacctgcacatgtaccctctgtttctaaaataaaagttgaaaaaaaaaaaagatgtctccttgaaatactcatttgtgtttacctgaagtcaatgagatgaagtactttttcatttgttgttgtctatttcgtcttttatgaagctcgcattgaggtcctttgtctatttccatctagttgttttcttacattttgattcaaatatctgctttttgtttgaggtttaaaaattgatcactcagctcaattattttaaaaattagttgattttttatcttaaataaaaataaatatgaattacttttaaagtaccattatcacaaatattttgccacttgagctctaaatagatcccatattctataataattttcttattaacc

SEQ ID NO: 119676 - DNA, 670 bp, Homo sapiens
aataaactggtaggaaaacttaaatggtaattttcgacaagttgctcctggctgtgtatggattttaacttgagaatgagaaactcaaagttagacttttgtggatttaatctctaggaatcccaccatattctcagagtgaagcaatgaaaaagatgatctmtaactgtttctggggaaggaaagagtacccattgtgaacaatgctgtgcaagaaatagactcgcggaagaggagtacttataaagtccaaagtcaaagtgagacaaaaacaaagacagcagaatttggagcctctggcaccagtagctccaccaaattttgaacagagactgattcttagccagataaacatgggatctcacactgaagtcctatttttcctattccacaacattggcagatttcaacaccaccacattataagacatgtttcaaagcaaggaaaacacattttgaaaaggtaaagcaatcatcaaaaccagacagatatatgatacagacattcaaattatcatacaagtcatttaaaataactatggttaatatgttaaggacactaatggaaaaactagataacatgcaaaaatagataatataagcagagagataaaaactctaagaaatagtcgaaaagaaatgctggaatgaacactataaccaaaataaa

SEQ ID NO: 119677 - DNA, 670 bp, Homo sapiens
aataaactggtaggaaaacttaaatggtaattttcgacaagttgctcctggctgtgtatggattttaacttgagaatgagaaactcaaagttagacttttgtggatttaatctctaggaatcccaccatattctcagagtgaagcaatgaaaaagatgatctataactgtttctggggaaggaaagagtacccattgtgaacaatgctgtgcaagaaatagactcgcggaagaggagtacttataaagtccaaagtcaaagtgagacaaaaacaaagacagcagaatttggagcctctggcaccagtagctccaccaaattttgaacagagactgattcttagccagataaacatgggatctcacactgaagtcctatttttcctattccacaacattggcagatttcaacaccaccacattataagacatgtttcaaagcaaggaaaacacattttgaaaaggtaaagcaatcatcaaaaccagacagatatatgayacagacattcaaattatcatacaagtcatttaaaataactatggttaatatgttaaggacactaatggaaaaactagataacatgcaaaaatagataatataagcagagagataaaaactctaagaaatagtcgaaaagaaatgctggaatgaacactataaccaaaataaa

SEQ ID NO: 119678 - DNA, 580 bp, Homo sapiens
ataacaaaatatttttcaatttaaattttcaattatttgttgcctatatatagaaatgcaattgatttttataataatcttgtacttatttgtgttctgtaaccttacctttctttgtagactatatgagatatatagacaatcatgtcatctgaaaattagacaattttactattttctttccaatctaaagaactttgtttattttcttacccttatttcactgactagagtatctggtacagtgttgaatgaaagtggtaaaagtagaaattcctcttgtttctaatcttccgggaaaagcattcagtcattcactattaagtatgatgctagctataagtagttcataaatgccctatcaagttgagaaagtatctttatttctactttgaaagtttttatcatgaatgtatcttgaattttgtcattatatttttctgtctattaagatgataatttttaaagaaatttagctaatgratatgatgaattacattgattgactcctcaatataaaaccaaacttgcagtcctagggcaaaatctacttggtaataatttattatctttcatattg

SEQ ID NO: 119679 - DNA, 557 bp, Homo sapiens
tcctttcaaaatattattgctctttgacaatgcacctggtcaccaagagcactgatggagaagtacaaagagattaatgttttcatgactgctaacaaaacattctattggcagcccayggatcaaagagtaattttggctttcaagtctttttatttaagaaatacattttgtaaggctatagctgtcacagatagttatttctctgacagatctgtgctaagtaaattgaaaatcttctggaaaggattcaccattctagatgccatgaaaaatattcaggattcaaaatatcaacattaagaggagtttggaagaagttgattccaactttcatggataacttggaggggttcaaaactcagtggagaaagcaactgcagatgtagaaatagcaaaagaactagaaatagaagtggtgcctgaagttgtgactgaattgctgcaatctcatgataaaacttaaacagatgaggagttgcatattttagataaacaaagaaagtttcttgagatgggctctacttctggtaaagatggtgtgaacaatgttcaaa

SEQ ID NO: 119680 - DNA, 621 bp, Homo sapiens
caatatctgggacaaaggaggaaattttactacctattctacctacattacaaagattacaagaaaaattttaaacagtgttacactagcaaattgacaatgtagatgaaatttacatttctactagaaagcataatagaattttgtttagaatagtattaaatctaggaatcattttgggggaaatgtgtattttaataaaattaagttttctttttaaattcaggagcatgctgtatctttctaattacttaggtattactttttctcatcaatagtttttcatttttagtgtactgatcttttacatatttatatattttaatcatctctatcattttatrtttttggttttataaatggtatttgcattatgctgggtccagtcaatagaaagaaagcgcacagtaatttaaacagaagtttaatgtgaagatcattgaaatctgttgaaagggtaactcagatataagggtagagtaggactgaaagagattccccaggaaaacataaacttggtaggaaagctttcttaccaagattggggttcaaactaaagaataagtgtacttgcaacccactagaaaagagagaagtttgctagttttcctgggccttagg

SEQ ID NO: 119681 - DNA, 478 bp, Homo sapiens
tgagctgccatgtatgaagtttggccatcctgaagcacagatgcttagaaaagatcctgtggataaaccataaagagaatgacatatgccctgaggagatccagctgtctggtccccaactatttgagtcttcccagcccaggcaccagacacataagtgaggaagcctttgtgactccagccccagcctctgtaactgcttgagagagactgagtgggaaccacccagctgagcccagcctcagtcaacctgctgaccaggaggtgttataatagtcataacaataatagaaataaatgattgcaatggttttacagcactaaattttgggggtgatttatttcaggtagaccttttttatttttaacatagcaatggataactggaacatgttccttgtgattctcaaattttcagtaaagtctcatatactcaagaaatgsttgcgataagtgcgtatatatgtaaggcagagac

SEQ ID NO: 119682 - DNA, 406 bp, Homo sapiens
tgcagctggagcatttggggtgtctcctaggtcctgcaggagcagtctgcttccttcagagggtctgtgaatcctctcaggattcctagtttgttcttggagttgatctggagctaaaatgcatacatgtttttaatgacatctagaatagtgaatcctttctgggaggttttcaatagactttgcctagattcatcagaggaatcactatctattgcagctatagccttatgaaacggatttctgaaataataagacttgaaagtcaaaatgactccttgatcattggactgcagaatggatgttatgttagcatacatgaaaacaacattaatatcctgtacctyctcatcacagctcttaggtgaccaagtattttgtcaaagaacatcaatattttgatagg

SEQ ID NO: 119683 - DNA, 660 bp, Homo sapiens
tgcacatgaactgtgatcagcctcaccgatgtctctttaataaaaaattgttttaatacaaatattctcagtataaaattgataatataaatatatgctgctttttttttttggtgaacagtcagaaagtgtagcrttttcagtgggctaatctaaaagatatactgagagagaatgtttttaaagctagacaaaatgttatggctaacatttgccaaatgtttggcagttaataacatttaaatgaagaataaaaatacactttgggaggtcgaggtgggtggatcacttgaggccaggagttcaagacgagcctgtccaatgtggtgaaaccctgtctctactaaaaatataaaagttagccaagtgtggtggtgcatgcctgtggtcccagctacacgggaggctgaggcaggaggattgcttgagcccaggaggcagaggctgcagtgaactgtgatcatgccactgcactccagcctgagtgacagagtgagaccctgtttcaattttttaataatgtaataaaaggatgagtattcagaatatctaaagagcatttacaaatcaataagaacaaagaactatggatacaagcaagaaatttaccaaagaagtacagcaacctcactagcgtttagataaatacaaaagcaatca

SEQ ID NO: 119684 - DNA, 581 bp, Homo sapiens
atatcttacaacaaccttatgaggtagttactattacaattagctcactttatagataagrcacagagagattaagtaacttaatactcaaaatcacataccttgtaggtaccatcatggtttttgaccatacaagtaacagctggcttgacctcagttggaaggctcctttggatcaagttattatcattgctttaccattcatatggaatcattctactgttcctcatgatgcatggccctgagatgccatgggagtgtctggcccatacagagctgaagagaaataccagtaagtggagagtcttaaaagcagtgccaggggattttatttaatttgacaagcagttgagagtcaccacgcaaaagtgacactatcaacatcatatttaaaggagaaagtgactgcaatcatataaaaattaagggagtccagtgaagaggaggcatttgttcaggtgttaagggataagagctgagaattgaaaaaggaggtaaatccaccggtacaatgcatggtaatatccgtatcgaaatatgaaagataaggaagcaagagggagaaaagccaaagctgccta

SEQ ID NO: 119685 - DNA, 581 bp, Homo sapiens
atatcttacaacaaccttatgaggtagttactattacaattagctcactttatagataagacacagagagattaagtaacttaatactcaaaatcacataccttgtaggtaccatcatggtttttgaccatacaagtaacagctggcttgacctcagttggaaggctcctttggatcaagttattatcattgctttaccattcatatggaatcattctactgttcctcatgatgcatggccctgagatgccatgggagtgtctggcccatacagagctgaagagaaataccagtaagtggagagtsttaaaagcagtgccaggggattttatttaatttgacaagcagttgagagtcaccacgcaaaagtgacactatcaacatcatatttaaaggagaaagtgactgcaatcatataaaaattaagggagtccagtgaagaggaggcatttgttcaggtgttaagggataagagctgagaattgaaaaaggaggtaaatccaccggtacaatgcatggtaatatccgtatcgaaatatgaaagataaggaagcaagagggagaaaagccaaagctgccta

SEQ ID NO: 119686 - DNA, 434 bp, Homo sapiens
tgccaggggattttatttaatttgacaagcagttgagagtcaccacgcaaaagtgacactatcaacatcatatttaaaggagaaagtgactgcaatcatataaaaattaagggagtccagtgaagaggaggcatttgttcaggtgttaagggataagagctgagaattgaaaaaggaggtaaatccaccggtacaatgcatggtaatatccgtatcgaaatatgaaagataaggaagcaagagggagaaaagccaaagctgcctacaaggttataaactctgtatgcaggaaaatgtatgctagagaaggaagacattttcattttaaaaacttcygaaatctgaatttcttcactatcacttttctgatatatacgtgcgttttgtccctgacatgccattcaccagtaatctctaaacaagtaaaatatgat

SEQ ID NO: 119687 - DNA, 571 bp, Homo sapiens
  misc_feature (1)...(571): n = A,T,C or G
tttaaaattagcatatagtaaggcttacttgtgctgtaaagttatatgggatttgacgtatgcatgctgttgtatatccactattgcagtataatgcagaatagtttcgctgccctataccaccctctttgcttcacctgttcaacccttacccctctgaaaatcctggcaaacatttgtctccttcacatctctatagttttggcttttctaaaatgtcrtataaattgaatcatgtagtatgtaaactttccaggctggcttatttcacgtaacaatatgcatttaagattattctgtatctttgtatggcttgatacctcatcctgttttataacttagtagtatgcaattgtatgactgtaccacagttgtttgtccactcctctatttaaggataacttggttgcttacagtttttgatcattacaaataaagttcccataagtattcacttgtaggtttttgtgcgaacatatgttttttgagcagttgggtaaagacctaggagagcaaccgctnggattgtatggtgaaactgggtttaggtttgtaagaaacttccaattgt

SEQ ID NO: 119688 - DNA, 469 bp, Homo sapiens
ttctctcatatgtcaggctataaatsgcagctacatcttggacctcaggtggctttcatatagaatatctacatataaccttttttgtggtctctctgagtaactcatttggacttcttcgcagcatacaactgaaagcaagacttctcaaaaagcaaaccctgagtgcgtgacatttttatgatttatcctcagaaatcacacagtgtcacttttcccctatgctattggctaaggaagtcacaaaaatcctgcaaggggtatagacccagccctgcataagaggagtgacaaatagtcctattgtaagaataacatattgggtggaatagagattggcatggccatcttttgaaactacactctgctgtaatcctccccataggcacacaacacaacttacaaatctccaatatgaaaatacacttattttctcccccaatgtccccagtactcagctcatcatggg

SEQ ID NO: 119689 - DNA, 469 bp, Homo sapiens
ttctctcatatgtcaggctataaatggcagctacatcttggacctcaggtggctttcatatagaatatctacatataaccttttttgtggtctctctgagtaactcatttggacttcttcgcagcatacaactgaaagcaagrcttctcaaaaagcaaaccctgagtgcgtgacatttttatgatttatcctcagaaatcacacagtgtcacttttcccctatgctattggctaaggaagtcacaaaaatcctgcaaggggtatagacccagccctgcataagaggagtgacaaatagtcctattgtaagaataacatattgggtggaatagagattggcatggccatcttttgaaactacactctgctgtaatcctccccataggcacacaacacaacttacaaatctccaatatgaaaatacacttattttctcccccaatgtccccagtactcagctcatcatggg

SEQ ID NO: 119690 - DNA, 613 bp, Homo sapiens
cattctatcataaagacacatgcatttgtatgttcattgcagcactattcacaatagcaaggacatggaatcaacctaaattcccatcaatggtaaactggataaagaaaatatggtacatctaccccatggaatactatgcagccataagagggaacaagatcatgtcctttgcaagracatggatggagctggagaccattatccttagcaaactaaagcacgaacagaaaaccaaatatcacatgttctcacatgtaagtgggagttaaatgatgagaactcatgaacacaaagaggggatcaagggtcccctgaggatctacctgaggatcaagggtgggacgaaggagaagatcagaaaaaatagctatttggtactaggcttagtacctgggtgacaaaataatctgtacaacaagcccctgtgacaagagtttacctatattacaaacctgtacttgtactcctgaacctacaataaaagttaaaaaagaaaaaggatctgcttcatgtacatatggacaatagccaatgatgagctgaagctggttggtaccaacttgtaagagatgattttttgcatctctttcccattttcatgtgcagtgat

SEQ ID NO: 119691 - DNA, 613 bp, Homo sapiens
cattctatcataaagacacatgcatttgtatgttcattgcagcactattcacaatagcaaggacatggaatcaacctaaattcccatcaatggtaaactggataaagaaaatatggtacatctaccccatggaatactatgcagccataagagggaacaagatcatgtcctttgcaagaacatggatggagctggagaccattatccttagcaaactaaagcacgaacagaaaaccaaatatcacatgttctcacatgtaagtgggagttaaatgatgagaaytcatgaacacaaagaggggatcaagggtcccctgaggatctacctgaggatcaagggtgggacgaaggagaagatcagaaaaaatagctatttggtactaggcttagtacctgggtgacaaaataatctgtacaacaagcccctgtgacaagagtttacctatattacaaacctgtacttgtactcctgaacctacaataaaagttaaaaaagaaaaaggatctgcttcatgtacatatggacaatagccaatgatgagctgaagctggttggtaccaacttgtaagagatgattttttgcatctctttcccattttcatgtgcagtgat

SEQ ID NO: 119692 - DNA, 617 bp, Homo sapiens
tcagacttaatattctcatttagtatttcataaacttctacaagtttcccaaggagagcaagtactttttttctccaaatcctttttatggaaaactagaatgtgcccagaggaatcctcaagccatattcattcacacatacaaagagaaaaagctaaagttgttcactaacaagttgataaactgcaacccagccaagagttgattcttatggaattgttttgctatgtattgaaatgacagaagtataatgtctgttgtttctgtgtatggattacatctagcaaagtataggataacagaaaatcatattatcctactaaaaaaatctgttatgcttgttttttattttccattaaacacgttggcttaagtatgtgtaatctgataaaggacatatcacctggatgtttgctgaagggatgacagaggtttagtcttgtgggtcaaatrcaggatggtattttggaagtgcatgctaggaaagtgcaaggatccggttccaaaactcattttttttaaagaggtacttgaatgccaaagagtctgagtgttacattgccaaggtgctctctaaaggcaggggtcatatagtgtacactcacaaagacgacag

SEQ ID NO: 119693 - DNA, 423 bp, Homo sapiens
tcctttagagtcaaataggtgagttcatttgaataagttatcaaatgtatttatctttattttaataatttgcttcatcctctgcatcctttcgttasaataatcacgtcttcaaattaaggcatttggttacaaaagtgtggggaaaaggtggaaatgcagagccttaaaaaatccctctgtaaatgtatctgtaaattcatggatatgaattatgctcatgagataactgcttcattaataaaggaaaaagtgactacaaaaacactagaagagtggtagagggatttgagttttcaaaagttgaatattacaataacggatgatgtctattataaaggatgctgaatttattttcaaagtattccaaaaatctcaaatctggagtattgttctcagtgacagggagacccagttgaattc

SEQ ID NO: 119694 - DNA, 584 bp, Homo sapiens
ctaaataatatctggacatggcttttcatttgaaatcctcgaattacccatgaatagagaaaaggtcacatgtattgaccagttgactctgcagttttgaaagtggtgatgcttagtcagtatggggtgccggacagttgtatcacccactgttttcccaaggttcagccttagtctcactgtagggtgtctattccaagcaatatgggcacagtgtgattttaacaatgttaaaagcttgcctaccaccataccatgtattgtttgaaatcccacaattagattcagtcctttgggctatatattttttaaatgtttcttagcataatctaattgcttggaagagctaatatattacaactagttatcagtaatcatttattcatttacttatttctattaatcctatcccctcccaaaacatgctctracaaaatccttcagttcagaactagttcccattccctcattttgcgaaattcttgcataaaacctagatatatcgcttttacatggtagtttgtaacgtgccttgatgaacgcctgctttttccattaaatctgctccacccacattcagtctt

SEQ ID NO: 119695 - DNA, 635 bp, Homo sapiens
acaacagttccatgaatatattttagaactcaagtagaaaagaaattcactgggagaatgtgtggtagttcataatattaacagaaggctggaaaaaatagactcagaatgttcatatatcaggaatatccaggtagcaggaaagaaaggcaacattatgcctcagtgatggtctgattaggatattactgctggcactaataccactgagtayttatcactgtttccattgctgaactgtcacagtgatgactgtcaatactgaaatgaaaactgtctgcatatcctcacatcatttgatcactttctcaagattcaaagctgaaggtacgagcatttaattctaagagtctgagtatccaccccctagccagccacaggaaccaaaacagggagaagctttcattggcttctgatttaatagtttttccccctaagacatgcagatttgagaataaacttgaagtggaaaggttgttctgattccagttaacatatacatatcaccaaaagtagctgttctacagtatgaatttcacaattagatacttactcaacttatgtgaaatcatattttgccaaaaggacatgcacaaaaatgttcagagcagcctattcatagcaggcaaaaactg

SEQ ID NO: 119696 - DNA, 547 bp, Homo sapiens
cctgattctttttaattggtacttagctctaaataacattagcttatatccactttctcaaaatagaatactatatatcatttttaacacatcatattctctcatcttccatatccatcagcaaattcttgtgatactaccttttacagatctctaggatccaccctctttaattccacattctcctccctagagcaagcaatgtcaatcatctatgggggcaacggcagggcacatctactaacttgtccctctttatcaactcttgtccatttctaccatggcaattggttaaaaaarattctaattagcccaagatccttacttaaaatgcttaagtttttaataaaagaatttaataaaatccggcattattctatattactattagtttatgtgttctaccacactggtcttctttcagtcacacaagttaacttcagcctttaccactggaccttttaaatgttccttcctctgtcttagattcattttctcttcatttatctgtttattttctatttctttgtatcaaagtttaatttct

SEQ ID NO: 119697 - DNA, 547 bp, Homo sapiens
cctgattctttttaattggtacttagctctaaataacattagcttatatccactttctcaaaatagaatactatatatcatttttaacacatcatattctctcatcttccatatccatcagcaaattcttgtgatactaccttttacagatctctaggatccaccctctttaattccacattctcctccctagagcaagcaatgtcaatcatctatgggggcaacggcagggcacatctactaacttgtccctctttatcaactcttgtccatttctaccatggcaattggttaaaaaagattctaattagcccaagatccttacttaaaatgcttaagtttttaataaaagaatttaataaaatccggcattattctatattactattagtttatrtgttctaccacactggtcttctttcagtcacacaagttaacttcagcctttaccactggaccttttaaatgttccttcctctgtcttagattcattttctcttcatttatctgtttattttctatttctttgtatcaaagtttaatttct

SEQ ID NO: 119698 - DNA, 590 bp, Homo sapiens
actatgaattcctgaaatagtagtgagagagaaatattacattgttcaaaagctagtttacatacagcttatactcatatctcgagatgtttcctgcaaaatattttcacatgagcatgttactgaaatttttttccctaagactgttttgcaaattctaaaaaaaaaaaaaaaaaaaagcagctgagtgtctccactttaggaaacaagtaatatatgccacatatttaataaatggctgtttgggaaatataaagtataaataaacttgtattttacttatacttttataagtgagtcagtggtcatgttcaagaagactaagctgaatgaagaagagcgctctaaagggcttgtggccctttgtaaatgtctccctyagctgagtccctttctttctctaggtgttgtcaggatattagaaagttaggcaaatttggacataacacttgaaccaacttaacagtaaccattttatttctgtacttccttcaaagagcagtaagatgttctctcctctcttccatgtgccttgtcaccatatttttagggagacattctattctaaaatccagcatctaacaaatttc

SEQ ID NO: 119699 - DNA, 588 bp, Homo sapiens
ttactgagcatttttaccatgaaaggatgttgaattttgtcaaatgctttttctgcaccacttgggatgatcatgtggctttctcccttcattctgttaatgtggtgtaytacattgatcagttttcatagattgaatcatccttgcattccaggaataaacctcacttagccatagcgtataatcttttaaatatgctgttgcacttagtttactcatattttgttcagaatatttttgcatcaatgttcataagggatattggtctattagttttcttttcttgtagagtctttgtctggctttggtatcagggtaatgctggcctaatagactgggttagggtgtaatctcttcaatttttttggaaaagtttgagaaggattggtgttagttctttaaatgtttggtataattcactggtaaaaccatcagatccagggcttttcttttcttttaagagatggggtttcttatgttgcccaggctggtcttgaactcctgggctcaaacgatcctgtcactgcagcttcctgagtaggtgagactacagttgcatgccactgtgcagggattttatttcatggg

SEQ ID NO: 119700 - DNA, 485 bp, Homo sapiens
  misc_feature (1)...(485): n = A,T,C or G
gtaaatgggaaaattggtagataaaacacgtttggagaacgatttcatttctttaccatttttgtagggtctgcaaagatgctttgaggaagrcacttgccaactttcagtttgctagagaaaattactttaggatcaaatcataagttctgaatcacaaatgaactcaaaatgtgcattgatagcatcattaggtagcagtacggctattgattttcagagttggattggccttcccctgacctttcacccattgttccctttgcccacacatggcaattctactttgaaaaatacagtattttctccattcaccatctctaattcagaccatcggtcaagcttactctggttttatcctgttcatataaaaagaatcacccttttttgccctttgccagctcttacattactagtgtctgctttatggaatcaagagcaaataacttcctacctgcagccaaaatgtctaaaagcagannnnn

SEQ ID NO: 119701 - DNA, 599 bp, Homo sapiens
cctactatgtgccatgcaccactttaagtactttacatgtatgaattcatttaatgtcttaacagtcctatgaggtacatactaaaaaaaaaatcattcgcattttttcagatgaagaaactcaggcctagaaaactagtaaaacttaccaaagggcaggtaactaaaaggtagcagaggccggacgcagtggatcatgcctgtaatcccagcactttgggaggcccaggcaggcagatcacctgaggtcaggagttcaagaccaacctggccaacatggtgaaactccgtctctactaaaaaaaaaaaaaatacaaaaattatcagggcataatggtgggcacctgtaatcccagctactagggaggcggaggcaggagaatcgcttgaacccaggaggcagaggttgcagtgggccgagatggygccactgcactccagcctgggcaacagaatgagaccctgtctcaaaaaagaaaaaaaagtagcagagtgaaggttagaagccaggcaattaggtgtgggagtccacatcattaaccactgcactccactgcccctcaccactcagtgaagcagatattatccccctagcaaag

SEQ ID NO: 119702 - DNA, 421 bp, Homo sapiens
ctggtcctcagcataaaaagtccagagacatatctttgccgaagaattcacagttaaatatgctcaagagaactaactcrtggtaacccaaatcataagaggctgaagtacaaatcagaataccaatttcttaattaatcatagagaatattccttttgactagtaagaaaatttacacctaaagccatgacacacttttctcaaatatctggataactgaaatcctgaattagtaatcaggagtccactgaaagttagaaccttgagatatagagagtttgggggatagctaataaattatccctgcactacatacatcttcatagagataaaagttgtggctcacacaggaagagtctctctcccttgaatagtgctgccccagcactgcagacttcttggtcttcttggcctttcctc

SEQ ID NO: 119703 - DNA, 411 bp, Homo sapiens
gcatgtggcagtgagcatggacaatgaagtcaggatctccggatttcctatgtcagaacctcgtattacctgcagtcagaatcaacaggagagtagaggacaacaacatcgacacagggtgtttccaggaattatgatcaggtttgggaaaaagaagcaaagaatctgtctggattataaagtgagatgaccctagtatttggaggcagggtgaagtaaaaaaataaccttttaaagtgacaatttaataatgatcatatatgaatatggaagaagctcttaaaacttcattaagagaccaaagtgtatcttcagcaagactcaatggcaatacaatagtggaaagttacaataatctaatcaattctrctggacttgtctaaggacgtaaaatatcaagagagtatctag

SEQ ID NO: 119704 - DNA, 556 bp, Homo sapiens
gtttggctgtgccaccacccaaattggggcgttctcatgcccccatgctgctgttctcatggtaataaatgagttttcaggatatctgatggttttataaaaggcttttttctcttttgctcggcacttttccttcctgccaccatgtgaaaaaggatgtgtttgcttccccttccaccatgattgtcagtttcctgaggcctcctcagccctgcagaatggtgggtcaattaaacctctttcctttattaattacccggtcttgggtatgtctttattagcagcatgagaatagactaatacagacattagtcaaatcacaggaataaattcaaatttgtaatcttaacaagtgtcatgaaggagatgtacataatgctstgagaacttttccctaggaagtttttgcaatctcagagagcaaagtagaaatatctagatgaaaagggaagggaagaacctggaaccttccagaaccttccaggcagaaggaatagcatgagcaaaggtcatattgcagaaacaatggggaacttggttgaagatgcgagtggaa

SEQ ID NO: 119705 - DNA, 508 bp, Homo sapiens
ggtatagattgctaaccccattttraaaatgagaaaataaactgagtagttaagtaacttgctcaaagtcacacaggctatctgagtccaagttcaatgctctttttattttatttctgccattcattcattcagtatgtgtttaccacctactcagagacagcagaggcagattcatcatgtagctaatgaactaaagctttagagcctcacatctacataagctctgaggctcttagaggaactctagaaatgagtttgtctggttacatattttcatctttttttttttaatttgccaaagtaagatagttaatccacagttaggtatgactgccatctcttcccacattaacatcctctccatcatgcttctcctcatggccagtggccacagacacctttgagatccagataagaacaagataggatgaaaattcatttgtgtatagttagtggttatattgacatcttttgcactgacttttataagagttgttttgctggc

SEQ ID NO: 119706 - DNA, 508 bp, Homo sapiens
ggtatagattgctaaccccattttaaaaatgagaaaataaactgagtagttaagtaacttgctcaaagtcacacaggctatctgagtccaagttcaatgctctttttattttatttctgccattcattcattcagtatgtgtttaccacctactcagagrcagcagaggcagattcatcatgtagctaatgaactaaagctttagagcctcacatctacataagctctgaggctcttagaggaactctagaaatgagtttgtctggttacatattttcatctttttttttttaatttgccaaagtaagatagttaatccacagttaggtatgactgccatctcttcccacattaacatcctctccatcatgcttctcctcatggccagtggccacagacacctttgagatccagataagaacaagataggatgaaaattcatttgtgtatagttagtggttatattgacatcttttgcactgacttttataagagttgttttgctggc

SEQ ID NO: 119707 - DNA, 508 bp, Homo sapiens
ggtatagattgctaaccccattttaaaaatgagaaaataaactgagtagttaagtaacttgctcaaagtcacacaggctatctgagtccaagttcaatgctctttttattttatttctgccattcattcattcagtatgtgtttaccacctactcagagacagcagaggcagattcatcatgtagctaatgaactaaagctttagagcctcacatctacataagctctgaggctcttagaggaactctagaaatgagtttgtctggttacatattttcatctttttttttttaatttgccaaagtaagatagttaatccacagttaggtatgactgccatctcttcccacattaacatcctctccatcatgcttctcctcatggccagtggccacagacacctttgagatccagataagaacaagataggatgaaaattcatttgtgtatagttagtggttatattgacatcttttgcacygacttttataagagttgttttgctggc

SEQ ID NO: 119708 - DNA, 567 bp, Homo sapiens
acgtgatattcaaatcttatacactctctaaaagaattttgcaaatatgtatacccctcagatttttttaagtcactgcctaaaaatttatcctatgtcataaaaatgtaatcgctggtgtattaaaatattcacatttaaaataaaacggttagctaattcttctattggtatccattgaaatctgattccattgcagcttgatactcacaataatccagccraaagctgtggtatgcactttgctaatagttagaaattttctgtttgtcctcttttcttgaaaccatattttcatttcatattgctcacaaaattttgttgcaatgcaatatattttattcctaaaagcattttattgatcttcacaaaaaaaatgagtataaattaagcctctttaaaactttttttccatgactctaagatcctgagggttaaaacatgttttggattgagtgatatttacaaatattattaatacacaatttataaataattgctaaccacaaaagtgcactataattggaaatgcatttgttaattaaaatgatggaaaattttttaacc

SEQ ID NO: 119709 - DNA, 567 bp, Homo sapiens
acgtgatattcaaatcttatacactctctaaaagaattttgcaaatatgtatacccctcagatttttttaagtcactgcctaaaaatttatcctatgtcataaaaatgtaatcgctggtgtattaaaatattcacatttaaaataaaacggttagctaattcttctattggtatccattgaaatctgattccattgcagcttgatactcacaataatccagccgaaagctgtggtatgcactttgctaatagttagaaattttctgtttgtcctcttttcttgaaaccatattttcatttcatattgctcacaaaattttgttgcaatgcaatatattttattcctaaaagyattttattgatcttcacaaaaaaaatgagtataaattaagcctctttaaaactttttttccatgactctaagatcctgagggttaaaacatgttttggattgagtgatatttacaaatattattaatacacaatttataaataattgctaaccacaaaagtgcactataattggaaatgcatttgttaattaaaatgatggaaaattttttaacc

SEQ ID NO: 119710 - DNA, 521 bp, Homo sapiens
tagctcagttcatgaacatatcctaactactcgatgtaaagtgagccacaagttgatcagaactttggaaattggaatgctcaattacactttatattttattttcttttatatatttatttatgtatttattttttgagatggagtctccctctgtcgcccagactggagtgcagtgacacgatctctgctcactgcaatctcaccctcctggattcaagcgattatcctatttcagcatcacgagcagctgaggttacaggcatgtgccaccatgcccagctatcacttrcgctttaaatttgctcacaatctgacaccaattaaagtttctttacatgtgagaaggaaacactagcttgttgctttgtctctatgaccagcacacagatatttatagcaagaagaaaagcacaacatctagaaagagaaacaactataaaatctataaaaatggttttatttagcaacatttgataaggcatctggtgtgaagagagacatatttgattttcagctct

SEQ ID NO: 119711 - DNA, 582 bp, Homo sapiens
acatgcttactggaggcatttttcccttaccagttgagtgttcctagaggaatgttctattcctataccagttaaatgctgccattttgcttctcagtgcacatgcttgagtccacttgcccarctcctgagatcttatctggaaactgctgatcaccagattcaatgttttctatttattacagtctgtcttccctggcactggcagcaaccaataattgttttacagagagagtttaacaaccacctgaccatcacctattggttgcctaactacctactctaacaatataaccactaaatatttgaatatgcagacattagagaatgtaagacagtttatgacagattattttcgggaactggttacagaattaggatgaggatttatgcataattgatatttgtctctattggtcttcacagatataagtgcacatatggaggattttgagacttggtgacccaaagcaattgtctttaactttttttgacttccagttcttagtgaaggcatttcagccagtggagaaaagaaattgtgtgccaatgctaagtcattcacttcttgtgttggtgtaa

SEQ ID NO: 119712 - DNA, 523 bp, Homo sapiens
cctgtcatcattttttttgacattctacaaatatttctagagtgcctcctgtttgtcagtcagtgtcctaagaactgagaataagtaatgaatcagaaacagtttctagtctcaaggcactgtgtcaaaatggttggtgagaaaactaacatccagttgtgataatcacttgcatgacatgagttactggagattactaaggcattctgtaactccttgggaagatattgtccccgaattcatctgaaagacttaaaagctaagtgactaagaggcagttaaagaggaacaaaggttacccaggtgaatataaaaactcacagccaagacggcactttttatatrtgtgatcgaagcctttcagtaagctagagcacgcaatatgaatagaaagataaaattgaagaggcaagtggaagtcaattcattattgtcattgtcattacatagcaagtgtttaatgtacatcaaatttgactaagtattttacaaacaaatacaatataaagtagatattatttgc

SEQ ID NO: 119713 - DNA, 538 bp, Homo sapiens
tatcataaaatgaagctacaacataactgtcctctaaataatcaatatttggatctttttttttcaataagcaggaagatgtgaaaatcacgtacttaaaaaacaaattacttagcacttaaagcttttattttcctgaataatatttttccgggttatggtcacatagagtcaactggattgcaartttcttttccttttcttaattattcttttaaaatattatttatttattttagagaaagagtcttgctctgttgtccaggctgaagtgcagtagtgttttcagctcactgcaacctcgaactcctaggctcaagcaatcctctcacctcagcctttggagtagctaagactacagggcacatgtcacgatgtctggaaaatttttgtgttttttgtagagaaagggtcccactatgttgcttaggctggtctcaaattcctggttcaagggatcctcccacctcatcctcccagtgggctgcaattataggcataagccacggattgcaagtttcttagtagaaaaaaataa

SEQ ID NO: 119714 - DNA, 541 bp, Homo sapiens
catttaaatccctactagtgaaacataattttgagcttgtgcccctaatatacatatatttatatattacatacatttgtatattatgtacatatatattacatgtatatatcacatatacttttatctcaaggcattctattcccaagggatagtgtcacaattaataayagtggaaataaatccatattttaaattttctccttaataattctgatatttttggctgattcatgtcaaatatgattaggttattgttttttaggtcttatcatgaagctgacaaagagctcattccctaaatagcagaaagctgcttgcataactatgttatcttcaactatgattccttaacaaaaatctcttaaagccacttttgaaagttagtttagaaaataattaaactgtataatctgtcaatctgcttaactaggcacaggcaaccttccatatgtcaaaatattctgaaagccattgaacaagtgaggaagctttgccaactgattttcagtgaagattccccacctgtgtaataggtgac

SEQ ID NO: 119715 - DNA, 601 bp, Homo sapiens
gccatgagtctaactcctgggttagcaagccaagaaaacttgactgccagcaccataatgctacacacaatgagaggtagatgcttcttcagagggaattcagggttcgagcatcagaataaagggagaatagatgctgtgtggccccaacataatgtctactctaagagccagtagcaatgacccatgctcttctccacaaggaataatattttcttacgtgatatgtgctgttgatgaagcactgaatgtttcaggaaggagaatacttactttaaatgtattggccttctactgaagttcaaatgtcaaaatcatttygattctctgataactttaatttatatttagaaagttcagcaaaagatgagatcttctgtgttctcataggccaacaaattaaattccagtgtcacatcctactgctgatggttaaaatttctttccaactaagcctatgaagtactaagttcatttcatataaaatgatgagattgatcccaacggaatgaaaggcctacaagatgccatgtcaggcttcagactatgaccagatgaattaatcagtgcaaagtcccgataagttgttaaatagcacatt

SEQ ID NO: 119716 - DNA, 587 bp, Homo sapiens
cagtttgcacctaaacaagaagttaaagcattttctaaagttatggaggcttccatcaattggtgtgcattgatcatttcccaattcctaatgttcagagggcacataagctgtagttgaaaaatagccccctggctgggtacgggggatcatacctgtaatcctccccttgagaggccaaagttgagggaatacttgagcccagcagttcaagaccagcctgtgcaacataatgagaccccacctccacaggaaaaaaaaatagccaggcttggtggtgcatgcctgcagtcctagctgcaggactaggaggcaggaggactgaggcaggaggactgaggctgcaggactgaggcaggaggatcacttgagcccaggtggtcaaggctgcagttaactgtgctcataccactgcctgggcaacagagcaagattctgtctctaaaataaagaagaaaaaaaaattactgaatcacagaaccaaaatgcttattccatatctrcttattatgaaccaaatgtcaagaacagccaagcctcttctttggtccttttatttctgcacttttactgactatgaaatcaca

SEQ ID NO: 119717 - DNA, 564 bp, Homo sapiens
gaattcagtccttgggactgcactgcctaggtttaaatcctggccttgccactcattagctctgtgacctgggcaagtcatttactcaacctcccacgcctcagcttcctcatctgttcatcagygataacaatacttacctcaaagcgtcgttgaaaggattaaataaattgtgaagtacaattaaataagttatgaagtactttcagaagtttatagcatataataagtgctatatgaggacctggtaaataaattccatttaaaataagaacttttctgctaaaatatgctaaaacccatgttgtaccgtgtgtttaattaggcaataattacttaaaatcagattgctcattgtcgatgcaaatcatggtaactaatcagctttgattaatattcttaatcaaaataaatggaattacccatgattttattcccccacaataaacttttaaaaatattttgatgaagagcatttcaaactttaaaaaaaagtatatatactctttttaacaaaatacaattataattaagataatatgataatataacttatgtggacag

SEQ ID NO: 119718 - DNA, 584 bp, Homo sapiens
tgtttgacatgtatctggagctcaatgaatagtttctttctcctcttcatagtggtctgggtggtcaargaaaacagtgaagtggctctgagaaaatccgtctatatgtagatgcctatcagtatctaattttctcccttgtcaagctttctccctttcctaacatcttctcatttgcccaagcctgacttccaaatgacatactagatagattatttcctctgtttcactcactacatgcaatcatgacaacaataagtgccattccatatttttatttagcaagtgcactgtgataaatgctttgcatgtagtgtttcacaagaaccctgcaaagtacatattattattttcattttacagatgggaagaaaccaagactctgagagatcaaacaaatcatccttgaacacatatggagtgggtgatacagctaagatttgaaaccaaatccattcgattccaatggtcatttgattaactacaattctgtatatcacactcgtcagaaagacctctggactttatctccttcacatctctgagtacattgtcattttctcttcatcccctgtaccacacac

SEQ ID NO: 119719 - DNA, 584 bp, Homo sapiens
tgtttgacatgtatctggagctcaatgaatagtttctttctcctcttcatagtggtctgggtggtcaaggaaaacagtgaagtggctctgagaaaatccgtctatatgtagatgcctatcagtatctaattttctcccttgtcaagctttctccctttcctaacwtcttctcatttgcccaagcctgacttccaaatgacatactagatagattatttcctctgtttcactcactacatgcaatcatgacaacaataagtgccattccatatttttatttagcaagtgcactgtgataaatgctttgcatgtagtgtttcacaagaaccctgcaaagtacatattattattttcattttacagatgggaagaaaccaagactctgagagatcaaacaaatcatccttgaacacatatggagtgggtgatacagctaagatttgaaaccaaatccattcgattccaatggtcatttgattaactacaattctgtatatcacactcgtcagaaagacctctggactttatctccttcacatctctgagtacattgtcattttctcttcatcccctgtaccacacac

SEQ ID NO: 119720 - DNA, 605 bp, Homo sapiens
acatggaactattcagtctataactctagtcagagaaaagaaggcagagagaaatagtattaaaatgccggaaatatataaatatagacagcataaaaaattaagatgtttacatcttaatctatgagattaagcaatctcatcagcaatctatgagaaaggagtggttcccctgggtattatccataggcatcctgatcagtgcaaacctagacccaatcatccctatatatgacataaagagtacatttcgtttgcaaagccaatttcaaattgttttggtgctaaataaacaatcagccaaacaaagttcaaaattatggactccacaccaagatayggaattttacttaggttaactttgcaatgacctttacaggagaaaaaccattcaagattttgtagtgttcagtatctacattagcatttaaagaaagcctggagtttctcaaaggaaaatgtaacaaggtatggtttctggtctacatttaaatacatatttactttttgaagataagaaaaaagattaaataaactttgaataacagcacctttggaatcacatcagtttcacttctgcctctgaagtctattaactgtacagt

SEQ ID NO: 119721 - DNA, 600 bp, Homo sapiens
ttggtgctaaataaacaatcagccaaacaaagttcaaaattatggactccacaccaagatatggaattttacttaggttaactttgcaatgacctttacaggagaaaaaccattcaagattttgtagtgttcagtatctacattagcatttaaagaaagcctggagtttctcaaaggaaaatgtaacaaggtatggtttctggtctacatttaaatacatatttactttttgaarataagaaaaaagattaaataaactttgaataacagcacctttggaatcacatcagtttcacttctgcctctgaagtctattaactgtacagtactggacacgttttttaaatttaccatctctgaattttagtctctgattatatgataggctagttcacaccatggggtatgttggggatcaaaaaaaaataacgtataaagcacctagtacaaaagttggtacacagaaggtactcaatttcagccatgattgtgattacatttttagaaagtaaggaagatttctatcatatattatgtatgtggtgtcttgtgcacatgttgtcatgaatgctttaggccagaaactacaggcttaattgc

SEQ ID NO: 119722 - DNA, 463 bp, Homo sapiens
tttagttaatattgtctcccctgagtttcacaagtgaaatgatgattatagttcattgtttcagtttgtactttgttgatgactaatgaggttttagctatttaaagatgtagaattttctgttagaaaaaaaattcaactctaagatagtaaaatatattttgtcattagggaatgtgagaataaaggaatagttggttgattactaaagaaaatgtcatataattaatgagaaatataacttaaaatatcagataattgrtataaagaactgctctcagtcttgtcaagaagccaggcacataaacaattttactttgaataagacttttaaaaattttacaaagttttataaaaagtagtacattgaggccagaaatggtggctcatgcctgtagtcccagcactttggaaggcttgggggaaggatcgctggagcccagggcttccaggttgcagtgag

SEQ ID NO: 119723 - DNA, 542 bp, Homo sapiens
tcagacatatatactgggaatatattttcccagtctgtgatttacgcttttactctcttaatcatgtcttttgatgaacagaagtcattattataataaagtccaatttatagtcttatgattagcgcttgtgggtcctgtttaagaaaccattgcccactgcagagtaattatgatattttattatgttatctcctagaagttttattgttttaacttttatatttaagctccattttttaataagaatgttacccaaactttattatttatttattttccaaccttatttaggtataactgacaaaacttgtatatatttaaggtatacaacataatttttatatatgtttacattatggaataattaccataatcaagctaacraacatatccatcaactcacctagttaccattttgtgtgtgagtatgtggtgagaacatttaagatctactcttttagcaaatttccagtatatattgcagtatactaactatagtcaccttgctatcattagatctccagaacttattcatcctg

SEQ ID NO: 119724 - DNA, 572 bp, Homo sapiens
ccagacagtaagagagaagtcagagcagcccatcaaaaataagagtcacatgacaattatttcatgatggmaactttcagcaaagtgcgactaggataaaagtaggatcacttgtgactttgttatgtcacaccatttgaaaggggaggacctaattttatgttacacttaaatctattaaattaaaatccaaagaaaaaataatttttactcaaaagttattcaatgatttcaataatatgaaaatatatatggataaggttattcacctatgtccactgtttgtaattgtaaaatattagaaacaacctaaacattcatacataggaaaatgattgaataaactatggtacatccatacaatggagtactacacagcttgaaaaaaaagagcacagctaaagaacaaagaaaatctctataaactggtgtggtggaatttttaggacatttagtgaaaaaagcaaaatgcaatacagtacctttatatgctaccttttcataaaaaaagaagagaaagagaagaaaatgtacatgtatctgtacattcattcaaaaagaaacacaagaag

SEQ ID NO: 119725 - DNA, 560 bp, Homo sapiens
aaatgagacattatggaataaacaaggaactggtgcccagtgagttatagcrgagaataaagagacgtccagagaagatttagaaaatattttccttgtgagattgtgtaagcttaggccgagcagggtggctcacacctgtaatcccagcactttgggaggccgaggcaggtggatcacgaggtcaggagttcaagaccaaccaggccaaggtggtgaaaccccgtctctactaaaacttcacaaattagccagacgcagtggcaggtgcctgtaatcccagctactcgggaggctgagacaggagaattgcttgaaccaagcagcagaggttgcagtgagccgagatcacgccactgcactccatccaccctgggcaacagagtgagactctgtctcaaaaaacaaaacaaaacaaaacaaaccccaaaacattatgtaagcttaaaaagcccttaaagtgtgtctatggtaatatacttagaaataccaggaaaatgtgaaaatgacatttaaaatgaaatgcagtaaaaataatttgcaatcattatgcatataat

SEQ ID NO: 119726 - DNA, 424 bp, Homo sapiens
ccaaaccaataagtaagctaaatgaagtttatttgtttatttaaaactttttattcaagtaaccaataatggataaaaatgtagaartgataaatgttcagctcaatgaattactgtattatagaattaacactgttgtgtaaatactactgaggtcaagaattagaatgttaagaatacccttgaacccctgctcatacccctcacaatcattattatttcccagttcaccaaagataacattatactgacttctaaatccatttagaagttttggcgtttttgaactttacataaatgcactcattacattagtgtgtaatcctttatgtctggcttattttgctcaactttcttcatgagatttattaatgttgtttcatgtagctctcattcatcattgtacaatattccataatataaa

SEQ ID NO: 119727 - DNA, 562 bp, Homo sapiens
tgtcggccaaaacccagggccatctgggacctctggctccccactttcaaagcaggaacatgttcttcccacttcctttccttaggagattaactgaaaagacatagccattgcaacatttcctcagagcagagaagctgcaggagatcaaagtctccccacataaagctcttcagggaaagggcagaatccaaatagctgaagattggaccatgagacagggaagggtcatgaggttcaggctcccatcccatcattcarctaattttctgaaactcttgactgttcctgacattcacaggccaagagctatcttccatgaccacagactataccataatcctcacagtcacaaaagcctaggcaagaaccataagtaattccatatgaatccaccctccatatgagaaaaagaaaattaagcagtggtgttaatgtggatggtgacataatgaaacaagaacaagctggcttggaggcaggatctacctaggcataaataagttcacagaacccccaaaacgtagatataagaagcactgtagcactcccttgctgtctt

SEQ ID NO: 119728 - DNA, 587 bp, Homo sapiens
ttttcacccataccagttgtccaattaaataaacaatgagaaattacctttagaaggccctggcatgtttttctgttggaaattaataatttctattccaaatatgcacatgagatgctccaaatcctcctattgcatgctaacaagacagcctcttttccttcttcccctaattatcttcatgaatatataatacatgacagctttgtgtgcctccctaggaaactccactgtcatttgcttccgaagagaattcctaatagtggacagtcatttaacctctctgggcctcagctgcttcgtctgtgtaattaaggggttcactctaggagctctggcagctctagaattttgtgatggctttgtgttatctattcaaawacttttcacaggcttggctggcttcactttctgtggggctaggcctacggagatgccacttgttcttaacaactgtaaacctgcacaatgcctaagggcataaggctacttgatgatggcaaaggcaacaatgtgggtgatgcctgctctgcaagattaaattccatgggtttcagagagtaccgtaggcatatgaccaagagcca

SEQ ID NO: 119729 - DNA, 499 bp, Homo sapiens
taatgaatttttaatatcttctattgctcattaagccaatctgttttccatgtgtaaatgaggaacagcaaacagtaagtgaaactttaaaaattctattcttgcagaaaggacactagctagcaggagagagggtacagatgtagtaaaaaaaatagagcctgggttttcctccagcacctcataacattcaaagaggtatttaagtccttgcagttgagttgccacagggcagaaagcaatgtatataggagcattcacaaagcattctttagccaggatcagcagcggtcatgcagaaagcatctctcctgaaattctagttaatgtatacctctctctgcaattagcaatttcaaaaagaactagaattcttaaagaaaaaaaaatwagactatctgaacattctgaacatgtaagactcaactttaagttcctacaaatgggagagactgaaaacaaactgccagcctgatatgagaacatgcgtgctcaacac

SEQ ID NO: 119730 - DNA, 557 bp, Homo sapiens
tctttcactgcataatcaggtacctggcacataagtaaacattgagtaaatatttgtttggtaggtgaatgcatggatgaacaaactgaagataaaattactatttgcagacttatggctaataccattcaagtcataatttaatcttttgtttgtaaaagtctcaagacagagaaaaccattaggtatgattttttccccatcactacaagaaccatctggaagagcaaaataacttaatttctacatgaaggagtttcttggaagcttcttactggctggaccatgcagttgtcctaatacttatttattcttcagaaatacttstccgaaattgtcacttctgaatatgaaaaaaaatcaaaggatgctttttaaccccaattgtttgtattattccaaagttgcaattaagcattgtctaacggaaacatgctcctctcatttctagtgcatagctcaggttatctgcctgtaatccagagagagcctatgggagggagagcaggaggaaggaatattgggagattgagagattgagagagaaagggattgag

SEQ ID NO: 119731 - DNA, 592 bp, Homo sapiens
tgatactgacatgctagtgataatactcttggagctgggaaacttgcagagtaaccaggcgtctactgacccaccacatttttaccttatgaccaaagacaagccctgtcataatagactgtcatcataggaggtagcatgcatccattcatccaacagatatttacacagtgggtcctaagtgcagatattgaaatgatcagggttataagacactaacaatgccaacggagtgggttgatatagaaatttattctaagtgatttatgtgccttttcttcttgttctgaatgaaaaacatgtgaggtattttctgttatgacgtcactgtagaagtaaagaaacggaagctaaatggytgagtaacacagctgtcaatagttaatagttagtaaggggcagagctggaattttcacccagcctccagaaccccatgactttagccactatatgtactgcctgtatggtgagaaataaaatagacatgatctctgtttccatggctaggagagaaagaaggacatgacaccaattcacacataaatatgattttaaattgtcataaggcctgcagaaaaatataaacaagct

SEQ ID NO: 119732 - DNA, 508 bp, Homo sapiens
gttgtttttacctaaatcaatctggcctggtatatgacaacataaaaaaacttaaggatagagatagagcccaaaaactctccaaccaagcagacaacaacgttgaacccccttggacactctctaattggatgtcctgggtactcccaattcttagtcctttaatacctatttttctccttcttttattcggaccttgtgtctttcatttagtttctcaattcayacaaaactgcatccaggccatctccaataattctatacgacaaatgctccttctaacaaccccacaatatcaccccttacccccaaatctttcttcagttgaatctctcccactgtgggttcccacgccgcccctaatctcgctcgaagcagccctgagaaacatcgcctattatctctccataccacccccaaaaattttcgctgccccaacactttaccactattttgttttatttttcttattaatataagaagacaggaatgtcaggcctctgagcct

SEQ ID NO: 119733 - DNA, 508 bp, Homo sapiens
gttgtttttacctaaatcaatctggcctggtatatgacaacataaaaaaacttaaggatagagatagagcccaaaaactctccaaccaagcagacaacaacgttgaacccccttggacactctctaattggatgtcctgggtactcccaattcttagtcctttaatacctatttttctccttcttttattcggaccttgtgtctttcatttagtttctcaattcatacaaaactgcatccaggccatctccaataattctatacgacaaatgctccttctaacaaccccacaatatcaccccttacccccaaatctttcttcagttgaatctctcccactgtgggttcccacgccgcccctaatcycgctcgaagcagccctgagaaacatcgcctattatctctccataccacccccaaaaattttcgctgccccaacactttaccactattttgttttatttttcttattaatataagaagacaggaatgtcaggcctctgagcct

SEQ ID NO: 119734 - DNA, 595 bp, Homo sapiens
ttcaagtatttggggggagtaagaaagaggtttagataaaatgacttttaagatggggaacacaaaaccccaataaaaacttaaatttaccgagatatttactggcagagctggaactgggattacagtttcccaaattttagttcatgatatttcctctcttctacatgaaatgaatggtgaggttttccttcttaatcattttatgtctgtttttaaaaatatggcagttccacaaacatcatggctggatgttgtttgctggaacctgtgccccagcttttgaaggccacccctccctgccttatttgttgttttcaaaggcagtttttcyataatgcagtgctgggtgcctggggtttgccagcaaacagaatgaaaagataaaggtcgtatatttcctgctacactaaacggtccctcaaaaatgcagaccaccactgttctgtcagcctttctgcaaagggatggcaaatatctaccttgaataaaagcatgttaaaaaaaaaataaaacactttggcaagcagagaggtgagtcatatttcaacaaaggattaatgcaagtcctgttttgtttgttttgagaactcag

SEQ ID NO: 119735 - DNA, 579 bp, Homo sapiens
cctctctgctcaactggtgagttcccactgcaaaacttcaagaaaggaaataccagtagctgtaagagtgtcacaacttggttttatgtggcagtaaccaacccctagccaattgtagagtttggctaggagtatactccacaccttgttaaaaaaaaatcatatagcaacttctgtgggarttcattgtacagcagttgctacttaggaggaccacttgctgacagggcagggaggttgggcttttaaaagcaagttgcagtaagaggttggtttctaattgaccagcaagtatcctactgaggtcaaagaacagatgttggcaaagaaggtacctggggtggagaatgggaaaggaagtgacgcactgtttgctaaaactttaagatgcataaaggtttattttctcatcttggctttccctggttcactgtgtgataggaacaagttgtttcccctacttgagcctttattttctctttttcatagtggagctaaaaagtaaaatagctaccacaaagggctgttggaagaattaattaaaataatgtgtgtaaattacatggcacattcgtggtt

SEQ ID NO: 119736 - DNA, 548 bp, Homo sapiens
ggaggatggcttgagcccaggagtttgagaccagcctgagcaacattgcaaaatcctgttgctacaaaaaaatacaaaaattaaccaggcatggtggtgcatgcctgtagtctcagctattcgagaagctgaggtgggaggatcgcttgcaccctggggtcaagggtatagtgagccatgattgtgctgctgcactccagcctgggcgacagagtaagaatctgtctcaaaaaaaaaattgataaaaaaatgttttaagtgactkttttttgaggaacagcatttggggaattgagggaaaatacaaacaggcaatggaatgaaaagagaaggaaaactgaagataagatatcctaacagagataactaaatttgtttttttctcctaagtttaaaagactgggaactctttaattctcccccaggagtaaattctccctctctcattcttgttctctcttgtttctgtccaaggttagataaaattatgcctataagggtcaggggatttatttcactgttaaatggaaacagctgtataaatttta

SEQ ID NO: 119737 - DNA, 548 bp, Homo sapiens
ggaggatggcttgagcccaggagtttgagaccagcctgagcaacattgcaaaatcctgttgctacaaaaaaatacaaaaattaaccaggcatggtggtgcatgcctgtagtctcagctattcgagaagctgaggtgggaggatcgcttgcaccctggggtcaagggtatagtgagccatgattgtgctgctgcactccagcctgggcgacagagtaagaatctgtctcaaaaaaaaaattgataaaaaaatgttttaagtgacttttttttgaggaacagcatttggggaattgagggaaaatacaaacaggcaatggaatgaaaagagaaggaaaactgaagataagatatcctaacagagataactaaatttgtttttttctcctaagtttaaaagactgggaactctttaattctcccccaggagtaaattctccctctctcattcttgttctctcttgtttctgtccaaggttagataaaattatgcctataagggtcaggggatttatttcrctgttaaatggaaacagctgtataaatttta

SEQ ID NO: 119738 - DNA, 525 bp, Homo sapiens
tttttttcaatcaatataaattactttacttattacaatctggttattctttggctttaaaacatccatgccaatataagctagtcattgcatttctctcctcatgctagaattctcgtctgaactttttgatgacgtatccagtgttgagcctaagactatacaggctttgaagtgctgccacttggtagcattgtgcaaccccaaacaggtacttcaacctctccaagcctccgttctctcacctgagaartgggaattataaacctcgtagggttgctctagcattaaataagatgaacattagatgccttgcacatagaaagcattgactagtgtaaacctgtgtaacttttgtcacatttgtgtcatgctattactcatgctcacatcagctgttaatatgcatacacaatatgcattactacttttatacacatccacatctatatttatattatacaactacaggcactcgcctggaattgtgaaatcaatctcaggacagcaggggcaggctccaat

SEQ ID NO: 119739 - DNA, 605 bp, Homo sapiens
ttgacttactgtatactaatatatatttttactatttttcataaattatgtttacaataataatacaaagtacctctggactcattttattttatttatttattttgaggcagagtctccctctgtcacctaggctagattggaatggcatgatctcagttcactgcaacctctgtctcctgggttcaagcaattctcgtgcctcagcctcccgagtagctgggattacaggtgtgtgccaccacatccgactattttttgtatttttagtagagacaggtttcatcatgttggccaggctggtctctaattcctgacctcacatgatccgcccacctcagcctcccaaagtgctgggattacagacgtgagacaccgtgcctggcccaacctctggattaattttaaaaacttatttatttatttatttagaggcaaggtcttgctctgtcacccaggctggaatgtactggcatgatcatagctcactgcagctcaaacycctaggctcaagagatcctcccaactcagcctcccaagaattttggactacagttgtgagccactgtgcccaggttaattgttttttttttttttatgcaaaa

SEQ ID NO: 119740 - DNA, 605 bp, Homo sapiens
acagctggaactgcaatcatttgaatggcaactgagcttggtgtgcaggatggcttcttgtctagtgcctcaactgggatgtctggaacagccaggggatggccaggcatctctctgtgtccatgcaatctctccatgtggctaactttggcttcctcacaatatggcagcctcagggcaatcagacttctcacrtgataactggcttcccccagagcacatatgccaagagatctagctgggagctgcaagccatcttatgacctagccttggaaattccacaacatcattcttatcatattttgtgagtcaaaagtaagcactgggttagcccagattggagaccaggagacaacacaaggtcatgactattgggaagcccaattcattggtggagggggtctttggaaactagctaccatagcccccttcctcccagaaaacttccatatgtcattggccaaaattggattatatgcccttttctaaagcaatggctggcaagggaaatggagtcagtatgattcatcatcacattgaggaaggcaccactatgggggtcaacatcacggtattgagagaagtaatccagggaagacccacc

SEQ ID NO: 119741 - DNA, 605 bp, Homo sapiens
acagctggaactgcaatcatttgaatggcaactgagcttggtgtgcaggatggcttcttgtctagtgcctcaactgggatgtctggaacagccaggggatggccaggcatctctctgtgtccatgcaatctctccatgtggctaactttggcttcctcacaatatggcagcctcagggcaatcagacttctcacatgataactggcttcccccagagcacatatrccaagagatctagctgggagctgcaagccatcttatgacctagccttggaaattccacaacatcattcttatcatattttgtgagtcaaaagtaagcactgggttagcccagattggagaccaggagacaacacaaggtcatgactattgggaagcccaattcattggtggagggggtctttggaaactagctaccatagcccccttcctcccagaaaacttccatatgtcattggccaaaattggattatatgcccttttctaaagcaatggctggcaagggaaatggagtcagtatgattcatcatcacattgaggaaggcaccactatgggggtcaacatcacggtattgagagaagtaatccagggaagacccacc

SEQ ID NO: 119742 - DNA, 607 bp, Homo sapiens
gaggacaaattttctgatacataaaaaactggaaaagcactccattcttagttttaaatcttctaaaccgagaatatatctgtaagagaaaccattagtgtccaccaaatacccattatctcctttctgtttcctacttgcttttagttagggtgggtccatgtgactagttttccagtaaatggactatatgaagaagtgacatgtgttctttcagatgaagaaaattaagaaccagtgtggttctgacatttttctccacccctgctacagggattttgtgtattccagatgatatattaaggccaatataatatagcataatgtagtttaatatagtataatataatgtcattatataatatacaaaattatagtcaatatattatatagaatacataatactacatatttataatattaattgtatatattttatatgttatatgcagttacacataatttaatatataatcatgttatgtaatagccaaataagactgactgattcacattgaaacatgattgtgacatgagaggaataaatctttattgtaaatccctaagaatttggattttttttgacagkcttaattactatgactag

SEQ ID NO: 119743 - DNA, 582 bp, Homo sapiens
attcatttactcagtaaaaatttattcagtgtttactatgtaccaggcacagtgctagacatgattagtaaaagaaaatgttgagatgtctattttttaaagtgttttaaagagattttttagatgttgtttgtgaagctttttaaatttctcaaacaaaaagaaatacaaatacaacacatcatgctagtcacatctgagatcaactagaaagcacacttagttgatggaagagaaagaggatgggagaaatgtgtgcaatggcagttccagtgctggggatcttgtcctcctttgatatggtgtgatatcaactcactcctcttagaaaacagatcttatgatcacagatatgctcaacaatgttaaagactgcgaatgagtagaaagcatcattatcctgaagagaataaattgattatcatgggttactaaaaaatactcaccttttttcyctctcttcatctaattacctaaaagtagtaagatataataaaagtttttctataaatattttaacattcttgtgattatattgtttataccactttacattctaaatccatttaacattatgaaata

SEQ ID NO: 119744 - DNA, 540 bp, Homo sapiens
ctctaagccatttcaaaaaccttcatggcagcccctcccattacaggcccagagacctaggagggaaaatggatttgtgggccaggcccaggaccctgctgacctgcacagtcttgagacactgctccctgcatcccagctgctccagctccagccatggctaaaagggccccagatacatctcaggcctctgctccagaaggtgcaagccataagctttggcagcttccatgtggtgttaagcctgtgggtgtgcagagtacaagagctgaggcttgggagcctctgcctagatttsagaggatgtatgaaaacacctggatgtccaggcagaagtctgctgcaggagcagagccctcatggagaacctctattagggcaatgcagaggggaaatgtgggattggagcccctacacagaatccccccagggcactgcctattgaagctgtgagaagagggccattgtcctctagaccccagaatggtagatccattgacagcttgcactgtatttgtggaaaagctgcaggcactcaat

SEQ ID NO: 119745 - DNA, 610 bp, Homo sapiens
ttcattgaagcattcctgcacttttttctccctatttcttcctcataggtcaaaagatatggaatgcaacaaaccaaatctcatgaaagtgtacactgctggccaaggctttcaaaggacaaaaaaacttttcctttcatcatcagcctgtgagctcccaaattatataactgctatggggagagcatacacatcatcttgttctcaagtcttttcaccttatcctgtggaaagttgtcctgggaagtccctctgatctttttatgaactggtggcatcttatgacagtccttttaggactggggtgttttcctgaacaccatrgcattgaaatgccttccccatatacagccttaccttatcagctcattatccacagcaccttgtcttacatcctatctatcctatcagctgggggaaaggtgaagcgcccgaggcaaagggagagggccatcaaatggtgtctcatacagataagaaaacaggaagaagggctctaatgttgcttactcttgcagcagttattactccaggccctagttttgcctaagttgggagtctaacataattatagttctccaattagaatattaggggaactttaatattc

SEQ ID NO: 119746 - DNA, 610 bp, Homo sapiens
ttcattgaagcattcctgcacttttttctccctatttcttcctcataggtcaaaagatatggaatgcaacaaaccaaatctcatgaaagtgtacactgctggccaaggctttcaaaggacaaaaaaacttttcctttcatcatcagcctgtgagctcccaaattatataactgctatggggagagcatacacatcatcttgttctcaagtcttttcaccttatcctgtggaaagttgtcctgggaagtccctctgatctttttatgaactggtggcatcttatgacagtccttttaggactggggtgttttcctgaacaccatggcattgaaatgccttccccatatacagccttaccttrtcagctcattatccacagcaccttgtcttacatcctatctatcctatcagctgggggaaaggtgaagcgcccgaggcaaagggagagggccatcaaatggtgtctcatacagataagaaaacaggaagaagggctctaatgttgcttactcttgcagcagttattactccaggccctagttttgcctaagttgggagtctaacataattatagttctccaattagaatattaggggaactttaatattc

SEQ ID NO: 119747 - DNA, 561 bp, Homo sapiens
agttttatagggtaaaaagaggaaatacaaagaatctctgattgggaaacattttattaaggtgagacttttggaaacagaagcaactttctctttggtcttcaggcacatttggcattccctggttagcttcaagggagcaagtaagtggtttggggccacttcaaaagtgaaaggaatgttcagcagtaggggtgggggttttctgtagcagatcttttcctggcatgaatggtggtcaatgggrtgctttttgaggtcaaagtattatatgatccttatggggtaggggcagggatggctaccatggcaggcagtttctcaatgaacacatggttggacatctatcaactaacattctaggatgagtcactggccctttcctccccttctccctttctcccttttctcctcccgttccctcccctagatccctgctacatagagcactttggtcttccatctgatccttaaactcatggtatctgttcctgtcttggagcctcttgtttcattctttgcctggaatgttcttctcctaaatcttcacatggctgcatc

SEQ ID NO: 119748 - DNA, 605 bp, Homo sapiens
atcgaccttcagtaataaggataaaattagacagaaatgatatttttgatgagacagttaatgagtgttcttttttctcatttttaaaactacttttctttttacttcttcagtaacttttatcccaaagaaaaaataaaaatcttaaacttatactgtctcatataatttatgaattatttttacatatatgagccaattgtatctacacaacyctgataggtgttctcactcctttttatggaagaggaaatggagaaagactagacgagtttgctaggacaattttcttcctattctctcattttttaaaaaatgaatcatttttattactgaaagccttttataaagacatcgtagataaatgagactgttaggacttatccataattctttctggtaagtagctaaaggtacttaactctgggaaggataggagaaagaaacagagccatttttaaaatttgttaacactatttgccaccatttattgagtatttactctgtggtagactttataataaacatttaatatagattagcatatttaaaaatcacatgctgagtggtgggataagtaaactcagatatagaaatggaggctt

SEQ ID NO: 119749 - DNA, 565 bp, Homo sapiens
actttagtctttccctcttcaggctttaagttttttctattcttactgtttctttaattgccatctgaagctttcgcacatgacctccccggacacgggacgtgtcgtgctaaaaccaggaaagccgtggacaaaccagaatgaactgatgactctactttctgcccaccacctccacctggcaaacacctacttcaagtactagcttaaatgtcattctctcaggaaacctctgatacctcttcactgccacaagtattggtttatttccttttatctcaacattcatcacactggatttcttcttttaatgtctgtcttctctaactatgtataaactccacaggcaaggacccagtgagtatctatcttgttgaccattacatcaccatcacactggacactgtgtttagcccagagtaggtgatgagtcattayttcttgaatgaataaatcagtgaatgaaaggatttcatctgtgacagcatcagaattaaagggttttttcttctttaggctagtggagacccaggcaagtttgaagatacattcactgttctatctc

SEQ ID NO: 119750 - DNA, 493 bp, Homo sapiens
atttaaaacaaattcttattgcagtaaaatacatgtaacataaaatttaccattttgaccattttaaagtgtacagttcagtggcagtaagtacatttatgatgttgtacacctatcaccactatctagttctagaacttttccatcaccctaaatggaacccccacatcygttaagcaattattcttcatttcccctcctcctagctcttggcaaccaaaaatctgcattttgtctctatagatttgcctattctggatattttatataaatggaatcatataatgagtggccttctgtgtctggcttctttcacttattatgatgttttcaaggttcatccatgttgtagcatgcatcagtatttcattttttttgcatggctaaataacattccatcatatgaatatactacatttcatttgcctcctcattcattcatggacaattgagttgtttctaccttttggtcattgtgaatagtgcagctatg

SEQ ID NO: 119751 - DNA, 637 bp, Homo sapiens
aatatggattgtatcctttgaaactcacaaaattcccaggtgcttcttcagtctttatcttggaaaacatactttttwaaaaaaaagtctttttttccattgaacatattcaaaatcatttttgtcaaaacaatattcctagatatacagcacctattggaatgcctgagatacggtattaaaggttagcaacccaaaatgttgcagtcaccatgtcaaacctccaaaatgtccaaccccagaacacaagccataagagtcttaatagaggatgcggaaaagtatccatttctaggcccagggcatgccttttgttattacacaaatatttgtttagtgcttgctatgtgataggcactttcaggtgccaagtttatagcagccaacacaacagacaaaatatctgtcctcattgtgtttatgttccagggagtgtaaatgttctctttaaaaattccctttaactttttgtactatcttttatatagttcgttagtaaaaaactttgtgctgggtctacaaaccaatgctaatccattaatgatgctggactggactctgggggtattatgaaaaaaaaaaatatgtttctgttctcagtgaactgatagttggacatacttcttacctctgtcaa

SEQ ID NO: 119752 - DNA, 571 bp, Homo sapiens
tgttttagaagtttacaaatgtgtgttgggccgcatgcaaagctgttctgggccgcggcttggacaagcttggtctacatgcttaacttgaaagtggctgagaagaaagaggatgggtataactgcatctgctgaggagtttccagggggaaaaaggatttaaacctgaatttcaaatatgtctttgaacatggcggttagactaaggtaccccaaataaggacagttagctggagaagacaccgsggcctctaaggggaacatcactacaaaaatagagttgagatagtaaccaacatcagaatctcagtcttaagggaggatgaatttcataagaccctgacactgtggacaaagaaaatggatgggtgtttaggctaataagctatgtaagacataggatggcaagagctgagcaaaaacactgtgtgagaaagatgaaggcaacaattcaaaatgtaggaaaaagcagccaggcatggtgtttcatgcctgtactcccagcatattgggaggctaaagcaggaggatcacttgaggccaggagttcaacactagcctgggcaacata

SEQ ID NO: 119753 - DNA, 571 bp, Homo sapiens
tgttttagaagtttacaaatgtgtgttgggccgcatgcaaagctgttctgggccgcggcttggacaagcttggtctacatgcttaacttgaaagtggctgagaagaaagaggatgggtataactgcatctgctgaggagtttccagggggaaaaaggatttaaacctgaatttcaaatatgtctttgaacatggcggttagactaaggtaccccaaataaggacagttagctggagaagacaccgcggcctctaaggggaacatcactacaaaaatagagttgagatagtaaccaacatcagaatctcagtcttaagggaggatgaatttcataagaccctgacactgtggacaaagaaaatggatgggtgtttaggctaataagctatgtaagacataggatggcaagagctgagcaaaaacactgtgtgagaaagatraaggcaacaattcaaaatgtaggaaaaagcagccaggcatggtgtttcatgcctgtactcccagcatattgggaggctaaagcaggaggatcacttgaggccaggagttcaacactagcctgggcaacata

SEQ ID NO: 119754 - DNA, 581 bp, Homo sapiens
cttggaaaggaattgagtcttttgtgatgtcatcacaacattgggttacatattacctaaaatctgacgtgcctctggtcttcagttacttgctccattaagttctgctrtttaagcctgagaatgagtcaagcattctgttatttttactgaagattcctaagggatacactgactatatgcctggtgctagccataacaaaggagtaacacagagtctgtaacatcaaggaatttacatgttagtggcagagacaaaatacaattaaaaataaaataataaaagggaaatgagttttaggatattggaaagagaaggatccaccttgcaagaactcagcctgttaatgaagggtttctaaggaaaatgtcttagaaggaaataatacttgaggtgtcttttttaaataactgaggcaaagaaagagaaaagcagtcagtcaaaagaaacaggtctgctattaataattataatactcaatatgtattgtgtttacgtctttgctgtgctgaagtatttgcagatactgtgtcatttaatctctacaacaattttatgaactacttcttataaatgggga

SEQ ID NO: 119755 - DNA, 512 bp, Homo sapiens
tctcttttgattgtgttattctgtatcaggggaaaaaagaaggaaacacgagttttgagagatacaggcacagttaaattacattctatgttgttcattttaaaacatgaacaccatgctcaaaatcaaattcagtcttatccattttacctcatattttctcaaaaataaaaattamtatacatatgaaggaaggaaccaatgataaaatgaacaaacaaatcacctattaaactaaacattattttgccctacacattggaagctaattaatttaacaattaccttgtataattggttaaaatctctagtttatttgattttcccctcattcatagggcagtgtgaaggaattcacagttacagaacatttagtatttgtgagacactggcttataacatgatttacaccttaagataattttagcattaaggtgaagattattaacagttaagaataaagcctttggtctcaggcttgtatttgagttccagctggagactagagagtg

SEQ ID NO: 119756 - DNA, 624 bp, Homo sapiens
catgttagtaaataagcctcatgagatctgatggttttataaatgggagttcccctgcccaagctcttttgactgccatgtaagatgttcctttgcttttcctttgtcttccaccacgattttgaggcttccccagccatgtagaactgtgagtccactaaacctctttcctttataaattagccagtctcaggtatgtctttattagcaccttgaggatggattaattgagtaggcaaggaagaatgtagtgggataaatatttaaagtgttgaaagaaaaaaaaaaaaagctcagacaataattctatatccagcataattatccttcaaagtgaatgagagataaagactttctcagacaaagaaagatgtaaagaacccatggtcaacacacctgcatgcaaaaactgttaaaatttttctttaggcagaaataatattatatgagtcacaagctttgattacatacacaaaagaaragcctcagagataacaaaaaagataaaaatattttacttttcttattttcatttgatctaaaattaaccattccttaaaaataataataggcacaagttattgtgtgattatagcatatgggtaagtgcaatgaatgaaatga

SEQ ID NO: 119757 - DNA, 584 bp, Homo sapiens
ttccattacattttaactctatttttaagctaaccttttaactttatctaactgtctcattcttcatcttcattacttcaaggatcaagttgaccattgaagtcggccattctgatcaaatctcagaccaatttaaaattctccaaagattccccactagatgtatcctgaacttcagattccctatgatatcacatgaggcctccctgacctggcccccatgttcttctgtagtctagtctctaaccacaatctctttaacctatgattaaatttttccagtatatakaaatagtataactgctgaatatcttaatggataaatggacactagactggctccattaccattgttcaagcacctttatgaactacatgtctgctaataaacttttcattcctttctctccatctagcaaaattctgttcagcccagagtttatcatagtatctgatgaatactagctacttaacatgtgttgaatgaataagttaaaacttctcccaagtcaaattctactttcttcatatggtatgtcctcatctccatctagaagtaatttctccctatgttgagtccccca

SEQ ID NO: 119758 - DNA, 597 bp, Homo sapiens
aaaacattctgaaataggctgatggcatttcaaaagcagtctaaaattatttttaaaaattgttttatcttggtggtaaaacaaaatattatgaaattcattttaatatgatgaagtttcaataaatctaacaattaaaattgattacacatgtagaatccatgcaaaaaaataagtcagtgaaatagaatcaccttcatgtcatgggttgtcattgtttgcttgttattaaccctgtaatgccacacacctactctgccttgtccattgctgtattcccagcacctagcagagtatatagtacacacacacaaatttatgaattaatgaatttcagatcagtgtatgctatgaaaaaaacataaatacmacaaatttgaatcatgtctatctagttatttggtttagacatattgatatgatttttcacatatgttctaatacatttttgatgctgattatattaacctatctctatctttccatttagatatggataaaggcttacatgcatttagcaataaatttcataaggttaagttgattgaaaataatcggaatttgtaaagaagaacaaatatgtctgtggacaaaatc

SEQ ID NO: 119759 - DNA, 310 bp, Homo sapiens
acatcctcagcctatgaagatgacgggataaagagattaaagacaggcataggaaattataagagtattgattggggaagtgataaatgtccatgaaatcttcacaatttatgttcagagactgcagtaaagacaggtgtaagaaattataaaagtattaatttggggaactaataaatgtccgtgaaattttcacaatttatgttcttytgccatggcttcagccagtccctccatttggggtccctgacttcccacaacataggacaaaaggttgctacagtcctattattttatggttaccataagt

SEQ ID NO: 119760 - DNA, 499 bp, Homo sapiens
gttcctgatcagaattacctgaggtattccttacaaataaattctgaggcccattctcttaaagattctggcttagcgggtggtacgtctggattgaaggctaagaatctgtaccttaagcaattctaattatcaggcaagtttcgaaaatagggctaagcaggagtgtgtgtgtgtgtgtgtgcatgtgtctgtctgtgtggaggggggagcggggaacaggaacaaaggaacaataccagcactgtctggtcccctcattcaaatactgcctgaaaaactacctgagaatgagaaacattcaactgaagttgaggaattatctacagaacactgtttatttcaagtccaaaacacaaattactcatttttcttaacagaccgcataatttttwctgcatgaatatttagggtttctctattcacaagtacagtttattactagactttaggcttgaatgattcatatatatagatatcagtttactacagaggacat

SEQ ID NO: 119761 - DNA, 621 bp, Homo sapiens
tactatagtagctggtatgtttccttctgagtcagggctaccacaagggggtccccaggatttgacacctctctgaaaagatgccaagatgctggtgccgaggtcatgactgcctctccctttgttaagggccctctagggcttttcccaagtcactgagattaatagaatccaaaccagatttcagcccaggccctcccctctctttgaattaccgttgcttccttatttttttctcttcttttttttttttttttcattgagacagagtctcgctctgtcacccaggctagagtgcagtggtgtcatctcggctcactgcaatctccacctctcgggttcaagcaattctcctgcctcagcctcttgagtagctgggattacaggtgtgtgccaccatgcctggctaatttttgtatttttagtagagatggggtttcaccatgttggtcaggctagtctcgaactcctgacctcgtgatccgcctgccttggcctcccaaagtgctgggatcacagacgtgagccaccgtgccctgcctgcttccttgttttaatgcttccttggagtatcttcagtckcccgtttatggtttcacatccttctaccatgaaaggcac

SEQ ID NO: 119762 - DNA, 448 bp, Homo sapiens
gataccatgcctggcctaaaataacactagatctttttgctgttgttcttcagaaaaaaaaaatattttattataggaagaaactatttttaagagaaagtgkctcatttaaacagatacagctatttatgggcagtgccaagaccagagctgggtcttctgacttctaactcctagtctactgtaccatgtaatagggctgaaaataacactacatcttgactggaaattcaatagagttttctttactttcttttattcctttactgacttgaaagacatacattctacttctgttttgttggagtttacatttttaaaattaacaactggatcttctactttttctaacaaaaaaaattgttttttatcttccttgtgaagaaagtagtgactttagagtacattaatattccccctaaaccctctctttgcgtcttctaagctg

SEQ ID NO: 119763 - DNA, 562 bp, Homo sapiens
tgggttgatgatcttaaaaaaatccaaggaagtttgaaataatacatctaattttcctctagatacaattttctatagtaagcagagggtattttttggtagtttactcttcctgctggggcgctacattgtttatttatgtttattcattcacgttttmattcattcatccaacacgtatatgtttaatgtctactaattccaaacactcttccagttttagggatacagtggtaaacactgaggggcaaaggaagacaaacacagaataagtaagaaaatcaacaatacagtttaatgtacagcaaatcctcactcaccgtcggtaggttcttggaaactgtgactttaagcaaaacaatatataatgaaaccatttttttctcattaacattataacgaaatgacattgaaggaaatgacatcatttgaggacctgccatacatcatctcacttaaagttgcagtttccaagaatctattgcggatgttaagtgaggactcaactgtagtgattgtgtctatggagaaaatgaggcaggaaatgaggatagagaggact

SEQ ID NO: 119764 - DNA, 608 bp, Homo sapiens
tacttgctacactgacttagataaaacctaaacttctaggagcctcagtctagtctataaaatagggacagatcagttgagacctagttaagaaaactccatcaaaactcatactagatatttcaaacagaaagaattaaatgcagggcattggttatgcaggcattagaaccctgaaagggaagaaggggagatagtagaaatgcaggaagaaacaactacaatgaagtgctggggaacaaaagggaagaagtcatgttatagcacttaggagctcatagcggggtcccttacaagtgagtgcttgaatcgttatttttatttttattctttaaataaggcctttttwttattaatttttgtgggtgcatagtaaatatatgtgtatatatatttatttatttatgcgatacatgagatgctttgatacaggcatgcaatatgggtacaatatggtgcaataaataagcacatgatggagaatggggtatccatcccctcaagcatttatcctttgagttacaaacaactcaattacacttttgtagttatttaaagatgtgcagttattattgactatagtcaccctattgtgctattaaatgata

SEQ ID NO: 119765 - DNA, 645 bp, Homo sapiens
ttttacagtgtgtgttaaactaccatgcatgcttctcaatggcatacaagatagatgctagtgattacggaaatatagacaaaacttgccttttagaggcttttctcttccagcattcagggaaacagtatttcagatcattactctcaaacaaatggcttcaatttataataaatacattaaaatttaaaaaccccaacttgctcagcagatatttgcatattgaaagatacagttttcctaagtgaacctaataaagtgagaatataagggagtagaatatgggggtgtatattttcatcaagggagctcttttctcaacttaccctgagacaaggaaaggctctgcaacaaccacaggctcttcaatacaaaagtcaacaawccgccttgtacctcacgcccatttaaaaaagttcttataatacaattagaggaaataatttatttattgactatatttaacactgtgaacaggaaattatctgacattataaaaaagtagtgttgtttgactactgaatatgtagctatgatctcaacaataaatctacctaatagaaggcaaagtaaaatttcagtttaatgttttataaaaaccaaaggtatcaaaataatcataaaattaaaatagaatttcaaatg

SEQ ID NO: 119766 - DNA, 595 bp, Homo sapiens
gtcctggtgctgcactatgaagaaatattcgtttttgatttatatgaaatgctattgaatcattttatggaaagaggcagacttaattagaattatctccaagaaaaatgaaggccctagaataattcataaaatatgagcttactgtgcagaagagatgtgttcattgctttayaggtgtatagaaggagacaaaaggatacgatcaaaaaccgtttgcagtaatacctgtagttgggttgagaaacagtaatggagtttcaaatgctgtaatgaatcatgtaaaggagtatgtaattgagcgtgtacaggcatacctcattttattgcatgtcactttactgatcttctcagatactgcactttttacaaatggaaggtttgtggtaaccttgtattgagcaagtctattggcactatttttcaaacaacatgtgcttacttcatgtctctgtgtaattgtcgttttggtaattgtcacattatttcaacctttttcttattattatatctattatggttatctgtgatcagtgttctttgatgttactgttataattgtttttggaaacgatgaaccatgtccatataagat

SEQ ID NO: 119767 - DNA, 595 bp, Homo sapiens
gtcctggtgctgcactatgaagaaatattcgtttttgatttatatgaaatgctattgaatcattttatggaaagaggcagacttaattagaattatctccaagaaaaatgaaggccctagaataattcataaaatatgagcttactgtgcagaagagatgtgttcattgctttacaggtgtatagaaggagacaaaaggataygatcaaaaaccgtttgcagtaatacctgtagttgggttgagaaacagtaatggagtttcaaatgctgtaatgaatcatgtaaaggagtatgtaattgagcgtgtacaggcatacctcattttattgcatgtcactttactgatcttctcagatactgcactttttacaaatggaaggtttgtggtaaccttgtattgagcaagtctattggcactatttttcaaacaacatgtgcttacttcatgtctctgtgtaattgtcgttttggtaattgtcacattatttcaacctttttcttattattatatctattatggttatctgtgatcagtgttctttgatgttactgttataattgtttttggaaacgatgaaccatgtccatataagat

SEQ ID NO: 119768 - DNA, 595 bp, Homo sapiens
gtcctggtgctgcactatgaagaaatattcgtttttgatttatatgaaatgctattgaatcattttatggaaagaggcagacttaattagaattatctccaagaaaaatgaaggccctagaataattcataaaatatgagcttactgtgcagaagagatgtgttcattgctttacaggtgtatagaaggagacaaaaggatacgatcaaaaaccgtttgcagtaatacctgtagttgggttgagaaacagtaatggagtttcaaatgctgtaatgaatcatgtaaaggagtatgtaattgagcgtgtacagrcatacctcattttattgcatgtcactttactgatcttctcagatactgcactttttacaaatggaaggtttgtggtaaccttgtattgagcaagtctattggcactatttttcaaacaacatgtgcttacttcatgtctctgtgtaattgtcgttttggtaattgtcacattatttcaacctttttcttattattatatctattatggttatctgtgatcagtgttctttgatgttactgttataattgtttttggaaacgatgaaccatgtccatataagat

SEQ ID NO: 119769 - DNA, 536 bp, Homo sapiens
ttaaaaattatgaatttgatgataggtaataatctggaaaaaggtacacaaaattcaagtaaaaatatacaacttaaaaaaaaaagtaaaactattaaaaatttttaggccgaaagtgatggctcatgcctgtaaccccagcactgtgggaggctaaggcgggtggatcacttgaggtcaggagttcaagaccagcctggcaaaaatggtgaaatctcatctctgaaaatacaaaaattagccgggcatggcagcatgtgcctgtagtcccagctactcgggaggctgaggcaggaggatcacttgaacctgggagaccgaggttgctgtgaacccagattgcaccaccgcactccagcctgggtggcagaacaagactcagtctcaaaaaaaaaaaaaaaaaatttgtttayatttatgataccaatttaaaatatatatatgtatgtaacctcctgacagattattcctgcccactgcacaaataaaaaccacagcactgcagtaaataaagagtttaattgatatgaggctag

SEQ ID NO: 119770 - DNA, 398 bp, Homo sapiens
catcaaccatgtaaaatagacagtagtatattctcattttcagatgagtgaacaggttttcaagggtggtaattgtttcaaggttayataaacctgcaagttgaaaagagtagttggaaattagtgtttgccccagctccaaactcttcccctttcaaaaaaacaaatggtaatgccatccttagaccccatattgcttaaatcttttgtgtcaactagactaggctgtggtacctagttgcttagtcaaacactagtttagattttcttgtgaaggtattctgtgtatgtggttaacatatataattagttgtctttaattaaaacaggttacgtagtctgacctgtttgaagaccttaagaacaaaaactgagatgtcctagagaagaaggaattc

SEQ ID NO: 119771 - DNA, 562 bp, Homo sapiens
atgaagtaagaaaacattgtgaagcctctactggcatgtttaatcgtttgctatgtttgatgtgaacatcccagatcccagaaagccacagaagggaggacagaaaaaaacatgataaagatgtttgtgggaaagtaaaatcaatccggtgatactgtaagcaaaacatcctgcaatattaggtttaatgctaaataacgttctatgaaatatttatttaaaatctgtcatcttaattgggaaggtatttcagaatgcttcatatgcttcacatatatatatagcattaagacattttaattaattgatttttttattatactttaagttttagggtacatgtgcacaacgtgcagcttagttacatatgtatacatgtgmcatgttggtgtgctgcacccattaactcgtcatttaacattaggtatatctcccaatgctatccctcccccctcccccaccccacaacaggccccagtgtatgatgttccccttcctgtgtccatgtgttcccattgttcaattcccacctatgagtgagaacatgcggcgtttggttttt

SEQ ID NO: 119772 - DNA, 562 bp, Homo sapiens
atgaagtaagaaaacattgtgaagcctctactggcatgtttaatcgtttgctatgtttgatgtgaacatcccagatcccagaaagccacagaagggaggacagaaaaaaacatgataaagatgtttgtgggaaagtaaaatcaatccggtgatactgtaagcaaaacatcctgcaatattaggtttaatgctaaataacgttctatgaaatatttatttaaaatctgtcatcttaattgggaaggtatttcagaatgcttcatatgcttcacatatatatatagcattaagacattttaattaattgatttttttattatactttaagttttagggtacatgtgcacaacgtgcagcttagttacatatgtatacatgtgccatgttggtgtgctgcacccattaactcgtcatttaacattaggtatatctccyaatgctatccctcccccctcccccaccccacaacaggccccagtgtatgatgttccccttcctgtgtccatgtgttcccattgttcaattcccacctatgagtgagaacatgcggcgtttggttttt

SEQ ID NO: 119773 - DNA, 360 bp, Homo sapiens
aatgtcatgaccaagtgggatgtatcctaagaatgcraggctggctaaattaatcaatcacattgagggaatgaaaggaaaaaaaaaccataatcatctaaattcatccagaaatgtatgtatagcatacacccacaatatatccaatatcatgttaaatactcaacacaccaggaattgaagggcacttccttaccctgataaaggacagttatgaaaaacctgcagctaatatcaaaatcaatgatgaaaggctgaaggctttccctctaagatcaagaaccagataaaaatgcctgcttttggctgggtgctatgactcatgcctgtaatcctagcactttgggaggctgaggcaag

SEQ ID NO: 119774 - DNA, 360 bp, Homo sapiens
aatgtcatgaccaagtgggatgtatcctaagaatgcaaggctggctaaattaatcaatcacattgagggaatgaaaggaaaaaaaaaccataatcatctaaattcatccagaaatgtatgtatagcatacacccacaatatatccaatatcatgttaaatactcaacacaccaggaattgaagggcacttccttaccctgataaaggacagttatgaaaaacctgcagctaatatcaaaatcaatgatgaaaggctgaaggctttccctctaagatcaagaaccagataaaaatgcctgcttttggctgggtgctrtgactcatgcctgtaatcctagcactttgggaggctgaggcaag

SEQ ID NO: 119775 - DNA, 626 bp, Homo sapiens
gaaacactaatataccagtgtrcatattagggggcaaaacaaatagacacaaagtggtttcaggtgctctttagcacttgtgtagtgtgcagactttttttatgatcacagtttgtaggccttcagctcctcatgtaggtgggatacctttgggtatttaaaacgcatgaaaacaggccagttagtctgtgtaaaatatcagctactgtgtacacatggtaatgaggtttttctcatcaaggggtcttaagatgtgaaatgactactcccatgtttctctggatttaagactccctaggggcatcctgatgtgacagatgacaatatgtcttgaagaccaatgggctgcttctgtcttacctcttctattggggggccatgaagcagagatttattggcacgtcatgtaaagaaactggaacttgggttcaggcaggaaataacactacagactagaacctgccctgtagtggttctcaaacacttcttaatacctatagggagaccagtaaaaaaggcagataaaggtagagtttctcagaatcagggggaaagcctagagcacccagctgctcagctcaaaaacctccagaagccctggagatgcttggtggaactctaaggct

SEQ ID NO: 119776 - DNA, 626 bp, Homo sapiens
gaaacactaatataccagtgtacatattaggggrcaaaacaaatagacacaaagtggtttcaggtgctctttagcacttgtgtagtgtgcagactttttttatgatcacagtttgtaggccttcagctcctcatgtaggtgggatacctttgggtatttaaaacgcatgaaaacaggccagttagtctgtgtaaaatatcagctactgtgtacacatggtaatgaggtttttctcatcaaggggtcttaagatgtgaaatgactactcccatgtttctctggatttaagactccctaggggcatcctgatgtgacagatgacaatatgtcttgaagaccaatgggctgcttctgtcttacctcttctattggggggccatgaagcagagatttattggcacgtcatgtaaagaaactggaacttgggttcaggcaggaaataacactacagactagaacctgccctgtagtggttctcaaacacttcttaatacctatagggagaccagtaaaaaaggcagataaaggtagagtttctcagaatcagggggaaagcctagagcacccagctgctcagctcaaaaacctccagaagccctggagatgcttggtggaactctaaggct

SEQ ID NO: 119777 - DNA, 615 bp, Homo sapiens
acagcacttgaaagagggatacttagagttgtataaccacttgctattattcttattatgaaatgacatattacttaaaaattaaaatagaaaaaattaaggagtaagctaattttgctttgaactctattcctgaagactcattccttgcttcctctaaagtaatagtcagcattttatctactcacttcaattttgccttaaatgtaccaacttttgtccctttcctcagctacagaaaacgtcagtgacacaggaactacagagaaggctgaggactgcagctgtcacccacaccactgaatgggtgcctaaggaacactctacagggtcatgtaagcctgctgctgtctggagaacatggcatcagcctagaatgcaccaagcctgactttgagcatgtacttttcaaggcaacacattgtaaatcagcctagatcactgtggtcatcttgaaaggtcttgctatcctgccaaaatcccagacaaacctgygcatgtttaaaaagcgaatggcagacgcacacaaacacatggtaggaatcaattctttactagcctttcaaggacaaaagaggaccctcaccttctgggccctgtgctctttgcagacca

SEQ ID NO: 119778 - DNA, 589 bp, Homo sapiens
aaaactgctcgatacatttttgttgaatgaatgaatattgttatgaaaragcactacaaaacctaagtaacttttaattatctttttatgtgtctgcgtctgctactatcctgtgactttgctgagggagggaagggcatcttattcaccattgcactcctacagtctacaccagtgcctggcaggtggttgactctcagatcatgttgtaaaattaatgaatgtaagctagaggtgatgcaatgacaaagaagcccccaaatccttggtccttcccttgttctaagtttatttattctgaaaattctgtctggtattaaatgtatctcagttcattttatctgtgtatcttctctcttttgtaagctgtgaggtccccagggaagggaacttaccttctatattggcagttttcctggcccctgaagagatgtcttcagtgtgatggatgaagcaaatggtacataggtctggctgaatgctggaccaatgtatactttaaaaataacattccttttttattattataaaagtaatcgaagtttatgttagaatatttggagactacaaaatagtataaaaaaagaaa

SEQ ID NO: 119779 - DNA, 589 bp, Homo sapiens
aaaactgctcgatacatttttgttgaatgaatgaatattgttatgaaagagcactacaaaacctaagtaacttttaattatctttttatgtgtctgcgtctgctactatcctgtgactttgctgagggarggaagggcatcttattcaccattgcactcctacagtctacaccagtgcctggcaggtggttgactctcagatcatgttgtaaaattaatgaatgtaagctagaggtgatgcaatgacaaagaagcccccaaatccttggtccttcccttgttctaagtttatttattctgaaaattctgtctggtattaaatgtatctcagttcattttatctgtgtatcttctctcttttgtaagctgtgaggtccccagggaagggaacttaccttctatattggcagttttcctggcccctgaagagatgtcttcagtgtgatggatgaagcaaatggtacataggtctggctgaatgctggaccaatgtatactttaaaaataacattccttttttattattataaaagtaatcgaagtttatgttagaatatttggagactacaaaatagtataaaaaaagaaa

SEQ ID NO: 119780 - DNA, 582 bp, Homo sapiens
ccacacttcagtgtgagtgtcaggtagtgggcaaacctgatagtaatgaggtggggtgtcccacctcattcgtggggcaaggatttccagtcatcatgatgtaggctctaagaactttgctgagtgtgtgtgagattgcacctgctgccttctcttctttttacccacccagagaatctaagattgttgagtaatagaatttcaggattggaatggtcgatagaaatattgttgatatttcttattttgctagtgaaaaaactgagacccagaaatagtggcttgacatgtgaaacaattagttagtggcagagttgggattcaaatgaaaatcactagatctttaaacaagcaaagttggagccagatactatttttccttcctgagaaatccatctacacagagctggatggttttcagttgtataatcttcatagttttttatartggagcaaaggtgaggggtaaggtttttggtacaaaaaaagggaataaggaactgaaaggaagctttgagttgctgtattttttattgttgctgatgcaatatatggaagtggcatcagaaaaatagcatttga

SEQ ID NO: 119781 - DNA, 584 bp, Homo sapiens
caatcattggaccggcagcattctctgcawctctggaaactattattgtatctccacttacctggaacctcttccgaatgttgaaatagtgtcagtgacagccatttccctatggcggcagtgtgtgatcacctgcatttctgcactaggagtttcaggttcctctggaggctaatgtgagttgatcagaaaaaaaggtgcagtcacagctggcttcaaactcaagctgcaatactaccaagatcctcctgggtttcaggtagtagggagctgagccatttactgccatagtaattactcagaggggtttctgtggctctctaatactctgaaacaaatgttagatttcacgaaacacctatgcagtgcccgctggggtttgaggttgtcttctaagcccaaagggaagggaaaggcattatgtgaatgtgccatggcattacgtttgctaagtcgaggcagcctctggccagtgctctaagtactgagtgctacctaaaacgagacgaggcaaagacagttccaactggagaacctgagattcctggagaaggctttgaaagatggtttccacttcaacaggc

SEQ ID NO: 119782 - DNA, 592 bp, Homo sapiens
tcttgccttctgccatgtaagacgtgtctttgctcctcctttgccttctgccatgattgtgaggcccccycatccacatggatctgtgagtctattaaagctctttcctttataaattactcagtctcagatatgtctttattagcagcatgagaataaactaatacaccgttacaatgcaatctgtagagattttgatcatcttaacattccatgggcactggccccatatattttggacattgcaccatgttaacccaattaagtggttagtagaaagtactccatatatttagacaaggcatatgcatcctagaatgaggaattaatctccagcaaggtacctgtaacatctccgtaggtttagctcctcggggcataaagatcattctttctaagattaaaagataagctacggtaccttgtcccttccttgtaaaggaagaggcacagctcttggcaggctgctggattttggaggcagcatatattacccttgtgaatactgttctaacctactcaccatgtcacctaacatactgccagttttgagtgggacacagagtaacaaaagatgctgcactaagtttag

SEQ ID NO: 119783 - DNA, 592 bp, Homo sapiens
tcttgccttctgccatgtaagacgtgtctttgctcctcctttgccttctgccatgattgtgaggccccctcatccacatggatctgtgagtctattaaagctctttcctttataaattactcagtctcagatatgtctttattagcagcatgagaataaactaatacaccgttacaatgcaatctgtagagattttgatcatcttaacattccatrggcactggccccatatattttggacattgcaccatgttaacccaattaagtggttagtagaaagtactccatatatttagacaaggcatatgcatcctagaatgaggaattaatctccagcaaggtacctgtaacatctccgtaggtttagctcctcggggcataaagatcattctttctaagattaaaagataagctacggtaccttgtcccttccttgtaaaggaagaggcacagctcttggcaggctgctggattttggaggcagcatatattacccttgtgaatactgttctaacctactcaccatgtcacctaacatactgccagttttgagtgggacacagagtaacaaaagatgctgcactaagtttag

SEQ ID NO: 119784 - DNA, 592 bp, Homo sapiens
tcttgccttctgccatgtaagacgtgtctttgctcctcctttgccttctgccatgattgtgaggccccctcatccacatggatctgtgagtctattaaagctctttcctttataaattactcagtctcagatatgtctttattagcagcatgagaataaactaatacaccgttacaatgcaatctgtagagattttgatcatcttaacattccatgggcactggccccatatattttggacattgcaccatgttaaccsaattaagtggttagtagaaagtactccatatatttagacaaggcatatgcatcctagaatgaggaattaatctccagcaaggtacctgtaacatctccgtaggtttagctcctcggggcataaagatcattctttctaagattaaaagataagctacggtaccttgtcccttccttgtaaaggaagaggcacagctcttggcaggctgctggattttggaggcagcatatattacccttgtgaatactgttctaacctactcaccatgtcacctaacatactgccagttttgagtgggacacagagtaacaaaagatgctgcactaagtttag

SEQ ID NO: 119785 - DNA, 592 bp, Homo sapiens
tcttgccttctgccatgtaagacgtgtctttgctcctcctttgccttctgccatgattgtgaggccccctcatccacatggatctgtgagtctattaaagctctttcctttataaattactcagtctcagatatgtctttattagcagcatgagaataaactaatacaccgttacaatgcaatctgtagagattttgatcatcttaacattccatgggcactggccccatatattttggacattgcaccatgttaacccaattaagtggttagtagaaagtactccatatatttagacaaggcatatgcatcctagaatgaggaattaatctccagcaaggtacctgtaacatctccrtaggtttagctcctcggggcataaagatcattctttctaagattaaaagataagctacggtaccttgtcccttccttgtaaaggaagaggcacagctcttggcaggctgctggattttggaggcagcatatattacccttgtgaatactgttctaacctactcaccatgtcacctaacatactgccagttttgagtgggacacagagtaacaaaagatgctgcactaagtttag

SEQ ID NO: 119786 - DNA, 578 bp, Homo sapiens
atttttaaaaccatcaggtctcatgagacttactcactttcaggagaacagcacaggaaagagcctgccccccccaccatgattcaattacctcccaccaggttcctcccatgaaacgtgggaattgtgggagttacaattcaagatgagatttgggcggggacacaggaaaatcatatcayctatcaagcataaatttttttaaattctgtaattggttgctttgtttttcataaaaacacccaagcaactaattgtttagttatcttttgtaaattggcaagtttaaatccagcaaattatttctcacttcaagtattaatatttgatctgtccacaggtaagaaaactgaagcaggtatgtcatgcttttccaaccatcactcagccaattaatagtaaagccaggctagtggctctttctatctgaggtgtataactctacctgaggggttcatctttgctggttttcttgctcccactgcctgctctcaattattcccaataccatactatacataaatctacataatttttgacttttgaataatagacatgcttgaaattgaaattgaagg

SEQ ID NO: 119787 - DNA, 567 bp, Homo sapiens
aagtctctgcttttaatttcattttctcaccgtgcattataaaatagcatttgtagaataagttaataataattttaagcaatacctattttcaaacaagacaaaattattattctatttgaattcaatcccyaacaaataactagtatcaaatcagtggtactgcaaagaatagttaatatccagggtattgttttagctgcaagtgtttgtggattactgaacagtcaagtgggtttgctttgagattattgctttcccatgtgtttattctcttcacagtctttttcagttgttgcctggttcatctttttagacatcatgtaattggtagaacaacagtcaagaaaaaggttgaaaaaaaatacagatgagttctctggagatacgatgaagcaatctgagtgaatcatgatgtgcagtgggctttaggtttctatttttgtgcaagggaccgattatagagctctgaacttgaaatcttattaaaatctctgaagatgcagtagaatacatctcatttaagaagtgttctctaagagatttataattcagtattgtttatat

SEQ ID NO: 119788 - DNA, 567 bp, Homo sapiens
aagtctctgcttttaatttcattttctcaccgtgcattataaaatagcatttgtagaataagttaataataattttaagcaatacctattttcaaacaagacaaaattattattctatttgaattcaatccctaacaaataactagtatcaaatcagtggtactgcaaagaatagttaatatccagggtattgttttagctgcaagtgtttgtggattactgaacagtcaagtgggtttgctttgagattattgctttcccatgtgtttattctcttcacartctttttcagttgttgcctggttcatctttttagacatcatgtaattggtagaacaacagtcaagaaaaaggttgaaaaaaaatacagatgagttctctggagatacgatgaagcaatctgagtgaatcatgatgtgcagtgggctttaggtttctatttttgtgcaagggaccgattatagagctctgaacttgaaatcttattaaaatctctgaagatgcagtagaatacatctcatttaagaagtgttctctaagagatttataattcagtattgtttatat

SEQ ID NO: 119789 - DNA, 576 bp, Homo sapiens
tgtattgagattttctattccttctttagtcagttttggtcattcgtgactttttaggaatttgtctatttaagttgttgaatttgttggcgtaaagttgttaatatttctttgtctttctaatctgtgaggggtcagtggtaatcatctctctttcattcctgatttttgtggttttctttctctctctctttgccaagggtttgcyaattttgtttttaaagaaccaccttttaatttttcctctgttgtttttctgttttacatttctttaatttctcctgtcatctttattttcttcattctgttttcccttgatatggtttagtcttctgttttctacattttaaaggtgaattcttagattattgatttgagatttttttctttaatataggaatgttaacactatacgtttttttctaagtcttgtgttagctgcatctcatacacttggacatgagttgtatttctattattcagattaaaatacttgctcattcccccttgtaattttaaaaaaatttttctttgacccgtatttagaaataactgcattattgttggtaaatatac

SEQ ID NO: 119790 - DNA, 587 bp, Homo sapiens
aacttcagagagccagcatggcttgactgtcacgcttcctattaatgttttgagaagcagcatccaggacttcaggatggaacatctcayttgtgaggtcaaagtcttttggcagagcctgcagaacacggctcccagaactagcatataaagctgaaaatctgccttaggactcctaaggctctccctattccaataactcgatgaaaggcaggtagtttcccacagggttttcaggtgctcggtcatggctggcaacatgtccagcagtcctgctccacatggtagtagtcaaggcatatcctgtaacaaaacctcacctcccctagctgagttgcccatctgagaagagaaaaaccagcccctcctgaagcaccattcaaagggttccatgtccatctttatcactccagaaaaacaaacaaacaaaaagagtgatggaaaattacagcaacactttttattcacagacaacttggaccatgtgtgaacgccttaggtgtagtttatatgaatttatcctctgcacgtccctatggctgcttggagtgttagactgatggccaacccaaaaggtgactccctaa

SEQ ID NO: 119791 - DNA, 587 bp, Homo sapiens
aacttcagagagccagcatggcttgactgtcacgcttcctattaatgttttgagaagcagcatccaggacttcaggatggaacatctcacttgtgaggtcaaagtcttttggcagagcctgcagaacacggctcccagaactagcatataaagctgaaaatctgccttaggactcctaaggctctccctattccaataactcgatgaaaggyaggtagtttcccacagggttttcaggtgctcggtcatggctggcaacatgtccagcagtcctgctccacatggtagtagtcaaggcatatcctgtaacaaaacctcacctcccctagctgagttgcccatctgagaagagaaaaaccagcccctcctgaagcaccattcaaagggttccatgtccatctttatcactccagaaaaacaaacaaacaaaaagagtgatggaaaattacagcaacactttttattcacagacaacttggaccatgtgtgaacgccttaggtgtagtttatatgaatttatcctctgcacgtccctatggctgcttggagtgttagactgatggccaacccaaaaggtgactccctaa

SEQ ID NO: 119792 - DNA, 606 bp, Homo sapiens
tatatatgcagaaaaagcatttgactaaattcaaaatcctctcatgactaaacctctcaacaaattgggcrtagaaggcatgtaccttaacacaaaacaggacatatataacaagctcacagctcacatcatacccaacaatgaaaaagtgaaatcttttctgctaagatcaaaaacaagacaaggatatttattctcactacttctattcaacttatttctggaagtcctagccagagcaattaagccaaataaagaaataaaagattcagattgaaaaggaagaagtaaaattgtctctgtttgatgacatattatatataggaaaccctaaaaactccaccaaaaagctattagaaatgataaatgaattcaataaaatttcagaattcaaaatcaatgtacaaaactcagtagtttctttacactcacaacaaactatatgacaaaaataaagaaatcaatctcattcacagtagcatcaaaaaaaacgtattttttttgtttaggagcacatttaggattgtacttaggagtacatttaaccaaggaggtgaaagatctgtattctgaacactataaaacattgatgaaaaattgtagatg

SEQ ID NO: 119793 - DNA, 606 bp, Homo sapiens
tatatatgcagaaaaagcatttgactaaattcaaaatcctctcatgactaaacctctcaacaaattgggcatagaaggcatgtaccttaacacaaaacaggacatatataacaagctcacagctcacatcatacccaacaatgaaaaagtgaaatcttttctgctaagatcaaaaacaagacaaggatatttattctcactacttctattcaacttatttctggaagtcctagccagagcaattaagccaaataaagaaataaaagattcagattgaaaaggaagaagtaaaattgtctctgtttgatgacatattatatataggaaaccctaaaaactccaccaaaaagctattagaaatgataaatgaattcaataaaatttcagaattcaaaatcaatgtayaaaactcagtagtttctttacactcacaacaaactatatgacaaaaataaagaaatcaatctcattcacagtagcatcaaaaaaaacgtattttttttgtttaggagcacatttaggattgtacttaggagtacatttaaccaaggaggtgaaagatctgtattctgaacactataaaacattgatgaaaaattgtagatg

SEQ ID NO: 119794 - DNA, 606 bp, Homo sapiens
tatatatgcagaaaaagcatttgactaaattcaaaatcctctcatgactaaacctctcaacaaattgggcatagaaggcatgtaccttaacacaaaacaggacatatataacaagctcacagctcacatcatacccaacaatgaaaaagtgaaatcttttctgctaagatcaaaaacaagacaaggatatttattctcactacttctattcaacttatttctggaagtcctagccagagcaattaagccaaataaagaaataaaagattcagattgaaaaggaagaagtaaaattgtctctgtttgatgacatattatatataggaaaccctaaaaactccaccaaaaagctattagaaatgataaatgaattcaataaaatttcagaattcaaaatcaatgtacaaaactcagtagtttctttacactcacaacaaactatatgacaaaaataaagaaatcaatctcattcacrgtagcatcaaaaaaaacgtattttttttgtttaggagcacatttaggattgtacttaggagtacatttaaccaaggaggtgaaagatctgtattctgaacactataaaacattgatgaaaaattgtagatg

SEQ ID NO: 119795 - DNA, 648 bp, Homo sapiens
ggtttaaacataaaactgtaaaactactagatgaaaacataggggaaaagttccacaatgttggtttggtcaaagatttcttggatataacccccaaagcacaggcaacaaaagcaaaaatatatgggattgcatcatactaaaaagcttctgcacarcaaaggaaacaatatggtgaagagacaacctacaagttgtgagaaaatatttgcagagcatacatctgatgaaaggctaatctccaaatatataggggactcaactcaatatcaagaaaacaaataaccaagtcaaaaaatgggcaaggtcctaaatagacatttctcaaaaaaaatacaaatgactaacataaaaaaagtttgtcatcctaattatcagggaaatgcaaattaaaatgacagtgagatgccacttcatacctgttagaatggctactatcaaaatgataaaagataacaagtgttgaagaggatacagagaaaagggaaccctcgtacactgttggtggaaatgtaaattaatactattatgaaaaatagataaaagttactcaaaaaactaaaactagaattactatatgatccagcaatcccacttccttgtatatatccaaaggaatttaagtcaatatgctgaagagatatctcc

SEQ ID NO: 119796 - DNA, 616 bp, Homo sapiens
tatcacaaggactttctataaactcacaagaaatttctgcccacccagcacactctgtttgtccagctcatactgtaggtgtctctataataggacctatcataaaaaattcctcaagactgcagcatttcagataagccaccctcacaagaacacttgcctagcaatggctgtttctgccagtaagttaacaccagctcctgcatcagaycctgtgaccaatgatgtttgtttcaaaacagcttgcatggacttctttttgtctttacatattttccttacctcaacctcttgggatgcacctatgattgatcatagcacaaatatctcagattataatccttgtttatttccaaataaatttatttctttggagatccactttttctgttattatacattgacattgttattatgaaattggttgggtgatgtgtcttattttcttgtctccagaagaatttctgtaacagtgcaattaaacgttctttgcatgtttgctagaactcacctgtaaaattgtctgagcaaccaaagcctggtttttgtgtttagtttttcttttgtgattggggaggggggtttatcgtactgattcaaggtgtgaaggtaacat

SEQ ID NO: 119797 - DNA, 641 bp, Homo sapiens
tttagaatatatatgaactcccaaaaatcaacaggaaaaataagacatagaacaagcaaaatgcataaacaaaagaaggcaaaacaaaaataatgactcataattatatgaaaagaagctcatcttcatagatgagcagataaatgcaaattaaaaccaccctgagatgctttttacatccatgagcctgataaaagttagagtctaaaagtaataattaacaaagatgggaagtaacagaaaatcttgtccattactggttaaagtataaactgatacagctactttayagaatattacattatagaataaagttgtgagtatgtatatgcagtgactcagcatattcattgctagtatgtactcaagagaaacttacaggagtggcctaggaagtaaatacaaaatgattacaacattgtttgttatatcaaaaaataaaaaagacacccaattttccagcaaaaaaaataagtaaaaataaatcctggtgtattctaacaatggaataatatatagccattaaaataaatcaactattactgtacatatgaatgtaagtatcagcaaaacatattgtttagtgaaaaactaagaagctgaagaagaatatatacaatatggttacatttatatgaagt

SEQ ID NO: 119798 - DNA, 641 bp, Homo sapiens
tttagaatatatatgaactcccaaaaatcaacaggaaaaataagacatagaacaagcaaaatgcataaacaaaagaaggcaaaacaaaaataatgactcataattatatgaaaagaagctcatcttcatagatgagcagataaatgcaaattaaaaccaccctgagatgctttttacatccatgagcctgataaaagttagagtctaaaagtaataattaacaaagatgggaagtaacagaaaatcttgtccattactggttaaagtataaactgatacagctactttacagaatattacattatagaataaagttgtgagtatgtatatgcagtgactcagcatattcattgctagtatgtactcaagagaaacttacaggagtggmctaggaagtaaatacaaaatgattacaacattgtttgttatatcaaaaaataaaaaagacacccaattttccagcaaaaaaaataagtaaaaataaatcctggtgtattctaacaatggaataatatatagccattaaaataaatcaactattactgtacatatgaatgtaagtatcagcaaaacatattgtttagtgaaaaactaagaagctgaagaagaatatatacaatatggttacatttatatgaagt

SEQ ID NO: 119799 - DNA, 560 bp, Homo sapiens
gcggttttgccatgttgcccaggctggactcgaactccttgcctcaagtagtccacctgtctcagccccgcaaagtgctggtattacaggagtgagccactgcacccagcatttgccaagacctttgatggcaggctttttccaggtgatcagtccttgtctggtctggctctgccccactctccttctcacctagttggaatccctagctacttttcagtagaggagagtgtgtaccccaatcccagcttggttcagatctgcatttaactcatggaacctggctgctccccaggttctgaagaaaaaaacggtctctctgtgggtatgataaaggatgggcctgccccaggaccctgtgagagggaagcccaatgtcccaccakgttggcagggctggggaagggaaagtgttatggcagccccaagaaaaaaaagaggcagcagagggagcaggacagcgctcacatggaactcatgccactgcctgaggggagggaggagtgcacgccagtgacgtcagggggcagagaggcgcagttccagggcggctttccccc

SEQ ID NO: 119800 - DNA, 525 bp, Homo sapiens
aggatgggcctgccccaggaccctgtgagagggaagcccaatgtcccaccaggttggcagggctggggaagggaaagtgttatggcagccccaagaaaaaaaagaggcagcagagggagcaggacagcgctcacatggaactcatgccactgcctgaggggagggaggagtgcacgccagtgacgtcagggggcagagaggcgcagttccagggcggctttccccctcacttcctgccatgttactctgatcgcctccaggtgagcctgcccactttgtgcccaggggcctgtagaaaaccacagctccccatggttatggccccaggagtggggcagagcagggaggagtcctggacagaggagaggmaggggcaggagggagtgggcctcaaactccaggagggggcccttctcatgggtcctgctttctggcttctccttccttacccctgggctgatcacttggggaagaactgagacaaagtttctcaccctcaggcccaaagggtttaattactgggcc

SEQ ID NO: 119801 - DNA, 548 bp, Homo sapiens
tttctcctccccttttgctttttgctctcttgttagtatattaattgttttcactctctgaatcttttttccccatttctttggcagacatttttacttgtcttggaagagtaggtgaagagctgtttttaggactctttgaaagggtacagtatgggtgacagtcttggctaatggtaacatccagggagctggggtcagcgtgcgcacactcagttcaaattagcaaacactggcactcagtagcaggaatacaagtgactgcaaagtgttaaacacatctggaragggatactgacatcatcctcagaatctgtggggagttcacatagccagttaagacccattcttctttgaccctgtaaagattctttaaagaataaatacccttagtggttttctagccagcttgcctgctcatttatctttgaggacgatatgccttgtggagctccacaggccccagaggggtatggattctgcatttaaaagtgctgaagctgagagactgggtcttggtggaccccgagaggtctgtttctcctcta

SEQ ID NO: 119802 - DNA, 377 bp, Homo sapiens
agatctcctaaaactgctatatagttctgcctcactcttacaaagattcatctcttgagagttttgtgctctacccccagatgtggtctttctggttmtgaagcttttgcttcagtcaccctgaattttgccagccctatgcatgctataccttggattgccaacttgccctcactgaagccagtttctctggttagaatagttgcccaaacccatgcctaatactctagtaaacaaggttctacctgggcttaggttaacttttgctcctttgggccctgtgttctaccagcattccatttatctgaaactctccctcaccttaagaacttatctgttctttaatgatttactgctgcttcctgggctcgaaagaa

SEQ ID NO: 119803 - DNA, 572 bp, Homo sapiens
atggtgtataaacaactttagattctttgtttaagaaattctgccagtttgtaatatatgcttcattcaaagtagctaagggctgtacctggctaatagtaggcayctaatatttgttgaaaaggaatactgagtagctgggacctcctgagtagctgggaccacacacatttaacctgtatttataaaattactgtttagagaataacatttgatggaatcatgcttttactttctgcttacgactcaattgtttgtactgacattaacatcccaaatccttagcatggcctacaaggccctgagcaatgtggcacctgctgaagcctgctgcctcatttaataactctttgtctctttcccagatccagccactctaacattttttagctcctggaccaagacaagctcttcccagaacctgacctttgtacctgttctttattcctggagtatttttcccctgacaaattacttatcatctatcataattcaggttaaatggcactaactcagggaaggcttccctaactgcctcccttctccaaccaaattaggaacaattatatggc

SEQ ID NO: 119804 - DNA, 386 bp, Homo sapiens
tttataaaataccgagattatggtgtataaacaactttagattctttgtttaagaaattctgccagtttgtaatatatgcttcattcaaagtagctaagggctgtacctggctaatagtaggcacctaatatttgttgaaaaggaatactgagtagctgggacctcctgagtagctgggaccacacacatttaacctgtatttataaaattactgtttagagaataacatttgatggaatcatgcttttactttctgcttaygactcaattgtttgtactgacattaacatcccaaatccttagcatggcctacaaggccctgagcaatgtggcacctgctgaagcctgctgcctcatttaataactctttgtctctttcccagat

SEQ ID NO: 119805 - DNA, 386 bp, Homo sapiens
tttataaaataccgagattatggtgtataaacaactttagattctttgtttaagaaattctgccagtttgtaatatatgcttcattcaaagtagctaagggctgtacctggctaatagtaggcacctaatatttgttgaaaaggaatactgagtagctgggacctcctgagtagctgggaccacacacatttaacctgtatttataaaattactgtttagagaataacatttgatggaatcatgcttttactttctgcttacgactcaattgtttgtactgacattaacatcccaaatccttagcatggcctacaaggccctgagcaatgtggcacctgctgaagyctgctgcctcatttaataactctttgtctctttcccagat

SEQ ID NO: 119806 - DNA, 572 bp, Homo sapiens
atggtgtataaacaactttagattctttgtttaagaaattctgccagtttgtaatatatgcttcattcaaagtagctaagggctgtacctggctaatagtaggcacctaatatttgttgaaaaggaatactgagtagctgggacctcctgagtagctgggaccacacacatttaacctgtatttataaaattactgtttagagaataacatttgatggaatcatgcttttactttctgcttacgactcaattgtttgtactgacattaacatcccaaatccttagcatggcctacaaggccctgagcaatgtggcacctgctgaagcctgctgcctcatttaataactctttgtctctttcccagatccagccactctaacattttttagctcctggaccaagacaagctcttcccaraacctgacctttgtacctgttctttattcctggagtatttttcccctgacaaattacttatcatctatcataattcaggttaaatggcactaactcagggaaggcttccctaactgcctcccttctccaaccaaattaggaacaattatatggc

SEQ ID NO: 119807 - DNA, 618 bp, Homo sapiens
agtgtcacagtttgtactttatagtttgaagtcaataagaaagctcatataccttcctaaaagtcacttgttaatgtttgatattaatctaattttatcataaattaaaagtataaaactacaaatttcttaaagataaaatatccaaatggattcagtcaaattaagcatgataatatcaaatatcagaataggttaccatgcaggaggtactgagtacttaaaaggatggggaatgcaatgaacataaaagctggtaccaaggggaggaggagacagtgatgaattaaaacattatcttaactaatccaagtgctggtcttcwatactttcatgtgtatagacaaagagaaactgcagagatttctcacaacctctgtggccattttatgcatcttagcaaaaactctggtgaaatccctccaaaacatatttattaggcatggaaaaagccttacatgacaggtggcataggctccttatgaaatcactgcaggatgggaagccatttagggcttcgtaattgtgaaagattgtatagaaactgaggcacttaaatagcagtgagcatgagaaaatgtggtagataatggtggtgattctatttcttgtgaaagt

SEQ ID NO: 119808 - DNA, 619 bp, Homo sapiens
ggtgattctatttcttgtgaaagtccacttactctgttctgctacagttgtgggctttccgatttcacataccccagtctctatattctgtctcaatccacagcctacctcaactaagtcygtcccaggcacctcttactgcaggtgataatccatctgttaatcatgttttcctcttatgtctactttctgtcagagaattgtggctgcaaactgggaagggaaggaaattataagaatatgtataagtacaaatggaatatgttggaaatgaggaatagttaatatcgcaggtcatttaaacacctgatgaatttcatggatagtcaggaatcttgttcttacctaatctgttaattttagatcagacattacactgaaagtattgatgatgggtttaaatcaggttgcagctcacatgttgtgataatattatgttgattttttgtttttaatatgtgaggaacagaataactgtatactatttattcatagtgacattgcaatattgattttagtacatattattatcttcataatcacaatttcctccccattttcttagttctcataattttagccacagcccagttggctggaccaatggatggagagaatc

SEQ ID NO: 119809 - DNA, 619 bp, Homo sapiens
ggtgattctatttcttgtgaaagtccacttactctgttctgctacagttgtgggctttccgatttcacataccccagtctctatattctgtctcaatccacagcctacctcaactaagtccgtcccaggcacctcttactgcaggtgataatccatctgttaatcatgttttcctcttatgtctactttctgtcagagaattgtggstgcaaactgggaagggaaggaaattataagaatatgtataagtacaaatggaatatgttggaaatgaggaatagttaatatcgcaggtcatttaaacacctgatgaatttcatggatagtcaggaatcttgttcttacctaatctgttaattttagatcagacattacactgaaagtattgatgatgggtttaaatcaggttgcagctcacatgttgtgataatattatgttgattttttgtttttaatatgtgaggaacagaataactgtatactatttattcatagtgacattgcaatattgattttagtacatattattatcttcataatcacaatttcctccccattttcttagttctcataattttagccacagcccagttggctggaccaatggatggagagaatc

SEQ ID NO: 119810 - DNA, 619 bp, Homo sapiens
ggtgattctatttcttgtgaaagtccacttactctgttctgctacagttgtgggctttccgatttcacataccccagtctctatattctgtctcaatccacagcctacctcaactaagtccgtcccaggcacctcttactgcaggtgataatccatctgttaatcatgttttcctcttatgtctactttctgtcagagaattgtggctgcaaactgggaagggaaggaaattataagaatatgtataagtacaaatggaatatgttggaaatgaggaatagttaatatcrcaggtcatttaaacacctgatgaatttcatggatagtcaggaatcttgttcttacctaatctgttaattttagatcagacattacactgaaagtattgatgatgggtttaaatcaggttgcagctcacatgttgtgataatattatgttgattttttgtttttaatatgtgaggaacagaataactgtatactatttattcatagtgacattgcaatattgattttagtacatattattatcttcataatcacaatttcctccccattttcttagttctcataattttagccacagcccagttggctggaccaatggatggagagaatc

SEQ ID NO: 119811 - DNA, 602 bp, Homo sapiens
ggtccatgtgcctcagccttccaaactgctaggattacaggagtgagccaccgcacctggccccaaccacattttttgaggcttggractttcagcctcacctgctgaactccaggaggcaaaaggaactggagattgacttaactaccaatggccagtgattttatcaatcatgcctccataaacacccaaacagcagggtttggagagcttctgtgttgctaaacacaaggaggtcctgggagggtagtgtgcccaacagagggcatggaagctctgtgcccctccccacttaccttgtcctgtgcatctctttcattggctgttcctgagatggagccattacattgagccagtaatagaaaataaggtggccagatgcactggctcatgcccgtaatcccagcactttgggaggcagaggtgggcggaatcacttgagcctaggaatttgagaccaacctcggcaacataagaagaccccatctatacaaaaaataaaagaaattagccaaatgtggtggtgggaaccctgtaattccagctacttgagaggctgaagcaggagaatcacttgagccctggatgttgaggcttcaata

SEQ ID NO: 119812 - DNA, 602 bp, Homo sapiens
ggtccatgtgcctcagccttccaaactgctaggattacaggagtgagccaccgcacctggccccaaccacattttttgaggcttggaactttcagcctcacctgctgaactccaggaggcaaaaggaactggagattgacttaactaccaatggccagtgattttatcaatcatgcctccataaacacccaaacagcagggtttggagagcttctgtgttgctaaacacaaggaggtcctgggagggtagtgtgcccaacagagggcatggaagctctgtgcccctccccacttaccttgtcctgtgcatctctttcattggctgttcctgagatggagccattacattgagccagtaatagaaaataaggtggccagatgcactggctcatgcccgtaatcccagcactttgggaggcagaggtgggcggaatcacttgagcctaggaatttgagaccaacctsggcaacataagaagaccccatctatacaaaaaataaaagaaattagccaaatgtggtggtgggaaccctgtaattccagctacttgagaggctgaagcaggagaatcacttgagccctggatgttgaggcttcaata

SEQ ID NO: 119813 - DNA, 526 bp, Homo sapiens
agcacaaaactaggcagctgtttgggcagacaccgagctagctgcaggaggttttttttttttcatgccacartggcaactgcgaatgccaacaagacagaaccattctctctcctggaaagggggctgaagccagggagccaagtggtctggctcggcgggtcccacccctacagagcccagcaagctaagatccactggcttgaaattcttgcacagcagtctgaggttgacctaggacactagagcttggtggggggaggggcttccacattgccaaggcttgagtaggcagttttacccccactgtgtaaacaaagccaccagaaagtttgaactgggtggagcccaccacaactcagcaaggccacagcagccagactgcctctctagatttctcctctctgggcaaggcatctctgaaaaaagggcagcagccccagtcagagacctatagataaaacccccatctccctggaacagagcacctaggggaaagggcggctgtgggcacagcttcagcaga

SEQ ID NO: 119814 - DNA, 526 bp, Homo sapiens
agcacaaaactaggcagctgtttgggcagacaccgagctagctgcaggaggttttttttttttcatgccacagtggcaactgcgaatgccaacaagacagaaccattctctctcctggaaagggggctgaagccagggagccaagtggtctggctcggcgggtcccacccctacagagcccagcaagctaagatccactggcttgaaattcttgcacagcagtctgaggttgacctaggacactagagcttggtggsgggaggggcttccacattgccaaggcttgagtaggcagttttacccccactgtgtaaacaaagccaccagaaagtttgaactgggtggagcccaccacaactcagcaaggccacagcagccagactgcctctctagatttctcctctctgggcaaggcatctctgaaaaaagggcagcagccccagtcagagacctatagataaaacccccatctccctggaacagagcacctaggggaaagggcggctgtgggcacagcttcagcaga

SEQ ID NO: 119815 - DNA, 526 bp, Homo sapiens
agcacaaaactaggcagctgtttgggcagacaccgagctagctgcaggaggttttttttttttcatgccacagtggcaactgcgaatgccaacaagacagaaccattctctctcctggaaagggggctgaagccagggagccaagtggtctggctcggcgggtcccacccctacagagcccagcaagctaagatccactggcttgaaattcttgcacagcagtctgaggttgacctaggacactagagcttggtggggggaggggcttccacattgccaaggcttgagtaggcagttttacccccacwgtgtaaacaaagccaccagaaagtttgaactgggtggagcccaccacaactcagcaaggccacagcagccagactgcctctctagatttctcctctctgggcaaggcatctctgaaaaaagggcagcagccccagtcagagacctatagataaaacccccatctccctggaacagagcacctaggggaaagggcggctgtgggcacagcttcagcaga

SEQ ID NO: 119816 - DNA, 387 bp, Homo sapiens
gtgtgtgtgctgtgcttgaatatctcactgctcatttatacacaggctttctggtgactgagttaacagtatctgtttcataaataatgtagccctctttctttctttctctctctctctctyttttttttttttttttttttttttgagacagggtcttgctctgctacccaggctggagtgcaatggtgcagtctcagctcactgcaacttcaccatgcctggctaattttttcttttttttttttttgagacggagtttcgctgtttttgcccaggctggagtgcaatggcacaatctcggctcaccacaatctttgccttttgggttcaagggattctcctgcctcagcctcccgagtagctgggattacaggcatgtgccac

SEQ ID NO: 119817 - DNA, 387 bp, Homo sapiens
gtgtgtgtgctgtgcttgaatatctcactgctcatttatacacaggctttctggtgactgagttaacagtatctgtttcataaataatgtagccctctttctttctttctctctctctctctcttttttttttttttttttttttttgagacagggtcttgctctgctacccaggctggagtgcartggtgcagtctcagctcactgcaacttcaccatgcctggctaattttttcttttttttttttttgagacggagtttcgctgtttttgcccaggctggagtgcaatggcacaatctcggctcaccacaatctttgccttttgggttcaagggattctcctgcctcagcctcccgagtagctgggattacaggcatgtgccac

SEQ ID NO: 119818 - DNA, 607 bp, Homo sapiens
tacagttcaatatgggaaatataatttgttaaaatataaaagtgcaattgtgttacatgctgtacgaagtacatgttgacatgtgagcatataataaatgggctggaggccagaggattgccaaagagaatgggcctcctgctgagatgaaaagttgagcagggattagttggcgaaagtggagggacgatcctttctaggcaggasgaagaacatgtacagaatctctgaggtgtgatgcgacaaagtctatataaaaaactgaagaaaggtctaatgtggcttaaatacagaagctagtaggagaggagtcgaaaacaggctggagaagtagaaagtgatcgcattctgcaggaacttatattgtataaaatatattgtatattgtataaaaagaatttctctttattctaagtgcaatgtgaagccaatgaagtgctttaaacaggtgatgtgatttgattgaatttattacttcacttaacaaatattcattacatgcccactgtttgtcagatattgctgtagcccctggtgatacagtagggaataaaacaggcaaaaatccctgtcctcttgcagcttataatggactgcaatgtttaat

SEQ ID NO: 119819 - DNA, 607 bp, Homo sapiens
tacagttcaatatgggaaatataatttgttaaaatataaaagtgcaattgtgttacatgctgtacgaagtacatgttgacatgtgagcatataataaatgggctggaggccagaggattgccaaagagaatgggcctcctgctgagatgaaaagttgagcagggattagttggcgaaagtggagggacgatcctttctaggcaggaggaagaacatgtacagaatctctgaggtgtgatgcgacaaagtctatataaaaaactgaagaaaggtctaatgtggcttaaatacagaagctagtaggagaggagtcgaaaasaggctggagaagtagaaagtgatcgcattctgcaggaacttatattgtataaaatatattgtatattgtataaaaagaatttctctttattctaagtgcaatgtgaagccaatgaagtgctttaaacaggtgatgtgatttgattgaatttattacttcacttaacaaatattcattacatgcccactgtttgtcagatattgctgtagcccctggtgatacagtagggaataaaacaggcaaaaatccctgtcctcttgcagcttataatggactgcaatgtttaat

SEQ ID NO: 119820 - DNA, 562 bp, Homo sapiens
gaattctttactggacaaagccaaaaatcctcccaagctaagccccggttttggggtcacctgtcatgcaacagtaggaaccagaataggctctctctcactttgctaaatcttctaaaactgtgaratgaaacacaaagagaaatgtacacaaaacatgaatgtataactccagggattatcacaaaatgcccatcacccagacacccttctgctcctcccagtgaatatccactcccttcacctgactaatatctaatatcctgactttaacataatagtctagtttttgcctgtgtttggaatttatgtcagtggaatcatacattattttgtgtttggtgtctatcactcaacactgtgtttataaaattcacctatgttgctccatgtttaggtttgttcattttcattatccagtattgggttgcatgaatatacaacaagttattcaaccattccctaaacatttggattatgtccaggttttagctattataaaacaatgtggttatctctttgaacaccagagtttagttttgcctgtttaaggaaattttat

SEQ ID NO: 119821 - DNA, 569 bp, Homo sapiens
aaatctactgaaataatgtaagaaatttcaaagtaatttcatgaatttcacaaaagatgtacctttctatttaaaagagttaccttaatgctctgtgtacaatactwgattacaattatataataaaatccaaaagtaccaaaattcagtcaacaaccattcattcaaatgtgttaaagtataattttcacaaaagtaaaattatttctctcatacaaatataatataaacaagtgtaaaaaatgttattgaactcacatgtgtgagggaaccagtgaggtattaaaaccagttcaagaagcaattgagaaactattatgcatgcatgtatgcacttgtgtgcacacacacacacagacatattcagttaagatagttgggtaagatacaaaactggtaatgtcttatagggcaataatatttagaattatctgttactctgtacagaaattatttccatttctactgaacagaagtctataaactgatacctagaaatgcagatgaataatgtacagtaatctaagtaggtatcttcttctgtatcagtgattctgaaattataattc

SEQ ID NO: 119822 - DNA, 569 bp, Homo sapiens
aaatctactgaaataatgtaagaaatttcaaagtaatttcatgaatttcacaaaagatgtacctttctatttaaaagagttaccttaatgctctgtgtacaatactagattacaattatataataaaatccaaaagtaccaaaattcagtcaacaaccattcattcaaatgtgttaaagtataattttcacaaaagtaaaattatttctctcatacaaatataatataaacaagtgtaaaaaatgttattgaactcacatgtgtgagggaaccagtgaggtattaaaaccagttcaagaagcaattgagaaactattatgcatgcatgtatgcacytgtgtgcacacacacacacagacatattcagttaagatagttgggtaagatacaaaactggtaatgtcttatagggcaataatatttagaattatctgttactctgtacagaaattatttccatttctactgaacagaagtctataaactgatacctagaaatgcagatgaataatgtacagtaatctaagtaggtatcttcttctgtatcagtgattctgaaattataattc

SEQ ID NO: 119823 - DNA, 588 bp, Homo sapiens
aagctacatgtaaaaatgaaagaatttgttacttgctgctttattaattttttatcctttgctttgttgccctgacttccagataatcttgggagattaccttaattgacatagatgtcctgaaggtactaactattcatgaagtgaagacttgttactcaaattataccttattttcattaatttactcctaagttgggttttaaaaatatattttaaacattaaattgtgttaccctgtttgacagcagaatgatttcawgagttttgaccatcacttctgatcaaactaacacaatttttttaagtgcaattaccatgtcagtagattctgcagtctctgctcatgcaagatggcttgtataaccaaaatatctagcctcaattattcttgggactgttttgccagtgtgaatttacatctagccttaataatttttgaataaagtaattatatcccctaatttgatttactagactcaaaactattttaattcattttaaaggaataaagtattgcagtttggacacaatttcaattcatttacaaagtgttttatgaaccaaatgaaactttgcttttaatgg

SEQ ID NO: 119824 - DNA, 556 bp, Homo sapiens
  misc_feature (1)...(556): n = A,T,C or G
ccttggagaatctgaagattatgtgntcttggggttgatcttctcatggagtatcttagtggggttctctgtatttcctgaatttgaatgttggcctgtgtttctacgctggggaagttcttttggataatattctgaagtgtgttttccaacttggttccatttccctgtctctttcaggtactccaatcagtcgtaggttcagttttttacatagttccatatttctcggttaggttttgttcattccttttcattctttttctctaatcttgtctgcctgccttatttcagcaaggtagtcttctatctctgatattctttcttccactcaatcaatttggttattgatacttgtgtatgctttacaaagttcttgtgcygcatttatgttcctctccaaactggttattctagttagcagctcctctaaccttttatcaaggttcttagcttctttgtgttgggttagaatatgctcctttacttcagtgaagtttgttattaactaccttctgaagcctacttctgtcaatttgtcatcttatcttccatc

SEQ ID NO: 119825 - DNA, 653 bp, Homo sapiens
aaccattaatttttagggtgatttgttatatagataattaacataggtgttgataaatttgcttattcataaggaaaaaaagcaaaaatcaaaaccgagtttctgcctcctgctatacacaaaagtcaaactcaagtgaataaatgcctttaatttgaaaatcaaacttcagaattctaaaagttttagaagaaaatatgaaaaaatatctgtatgatatcaggatagggaaaaaattcttaaaacataaaaatgctaacaatagagaaaatattgatccatgactatattaaaatcttcaatcaaaacataycctaaagaaagtaaaatgatgagccacagttggggctgcatcatagttagacttctgcctcttcccagtcctctacttccttctcctcctttccacagggctgatgccaagcacactaaattcaatctcagattttatgtttcgtagagccaacgattttaaatgtcatgtttatcatttccatgaatgtttctatagaataactacatatgtacagattcaacattaagatagagtatattatacctgttccaagtattgtttgaataatatcacagcttgcattatcatggcaaaatgtacctgtagttccactccacctattttaacaggtacatgg

SEQ ID NO: 119826 - DNA, 631 bp, Homo sapiens
atcttttcatgagaagttatttgtatgaaactctatgttttcttacagatcttagcaaggaaaattccttagaaatacacaggtatttgtaggtttgtttcaaagtcacttgagaaaatagatgttgggaaactttgtcccattgtgaaagagatctgggggtagaagtgtccagctgaagaataattcggttccagctataaaaatgttagtgatgcccaacttcagagatgtatgaagaaaatgaagtaagccaggaatcaatcctacaagtacccagcaggtttcatctggcattatcatcttatcacataaaattactgttcttttcaaaacattttaatattactattatttttatagacaytttggttgctccgaagttagagaaactactattctgctgaggttcatgaacacatgtagttaatattctgtgtgaaggatcataaagccaaaaaaaaaaaaaagaaatattaagtgcaagttcataatggtaactggtattttgaaaacaactaatattttgactgttaagtaatgccttttctccataatgaaatgcgttatttcaaaggtcctggaatattgctgatggtcacatttatagatactgaagaaaaatttagaa

SEQ ID NO: 119827 - DNA, 611 bp, Homo sapiens
cagaaataaatatagtgcctgttccaaccatgtaactcaccaccaaaaccaatacgaaaggagtgtgagaaatgtcaacagagctgtgatttaccagtgaagatttctgtgatgcagttgtgggtaaattcaactatctaataattgtattctgttaccatgaacctgatgatactgatgtgaaaccaaactataatctcaaagtttagagctctgctgtccaatgtggtagccactattgacatgtggctatttaaaatcaaattttattcacttaaacttacatacaacttacaatttttcatcagtggcactagcacatgtgcagtgctcaatagctatatgtgtctagtgatttctagatgaaacactaaaacagtaggctmtttcctttatcacagcaagttgtattgggatagatagagagatgatagctagataatcagtaagtagataaatagatgattgatggacagatgatagatagatagacagacagacagaagtagatgtagacatggacatatttaaatctgtatgccaaagtcagcctactcctgctctctagaaccaatgattaaatattcaggaattttgtgacatgattgcca

SEQ ID NO: 119828 - DNA, 585 bp, Homo sapiens
gctccacctgtcccattaacttctacctcaatttgacttttaagagcaggcaacaacaatgacatgaaaataggaaatataaacttcattttaattttttcacagaaagcttaggaattcagtgagttgtggcaacatggtttccattgtctaacattttaaaatgaattgatatggtttaaattcattcatttttaaatcagaattttttggagatggaatatttccagcatgttccttctggrtgatgaaagagggctgttagttcagtatttgtgacaataaatgtgtgtaaaataacatcacctctccagaataatgtcaggaatatgagtctaaagcatgaatgtatatcgctaagacaagactgcgatatacatatttatgtatatctttttatatttaaaaagatatgtctttttaaatatacatgcctgacagtttattttaatacctcctttttgaatatacctgcttagcaggttatcttaaactgtcaggcaggggagtaagcaatactgtgagctagtgatgatagcaaaggcatccacgtaggatccgtatgaagtaagaaaatattcctca

SEQ ID NO: 119829 - DNA, 585 bp, Homo sapiens
gctccacctgtcccattaacttctacctcaatttgacttttaagagcaggcaacaacaatgacatgaaaataggaaatataaacttcattttaattttttcacagaaagcttaggaattcagtgagttgtggcaacatggtttccattgtctaacattttaaaatgaattgatatggtttaaattcattcatttttaaatcagaattttttggagatggaatatttccagcatgttccttctggatgatgaaagagggctgttagttcagtatttgtgacaataaatgtgtgtaaaataacatcacctctccagaataatgtcaggaatatgagtctaaagcatgaatgtatatcgctaagacaagactgcgatatacatatttatgtatatctttttatatttaaaaagatatgtctttttaaatatacatgyctgacagtttattttaatacctcctttttgaatatacctgcttagcaggttatcttaaactgtcaggcaggggagtaagcaatactgtgagctagtgatgatagcaaaggcatccacgtaggatccgtatgaagtaagaaaatattcctca

SEQ ID NO: 119830 - DNA, 564 bp, Homo sapiens
aacctaattgggtgggggagagagtttgtgtgagtgagtcaaatgaatcatagagtttattcctggaatgagtacggactgtggttgaggatgttgagggtaagttagcagctgacatctgtgtttcactttaagcttccacaagacttaagccagatctagttagctgatcatctgcatagttgttctttaagttgggtatgcatarcgctggtagattaggagcttgataatttcattaagtgatcatgatctatttcttctgcctttccatttttacatgtagaagcaaatatcgttaccaaccaaaatgacccatttgctctcattatgaattacaattcttttaaagaatttagtatgcatatccttgaccttttttgaaattaaaaattatcttgaaaatttacctctccgtctgtaatttctgtggtgtgctcaagaacagcttaatagtctgaaaacggatgaatttaaaattagagagttgaaggtcgtaacccagcagtgataactcagctaatgaaatattcatttccaagtacgaagtggcactgtatatca

SEQ ID NO: 119831 - DNA, 564 bp, Homo sapiens
aacctaattgggtgggggagagagtttgtgtgagtgagtcaaatgaatcatagagtttattcctggaatgagtacggactgtggttgaggatgttgagggtaagttagcagctgacatctgtgtttcactttaagcttccacaagacttaagccagatctagttagctgatcatctgcatagttgttctttaagttgggtatgcataacgctggtagattaggagcttgataatttcattaagtgatcatgatctatttcttctgcctttccatttttacatgtagaagcaaatatygttaccaaccaaaatgacccatttgctctcattatgaattacaattcttttaaagaatttagtatgcatatccttgaccttttttgaaattaaaaattatcttgaaaatttacctctccgtctgtaatttctgtggtgtgctcaagaacagcttaatagtctgaaaacggatgaatttaaaattagagagttgaaggtcgtaacccagcagtgataactcagctaatgaaatattcatttccaagtacgaagtggcactgtatatca

SEQ ID NO: 119832 - DNA, 642 bp, Homo sapiens
ttttaggacattataatgtgcatctgtttggtaattcttggttctagacctccttaaatatgaattgactggttggagtctcacctctactttctcaaataaatgttacccactgtgcaccagtgatgattccttcaaagtggagtaaaaacttggatgcctgcaaagcagtataaggcacagttcttctgggcttttgtaatcatctttctcaccttgtaaagatttctccatctaatataaagccaatcactctcaccaattcgatttatctcatctttcgaaaaaagtaatggaagcaatggctctattttcttccgcatatttcatcagtctcttatattcttaaatcatgtaaatacactaaaagtatgatgggtttgggaattgatattttcctggtaaacatacarctgaggtgatggaactagattgtacagtgttctagaaggtagtctaggcaattttggtgttctgggtaccacggacatcattatgttctcaaaggaattgcagaggtttgatttaacccaacaatgtggttagttggtgatcagcatgaatgttattttcccattgtcttagtaaaaaggggattgattattaaacaggaatagttctctttaaatttgaactgtcaag

SEQ ID NO: 119833 - DNA, 587 bp, Homo sapiens
tttacaagccattttaagatactttcaagatcttttctttagaaacaataaaagctgaaatgtaaatcctgaaacccctagaggaaagcacagaggaaaacttttttacattggtctttgcaataaactttttggatatgacactaaaagcaggccacaaaaggaaaaatagacatatgagaatacataagacaaaaaagcrtctgcacagcaaaggaaacattctacagaacaaaaagtcagtttgcagaatgggagaaaatatttggaaaccatataactgataaggggttaattcctaaagatatatgagaccactgcagtttcaaatagacaaataataacccaattgaaaaatggccagaggatttgaacagatatttccccaacaaagacacaaaaattgacaagatgtatatgaaaatatgctcaattattaagtgtcagagagagaaaaatcaaagctacaaggggatatagtatgtctgttgcaaaaaaatataaataaaagattacaaatgcagaggatatggggaaattggaactcttgtacattctttgtagaagtgtaaaagcagtttggtaga

SEQ ID NO: 119834 - DNA, 587 bp, Homo sapiens
tttacaagccattttaagatactttcaagatcttttctttagaaacaataaaagctgaaatgtaaatcctgaaacccctagaggaaagcacagaggaaaacttttttacattggtctttgcaataaactttttggatatgacactaaaagcaggccacaaaaggaaaaatagacatatgagaatacataagacaaaaaagcgtctgcacagcaaaggaaacattctacagaacaaaaagtcagtttgcagaatgggagaaaatatttggaaaccatataactgataaggggttaattcctaaagatatatgagaccactgcagtttcaaatagacaaataataacccaattgaaaaatggccagaggatttgaacagatatttccccaacaaagacacaaaaattgacaagatgtatatgaaaatatgctcaattattaagtgtcagagagagaaaaatcaaagytacaaggggatatagtatgtctgttgcaaaaaaatataaataaaagattacaaatgcagaggatatggggaaattggaactcttgtacattctttgtagaagtgtaaaagcagtttggtaga

SEQ ID NO: 119835 - DNA, 692 bp, Homo sapiens
gatctttgtaatggcatttgtattatatatgcatacacataatatcactcctatatttaatgccaattttatagaaaataaaaattttagtgattrctgtatttcaaaagagcaaccagtacagcatacaccttatctctttacaaagtggcagattatgcattatgcatagttgaataaaccacataggtccccaaatgcagaaaatagtactcttatctccctgtgaatcatgcattgagagtgagaacagcaacattatacacagtatgcatctagaaattatgcctgggtataatcagttaaatattgagtacaaatgtgagtgctggagatgaaggtgagagatgtatttaagttgactttaaaaacccacaaaaaagaacttctttctaggagtcactctatttttggaaggtagacctcatgaagaaaactaaagttgaatttttaagatattttctttgttgcttactcttattccataaaacatcttctctgtaaaaccttatattaattatatgcaaaaccttacacttttgtataaattcccttgtggtgacttaaaagaccatttgtgattctctcttctgtataattttagagagcttttaaatgtacctggtgcctattatcttactcaaccaaagttggcactgcctaacacaatgaaagagctaaaatctacactg

SEQ ID NO: 119836 - DNA, 692 bp, Homo sapiens
gatctttgtaatggcatttgtattatatatgcatacacataatatcactcctatatttaatgccaattttatagaaaataaaaattttagtgattactgtatttcaaaagagcaaccagtacagcatacaccttatctctttacaaagtggcagattatgcattatgcatagttgrataaaccacataggtccccaaatgcagaaaatagtactcttatctccctgtgaatcatgcattgagagtgagaacagcaacattatacacagtatgcatctagaaattatgcctgggtataatcagttaaatattgagtacaaatgtgagtgctggagatgaaggtgagagatgtatttaagttgactttaaaaacccacaaaaaagaacttctttctaggagtcactctatttttggaaggtagacctcatgaagaaaactaaagttgaatttttaagatattttctttgttgcttactcttattccataaaacatcttctctgtaaaaccttatattaattatatgcaaaaccttacacttttgtataaattcccttgtggtgacttaaaagaccatttgtgattctctcttctgtataattttagagagcttttaaatgtacctggtgcctattatcttactcaaccaaagttggcactgcctaacacaatgaaagagctaaaatctacactg

SEQ ID NO: 119837 - DNA, 647 bp, Homo sapiens
agttcctccaggaaagaaaaatttccatgtgattgtgaaaaagataagttgcaatttgtaaatttttgaaggaaattgaagatctcagtggtgtcaagtgattaatacagttaatgcttgtataagaaataggttatatttgaagatttttcaagtaaaaataggttttgaaggtaatacaatttttgctaattataaggtttatgatataatatgaaaatataattggatgaaaaggagataaaggtcattagagatctagaagtcaaggaacttagaggcaagtgggcagggtgaactaatcatatgtaagttgaagtttacaaagaatagaaaggttagtaataatataatgttgaaaaagataagagagtcyatggttaaccccctacccccgaatgcaaagatgatggcaaagctgaatgtcatggacttaatgaaggacttttacaagcagaggaaacaagtggtttggaggtaaccctgaattgcaggaacactaaccctactttacaagtttgatgtacatggcatgagggtaaataatcaggttacacttaagagaagaaactcccttatcaattaagatgggagaaaaaatgctatgaaagaagatgaagattgatagaatgatctggtcaaaaaca

SEQ ID NO: 119838 - DNA, 457 bp, Homo sapiens
gaattccctggtgagtaagtctggctcacagctactacgcaagcccgcaacaaatatttcccaggttcagattcagatctgctcccattatagtcttcaaattctgctaamtggaagaaattaaattttattttattttattttgagatagggtcttgctctgttgcccaggctggagtgcagtggtgtgatctcggctcactgcaacctccacctcctgggttcaagcgattctcctgccttggcctcccaagtagctgggattacaggcatgtgtcacaaacacctggctaatttttgtacttttagtagagacggggtttcgccatgttggccaggctggtctctgacagctggaggacttcataagcagacaataaaatcagtgccaaaagagaagaaatcagtgcccagaaaataaacctagaacaggatgaatctgcataggaaaaagagc

SEQ ID NO: 119839 - DNA, 559 bp, Homo sapiens
tccacctcacccctgcagctcctccctccccagatagtttcattgaccgtatttcttatttgtttcatgttctttccatactcagtgggaacctgttctcttctgtggcttcactgggcccttcctactgcagacaactcgcacagaccttgccttccatgtgataagctaggaagtatccttcagggcattgcctttctcttgctcagttttctttctacttttatgcctttgtgaactctcctgcattcactcagcaaatagtgaccatgtgctctttatggtagattgcayccaaagatgcaaaaaaacccaacagttcctgccttctctgtgtacccatgtggctccacccagccaggagtgggcagtctcctccccttcaatcttggctgacttgcaacttgctgtgactgatagaatgcagtggaaatgatgctgtgtaggttgtccaactgttgggttcaagtgatcctcccacctcagcctcccaagtagctgggactacaggcgtacaccactatgcctggctaattttttttttaactatttttcatag

SEQ ID NO: 119840 - DNA, 587 bp, Homo sapiens
tgcagcacaccaacatggcacatgtatacatatgtaasaaacctgctcgttgtgcccatgtaccctagaactttaagtagaatttaaaaaacatttagaaacaaacaaacaaaaatcatagtattctactcagagcagttccttagtaggttttgtgattttgtcccccagaactcagtatggatgatgtggtaagaattgatattttctgagggtgtttttattagtttcttagggctaccataacaaagtgccacaaactgagtggcttaaaacaacagaaatgttagtatctcacagttctgggggctacaagtctggaattaagtgattggtagattcaatctccctctggaacctgtagggcagaccttctttcttcttcctagcttctgctgttttgcttcaatctttagtgtattttggtttacaggtgattaactccaatttgtgcctccatcttcacatggtgttctccctttatatcttcatgcctttacattgctgtcttcttataaagatagcagccatagtggattaggggcccaacctactccagtatgacctcatcttaatgaattgcatct

SEQ ID NO: 119841 - DNA, 488 bp, Homo sapiens
aagctctctttgcctgctgccatccatgtaaaacctgacttgctcctccttgcctcctgccatgattgtgagacatccccagtcatgtggaactgtaagtctaattaaatctctttcttttgtaagttgcccagtcttggatatatctttatcagcagcattaaaatggactaatatacacctctcctgactttagtttcctcatctataaaatgtgggggttggaaaatttacttctaagggcctcttctaataacttgagaatgataaccatgacctcttgtcacatacctggggcccatgaacatttctgttaggacagggtatggctcatgaggatagaaatgatgaaacaccttyctttctcccaagtcccaatctccttctttagttagttgctaggttttgagaatcctcaggatctgcaattttatttattgcagagtgccatgatgcaacaaagaaaaaggcataagaatggaagatct

SEQ ID NO: 119842 - DNA, 608 bp, Homo sapiens
aacaggtattattaaaaactcaatgagctataacagaatgcagatagacaagaaaatgaagtcaaggaaacaatatgtgaataaaatgagaagttttataaagtgagaaaccataaaaaagaaccaaatagaaatttggagctaaaaagcacaaggattcagttgaaacatttcatgaacagcttcaacagtgacttgatcaagtagaagaaacaatcagcaaagctcagagacaggtcatttgatattatccagtgatatggtttggctctgtgtccccacccaaatctcatgttcaattgtaatccccagtgttgggggaggaacctggtgggaggtgattgattgcatcatgggagtggatttcctccttgctgttttcatgatagtgagtgaatttgcgcaagatctggttgtttaaaagtgtatggcacttcccttttctctctctttgttctgctttggccgtgtgatcatatgccttgcttcctctttgcmctccgccatgattgtaaattttctgaggcctccccagccatgtggaactgtgagtcaattaaagctttcttcttcttatgttacccagtctcatgtacttctttatagtg

SEQ ID NO: 119843 - DNA, 582 bp, Homo sapiens
tttgcctgcagctaaccaatggaaattacttaaaacccttcaccaaaactttcactctcactgcacctcctccatgctgctgtactaccagtagctccccttaccaagatcttctatggagaatacggcttcccagaaatattgatgccccatcgtataggagtttttctaaaggaacccccactttcaccgcccacacccacatgcccctgcacttcaggccatacatttcaatccctgtatctttaacctcctwgttaagtttgtctcttccagaatcgaagctgtaaaactacaaatcgttcttcaaatggacccccagatgcagtccacgactaagatctactgcggacccctggatcagcctgctagcctatgctccaatgttaatgacattgaaggcactcctctccaggaaatctcaactgcacaacccctactatgccccaattcagcagcaagcagttaagagcagtcatcagccaacctccccaacagctcttgggtttttctgttgagagggaagctgagagacaggactagctggatttcctaggctgactaagaattcctaagcctagc

SEQ ID NO: 119844 - DNA, 579 bp, Homo sapiens
tctcactgcacctcctccatgctgctgtactaccagtagctccccttaccaagatcttctatggagaatacggcttcccagaaatattgatgccccatcgtataggagtttttctaaaggaacccccactttcaccgcccacacccacatgcccctgcacttcaggccatacatttcaatccctgtatctttaacctccttgttaagtttgtctcttccagaatcgaagctgtaaaactacaaatcgttcttcaaatggacccccagatgcagtccacgactaagatctactgcggacccctggaycagcctgctagcctatgctccaatgttaatgacattgaaggcactcctctccaggaaatctcaactgcacaacccctactatgccccaattcagcagcaagcagttaagagcagtcatcagccaacctccccaacagctcttgggtttttctgttgagagggaagctgagagacaggactagctggatttcctaggctgactaagaattcctaagcctagctgagaaaggtgaccacacccaccttgtaaaactcagctcacacccaaccaat

SEQ ID NO: 119845 - DNA, 636 bp, Homo sapiens
tctgctttgtgctggatgctgagcaaattactttgggaaacttgagcaaaaacagattaaagcaaatgtctaaacagttcattctcaggcaggtccttgatagttctgccgtatgtgtatataggctcctggaggcagtttttgctgccaaaaaaytaccatcacatcttacagcaacaaaaatggcagagagtgctaatatttagataaaggttaaatagataatttgagtgagagacaaaatattttcacaacaatttttaacattaaggaataaaattaaaaaccctaaaagcttttagaaaaaaaattggatcaaccctaagataaaattcagactgtcttcaggcattttctttataatgacaaataacagagatcacctaggcaatgaatgtctgcagagtactgagtagatgaaaaagcatttaatgcctatatcctcactacatttatattttcaaatatattcgcataggtttatataaaatattcttataattttaatttcctctatatcacttctgtgtccctttcttcctattttaaatatattttttttcttttgtttggtagctgtatgtgtcttcagcccattttccaattagtcagttcttttcttatttataatctcct

SEQ ID NO: 119846 - DNA, 499 bp, Homo sapiens
gatgccattttaacactcttcttgtatttattcagcaattaccatgccctaccacccaccccctaccatatgccaggcactgtgtgaagtattggagagacatcataccaagacacagtccttaccttgagagcctttaggtttagaaagttagatgggcaagttaaccaatgaccaaccatggctgtgacaggggcatgcatgggactctcggagccctgggagaggcaccaaccttgggttggggtgggggagtggtcagaaaggcttcccagaagagttggtttctgtataaagatgaaggatgagtaggagttacctaagcacataaggaaggagagagagacwgtgtgtgtgtgtgtgtgtgtgtgtgtgtgtgtgtgtgtgtgtgtaagccagaggatacatgaagcacagcatcttccaggagctcttaagtagctctgtttggcagcataacatagtagttaagatcatgatctcaaagccagaccaccta

SEQ ID NO: 119847 - DNA, 511 bp, Homo sapiens
gagtttaccagaggctgattctgattcactcaggaccccttccaatggtagagccagtttatccaaccaccatccctggcccttaaaaaaccagctagcctccttaagaaatccagatactgtgttcgttctgatttatgaaaatcattaggcaaaatgtaaattaaacaccttttctgacacttcacgtcatgatcagaaagaagccaggcctattgcctctgtccgttcaccagtgtgctccatgggagaaaacaaacaagtacagaattcgtattggaacagagtttttgttcttaatcaaagcagcaatagggtaaaacagatttgcagagcttggagaactgtagacccaagctgccccagcttttttcagattaaaaaaaawaataagtgaacaaggcaaataatataagtagatgaagatgtgcaaagacctctttttatatccttccagacgttttcagtccataaaaacatccaacacatgtactcacatttttttttctat

SEQ ID NO: 119848 - DNA, 621 bp, Homo sapiens
tgtatcagccatcagaggtacaagtgacatgaaagtttaactggaatctttttttttccttatgtctcaatgcatactttgcacttttaattcagtwttgtgtcaagttcatacatctaattcatggaaactacttataaaatatgaagacacattagcaactaagatttggttaatacacatttcaaatgttgttggatttctttggagtacaacaatacctaaatgttgcattatttaaccaatgttggggtgtgggtttgtgcacatagggttcccagcaggtaatttatctagtgatcatgtcctgatgaacacaagggccctattacaggcaaatcaaaagaggtaggactatgtcccaagtgttgcttctcttaccccaaggttgcccaatgcaatagttttcattctggtacatgcaaacatgtttcctctaaggtgcaatgccagaaacctagaggaaaatgtgtcttggttttatctgagaaaactggcaacaattcctttggaattgattccttttctttttattattttaaagagagaatagatggttattataccacttacgcagctaacagtttgtaggtcaagatgacctagagccaagaatgtgat

SEQ ID NO: 119849 - DNA, 543 bp, Homo sapiens
tggtcaaatttcttcatactacatacaattaaaatagaactttgcctacccaacattcaacaaatatttatttagctttcatatgtctgagatacagttttcaattctgtggataccaagataagttatgttcttagcctcaaaaaggtaaaacctagtcagggagacttgcrtgtggaaaaatgattgcaatattgtgtgatcagaagcatgtgtaagatacagagaatattttagcacttaccaaggtatagtaattataacatttatttcctccactgattttcctgtgggtagggacaaggtcctttatcttgtttcctcccttgtgcctaccacacggtagctactcagtcaatatgtgattgactgaatgatgtgtggctgacataagagaacgttgggtatactctgcatagatgttgtatctgggaaaactttagaaaggaggtgctgaaggtaaagcagacaagaacaaaacagcaaggtatgtgcggtgcctgggtgcgtggtgcctaggctgagggcagcggtatccctggg

SEQ ID NO: 119850 - DNA, 543 bp, Homo sapiens
tggtcaaatttcttcatactacatacaattaaaatagaactttgcctacccaacattcaacaaatatttatttagctttcatatgtctgagatacagttttcaattctgtggataccaagataagttatgttcttagcctcaaaaaggtaaaacctagtcagggagacttgcgtgtggaaaaatgattgcaatattgtgtgatyagaagcatgtgtaagatacagagaatattttagcacttaccaaggtatagtaattataacatttatttcctccactgattttcctgtgggtagggacaaggtcctttatcttgtttcctcccttgtgcctaccacacggtagctactcagtcaatatgtgattgactgaatgatgtgtggctgacataagagaacgttgggtatactctgcatagatgttgtatctgggaaaactttagaaaggaggtgctgaaggtaaagcagacaagaacaaaacagcaaggtatgtgcggtgcctgggtgcgtggtgcctaggctgagggcagcggtatccctggg

SEQ ID NO: 119851 - DNA, 578 bp, Homo sapiens
tccccctggcttaaatgtaagggccatgtttattcatcttttttccagaatttctagcacagtgcttaatacaaagggagattcaatacatgctagatgaaggaataatgaatgaatgcacaatggctgtggaggcagaaatataccagcatgtcaaaaatatcaacccaagaattattattctagtagcttaaagatatgcctgtataagatcatctgttacagaacttaaatccagtgagaaaatggatgcaaaaatactttataaactgtaaaatcatacacaaatgtgagcaaatgtcactgttacttactgtttagtatccttcagggaatagtttctgaatttgtgaatcaaactttgaaaaacagtatgaacttaactcattggaatagtaggaccatgaaaggaataataaatggaagccagttaacaacaagttgtcatttgtctataatgtaatgcagtaggagttcagttttggaaaaccaggccttggtgacatctttaaaatactaatttttgtgtcctggtttataaatgacmattcctttagatgcttaggatttggataatt

SEQ ID NO: 119852 - DNA, 344 bp, Homo sapiens
agatatctgtgaaaccatgaataggaataatacaattaagaacatatatccaaaaagcaaggacaccaaagttaagcaggaaaaaaagtatttttatcaccattattttcatatataactgaaaacaacaaaaaatatccaatagtctaacgggaaccctcataggaagactgtgacaaaaaacgtataagagtaaaggggaaataaacctattmcaaggaaagcaacagcacaggaatttgtcttctcaatcttggcactagtggtgcgggggagagaggtgctatctcctctccaaatttgaaccaccagccagaacacacacaaatctgtaatccgaattc

SEQ ID NO: 119853 - DNA, 639 bp, Homo sapiens
ctaatgtaaatgacgagttaatggatgcagcaagccagcacagcacatgtatacatatgtaacaaaccagcacgttgtgcacatgtaccctagaacttaaattataataataaaaaaatctagtaaaaaaaaaagaataaatctcctaataaaaacgggcaaggtaagtataaaataataatgttatgataattgtcacattsctcttttttgtatccaggtcactctatgcttctattaattcatcattttcaattgtgtacactaaacaagatgcaatcagcaaatacccaatgttatgcatcacttagagattgttcctttctgccctagtccataaataatattctcttgactctggggcagagaagacccattggaatgatgttccagaaactaaagtaggaactaagggaccagctttaacagcactccttccaggaactccagtaaagctaggagaggaccttgcaggttccacagcctaatgaggtcccaatcaccaccctgacagagatctgctacgttattcattcatcaacttgctggatgtattacaagtactaagtacttttaagaaatatgcaacagtatttagcctattacagtatacaggtgatgccctataacatttcttga

SEQ ID NO: 119854 - DNA, 554 bp, Homo sapiens
gtctctagaatcaatctttttttttttccttcacgtgttagcataaggccacacggtatgatttcttagatgactaaacacccccctaattgatcttcatttccattttaggctctgtataatacattctttactgtgcggtcatatctgtttttcwctgcttcatattcgttagtgaatactagctagagtgaagaataacaccagctgattctgtgctaaacattctctcagatggtccccacgctaagtactgttagtcttttcgaaccagtaagtcaatttagaaaggctagctaatttgtctaaggtctccttggctggtaagtgactagcatactttaaaactgaggtttgtcagactggaagtcctttcctttacacactgagctgtgtgctttcctgagcttacttctctattccttttttccctcacatcattccacttcactctttaaccaccagctatttgtaattccttcttctaaggcatagtgaaaacttgctgcctgtctaaaaatgctttaagggaaacaaacattaaaaaaaaaaag

SEQ ID NO: 119855 - DNA, 554 bp, Homo sapiens
gtctctagaatcaatctttttttttttccttcacgtgttagcataaggccacacggtatgatttcttagatgactaaacacccccctaattgatcttcatttccattttaggctctgtataatacattctttactgtgcggtcatatctgtttttctctgcttcatattcgttagtgaatactagctagagygaagaataacaccagctgattctgtgctaaacattctctcagatggtccccacgctaagtactgttagtcttttcgaaccagtaagtcaatttagaaaggctagctaatttgtctaaggtctccttggctggtaagtgactagcatactttaaaactgaggtttgtcagactggaagtcctttcctttacacactgagctgtgtgctttcctgagcttacttctctattccttttttccctcacatcattccacttcactctttaaccaccagctatttgtaattccttcttctaaggcatagtgaaaacttgctgcctgtctaaaaatgctttaagggaaacaaacattaaaaaaaaaaag

SEQ ID NO: 119856 - DNA, 646 bp, Homo sapiens
tttttacgggaagacatttccttttccaccatcttccacaaaggtctccaagtaaccacttgcagattctacagaaagacactttaaaaactgctctatcaaaagatcagttcaagtctgtggtttgaatgcacacatcacaaagaattttctcagaatgcttctgtgtagttttcatatgaagatatttccttttccaccataggcctcaaagcactccaaatatccacttgcagattctacaaaaagagattttcaaaactagtcaatcaaaagaaaggttcaactctgtcagttgaatgcacatatcacaaacaagtttctcggaatgcgtctgtgtagtttttatgtgaagatatttccttctccacaacaggcctcaaagtgctccgaatatccacttgcagattttactaaagagtgtttccaaactgctcaatcaagaggaagtttcaagtctgtgagctgaacgcacacatcacaaagtagtttctgagaakgcttctgtgtagtttttatgtgaagatgtttccttttccaccataggctgcaaagggctccaaatatccacttgcagattctacaaaaagagagtctcaaaagtgctctatcaaaagataggttcaactatgtgatatgaatgcac

SEQ ID NO: 119857 - DNA, 539 bp, Homo sapiens
tatcatttgaaccaatatgcttaagtatattcttgtctttattattgtcaaagtcaaaataaagaaataaatataaaagtgaatctcaggctgcatttttttactgttaagcccaacaagctggtttcaggaagccctcatcatctgccaatgtgggcaggctttggagttagtcagcacaaggaaaatctccgctctgccatgccccatctttgtgacttctctatctcaactccttcaactgtagaataggaatggaaacaatgataatatctgctgaacagggttttwtttaaagaactaagtgagaacatgcatgtaaagttcttagtacccagtgcactagacagaggtaaagaaaaaaattaatcatgaaaattgtggttttagtgagctatgggcaactttgtcaaaccagggagggtgcatgaatagtcactagtgactgcccattatgtctttcagagatgcctgctggagacaagacctctgtgaaagaagtggcctgcataaactttgggtggggtttccagttgtcc

SEQ ID NO: 119858 - DNA, 575 bp, Homo sapiens
tgttatccataaataaaattcacagataaattaatcttacttattttctaaccctggtatgctacagtttacatgcttaccccacctcatattttcatctcgttaactaatacataagctgctttctccacacaatttgtcatcattccaaaaccatttttttttttcaaatttattccatgtgcatgaccgtgtccctttgcctaacatatccatcttttctcctgtgaaatttcaagttttattcttccattgttccatttgtgacctaatctrtgaagcctttcttatcttttccaagtaaaggatcactctcttcttacttcttcagttgcccctttgagctctataatatattcttttttttttttttttttttttgagacagggtctcactctgttacccaggctggaatgcagtggcccaattcaggcccattgcagccttgacctcccaggctcaggtgatcctcccgcctcagcctcccaaagtgctgggattacaggcatgagccaccacacccagcctatttctttctgttaaaagtccatttcccctgttggcctatggtctt

SEQ ID NO: 119859 - DNA, 575 bp, Homo sapiens
tgttatccataaataaaattcacagataaattaatcttacttattttctaaccctggtatgctacagtttacatgcttaccccacctcatattttcatctcgttaactaatacataagctgctttctccacacaatttgtcatcattccaaaaccatttttttttttcaaatttattccatgtgcatgaccgtgtccctttgcctaacatatccatcttttctcctgtgaaatttcaagttttattcttccattgttccatttgtgacctaatctgtgaagcctttcttatcttttccaagtaaaggatcactctcttcttacttcytcagttgcccctttgagctctataatatattcttttttttttttttttttttttgagacagggtctcactctgttacccaggctggaatgcagtggcccaattcaggcccattgcagccttgacctcccaggctcaggtgatcctcccgcctcagcctcccaaagtgctgggattacaggcatgagccaccacacccagcctatttctttctgttaaaagtccatttcccctgttggcctatggtctt

SEQ ID NO: 119860 - DNA, 601 bp, Homo sapiens
ttttcttattttatcgcattggatagaaagtccattctttttattcattggaagttcctgtcaccctacatgctgaaaatatttatatagttaggaattctctggaactacaatactactggctcacatttacatagcttctttcagttctcaaaaatccattaacatgtcttacctcatttttttctaacaagtctgtgatacaggaaggttttattttttcctcatttaaaatttggaaaaaatagattttaaataattcctacaaggtactgaagctagtaattaaacaaacagaacagactataattcagattttcagtttctaggccagagtctaatacagcagatcagctagcttcctcctattataaaaatcttttggaaaatactcacattttgggtatactaaaatatttctcatagacaattgccttatatgagatgttattaggaaactattactcgttaaatatcatgcacatmtgtttcattggacagtatgtaaaataactaaattactgcaagttgacatcaattcagaaattacaattacagaccaaagactgaggtactgggatataagaatgtgcaagacaca

SEQ ID NO: 119861 - DNA, 656 bp, Homo sapiens
ccatcggcatctgctgatggattgattgttgggggagaaataaagagagatatctatgagtttaggatattgagacctgaacagttggaagatggaacatacatagagtcttgaagtagcagcttttggtgaaaaaaataaaatatcagactgtatttgggcatgttaactttgtaaagcttgttataagtccaagttatttagccatatggtttaaatccatatagttttaactatagaagtctaccaaaggaatgagtataggtagaattgatctgagggcactctaacatttcagaatcagatgaaaagcaatgagcaagagactgaggagctgccataaaatgggaataaaaccatgaaaatatgctatcctagaatccacttaatcaaagtgcttccaaaaggagagagtcctcaactgtgctaaaacttaagttaaacaagaagagggctgaggattgacctttgtatttataaatgtgaagtcattgtagayattgacaggaactaaattggacgagagtactatgtatgaaaacctggttcagtgtgagtccaaaaaaaaagtaaaaagaaatcagatcattttgttacaagagtaaacatactaacagggtagtgaatgaaggaaaatgtgggctcaagagaggttt

SEQ ID NO: 119862 - DNA, 629 bp, Homo sapiens
tttccccaaaaggaaaaagcaagtttccaacgactgaccttagtgagacaacaatttatgaactctctgaccaagaatccaaaatagcagttttaaggaaactcagtgatatccaagataatacrgaaagcaattcagaaatttattagagaaaattaagagattgaaataatttaaaaatcaaacaaaaattttataactgagaaatacatttgctgacatcaagaacctattagaggctttcaccagcagaatggaccaagcagaagaaaaaaattagtgagcttgaagaccatatatttataaacacacattcagtggcaaaaaaaaggatgaaaataaatgaagaccacctatgagatatagaaattaccccgaaagacaaaatctaagaattattgtttttcaagagggagcttggtgacagcaagggttagaaaccttactcaaagaagtaatagcagaaaactttccaaaacttgagaaagatgtaaatattcaggtacagaaacatctgagaacaccaaacagatccaacccaaattctatccaacacatataataataaaactctcaaaagtcaaggacaaagagaggatactaaaagcagcaagggaaaataagcaaat

SEQ ID NO: 119863 - DNA, 529 bp, Homo sapiens
gaaagataagttacgacacatccatccaccttctggctggcaggttttactgatattatcctttctttttctcccagccctttgccttttcaaaaacaacaacaggctgrgcacggtggctcaggcctgtaatcccagcactttgagaggccgaggtgggcggatcatctgaggtcaggagttcaacaccagcctgaccaacatggtaaaatccgtctccactaaaaagacaaaaaattagctgggcgtgggtgtgcgtcacctgtaatcccagctactcgggaggacaagacaggagaatcgcttgaacctgggaggcagaggttgcagtgagcccagatcgtgccactatactccagcctgggcgacagagtgagattccatctcaaaaacaacaacaacaacaacaacaacaacaaaacctcttcagtgtatgtttaataaagattcaggaggaagcaagttaaatgggtatactcagtctgccgttttaactcttattccttgagacccatgggaagaatctttc

SEQ ID NO: 119864 - DNA, 491 bp, Homo sapiens
aaacgtaatacccacaaacttaatatatttaccatctagttgtttgcagaaaaatgtttggttaccccagcacagagaatgcattaacaaagataacttggaatatatcaaaaatgtctggaccaggtcctggctcttaaagaacaataacctgagataattaatggcaaaataaatgtgacaaatagcaatgctatacatggagaagttaaactcatagagaaagacaggatccctatgatgagttgagaaatgaatgagatgttacacatggagtgatgactacatgtattgtcctttccccttttccaaacctccaaaatgtatgagagcataactccatacagacaaaaaraatgagagaagataatagctgataagaatcaacaaaatttttgtaaatggaaagtgattttcagtgattatcactacaatcaagatgaaaccatgtgtctgaagcataatggagaataaagaggtaggatggcacc

SEQ ID NO: 119865 - DNA, 461 bp, Homo sapiens
cattctgacctcagggaaagcagctaccccagaaggaagcataattctggaagaaattaggtttcraaattgtacctgcatggcactaagttgaggatgccaattcctcctgtgtccctaaatattcagccaggaaaaactgaagcctgtattcactttgcaattatatgctttcttgcctgaaaatcatggtagcagtgacatgaacaggagacagggaaatactgggtagaagagggtggtttcccagtaaaggcccaattgtcaagcctgaagacccacggcccttttgaggacaggcatttctgtttttgtgcccaaaaagttgctttttggtcttctacacaccctatcctgccgccatataaactggagaccttagcgggcacacaccagcagctggacattggaaccagtagcccagcgaaaacagaacaacgcagaagacaaagagagaagag

SEQ ID NO: 119866 - DNA, 496 bp, Homo sapiens
tttttacgttttgcttgttggcttttgcaaagaatgtcataataagctgaaaacaatgggttataatatagtattttcaagcctcctggtaatctcaaatcaaaaaacatacaacagatatacaagaaataaaaagaaattaaatcacactaccacagaaaatcactttcattaaaaggaaaactggaaggaaggaaagaaggacaaagagaccacaaaacaggaaacaaataacaaaatagcaagagtaaataattatttattaataataacattgaatgtaagtgaaataaattctctaatcaaaagacatggagtagctcaatggataaaataatatggtccaatgatctgttgcctacaagaacacacttcgcctagaaagacacatagactgaaaataaagggayggaaaaaatatttcatgccaatggaaatccaaatagagcaagagaagttaaactgataccagataaaatatatttcaagacaaaaa

SEQ ID NO: 119867 - DNA, 581 bp, Homo sapiens
atgatggaacacagaataaatctttctcacccaagaaagcgtgacatgtatgcaaatttaagaatactgaaaacaagtctgaaacatgaataagaccactggcgacaaggaaatcttttgagggagagatgaaaacatttcaggagaatatgatcctgggacgcttagtgtttagcagaaaaaaagaaggaaaccacagtaaggaaccacatacctgtgaaagaataaatcctcccctaaccataaaaggggtccatttggtatagtgactgcacttcacttaaccaacagaaaaccacrcctctgaatgttagaaaactattaaaccccgatctcacaccattccttttaatactggtgccgaaaaatatgaaatatttagaaaggcactgaacacaaggcaatattaataaatagcagcagtagaagaaaatagaccatgaaaattaaagcattcttcctcagcctccaactatgaagcagaaaaacctttagcatgacaatccaacctgacttaaatatgcttaaacacaaacatactgatataaaaggcaacacatttcaaaaaatatgttgaaaaa

SEQ ID NO: 119868 - DNA, 581 bp, Homo sapiens
atgatggaacacagaataaatctttctcacccaagaaagcgtgacatgtatgcaaatttaagaatactgaaaacaagtctgaaacatgaataagaccactggcgacaaggaaatcttttgagggagagatgaaaacatttcaggagaatatgatcctgggacgcttagtgtttagcagaaaaaaagaaggaaaccacagtaaggaaccacatacctgtgaaagaataaatcctcccctaaccataaaaggggtccatttggtatagtgactgcacttcacttaaccaacagaaaaccacgcctctgratgttagaaaactattaaaccccgatctcacaccattccttttaatactggtgccgaaaaatatgaaatatttagaaaggcactgaacacaaggcaatattaataaatagcagcagtagaagaaaatagaccatgaaaattaaagcattcttcctcagcctccaactatgaagcagaaaaacctttagcatgacaatccaacctgacttaaatatgcttaaacacaaacatactgatataaaaggcaacacatttcaaaaaatatgttgaaaaa

SEQ ID NO: 119869 - DNA, 552 bp, Homo sapiens
gagccactgcacctggtgcatgctctgatttttttgcttcattggttgtctttcctcactctagacttctttatgagttttagaatttgagtagatgggcccattgtcagtcagccaaattatttttgtctcttttttctccctggtcagtattttgcatttctctaggcacttgaaactatctccccctatccccagttctgagtctgattttataatggcattctggggctttagatttgtggtgattttagagaaaattagttgccttggtcagttccacatcagrgtgtatttttacagtcccacttccttagcccacagttcccatcaactgtatcttcagggataaaattggcaactttttaattttctgctcccttttatgcacggggataaccccatacttagcaaatccctatcttcaagcagtcagcctagttttgttcacctgtcttgcatggaacacttttcttccattattctatacctgccacttctggtttctctctccaaaggcgctcaggttctttgtttcaactccccttccca

SEQ ID NO: 119870 - DNA, 629 bp, Homo sapiens
aacaaaggaaagatgatttagctatgcaccaaagagaaaaaaaattcactaaagataaccactccacaagataaaatattcaattcatcagagaaaagcacatgaaaaatgctcaacattgttagtcagtatggatatacaagtcaaaactacagtgagataccacatcacacccattgggatggctataataattttggrgggaaaaaagcaaattattggcgaggatatggagaaactggaacctttgtacattgctggcaggaatgtacaatggtacactcactatggaaaacaatttggctgtttctcaaaaagttaaaaatggaattactatataacccagaaactcctcccctaggaattcacacaaaagaaatgaaaacagggactcaaacagatacaacaaaaaggtatgaataacttaagtatacatcaatttttaaatggataaacaaaaattaatatatgcatgcaactgaatattattcaggcataaagagcaatgaagttctgatacatgctacaacatggatgaatcttacaaacattctaagtaaaataagtcaaaaacaaaagggtgaatgttatgatttatcttacataaaaaatttagaataagcaaattt

SEQ ID NO: 119871 - DNA, 629 bp, Homo sapiens
aacaaaggaaagatgatttagctatgcaccaaagagaaaaaaaattcactaaagataaccactccacaagataaaatattcaattcatcagagaaaagcacatgaaaaatgctcaacattgttagtcagtatggatatacaagtcaaaactacagtgagataccacatcacacccattgggatggctataataattttggggggaaaaaagcaaattattggcgaggatatggagaaactggaacctttgtacattgctggcaggaatgtacaatggtacactcactatggaaaacaatttggctgtttctcaaaaagttaaaaatggaattactatataacccagaaactcctcccctaggaattcacacaaaagaaatgaaaacagggactcaaacagatacaacaaaaaggtatgaataacttaagtatacatcaatttttaaatggataaacaaaaattaatatatgcatgcaactgaataytattcaggcataaagagcaatgaagttctgatacatgctacaacatggatgaatcttacaaacattctaagtaaaataagtcaaaaacaaaagggtgaatgttatgatttatcttacataaaaaatttagaataagcaaattt

SEQ ID NO: 119872 - DNA, 630 bp, Homo sapiens
ggaaattgctaaaacctgaagagggaaagaaaaaaacacacaatcaggattgtggatatgagtgacaatattctctcaatgtttatcaaataactgttatggtaactacgatggctgtrctatagttactattgtgttaggcatggcactctgtgcgtcatctctcaaaacacccatttcattttattatcacttatccaatctctttttaaattgatacatgataatacatatttatgggtacaagtggtattttgatattttccatacagtgtgtaatgatcagggtattgaaataaccatcacctcaaacatttatcacttctttgtatatctccaaaagcaggggctgtggcttccttgtttcctatatcaacagtacagtatctgacaagtaacaggcactcaataactatttaatgaatgaaagaagaagtgtttgaggtataaagatcagatcaacagtagatagatacttaaggaggcaaaacagagcgtatataagttagttaaaaaatctttttattgagatataattcacatttcataagattcatacatttaaagtatataatttactgattgtaagcatattcaaccattaatacaatctaatttagaacattttct

SEQ ID NO: 119873 - DNA, 568 bp, Homo sapiens
tatatttttatgactcatggtagctttaacattgttcttaaaattctgagtaatttaagsgttcacatttgaagaatctgatgcattactgataacattttattgcaagtaaatgcattttaaaatttgctatttgttttgtattagattattctcagcctacttcattatcaagctatactattttatttatgcagtttgatgatcttacggcagaggaggaagctgtatcttcaaaatgtgtcaatttggctaaagacaatcaagttatccaacaggagttattatctatgaaaaaagtacaacaagaatgtgaaaaacttgaggagaatcaaaagatgttggaagaagaaatattaaatctcaagacacatatggaaaacagtatcgtagaacttagtgaactacaagaatataaatcagagctagatgaaagggcaatgcaggcagtagaaaaattaaaagaaatccatttacaggttacttgtttaaatcaggtaagtttacctgtaatgtgctttcatttatttcactgcaaattatattttggagattttatatatatata

SEQ ID NO: 119874 - DNA, 568 bp, Homo sapiens
tatatttttatgactcatggtagctttaacattgttcttaaaattctgagtaatttaagcgttcacatttgaagaatctgatgcattactgataacattttattgcaagtaaatgcattttaaaatttgctatttgttttgtattagattattctcagcctacttcattatcaagcyatactattttatttatgcagtttgatgatcttacggcagaggaggaagctgtatcttcaaaatgtgtcaatttggctaaagacaatcaagttatccaacaggagttattatctatgaaaaaagtacaacaagaatgtgaaaaacttgaggagaatcaaaagatgttggaagaagaaatattaaatctcaagacacatatggaaaacagtatcgtagaacttagtgaactacaagaatataaatcagagctagatgaaagggcaatgcaggcagtagaaaaattaaaagaaatccatttacaggttacttgtttaaatcaggtaagtttacctgtaatgtgctttcatttatttcactgcaaattatattttggagattttatatatatata

SEQ ID NO: 119875 - DNA, 494 bp, Homo sapiens
aaccatagcctttagaaaggagcaagtctttgtggaatagacaggatttgaagtgcaacaaaggggtggaaacccagctgaccatgatactttcaagggagtttttccactgaatttgattattttctcatttggcacttctttctgggttttttaatcagcccaaaaactctaggtgattttacttttgtaattgtattctcttgggaattcctgattcctcgtttcaccaaataggtgtgtaactttcttgtttctgcctataataattctggagtctttaaacaaaacgactgtgactttycatgatgagtagaagataggttttactcatgctacaatcaatattaattccttgcagttcaaagacactgaggccctgtctaataatatagaagttgaacttggacttgggagatgactcctgcctctcatactctctgtggctctgctttctattattttactcataagcttgttttgtctccttgctg

SEQ ID NO: 119876 - DNA, 494 bp, Homo sapiens
aaccatagcctttagaaaggagcaagtctttgtggaatagacaggatttgaagtgcaacaaaggggtggaaacccagctgaccatgatactttcaagggagtttttccactgaatttgattattttctcatttggcacttctttctgggttttttaatcagcccaaaaactctaggtgattttacttttgtaattgtattctcttgggaattcctgattcctcgtttcaccaaataggtgtgtaactttcttgtttctgcctataataattctggagtctttaaacaaaacgactgtgacttttcatgatgagtagaagataggttttactcatgctacaatcaatattaattccttgcagttcaaagacactgaggccctgtctaataatatagaagttgaacttggacttgggagatgactcctgcctctcatrctctctgtggctctgctttctattattttactcataagcttgttttgtctccttgctg

SEQ ID NO: 119877 - DNA, 504 bp, Homo sapiens
tgagctgttttgatcatttacggctttatacacagcctcttggagctgagcaataaaattaatatatggttctttaggtccttgtcagacagaactgaaataaggatacttttcccctgtaacatttatccttttctatgcatgtaagcacatgaagcacagctgaacaatgrcaacatcttccattactgcttgattctctaatcaaccccagttagggccaactcatattaactgatcaaagaaaacaggcacaggtggctgcaggtgtgtgttttcttttgcctgagtttgagttcaccagcctaccaagttttaaactgcaagtactgagatggagtgagaacaggttttgtcaaagtatcctaattatatggtattaatctattatcaagagccatatttttaataaagattgcgcaaaaagagagttcagtccatattgactaatggcttgcttaaattctttagtaacttaaaagaaaaagcaggctaattagctat

SEQ ID NO: 119878 - DNA, 504 bp, Homo sapiens
tgagctgttttgatcatttacggctttatacacagcctcttggagctgagcaataaaattaatatatggttctttaggtccttgtcagacagaactgaaataaggatacttttcccctgtaacatttatccttttctatgcatgtaagcacatgaagcacagctgaacaatgacaacatcttccattactgcttgattctctaatcaaccccagttagggccaactcatattaactgatyaaagaaaacaggcacaggtggctgcaggtgtgtgttttcttttgcctgagtttgagttcaccagcctaccaagttttaaactgcaagtactgagatggagtgagaacaggttttgtcaaagtatcctaattatatggtattaatctattatcaagagccatatttttaataaagattgcgcaaaaagagagttcagtccatattgactaatggcttgcttaaattctttagtaacttaaaagaaaaagcaggctaattagctat

SEQ ID NO: 119879 - DNA, 504 bp, Homo sapiens
tgagctgttttgatcatttacggctttatacacagcctcttggagctgagcaataaaattaatatatggttctttaggtccttgtcagacagaactgaaataaggatacttttcccctgtaacatttatccttttctatgcatgtaagcacatgaagcacagctgaacaatgacaacatcttccattactgcttgattctctaatcaaccccagttagggccaactcatattaactgatcaaagaaaacaggcacaggtggctgcaggtgtgtgttttcttttgcctgagtttgagttcaycagcctaccaagttttaaactgcaagtactgagatggagtgagaacaggttttgtcaaagtatcctaattatatggtattaatctattatcaagagccatatttttaataaagattgcgcaaaaagagagttcagtccatattgactaatggcttgcttaaattctttagtaacttaaaagaaaaagcaggctaattagctat

SEQ ID NO: 119880 - DNA, 504 bp, Homo sapiens
tgagctgttttgatcatttacggctttatacacagcctcttggagctgagcaataaaattaatatatggttctttaggtccttgtcagacagaactgaaataaggatacttttcccctgtaacatttatccttttctatgcatgtaagcacatgaagcacagctgaacaatgacaacatcttccattactgcttgattctctaatcaaccccagttagggccaactcatattaactgatcaaagaaaacaggcacaggtggctgcaggtgtgtgttttcttttgcctgagtttgagttcaccagcctaccaagttttaaactgcaagtactgagatggagtgagaacaggttttgtcaaagtatcctaattatatggtattaatctattatcaagagccatatttttaakaaagattgcgcaaaaagagagttcagtccatattgactaatggcttgcttaaattctttagtaacttaaaagaaaaagcaggctaattagctat

SEQ ID NO: 119881 - DNA, 540 bp, Homo sapiens
gaaatcacagatgtcgaaacaaatggaaaaccattccatgctcatggattagaaagatcaatattgttaaaatggctatactgccaaaagcaatctacacattcaacactattcctatgaaacaaccagtgtcgtttttcacaaaattagaaaaaaatattctaaatttcatatggatttttaaagagcccagacaaccaaaggaaatctaagcaagaagaacaacactggagacatcacattacttgacttcatactataccctagggccacagtagacaaaataacatggtactgatatgaaaacagacacaaagaccaatgaaatagaatagagawccccaaaataaacacatgcacctacagccatcagctttcccaggataacacaaagagagccaagtggcacctgcacattacactgtggaagaaaaacccaagctcaagaaaacccaacttgtgttattggaagttcacttggctgtatgcttcccaagagggagaaattatctgcattatactagacagtaaataaacttt

SEQ ID NO: 119882 - DNA, 377 bp, Homo sapiens
atgaaatgctaaatctagtgggttctgaggagtaacaagatatttacagagcctcaaagtatctccatacaaaatacggttgaactacaaaaagaaaatcataacattagcatggacaaacctggcaggtactccttaactctcctaagtaataaaaactgtaaaatgcaaataagccttcgatgacctttactaacctttactaaagtatcartgatgacttggttgtttaaacagctgacatttgggcaatttgagtatgtcaagctcaataatactggttttcatttgcaagatccacttaaaacttaaggaggctaaaaaacatcatttaaaataccctataaattatcatcatatatatcatacaaaaatat

SEQ ID NO: 119883 - DNA, 622 bp, Homo sapiens
tcatttaaaataccctataaattatcatcatatatatcatacaaaaatatcctacttcagtaaatattgtaatgttatacattttatgagaaacaactaaaatgtgtaaatagcccagtaataaagttttataatcttttaaatcatacaatttttctttaagacattatggttaaatattctcttcgttagatgtggcttacccgtggattctagagaagaaagtagatgggagcaagtgtccaacacagcagcagctggaaagaaaaataaagaattatgttctttacttaaaacacttcagttgactaagwgtgcgtttaaaaactaaagagttgataactttatcagagttaataagaatgagaaatatgtatgtgcatttacaatacaaaattactatttaataatttacacatggcattaattctaattgtgtttaaatatcagagtttttcattcttcattcatgtaatcaacagccacatgctaaggtactagaaccagcactggaattacaagatgaagatggcatggtccacctcccaacagtcatatgctataacctaaaaaaacagacaggcagtcaatgtccatatagagtcaaagataccatgacagg

SEQ ID NO: 119884 - DNA, 622 bp, Homo sapiens
tcatttaaaataccctataaattatcatcatatatatcatacaaaaatatcctacttcagtaaatattgtaatgttatacattttatgagaaacaactaaaatgtgtaaatagcccagtaataaagttttataatcttttaaatcatacaatttttctttaagacattatggttaaatattctcttcgttagatgtggcttacccgtggattctagagaagaaagtagatgggagcaagtgtccaacacagcagcagctggaaagaaaaataaagaattatgttctttacttaaaacacttcagttgactaagtgtgcgtttaaaaactaaagagttgataactttatcagagttaataagaatgagaaatatgtatgtgcatttacaatacaaaattactatttaataatttacacatggcattaattctrattgtgtttaaatatcagagtttttcattcttcattcatgtaatcaacagccacatgctaaggtactagaaccagcactggaattacaagatgaagatggcatggtccacctcccaacagtcatatgctataacctaaaaaaacagacaggcagtcaatgtccatatagagtcaaagataccatgacagg

SEQ ID NO: 119885 - DNA, 622 bp, Homo sapiens
tcatttaaaataccctataaattatcatcatatatatcatacaaaaatatcctacttcagtaaatattgtaatgttatacattttatgagaaacaactaaaatgtgtaaatagcccagtaataaagttttataatcttttaaatcatacaatttttctttaagacattatggttaaatattctcttcgttagatgtggcttacccgtggattctagagaagaaagtagatgggagcaagtgtccaacacagcagcagctggaaagaaaaataaagaattatgttctttacttaaaacacttcagttgactaagtgtgcgtttaaaaactaaagagttgataactttatcagagttaataagaatgagaaatatgtatgtgcatttacaatacaaaattactatttaataatttacacatggcattaattctaattgtgtttaaatatcagagtttttcattcttcattcatgtaatcaacagccacatgctaaggtactagaaccagcactggaattacaagatgaagatggcatggtccacctcccaacagtcatatgctataacctaaaaaaacagacaggcagkcaatgtccatatagagtcaaagataccatgacagg

SEQ ID NO: 119886 - DNA, 567 bp, Homo sapiens
  misc_feature (1)...(567): n = A,T,C or G
nnnnnnnnnnnnnnntgttcaagtgcagaaagggcccaatctggtagatgaaccacacaaccagcgtctgggtgcaggcacagtgccacattttttgtcacttcctgatgtaccccaccagcactgaagagacagcctggagacagggcaagaggaaggctgagaaggatgagatggtgagtgccagattcttcctggccctgagccctcmctcagagtgacactcaacctttaggagtgggagagcaagattgacggcttcaagtgcttcaccaagaagatggacaacggggctctcaggtcaacttcacagccaatgagtggtgacaggctttaagaaagagcatcttccacattgtcagtgagctctttgccaatcagtccaggcaggaccccgacccagccatgggcctgttagtgctgtctcagggacacaagaccaacatcttggacatcatccagatacacaaggaagctcttaccaaagtcatggagagcaggcaacatgtggcagaagggaatacagaggtgcagaggctgatgatgtcagaatcacaggaacaggat

SEQ ID NO: 119887 - DNA, 567 bp, Homo sapiens
  misc_feature (1)...(567): n = A,T,C or G
nnnnnnnnnnnnnnntgttcaagtgcagaaagggcccaatctggtagatgaaccacacaaccagcgtctgggtgcaggcacagtgccacattttttgtcacttcctgatgtaccccaccagcactgaagagacagcctggagacagggcaagaggaaggctgagaaggatgagatggtgagtgccagattcttcctggccctgagccctccctcagagtgacactcaacctttaggagtgggagagcaagattgacggcttcaagtgcttcaccaagaagatggacaacrgggctctcaggtcaacttcacagccaatgagtggtgacaggctttaagaaagagcatcttccacattgtcagtgagctctttgccaatcagtccaggcaggaccccgacccagccatgggcctgttagtgctgtctcagggacacaagaccaacatcttggacatcatccagatacacaaggaagctcttaccaaagtcatggagagcaggcaacatgtggcagaagggaatacagaggtgcagaggctgatgatgtcagaatcacaggaacaggat

SEQ ID NO: 119888 - DNA, 567 bp, Homo sapiens
  misc_feature (1)...(567): n = A,T,C or G
nnnnnnnnnnnnnnntgttcaagtgcagaaagggcccaatctggtagatgaaccacacaaccagcgtctgggtgcaggcacagtgccacattttttgtcacttcctgatgtaccccaccagcactgaagagacagcctggagacagggcaagaggaaggctgagaaggatgagatggtgagtgccagattcttcctggccctgagccctccctcagagtgacactcaacctttaggagtgggagagcaagattgacggcttcaagtgcttcaccaagaagatggacaacggggctctcaggtcaacttcacagccaatgagtggtgacaggctttaagaaagagcatcttccacattgtcagtgagctctttgccaatcagtccaggcaggaccccgacccagccatgggcctgttagtgctgtctcagggacacaagaccaacatcttggacatcatccagatacacaaggaagctcttaccaaagtcayggagagcaggcaacatgtggcagaagggaatacagaggtgcagaggctgatgatgtcagaatcacaggaacaggat

SEQ ID NO: 119889 - DNA, 585 bp, Homo sapiens
tggtatcagcaaaaagcctcagattaatttcaaacactataaaaatacaatacataaacagaaaatattaactgtcagcaaggctatagagaaattggaagctgtatgcattgctttttggaatgtaaaatggtacagcccactgtggaaaatggtttagcagctccttaaaaatatgaagcatagaattatatgatccatcaayaccctttaaacgtatatacccaaaagaactgagagcagggactcaaacaggtatttgtacacccgattaacagcagcattattcacagtggccaaaaggtagcccaaacctaatgcccatcagtaggtgaatagataaagaaaatgtaatatatacatacacagagtattattcagccataaaaagaaaaatatctggccagattcaggggcttacacctgtaatcccagtattttgggaggccaaggtgggcaggtctcttgagccccatattttgagaccagactggacaacatggcacatttggttagaagtgtttgaccataactactattccagaaaaagatctactcattagaactacaaatcataaaattata

SEQ ID NO: 119890 - DNA, 585 bp, Homo sapiens
tggtatcagcaaaaagcctcagattaatttcaaacactataaaaatacaatacataaacagaaaatattaactgtcagcaaggctatagagaaattggaagctgtatgcattgctttttggaatgtaaaatggtacagcccactgtggaaaatggtttagcagctccttaaaaatatgaagcatagaattatatgatccatcaataccctttaarcgtatatacccaaaagaactgagagcagggactcaaacaggtatttgtacacccgattaacagcagcattattcacagtggccaaaaggtagcccaaacctaatgcccatcagtaggtgaatagataaagaaaatgtaatatatacatacacagagtattattcagccataaaaagaaaaatatctggccagattcaggggcttacacctgtaatcccagtattttgggaggccaaggtgggcaggtctcttgagccccatattttgagaccagactggacaacatggcacatttggttagaagtgtttgaccataactactattccagaaaaagatctactcattagaactacaaatcataaaattata

SEQ ID NO: 119891 - DNA, 628 bp, Homo sapiens
aaagcctcagattaatttcaaacactataaaaatacaatacataaacagaaaatattaactgtcagcaaggctatagagaaattggaagctgtatgcattgctttttggaatgtaaaatggtacagcccactgtggaaaatggtttagcagctccttaaaaatatgaagcatagaattatatgatccatcaataccctttaaacgtatatacccaaaagaactgagagcagggactcaaacaggtatttgtacacccgattaacagcagcattattcacagtggccaaaaggtagcccaaacctaatgcccatcagtaggtgaatagataaagaaaatgtaatatatacatacacagagtattattcagccataaaaagaaaaatatctggccagattcaggggcttacacctgtaatcccagtattttgggaggccaaggtgggcaggtctcttgagcccmatattttgagaccagactggacaacatggcacatttggttagaagtgtttgaccataactactattccagaaaaagatctactcattagaactacaaatcataaaattataagttctacaaaaacaaatcaaccttatctaccacccagttctacccaattatatc

SEQ ID NO: 119892 - DNA, 628 bp, Homo sapiens
aaagcctcagattaatttcaaacactataaaaatacaatacataaacagaaaatattaactgtcagcaaggctatagagaaattggaagctgtatgcattgctttttggaatgtaaaatggtacagcccactgtggaaaatggtttagcagctccttaaaaatatgaagcatagaattatatgatccatcaataccctttaaacgtatatacccaaaagaactgagagcagggactcaaacaggtatttgtacacccgattaacagcagcattattcacagtggccaaaaggtagcccaaacctaatgcccatcagtaggtgaatagataaagaaaatgtaatatatacatacacagagtattattcagccataaaaagaaaaatatctggccagattcaggggcttacacctgtaatcccagtattttgggaggccaaggtgggcaggtctcttgagccccatattttgagaccagactggacaacatggcacwtttggttagaagtgtttgaccataactactattccagaaaaagatctactcattagaactacaaatcataaaattataagttctacaaaaacaaatcaaccttatctaccacccagttctacccaattatatc

SEQ ID NO: 119893 - DNA, 336 bp, Homo sapiens
tcttttttgttctagtgaagcttgaaatggattaaatgaaggccacccacattggggagggcaatctactttacccagactaccaattcaaatgttaatctcatccaraaacacccttacagacaaagccacaataatgtttaaccaaatatttgggcaccccatggcccagtcaagttgacaaataaaactaaccatcacatatacgaaatagaaacatgttccagaatgaaggatgtgagtccctggtgaagggccccagtgagaatgagaaataaaaatgacctataccagggcacatcactataaaatttctactggggataaaaagaattc

SEQ ID NO: 119894 - DNA, 594 bp, Homo sapiens
gttggcattatagacataacgtatatttgttcaaaaattttccttaccattctgtagcctatgatctatttaagaataaagagaatatgtacagcacagggcaagtccctaatgagtgactctgatgattggacagaatgtcagggaatagcatgctcaccttgcatctgttcactgaagagatgaggttgaacagtttttagaccaatagaatgtttgaagttgagtatttgacataaaagaaacatttactaagatattcgcctcagtacttcacacttaccatagaaatgaaaatttgaaatagctgaatcagcttctaaacatttcctcattaatcaggaacaaataatttgattacaggagtaagtatgtgagagctatgcctgattctggatctctgctgttagatttgataatctgaaaattcaagtcagtgatcactttgctgggasaaagtattcattcgaatgaagaaacagaactcattgaaatagactgttagaattactattagaaacataaacagaattcagatgtcaagaactggggagagtttgagactttactatacttgcaagctaacaggttaga

SEQ ID NO: 119895 - DNA, 603 bp, Homo sapiens
aggaagggattactagttactgaatgccrattacaggtattgttttatttaatattcatatctaccctgtgaaataatgctagtatcttcgttttatataaaaggaactgaggcacagtgggataaagcaccttgtccaggattcacaacagaaaatggttgtgagcaggattcacgccagcactgtcttgactccacagctgttgctgtctttaccattacatacccctcagctttcccatgcaacaaggctggcaatgccttcaaatgtactcatagaatgaatgtaagttgcaggccccgtgcctagactcaccatacgaggagaagttccttgaaggcagagaatgtctggtgcttcactgatctatgcctatagttctgcaggcagacggtagcccgtacatatccatgactccctgacaaaccagcaatagctttcctgtggtttacatcaattcacttgaatttaaaattccagggaaagaaaatgtggcccttcccagaaatccttgaagtatgctaactccagtaacttctatatatcattaagaaagagtgtgttttatggactgaaatttgaaaacaattgagcatctggta

SEQ ID NO: 119896 - DNA, 621 bp, Homo sapiens
cattaaggaagggattactagttactgaatgccgattacaggtattgttttatttaatattcatatctaccctgtgaaataatgctagtatcttcgttttatataaaaggaactgaggcacagtgggataaagcaccttgtccaggattcacaacagaaaatggttgtgagcaggattcacgccagcactgtcttgactccacagctgttgctgtctttaccattacatacccctcagctttcccatgcaacaaggctggcaatgccttcaaatgtactcatagaatgaatgtaagttgcaggcccygtgcctagactcaccatacgaggagaagttccttgaaggcagagaatgtctggtgcttcactgatctatgcctatagttctgcaggcagacggtagcccgtacatatccatgactccctgacaaaccagcaatagctttcctgtggtttacatcaattcacttgaatttaaaattccagggaaagaaaatgtggcccttcccagaaatccttgaagtatgctaactccagtaacttctatatatcattaagaaagagtgtgttttatggactgaaatttgaaaacaattgagcatctggtaaaaagtgtaggat

SEQ ID NO: 119897 - DNA, 549 bp, Homo sapiens
aggaggaatgtatcccccacccaaaatgatattggattaactgtgatcgtagtcacccaggcatgagacaaacacctgcccccccaccccccgtctcccctgagcagcctcataatttagatatcttcttaagcagatcactggcctaagcaacagatatattcagcaagaggaaagtaaatcactcagaatgaaagtaatttttctaaaagaaatggaattaagatagcggaattcaaccagacttgtaaaaacaagactttacagcagacactacatttgagggatgggagttgatctcatgttaatgtggatttggtttaatcggttgctagcagaatgaggattatttaggaaacagtgccctctgtgtgtgyagtctctcatgtgacagtatcaggccctctcaggaaacagagatatggacaaagggaaattcaaacaaattagtttatatttgctaagcatttttatggaggaaaaataaatctgccagtaaaagacacacagtaattagtctctctaatggaaaagtagggtctgattaag

SEQ ID NO: 119898 - DNA, 583 bp, Homo sapiens
gttttgcgaccaatatttttaagaacactatttcaaatcccgcacgtgaggccaaaaaaggccaaacgatattccccaagccacgcacctaggcagttatatttttgggcctaaggcgttttgtttaaattgaaaatttttastcactcaactaaaaaatgttacacgagcagttaatagtttataattctagtaacttgggctggacacagtggctcatacctgtaaaaccagctgctggggaggctgaggcaggaggatcatttgaggctaggagtttgagaccagcctagtcaacacagtgagaccctgtcttcacaaatataaaaataaaagaaaattagctgggcattgtgttgcaggctgaagtgggaagactgcttgagcccgtgaggtcaaggctgcagtgagccatgatagcgccactgtactccagcctgggtgacagagtgacagagtgacatcgtctcaaaaaaaaaaaatataataacttgtacctattaccctattcaagtgcaaactattacatgcacaaaatccaccaggagaagaatgaagagaaaaatgagacttctttcaaact

SEQ ID NO: 119899 - DNA, 583 bp, Homo sapiens
gttttgcgaccaatatttttaagaacactatttcaaatcccgcacgtgaggccaaaaaaggccaaacgatattccccaagccacgcacctaggcagttatatttttgggcctaaggcgttttgtttaaattgaaaatttttactyactcaactaaaaaatgttacacgagcagttaatagtttataattctagtaacttgggctggacacagtggctcatacctgtaaaaccagctgctggggaggctgaggcaggaggatcatttgaggctaggagtttgagaccagcctagtcaacacagtgagaccctgtcttcacaaatataaaaataaaagaaaattagctgggcattgtgttgcaggctgaagtgggaagactgcttgagcccgtgaggtcaaggctgcagtgagccatgatagcgccactgtactccagcctgggtgacagagtgacagagtgacatcgtctcaaaaaaaaaaaatataataacttgtacctattaccctattcaagtgcaaactattacatgcacaaaatccaccaggagaagaatgaagagaaaaatgagacttctttcaaact

SEQ ID NO: 119900 - DNA, 583 bp, Homo sapiens
gttttgcgaccaatatttttaagaacactatttcaaatcccgcacgtgaggccaaaaaaggccaaacgatattccccaagccacgcacctaggcagttatatttttgggcctaaggcgttttgtttaaattgaaaatttttactcactcaactaaaaaatgttacacgagcagttaatagtttataattctagtaacttgggctggacacagtggctcatacctrtaaaaccagctgctggggaggctgaggcaggaggatcatttgaggctaggagtttgagaccagcctagtcaacacagtgagaccctgtcttcacaaatataaaaataaaagaaaattagctgggcattgtgttgcaggctgaagtgggaagactgcttgagcccgtgaggtcaaggctgcagtgagccatgatagcgccactgtactccagcctgggtgacagagtgacagagtgacatcgtctcaaaaaaaaaaaatataataacttgtacctattaccctattcaagtgcaaactattacatgcacaaaatccaccaggagaagaatgaagagaaaaatgagacttctttcaaact

SEQ ID NO: 119901 - DNA, 445 bp, Homo sapiens
tgaattcagagtcttgtctccccyactttctggctttatataagtcagtaagatacttattctctcagtccattttcatgtctggaaaaacatcattatatatcacccctggtagcatggaagctggaacggtttatagaaagtgtttttccagctgtaaagatataaacgaaagatggttgcagtgggtcccctagagtaacacatacatcaatcaacccatgtctcactctaggtggtcctttgactcctccctcctgaacaaataaaatagttgatttaaatcttctgcagttcctttgtcttttgttctaccaactcaataaggcaaagatctacaaacgtaaacaggaaacatctttatttaggaatcaaatatccagacctcctctaaatgagtaaatgcataaagaatattgggtttatgaaaaaacatttaaaaggt

SEQ ID NO: 119902 - DNA, 560 bp, Homo sapiens
agtttggtggtttacttggattataataaacataagaggatatatataataaaaagcaacctggataatatctcatattttctttgagtaagagtgatgtaggtctgttttgccttcgtgttagaattgtggcttatgtaacagatcctgaacttatcaagktatcataatctgtaaaaacacaaaacacagtctctgtcagctgatttttacaaacagttttaaagcatttgatgtgggccagggcctttgaactctgctttaggaactgaagaactgtgactgaggtttaatacaatgccggagactggctgtaatgctgcaattacaagaatgactttcaatattaaatatatctgtcttttaaattttgctagatatgtacctttaatctgctttaagtaaaacttccactcctatgatttaaacagaaatggcagaggagaatatgagctatttgatcaaaagaaaatcattttaaatgttgaacatggctcattattactgttaattggttacatatattgttagttttagtaatgtttttcttcctagatttt

SEQ ID NO: 119903 - DNA, 600 bp, Homo sapiens
tgagtacagattccagggctggaacacctgtgttccaatcacagcttcatagtaacaggcctaaggtctaggtaagaattaaataattaatacaaaacactgcttaggtttctacttggaatgcaagtgctatggattagctaaaacaagaacaaacaaatgaaaagttctagtggaaatgatcaggatatggatttgagagtcgaygagcgtattctgccgttaacagtaccaccgactgggtgcctgaacaacagacactgattttctcacagttctgcaggctggtactctaagatcaaggtgtcttcagggtctttttttttggagatgtctcccttggcttgtagatgtctgttttctgtttgagtcttcaacaaggtctgtactgtctgtgtccaaatttccgctcctaaggacacctgcaatattggattagggccctccctaatgacctcatttaaacttaattatctttttaaggattccttctccaaatacaatgacattctgagatactagagattattagcacttcaatatgtgaattttgcaggtacaccactcagctcatgacaatggctagtagaaaacaagaga

SEQ ID NO: 119904 - DNA, 594 bp, Homo sapiens
tgggtaccccagaccctatataggttcctcaatgcaaccaatgatacatgaccaacatctttcttttggttcatcctaatggagaatgacacatgcctttctgtatcacttagtcattcagtcgatatttattgaccaactactctgtgttaggagacaaaacagtgagcaaaagcagaccctgttttgctctgacaggatattatgaattgaactgtgcctgcaaaatttaaatgtttaaacaatgtgatgatatttggagatggtgatatacatacgttctctctctctctccaagcctcagatgtggtaatctgcaatatattttaaccaygcatagtaaaactacatttttagcatggcattatgatatttatacaaaaccatttatgcattaggaaatttatattatctatgtggtctctaaaccttcacaacaagctgggcacagtgatatgagttttcaaactcacttgatagatccagaagctcagagagtttaaacaacttgtccaaggcaagatgtctgggcagtagccattccgggcttagtcttgtatatcactcttgtgaaggaggccgcttgaccttaca

SEQ ID NO: 119905 - DNA, 594 bp, Homo sapiens
tgggtaccccagaccctatataggttcctcaatgcaaccaatgatacatgaccaacatctttcttttggttcatcctaatggagaatgacacatgcctttctgtatcacttagtcattcagtcgatatttattgaccaactactctgtgttaggagacaaaacagtgagcaaaagcagaccctgttttgctctgacaggatattatgaattgaactgtgcctgcaaaatttaaatgtttaaacaatgtgatgatatttggagatggtgatatacatacgttctctctctctctccaagcctcagatgtggtaatctgcaatatattttaaccacgcatagtaaaactacatttttagcatggcattatgatatttatacaaaaccatttatgcattaggaaatttatattatctatgtggtctctaaaccttcacaacaagctgggcacagtgatatgagttttcaaactcacttgatagatccagaagctcagagagtttaaacaacttgtccaaggcaagatgtctgggcagtagccattccgggcttagtcttgtatatcacycttgtgaaggaggccgcttgaccttaca

SEQ ID NO: 119906 - DNA, 561 bp, Homo sapiens
cacaagccggcctatcccccagtatgtgtacagggcccaggcaggagtacaaaggaggacaccatgctatatgtctacatagctaaaattcatatatcaaactaacaaactgctacttgaaatatgttctatcctcctaccttgaaaaaatgtacctttataaagacagaaatgtttttaatgtgtaaagctatgttttaatgagtaggcaaaatatcaraagtagataaattcaattattatggcacgtgtttgcatagtccggtgataggctggagatgtttgggtaagtaattaaataaaaacttacacagtttacaagttacatatttacccctgtgaaatttactttcttcccttcattttagcaaaatcccttaattatattgtcataataaaaattttcatatagtcagtcttctatgaatactaatgccaaattacataacttttctgaattattgcagctcttgggatttttcaactcgattttaacttggagaaactttgctctgctaaggcagtagcaactggaattatcaataaaattcttaaagtcat

SEQ ID NO: 119907 - DNA, 559 bp, Homo sapiens
ggatgaacatattttcacagtcttttgaagtaaaaattgtgattgaaatgttttatgttcttcctcaaaatgtcctgggtaccattctcagaaaccaaatctaacatgactcattgagatatttcttatgtccttaattttatgctatgaatttcatcacatcattaaactaggatttagcacgttaagtgccaaacctgtgaattaaactcatgaattaaagtgcaaatctatgaattgagcaaatatcaaacctggttgcatcagtctgttccttttactcacctttagtgacaccaccttcttcaactctcttagtaacccagtgctttcatgatctcacttataaactcctcctttcaaatttcattctcaaaaaactcatctaataactattaatattggttctgagattctaccattcaataactaaaacagcgttattaattacagtttcaaaaatcaagaaataaaaggtaggctcctttaaggaaatggtcagtccctggcagaaatccytggaaatagcagttactattagtactggcagagatgagaa

SEQ ID NO: 119908 - DNA, 625 bp, Homo sapiens
tttgtgatgagtggattggtctcacagagttaaacattatctttgagtcagcagattggaatctctttttatgtagaataaatgcagggacatttgggagcccattttggcctgtgtggaaaaacagtacatccccagataaaaactataaagatgctatctgtgaaactgctttgtgatgtgtggattcatctcacagacttaaacaattattttgattcagcaggttggaaatactcttttgggataatctgtgcagagacatatgggagcccatggagacctataaggataaatcaaatatccccagataaaaactagaaagaarctatgtgtgagaatgctttgtaatatgtggatgcatctcagagttaaacctttgttttgattctccatgctggaagcactctttttgtagattatgggaagacacattctacaaaatgcaaaggtgcgaagctatctttgaaattgctttgtaatatgtctatttatctcagagctaaacctttctttttattcaccgggtaggaacacttttattccagagcctgcaaagggacttatgggagcccattgtggcatttgggaaaaaactgatattcccagattaaaactagaaata

SEQ ID NO: 119909 - DNA, 593 bp, Homo sapiens
ggattcagtagttgggaaagagtgttttgtccattatgggaatggacatttgggagctcacagaagccagtggtgaataagtgaatatccctgaataaaaactagatggaagcaatctgagaaactgttacatgatgtgtgcattcatcttgcagagttaaaactcttttcattcatcattttggaaacactgtttttgtaccatcttccaagggttatttcagagagcattgaagcttatggtgaaaaaggaaacaacttcagataaaacagagaaagaagctttctgagaaactgctttgtgatgtctgcattcatctcatagaattaaacctttctttggattcagctgtttgaaaacactgtttttgtcaattctgtgaattgaccattggcagctcgtgtaggctaatggsaaaaaagaaaatatcccaggaagaaaactagaagaaacctatttgaaaaactgccttatgatgtgtgcattcacctcactaagttaaacctgtctattcattcagcagtttggaaacaatgtttttgtagaatctgaaattggatattttggagagcatcacagcctatggtaaaat

SEQ ID NO: 119910 - DNA, 613 bp, Homo sapiens
tgtaatatgtggatgcatctcagagttaaacctttgttttgattctccatgctggaagcactctttttgtagattatgggaagacacattctacaaaatgcaaagrtgcgaagctatctttgaaattgctttgtaatatgtctatttatctcagagctaaacctttctttttattcaccgggtaggaacacttttattccagagcctgcaaagggacttatgggagcccattgtggcatttgggaaaaaactgatattcccagattaaaactagaaataagttatctgagaaactactttgtgatggatgaattcacctcagaatgttcaacctttcttttgattcaggaggttgaaaacactctttttggagaatgtgcaaaaaaacatttgcgtgccagtgaggcctgtagtgaaaaaccgattatccccagacaaaaactcgataaaatttatgtgtgaaactgctttgtgatgtctggattcatctcacagacttaaatctttcctttgatttagcaggttggaatcaacctttctggggaatcttcaaagggacatttgtgagccatattaggcttatgtggaaaaactgaatatccccagattaaaa

SEQ ID NO: 119911 - DNA, 613 bp, Homo sapiens
tgtaatatgtggatgcatctcagagttaaacctttgttttgattctccatgctggaagcactctttttgtagattatgggaagacacattctacaaaatgcaaaggtgcgaagctatctttgaaattgctttgtaatatgtctatttatctcagagctaaacctttctttttattcaccgggtaggaacacttttattccagagcctgcaaagggacttatgggagcccattgtggcatttgggaaaaaactgatattcccagattaaaactagaaataagttatctgagaaactrctttgtgatggatgaattcacctcagaatgttcaacctttcttttgattcaggaggttgaaaacactctttttggagaatgtgcaaaaaaacatttgcgtgccagtgaggcctgtagtgaaaaaccgattatccccagacaaaaactcgataaaatttatgtgtgaaactgctttgtgatgtctggattcatctcacagacttaaatctttcctttgatttagcaggttggaatcaacctttctggggaatcttcaaagggacatttgtgagccatattaggcttatgtggaaaaactgaatatccccagattaaaa

SEQ ID NO: 119912 - DNA, 613 bp, Homo sapiens
tgtaatatgtggatgcatctcagagttaaacctttgttttgattctccatgctggaagcactctttttgtagattatgggaagacacattctacaaaatgcaaaggtgcgaagctatctttgaaattgctttgtaatatgtctatttatctcagagctaaacctttctttttattcaccgggtaggaacacttttattccagagcctgcaaagggacttatgggagcccattgtggcatttgggaaaaaactgatattcccagattaaaactagaaataagttatctgagaaactactttgtgatggatgaattcacctcagaatgttcaacctttcttttgattcaggaggttgaaaacactctttttggagaatgtgcaaaaaaacatttgsgtgccagtgaggcctgtagtgaaaaaccgattatccccagacaaaaactcgataaaatttatgtgtgaaactgctttgtgatgtctggattcatctcacagacttaaatctttcctttgatttagcaggttggaatcaacctttctggggaatcttcaaagggacatttgtgagccatattaggcttatgtggaaaaactgaatatccccagattaaaa

SEQ ID NO: 119913 - DNA, 516 bp, Homo sapiens
actaacagagttgaaccttcctttagaaagagcagttttcaaacactctgtttgtgcaatttccaatggagatttctagggatttgaggccagtcttagaaatggaaatatctttgtataaaaactagacagtgtcattctgagatactaccttgtgatgtgtgcgttcaactcacagagtttaacctttcttttcatagagcagtttggaaacactctatttgtaaagtctgcaagtggatatttggacctctttgaggccttcgttggaaacgggatttcttcctrtaatgctagacagaagtattctcagtcacttctttgtgttgtgtgcattcaactcagagatttgaaccttcctttagagagagcacatttgaaacactctttctgtgtaatttcctagtgcagatttcaagctcttcgaggacaatggtagaaaaggaaatatcttcgtatgaaaactagacaaaatcattctcagaaactactttgtgatgtgtgcgttccactcac

SEQ ID NO: 119914 - DNA, 516 bp, Homo sapiens
actaacagagttgaaccttcctttagaaagagcagttttcaaacactctgtttgtgcaatttccaatggagatttctagggatttgaggccagtcttagaaatggaaatatctttgtataaaaactagacagtgtcattctgagatactaccttgtgatgtgtgcgttcaactcacagagtttaacctttcttttcatagagcagtttggaaacactctatttgtaaagtctgcaagtggatatttggacctctttgaggccttcgttggaaacgggatttcttcctataatgctagacagaagtattctcagtcacttctttgtgttgtgtgcattcaactcagagatttgaaccttcctttagagagagcacatttgaaacactctttytgtgtaatttcctagtgcagatttcaagctcttcgaggacaatggtagaaaaggaaatatcttcgtatgaaaactagacaaaatcattctcagaaactactttgtgatgtgtgcgttccactcac

SEQ ID NO: 119915 - DNA, 516 bp, Homo sapiens
actaacagagttgaaccttcctttagaaagagcagttttcaaacactctgtttgtgcaatttccaatggagatttctagggatttgaggccagtcttagaaatggaaatatctttgtataaaaactagacagtgtcattctgagatactaccttgtgatgtgtgcgttcaactcacagagtttaacctttcttttcatagagcagtttggaaacactctatttgtaaagtctgcaagtggatatttggacctctttgaggccttcgttggaaacgggatttcttcctataatgctagacagaagtattctcagtcacttctttgtgttgtgtgcattcaactcagagatttgaaccttcctttagagagagcacatttgaaacactctttctgtgtaatttcctagtgcagatttcaagctcttcgaggacaatggtagaaaaggaaatatcttcgtatgaaaactagacaaamtcattctcagaaactactttgtgatgtgtgcgttccactcac

SEQ ID NO: 119916 - DNA, 597 bp, Homo sapiens
taaaaactagacagaacaattctcagaaactgctctgtgatttgtgcgttcaactcacagattttaaactttcttttcatagagcagtttggaaacactctttttgtaaagtctgcaagcggatatttggacctctttcaggccttctttggaaacgggatttctccatatactgctagcccgaagaattttcagtaactactttgtgttgtgcgtattcaactcacagatttgaacctttctttagacagagcagatttgaaacgctcttttcgtggcttttgcaagtaaagatttcaagcgatttgaggccaatggtagaaaaggaaatatcttcgtataaaaactagrcagaatcgttctcagaatctactttgtgatgtgtgcgtgcaactcacggagattaacctttcttttcatagagaagtttggaaagagtctgtctgtaaggtctgcaagtggatatttagatttctgtgaggccttcgttgcaaacgggatttcttcatatactgcccgacagaagaattctgttactactttctgttgtgtgcattcaactcacagagttgaaccttcctatattcagagcagttt

SEQ ID NO: 119917 - DNA, 583 bp, Homo sapiens
catccatgcttcctgtacttagaattgttcattgtagttgaaaggctctctctctacctcctgaaaaataaaagagaagcattgttgatggtttttcttgggtctgtgcttcacgttttccatttcattgcatatctgggtctctatcaagagctagtctgactaatggaaagtgctctgggtattgtttgaaaaattcttggttttcacaggacacgactgcttttggaagaattgctttatgtctgggaaagtaagaattatggcatcttattgaaaaataatgtgtttttgaaaatttcctgtcagaaaattgttaaacttttgcaaaaaatggaagttggttgcagcaatcacattccaaggatctgagaatcctggtaggtgggaacgttgcaaatcacagcaaaamgcagttgctagcatatccttctcactttacgttactgataatgtgtggctccagcctttgcaggtagtcagtgaggaaaccttttgtctgttcttgatcagttccttttgaattttcccaattgccattctaaatcttcatctcttgcctcatcccaacctaaaacacaac

SEQ ID NO: 119918 - DNA, 583 bp, Homo sapiens
catccatgcttcctgtacttagaattgttcattgtagttgaaaggctctctctctacctcctgaaaaataaaagagaagcattgttgatggtttttcttgggtctgtgcttcacgttttccatttcattgcatatctgggtctctatcaagagctagtctgactaatggaaagtgctctgggtattgtttgaaaaattcttggttttcacaggacacgactgcttttggaagaattgctttatgtctgggaaagtaagaattatggcatcttattgaaaaataatgtgtttttgaaaatttcctgtcagaaaattgttaaacttttgcaaaaaatggaagttggttgcagcaatcacattccaaggatctgagaatcctggtaggtgggaacgttgcaaatcacagcaaaacgmagttgctagcatatccttctcactttacgttactgataatgtgtggctccagcctttgcaggtagtcagtgaggaaaccttttgtctgttcttgatcagttccttttgaattttcccaattgccattctaaatcttcatctcttgcctcatcccaacctaaaacacaac

SEQ ID NO: 119919 - DNA, 611 bp, Homo sapiens
ttggtttccctaacaagtattgattcctgggtgaatgtggaagacactgacaatttcacagaagaattttctctgcccttacagaatgttcaatgtagtgaggaataccaacatattaaatgaaccaaaatctataaatccatccatacacacctctgcacatgmaaagacaatcacccagatgtagagggaattgtcaataaaactagttaaatatatggttaacatagaaactccattgtgaaagatctctgcaaacagaaaggtagaattttggaaaatgaatgaggaaagcccgtgcactttggcactacattaatactatagttaaaactctgtcttgccaagaaacaaagttcatttgatatttagcatgtctattggcaagacagagttttaatattattgattagaatttgaattattctaattcaaactatcattaatacaaagttcatttgaattaactataattatgtattgccaatgatttttgagaaaaacctgaacctgaagtattctttcttggtactatgagttcaatgcttgaagagctgtaagatccaactgtgaagtgaggcgaacatcatcactcaccctgcaagactcaa

SEQ ID NO: 119920 - DNA, 586 bp, Homo sapiens
tgattaaactgctggaatgagccaytcaaatatctccaggaagaacttcatggaagaggaatagaaagtgcaaatgccctgaggttgaatgtacttgttatgttgaaggtatgcaaggaggttacatggctaaattggagtgagcttgggggagagtggtaggagattaggtctgacaggtggccagggccagatcacagagggtcttgctggtcacagtaaggactttgtcttcttctctgagtaaaagggaagacagtggagtttttgagcagaggagtacctaaccaactgatatttaaaaaatactagtctatcaaagatattatggaggaggataaagactggagtagaaagaagataggagattatttcagtaattcaggagcaccgttcatgctgttaaaactggggagcatgagaaatgtgcagatggggaatatttccaaagatggggaaaacaggattttttcattgattgactaagagtgagaataagaataagaacgagaaagtacttaaggatgatcacaaggtttttagcttgagaaagaatagaagaatggaattgccatttacagaggta

SEQ ID NO: 119921 - DNA, 586 bp, Homo sapiens
tgattaaactgctggaatgagccattcaaatatctccaggaagaacttcatggaagaggaatagaaagtgcaaatgccctgaggttgaatgtacttgttatgttgaaggtatgcaaggaggttacatggctaaattggagtgagcttgggggagagtggtaggagattaggtctgacaggtggccagggccagatcacagagggtcttgctggtcacagtaaggactttgtcttcttctctgagtaaaagggaagacagtggagtttttgagcagaggagtacctaacyaactgatatttaaaaaatactagtctatcaaagatattatggaggaggataaagactggagtagaaagaagataggagattatttcagtaattcaggagcaccgttcatgctgttaaaactggggagcatgagaaatgtgcagatggggaatatttccaaagatggggaaaacaggattttttcattgattgactaagagtgagaataagaataagaacgagaaagtacttaaggatgatcacaaggtttttagcttgagaaagaatagaagaatggaattgccatttacagaggta

SEQ ID NO: 119922 - DNA, 600 bp, Homo sapiens
gacaattctctttttcctcttttgagtcaactttatagaggcataattaattaaaataaaatgtaagtgtgtagttcagtgatttaagactgttttccaacatggttgcaccttttgtatttccatcagcagtttgtgagagttccagttgcttcacattcttttcaaaacttgcaatggcccagtattataagttttaattttggccatcataattggtacaaagtggtattccatgaggaggagttttgaaagcacttaaattttgcatttcttatgaaacttttaatttagtcatttattttatatgagcagggactcrtattctgttttactcaatagattttaattcattatttaaaaaatcaagacaaaaactttggctttcccttcagtgtctcttgcagatggctacaatgcaggggcaactggttttctggtgggcctagaatgtatgtaaatatttcaattctcctaacaaaatatcaactatgccctctcctctataagaatctaatgcttatgagctttgtcttaacattttcattattaaaaagtaccttcttttaaacccagaaaaattaataatagttgaaggat

SEQ ID NO: 119923 - DNA, 600 bp, Homo sapiens
gacaattctctttttcctcttttgagtcaactttatagaggcataattaattaaaataaaatgtaagtgtgtagttcagtgatttaagactgttttccaacatggttgcaccttttgtatttccatcagcagtttgtgagagttccagttgcttcacattcttttcaaaacttgcaatggcccagtattataagttttaattttggccatcataattggtacaaagtggtattccatgaggaggagttttgaaagcacttaaattttgcatttcttatgaaacttttaatttagtcatttattttatatgagcagggactcatattctgttttactcaatagattttaattcattatttaaaaaatcaagacaaaaamtttggctttcccttcagtgtctcttgcagatggctacaatgcaggggcaactggttttctggtgggcctagaatgtatgtaaatatttcaattctcctaacaaaatatcaactatgccctctcctctataagaatctaatgcttatgagctttgtcttaacattttcattattaaaaagtaccttcttttaaacccagaaaaattaataatagttgaaggat

SEQ ID NO: 119924 - DNA, 452 bp, Homo sapiens
ggttgcagttagccaagattgcaccattgcactccagcctgggtgacatgagtgaaacttagtctaaaaaaaaaaaaaaagcagtgtcacgagaaccaaaaatcaggtgagcaatcayagtaactggttttaacttcatatcctggaaagaggaattgaggggggcaggagagacaatcttgaattgtcgatgccaccctttccccatgcaacatggagaaagagtctatgcccttgagggagggagagtgcagcaacttgggattttacattgaattcagtactgctctatcacagtagagaataaagcttagcagagaataaggccgtgctgggctcagccagctcacccttgcccgaagtgagcatttggaccagccctagccagaggggattcacccatcccagtggttggaactcgagtttcttggcaaagccttgccaccacaggc

SEQ ID NO: 119925 - DNA, 414 bp, Homo sapiens
gaattctgcacaagtgtgcattccaaccgaccgtgaatagagttctgatttctccacattctccccaacacttggtattgtcatgggccctttttaacaccagccgtgagtttgttttctcagcacatcacaaagtcaagggagatttatctacaacaaggtgccagaaacacataggctgaaagtaggggctggatgggagaaaggaagctgtgtttccaatctggaaatttctcacctgcctgtttcctcaacccccaagacatgctcttcttaggtctcctgtatcaatatatatgttttgagtctctgaatgagtttaagaggtataagttccctgattgaagtcggggaatagactaatggggcrttgatggactaaaaatccaaagatagaagaaaaagaaagaagag

SEQ ID NO: 119926 - DNA, 649 bp, Homo sapiens
ctcagtgaataatatatggaaactatttgtattctacttgcaattctctgaaaaatataaaattatttcaacataaaagcgggcatcaaaagaaagtatgtgtacaacaaagaatattttaaatgggaacagaaaatcagtaatctcaacaaaaataataacaacaacaaacaaaaaccatgacccaattaaggggcttcaagatggctgacaagatacatttggtactcacacattccacaaagtaaaaccaaaacagcaagtagataatcacacctcaaatagatcatataaaagagaacactgaaattcaacagataagtgacagaaaacacctacaggagaataaaaagaggaaagtgaggcagcctgattggccaggatcagctggaggcatgaggaaactctwaaatgtggagaaagaataagtgagatacccccagtattccatattctcactgtggactcccaaaaccctagacatgggagagccccttgacccttacatgccctgaaaccaacataggtgtatgcctgaagactgtacaactgcattactccagagagagagctcatgctgagttccacaaacctccaagtcctgagcagctacagcatggcatcattttgacagctcagcaccccgtca

SEQ ID NO: 119927 - DNA, 649 bp, Homo sapiens
ctcagtgaataatatatggaaactatttgtattctacttgcaattctctgaaaaatataaaattatttcaacataaaagcgggcatcaaaagaaagtatgtgtacaacaaagaatattttaaatgggaacagaaaatcagtaatctcaacaaaaataataacaacaacaaacaaaaaccatgacccaattaaggggcttcaagatggctgacaagatacatttggtactcacacattccacaaagtaaaaccaaaacagcaagtagataatcacacctcaaatagatcatataaaagagaacactgaaattcaacagataagtgacagaaaacacctacaggagaataaaaagaggaaagtgaggcagcctgattggccaggatcagctggaggcatgaggaaactctamaatgtggagaaagaataagtgagatacccccagtattccatattctcactgtggactcccaaaaccctagacatgggagagccccttgacccttacatgccctgaaaccaacataggtgtatgcctgaagactgtacaactgcattactccagagagagagctcatgctgagttccacaaacctccaagtcctgagcagctacagcatggcatcattttgacagctcagcaccccgtca

SEQ ID NO: 119928 - DNA, 600 bp, Homo sapiens
ttgggaaaatgtgttcaagtttctgcttcttaaataactagagattcttttgtttctgttcttctgaaggtcttatttttcataatccactgttaccgtgagctatccatgaccattcccataaatactgttttcttgcttcagttaggtagtgttactttcacgagatgttcaaaagagccacttgaagaaactgtccgatttatgatttctgttaacgaatataaaatgaattgggccaataaaacaatcattaataaaataatgtaggtaagaatatgtataatgtccataagactatrtaaaagattcttatatatatatctgtgtatatatatgtatgtgtatgtatatatttatatacatacacatatgaaacaaatttttctcttctaaaaaaatagtatgcctcagaactacctgctctagcaggggaacatagtgctaattttttaaatatttcttctcaattatttctgaagctgggaagtccatacatcaacaaataagaagagaaaatgaaagaataatacttagtgtttcagcaggcctaggaaataagagagagaaaatgttctcacagttcctcacaaaaattct

SEQ ID NO: 119929 - DNA, 607 bp, Homo sapiens
ctcccaagtaggatgggccacaggtgtgcatcacaacccctggttaattactttttttttatttgttgttaagaagaagtttgcttatgttgtcaggaactcttggactcaacaaccctcccacctcagcttcccaaagtgctgggattacatgtatgggctactgggcccagccagaaagtttttcaaaattaatgcatctttcaaacataatagtaaaatacaatttttaaaaaatatatttttaaattttaatttttttaacctgttgtagtattatggtacctggttcakaactcccatacattctttttttgtaatgttaggtgtgttaggcctcaggaccaggaatcacaaaacagaatatttctgaccttctccagccttcctttcactttccccaaggcaggactctaatcttcccttgcttttctgattgtgagctgtaagaccctgaccagagagggtgctaccttataccctgaaagaaggactgcaatgctatgaagcttctgtaaaaacccaagagaacttggttcagggaggttccttatagctgaacacacggaggttcctggatgtggtgcacccagggagggcatggaag

SEQ ID NO: 119930 - DNA, 572 bp, Homo sapiens
tgccaaaattggtgtttctataggggtatgagggatagaactttctattttgccatcttcctgacatcatcctaaatttttgtatatttaattggttttagtgcttactactgcctctttccaatcccaaattccccatcttaggctcttgttttgacttattttcatatcatgtggataaatgttttgagtcatttttatagaaaggacacttgagtggtaacttttcttagcctttggagatcagaaaatgaaactgttgctgccctacatgatgacaaaatggcagggggaaacgtctttatcacattctttttctcttaaatttccatagaccttctattgctgacttctagaatttattggctcagagaagaaatctaatgttagtcagattttaattcctctaaaaggatccttcattttttggcttgattgtaggactcctaaacctttgaaattaaattatgctacaactattattgattttggaacccaaaagtcacgagttggagcaacaacaaaagcctagctcacarcagtaagctttgcaaaaggtttcagagaccaaa

SEQ ID NO: 119931 - DNA, 556 bp, Homo sapiens
gccttaatactctattgagacacttgctcttggaatccagcaaccatgctgtgaggaagcccaagcaactcatggagaggaaccaaagctcccagcccacagcctcatctatgcttccagccaatagccagtaccaatttgccagttgtatgagagagccatcttgaaagtcaaacctcatggtaggcagcatctcagatggcccccaatgataggattcctgcccttgtgtaatcacctcgcccaaacactgatgtattctgaagagtatgttcgtgataaaggatgaactacaccagagaaagaaccagggatggaggtctcaggagyatcatatcctgaattatgagaatttacttctttttctagacatccagctgcagtgagtcagaggagagatgtctggtctcccccaaatgtagatggcactgagtacctagcttctaacaaatagaatatagcataagtggtatccaagattatattataaaactgatgtggcatcaatcgtatctcaataaagctgggggagaaaagactagcttccattttggat

SEQ ID NO: 119932 - DNA, 556 bp, Homo sapiens
gccttaatactctattgagacacttgctcttggaatccagcaaccatgctgtgaggaagcccaagcaactcatggagaggaaccaaagctcccagcccacagcctcatctatgcttccagccaatagccagtaccaatttgccagttgtatgagagagccatcttgaaagtcaaacctcatggtaggcagcatctcagatggcccccaatgataggattcctgcccttgtgtaatcacctcgcccaaacactgatgtattctgaagagtatgttcgtgataaaggatgaactacaccagagaaagaaccagggatggaggtctcaggagtrtcatatcctgaattatgagaatttacttctttttctagacatccagctgcagtgagtcagaggagagatgtctggtctcccccaaatgtagatggcactgagtacctagcttctaacaaatagaatatagcataagtggtatccaagattatattataaaactgatgtggcatcaatcgtatctcaataaagctgggggagaaaagactagcttccattttggat

SEQ ID NO: 119933 - DNA, 614 bp, Homo sapiens
ttaatcaatgtcaacttgattggattgagggatacaaagtattaatcctggttgtgtctgtgtgggtgttgccaaaagagattaacatttgagtcagtgggctgggggaggcagatccactcttaatctggtggacacaatctaatcagcttccagctaatataaagcagccagaaaaacatgaaaaggagagctgggcctagcctcccagcctacatctttctcccatgctggatgtttccttgygatcgtgtaagttaacacttaataaatctcccctctctctctctatatatatcctatgagttctgtccctctaagagaaccctgactaatacagattttggtaccaggagtggttctagagaaacagaatattaaggattgagttctttcgttggttttggggtttctggaattggctgcttaatatggttagaccccaaaatgctaaggactgtatgtctaatagtatggagaagactgatagtccttggtgtgaacggtttagatagttaggcaaaataaatgcatttgacactcctgatttcactgctcatgagaggcaaggagtttagtgactctatacataatacctttgaccatatgcggag

SEQ ID NO: 119934 - DNA, 614 bp, Homo sapiens
ttaatcaatgtcaacttgattggattgagggatacaaagtattaatcctggttgtgtctgtgtgggtgttgccaaaagagattaacatttgagtcagtgggctgggggaggcagatccactcttaatctggtggacacaatctaatcagcttccagctaatataaagcagccagaaaaacatgaaaaggagagctgggcctagcctcccagcctacatctttctcccatgctggatgtttccttgtgatcgtgtaagttaacacttaataaatctcccctctctctctmtatatatatcctatgagttctgtccctctaagagaaccctgactaatacagattttggtaccaggagtggttctagagaaacagaatattaaggattgagttctttcgttggttttggggtttctggaattggctgcttaatatggttagaccccaaaatgctaaggactgtatgtctaatagtatggagaagactgatagtccttggtgtgaacggtttagatagttaggcaaaataaatgcatttgacactcctgatttcactgctcatgagaggcaaggagtttagtgactctatacataatacctttgaccatatgcggag

SEQ ID NO: 119935 - DNA, 614 bp, Homo sapiens
ttaatcaatgtcaacttgattggattgagggatacaaagtattaatcctggttgtgtctgtgtgggtgttgccaaaagagattaacatttgagtcagtgggctgggggaggcagatccactcttaatctggtggacacaatctaatcagcttccagctaatataaagcagccagaaaaacatgaaaaggagagctgggcctagcctcccagcctacatctttctcccatgctggatgtttccttgtgatcgtgtaagttaacacttaataaatctcccctctctctctctatatatatcctatgagttctgtccctctaagagaaccctgactaatacagattttggtaccaggagtggttctagagaaacagaatattaaggattgagttctttcgttggttttggggtttctggaattggctgcttaatatggttagaccccaaaatgctaaggactgtatgtytaatagtatggagaagactgatagtccttggtgtgaacggtttagatagttaggcaaaataaatgcatttgacactcctgatttcactgctcatgagaggcaaggagtttagtgactctatacataatacctttgaccatatgcggag

SEQ ID NO: 119936 - DNA, 585 bp, Homo sapiens
ctacctgttctcccttctaaactccttctctcttgggttcccactgagtctagcatacaggaaaatggaagaaaagaattgagagacaaaatcatggcacatttttctaccttttaataagtttcatttttggatacagccaatgcctcrtatatgtgggttccacatctgtggattcagtcaacaatggatggaaaatatttgggaaagaaagcacaacaggccagatgtgatggctcacacctgtaatcccagcactttgggaggctaaggtggatcatttgagctcaggaattcgagaccagtctgggcaaacataacaagaacctgatcctacaaaaaatatcaaaattagtggggtgaggtggcacatgcctgtagtcccagctacttgggaggctgaggcaggaggattgcttgagccccggaggcagaagttacagacagctgagatgacgtgactgcactccagcctgggcgctagagcaaaatcctgtctcaaaaactaaataataataataacaaaatacaaataaaaaacaatgcagtataacaatgatttacatttacatttattaacagcac

SEQ ID NO: 119937 - DNA, 585 bp, Homo sapiens
ctacctgttctcccttctaaactccttctctcttgggttcccactgagtctagcatacaggaaaatggaagaaaagaattgagagacaaaatcatggcacatttttctaccttttaataagtttcatttttggatacagccaatgcctcgtatatgtgggttccacatctgtggattcagtcaacaatggatggaaaatatttgggaaagaaagcacaacaggccagatgtgatggctcacacctgtaatcccagcactttgggaggctaaggtggatcatttgagctcaggaattcgagaccagtctgggcaaacataacaagaacctgatcctacaaaaaatatcaaaattagyggggtgaggtggcacatgcctgtagtcccagctacttgggaggctgaggcaggaggattgcttgagccccggaggcagaagttacagacagctgagatgacgtgactgcactccagcctgggcgctagagcaaaatcctgtctcaaaaactaaataataataataacaaaatacaaataaaaaacaatgcagtataacaatgatttacatttacatttattaacagcac

SEQ ID NO: 119938 - DNA, 611 bp, Homo sapiens
ggatccttccctctgggagattcattcatcctctaaacagtggagttttttttcctcaggagctaaccaccttcagatgctcaaatagcctgtacacatggggaccaccagagagaacacttcaacttgtagagctgtgatctctgctggtaaacacagctcatacgacatcccgtaatgtacagcccatgatgtgtactcacacagcatgattgtctagcataagctgagctactctagaatataatggggagagtgtagggcaaggatgagcacatgggagctaaaatgtcgccttgttggggtagcctgccttccttctcagccctgcgcttagtctctgggaaaggaatagtcctcgtccagtgtctggagatatccttgactcctctgtttatctcataccccatatctaattcattaataagtatttttggccctamttccaaaaatatagccagaatcttattattccttcaaaagaaaactcccatttattctctactactattctcaatgcttcacttctgagactacctggtgttagcatagaccacacaggttaagggctcggtcccgtgaggctggcaacacttcagatgccaatctca

SEQ ID NO: 119939 - DNA, 607 bp, Homo sapiens
atttgtagccagttggtcagaagtgctagtggcctgaggatccccaaacttgtgactagcatctgaagtggggcagttttgctttagattgtgccctaaaatctgagaaatctggcactaactgcagtgattagcatcagaatgaattgtagtgcagaaccatcccataacaaaaaggacttgtgggattagccacattgcaagatccaatgtaacgcagtatagccaggaccagatcagaccagccaccttgtaagaagtcatcaatatcatccccaggtgattcagaggaaggccctgtgacccsaggccccttttacctctatcacgtacagatgcggtattgagagggaggagagggaaggaagtctgcttgtaaaggcagaaatagcttcactaaagtgtttgaactttgatgggactgcaaacttacctgctttaaattagaggagactgtggttttaaaaaaattcttaaaaacattttttagtcaacaagttcatacctctgaatcgtcaagactggaagcttgagaatagtagattactatagaaatgaaagaacactgccttttctccacccctgctgccaacactaccccccccaa

SEQ ID NO: 119940 - DNA, 607 bp, Homo sapiens
atttgtagccagttggtcagaagtgctagtggcctgaggatccccaaacttgtgactagcatctgaagtggggcagttttgctttagattgtgccctaaaatctgagaaatctggcactaactgcagtgattagcatcagaatgaattgtagtgcagaaccatcccataacaaaaaggacttgtgggattagccacattgcaagatccaatgtaacgcagtatagccaggaccagatcagaccagccaccttgtaagaagtcatcaatatcatccccaggtgattcagaggaaggccctgtgaccccaggccccttttacctctatcacgtacagatgcggtattgagagggaggagagggaaggaagtctgcttgtaaaggcagaaatagcttcactaaagtgtttgaactttgatgggactgcaaacttacctgctttaaattagaggagactgtggttttaaaaaaattcttaaaaacattttttartcaacaagttcatacctctgaatcgtcaagactggaagcttgagaatagtagattactatagaaatgaaagaacactgccttttctccacccctgctgccaacactaccccccccaa

SEQ ID NO: 119941 - DNA, 530 bp, Homo sapiens
cagtagagaaaaataggtagaatgggaaaagtaggttggagccaaaacatggggtcttcaaagccaaatcgaaagtaaacaataaggaatcttccctggcccccatttttttctttctttttttttttttttggggaagagaggaacatgatttataaaaaaaaaaaaattaaggcattgtatacaaaaaagccatagtagaatgaaggtgtgtaaatmttatttttcaggtttattatttttcttatgttccactcctggataatgttgtcacctccttttgatactttgagactcgaaactaatcatcttcagcttctcattttaacttctactccacgccaagtcctcataatataattttcaggtactttgcacagtatacagcaactagcataatcatctcttagtaagtgcatgctgaatcaatacctgagttggacaatgggttatgtttctgatctcctttccctcctttccttctctctactgcttactctgttctgacccttccatttggacttttgtac

SEQ ID NO: 119942 - DNA, 530 bp, Homo sapiens
cagtagagaaaaataggtagaatgggaaaagtaggttggagccaaaacatggggtcttcaaagccaaatcgaaagtaaacaataaggaatcttccctggcccccatttttttctttctttttttttttttttggggaagagaggaacatgatttataaaaaaaaaaaaattaaggcattgtatacaaaaaagccatagtagaatgaaggtgtgtaaataytatttttcaggtttattatttttcttatgttccactcctggataatgttgtcacctccttttgatactttgagactcgaaactaatcatcttcagcttctcattttaacttctactccacgccaagtcctcataatataattttcaggtactttgcacagtatacagcaactagcataatcatctcttagtaagtgcatgctgaatcaatacctgagttggacaatgggttatgtttctgatctcctttccctcctttccttctctctactgcttactctgttctgacccttccatttggacttttgtac

SEQ ID NO: 119943 - DNA, 530 bp, Homo sapiens
cagtagagaaaaataggtagaatgggaaaagtaggttggagccaaaacatggggtcttcaaagccaaatcgaaagtaaacaataaggaatcttccctggcccccatttttttctttctttttttttttttttggggaagagaggaacatgatttataaaaaaaaaaaaattaaggcattgtatacaaaaaagccatagtagaatgaaggtgtgtaaatattatttttcaggtttattatttttcttatgttccactcctggataatgttgtcacctccttttgatactttgagactcgaaactaatcatcttcagcttctcattttaacttctactccacgccaagtcctcataatataattttcaggtactttgcacagtatacagcaactagcataatcatctcttagtaagtgcatgytgaatcaatacctgagttggacaatgggttatgtttctgatctcctttccctcctttccttctctctactgcttactctgttctgacccttccatttggacttttgtac

SEQ ID NO: 119944 - DNA, 566 bp, Homo sapiens
cctcaactctgtacacagaaggggacagatggaaccacaacacaggttacgagagacagagactagaagaaacttggttggcacctcacatcccaggaagcttatgacaacctttgctctttgacaaaacccagtgatgttctgacccaactctactaagaatccaccgtgtcagagtcctgtgccggggcattgagagagaggaagcacaggctctgccccagggcaacyttcagtctgaggtgggtaacagagacgctgtataagataagtcccctgtctggtggggagcgggtaatctcctgcttgagaggctccagcctattggcagagacatagcacttaaccagagggatgcaccggtcctagctctctgatgagataagggcttggggttcgtttgggagacccctgcagaaggtagggtttggggagggctctgagcaggggaagagacacacgccttggtccagagaaggcaaggcacaaaaggttatcaaagcccctgccccctcaacccctttactatagaaagagaaagtacagcccagaaagggcaagagatt

SEQ ID NO: 119945 - DNA, 592 bp, Homo sapiens
ggatgtggagacattaggataatatgtgaaaaattatgtataactattcactggtagttttctaatctgcatattcctacccgtgagttgttttactgtgaattgggctaatatgggccacctaggtcccattatctttactggcattcctgctcacattcttaaaagattcaccacacataattgaaatcactttcrctttcttgacccacactaacaagcctgaaagatccaatacaaagaccaatatgatagaacttcagatccaagaagagaatttaggcagtgatgaacaggaagacacaaataccagtgttacacagtggaaaataattagagagagagagagagagagagagagtgattatgcacatgctaaaaaatgggcttctaaactgatgaagaatcaactgaggtaataaataatattacatccagaaaattcctaagtttgataacaaattcatgatggagaaaaaacgacccacaagaataacaagcaaaaaatcatgttgtatttctttcaatgacagaaaaaattaatatttaacatagatgacctccaagagaataatgatttgtttttaagtag

SEQ ID NO: 119946 - DNA, 592 bp, Homo sapiens
atgacttctgcttctgattcttaaatacctttttccctcatagcttctttcttaatacgtgattgcacttgactttttggtgcaccttggctgattagcaaactggcttcatcaggatgagaatgtgtgtgtttttcagaaggagaggtgttgcaagaggcttcaagaaaaataaaatatttctacagtgttaatgtttatgatagagtgaataaaaaagtgtggacacaaagtagccaaatttacaagtcaattgcttcactcctaccatattcttgtgcaatcccaaagacatctcaatgaccttttcaatgtattatcttgggacactggctgttcatgacaacacacttagaatgtagctccactgcagcagaaagaattctaatcccagtcagrggatataaagttcatgagactctgcagagaaggagggcactattttaggcaaaagaaaatctctctgaagaatccgcaagcaatttaccaaagtttaataagcctattattgtgttttaaataagctgtgctactttattacccttaataataaatatacattaaaatttatttaaaaagtcacaggggatgc

SEQ ID NO: 119947 - DNA, 625 bp, Homo sapiens
aaaaataaagttatttcatatggttcttggattattgtgaaaaaatgacatatttttgaatttattaaaattatcttcatgcagagagacatttctgacagcctttaaatcaagcttaattcaaaacctattaaaatacacatctttaaaaaggcttgctgatattaacttttttacactgaatacatgcttaatttccctttaatatacctctttattaatcaatatttaaatgaaaatgctatttcacattaatatctgcctgtggccaaaattctaattctcattacccatgttactatttgctggagataattagaggaagaatgagatatcacatagaccctcttaaaattcacagcatactttacaataatgacttcaatgtttttccatgctctagaaagcttatgcagcaattattcatttgcttccattttcctgtgatgcttcatcattgcaaacagaaaagaaaagagaatacaatctgagcaagaaggtgaggttttgaatgctaaaagaaaaagaaaaagaaaagaaagagaagttctattgggctctgagctattgtgaaggaaatcaaacaaagtgaatratcccaagggctagccttgatgcttgcaaa

SEQ ID NO: 119948 - DNA, 616 bp, Homo sapiens
gttgatattgtatttacaatgtcaatggatcaaataactttaaacatatttcttatgaatatagaatgtaatagagtaaaatcaagaagatgtattgagattagatgatccctgagcactggaccagctctcatgctccatcatactgattctggrataaatagagactgaagaacccaagaactgggttcaatcttggactgccacaaattagtttggttaccatgtcaggtaacttctttaggccatagtttcctaagaatagtaagagaaaataacaagagtgactaattgatagcattattgggtgtttaaatgagacagcatgtaagatttagtaaggtacctagcacatggtaaatgcccaatatatgttgctatgataataattattattatatgcaacagtggggtaacagagaagaagcaccaattttttgaatgcatactattcttcatttgcaaattaagctgcaaatggcaagtaatggcatgtctttcttggcaaatttttagtacgatttccatcagatagattgctgtgtgtaaataggctatttgtatgacttttgaaaaatgtatactaatttttggagtaaatttgaactcaaataaa

SEQ ID NO: 119949 - DNA, 622 bp, Homo sapiens
tatatggtatcacataatgcagtgacagtatttctagaagaaaggagtgatcagctacttcaaatgttagttaataggcataataatataataattaaaagtggccattgaaccttttcatgtagaagtcactactgaccttgatttggtgatttggtgattagggagaattaaaaaaaggatgtaagaataacaaatggagacagcatttaaaaattttgtcataaaaagaagtagataaggcagtgataactgaagaaagatgcgaatagagattattgttaaatgccagaattatcacaaaaatatttaatgacagaaattatccagtgaagaagacattaatgatgaatgagattaatgatgaatgtgcagacaactgcagaaataatattctagagcgagcaagaggtgatggtacaaacaaatggagaaagagcaattcatcattaagttagggaaagatagtgggwcaagaattaagaatttttttgttaagggagttagttaaatgatggacttggaatctaaattggttagggaggaaaatgagaatacaaaggagaagggtcaacaaattaaaagtgtctatgtggttaaagagttagtgatatcaggctat

SEQ ID NO: 119950 - DNA, 594 bp, Homo sapiens
ataatcctgtttttttttttctgcattggtaaacatactggaaaaaaattatgactctgaagtagttaagaaatcaaacagacctggcttcaaatctgatattcatccctattcagctggaataacatgagtgagctgcttaaccttaacctaagtctcattcataaagtggaaaattgagttatagtgagaatcatatgagacagtgcatgtagagtacggtgtccagtagctattattactgctgttagtcaagatcaggagattttcctcaatttcactcagcttccaaatggtaacaagctattcattgttggtatcttaaagtcttccagattgttggaaatcttaggtaaatgactgtaaaaaatttttcmactggtttttctttgcatttctctttttatgactggactttcaatgttcattattttgccttgttatgtggcagatctttgtagtatacatggaggatagaagttgtggaaaggagaatgattatccactgtctttgctttccaggaatttgtaatctatagcaagagacaaacataaatacaattctagtagaactgtgctacaataagttctaag

SEQ ID NO: 119951 - DNA, 593 bp, Homo sapiens
gtgtccctgcttaatattacatagagtagctgggtcataattatttaatcagwactcaaaaacatagtatgagtgcaaaaatgttcactgatttggagagaaagattgtgttatggcaagttagaagaaacagaatatgtgaaggtgaggaattcagaggaacctctataggtcaccaccttagggaaaaaaaaagacaaaataaggattggaaaactgcagaatgtttaaatttgttaccaccaaagctgaaagcacaatttgtgcagaaggagttacggtacagctaaggctaacctgcatctatgctccagcttccaggactcctccctatgccagagacattataataacagagaaaacaacaacaacaacaacttacaaataaaggatgtaaaatgaattataatacaaggcaaggccacatgtagtctagctaagcccatcttgagggaaggtccagggacaaatttggaaaaaattataggataggcaacagataaaggtatgaagtcataaaggaaagaatttgagcaacatattaaagagtaatactggtaactgccctgggtgtgcttgcctaccagacaccc

SEQ ID NO: 119952 - DNA, 593 bp, Homo sapiens
gtgtccctgcttaatattacatagagtagctgggtcataattatttaatcagtactcaaaaacatagtatgagtgcaaaaatgttcactgatttggagagaaagattgtgttatggcaagttagaagaaacagaatatgtgaaggtgaggaattcagaggaacctctataggtcaccaccttagggraaaaaaaagacaaaataaggattggaaaactgcagaatgtttaaatttgttaccaccaaagctgaaagcacaatttgtgcagaaggagttacggtacagctaaggctaacctgcatctatgctccagcttccaggactcctccctatgccagagacattataataacagagaaaacaacaacaacaacaacttacaaataaaggatgtaaaatgaattataatacaaggcaaggccacatgtagtctagctaagcccatcttgagggaaggtccagggacaaatttggaaaaaattataggataggcaacagataaaggtatgaagtcataaaggaaagaatttgagcaacatattaaagagtaatactggtaactgccctgggtgtgcttgcctaccagacaccc

SEQ ID NO: 119953 - DNA, 586 bp, Homo sapiens
atcgctttctaaagaaggcataaatgaatattactgccattctccagcctctgtccctatgatctacctctggcctacatgccttgttctggccaaacagaaaagatgattgaactccagggaataaaaaagcatggtggacttctgttccaagatggctgaacaggaacagctctggtctacagctcccagcatgatcgacacacaagatgggtaatttctgcatttccaactgaggtacctggttcatctcattgggaacggttaggcagtgggtgcagcccatggagggctagccaacgcagggtagggcatcgcctcacctaagaagtgcaaggggttaggggatttccctttcctagccaagggaagccatgacagactgtacctggaaaaaaggggacactccctgctaaayactgtgctttttcaatggtcttagcaaatggcacatcaggagattatatcctgcacatggcttagtgggtctatgcccaaggagccttgctcattgctagtgcagcagtctgagattgacctgcaaggcagcagcctggcagggggaggggtgtccacaattgctgag

SEQ ID NO: 119954 - DNA, 482 bp, Homo sapiens
cttccaccattgatacccaggcaaacagggtctggagtaggcctctagcaaaccccagcagacctgcaactgagggacctgactgttagaaggaaaattaacaaacagaaaggaatagcatcaacatcaacaaawaggacatccacaacaaaatcccatctgtaggtcaccaacatcaaagatcaaaggtaggcaaaaccacaaagatgggaagaaagaaaaggagagatgggaagagcagaaaagctgaaaattataaaaaccaaagtgcctcttctcctccaaagaatcgcagctcctcgacagcaatggaacaaaactgaacaaagaatgactttgacaaattaacagaagtaggcttcagaaggtcagtaataacaaacttctcggagctaaaggaggatgttcaaacccatcacaaggaagctaaaaactttgaaaaataattagacgaatggctaactagaataaacagtgtcaag

SEQ ID NO: 119955 - DNA, 482 bp, Homo sapiens
cttccaccattgatacccaggcaaacagggtctggagtaggcctctagcaaaccccagcagacctgcaactgagggacctgactgttagaaggaaaattaacaaacagaaaggaatagcatcaacatcaacaaaaaggacatccacaacaaaatcccatctgtaggtcaccaacatcaaagatcaaaggtaggyaaaaccacaaagatgggaagaaagaaaaggagagatgggaagagcagaaaagctgaaaattataaaaaccaaagtgcctcttctcctccaaagaatcgcagctcctcgacagcaatggaacaaaactgaacaaagaatgactttgacaaattaacagaagtaggcttcagaaggtcagtaataacaaacttctcggagctaaaggaggatgttcaaacccatcacaaggaagctaaaaactttgaaaaataattagacgaatggctaactagaataaacagtgtcaag

SEQ ID NO: 119956 - DNA, 482 bp, Homo sapiens
cttccaccattgatacccaggcaaacagggtctggagtaggcctctagcaaaccccagcagacctgcaactgagggacctgactgttagaaggaaaattaacaaacagaaaggaatagcatcaacatcaacaaaaaggacatccacaacaaaatcccatctgtaggtcaccaacatcaaagatcaaaggtaggcaaaaccacaaagatgggaagaaagaaaaggagagatgggragagcagaaaagctgaaaattataaaaaccaaagtgcctcttctcctccaaagaatcgcagctcctcgacagcaatggaacaaaactgaacaaagaatgactttgacaaattaacagaagtaggcttcagaaggtcagtaataacaaacttctcggagctaaaggaggatgttcaaacccatcacaaggaagctaaaaactttgaaaaataattagacgaatggctaactagaataaacagtgtcaag

SEQ ID NO: 119957 - DNA, 482 bp, Homo sapiens
cttccaccattgatacccaggcaaacagggtctggagtaggcctctagcaaaccccagcagacctgcaactgagggacctgactgttagaaggaaaattaacaaacagaaaggaatagcatcaacatcaacaaaaaggacatccacaacaaaatcccatctgtaggtcaccaacatcaaagatcaaaggtaggcaaaaccacaaagatgggaagaaagaaaaggagagatgggaagagcagaaaagctgaaaattataaaaaccaaagtgmctcttctcctccaaagaatcgcagctcctcgacagcaatggaacaaaactgaacaaagaatgactttgacaaattaacagaagtaggcttcagaaggtcagtaataacaaacttctcggagctaaaggaggatgttcaaacccatcacaaggaagctaaaaactttgaaaaataattagacgaatggctaactagaataaacagtgtcaag

SEQ ID NO: 119958 - DNA, 478 bp, Homo sapiens
tggaattaatatttcactgtatataaatagactattcatttatctctcacctatggcttctttcacactgtaactggagttgagtagttgcaccagaaaacgtaatacccacaaacttaatatatttaccatctagttgtttgcagaaaaatgtttggttaccccagcacagagaatgcattaacaaagataacttggaatatatcaaaaatgtctggaccaggtcctggctcttaaagaacaataacctgagataattaatggcaaaataaatgtgacaaatagcaatgctatacatggagaagttaaactcatagagaaagacaggatccctatgatgagttgagaaatgaatgagatgttacacatggagtgatgactacatgtattgtcctttccccttttccaaacctccaaaatgtatgagagcataactccatacagacaaaaaraatgagagaagataatagctgataag

SEQ ID NO: 119959 - DNA, 574 bp, Homo sapiens
ttccaacattttacactcacaagaaatgtactttgttccatatcactgttggcatttggtcatgcccgtctttacattttaggcattctagtattcacacatatggaatgggtttataataatattgctttagttttaatttacatttctttgatgcctaaaagtgtcaacacatgttctttgtcatatatttatacatatatttaacataggacatatatatatatgagatatgagatatatgacataggacatatatatgagatatatatttttaatatatgagatatacatatatgagatataaatgagatatgcatatatgtgaaatatatctcatataggagatatatatgtaattgtaccttcttgactctaatctgctttatatacctcatatatatcttatgtatatgagacatttatatctcatatatatattaatctatatacatctatgagagatacatagctcatatattttatacatacacacatacatatatatatgtgtgtgtgtgtgtgtgtrtatataggatatacctcttctctctcagaagaagccaaatttatc

SEQ ID NO: 119960 - DNA, 463 bp, Homo sapiens
gtgaatcatgcaaagataacttgctatcaccacttctacttaatattatacaagagaaacagcaagtacagcaggttaagtaataaaaattataggtagacacgtgaagcagttttgaacccaaatgtcatccagaagatgacttcagctgattacagccaagcctaacagaactgtagcctacttgcacatccatgagaaggaaataaatgcgtattgtggaaaaccactgaatttggattatttttatgtaacattacttcagctgaaacctaaacaatgcagctttcaaagatttaatggacaaatgggtaattcttaatttagatctgtaaactcataaggcctttgagaaattgagctagagatcataaaaagactggaaaagcaaagaatrctggacatttaatgtaaaatcatagtatcttaaattaatatgtttctattttgtgtcactgttcta

SEQ ID NO: 119961 - DNA, 592 bp, Homo sapiens
gtgccattaaattattctttactatagctaccctgttgtgctatcaaatactaggtcttattcactctttatattttttgtacctgttgaacatccccacctcccactatcccctgactgtgttttgttttccacaattttactrtgatgtccttactttcatttgtctatttgtatgtatgcatttatcctgcctgagatttgtaagtattctaaatatgtggattgctatttcccatcaaatttggaaatttctttttttatggtcctcatatattttctcttttttgagattctcattatgcatatttgactacttaatattttccctacaagtcaatgaggctatgtcaatttctttttgttttacttttattttattttcagaggtatacatgcaggtttgttatataggtgaattgcatgggggtttaatgtacaattttttcacccaggtaataaacatagtacctaataggtagttttttgattgttaccctcctctcatgttccaccctcaggtaggtcccagggtcagttgttcccttctttatatccatatttactcaatgtttagctcccacttataagt

SEQ ID NO: 119962 - DNA, 405 bp, Homo sapiens
cagcttttccttatatatctggtataattcagctgtgaatctgtctggttctgggcttttttttttttttttttttttttttttttggttggtaggctttttattgctgattcaatatcagaactcattattggtctctttagggattcaatcttttcctgatcagtcttgwaaggttgtgttttaccaggaatttatcaatttcttctgagttttctagcttgggtgcaaaaaagtatttgtaatagtctctgagggttttttatatttctgtgggttgagtggtaaagtcccctttgtcattccagatacctaaagcaagatcttggagacctatgaagagatttagataaccacacaataatagtggaagactttaacaccctaatgaaagtattagcagaa

SEQ ID NO: 119963 - DNA, 570 bp, Homo sapiens
aacaattgatgagttccagttatatactataattaatgagtagtcatagcgactaatatgtgtcagctttctctttgctggaggaagaaaaacttaaagaagttggaaggtcaatatattctttattgtttatacatgcatatacattatacttgtgtgtgtatctgtgtgtatacacacatatacagatatatatatacacacacatatacagatatagatacacacacacacacacatatatatatataaactagatctaaattccagaaattgcaagattttagaaaatcatattttcaagataggttttctttaacttagatcctggtagtgaaaatacatttgcaatcctaaaaataccattaaactagtttcattaggacttagaaatagtttgcagctcaagtagaaaagagattaaacctatgtcgtattaatgagtaaaatctcaccttgtttatcttttgwtgaagtaacataaatcagttctctctcagtactgactttgaaaatgtatccttcatgtttcaatcaacagtcagccctgaaatgaacttatagctgcac

SEQ ID NO: 119964 - DNA, 586 bp, Homo sapiens
ccactgggcaatatggcaactgggatgagttgggggaaacaaaaatagaccaaacaaacaaaatcaaaaggcaaagggcaaagcaagagtaaaaactgatgagaagcatgattgtacgtaggattttctgatgtctctattagcatgcaataaakgtagttttatcatcttcaaggctaacaaaagagtatgattctctgaaaaaaagagaataaagaattgagtctatcacttgaaagagagaagagggaaaattatctcagccaggtgaactcagttttgtatttttgacaagatagaaatatttaaaagtttttacattattatacaaaatttctgcacttagaagcagacaaatatcgataaacaatgcctctctcgggatgtaaataacaacgatgcactaaattaaataagaaataataatattcatttcctgagtgtctcttctctgttcttagataaaataattgcatactttctttaacgtttattgaaacattcagcaagttattgtttggtccccttcactgtctggtactcttataagaatatttgataattgcacatattatatttcataatg

SEQ ID NO: 119965 - DNA, 586 bp, Homo sapiens
gcacaacagggtgactatagtcaataataacatcattgtacattttaaaataagttaaagattgtaattggaatgtttgtaactccaagcatgctagaggttaggaaaactcctttctccatgatgygcttattttatatgcatgcctatatcaaaacatctcatgtacccataaatagtagagtacacctactatgtacccacaaaaagtaaaaaaatgaaaaagacaaatatcaaaaattaaaaagggaacattactgtagattataaacatattttttaaagttagagaatattaaaaattccattataaaaatgaggtatcaaaaaatgcccaatgcaaagaaatgaggaaaagaaaatatgaaatacattgggaaacaaggaaaagagaaacagaatgatatacctaaatataatttttcaggaatttcataaataaatattgtctaattcatcaaggttcaacaacctagatgaaatgcaaaacagtttcaagatatcattattaaaatatatttaagaatacacgcaaaatcaatagcctagaaatatattaaagatactgaattcacaactaaaaatt

SEQ ID NO: 119966 - DNA, 559 bp, Homo sapiens
ccagtctaggtgacaacagtatccaccgctcagggcttacagtgacctgcaggaagagaggaataacagagcacrtgctatgaataaatgtggagatcaatttgtggattttaaacttcatgacatgctgcagataatcctttaggtgtatctgtggtaaatggtgccttgctatgttctgaagcaatcaaacatgatgtcctaatagctcaatttatcagttcctcattagcttgtgtactcactgaaattcttttagcagttaatgtccttgtattagtctgttttcatgctgctgataaggacatacccacgactgggcaatttacgaaagaaaggggtttatcggacttacagttccacgtggctggggaagcctcacaatcatggcagaaggtaaaaggcatgtctcacatagtgacagacaagagaagagagattgtgcaggaaaactctcccttataataaccatcagatcttgtgagacttactcactatcacgagaatagcacaggaaaaacctgcccccatgattcaattacctcccaccggtccctcc

SEQ ID NO: 119967 - DNA, 396 bp, Homo sapiens
taatatcttggagtgtggtttccaacttgattccattctccctgtcactttmaggtacaccaatcaatcacaggtttggtcttttcacatagtcctatatttctgggaggctttgttcatttcttttcattcttttttctctaatcttgtctacatgcattatttcagtaagttgattctcagtgtctgatatgcattcttccacttgattaatttggctattgatacttgtgtatgcttcacaaagttcacgtgctgtgtttttcagctccatcaggtcatttatgttcctctctaaactggttattctagttagcagttcctgtaaccttttatcaaggctcttagcttccttgcattgggttagaatatgctcctttagctcagagtttgtta

SEQ ID NO: 119968 - DNA, 597 bp, Homo sapiens
aacaacacacactggtacctgtcagggattgggggtcttggggagggagatcattgggaaaaatgcctaatgcatgctgggcttaagcccaggtgatgggttggtaggtgcagtaaaccaccatggcagatgcttacctatgtaaaaaacctgcacgtcctgcacatgtatcccagaatttaaactaaagtaaaatttcaaaaaatattgtaagttgattttatacccagtgtatttgtcagggttctctagagggacagaaccaatgagtacatatatatatatatatatatatatatatatatatatatatatatatatatatatatatatacacatatatatttaaaggggagtttattaagtattaactcacatgatcacaaggtcccacaataggctgtctgcaagctgaggagcaaggagagccagtctgagtcccaaaactaaagaacttggagtctgatatgtgagggcaggaagcatccagcacaggagaaagatgtaggctgggaggctaagccagtctacwcttcacatttttctgcttgctttacattctagctgtgctggcagctgattagatggtgcctaccc

SEQ ID NO: 119969 - DNA, 575 bp, Homo sapiens
agagcagcaactggaaggatgcaggttgcaacagggcacaatgcaggtctacagccaagtgggatggtggtctaagcaagatgctggctgaagtggttggggacagcaagagtaatgtataaaaaagatttttgcatccatgatattttggaggttattatcacatgccaaaagatcaaactggcatttccatgcacagaggaagagagttatatactaactcctgacctggcactgactaccctgatgaagttttaaaataacaccatgaagtattaatgtactacatacacacttgtgcacacatatgcacatgcrtattcacacacacacacacacgcacacatgacagcatcgatttttgtgttgagcatattcacggacagaagtcttcctttccttcctctcatttccctgaaatttagcatcttcccttgcatctttacattcctttctcttgccttttgagatctcccctcctttccttccaggaaccccataattatttgcctaatggcacccatgagaaaggaggaaatgttctcttcctctgccctgtcagaaacgtctcctta

SEQ ID NO: 119970 - DNA, 537 bp, Homo sapiens
aattcaccttccaatcagttattaattttaaaagaaataaatctacgcttcacaggggatacagcaacacatcctgagtttcattggtaactgagatgtttttatgtaataatcattttgaatatgttaactgggttagtgatgaggatgagtaccaggatttgaggaaagacatctcagcttaggcggaccttacatatgaggaggtgggtaaaccagatgaaccacagttatggttctactgcagcaccagtggccaggcccctggagtttccctaataccacaggacttatactagtagtgtgcagagaggggacagttcttctctggcaggctttgaaggaatggtcagatcagaatagcctgttccttttccctcaggcaagtgaacagcatagctytgggtgactcaaactagatgaaatcagagtcattctatcctcttgagggacatgaaagatggaggaaatattcagacaagatgggcagatccaagaaagtttctaggagccattatgattctggggagcctttct

SEQ ID NO: 119971 - DNA, 672 bp, Homo sapiens
gaattctaaccattgttttcttttgtagttttaccacrctatatttttgcctgctttattattttttattttttatttttgagatggagtctcactctgttgcccaggctggaatgcagtggcacgatcttggctcactgcaacctccacctctcgggttcaagcaattctcctgcctcagctcccccctaccccaccaacagtagctgggattacaggtgcctgccaccacacccagctaatttctgtatttttagtagagacagggtttcgccatgttagtcaggctggtctcaaactcctgacctcaggtgatccacccgcctcggcctcccaaaatgctgggattacaggcatgagacaccatgcctggccacctattttaaatgttgatgtaaatggaatcatacagtatgcattctaggaattattcatgtttttgtataaagctttacttttttgcaatatattatggtatttagttatatgaatattatggtagagaactttccagtactgatggaaaacatcagcccagagattcaagaagcccgaaaagccctaagcaagaagaacaaaaaatgcagcttgatagtaaaatttcaggaagtcaaagaaaataataaaatgttaaaagcaaccagaggacaaaggacataatacattccaaag

SEQ ID NO: 119972 - DNA, 672 bp, Homo sapiens
gaattctaaccattgttttcttttgtagttttaccacactatatttttgcctgctttattattttttattttttatttttgagatggagtctcactctgttgcccaggctggaatgcagtggcacgatcttggctcactgcaacctccacctctcgggttcaagcaattctcctgcctcagctcccccctaccccaccaacagtagctgggattacaggtgcctgccaccacacccagctaatttctgtatttttagtagagacagggtttcgccatgttagtcaggctggtctcaaactcctgacctcaggtgatccacccgcctcggcctcccaaaatgctgggattacaggcatgagacaccatgcctggccacctattttaaatrttgatgtaaatggaatcatacagtatgcattctaggaattattcatgtttttgtataaagctttacttttttgcaatatattatggtatttagttatatgaatattatggtagagaactttccagtactgatggaaaacatcagcccagagattcaagaagcccgaaaagccctaagcaagaagaacaaaaaatgcagcttgatagtaaaatttcaggaagtcaaagaaaataataaaatgttaaaagcaaccagaggacaaaggacataatacattccaaag

SEQ ID NO: 119973 - DNA, 601 bp, Homo sapiens
tcttcagagaggcctgtaatccattcttattatagaatcctaggggtttcgcctcctgccagacctgttttgtccatttcttagagtaaggaggctaagatccactttactttcttttacccattactcggcaaaatcatcaggctagataagggrttcattactggaggtccatggataaatttcatgggaaccctgacctcctgaaatcatatacagtgtttgatttatgtttgtacaggttatctttcacaagatttttttaattggagaaaatgtgtacaaatttattaatgtgtacatggggaggaccgcagcatgattatccctatctttctcaagattaccaagagtccatggtccaaaaaatgttaggaaccactaggcaagaataaggtcctgtagtgaagcccccagccccagagaatattctcaagactgcatcctctaagcacctctttttgtatctggcagcgactgaaataatgtgttatgaatgtaaaaaatatcatcttgggttatgctatggtgtcatgacatcctgctccctgaagcataaacagtcctgtgcagttgagaacttttacatccttacaaggaa

SEQ ID NO: 119974 - DNA, 528 bp, Homo sapiens
tcttgaaaaaaaaaatctagctctcacatgtcaaaaactttgactgtccacactattattctgttccaacttttaagaacgcagataaaaaatgtaacaaagttaaaaagccttattaacctcaagacttgatgccggtgccattcctagactggtatttctcatgagtctccaccaaagacagagggcaggaagatmtggacttcttgggctgagccatgctttgaggacctcttcagcgggcggtatatcgtcccctgtgtggagctgcatttcctgtgaccggcactagcttgatggtttctgcttttgtgaccgttcacccgcacttgccaaggctgtgctgtgcctccactcacctgcctcgtgaggggactctgacctttctgtcatctgccacatgccactgatgagagccgcagggtgtggcctcctggtggtccagctcaacctctgttctgtctcattcctgcttctcaacaacctcctggagctttttcctctgggtgtagcaggagggcgccacac

SEQ ID NO: 119975 - DNA, 523 bp, Homo sapiens
gcacaatcccttcagtccatagtacttcctattccattgtactgtttgtctgttgattgttagttgagtagtattctatgatatgcatgtacactctctaaattatkgtaactttaataagaagtttagtatctgctagtgctagtttttctcattagacttactttaacttttgtggggaggggtatatttttgcttattctttcagaactccagacagtttatgttttttcgcatgtaggtacatttacttaagttttttcttagggttataaaaatgtggcaaggggctattgtaaatgatatattttaaaaatcatttttggtatcttttgaagctcttcatgcagcttttagaataatgttagacaatattggtgatataatatctattttctttgggaatttaaaggaatttctaatgttgcacagataagtatgatgtcagctgttgtcttgagatgtcctttaccatgataaggaagtgttcttatgttctccacctccccagactagaatttga

SEQ ID NO: 119976 - DNA, 574 bp, Homo sapiens
gctgtttatcagttttaagtctttaaattgctctccctttcccccatggttccacattagtgccaagggtgaggaactgactagggataaagaagtgaaattgatcaggaaagggtaaacagcagcagattccrtgattttatactgcagctgttggtgactgagaactgcctaaggggaaagtgtaacaatttagccttttctctggtgttgtataacttgaacttgactagtcttacccagtttggggaaatgattggtaaagacaagcctgcttttcttctccatctttcagtaggaacaggaacgacattaaaaatgccaatttaaaaaatgcttcaccccatgtaagagtagtagtttatttcagtataatgtacaaaatgatctctaaagtgagtaataatttatttgcaattctgccattaaataacagctgctaaaattttggtctacatggaaacctttcttatgatgttggtgatgaaacatattcatttattagatttttactgtatgccaagcactgttataaatgctttatgaaagcattatgtagtttatatatatacat

SEQ ID NO: 119977 - DNA, 502 bp, Homo sapiens
aaaagcaaggttataagacagttaccattataaacttagagtgacaaagrtaatgtggaaatggagaaaggaaaaactagaaatatttccagtttaagaagttgccaaagagattaaggaattgtttttatgattaataagtaattaggttgtcgataaaattgtttatagaagttgaagtgcctttaagataatggttctattgtttaaaaagagcatgttttaaaaataaggtttctttccagttactgtagcctaaaacgaaattagaatatttcttttctaggaagaaaataatgtggttataatatagcagtagctttattaaaaatgagactcacccctttctatcatgggggaatcttgaaagaccagggaaacatctttctgccttgggttgaactttatcgaagtacagaacaagaatttcctgctaagcttttccactgtgcctctgaattattcctttgtgaaacttcagtcctacagaagtggtcctcca

SEQ ID NO: 119978 - DNA, 502 bp, Homo sapiens
aaaagcaaggttataagacagttaccattataaacttagagtgacaaagataatgtggaaatggagaaaggaaaaactagaaatatttccagtttaagaagttgccaaagagattaaggaattgtttttatgattaataagtaattaggttgtsgataaaattgtttatagaagttgaagtgcctttaagataatggttctattgtttaaaaagagcatgttttaaaaataaggtttctttccagttactgtagcctaaaacgaaattagaatatttcttttctaggaagaaaataatgtggttataatatagcagtagctttattaaaaatgagactcacccctttctatcatgggggaatcttgaaagaccagggaaacatctttctgccttgggttgaactttatcgaagtacagaacaagaatttcctgctaagcttttccactgtgcctctgaattattcctttgtgaaacttcagtcctacagaagtggtcctcca

SEQ ID NO: 119979 - DNA, 596 bp, Homo sapiens
acaaacacaaacccatctcggaggagaaatatctatcatcctagacctcaatttatttttacattttttcaatctttagataactcaatcaaaaataaccaggcatacaaacaggcaagattatatagaaaaaaaaaaccactagtagacaccacaagcaacagaaacatacccacaattgctctagatttagagcaaaagaactatgtttactatattcaacaagataaaagaygagattgttttggcagagaactgtaaaccaaaagacgaaccaataaacttgcagagaggctcaatatcattagtagttagggagatgcatattaaaactaaaataaactactagtacatcccaactatgatggctaaaaatttttttaagtgacaacgacaagtgttgctaaatatattgagtaattctcataagctgctggtacaactataaattgtttaaagccattttagaactgttcggcaatatctaataaaactgaacatatgtgtaacctatgatgcagtgactctatggcaaggttatacatccaacagaaactcatgcacatctacatcaagagacatagacaagataactc

SEQ ID NO: 119980 - DNA, 596 bp, Homo sapiens
acaaacacaaacccatctcggaggagaaatatctatcatcctagacctcaatttatttttacattttttcaatctttagataactcaatcaaaaataaccaggcatacaaacaggcaagattatatagaaaaaaaaaaccactagtagacaccacaagcaacagaaacatacccacaattgctctagatttagagcaaaagaactatgtttactatattcaacaagataaaagacgagattgttttggcagagaactgtaaaccaaaagacgaaccaataaacwtgcagagaggctcaatatcattagtagttagggagatgcatattaaaactaaaataaactactagtacatcccaactatgatggctaaaaatttttttaagtgacaacgacaagtgttgctaaatatattgagtaattctcataagctgctggtacaactataaattgtttaaagccattttagaactgttcggcaatatctaataaaactgaacatatgtgtaacctatgatgcagtgactctatggcaaggttatacatccaacagaaactcatgcacatctacatcaagagacatagacaagataactc

SEQ ID NO: 119981 - DNA, 596 bp, Homo sapiens
acaaacacaaacccatctcggaggagaaatatctatcatcctagacctcaatttatttttacattttttcaatctttagataactcaatcaaaaataaccaggcatacaaacaggcaagattatatagaaaaaaaaaaccactagtagacaccacaagcaacagaaacatacccacaattgctctagatttagagcaaaagaactatgtttactatattcaacaagataaaagacgagattgttttggcagagaactgtaaaccaaaagacgaaccaataaacttgcagagaggctcaatatcattagtagttagggagatgcatattaaaactaaaataaactactagtacatcccaactatgatggytaaaaatttttttaagtgacaacgacaagtgttgctaaatatattgagtaattctcataagctgctggtacaactataaattgtttaaagccattttagaactgttcggcaatatctaataaaactgaacatatgtgtaacctatgatgcagtgactctatggcaaggttatacatccaacagaaactcatgcacatctacatcaagagacatagacaagataactc

SEQ ID NO: 119982 - DNA, 642 bp, Homo sapiens
ctaggttacactaaaaaaaattagatgaattaaaatgtggcctgcctcaaagcaagagcatgtcttaccaatcttactgtatctcacttaacatactcaagaggaaaagaaattgaagcatttaagtagtccatcttcaacattctgctgtgaatacaggacctgtaatatgcttgttctacttgacatataaaaagaatcacatttatgtggaagcctaaggttaaaacaggtttttaaaatgtaaacagcagtaacatgaatgtattgaattacgtaaatcccaaaacttttcatgccacaatggtatgggaaggtcggtgactgactcacctaaataaaatgcagtaagtcaaagtatatagttagagcaaaaggaaaaagataaaaacattttaaaaactaatttatggttttaattctctataataaatcttttaaaaattaatacacartagaaaatggagaaacaaagttaataaatgcttacaaagatggcttatgttatattaaacatgaaaatgatatcaaagcataattatgaaatcgtcaaaaatcacgtttgtagtacaagtttacagctagttttaaacaaagaattttgaccaattacttgcagaaagtaaacaagaaaaaaagctt

SEQ ID NO: 119983 - DNA, 520 bp, Homo sapiens
gttaagtaagtttcacaaaagttacacagactgataagtaacaaaagtagggtttgaacccaggcattctctgtccttagcttctgctctaacttctacatgatggaacctcaatcttgctgctggcttttgaatgttgttgggcgacagagcgagactctgtctcaaaaaaaaagaaaaagaaaggaagaaaagaaaaataccagtttgccttctcttcattgatgcaatcatcaatgtgtacaaatatgtgtgtgtgtgtgcatgtgcgtgtgtatgtacgcacatgcctgtacatgcctgcatgtgcgtaagggttagaggagttatgggaggggtataggattttggaaagctaccttttacaaataccaagaactctaataaacagtagtttaagagtgtcgaagtatatctgattgctatggtttgaatatttgccccctttaagtcaggttgaaatttaatmcccaatgtggcaggattgagaagtggggcctttaaggggtggttgtatccc

SEQ ID NO: 119984 - DNA, 570 bp, Homo sapiens
gaccctctcagtttctttgaaacttgtcataaaccatgctgacatccccaggaggcctctgaaaaccctccagttggctctcttgctgataatgagttgcgctacattgatgttcgctgtccaaggtattctcaccaaaatactacagagaatrgtctcctcccctatgtctctgaaacagacaaactcaagtcttcttggctagtcctgtgagctaacaaattgcatccttctagccactttctcaatcttctcttcagttttacttcttaaatatgtatctatctccatttccttctagctatatcttttttatttaaaaaaatcccattatttcaatatgtacaatagacattttgattcagttacaatgttgtgtcatttctctgttataagacagaatcaaagagtgctacaaaactggattatttatataaccaaacataatcacttccatccccaatattttatttaattttaattatttccatgaaatgtaaactgtattatagaattacttgtcataataaaatatgccaagaatctaaccttttgttgattcaagatgat

SEQ ID NO: 119985 - DNA, 599 bp, Homo sapiens
tgttttttgcccatttcccatatgctcagtttatattttcagttttattcttttctcccaaagttaagcctatttcctcaacatggcctratacctgtattccattctcacagtcaagcaatggactcatgattagtcatatttttctcattaataagaacactggtgacattcttgccatgtgatggcttaactgctacactttggaggcacatcctcctcctcttccttcatcaacttggcccactcaggcctgctgtcttctctaaactaatctgaatttccttacaggataattgctccaggctctggcatcagagtggctatgttcttattctgaccccctttcatatgaactaggtgggaaattccttcatctgaaaatagggataatcatagaatctatttcacagggttgtaggggacttgaatagaatggtgtatgaacagagcttaggatttctcaaaagctcaataaatgttagataacttgttaggaatgataatggcttctctaaaatgtgaatatgcattgttcattgacagcaatcctatgaagggggaattagctttatctatttgagataaaaaaaagcctg

SEQ ID NO: 119986 - DNA, 599 bp, Homo sapiens
tgttttttgcccatttcccatatgctcagtttatattttcagttttattcttttctcccaaagttaagcctatttcctcaacatggcctaatacctgtattccattctcacagtcaagcaatggactcatgattagtcatatttttctcattaataagaacactggtgacattcttgccatgtgatggcttaactgctacactttggaggcacatcctcctcctcttccttcatcaacttggcccactcaggcctgctgtcttctctaaactaatctgaatttccttacaggataattgctccaggctctggcatcagagtggctatgttcttattctgaccccctttcataygaactaggtgggaaattccttcatctgaaaatagggataatcatagaatctatttcacagggttgtaggggacttgaatagaatggtgtatgaacagagcttaggatttctcaaaagctcaataaatgttagataacttgttaggaatgataatggcttctctaaaatgtgaatatgcattgttcattgacagcaatcctatgaagggggaattagctttatctatttgagataaaaaaaagcctg

SEQ ID NO: 119987 - DNA, 643 bp, Homo sapiens
tacatggtgacagtacacgtatatttcattttaattgtcttatatatggatatgtcacgattatttcatacatttatctagtgatggcatttggattctgcctatttttttctccttaataatgtcataaaatgttgttatgcctagatggtaagcttgtgaatggttttccttaaaagaaaactccttctgacttatgaattgtaaaataatcaataaaataaaatagagcatatcactaagtgatcaaggaaagttgagccatatatgggttggtgtattagtctattttcatgctgctgataaagacatacccaagactgggtaatttatacaggaaaaagggtttaatggacttacagttccacatagctgtgaaggcytcacaattatggtggaaagcaaggaggagcaagacgcatcttacatagatggcagcaggcaaagagagagaatgagaaccaagcaaaagaggttttcctttataaaaccatcagattttgtgagacttattcactaccaccagaagagaatgggagaaaccaccccagttgttcaattatctcccacagggtccctcccacaatccatgggaattatgagagttacaattaaagatgagatttgggtggagaaacagcca

SEQ ID NO: 119988 - DNA, 643 bp, Homo sapiens
tacatggtgacagtacacgtatatttcattttaattgtcttatatatggatatgtcacgattatttcatacatttatctagtgatggcatttggattctgcctatttttttctccttaataatgtcataaaatgttgttatgcctagatggtaagcttgtgaatggttttccttaaaagaaaactccttctgacttatgaattgtaaaataatcaataaaataaaatagagcatatcactaagtgatcaaggaaagttgagccatatatgggttggtgtattagtctattttcatgctgctgataaagacatacccaagactgggtaatttatacaggaaaaagggtttaatggacttacagttccacatagctgtgaaggcttcacaattatggtggaaagcaaggaggagcaagaygcatcttacatagatggcagcaggcaaagagagagaatgagaaccaagcaaaagaggttttcctttataaaaccatcagattttgtgagacttattcactaccaccagaagagaatgggagaaaccaccccagttgttcaattatctcccacagggtccctcccacaatccatgggaattatgagagttacaattaaagatgagatttgggtggagaaacagcca

SEQ ID NO: 119989 - DNA, 643 bp, Homo sapiens
tacatggtgacagtacacgtatatttcattttaattgtcttatatatggatatgtcacgattatttcatacatttatctagtgatggcatttggattctgcctatttttttctccttaataatgtcataaaatgttgttatgcctagatggtaagcttgtgaatggttttccttaaaagaaaactccttctgacttatgaattgtaaaataatcaataaaataaaatagagcatatcactaagtgatcaaggaaagttgagccatatatgggttggtgtattagtctattttcatgctgctgataaagacatacccaagactgggtaatttatacaggaaaaagggtttaatggacttacagttccacatagctgtgaaggcttcacaattatggtggaaagcaaggaggagcaagacgcatcttacatagatggcagcaggcaaagagagagaatgagaaccaagcaaaagaggttttcctttataaaaccatcagattttgtgagacttattcactaccaccagaagagaatgggagaaaccaccccagttgttcaattatctcccacwgggtccctcccacaatccatgggaattatgagagttacaattaaagatgagatttgggtggagaaacagcca

SEQ ID NO: 119990 - DNA, 633 bp, Homo sapiens
tattagtctgttctcacactgctattatagcaaaggcatacccaagacttgggcatttataaagaaaagaggattaattgactattgactcacagttcagcatggctgggtaggccgcaggaaacctacaatcatggtggaaggggaagcaaacacatccttcttcacatggtggcagaagagagaagaaccagtgctcagcaaagggggaaggacctcatataaccatcagatctcatgataactcactcactatcataagaacargatgggggaaaccacccccatgattcaattatctccacctggtccttcccataacatgtggggattatggaactacaattcaagataaaatttggatggggacacagccaaaccacatcaccctccattttacttacctgctgtgaagccactgtcatgtttttctctagtgactaacatgccgttcccttcattatggctctgacttttcaagattcaagtcaaatgctctttcttctgtaaatttcttctgctaatttgcccttccctcttctgacagtctcatattttgaattactttctattctgttatcattatcaaagactctattactgtcttacattgttgtctcccacagtaggttg

SEQ ID NO: 119991 - DNA, 605 bp, Homo sapiens
gttggagatctgacagcaataaagatttaaacaaatcactgtggagttttgaagactgagtgcaataagaaacataatgttctctaggcagtcttgagggcttaattgaggtcaataaccataaattccgcgattattttcagattttcttcatcagaattcagcagatcgggtgcaaatgtcaaaagaacagatagttaaagttcatcgagrgctgtgacttcaaaatacgaataagaagaaaagatagagaaatgagacagtggagtttagaatattggcaaaaggcaaatcaaaattctgaaatcacttatgaaactcaagttggatgaggagcaaaacaaagaaaggaaaagattgagggactgaaagtacaggaagtcctaagtcaaagtatgggctgcagtgaccatgttggccaacgagcacattctctcacacaagcagatctccatgggaaccaaactgtaaccaaatgattgctcagtaagcaggaagtcacagacttatgagatagtcagatgactcaacaagaacaatcctcccaaaagaccagagtgtcacagagtttgggcaccaagacacccttccttaggcagtgtttg

SEQ ID NO: 119992 - DNA, 568 bp, Homo sapiens
catttattagatgaatgaataaataagtgcaagaataaatgaatgaatgagtgaatgaatgaataaataggaatgtaccattgcatagggtcaggtaggaagaaaactaacatcttgaaggtttctttagcttttcacaaagtcttagaaaactgagasactaaatcaggatgagactgaaaatagtagtagtaataataataatagtaataataataaccacgattcattaggcacttgtgccaggcaccatgccaaatttacataaattaacccacttaatcaataggaatctgataagtataatttaatctgttttatagatgaagaaattgacagtcaagattccacagctagtaagtcatagagtcaggatgtgaacccaggaatgcctgctttatttcaaagtctgtggtagaaaacaccaggctcacactgcctacattgtctacagtcttgggaattttgcactttgggaatttaggccacagtagtgcatgaaaagaaggtatgaagaacactttactactttatggttaaaaatcagatggaaggccaggcgcggtgg

SEQ ID NO: 119993 - DNA, 402 bp, Homo sapiens
aaccactaatgattgttattagtgataatgttgataatttattattatatttttgatgataatttggggacaattttgtgatccaggcactgtgatcagtgcttcacctacgtcatctcattaaagtctcataatgaacatgtgatatatcatcaatttacaaataaggccattgtgacccatagaagttaagtaattttcctagtctcctgcagttctgtgacctacccaggtctgcccgaccccaaaagcccatgtgcttatctatgatgctatataccctctcaattggatttgtattacatatcatgcactattaaatattttacacatattcatttattcataagacttgtacygagtggctactgtgtgtcaagaattggtgactgaaaaaaatga

SEQ ID NO: 119994 - DNA, 617 bp, Homo sapiens
cttggctccgttgttagttttcttaaagctgaatatgtacaactcctagaccaattattaatgataagcaggttttcatctcatctggcaatgtggatagagggtcttctatctccatttcctaattatcttgtactcttaagctatttagcaaattgaaaactatttttattttcattttattatttgtttatttgaggctgagtcttgctttatcacccaggctggagtgcagtggcgtgatcttggctcactgcaacctctgcctcccgggttcaaaygattctcatgcctcagctccctgagtagctgggattacaggcacctgccaccatgcctggctaatttttgtatttttagtagagacggggtttccccatgctgaccaggctggtttccagctcctaacctgaggtgatcagcctgccttggcctcccaaagtgctaagattacaggcgtgagccatcgtgccccaccctatatcaatcaatctatctatctatctatctatctatctatctatctatctatttatctatctaatctctctatatatctacaaatatatatatatctacaaatatatattatatgtatatatatatatatagagaga

SEQ ID NO: 119995 - DNA, 611 bp, Homo sapiens
aaaacgtttattgatctcatgggtctggcactgagctaagcactggagagaacaacagcccttactgccatagaatttacagtcttttgacatagacagacctaaattcaacttgtatctatcaattactagtatttgaacatgggcaagtcacttgactttttgtatttcttgattttcctatgtacataatgaggataaccctacaaggttgttatgagaattaaatgaaatgatgaatttaacatagtgcctcacacatagtaaactctcaataaacgttagctggtcttgcctggtgtgacagtagtggtagtggtgatggtggtagtagcagtcgtggtggtggtgagtggtggtggtgrtagtgagtatagtactagcaataacagtagcttatttgggccagagcagagagattgttttgataataatgggcactgacattggaaatgaagttttgagcatatttaagaagtcttttgaatgtcaggacaaagactttggattctatccttaggcagtggacaaccattgaggtttttcgagcaaggtagtaacaagtaacatagcaacactgaatagaccagattggacttaggagttaagaa

SEQ ID NO: 119996 - DNA, 558 bp, Homo sapiens
tttcagtagagacggggtttcgtcatgttggtcaggctggtctcaaactcccgacctcagatgatccgcccacctcagcctcccaaagtgctgggattacagacaggagccatctcacctggccaggatagaaattcttaagcaaagtgtttataacacacagaggttcctcattgagttttcaggtatgtccagtaatctgttgcaactaataaactaaagactatatacagtttaccttttcatatagtggcaatcttgctcatctatcatatttaaaaataattttactgcttttaccatataatccacccttttaaagtatacaattcaatgacttttttagtatagttatagggttgtccacctgtcattacaatctaattttagaacattttcgttccccctaaagaaattctatacccatgcacaatcattctctatgtgttmtcactctatctgtaagcaaccactaatctttctgtctctatctatttacctattctagatatttatttatttagttttgagacagggtcttgctctgttattcaggct

SEQ ID NO: 119997 - DNA, 397 bp, Homo sapiens
caatttagccctattcaagtccccagtaattactgcagtcgtcttggtttgtgtaaaggatgagtggttttcctgttgtagagtgattatttatttgctctattacttagagagacttgtgggtgtagcagtaaattgaaatcaaaatgataatttaaaatgtcctctttgttgttgattcatcttcagcttccaatgaactgtgacaagcacagcaaacccattcatgcctactacacttgtgtatgtcctcacaagacatgaatgcctctgcattcaactggatgcttacaaattggatctccatgtcactcttaaatgagaaggtaggaacacartatagcttaacataagagcagacttgtactggatgcctaagtgaagttaaaatagtaaa

SEQ ID NO: 119998 - DNA, 589 bp, Homo sapiens
ttttgtttttaattttaatatctttaaatatgccaatgtttctttgttgctgaaattctctctagtttcttttaaggtcatagattttaaaaaaatcttttacttattcaattttttcagagacaaggtctccctctgttgcctaggctgcagtgcagtggcatgatcatacctcaccgcagcctcaaatttctgggctcaagtagtactcttgcctccgcttccagagtggctaggattacaggtgtgcatcagcaggcccagctaaggaatcatagattttgaatgcagtacccatgtcccttaagartttttaaaacacagatcaatctctattatatatggatttaatttttgatacaggtttgataaggggtccaaattttattttctctggaagaaagtctgctgtgccagtattatttataaattaatttatattttgtctctgaatccaattaggtccttggtcatgtattaattttttatttttatatttcagatataaaaatttatatagaatgaatatataatttacaatataaaagttatataaaaatgtgaacattaatattttatttttatattt

SEQ ID NO: 119999 - DNA, 518 bp, Homo sapiens
gagaaaaggaaggagagaataatttaatttcctaactttgctccttttttccctagttcctcgtgcaacttagctatacgcttaatcttgggtgcattgagataaacccttgtccttccaaaatcatcttcttttatgtcagtaagttagagtgcatgtcagtgtcttatatccaaataaccttaattaaatcagcctgaaagaagccagcatcctatctcaggcaagacacctttgagctgtctgcaccccagtgagagtatggatttaaaaaggaaattgtggagaattcaaatactagatataacacaaagtgtctcacaaaaattataagcactgggggctaacacacaagctgggtcactcctaccttcttttccagkaatcctggaggagtcatttttagagatagaaaataagaaattacaaatgttagggagagggacatttttattaactgtgtctggagaagtacaggtctggactggctgggaggaattaaattatggagggttcca

SEQ ID NO: 120000 - DNA, 597 bp, Homo sapiens
gaaccacgtcatttaagcaaaaggggtgggggcaagcggtgagttttgggagcattgacagtaagagattctggcaccagtatgagccttttcccggcacacactgggagtggtcacaactcaggtccccttctggcaaaaaatttggcaagctgtctaagtccaaggtggactttgctcttgctcagcagaaaacaactgagggctcccatgtgccctaataacccagagaggagcagagaacagtagacttccttgtattccctgtaaatttagaggctcctctttggtgtcaggcatgggtaggagatggggaagaattaactgattccaaataatttagaacaatgtgcttgtggcaataagtggttcctccatgtctttttaggctcacaaacctctcaagacctacctcaaggggtaggttaaatttatatttctaaacatttaacatgtctaacaaggtttgagctaacaaaatacacatattctcmatgtgagaattgtagagagctgatgcctaaggaagcttaaaggagctaaatatgaagtcagccttcattgaaattgtccatttgaagtcaactgtttgttagt

SEQ ID NO: 120001 - DNA, 562 bp, Homo sapiens
gtcaagcattgttctatttgctttgattcattaatttatatgatcctcccaatagcaayagtggatattactattatccttattttatatagaggatcaccatgttatgcataaatacgatgtaaatattattgaatttctggaacgtgacagataagattttctcatttcatgatcatgaattggatttgcttaattttctcaaaatattgttttatatttcaattatatttctagctttttagcttattttcacattattttgccctattactccaaatcacagtctcaagaaaaacatatgtatagaatatatttataaatggaatattctttaaaatcaaactattctgacatttcttcaaaaatggaggggaggttcatggttgcaacatcaatttcacatcctgtaaaaattgagtaagttattgaattcaatctaagcaaggttgaaacaatcactcgtttttggtacaagaaacactgttttgtgatttttctaagaagagttaactactctttagcataataaataaatgtatgaataattggtggccaaatt

SEQ ID NO: 120002 - DNA, 529 bp, Homo sapiens
aagatttccaagaaactaaaatgtccaaagcaaaattaaaattcacagtagagttagtttaaaactgaaactccatacaattaaggaaccagtaacctttttcagcgtttactaagtgtcaagcattgttctatttgctttgattcattaatttatatgatcctcccaatagcaacagtrgatattactattatccttattttatatagaggatcaccatgttatgcataaatacgatgtaaatattattgaatttctggaacgtgacagataagattttctcatttcatgatcatgaattggatttgcttaattttctcaaaatattgttttatatttcaattatatttctagctttttagcttattttcacattattttgccctattactccaaatcacagtctcaagaaaaacatatgtatagaatatatttataaatggaatattctttaaaatcaaactattctgacatttcttcaaaaatggaggggaggttcatggttgcaacatcaatttcacatcctgta

SEQ ID NO: 120003 - DNA, 558 bp, Homo sapiens
tgtttacttgaaaatgaatcttgtttttggtrgccatttctcagaaaactttactatcacatatttttatgtcctaattattcaattcaggtttctttagttataaaatcagcaaaaaggtctgtttctatttattttcacatagctaagacttataaaattgtgaatttagaaattgctagattggaattaatttcatcttataaacccagcatactcatttaataatagaatcaagataaacaattataggatagacgaaaaaaatagaaattgaactagaacattgaacagagtgctaactacaagttctaacatttttgtttttgttttacatgttcaaatattcatgcatgcataaagtattacgtggaatttaaataatttctttaaaatggaaatatgttgtatttaatggacactaatttgttttaaaactacggaatgaatccaggaaagaggtgcatgatttagtagttgcctaaattgtaccttctacagatgttctgagtttattaaaattagttattattaattagttgcataaaatattagcat

SEQ ID NO: 120004 - DNA, 622 bp, Homo sapiens
tgtttgtttttgagctgcacagtggaaggaggtgctcctgacaattttcacttcacaaacattttattccttgattttgcccaccaccactatgactgctatcactcgtagagccaccaaaaattgggttaataattatcttactcgtttcaattaatctttcttaaatgcatgtatagctcacatttatttcaatgtttartattacaagtgttttggatcttcatttagaagtttggtgatgtttttgtgaccagaaatatgccttaggaacttcactcttgtttatatcagtatatggcaaaattagcttcattatatgtcattttccttaaagtcatagtttccaggaacttctcaatgatattgggtgaggtctgactgtaatgtaaggtagtcatgtgttttattgtttactagagagaaagttttcaatattttggctacaagttaagtggaacttagccttgtgcgagagtaatatctacactgacttatcattttttctttctgtaataggatcaaattttctaaattagtgggttttctttgtatgtgtatgtgtgttgaagactttatcattggaaaattccaatacatgtatgagaaaggacttccaaca

SEQ ID NO: 120005 - DNA, 558 bp, Homo sapiens
tacaacattctcacatattttacaaagtctttgggttatacagacagagtaaaagtagggctcagcacacaggcgaaattgtgagtcttttatgcagaaccagctgacagtaaggactgtcgttatctcacatggatgaagcgaactgtcacacatgaaaacaagacatgtatggtattgtaaatctcatctttggaattttctgacagcatgattgtgcggtataaatcttttctaagcacctgtgtaatttgactctccagacttgttccagcccatagaagggactgtgatatctacytaggccaacctccaggtgatgtgactctcctggctgggcccttctctcagtaaggattgtgacatatcactggatctaacactcaggtgatgctacattcttgcctgcaccatgcctaccacaattattgtaacatatttctgtgtccacctcataggtgatgtaactttcctctctggaatgggtcctgcacaaaggaatgatagtaacatattgcaaagccagacacacaggtgagggtactcttttgccaaagc

SEQ ID NO: 120006 - DNA, 541 bp, Homo sapiens
tgttaatgagcagtaagaaatcatctgaaggtacaaatctcactattaatagtaagtacacagaaaaacagattctaacccctgaaattgtgtgtaaatcacttatatcttgagtagaaagactaaaagaagaacctataaaatatataaaaaataataactatgctttttttttttgagatggggtcttactttgttgtccaggcctggagtgtagtgacatgaccttggctcactgcaacttctgcctccctggctcaagtgatcctcccacctcagcctcctgagtagctgggactacaggtgcacaccactacacccrgctattttttgtatttttaggagggacaagtttttgccatgttgcccaggctggtcttgaactcttgggctccagtgatctgcccaccttggcttccaaaagtgctgagattactggtgtgagccaccgcacccagcctaaagcaacatttaagacattgagagtataataaggtatcaatagaaacaacaaaaaattaaaaagtggggggatgaagtt

SEQ ID NO: 120007 - DNA, 541 bp, Homo sapiens
tgttaatgagcagtaagaaatcatctgaaggtacaaatctcactattaatagtaagtacacagaaaaacagattctaacccctgaaattgtgtgtaaatcacttatatcttgagtagaaagactaaaagaagaacctataaaatatataaaaaataataactatgctttttttttttgagatggggtcttactttgttgtccaggcctggagtgtagtgacatgaccttggctcactgcaacttctgcctccctggctcaagtgatcctcccacctcagcctcctgagtagctgggactacaggtgcacaccactacacccggctattttttgtatttttaggagggacaagtttttgccatgttgcccaggctggtcttgaactcttgggctccagtgatctgcccaccttggcttccaaaagtgctgagattactggtgtgagccaccgcacccagcctaaagcaacayttaagacattgagagtataataaggtatcaatagaaacaacaaaaaattaaaaagtggggggatgaagtt

SEQ ID NO: 120008 - DNA, 467 bp, Homo sapiens
ctggttctggcgttagctccaagatcctcatatcttgatgctggatgaggtcatcttgtcctaagtgaaacagagcaaaaacaaggtcaaaagttaccatggaaaactaaatattcaaaatactcagtgtttcctgtaggtagttctaaagatgattagaagttccatctctggcaaaatgttaaatgaaaaaagcaaaaagtttacaagtactatggtaactggyaaattttactgtatatggcgtctctttaaaaaaaaaaaatttttttttttttttttggtgacacggtctcactctgtcacccagactggagtgcagtggagtgatcacagctcactgcagccttgacctcctgggctcaagtgatccacccacctcagccttccaagtagctagaatcacaggcatgtgctaccatgcccagttaattaaaaaaaattgttttagagacagggtctcacta

SEQ ID NO: 120009 - DNA, 613 bp, Homo sapiens
tttcttaaacaactcctagtataacacatgctgctggaccaacaatgttgatcttaaagtacttgggagaaatcctattatcccatcttaaatcatggcccatgtttgcccagttcataaggacataaactccgttagttctctgagacaatagaatactagaaaagaatgttttgatgatgaaagtttggggcacgaaagtgcagagcattgcatgaaaaaagaagacctttgggcaactgaggaacaagtcctgggtgctgggcatataaaaagtgaaaagaagtaaaggggtagtaagacagcattaaaggaacactgatgacttaatcgtccttagagctggcactggacagaactatcaactaggaaaagtaacttactttcactttttgaacgtaggtgatccacaaattacattttcagaaacactgatctaaaaacattatcttgggaaagtcacatasttatttttttctctgcatccactcaattagggaaaaaaggattgatactgtgatgcaattaaataagtactacttattgtttatcacatacctggaaactgcaaaagcacataaatcatagaacagaacctacaagggaattgctt

SEQ ID NO: 120010 - DNA, 600 bp, Homo sapiens
tcttttgaaaaatatctgttcatgtcttttaccgattttttaatggagttatttgtttttttcttgagttatttgaattctttgtagattctctatgttagacctttgtcagatgcattgtttgcaaatatttcctcctattccacagattgtctgtttactctgtttattatttcttttgctctgcagaagctctttaattaagtcccatttttctatttttgtttttgttgtgttaccttttgagaatgtagacataaattatttgcctacatcaatgtccaaaagagtttttcctaatgtttcttctaggatttttatagtttcaggtcttacatttaacatattaatccatcttgaattaatttctgtacatggtgatagacaggggtgtagtttcattcttctgcatatggctatccaattttcccagcaccmtttattaaacgatgtgtcctttctctagtgtatattcttgtcaacttttgagttggctacaggtatatggctttatttttgggttttctgttctgatccattgatctatgtgtctatttttatatacaggttgtttttaaataaattatcctgataaaaggt

SEQ ID NO: 120011 - DNA, 600 bp, Homo sapiens
tcttttgaaaaatatctgttcatgtcttttaccgattttttaatggagttatttgtttttttcttgagttatttgaattctttgtagattctctatgttagacctttgtcagatgcattgtttgcaaatatttcctcctattccacagattgtctgtttactctgtttattatttcttttgctctgcagaagctctttaattaagtcccatttttctatttttgtttttgttgtgttaccttttgagaatgtagacataaattatttgcctacatcaatgtccaaaagagtttttcctaatgtttcttctaggatttttatagtttcaggtcttacatttaacatattaatccatcttgaattaatttctgtacatggtgatagacaggggtgtagtttcattcttctgcatatggctatccaattttcccagcaccatttattaaaygatgtgtcctttctctagtgtatattcttgtcaacttttgagttggctacaggtatatggctttatttttgggttttctgttctgatccattgatctatgtgtctatttttatatacaggttgtttttaaataaattatcctgataaaaggt

SEQ ID NO: 120012 - DNA, 600 bp, Homo sapiens
tcttttgaaaaatatctgttcatgtcttttaccgattttttaatggagttatttgtttttttcttgagttatttgaattctttgtagattctctatgttagacctttgtcagatgcattgtttgcaaatatttcctcctattccacagattgtctgtttactctgtttattatttcttttgctctgcagaagctctttaattaagtcccatttttctatttttgtttttgttgtgttaccttttgagaatgtagacataaattatttgcctacatcaatgtccaaaagagtttttcctaatgtttcttctaggatttttatagtttcaggtcttacatttaacatattaatccatcttgaattaatttctgtacatggtgatagacaggggtgtagtttcattcttctgcatatggctatccaattttcccagcaccatttattaaacgatgtgtcctttctctagtgtatattcttgtcaacttttgagttggctacaggtatatggctttatttttgggttttctgttctgatccattgatctatgtgtctayttttatatacaggttgtttttaaataaattatcctgataaaaggt

SEQ ID NO: 120013 - DNA, 577 bp, Homo sapiens
cacattacttttataaaaagtgcatagatgacaaagcaaacctcaaaagaatcccctagagggacagcgcaagatggctgaatagaagcctccaccaattgccctccccagaggaaaacaaaattgaaaaactgtccacactgaaagcccctttataagcaccaaaaatcaagtgagtgatcacagtatctggttttaatgccatatcactgaaagaggaaccgaagatggtaagaaagacagttgtgaatcacctgcaccatccttcccccatttcccagcagcagccacgtggcatggagagagaatctgtgcaattcaaggagggaaagtacaatgattgtgggactttgcattggagctcagtgctgccttgccacagcagaaagcaacactrggcagagcttagctggcactcatggagggagcattgagaccagccctagacagaacctgggttctgaaagccttgcaactgtgggcaaaagtactctggggtcctaaataaacttgacaggccatctgggccacaaggactgcaattcctgggcaagtcctggtgctgcgctgggcacag

SEQ ID NO: 120014 - DNA, 627 bp, Homo sapiens
gtggaataatctccaattttagattttgttttgtttttagttatggttggaccatacttagtctggcttgtttggagaactagattccttaacccaatctcaacaattcattcagaaatattggaattattttttaatttcagatgaaggataatataattttctytttgtaatattgtaaaacatatatttggtgttcaatcctctttcctggcatacaacttctgaaatccttagaaactccaaagtgatgtcttctggtatgctaatgagttgactgataattgacagcccctagctgcttcaggatggggctgatcccaggaaagaccaaagcagaattaaaggattggaactttaatccccactaccaacaactggggaggaaagcggggttgaaggttaagttgatcgccagtggccaatagttgaatcaattatccctatgtaataaagcttccataaatactcaaaaggactagtttcagagagctcctgaatagctgaacatatggaggcttacaggaaggtgagcaagaactcaaacatgtgctgggaggatggcacaccccaactacacagggacagaagctcctgtgcttgggacacttccagactttgccatat

SEQ ID NO: 120015 - DNA, 582 bp, Homo sapiens
caaatgcttggaagcacttggaaccactaattgctgaaagatagactcaatgagtgtctatgacatcatattgctcccttctgtaggaaagactgctgtttgtaccccaacatatattccctccatctctcattgtaatatattctctccatctgtcatgttggtcacatggccagccgctcagagtaaaaactacatttcctagcccccacttaatcaaaytgtggccagtttaggccagtggaaaatagaagttattttatgttagcttttagtatagcgaagatgagtcacactccctggggttgtgaactaatcacttgaaaggagtcttgtccctatggatttctgagaccaaagcatgatatcagtctaggatgatagatctttactcttctataagagcaagtaaacttctatcttattttcctaactcaaaaaaatcttttcatgggtgtgtctgatgggtggcccagatccccttcctgcacccagacagccagggagagtgagggaatgaattcacttcccaccctggcagccgggtttataatgttgagaatgtctcccagatagaagagc

SEQ ID NO: 120016 - DNA, 582 bp, Homo sapiens
caaatgcttggaagcacttggaaccactaattgctgaaagatagactcaatgagtgtctatgacatcatattgctcccttctgtaggaaagactgctgtttgtaccccaacatatattccctccatctctcattgtaatatattctctccatctgtcatgttggtcacatggccagccgctcagagtaaaaactacatttcctagcccccacttaatcaaattgtggccagtttaggccagtggaaaawagaagttattttatgttagcttttagtatagcgaagatgagtcacactccctggggttgtgaactaatcacttgaaaggagtcttgtccctatggatttctgagaccaaagcatgatatcagtctaggatgatagatctttactcttctataagagcaagtaaacttctatcttattttcctaactcaaaaaaatcttttcatgggtgtgtctgatgggtggcccagatccccttcctgcacccagacagccagggagagtgagggaatgaattcacttcccaccctggcagccgggtttataatgttgagaatgtctcccagatagaagagc

SEQ ID NO: 120017 - DNA, 599 bp, Homo sapiens
gtagactaacaatgagtgaattttaatatatgcaaattacacttcaatgaagctgttttttacaaaaagaaagttttgttctaaagcttttatttatcatcatcatcactatcaattacatacatgtacacaagagaaaaaaggcaaatagtaagcaaagcataaaatgaaaactatatttagctgccttatcatcagtcttatgcccaatatactaatgcttttatcaaactcttgctttttttatttatataagttttaaactttggaataaatttacaggaaagttgcagatagtaccaagagttctygtatatccttcactgaatttctcctaatgttaagatcttacacaatcatctcacacttattaaaaaaaactgctcttaatcattccggttatttattccatatttctaaaaatgcttatatatctattaaccaatttatcaaacataaaccaaaaccattgtctctgtcactttgaaggtaagaaagcagctcacatactccactggagaaggtaaccttccctcatcttaatgcttatagtgaaacatagttttactatatttttagaacatagttttactatattt

SEQ ID NO: 120018 - DNA, 633 bp, Homo sapiens
atactccagccacagttataccttgtccttccttctctccattcccccaaaggttaaaggcatcgctcccaatctgaaagtttttactagaacttttcaaatctcttccaacttcagaatgactaagtatagctcaagcacttgaggraaagctgaagaggtcatgtcctaaattgctatttagcctcacctggcaggagttgatgaagacaagtagtgagtaaacaatgaaatatttttgaaaccctctcattctattcatctaataattgagcacaactatcatactatcatagcaacaataattctacaaatctgctttccatttgtttgtgttagaatcctataccctcctaggtcattttaacaattgtttttaagaagctggacaaaaattgttttaaataaggaaaagtgtcaagtctcagtgtgctctaattggccatgattagcatggctcttaatagggttttcgctgctagccattgacagtcgtttgcatttagaccgcttttctaaaaatgcaatgatttctgtgtggtggaaagctccggagacttaatagagaagtcataataatgtaaactcacatagtggtttctactactgaaaaatgcctctgtccatgttaga

SEQ ID NO: 120019 - DNA, 629 bp, Homo sapiens
tgagtgcaagcttgtaaatgaagcaagaatggtgttggttgagtgcattttttagcgtggaattcacaatgtgactccgttaatttaatctaaaccaaataagtacatggtggagatgaatgcatgaacagaaaagtgrgtggtgcaggagagaaaacagaagtccctaagttcaaacaaaacatggatatgtaatattcaattattttgcgggaggtggcgggggggaactgtaaaaaattcttctccaagtctgagtatttattcaggaaaatacaaatcatttactttgatataggttccttttattcaaagatataacgttcatctagtatagttaaacaaacttttaacctcttccctgaaataatgccaaattaagtcatagataaattatatgggcagaaatgttcactaaactgatttgtattgttaagaatgagaaaaatgaagagagtactcatttctcattttgtagcagattggtaatttttaactatgctacttacaaatctgaatattccaattctaaatatggatggatagatcaatagatcaatagctagatggctagctagattgatagatggataaatgaattgtggactcttcttggataaagcacagtg

SEQ ID NO: 120020 - DNA, 535 bp, Homo sapiens
gatgaacatgaaattggcaaaggcttttttatctaagcatcatcataataataaatgtcatgaatgaagtaagcaagtttatgtttatgaaatcctggaatagttgacgcatggattaccttgtaaatgggtacatttaggtaaagcaaaaataagaatactgaatacaatgagtaataaacaaaattcagctaaatttacagtgattttgcttttaaaaaatgataagtatatttatgttattggactataattaaataagatgaaatggctgggaaataaaccttagaaataatagatgtctggtaataaatcaaacacaactaaataaaaatatcacattgtcgaaaatattttgcaaacaacactgagttaaacaaatcaggtctctttcaagtatgtttttaggaatcatgtctctctaagctaagagttayagtatatattatttctcaaataacaatgtcttcaggactcctttttttaaaaaaggaaatatcaaaaaggatagttcttcatggcatacactttggaa

SEQ ID NO: 120021 - DNA, 470 bp, Homo sapiens
gaaatcgcaccattgcactccagcctgggaaacagagcgagactctgtctcaaaaaaaaaaaaaaaaaaaaaacaaaactgaagctatttaatctgtttaactctgttaaraaatttatttcatccttatacaaagtcttatttgaagttcaacaatcttcagtcttgctgcctcgtggtctgtgagccctaaggattgaagatgtgacaggccatgcctgtcattcacacacagtgggagccagggctctggaaagaactgagaatagctggatcacatgactagataccagtataaaaggctgcttaaatggttctcaggagaactgagaaccatttatagtggttatagattactcgacatcctagaaaaaataaatcacacagggagaaattaagagagcaaattaaaatgtttttcctagaaagttagaagagaattgcttacaaattacttcacctgtagtctt

SEQ ID NO: 120022 - DNA, 470 bp, Homo sapiens
gaaatcgcaccattgcactccagcctgggaaacagagcgagactctgtctcaaaaaaaaaaaaaaaaaaaaaacaaaactgaagctatttaatctgtttaactctgttaagaaatttatttcatccttatacaaagtcttatttgaagttcaacaatcttcagtcttgctgcctcgtggtctgtgagccctaaggattgaagatgtgacaggccatgcctgtcattcacacacagtgggagccagggctctggaaagaactgaraatagctggatcacatgactagataccagtataaaaggctgcttaaatggttctcaggagaactgagaaccatttatagtggttatagattactcgacatcctagaaaaaataaatcacacagggagaaattaagagagcaaattaaaatgtttttcctagaaagttagaagagaattgcttacaaattacttcacctgtagtctt

SEQ ID NO: 120023 - DNA, 470 bp, Homo sapiens
gaaatcgcaccattgcactccagcctgggaaacagagcgagactctgtctcaaaaaaaaaaaaaaaaaaaaaacaaaactgaagctatttaatctgtttaactctgttaagaaatttatttcatccttatacaaagtcttatttgaagttcaacaatcttcagtcttgctgcctcgtggtctgtgagccctaaggattgaagatgtgacaggccatgcctgtcattcacacacagtgggagccagggctctggaaagaactgagaatagctggatcacatgactagataccagtataaaaggctgcttaaatggttctcaggagaactgaraaccatttatagtggttatagattactcgacatcctagaaaaaataaatcacacagggagaaattaagagagcaaattaaaatgtttttcctagaaagttagaagagaattgcttacaaattacttcacctgtagtctt

SEQ ID NO: 120024 - DNA, 582 bp, Homo sapiens
taatgtattggttcttgtactggttttatcyaggacacagtgcccttcatccagtttctctctttccttttttctcaccctgttttatcgaggtgcagccctttttatctggtcacaaaagggaactcctaagtgttggtttgtgatcaagaagcagcaaagctgtcatctctctaaatatatttttatattttgcttggggttgtcactataaataagaagaagtattgctgatagggcttttcatgtgtgtactctctttctctctccgtcctcattcacttcatcatccttaggcccccagagctgtgtcaccaccctgaaacaaatgagggaaagcaaccaattacattaaaatgcaatataaatagagggaacaggcaatgtataatgtggatttcctgaacaactgttcacattctaggggctggtcaagcaaagggaacagataaggaagcccttggctgtcatttcccttgaactattgtgaggatctcagggcctagggaaagaatcctcctgagtcttctctctttcataatagtttcatttttgtccttgtcatacattttcaagaataca

SEQ ID NO: 120025 - DNA, 582 bp, Homo sapiens
taatgtattggttcttgtactggttttatccaggacayagtgcccttcatccagtttctctctttccttttttctcaccctgttttatcgaggtgcagccctttttatctggtcacaaaagggaactcctaagtgttggtttgtgatcaagaagcagcaaagctgtcatctctctaaatatatttttatattttgcttggggttgtcactataaataagaagaagtattgctgatagggcttttcatgtgtgtactctctttctctctccgtcctcattcacttcatcatccttaggcccccagagctgtgtcaccaccctgaaacaaatgagggaaagcaaccaattacattaaaatgcaatataaatagagggaacaggcaatgtataatgtggatttcctgaacaactgttcacattctaggggctggtcaagcaaagggaacagataaggaagcccttggctgtcatttcccttgaactattgtgaggatctcagggcctagggaaagaatcctcctgagtcttctctctttcataatagtttcatttttgtccttgtcatacattttcaagaataca

SEQ ID NO: 120026 - DNA, 590 bp, Homo sapiens
cttctctctttcataatagtttcatttttgtccttgtcatacattttcaagaatacagagactgatgtaggcatctctggaatagtcttaggaaaattattctgggaacaggatcaatgaagaggattgtgaaaatgaacatggagacttgaatcccctgtgycttctagaaacggaaggacagaaaaatatagcaatagtctaatgcaaaaattgtcatacacatgccaacctcttaaaacagacaatgccaccaagcgtcaaggtgaccttagaacctaagaatgtggaaagaagaagacacacatttggcaggctaccccagacccatgtggagcagaggtggtaaatatctcacatgttgcaatctcccttgtcatgtctgtggtagatattgttaatgaatcacaactttctctccccctcagtccaaatttagctttaaaatctattttaacacaatatgccagatacattgcccatcaaatgccaccagcattccagaagaaatctatctgctatccatgatcaaggctattgcaaaacttgtattaattcaggtcagaggaatggtaatctcggcttgattc

SEQ ID NO: 120027 - DNA, 566 bp, Homo sapiens
cttgggaggccaaggagggaggattgcttaagtgtaggagttcgaggccagcctgggcaacatasaaagaccctgtctctaccaaataaattttaaaaaattagcctggcatagtggcacacaccagtagtcctagctactcagggagctgaagtgggaggatcgcttgagcccaggaggtcaaagctgcagtgagctgtgatcacatcacacactcagcctgggcttcagagtgagaccctatctaaaaaatggtcaaagaatatagactagaaggagactttctcaagaggtgtatgggagaggaagaaaaattactccgaaaaatgctatttgatataattttctcatttttatttttgttggaaccatcatgactacaaaaattccccaccctcataaaaataattattcattcacttgctcactcactcatttacgaattgtttttgagaagctcctatgtgtcagcactcttgcagataccgggattgttgaggtgaacaaaacagatatggtccccaccctcaggcaggtgcattctagtgagagaagacaagaaaact

SEQ ID NO: 120028 - DNA, 533 bp, Homo sapiens
agctgaattcatgaagaccattgtcctctgggttagatagttcctacctctccctccagacgcacttttcacccttcccygccctcctctgtgctctgaagactgacttctttgtacagcatcacctggcttccctttctctcgacttctgatgaggtttagtcaatggagacaccagcagaattgtggaggacaagagcacagagagatcagggaatttattttgcttactccctcactgctggtcatggttttgtgaagtctgttcatctggggaggcccacagtaccactggatagccattttctcatggccaccactcttatggggtgtgacaatctcgcccacttctgcccttccagcctgcatgtgaagacagctccactggagaagttcccatgtgttttgccccctctcactggttcccttaattttgtccacccctatgtgagtattccctatattaactcactccatttactgtctttgaatgtgctacttgttttctgcccttctgactgatacaccttccc

SEQ ID NO: 120029 - DNA, 563 bp, Homo sapiens
atgactaggtagatgactgctacgtattcgtcacagactgcatcttcatctccctcccagcagtaaccattttcattcattattttaaaacttcctttatttcctattacttatctcctatgggatacatatgcatatgtgtatacatgtatatttagtttgtctgatatataaatgaaccattttgttcttgattagttatcctgctctgcttgttttattttgctttacctakgttgataagtgtagctctagttcattcctatttactgctgaattcttatttacacttcttagttcattctttcattgactcttatttacacttacttattcttcctccgtagtcactaatactctttccagcattaggctgctgtaaacttccctatgcatgcttcctcttctacatgtgcaagtattactctaggttatatacctacaaatgaaaatactgagtcatgatatatgcacattttcaactatgcatggcaattccaagctgatttcttaagaagttgtaccaatttatgtttctaccagtagtagatgggacctcatgt

SEQ ID NO: 120030 - DNA, 563 bp, Homo sapiens
atgactaggtagatgactgctacgtattcgtcacagactgcatcttcatctccctcccagcagtaaccattttcattcattattttaaaacttcctttatttcctattacttatctcctatgggatacatatgcatatgtgtatacatgtatatttagtttgtctgatatataaatgaaccattttgttcttgattagttatcctgctctgcttgttttattttgctttacctaggttgataagtgtagctctagttcattcctatttactgctgaattcttatttacacttcttagttcattctttcattgactcttatttacacttacttattcttcctccktagtcactaatactctttccagcattaggctgctgtaaacttccctatgcatgcttcctcttctacatgtgcaagtattactctaggttatatacctacaaatgaaaatactgagtcatgatatatgcacattttcaactatgcatggcaattccaagctgatttcttaagaagttgtaccaatttatgtttctaccagtagtagatgggacctcatgt

SEQ ID NO: 120031 - DNA, 563 bp, Homo sapiens
atgactaggtagatgactgctacgtattcgtcacagactgcatcttcatctccctcccagcagtaaccattttcattcattattttaaaacttcctttatttcctattacttatctcctatgggatacatatgcatatgtgtatacatgtatatttagtttgtctgatatataaatgaaccattttgttcttgattagttatcctgctctgcttgttttattttgctttacctaggttgataagtgtagctctagttcattcctatttactgctgaattcttatttacacttcttagttcattctttcattgactcttatttacacttacttattcttcctccgtagtcactaayactctttccagcattaggctgctgtaaacttccctatgcatgcttcctcttctacatgtgcaagtattactctaggttatatacctacaaatgaaaatactgagtcatgatatatgcacattttcaactatgcatggcaattccaagctgatttcttaagaagttgtaccaatttatgtttctaccagtagtagatgggacctcatgt

SEQ ID NO: 120032 - DNA, 623 bp, Homo sapiens
ttcatttcacttggaatctactgataagcagtgcaaaaaaattattttgggctttgctctgtgaattcttgggtttgctgtgacgtcactaattctgagatctgccacctgcccagctctccaattaatcctgggtcctcagagcacagattggaaataacaggcagagaggatctttaatctggtttagaaaactctccctgatatctaaactatgtcctagttaaatgggcttgaaaatgagaagaaacacctcactgatgtggctgggggcacggagtgaggtataggggtaatctcagagagttggggctcctcccagatgtcctcatcccatctgtccagatcttatattttcctcacrggcccaccagccttagaaattgttgaaatagggtaaagaatggtggtagagaatgaagctgccacattctgccttgtgcatggttacaggagatgctacaccttttcatgtacggttctacttggctcctcttcccaagttaccagttcacactcatgcaccacctgctctcagatgacaatactgggccatgtctgtgtctgtactttgtagttgttaaagctacaagagagacctggaatgctaataccttgataat

SEQ ID NO: 120033 - DNA, 623 bp, Homo sapiens
ttcatttcacttggaatctactgataagcagtgcaaaaaaattattttgggctttgctctgtgaattcttgggtttgctgtgacgtcactaattctgagatctgccacctgcccagctctccaattaatcctgggtcctcagagcacagattggaaataacaggcagagaggatctttaatctggtttagaaaactctccctgatatctaaactatgtcctagttaaatgggcttgaaaatgagaagaaacacctcactgatgtggctgggggcacggagtgaggtataggggtaatctcagagagttggggctcctcccagatgtcctcatcccatctgtccagatcttatattttcctcacgggcmcaccagccttagaaattgttgaaatagggtaaagaatggtggtagagaatgaagctgccacattctgccttgtgcatggttacaggagatgctacaccttttcatgtacggttctacttggctcctcttcccaagttaccagttcacactcatgcaccacctgctctcagatgacaatactgggccatgtctgtgtctgtactttgtagttgttaaagctacaagagagacctggaatgctaataccttgataat

SEQ ID NO: 120034 - DNA, 623 bp, Homo sapiens
ttcatttcacttggaatctactgataagcagtgcaaaaaaattattttgggctttgctctgtgaattcttgggtttgctgtgacgtcactaattctgagatctgccacctgcccagctctccaattaatcctgggtcctcagagcacagattggaaataacaggcagagaggatctttaatctggtttagaaaactctccctgatatctaaactatgtcctagttaaatgggcttgaaaatgagaagaaacacctcactgatgtggctgggggcacggagtgaggtataggggtaatctcagagagttggggctcctcccagatgtcctcatcccatctgtccagatcttatattttcctcacgggcccaccagccttagaaattgttgaaatagggtaaagaatggtggtagagaatgaagctgccacattctgccttgtgcatggttacaggagatgctacaccttttcatgtacggttctacttggctcctcttcccaagttaccagttcacactcatgcaccacctgctctcagatgacaatastgggccatgtctgtgtctgtactttgtagttgttaaagctacaagagagacctggaatgctaataccttgataat

SEQ ID NO: 120035 - DNA, 639 bp, Homo sapiens
ttagaatctattcattcactcatatgtttattcactccacacaatatgttataatacttattattgtctaaggactatccttggccagcagtttatagaaacttattagagaagccaagtcccctgcccttggagaacttacccttaggaagaatgtttcagtttcttattgctgctgtaacaaatgaccataagcacagaagctcacaacaacacaaatatattatttcatagatctggaagtcagaagtctgaaatgggtcacctagagctaaaaataaggtgttgatggggctgcattccttctggaggctccagatgagagtccatttcctttycttttccagctcctagagacactcacattccttggctcatggcagcatcattccaacctctgcttccattatcacatctctgtctctagttcttacatgcctccctctttcacttataagagccctgtgattatattggacttgccaagataatacagaataatcttcccatcttgagatccttgtttaatcacatttgcaaagtccctcttgtaatgtaagatcaaattttgacaggttgcagagattaggatgtagacatctttggggcatccaaaatatggacattcattattctacc

SEQ ID NO: 120036 - DNA, 472 bp, Homo sapiens
agaagtctgaaatgggtcacctagagctaaaaataaggtgttgatggggctgcattccttctggaggctccagatgagagtccatttccttttcttttccagctcctagagacactcacattccttggctcatggcagcatcattccaacctctgcttccattatcacatctctgtctctagttcttacatgcctccctctttcacttataagagccctgtgattatattggacttgccaagataatacagaataatcttcccatctygagatccttgtttaatcacatttgcaaagtccctcttgtaatgtaagatcaaattttgacaggttgcagagattaggatgtagacatctttggggcatccaaaatatggacattcattattctacctaccacaggagatgacacaacatcaattgattacaactgtggaaagtgcaaaaaaaatgaggactttctgggtgctct

SEQ ID NO: 120037 - DNA, 598 bp, Homo sapiens
gtagggtagtttgcgaaaatgtagagtggctttaaagtgtggtcgttcattttgtattaatagacgttttagagagttgtaccacactcataactgcatagagaatagactacccttatttttatgtagaatcactgcttcaggatgacatataggaaagtgktttttttttctgtgctgatgacatctctccaattcccagaacactcccagttttttttttttgagggggaagtcagtaagaggtggactgtcaggcttttttttttattattaattataattattgatttcattattgttacttaaaagattgtgtgtccttcactctttatgtgaaatttctttaatcttcattctcataactagctagtgtggcagtttctaaaatcccagttaggtagagagaaaccaccaacttcttaatattctcctaggaaaacactagccttggaacttctatgtatttttttgatgaacactttatttaaaagtttttccttaattcagtctcatttctctgaaccaataattttttttatttctcccttcttagtctaattggtgagtatttttatgtctaggttcagttttaaaa

SEQ ID NO: 120038 - DNA, 614 bp, Homo sapiens
tatacgtgttattcacccattccactgccgayggacatttgggttgttttcagtattttgcttctacagatagtgctgctatggacatttttgcacatatctccttgtgtctgtgtcagcctcactagataatgttaaactgttttccaaattgattattcttgccggtaaagtataagagttctgattattccatgatctcagcaaacacttggacttgcctctagttctttcacctgagcttattaaattaaaggaaggcttactgtcctttctcacgtctaaaagtcatggtttgtattctctttccatagctgtctcctgtcttttttttttttttttttttaatgccatcaaattgaaggactctggcatacacacacacagcgaaggcagagtggacatttcacatccaagtccgggtggttatgtaggttcatttttcttctgggtgtcctgtgctgaggttggctagcaaaatatccagctcaaaaaaaaaatcagaaagttattcccttagcaccttttcaattcaactctgccaacagtggctcagtaagaagcagcaagtaaataaaatcaacagatttcagcttatgccttgggctcgccag

SEQ ID NO: 120039 - DNA, 593 bp, Homo sapiens
cattatcaattttaaaacctacctgaagctaaggaagtaattattcatagggatggaatcgctggggtgggagtatatttttaaaaacattaggacttgtttttagtactgggtgtatttgctgcttttttttgtttgctaatagacaataatatataggcaatgcataaaatcttcacactaaggtacaattatttgtaatcaagatccacacartgacaggcttccaagactaaaaaggctaaaacttggtttgctgacaaaaggttcatccatttcaactcaaacaaaaaatgattgatgaagcatttgcacacctgtttgggagactatggaagatgctgtagacaagtatttttcaaactttatcgcacatacaaaccatctgggggtcttgttaaaatacagagttgaattcacagatctggggtggaccaggacattctgcatttctaacatggaaatcccgatgctgctggtccacagaccccaccttcaatactgtaatcctggctgcatattatggggaaacttaaactgtgcaaaccaggaagacagccctcaccagaacctgaccactctagcatgatgaa

SEQ ID NO: 120040 - DNA, 636 bp, Homo sapiens
acttttatttaaggaaatgaagatatatctataaggacattcagcttagcatataagagcaaaaaattgaggctgagcatsgtggcccatgcctataatcccagctccgtgaggctgaggcgggaggatggcttgagcccaggagtttgagaccagcctaggcaacctggtgagaccttttctctacaaaaaattttaaaaaaatcatccaggcatggtggcatgcacctggtagtcccagctattcaggaggctgaggtagggggattgctcgagcccaggagtgcaaggctgtggtgagctatgatcacaccactgcactccagcctgggtgacagagcgagactcttcctaaagaaagcaaaaaatctggcaacaacaatgggggataataaaattaatgtcagacagtcacaacaaagtactatcaacagtgatgtagacgtgcatatgtacatggaaacatactgacaatatcgggaggtagaaaagtagaaaaaatcaggtaacaaaatgtatataacatctgttaccatttttgtgagcagaaaagaaatagctcggtaattggaggctttctagtgccagacactattccaagtactgtacttcaaagatattgactcatttaatctt

SEQ ID NO: 120041 - DNA, 636 bp, Homo sapiens
acttttatttaaggaaatgaagatatatctataaggacattcagcttagcatataagagcaaaaaattgaggctgagcatggtggcccatgcctataatcccagctccrtgaggctgaggcgggaggatggcttgagcccaggagtttgagaccagcctaggcaacctggtgagaccttttctctacaaaaaattttaaaaaaatcatccaggcatggtggcatgcacctggtagtcccagctattcaggaggctgaggtagggggattgctcgagcccaggagtgcaaggctgtggtgagctatgatcacaccactgcactccagcctgggtgacagagcgagactcttcctaaagaaagcaaaaaatctggcaacaacaatgggggataataaaattaatgtcagacagtcacaacaaagtactatcaacagtgatgtagacgtgcatatgtacatggaaacatactgacaatatcgggaggtagaaaagtagaaaaaatcaggtaacaaaatgtatataacatctgttaccatttttgtgagcagaaaagaaatagctcggtaattggaggctttctagtgccagacactattccaagtactgtacttcaaagatattgactcatttaatctt

SEQ ID NO: 120042 - DNA, 636 bp, Homo sapiens
acttttatttaaggaaatgaagatatatctataaggacattcagcttagcatataagagcaaaaaattgaggctgagcatggtggcccatgcctataatcccagctccgtgargctgaggcgggaggatggcttgagcccaggagtttgagaccagcctaggcaacctggtgagaccttttctctacaaaaaattttaaaaaaatcatccaggcatggtggcatgcacctggtagtcccagctattcaggaggctgaggtagggggattgctcgagcccaggagtgcaaggctgtggtgagctatgatcacaccactgcactccagcctgggtgacagagcgagactcttcctaaagaaagcaaaaaatctggcaacaacaatgggggataataaaattaatgtcagacagtcacaacaaagtactatcaacagtgatgtagacgtgcatatgtacatggaaacatactgacaatatcgggaggtagaaaagtagaaaaaatcaggtaacaaaatgtatataacatctgttaccatttttgtgagcagaaaagaaatagctcggtaattggaggctttctagtgccagacactattccaagtactgtacttcaaagatattgactcatttaatctt

SEQ ID NO: 120043 - DNA, 636 bp, Homo sapiens
acttttatttaaggaaatgaagatatatctataaggacattcagcttagcatataagagcaaaaaattgaggctgagcatggtggcccatgcctataatcccagctccgtgaggctgaggcgggaggatggcttgagcccaggagtttgagaccagcctaggcaacctggtgagaccttttctctacaaaaaattttaaaaaaatcatccaggcatggtggcatgcacctggtagtcccagctattcaggaggctgaggtagggggattgctcgagcccaggagtgcaaggctgtggtgagctatgatcacaccactgcactccagcctgggtgacagagcgagactcttcctaaagaaagcaaaaaatctggcaacaacaatgggggataataaaattaatgtcagacagtcacaacaaagtactatcaacagtgatgtagacgtgcatatgtacatggaaacatactgacaatatcggraggtagaaaagtagaaaaaatcaggtaacaaaatgtatataacatctgttaccatttttgtgagcagaaaagaaatagctcggtaattggaggctttctagtgccagacactattccaagtactgtacttcaaagatattgactcatttaatctt

SEQ ID NO: 120044 - DNA, 635 bp, Homo sapiens
tcagcttgcctcagcctcccaaagtgctgggataacagtctagagccactgtggccagccttctttactgtctttaggagttgttatcacagtttcctaggatagtcatctggtagctttggggaaaaaaaatgaattatggcacattcaattgagggcatgaaaataagagagaaacagtgtagatagatatgacgttatggctatrccagcatgctaagccagtgtaattcacaggggtacaggttaattctaaaactgctgtacatgtgtactggaattgacatacaagtaaatggatggcaagtggtgggagctcagtttctttctttcttttttttttagatgaagtctagctctgttgcccaggctggagtgcagtggtgcagtctcagctcactgcaatctcgtcctcccaggttcatgtgattttcctgcctcagcctcctgagcagctaggattacagacacacaccaccacacccagctagtttttgtatttttagtagagatgggctttcaccatgttggtcacggtggtcttgagctgctgaccttgtgatctgcccatatcagcctcccaaagtgctgggattacaggcgtttaccaccgcgcctggccttgggagctcagt

SEQ ID NO: 120045 - DNA, 582 bp, Homo sapiens
tcagctaaatggagatacaaatgggtaggtatagaaatatagatacatgtggatacatgtgttagtatacatacacatttttttctagctctgtgtgctgagtgggagtagaagcagtgacacccaatagatagggatatgccccacatccagattttgtttttaatgccattctccaattaaaggaaccagatatttctggagaaatggctgcttctaggatgaaacagaatatacaaaaatgagcctggaacatcttgtgttttaaagtaaggtagtgcctaaaagaagcccatagcaatggggataaatggctacaggagccaatctgaaagagttcccaatggccaaggctggaacagtttaatgaaataaaaacatkgcattagattaccaaaatgtaaaatatttatgtgtctatactgatatgtaaataagtggtttaataaaaataatagtgacaagtctgtcttacaaaataatttcaaataatttatgtaaatggtctccccatttttcaaacaagtgggtctgaactacctaacccctgagtgagctgtgtttaataactcctaaagagta

SEQ ID NO: 120046 - DNA, 592 bp, Homo sapiens
ttggaaacactgtttttgtagaatctgtgaaggtatatttgggaactcattgaggccaatggcaaaaaagtgaacatcccaggataaaaactagaaggaagctatctgagaaactgttttgtgatatgtgcattcatctcccagaggtaaaactttcttttcattcaacagtttggaaacactgtttttgcagaatctgcgaaggtatgtttcggagtgcattttggtctagtgtgaaaaaggaaatattttcagataaaaactcraaagaaccttcctgagaaactgctttgtgacgtgtgttttcatgtaacagagctaaaactttctttggattcagcagtttggaaacacagtttttgtccattctgaaagtggagaattctgagctcattgaggccaatggtgaaaaagtgaatattcctggataaaaattagaagtaaggtatctgagaaactgctgtgtgatgtgtgcagttttctcacagagttaaacctttatttggaatcagcagtttggaaaccctgttttggtagattccatgaagggatatttgggagcacattaaggcctacagtgaaaaaggaaata

SEQ ID NO: 120047 - DNA, 571 bp, Homo sapiens
gactagctcgagtaagggtgtcccagtggctgggaatcatctgactgaaaacagcaacatcctttaacagtcccattacaaaaggagaatctggtccatactgatttatagcttgtttaaattattttagtmatttaaaaggaaaaggataaaatgtagctgaaataattccctgttgttctgggggctgtattctaacaggggtctgccaagcctctaaatcaccctcttctagcttactgaatacctgcctgaatagaactaagagctgtcactcaatgtgctgctcaaacagttcccggggcaacaaattttgtccagtgtcatctagaaaagaaagatctggagggtctttttcttcaaaatcttaatgaaggtgtgcagaagggtaaggatgaacctctccctcctttgccactttagctttaacaggcaaataagcctgctctgtgacctcttctgttacttccctatactctccgtcctcctcatcattagtgtgaaaaatctctaaggtgaaacgaaccagagaccaaacttgtcccattgttaacatgatgtttccaagctc

SEQ ID NO: 120048 - DNA, 571 bp, Homo sapiens
gactagctcgagtaagggtgtcccagtggctgggaatcatctgactgaaaacagcaacatcctttaacagtcccattacaaaaggagaatctggtccatactgatttatagcttgtttaaattattttagtaatttaaaaggaaaaggataaaatgtagctgaaataattccctgttgttctgggggctgtattctaacaggggtctgccaagcctctaaatcaccctcttctagcttactgaatacctgcctgaatagaactaagagctgtcactcaatgtgctgctcaaacagttcccggggcaacaaattttgtccagtgtcatctagaaaagaaagatctggagggtctttttcttcaaaatcttaatgaaggtgtgcagaagggtaaggatgaacctctccctcctttgccactttagctttaacaggcaaataagcctgctctgtgacctcttctgttactyccctatactctccgtcctcctcatcattagtgtgaaaaatctctaaggtgaaacgaaccagagaccaaacttgtcccattgttaacatgatgtttccaagctc

SEQ ID NO: 120049 - DNA, 518 bp, Homo sapiens
ggtagcaactgcaaaaggacatttgggagcacattgaggcctatggtgaaaaaggaaatgtcttcagaaaaaaactagaaagaagctttctgagaaactgctttgtgagttgtagattgatctcacagagttcagcttttcttttcattcagcagtttggaaacatttttgatacaatctacaaagggatatttgggagtgaattgaggcctacagtgaaataggaaatatcttcagataaaaactagaaagaagatctctgagaaactgctttttgawgtgtccattcacctcactgttaatacctttctttggattcagcaatttggaatcactgtttttgtaaagtgtgcaataggatatttgggagctctttgaggccaatggcaaaaaaggaaatatcccaggataaaaactggaaggatgctatctaaaaaactgctttgtgaagtatgccttcatctcgtagagttatacctttctattcattcagctgtttggacacactgttttgttag

SEQ ID NO: 120050 - DNA, 548 bp, Homo sapiens
atttgggagcacattgatctctacggtgagaaagaaaacattttcagataaaaactagaaagaacttttctgagaaactgctttgtgatgtgtgcattcatctcagcaagtcaaattttttttttggattcagcagtttggaaacattctaggtatccattgtgtaaatggacatttggtagctcamtgaggccaatggtgaaaacccgaataacccaagttaaaaactagatggaaactatctgagaaacagctttgttatgtgtgcattcatctcacagacttaaaactttcttttcattcagcagtttggaaatacatttctgtagaatccgtgaagggatatttgggagcacatttaggcttatgctcaaaaaggaaatattttcacataaaaactagaaaaaagctttctgagaaactgttttgatgtgttcattcatctcacagagttaaaacatttctttgtttcagagtttggaaacactttgtttgtccattttgcaaaaggacacttgggagctcattgaggccaatggtggaaaagc

SEQ ID NO: 120051 - DNA, 644 bp, Homo sapiens
ttgtcataaatagctcttattattttgagatatgtcccatcaatacctaatttattgagtgtttttatcatgaaaggctgttgaactttgtcaaaggccttttctgcatctattgagataatcatgtggtttttgtctttggttctgtttgtatgcaggattatgtttattgatttgcataagttaaaccagccttcattcagcagtttggaaacactgttttggtagaatctgataaaagatatttggcagtgcattgaggcctactgtgaaaaaggaaataacttcagataaaaactagacagaagcttttggaaaaactgctttggtgtgtgtgtattcatttcaaaggtttaaacctttctatagattcagcagttttgaaaaactgtttttgtagaatctgtgaagggatatttggtagctctgtgaagggatatttggtagctcattgaggcaaaaggcaaaaaagcaaatatcccaggataaaaactataaggaaactacctgagaactcgcttwgtgatgtgggcattcatctcacagatttcaacctttctttaatttagcagtttggaaaaactgtcttggtagaaactgcaaagggatatttgggagcgttttgaggcatatggtgaaaaagg

SEQ ID NO: 120052 - DNA, 644 bp, Homo sapiens
ttgtcataaatagctcttattattttgagatatgtcccatcaatacctaatttattgagtgtttttatcatgaaaggctgttgaactttgtcaaaggccttttctgcatctattgagataatcatgtggtttttgtctttggttctgtttgtatgcaggattatgtttattgatttgcataagttaaaccagccttcattcagcagtttggaaacactgttttggtagaatctgataaaagatatttggcagtgcattgaggcctactgtgaaaaaggaaataacttcagataaaaactagacagaagcttttggaaaaactgctttggtgtgtgtgtattcatttcaaaggtttaaacctttctatagattcagcagttttgaaaaactgtttttgtagaatctgtgaagggatatttggtagctctgtgaagggatatttggtagctcattgaggcaaaaggcaaaaaagcaaatatcccaggataaaaactataaggaaactacctgagaactcgcttagtgatgtgkgcattcatctcacagatttcaacctttctttaatttagcagtttggaaaaactgtcttggtagaaactgcaaagggatatttgggagcgttttgaggcatatggtgaaaaagg

SEQ ID NO: 120053 - DNA, 505 bp, Homo sapiens
caaagaagtttctcagaaagcttctttctagtttttatctgaagatatttcttttttcaccatagacctcaatgcactcccaagtatcctttcacagatcctacaaaaacagtggttgcaaactgctgaatgaaaagtaaactttaactctgagagataaatgcatacataacaaagtggtttctcagatagcttccttttggttttctcctgggatactcgtttttttgtctgtggcctcattgaactccaattatcccttcacagattgtacaaaaatagtgtttccaatctgctcaatgcaaggaaatgtttaacttggcaaggtgaatgcatacatcacaaagcagtttctcacatagcttctgtctggtttttattctgggatatttgctttttggmttttggcctcaatgagctccaaaacatccctttcaagattctaaaaaaacggtgtttcaaactattgaatccaaataatgatttaactctgtgagatgaattc

SEQ ID NO: 120054 - DNA, 564 bp, Homo sapiens
cacaaggcagtttctcagcaatcgtctttcttatttttatctgaagatatttccttttcaaccagagatgacaatgcgcacccaaatatccttcgcagattgtaaaatacactgtttccacactgatgaatgaaaagagaagyataactcctctgctagatgaatatgcacattatacagctttttctgatagcttccttctagtttttatatgaggataaaaacttttgcaccattggcctcaatgagttcccaaacgtccattcactgaatggacaaaaacagtttttcaaaactgctaaatgcaacgaaagttttaactctgtgaggtgaatgcacacatcacaaagcggtttgtcagaaagcttctttctatttttttatctgatgatatttttatttttcaacatgggcctcaaagcgttcccaaatatcccttcacagtttctaaaaaatatactttccaaactgctgaacgaatagaccactttcactctgtgagatgaatgcacacatcccacagcatttcctccaatagctccaagtgctgaatccatagaaggg

SEQ ID NO: 120055 - DNA, 386 bp, Homo sapiens
agctacaaaatgtccactgacagaatggacaaaaacagtgtttccaaaacgctgaatgaaaagaaaagtttaattctgccagatgaatcaacacatcacaaagtggtttctgagagggattccttctggttcttatactattgtatttgcttttttcctttggcctcaagttgcacccaaatgtccattcacagaatgggcaaaaaaagtgcttycagactcctgaatgaaaagaaatgtttagctctctgagttgaatacacatatcacaaggcagtttctcagaaagattctttgttgtttttatctaaagatgtttcctttccaacatagtcctcaatgtgctcccaaatataccttcgcatattcttcaaaaacattgtttc

SEQ ID NO: 120056 - DNA, 590 bp, Homo sapiens
tattcctttttcaccataggtctcaatgcgctaccaaatatcccttcatagtttccacaaaaacactgtttccaaactgctgaatgaaaagaaaagtttaactctgtgagaggaatgcacacatcacaaactggtttctcagaagcgttctcctattttttatggtggggcattcacttttttgccattgtcctcaatgagctcctaaaatgcccttatgcagaaaggacaaagacagtgttgccatactgctgaatccaaagaaaattttaactctgtgagatgaatacttacatcaaaaaacagtttctcacagagcttctttctagtttttatctatctgaagatgattcctttttcaccatatcctcaatgtgctcctaaatatcctttcacagatttgacaaaaatagtgtttccaaactgccaaatgaaaaaaaagtttcaactctacaagrtgaatacacacatctcaaaatggtttctcagataacttccttctagtttttatcatgggatatttcctttttcaccattggcctgtgagctcccaaatatccatttacagaatggacaaaaacagtgtttct

SEQ ID NO: 120057 - DNA, 529 bp, Homo sapiens
tgtttttgtccattctgtgaatgcacatttgggagctcattgagacccatggcaaaaatgcaaatacaccagtataaaaactagaaggaagctacctgagaaaccaatttgtgatccgtgcatttacctgtcagaattaaagcattcttttcattcagaagtttggaaacattgtcattgtggaacatgtgaagggatatttgggagttcattgaggcctgtggtgaaaaaggaaacaacttcagataaaaactagaaagaatctttctaagaaactgctttgtgatgtgtgcattcatctcacagagttaaacctttgttttgattcggcattttgaaaagactgtttatatcgattctacaaatggacatttgcagctcattgaggccaaaggtgaaaaagtgaatatcccatgataaaaacgagaaggatgctacatgagaaactgctttgtgatgagtgcrttcatctctccaagtgaaacctttttttcattcagcagtttggaaacactgtttttgtagaatc

SEQ ID NO: 120058 - DNA, 480 bp, Homo sapiens
tttccaaattgctgaatgaaaagaaaattttatctctccaaggtgaatgctcacatcacaaagcagtttctcaaataccttccttgtagttttcatcctgggatattcacttttttaccattgaccacaaaagttcccaaaagtccagtcacagactgaacaaaaactgtgtttgcaaactactgaattcacagaaatgttgaactctgtgagaataatgcatgcatcrcaaagcagtttctcaaaatgcttctttctagtttttatcttaagctatttccattttcaccataggcctcaatgtgctcccaaatactacttcgtagattctatgaaaaccatgcttcccaactgctgaatgaaaataaagtcttatctctgggagatgaatgcacacatgacaaagtggtttctcagatagcttccttctatttttttttcctgggatattcgctttcttgcctttggcctcattaagct

SEQ ID NO: 120059 - DNA, 524 bp, Homo sapiens
aaagaatgctttaaatctgagagatgaattcactgatcacaaagcagattctcagatagcttccttgtaggtttttcctggacattcgatctctcactttggccttattaggctccaaaatatccctttgcagcatctgcaacaacggtgtttccaaactgctgaatccaaagaaaggtttaactgtgtgagatgaacggacacatcacaaagcagtttctcagaaagcttctttatagtttttgtctgaagatatttcctttttcaccacagaccacaatgtgctcacagatatcccttcacagattctacaaaaacagtgtttccaaactggagaataaaagcaagatttaaacctctgagatgaatgcaaacatcacaaagccttttctcaggtagcttcctcctagattttatcctgggataatccctttttcaactttggcctcaaaaagctcctaaataacccattgcagrttctacaacagtagtgtttccaaactgctgatccaaagaaagatgta

SEQ ID NO: 120060 - DNA, 581 bp, Homo sapiens
aatatctgttcttaaaaaccacaaagattttacctgataaactgctttgtgacatgtgtattcacctcatattgttaaaactttctttggattcagcagtttggaaacacaatttttgtagaatatgtgaagggatattttggagggcattgatgcctatggtgaaaaagttaatatctccagacaaaaacaagaaataagctatgagaaactgatctgtgatgtgtgctttcatctcacagagttaaagctttcttttgatccagcattttgaaasagtgttttcatagaatctgtgaaaggacatttgggagctaatagagttcaatggtgaaaatgcagatatcaccagataaaaagtagaaggaagctatgagaaaaacatctttgttatgtgtgcattcatctcacacagtgaaacctatgttttgattcaccattttggaaacactgtttttgtaggatccatgaaggacatttgggagtgctttcagggcaatggtgaaaaagtgaatatatccaaacaaaaacaagaaagaagatatctgagaaactgctttgtgatgtttgcattcatctca

SEQ ID NO: 120061 - DNA, 581 bp, Homo sapiens
aatatctgttcttaaaaaccacaaagattttacctgataaactgctttgtgacatgtgtattcacctcatattgttaaaactttctttggattcagcagtttggaaacacaatttttgtagaatatgtgaagggatattttggagggcattgatgcctatggtgaaaaagttaatatctccagacaaaaacaagaaataagctatgagaaactgatctgtgatgtgtgctttcatctcacagagttaaagctttcttttgatccagcattttgaaacagtgttttcatagaatctgtgaaaggacatttgggagctaatagagttcaatggtgaaaatgcagatatcaccagataaaaagtagaaggaagctatgagaaaaacatctttgttatgtgtgcattcatctcacacagtgaaacctatgttttgattcaccwttttggaaacactgtttttgtaggatccatgaaggacatttgggagtgctttcagggcaatggtgaaaaagtgaatatatccaaacaaaaacaagaaagaagatatctgagaaactgctttgtgatgtttgcattcatctca

SEQ ID NO: 120062 - DNA, 519 bp, Homo sapiens
gactgacacttatggaaaatagaaagaacctatgttgaaatagtgggggtgggttcctacgatatcatctcacagagttacaccactcttttgattcatcagtttggaaacactgtttttgtagaatctgtgaaagaacatttgggagctcattgaggccaatggtgaaaaagcaaatatccagagacataaactagaaagaagctatgtgagaaacagctttgttatgtgtgcatgcattcagcttgcacacttaatcctatgttttcatacagcagtttggaaacactgtttttgtagaatctgagaaatgacatttggaaactcattcagaccaatggtgaaaaagtgaatatctccagttaaagaccggaaagaagttacctgaaaaactgcagtgtaatattcgtctcatakagttaaacttttctttgtattcagcagtttggaaacactgtttttgtagaatccatgaagagacatttgggagtgtattggggcgtatgttgaacaagcaaa

SEQ ID NO: 120063 - DNA, 454 bp, Homo sapiens
gtaaagaaataaaagaatacttactccatggtcagagtagcccaagggctgctggttgcctatttttatgattatttcttgatgatatgctaaacaaggggtggattattcctgcctccgctttttagaccatatagggtaacttcctgaggttgtcacggcatttgtagactgtcctagcactggtgggagtgtagcagtgaggatgaccggaggtgactctcagcgccatcttggttttggtgggttttagctggcgtttttactgcaagctgttttgtcagcaaggtctgtatgacctgtatcttgtgctgattttctgtctcatcctgtgacttagaatgcctaaccatctgggaatgcagcccagtacgcctcaggctccttttacccagscactactcaagatggagttgctctggttcaaacgtctctgacacaacaatactataag

SEQ ID NO: 120064 - DNA, 584 bp, Homo sapiens
gaattcacgtcagctatttctgatagtagctactcctctgcttttcagaaggaagctcagtccttcagggctttcacactacccacttgaataatacctcccttgcaagtgaatacaataaaacttactctttaactggtatttattaagattttcacagcattcattaaactgctttccgaaggctatctcattccactccaccccraaacaccaactttctgaactctcattttctccgaaggctcaatcctttagaacccaagaaatcattcagttcaaatgcaacacttttcagctgaggacactgtgatgcaatgagaggttaagtggctcattcccacgtattggtggcagatcagtcaggccagatccagctcacctgtcaccttctctccaacttttccctaccactaaccactcctttcccacttgcatgacctttcctcctacccctatcacaatcctctgccgtaacattcaccttactttaagttgatcatttgtttacatctgtttttttccactttgagttccttaaaagaagggataacattttattcatctttaaatgcctccctaag

SEQ ID NO: 120065 - DNA, 433 bp, Homo sapiens
ggacatgaagttgtcatttgtgacatgtttgttgagttttccccaaatgcaagttttcagcagatgcaggagaggtcagttgatcaatgatgcaagttataaattacccatttagtaaaaaaaaaaaaaaaaaaaaaaaaaaaaaaaaaagtcttaggagaaacttgcacagctttcaaactgcagaagttattttattttattgtaaagtaataaaaccacatttccttatcataatatgtgattcagacttattactaattcagattggccttgaaactaattagtagcttttattatgtttttatttttttctaacatatttacagccaaaatctaaagagggttctgtttgtttttktaagattcatttaaactagtctctgcacatcactgaactcaacatctcataattcttataactattatggtg

SEQ ID NO: 120066 - DNA, 434 bp, Homo sapiens
ggcactgcatttccaacttggtggcaatcagctgaggctaagtagaaagtgctgagggggatgatgccctctccagttcccaataatttgtgtgatacacttgtacttaccaaaccacttctccccacctgtttgacatttgatggcataagatatcacttgattttacagcccctggcctatccagaccctacctgaggctttgacctaataaaatctttttaaattgtttctttgtatataaatcacagctttgcctctcagttcatgtacctctcagttcacgttcctcacctacaagaagaggagygaagaccagatggtccccaactcttctaactacaaggacatggttgggaaaataaataccctgacttcacatttcttcctccctccagtctctcactagagctattcattaactaaacccaatc

SEQ ID NO: 120067 - DNA, 586 bp, Homo sapiens
aattctaccagtaggctattaggtaaaatagtgagagcagccaatctcatctccattcctttgtccctagatgttatattctgactgtgtagatagagtcaaatattagctgctggcttaaggggtattagctgcatcttgtaaaatggtaccaaatctcacagagtatgtttttagctygcactgtagctgagcttcctcaggacattgtactcttctatcaaggtaagtgttttggccttaacgcaaataagatcaaagtgaattccactggcatcagtccaatgtctcacttcctttgctttaaaacaaatctcctggtcaaaggtaatgttttgtggattgccatggatacagcaatctgtaatccatgaatcaagatgctggcagaagccagcaggaaaggcagatctgttcctgaatacacatttgtccctgtgtggacaactgctgcctcctccatgatgagcaggttgccagccgttcccttaatatgtgatgcaggaactcattgctgtcctctctgcagtcaaattgcacactcagttgagtgtctagaagccagatcagccttgatgagagcaag

SEQ ID NO: 120068 - DNA, 631 bp, Homo sapiens
aaaataccaatggcattcttcacagaaatagaaataacaatcctaaaatttatatggaatcacaaaagatgcagaatagccaaagctatccagagcaaaaagatcaaaactgggggaataacattccctgacttcaagttatactacagagtaaccacaacagcatggtactggcgtaacagacacatacatcaatgaaacagaatagagaaaccagaaacagattcacacgcctagagtgaactcatttttgaccaaggtgctgagaacatacaatggggaaaagacagtctctccacaaaattgtgctggaaaaactggatatccatgtgcaaaagaatgaaatgagaccccatctctcaccatatacaaaagtcaaataaaaattaattaaaaacttaaatctaagacctcaaactatgaaattaccacaataaaacattggagaaactctccaggacatcagtctggacaataatttattgaasagtatcctacaagcacaggcaaccaaagcaaaaatggacaaagggggttacatgaagttttaaagcatctgcacagcaaaggatacaatcaacataatgaagacaaatcccacagaatgggagaaaatatttgcaaactaccc

SEQ ID NO: 120069 - DNA, 554 bp, Homo sapiens
taaataaaataacaaacttacatagtagacctcagccttggttgattattcccaaaacactttactgtattaacttgctgggaaaaaatacatatgtgatacactctacataggtaggaaaactcatgtattaacaatctagacctggattatttcaatacattttttttacttaagaaagaaaccataaagaaaatgtgtataagaaattataaaatgaaaaagagttgtacattcaaatgagggattaaagmaatgctatatgaaaatgaggtatttacatttaaatttctataaaacgtatctactaatgaaaaagaaacatgaaaaagaatgacaatatgagaattgctgaaaacagagcagtttgaacatcaggatttaagcatttcttttgaagcagtcagcactaatatattccttcattcctgatacacaatgatacatgagttaaaatttaattacacccaccacaaaaaataaacaagttcagatataattattctttatctgcaaccccattcagagcatttggtctcagtctgcatttaata

SEQ ID NO: 120070 - DNA, 554 bp, Homo sapiens
taaataaaataacaaacttacatagtagacctcagccttggttgattattcccaaaacactttactgtattaacttgctgggaaaaaatacatatgtgatacactctacataggtaggaaaactcatgtattaacaatctagacctggattatttcaatacattttttttacttaagaaagaaaccataaagaaaatgtgtataagaaattataaaatgaaaaagagttgtacattcaaatgagggattaaagcaatgctatatgaaaatgaggtatttacatttaaatttctataaaacgtatctactaatgaaaaagaaacatgaaaaagaatgacaatatgagaattgctgaaaacagagcartttgaacatcaggatttaagcatttcttttgaagcagtcagcactaatatattccttcattcctgatacacaatgatacatgagttaaaatttaattacacccaccacaaaaaataaacaagttcagatataattattctttatctgcaaccccattcagagcatttggtctcagtctgcatttaata

SEQ ID NO: 120071 - DNA, 549 bp, Homo sapiens
cacaatgatacatgagttaaaatttaattacacccaccacaaaaaataaacaagttcagatataattattctttatctgcaaccccattcagagcatttggtctcagyctgcatttaatatttacagtactcttcaaatagggatatagtcatcaagtgcccattctatgttcaagattttgatgctaagtcaggcaaggtatgaatccctaggtcaggcaatgtaagtggttaaaaaaaaaaatgaaaacagaacttgaattccttcaagctgatttaccccacagaaatatttagaatggaaggaaaaaataccttacatggtgtctggttttgttttatttttatttatttatttattttttgcacttgagactttttgttttgacttgcctttttttaatttattttttgtgtttatacagtttagaaatgaagttcagcctgctgagaactggtgtcccattttcacgtttttggtttattcctccgagttgcttatatcttttaccaaaatctaaataagtaataagtatcatccattcccat

SEQ ID NO: 120072 - DNA, 620 bp, Homo sapiens
agaaagactaaaagacaaacctatcaaaaataatagctacaacaagtttttaagacacagacagtgtaataagatatcaatagaaacaacaaaaagttaaaggcaggggagatgaagttaaagtatagagtttagttagttttctctctaaaggagagttagttttctccttgtttgtttattagtttgtttgtttttgcaatcatagttgtcatgagtttaaaataataggtaatatgttatatgcaagactgatggtaacctcaaatctaaaaacctacaacagatacacaaaaatatataaaacaagaaattaaaatatgctagacaaaatcactttcacaaaaaggaagacaggaaggaagagagaaagagaagaccgcaaaamaactaaaacacacataacaaaatagcagtagtaagtcattagttgtcaataataatagcgaacgtaaatggactaaactctccaatcaaaagagatagagtggctgaatggattaaaaaaaagacacaataaccttttgcctacaagaaacacattttacctataaagacacacatatactgaaaataaagggatgggaaaagatattccatgtaagtggagaccaaaaagg

SEQ ID NO: 120073 - DNA, 600 bp, Homo sapiens
gcttaaacaataaaattattttctcacaaatatggaggctggaaagtgtagccttcagatgcaatatactggcagactagacttctggtgagggctctcttcctggcttgtagatggccaccttctcagtattttctcacacggcctttccttggtgtatgcatgctgagggaaaaagacactctcgctgtttccttccttctctctttctctctctctgtttctgtctccgtcttctccttcttgtaagaccctaaaaatcccactatgagagccccaccttgccaacctaatataatcctaattacctcccaatggccccatcttcatatataawttacaaattggtgtttagagcttcaatatatgaatgggaaggttcacaatatgtacttagcatgaatatgagtatgctccttgctcatagaactggcctgcctcagagtggatccagatcatgttcccttgatttattatctaatgctttgattaggctaatacatccctctttattggttttcctccagcccctcttagtgtgcatgagcttccatcacaccatccatcggagatgtagcatgcattgtggtctacacagat

SEQ ID NO: 120074 - DNA, 582 bp, Homo sapiens
attagtaatttaaattaaaatactgctttgccttttctgttcatatctcttcacactcagagcaaaatcacaatgaaaacaacatacatcaaatatgcaagcataaaacatattccataaaatgctttatggaaatctatattgctaaatatatatactggaggaaaactgaagataataatttgatgagctaaatcactaatcaagaagtttgaaagtgaacaacagaataaaggcaaacgatgcagatgaaaggataataaagataaaagaactagctattggggttcagtgtacactattctggtgatgggtacactaaaatcccagacttcacaattatagaattaatttgtatcgccaaaaaccgcttgtaccactaaaactattgamattttaaaaaacattaaaaaaattgagaatattaagaaaatcaaaagttgtcttttttttcttaaaaacataagaataaaaaatagtaaaatattggcatatgtttaatatgtatgtttggtacatgaatgtcagttcattttttttcatatttttacatttgatatgttttataactgtaatttttaa

SEQ ID NO: 120075 - DNA, 640 bp, Homo sapiens
agatctcagtccaaatagatattcttgaacatatcctttcagaaattgttaaacaggttaaatattctttccttctgtaagtcctctaatactttaatatgtttgttttccattcattcaatcagttgtataaataaacattaattaagcaatggctatttaggcactaatcttggggctaaggaaatacatgtggacaggcaacatctttgaccttgagctattatatcatggttcagagagagtgacaaaaacattaacaggcagcacagagctgtcagtgataggatagaggacatactgcctaatgtgaatataggcataacagaaaaygatgatgatgttaacatgtgtcaaatatttattacatggcaagaactatgctaagtattatccataactaaactcatttattttttatcataaccatataaagtaaatattactatttccatttcttagggtaaaagtaataaagcacagaaaggttgagtagtttgtgcaaagtcacacagctagagtggcaggaatagacaaactttaaagctaaagtgatattgtttggaaataagatactgacgtccagagatagaaaattaaatgcataaaattacattaaaatgaacatttactaatggcc

SEQ ID NO: 120076 - DNA, 582 bp, Homo sapiens
ctattttagatacctcatgtaagtggaattatgcagtatttgtctttctgtaaatggctcatttcacttagcataatgtcctcaaagttcatgtatgttgtctcatatttcagaatttccttttctgaaggctgactagtgttccattgtatgcatacacaacattttctttacccattcttctctctatagacacttaggttatttctgcatattgcctattgtgaatattctttgggatcctgatttttaattcttttggatagatacamagaagtaagattgctggatcacatggtagctctatttttttagaaatattcattttgttttccatagcaaatgcacaatttttcattcccaccaataatgtgcaagggttctgatttctccacaatctagccaacatttgtcatctttttttatgatatccatcctaacaggtataaggtcatttttaattgtggtactgatttgcattttcctgatgattgctgacattgagcattttttcatatatctattggccatttgcatgtcttctttagagaaatgttattcaagtccttagctcattttata

SEQ ID NO: 120077 - DNA, 582 bp, Homo sapiens
ctattttagatacctcatgtaagtggaattatgcagtatttgtctttctgtaaatggctcatttcacttagcataatgtcctcaaagttcatgtatgttgtctcatatttcagaatttccttttctgaaggctgactagtgttccattgtatgcatacacaacattttctttacccattcttctctctatagacacttaggttatttctgcatattgcctattgtgaatattctttgggatcctgatttttaattcttttggatagatacaaagaagtaagattgctggatcacatggtagytctatttttttagaaatattcattttgttttccatagcaaatgcacaatttttcattcccaccaataatgtgcaagggttctgatttctccacaatctagccaacatttgtcatctttttttatgatatccatcctaacaggtataaggtcatttttaattgtggtactgatttgcattttcctgatgattgctgacattgagcattttttcatatatctattggccatttgcatgtcttctttagagaaatgttattcaagtccttagctcattttata

SEQ ID NO: 120078 - DNA, 518 bp, Homo sapiens
tgacttatctgtctatccatccatccaaacactggcttatattttaaatatatatataaacagtagaaccaggccacaaatattaacctaagccttgatttttttcttaattaaaatacacaacttaacagattattttcagtttttagcrttttaaagaattatacaagtgaccatccttaggtaaatggggtagattccagagtggcattgctaagtcaaagaattatacaaattttaacacaaaatcactttctaaaaggaatatgccatcctgttagatgagctggtcttatttatctccttatttatatatttatttattagtgagtttgagcttcttttaacaattttgttctttttctggaaattcactcttcatgttgtcaggctatttttcttttgatttctttgtcttggtcataatactttgcaggagctctttgatactagtgatgttcactttttgcttggtcatatgtattgcaaatattttctctcaggctgtcgtttcattg

SEQ ID NO: 120079 - DNA, 553 bp, Homo sapiens
gacgagatctttgctctccaggagtgccctctgggaacatttccctcgtttcccacagccagggcccctggtgccagcaggaagagaaatggacgccatcagtgctttaagatggcaaatgcaagctttattctaccatcataactccctggatcgatgctgacctcccagccaccctccaaaatgttctcccattgtgtattcaggtgtggtggctggtgagtacccagaccacaaacttacataaaggcyaggaatggattcatttagattaacttatttccaagcaatgaattaattaagaaaaaagcaactgcaggcaatacatgaatacattggacattacttctctgctcatcacttctcctctgctggttcttgaattcaatcattcatataacatttcataagcacatcctctatgccaggttttgtatagtctctggggatacagagttcatcctgagatgttgttaatctcgaaactgtctcaagaaggcttgccttgtgtatttgagaacaattcaaaatactgttgagataaaaatattta

SEQ ID NO: 120080 - DNA, 553 bp, Homo sapiens
gacgagatctttgctctccaggagtgccctctgggaacatttccctcgtttcccacagccagggcccctggtgccagcaggaagagaaatggacgccatcagtgctttaagatggcaaatgcaagctttattctaccatcataactccctggatcgatgctgacctcccagccaccctccaaaatgttctcccattgtgtattcaggtgtggtggctggtgagtacccagaccacaaacttacataaaggccaggaatggattcatttagattaacttatttccaagcaatgaattaattaagaaaaaagcaactgcaggcaatacatgaatacattggacattacttctctgctcatcacttctcctctgctggttcttgaattcaatcattcatataacatttcataagcacatcctctatgccaggttttrtatagtctctggggatacagagttcatcctgagatgttgttaatctcgaaactgtctcaagaaggcttgccttgtgtatttgagaacaattcaaaatactgttgagataaaaatattta

SEQ ID NO: 120081 - DNA, 507 bp, Homo sapiens
tccaaatttgcttcctttatcagaaaagctaacaaaaaagttcagcagcctggcaatcttacaataaactcacaaacctatgtcaagcctttttattttctctagattggttaagaacaaggtgaaaaggtcgtacagtgtcttgagttaartatggacagagtgtacgtggctgagttgctgttaactggagcctggtgttgagcatgttagtggcttggtgacagtcgtggatgattcatctactgagatctccaaagaaaaggggttcagtgtgttgcccaccagacttctctccttagcctccctccagtggtgtagaatttgataagaacagggtgcaaaattagcaattcagaccagagatttagagaagaaaagaaagcacactctcattcaaagttatttgcttctttttcttggcagagctgaaacagaaagagggctgtcaagaaagcatattattgaaggtgggtacttctgcttcaattttatttttggttgtgg

SEQ ID NO: 120082 - DNA, 539 bp, Homo sapiens
tgtgtccctaaaatatgtactactattatatatcagtaaaaaattaaaacacaatatgtatgtatgtgtgtttatatgtgtacatgtgtttgtgtatgtttatatatatgtatgacagtttagaatatataaattaaaaaaaattaaacaggggaaaaatcatcaacaccaccactcagagttaaccattattttttcattatactaggtggcaattaaggtacttgggcctggatagatctatgggccagaactacaaacaaatctaataaagataccatgtgcttccagcacttttgctgtcaatcaaaagaaaacattgagacaaaacaagaatcaacagttcatttgggtaaagaacaattcatgaattgggaagcaccaaattgaaatgagattatggtctccactctagtggcttaagcagcaagcttttataggctgaccacagaagcaaagcaaagaagtyggttggtttattagctacagcgaggtgtttacctgatttggctatggttcaatgggaggtcacagttaac

SEQ ID NO: 120083 - DNA, 490 bp, Homo sapiens
caccaacaccacgaccctccaattctgctgttacactttgatgatttgtagaaatcactgctgatatgcatagaatgtgtgtgttctacggaagttttctaacaaatggtaccataaaaaacttttacatattcaattccaggtagaaaaatttggctccttctaacacttctctattaatttcacattgaacagtaatggcttattcacatkcctgcttccctactaggctgtaaatgtcttgagggcaggggcctgaccttatttatctttgtagatggagcaacctagcacaaaaggtaggtgtcaaggaaagcagatgagtgaagcatcaaataagactctagtataagtaattattgcaaaacagctgttctaacttttaaggcaatttattcactgtgcttaatatcttatcctgacaccacttcgcctctcaactctatttattctaattggaataaaattttaaaacttcaagccaagcgag

SEQ ID NO: 120084 - DNA, 595 bp, Homo sapiens
tgtgcctggagaagttgccagccagccacagccagagacagagtactccgtggggtttgctgagtactgggacttagtggcttatataagttttttacgacccattttaatagagtttgcatcctttgaactacagatggggcaccggctgttaatggggctttctggagcatagacttaggaggagggtccttggggtttatggagctttcctgcrgcacacacatttcatggagactgtattgttttgtttcttctccccatcaactttcctggtcagggcacagggtgtagggcagagtttatctgagtagggtgtatgcatgtatataccgctgtcgtgtgtttaacaggctcagggtaatggctgggttacctaccaccccagggcagtgagcctcagaactacctgaagcctagttaaaaatgcactaattccacctcaccccaccctcctccccatgtttctgattaaggagggcttgggcagtacctgggcctgacaatgtgcgtttctaacaagttcccaggtgatgctgcacctgctgggccaggagccacacttcgacaaccactgtgccagagaagttttatg

SEQ ID NO: 120085 - DNA, 586 bp, Homo sapiens
ttaatgccatttttttctgagcaatttttttctctacctcaatgagtctactcagtgggatttggccaacctgttraatcattgtcttctgacaaaatgtatggcctagccaactagaactacttaaaactgcgtgagcaactatgttgctatgaagaatccaaaccattgcaaaaacctacatgttttggatttggcttttaaaactaccttaatttataggttttgcttcctgggattacatttcttatattgctctgcacctaatgtctatgattgttgtttaatccatttatggagatgaaatgattctaaatccctcttgaatttttttcttgttggcagtaagctcaatatctgttctgccgctcttttctatttgcccctgtacactgcagcaaggataggttaattctggtttcctatagaccccaccccttctgctgttcattaaagacatcatatttgacatctgactttttttcatacctcagaagacatgtgagataaaaaaatcctgttaaattgaaaaggggccatgtgattatttgtcattcaaaacaataataaaaagaatgtgtatagt

SEQ ID NO: 120086 - DNA, 586 bp, Homo sapiens
ttaatgccatttttttctgagcaatttttttctctacctcaatgagtctactcagtgggatttggccaacctgttgaatcattgtcttctgacaaaaygtatggcctagccaactagaactacttaaaactgcgtgagcaactatgttgctatgaagaatccaaaccattgcaaaaacctacatgttttggatttggcttttaaaactaccttaatttataggttttgcttcctgggattacatttcttatattgctctgcacctaatgtctatgattgttgtttaatccatttatggagatgaaatgattctaaatccctcttgaatttttttcttgttggcagtaagctcaatatctgttctgccgctcttttctatttgcccctgtacactgcagcaaggataggttaattctggtttcctatagaccccaccccttctgctgttcattaaagacatcatatttgacatctgactttttttcatacctcagaagacatgtgagataaaaaaatcctgttaaattgaaaaggggccatgtgattatttgtcattcaaaacaataataaaaagaatgtgtatagt

SEQ ID NO: 120087 - DNA, 586 bp, Homo sapiens
ttaatgccatttttttctgagcaatttttttctctacctcaatgagtctactcagtgggatttggccaacctgttgaatcattgtcttctgacaaaatgtatggcctagccaactagaactacttaaaactgcgtgagcractatgttgctatgaagaatccaaaccattgcaaaaacctacatgttttggatttggcttttaaaactaccttaatttataggttttgcttcctgggattacatttcttatattgctctgcacctaatgtctatgattgttgtttaatccatttatggagatgaaatgattctaaatccctcttgaatttttttcttgttggcagtaagctcaatatctgttctgccgctcttttctatttgcccctgtacactgcagcaaggataggttaattctggtttcctatagaccccaccccttctgctgttcattaaagacatcatatttgacatctgactttttttcatacctcagaagacatgtgagataaaaaaatcctgttaaattgaaaaggggccatgtgattatttgtcattcaaaacaataataaaaagaatgtgtatagt

SEQ ID NO: 120088 - DNA, 586 bp, Homo sapiens
ttaatgccatttttttctgagcaatttttttctctacctcaatgagtctactcagtgggatttggccaacctgttgaatcattgtcttctgacaaaatgtatggcctagccaactagaactacttaaaactgcgtgagcaactatgttgctatgaagaatccaaaccattgcaaaaacctacatgttttggatttggcttttaaaactaccttaatttataggttttgcttcctgggattacatttcttatattgctctgcacctaatgtctatgattgttgtttaatccatttatggagatgaaatgattctaaatccctcttgaatttttttcttgttggcagtaagctcaatatctgttctgccgctcttttctatttgcccctgtacactgcagcaaggataggttaattctggtttcctatagaccccaccccttctgctgttcattaaagacatcatatttgacatctgactttttttcatacctcagaagacatrtgagataaaaaaatcctgttaaattgaaaaggggccatgtgattatttgtcattcaaaacaataataaaaagaatgtgtatagt

SEQ ID NO: 120089 - DNA, 601 bp, Homo sapiens
ctacaattttcacaggttatagtttgagagtctggtttaataactatatttcctacaactagcatataagggggctttacgcaactttgtaaaggaactgttagactggaatttaggtcracagtataaaatggcttacgatctcttgtttctaaagtttgatttccagaccaaattctaatgtggtgtgaggccacagtaagcctccataattctggatgttcaggaccagaaacaggacttattatttttggtcttggggtagagattcctttttctccccattcccaagggtagaaagactgcaattttttatgcttatgtttgtctaaactttctgttaagtcgctatcaacagctggactcacttgtgcacttggacacgactgagtttgtcctgagcaattgtggtagaattgacctcgaggtacccaatctataatagttccgaattcattgttttgtaatatcaccgcactattggccacacattcttcccaaactaaaacttctgtattttttgattctttgggaatttccttggggcaaggtttccctttaggtctaaattttaatgatctttgataagaaaagtcttata

SEQ ID NO: 120090 - DNA, 641 bp, Homo sapiens
gcagcgatcatctgtggggccaggtacccrtacactatcattaacatatacttctataggattatccatccatgtgactggtgttaccatctccgtggaggcccttttctttgcatctccgatgggttcattgtagaacttcaaatgtctagtgggtatccaaacaggaagctgattttctcctggtgaaacacaagcaaaacctctcccccacgttatcaccttccctatttcccatgtcttatttttattatctttccaccaaattagttttccttcatgtgggctgttctttttaccagtaagatgttgttctgcagaagtagtagtctgatttctataaatgtttaaaaaatttaaagtatagagtgctagattaagttgcatctgaggagtggtacactccttactgtctcccccttctttttgtttaactaattgagttttgagtgttctattagttctttcaactatggcctgtccttgggaattataaggaattcctgttgtatgtgaaattttccactgacttaagaatttttggaaagctttactacaatatcctggtccattgtcagttttgattttttctggaactcccattacagcaaaacaagacaataaatgttttttaacatggg

SEQ ID NO: 120091 - DNA, 641 bp, Homo sapiens
gcagcgatcatctgtggggccaggtacccatacactatcattaacatatacttctataggattatccatccatgtgactggtgttaccatctcygtggaggcccttttctttgcatctccgatgggttcattgtagaacttcaaatgtctagtgggtatccaaacaggaagctgattttctcctggtgaaacacaagcaaaacctctcccccacgttatcaccttccctatttcccatgtcttatttttattatctttccaccaaattagttttccttcatgtgggctgttctttttaccagtaagatgttgttctgcagaagtagtagtctgatttctataaatgtttaaaaaatttaaagtatagagtgctagattaagttgcatctgaggagtggtacactccttactgtctcccccttctttttgtttaactaattgagttttgagtgttctattagttctttcaactatggcctgtccttgggaattataaggaattcctgttgtatgtgaaattttccactgacttaagaatttttggaaagctttactacaatatcctggtccattgtcagttttgattttttctggaactcccattacagcaaaacaagacaataaatgttttttaacatggg

SEQ ID NO: 120092 - DNA, 641 bp, Homo sapiens
gcagcgatcatctgtggggccaggtacccatacactatcattaacatatacttctataggattatccatccatgtgactggtgttaccatctccgtggaggcccttttctttgcatctccgatgggttcattgtagaacttcaaatgtctagtgggtatccaaacaggaagctgattttctcctggtgaaacacaagcaaaacctctcccccacgttatcaccttccctatttcccatgtcttatttttattatctttccaccaaattagttttccttcatgtgggctgttctttttaccagtaagatgttgttctgcagaagtagtagtctgatttctataaatgtttaaaaaatttaaagtatagagtgctagattaagttgcatctgaggagtggtacactccttactgtctcccccttctttttgtttaactaattgagttttgagtgttctattagttctttcaactatggcctgtccttgggaattataaggaattcctgttgtatgtgaaattttccactgacttaagaatttttggaaagctttactacaatatcctggtccattgtcagttttgattttttctggaactcccatkacagcaaaacaagacaataaatgttttttaacatggg

SEQ ID NO: 120093 - DNA, 575 bp, Homo sapiens
aggcagaatctgatataatattgataggttggtcaaaatcttgtaacactgtaatgactgcaaccaactctgctctttgagcmgattgatatggagttttgattactcgttctttcggccctgtgtaagctgcttttccattgctggaaccatcagtaaatactgttagagcattttctaaaggttcacgtctggtaattttaggtagaatccaagtagtcatttttaagaactggaagatctttgtttttgggtaatgattatcaataattcccacaaaattagcaagaccaatctgccatgcaccagaattgataaaggcttgtctaacttgttccttggttaaagggacaactattttgtctgggtcatttccacataattttattattcgtaatcttgtctgaccgattaatgtagctatttgatccaagtacaatgtaaaagtcttaactgtactgtgaggaaggaatgaccactccacaagatcagtattttgaataatgatgcctgttggagaatgtgcagtggcaaaaatcaaaagttggagtggggctaagggatctattctattt

SEQ ID NO: 120094 - DNA, 575 bp, Homo sapiens
aggcagaatctgatataatattgataggttggtcaaaatcttgtaacactgtaatgactgcaaccaactctgctctttgagcagattgatatggagttttgattactcgttctttcggccctgtgtaagctgcttttccattgctggaaccatcagtaaatactgttagagcattttctaaaggttcacgtctggtaattttaggtagaatccaagtagtcawttttaagaactggaagatctttgtttttgggtaatgattatcaataattcccacaaaattagcaagaccaatctgccatgcaccagaattgataaaggcttgtctaacttgttccttggttaaagggacaactattttgtctgggtcatttccacataattttattattcgtaatcttgtctgaccgattaatgtagctatttgatccaagtacaatgtaaaagtcttaactgtactgtgaggaaggaatgaccactccacaagatcagtattttgaataatgatgcctgttggagaatgtgcagtggcaaaaatcaaaagttggagtggggctaagggatctattctattt

SEQ ID NO: 120095 - DNA, 575 bp, Homo sapiens
aggcagaatctgatataatattgataggttggtcaaaatcttgtaacactgtaatgactgcaaccaactctgctctttgagcagattgatatggagttttgattactcgttctttcggccctgtgtaagctgcttttccattgctggaaccatcagtaaatactgttagagcattttctaaaggttcacgtctggtaattttaggtagaatccaagtagtcatttttaagaactggaagatctttgtttttgggtaatgattatcaataattcccacaaaattagcaagaccaatctgccatgcaccagaattgataaaggcttgtctaacttgttccttggttaaagggacaactattttgtctkggtcatttccacataattttattattcgtaatcttgtctgaccgattaatgtagctatttgatccaagtacaatgtaaaagtcttaactgtactgtgaggaaggaatgaccactccacaagatcagtattttgaataatgatgcctgttggagaatgtgcagtggcaaaaatcaaaagttggagtggggctaagggatctattctattt

SEQ ID NO: 120096 - DNA, 575 bp, Homo sapiens
aggcagaatctgatataatattgataggttggtcaaaatcttgtaacactgtaatgactgcaaccaactctgctctttgagcagattgatatggagttttgattactcgttctttcggccctgtgtaagctgcttttccattgctggaaccatcagtaaatactgttagagcattttctaaaggttcacgtctggtaattttaggtagaatccaagtagtcatttttaagaactggaagatctttgtttttgggtaatgattatcaataattcccacaaaattagcaagaccaatctgccatgcaccagaattgataaaggcttgtctaacttgttccttggttaaagggacaactattttgtctgggtcatttccacataattttattattcgtaatcttgtctgaccgattaatgtagctatttgatccaagtacaatgtaaaagtcttaactgtactgtgaggaaggaatgaccactccacaagatcagtattttgaataatgatgcctgttggagaatgtgcagtggcaaaaatcaaaagytggagtggggctaagggatctattctattt

SEQ ID NO: 120097 - DNA, 599 bp, Homo sapiens
tgaatgtccctgcctcgaacaatcctagcacatgttaaatgagtgaataatcaacatttgaaaaatatagaataaagccaggtaaccttgtatatgtacatgtatcactcatagaaataaactaaaagttcatattcactagttaactttgcaagataacatttacctcaattattatcagtctgtaatgtatatccaaactttgaatgaaggatgaaaatgctctttagaagaatgccaaattaagaattatctgtagatttcagtttttctgccaacartgcttaaaactaattataatttatgtgtaagcaaatgcttaaaattccgagtttacacattctgtggaagttctatatcatagctatcaaaatcattaaaacatcttcaaaactaattagcatataatgtagacttaccaaaaaaaagtaacttattaaaaaattttctacttaaatttaattataatgatcttgatttgttgctgaaaccagtattgggaaactaccttgttacgatttctagtggaacccctggctattttaaccagtgcttcgcaaactttaatacgcatgtcaattacctcagttcttgttaaa

SEQ ID NO: 120098 - DNA, 565 bp, Homo sapiens
aagcaaatggggcaagatgtaaataattggtgaatctggaaaaaagtattattggaattccttatgcaattcatgcagctttttcataagtttgaaattatatcaccatacaaagttatccccaaagagcatccttgaaaataaatgatgctgccagagaacactatgctgcttgataaatgcttatagggcagatagggaaatgctgtggtcaggcaagcaayctaggatttcactggtgatcaaagatatgtgtcagttctgtacagattctgaaatgacattagctcagaatctagggactttaaaacaggaagaaaccgtggcactgccctagcccacggtcctccttttacagataaggaaatgagattcaggtgtgaagtccaagcttctttgaggaaggtccaagtcttttgattctcagtcttcaccccttatgccttcgttcttcactcattcatcatgctgccttctcaagaacattatggtgtccctagcagccttgccacagtctccttctcttcctccttctctttaagccaccctgaaactctggcccata

SEQ ID NO: 120099 - DNA, 502 bp, Homo sapiens
tttctaaaagcttgtaccggttacatgctggtgcaagtatccctgacagacactccccaaatcggtgcttaaatttctcatgcttcatgtcgtcaccagtatttgaaactgtcaaacattaaaaattttagccagggtatgctgggcatggtggctcacacctgtgatcccagcactttgggaggtgtaggtgaccctaggcctaggtgggctggaagttcaagaccagcatggccaacataatgaaaccccatctctrctaaaaataccaaaacaaattagccaggcatggtgctgcacatctgtaatcccagctacttaacaggctgagtcaccagaataacttgaacctggtaggtggaggttgcagtgaaccaggactgtgccactgcactctagcctgggcaatagagtgagattctgtctcaaaaaaaaaaaaaaaaaatcaatcaatcaatcaataataaaaataaaaaatcccagcactttgggaggcctaggt

SEQ ID NO: 120100 - DNA, 621 bp, Homo sapiens
tctgtaagtatatgtgaaacctaacattggaagtagatctagaagaggggttcaggctggtgtggggtgataaagtggtccaagtactggagggagtgctttggcctggcctttacctcttccccaccgtccccacgcagagatgacactgcccatgacccatgactgtaactcctctgcagttaggacaatgatgaccaaagagaagagtgacttttctatttcttgtccctttccactttgactcaaacacataatgttggaatgctgtaggtgtggagttatctctgctctgatttttctccatgcctatcttgacattgtctcataaacttatttgcaaagactggaacactttttaaaatccatgcaaaatgkcctacctaaatatcagctgttattaaatgctctgtaagcataggacaatttgtccagctgttggaactcttgaggatggatgatgctacatagagcctttcccttctcagccactgattcaaattcagtatatcccagttgatgtaagacttggctgtctactgcacctgcttttggggttgagtcaagtgaatttactaccaatgaatgttcagagtccacacccttatttgcagtatcata

SEQ ID NO: 120101 - DNA, 567 bp, Homo sapiens
tagggcataaagggaccagaaaatggatgcatggaggtgactgtttggccattccagtgcccccctggctttctcaaatctgagggctcttatagtacaagactgtcaaattcagttatttagtaattatcaaaatgtcatattcttatggtggactggtgaatattatttacatgaaaaagatgaattatgaatgccatgtccttatgtcaaagaaagcagtaaattattagtggaagaaacttacaygaatgaatttttgccttttgaaaaaaagacagacactttgctatactaacttttttaataatcaaaatctaaaaaattagtactaatacagaagttattagaaatcctggtgtaaaaaagtcacatatggtattaactatatgtcctcctttatcaacttattataaaaattaggttagattttaaaaattataattaatataacagttctccaagctctcatggcactttataattggaatttcagttacctttgcagaaatgccttacactacttttctttgtgcacccgtactacagctgttttctattactggg

SEQ ID NO: 120102 - DNA, 660 bp, Homo sapiens
ctctgctacttggatcagtgagattaagagcactacacttttcaaatcacatttccttaaattcattctttaaggaaaacaccaattagcatcctattatagacaattttttgaaatctgcacaccaattaacatcctctccactcaatttaaatctacaatttttaaaaataaaaccacagtgaaaatctgggaggtaatacatttctctttttctccaatgtagtaataaattatgctggaaaaaccctacacacatatttttattttctaagtcatttaggtagaaacagagagtagcatcctagtccaatgacattgaatatattaattacaaaggactgaagatttcaagaaaataattagaattaacccactgatttatttctatattttgggaaagcttagtcatttcctttgtatcagaaaaatattcatcaattaccaatgatcrtcaaaactaaaatgtccctgagaaaaacaccaagcaataagctttttagggacaaaaaaaatgtgtctgatttgtctttgtatctcccatacctagagcaatgcctgatcacatatgtttgataagagtaagaatgaacagttgagtatgtgcataaagtgaataaccttttccttatttctccatcacttttcaaagccagttag

SEQ ID NO: 120103 - DNA, 597 bp, Homo sapiens
acctctcagttttgaacattgacataacctcttgtacttcgcattcaatggaacaactctctttgcattctttgctcattcattcaactctctatgaggaacttcacaggaaaacaaacatataaacatataaaaaaggataagcagttgttctgagtttagatattcctgataatctatttttggagaattgagaaaatagaaccagaaaataaaagctccaagagaaagttcatttacatgaacatgtcccaatatcaggcactgtctcttgtacgtaaatgtggtaagccatggccccaytacttaggtcaatccttctggcgtgggtaagctagtgaatagcttcctgtgagcgtcataacatcagtggacagtgactggcaagagcctatctagtagacaccatataacgtttgagtgctacagcatgatgatatttaatgggcaataagaaattctcctcggaacatgaatgttagatccaggtgatatcacctgataaaggcagttttgtaattaagtttagagtgatgtgtttcctggtaaaagtctggtaagggtaactattaataaaagaatctcacactagacaga

SEQ ID NO: 120104 - DNA, 597 bp, Homo sapiens
acctctcagttttgaacattgacataacctcttgtacttcgcattcaatggaacaactctctttgcattctttgctcattcattcaactctctatgaggaacttcacaggaaaacaaacatataaacatataaaaaaggataagcagttgttctgagtttagatattcctgataatctatttttggagaattgagaaaatagaaccagaaaataaaagctccaagagaaagttcatttacatgaacatgtcccaatatcaggcactgtctcttgtacgtaaatgtggtaagccatggccccattacttaggtcaatccttctggcgtgggtaagctagtgaatagcttcctgtgagcrtcataacatcagtggacagtgactggcaagagcctatctagtagacaccatataacgtttgagtgctacagcatgatgatatttaatgggcaataagaaattctcctcggaacatgaatgttagatccaggtgatatcacctgataaaggcagttttgtaattaagtttagagtgatgtgtttcctggtaaaagtctggtaagggtaactattaataaaagaatctcacactagacaga

SEQ ID NO: 120105 - DNA, 554 bp, Homo sapiens
gtatattacatttaaatatttattttacctaattaagttgtatgcttttttatattatttaagtgcattatgtaactgaagccaaaaatatttcaacaattttatcaaaatgcattttaaacaaatagactgagtcttcctaataaagtcaatctcatgatgagtgaattcacttcagaaaacattatttaggtaaaattacattgasggagggatgaacttaaggacataatgaaaagtacctcaagacatttgccgtcagttttcttcggtattttcttctgtatttggataagacttagaatatcagcaagactctttacctaaatccattggttcagaaatgtacagatcatgagtgctgtaagattgtatatgaaaccagattttattttcctattgaattatcaccattagaccatttaactgttctaatttattcactggtttgaacccaaagcaaagtctacctcttaaggaaaataaaacagcaaacagtacattctgagataaatcaaatttattggatagtttagtgagaactttttcataaa

SEQ ID NO: 120106 - DNA, 562 bp, Homo sapiens
gggtccaccctaatccagtatgaccttgtcttaacttgattacacctacaaagactctatttccaaataaggtcacattcataggtacctagggttaggatgtcaacatatcattttttggggtatagtttattccatgtctataaactagaaaaacataatacacacttacttgtatctggatatayttaccatagaagcataaaatagcatgtaagtatcagatatttctattaagtcaaaaatagattttgataattaatattctcattgagctaggcctgtgcagtaatcataaatgtactacaggtgccatagatgacagcacaaaccaaaattatttcttcagctattgcaaacaccaagcacgaatagtatgaattacttaacatttgttgaattgttatttctaaaactacattgtcttctctaatttaaaaatagctatatcgtagcataaaatttattataatttttaagaagtcaatttttatatagatgactttccttgaagtgtggtttaaaacttatggcttcgattatcactacataattttatttg

SEQ ID NO: 120107 - DNA, 562 bp, Homo sapiens
gggtccaccctaatccagtatgaccttgtcttaacttgattacacctacaaagactctatttccaaataaggtcacattcataggtacctagggttaggatgtcaacatatcattttttggggtatagtttattccatgtctataaactagaaaaacataatacacacttacttgtatctggatatacttaccatagaagcataaaatagcatgtaagtatcagatatttctattaagtcaaaaatagattttgataattaatattctcattgagctaggcctgtgcagtaatcataaatgtactacaggtgccatagatgacagcacaaaccaaaattatttcttcagctattgcaaacaccaagcacgaatagtrtgaattacttaacatttgttgaattgttatttctaaaactacattgtcttctctaatttaaaaatagctatatcgtagcataaaatttattataatttttaagaagtcaatttttatatagatgactttccttgaagtgtggtttaaaacttatggcttcgattatcactacataattttatttg

SEQ ID NO: 120108 - DNA, 605 bp, Homo sapiens
agcgaggtctggtataaagaaagggactttttattccaaagctagctgagggaagaagcaagggtttcctgctttaagggcactgctttgattctggagcagaaagkgggcacttttaaaggggtcttatcatgaatatacacaggggaggaagtgagcaggtggaaggtccacattctagctttttgccttatctaccacgcagttgagttggcattttcatgggcagaaatgaggtagaggtggctgaaaactctccagatgggagagagtttttttttttttttttatagcaagactttgagttgtaatgttgtctctcaaggcagtctcctggtgagtgagagttttatagtgggcatactttgggttgtaaattgactgttatctcttgaggcaatctcctggtgggtgagagttctgctctggagcttctaagctcataattaggtgaacttgtcctataagaagtgtctggtgaaggggaggttaaaggttataattgtatttctaaaggaataagtaggaagtggagaacaggaggaattggaaaaaagaagagaaaataacaatggttcttcttttttaaaacatagtaattcatt

SEQ ID NO: 120109 - DNA, 605 bp, Homo sapiens
agcgaggtctggtataaagaaagggactttttattccaaagctagctgagggaagaagcaagggtttcctgctttaagggcactgctttgattctggagcagaaagtgggcacttttaaaggggtcttatcatgaatatacacaggggaggaagtgagcaggtggaaggtccacatkctagctttttgccttatctaccacgcagttgagttggcattttcatgggcagaaatgaggtagaggtggctgaaaactctccagatgggagagagtttttttttttttttttatagcaagactttgagttgtaatgttgtctctcaaggcagtctcctggtgagtgagagttttatagtgggcatactttgggttgtaaattgactgttatctcttgaggcaatctcctggtgggtgagagttctgctctggagcttctaagctcataattaggtgaacttgtcctataagaagtgtctggtgaaggggaggttaaaggttataattgtatttctaaaggaataagtaggaagtggagaacaggaggaattggaaaaaagaagagaaaataacaatggttcttcttttttaaaacatagtaattcatt

SEQ ID NO: 120110 - DNA, 596 bp, Homo sapiens
ggctttaatcaacaccgcagccaaagggattttgtgaaaatatacatcagaatgagacatgcctctgtgtacaaccccacgacagtttcccctttcactgtacaagccactgtgtacaagccacaatctttataatggcctaggatttccatgaccttgctgactttctttgctttcactctcttcttttccccttcatttgagttacagtgacctccttaccacttctcaaacatactaggcttctctcactttaggaatcttgcayttgctgtcctcaaggcctggaatactcttctctttaataatcacatgctttactccctgagcaccttcagatctttattcaaaaatcacttcccttagacctttcttagcctatcttctataaaactgtgctccctgacacttcctattctacttctcattagaaagtatttcggcctaacatataatacgcacaccccattatcatcatcatgatcatcatatagatatgatcttatactacattaatttatttacttatcttgctagaacataagatccagaaggtcagaatttttatctgatttgctcaatgttctatttccata

SEQ ID NO: 120111 - DNA, 596 bp, Homo sapiens
ggctttaatcaacaccgcagccaaagggattttgtgaaaatatacatcagaatgagacatgcctctgtgtacaaccccacgacagtttcccctttcactgtacaagccactgtgtacaagccacaatctttataatggcctaggatttccatgaccttgctgactttctttgctttcactctcttcttttccccttcatttgagttacagtgacctccttaccacttctcaaacatactaggcttctctcactttaggaatcttgcatttkctgtcctcaaggcctggaatactcttctctttaataatcacatgctttactccctgagcaccttcagatctttattcaaaaatcacttcccttagacctttcttagcctatcttctataaaactgtgctccctgacacttcctattctacttctcattagaaagtatttcggcctaacatataatacgcacaccccattatcatcatcatgatcatcatatagatatgatcttatactacattaatttatttacttatcttgctagaacataagatccagaaggtcagaatttttatctgatttgctcaatgttctatttccata

SEQ ID NO: 120112 - DNA, 595 bp, Homo sapiens
tgttaaggacagaaacagttcctcctgttctctccctcaccacacattttcagtggtcctaactaagccccaagcctgcaggggttgtgtctatctttcccacattgttttttctcatatctgtgagaatacttcatacagagtaggtaattagtaatttttataaaratgatttcactaggaccccaacaatggacattgccaagagatagcatttcacttaatataagttatagaacttccttgcactctgaccatcattggaataaactacctcataagtgtggaaattcccttcattaacagtatataaacagtatgtggttgagtgtattagtctattcttgcattactatcaggaaatacctgagactgggtaatttataaagaaaagaggtttaattggttcacggtaccacagcctgtacagaaagcatgacgctggcatctgctcagcttctggggaggtctcagaagttacaatcatggcagaaagcagaggggaagcagccacattttacacggctaaagcaggataaagggtgagagagggaggtgctacatgcttttaaaccaccagatctcaggagaactc

SEQ ID NO: 120113 - DNA, 595 bp, Homo sapiens
tgttaaggacagaaacagttcctcctgttctctccctcaccacacattttcagtggtcctaactaagccccaagcctgcaggggttgtgtctatctttcccacattgttttttctcatatctgtgagaatacttcatacagagtaggtaattagtaatttttataaagatgatttcactaggaccccaacaatggacattgccaagagatagcatttcacttaatataagttatagaacttccttgcactctgaccatcattggaataaactacctcataagtgtggaaattcccttcattaacagtatataaacartatgtggttgagtgtattagtctattcttgcattactatcaggaaatacctgagactgggtaatttataaagaaaagaggtttaattggttcacggtaccacagcctgtacagaaagcatgacgctggcatctgctcagcttctggggaggtctcagaagttacaatcatggcagaaagcagaggggaagcagccacattttacacggctaaagcaggataaagggtgagagagggaggtgctacatgcttttaaaccaccagatctcaggagaactc

SEQ ID NO: 120114 - DNA, 595 bp, Homo sapiens
tgttaaggacagaaacagttcctcctgttctctccctcaccacacattttcagtggtcctaactaagccccaagcctgcaggggttgtgtctatctttcccacattgttttttctcatatctgtgagaatacttcatacagagtaggtaattagtaatttttataaagatgatttcactaggaccccaacaatggacattgccaagagatagcatttcacttaatataagttatagaacttccttgcactctgaccatcattggaataaactacctcataagtgtggaaattcccttcattaacagtatataaacagtatgtggttgagtgtattagtctattcttgcattrctatcaggaaatacctgagactgggtaatttataaagaaaagaggtttaattggttcacggtaccacagcctgtacagaaagcatgacgctggcatctgctcagcttctggggaggtctcagaagttacaatcatggcagaaagcagaggggaagcagccacattttacacggctaaagcaggataaagggtgagagagggaggtgctacatgcttttaaaccaccagatctcaggagaactc

SEQ ID NO: 120115 - DNA, 557 bp, Homo sapiens
tagaaaagaaacaaatatgactggtattcatatataacctacctcttcagggcccatagtgaaaatggcaagtttttgaaaactggaaaactacaggaaactgcccacctaacataaaaccaagtgcaaggagacaaggrtagtagaggagataaatatgataagaagacaagaatgctattacttatttagtaataaatataaaactaaacattttctctctatgctggtaatgaaacttgttcttactagactttagatgacaacataagctctaatatttcacaataaaaatgtgtattcctcattgcaactatttaaataaccttcccaatttggtgcagtagctaatatctttaagtgggttctagtactgaacttttataataaccaaccactgtctcttgttctctctgtctctctctctctctctctctctctctcgtgtgtgtgtgtgtgtgtgtatgtgtgtgtatttctgtgtgtattttatccagtctaagtgaaatcacttggttgacttttattttcttggttatttagtgtctctttgtatt

SEQ ID NO: 120116 - DNA, 557 bp, Homo sapiens
tagaaaagaaacaaatatgactggtattcatatataacctacctcttcagggcccatagtgaaaatggcaagtttttgaaaactggaaaactacaggaaactgcccacctaacataaaaccaagtgcaaggagacaaggatagtagaggagataaatatgataagaagacaagaatgctattacttatttagtaataaatataaaactaaacattttctctctatgctggtaatgaaacttgttcttactagactttagatgacaacataagctctaatatttcacaataaaaatgtgtattcctcattgcarctatttaaataaccttcccaatttggtgcagtagctaatatctttaagtgggttctagtactgaacttttataataaccaaccactgtctcttgttctctctgtctctctctctctctctctctctctctcgtgtgtgtgtgtgtgtgtgtatgtgtgtgtatttctgtgtgtattttatccagtctaagtgaaatcacttggttgacttttattttcttggttatttagtgtctctttgtatt

SEQ ID NO: 120117 - DNA, 619 bp, Homo sapiens
cactaggtatgtagaggccttactctcgattaaaatgcttaaattaaaagattcagcttcattaaggtctttggcaactaaattgttcatttgtttgtgattggaatacgcctgtaatatttctgaggaaatcttggccagatgggttttgactgaaagtctttaatgtcaaccccagagtctatccacttgatgttacttttcatcaataacgtagaatattggcttccattcttagaaaatattattactgaactcataactgctcagtattttgaatagtttttataatgaatattaaagaagaactgtttgaagaatatgcaatttattaattattccaggctcttagttctgattcaatcatttttcttacctgatacacccaagggataaaacattctttaataactttttactatagttacttagaaggaggaacactacctaaaaaggacatatgtaaatattgggtgcatgtatagttcctgcaaatgacactgatgcttcttcttcttctttcttctttcttcrtctgtcttccttttttaatgtaatttgtataaatttaagtgtagttttgttacctgggtatgttgtgtagtggtgaagtctgggc

SEQ ID NO: 120118 - DNA, 590 bp, Homo sapiens
taaccattttaagtttacaaatttactgttgaatcattttgctacaaaaataacttgggaaagtttatatataygtttacatggaacatgaatagaacatggaaaaagtgtgggaacaagtatgggtttaatacagttcatgcagaaattttgatctaaaattgctaatgaagaatagcagagaggcaaaagctagttttaaaagcgtaggattaggaagaaggagaatcctgacatggaatccctgctccttcatattctaaaggactgatccaggaaaagtcactaaactctctaaacttccatatccctctgctaaaatgtagctaacatttctacctgataaaattattataagaataaaaggaaggagagagacaggcagtgcaaaaggttgttatttaaaaccatgactacagcagcttctacttccttagggagtggtgtcatttctctctggagaaaataaccttctgaatagcaaaacacaatgagggacatttggctctgacaatatagttctcaaggcatgattaaaaagagaatctatgaaatagaggattaaattgtcctacacaataaattataat

SEQ ID NO: 120119 - DNA, 590 bp, Homo sapiens
taaccattttaagtttacaaatttactgttgaatcattttgctacaaaaataacttgggaaagtttatatatatrtttacatggaacatgaatagaacatggaaaaagtgtgggaacaagtatgggtttaatacagttcatgcagaaattttgatctaaaattgctaatgaagaatagcagagaggcaaaagctagttttaaaagcgtaggattaggaagaaggagaatcctgacatggaatccctgctccttcatattctaaaggactgatccaggaaaagtcactaaactctctaaacttccatatccctctgctaaaatgtagctaacatttctacctgataaaattattataagaataaaaggaaggagagagacaggcagtgcaaaaggttgttatttaaaaccatgactacagcagcttctacttccttagggagtggtgtcatttctctctggagaaaataaccttctgaatagcaaaacacaatgagggacatttggctctgacaatatagttctcaaggcatgattaaaaagagaatctatgaaatagaggattaaattgtcctacacaataaattataat

SEQ ID NO: 120120 - DNA, 433 bp, Homo sapiens
ggttgttttagtacccaatttgatatttttaacattcttaccatatytgagtctggttttagtgcttgttctatctttcaaactaagtatttcgtttgtagtatgtcttgtaatttttttcttcatagccagacatgatgtattgggtaaaaggaactgccagaaataagtctttagtatgtgacagtgaggcgtgggggagggaaagtgttctatattcctttgatcaggccttagtcttttagtaagcctgtacattggattgtgaatttcacaagtgtttctcaatatccttcctgccccagtgggacaagatggctagattgggctggagctcagtattttccttactccccatagaaggctagagcagctggagtgagagatttccctttctccaggtaacttaagctctgagaaaaccccagcaggt

SEQ ID NO: 120121 - DNA, 546 bp, Homo sapiens
ataaactttttctgctataacttctgtatcttaccacgccagaaagagtgtagattcttcccagaattgaaacatgtcaaaaatccatcccattattttcttagcctcagtgagtcccaggaaaacagagaggtagatgggagttggagaatacactgcaagtgaaaagaaagtattgggaggctggagtagaaggtacacttgagagtcaagaaaagaaagagtcaatgtagacctagcaaagagttccctctttaaaaagtttctgctttcaaagaaagggatctgatgtttggtcacattcttagtgtctggtactatgcatgatrcatcttagacactcagcaaataactttgaattaactatttaggtaaaaataacaaaatagatgtagactacatttccgttcagtacagacatggacactgagctcacatccattttttttttctacctctgtatccttaatttatcatggaacaggtcatttggagaatctgggggaaaaaaaggtataaaattcttcccccaaaacgcagctacaa

SEQ ID NO: 120122 - DNA, 560 bp, Homo sapiens
tagagaaaatgtggtacatatacaccatggaatactatgcagctgtaaaaaagaatgagatcatgtcctttgcagggacatggatgaagctggaagccatcatctcagcaaactaacacaggaacagaaaaccaaacaccacatgttctcacttataagtgggagttgaacgatgagaacacatggacacagggagggaaaaaacacatgttggggcctgttgggaggtggcagatgaggggaggaaacctggatgacaggttaatatgtgcagcaaaccaccatggcacatgtgtacttatgcaacaaacctgaatgttctgcacatgtatcccggaacttaaagtaaaaagaaaaaataagtctcaaaataaaaaaatacatttttttttcttaaaaaagggcaaaacatcttttagctggcacagggaaaggacgatagtgttccaatctgaatgggttccrtgtagacaaaaacaaaatgtccttagagtcttaaatgtcacagtcacctttcctgagtttgagattccaatgtaaacaaactgtgtggtctggaa

SEQ ID NO: 120123 - DNA, 595 bp, Homo sapiens
acttctctctttttaacttggattttaaatcaaatgaagaaacttgggactccctctgtacttaaaagacggaaataggaaacttgtgaaccaaaataataaaccttgctttatctacaagccacacatgccaatggagtctcagatgaatcccggagatcacaatactttcagttgctgtgctatgatgtgtcctcggaggtacatcattatcacctggggcccagctggggattgcttattaacactttcctgagaaacctcagctcatgtggctgtctcattcacagatcatgaggagtgattgggaaccatgtaacctggacattgtgttcaagaaactgtatcatcatcactatcatacaaatattcacacactaggaattgcacagcccactttcagaaacagggacacaccatgctcccttaatctggaacaagaaatwgcaagatctctgctctaggccttcacctcctcagagaatatgggtttagaaatgagaagctgctgaatttgaatacctttattttctactattattcagggtctctggtagtaaacaaagaagttttgaatctatactatgcataaccc

SEQ ID NO: 120124 - DNA, 642 bp, Homo sapiens
gttaagaattaaaggacacttagttgctgggtgtagcaactaagagactttttacattcgtgatgaaaagcagcccacactttatcaaacgactatgtttgaaaatagggatccattgcacatatataatataaccacagtaaattaaagagctttaagtttaccactagggtagagtaagattctccacacagaattctaaaccatattccattaaacaattaggaacaaggtttctgcagttacattgtctgcctttaaaatttggctctgttacttacaggtttgtataacctatctgggtataaactacctcatctatacatggacaatagtttctattaaattagagttgctgaggaaattatacaaggcaacacatatgaagagctttggatgtacctagcatatccaccataaataatactgtgtttattgttgttttcrcaaaggagtctacagattcacaacgtgaccgatcatcatcatttgaaaaaaaacactttcggggactcatttgctacagaattttgtttttcaataatgacaggtcaggggatggtggactaagaagacaattgcattccaatatcctactcaaataaaagcacatcagtaccaaaaataacaagtaacagaaaa

SEQ ID NO: 120125 - DNA, 369 bp, Homo sapiens
tgtagtcccaactattctgggagggtgaggtgggaagatcacttcattctgggaggcgtaggttgtagtgagcctagagggtgccactgcactccagcctgggagacagagtaagactctgtctcaaaaaaaaaaaaaaaaaaaagtacagaatttcactttaacattgattgacaattgttacaataaaaagctctacgtttttgttttttcgtagatataaaatgatatttcaaagttgttttcgctcrcattcctttcattactgtcaagaatgaacgtttttccatgtatttatttactaattatatttcctcttggatagaagagatatttttcttaaactatgaaaaagcatgtctgaacaag

SEQ ID NO: 120126 - DNA, 556 bp, Homo sapiens
tgttgggattacaggcatgagccaccatgcccagcctatcatatttcttttttttttttttttttccttttgagagagagtctcagtctgtcgttaggctgagtgcagtggcgtgatctyagctcactgcaacctctgcctcctgggttaaagtgagtctcctgcctcagcctcccaagtagctgagactacaggcgcgtgccaacatgcccagctaatttttatatttttagtagagacaggatttcaccatgttggccaggatggtcttgatctcttaaccttgtgatccgcccaccttggcctcccaaagtgctgggattacaggcttaagccatcgcacccagtcttcctatttctttatcaaatgaagaaatatgtttgaatgtagtatgtgaactataagctattaaacagatgtatgatattataagcagtggtttataaatttggatttatttattctttgtgctaatattttcaagcaattttaaattaaaaatctatcttgttttttaattatcatattatattaattgtttagtgggcaaataat

SEQ ID NO: 120127 - DNA, 556 bp, Homo sapiens
tgttgggattacaggcatgagccaccatgcccagcctatcatatttcttttttttttttttttttccttttgagagagagtctcagtctgtcgttaggctgagtgcagtggcgtgatcttagctcactgcaacctctgcctcctgggttaaagtgagtctcctgcctcagcctcccaagtagctgagactacaggcgcgtgccaacatgcccagctaatttttatatttttagtagagacaggatttcaccatgttggccaggatggtcttgatctcttaaccttgtgatccgcccaccttggcctcccaaagtgctgggattacaggcttaagccatcgcacccagtcttcctatttctttatcaaatgaagaaatatrtttgaatgtagtatgtgaactataagctattaaacagatgtatgatattataagcagtggtttataaatttggatttatttattctttgtgctaatattttcaagcaattttaaattaaaaatctatcttgttttttaattatcatattatattaattgtttagtgggcaaataat

SEQ ID NO: 120128 - DNA, 583 bp, Homo sapiens
catttctcacaagcattgattttctgagatatataccactatgtaattgctggttcaaatcttcaactatatactcttttgcagtacacaaatgcctgttttcaccagcagtatgcatcgttcaacatgtagcagtataagaattctgttttcttcttctgatctaatgggtgtatgtggaaactcactgtgtgtttattgtgttttccctgggattgagatgtttccatgtatttattggccgtttgtttttcctgattagtggaagcatctgtttgtttttgattagtttttctattagattgggtgtcttcttattgttttattttgattagagtacttcattgattatgtatgtcacaaatttcttcttatgttttttggttttaattatttcttatctattttttttttttttgagatggagtgttgctctgtcacccaggctgaagtgcagtggcatgatcttggctcactgcaacctctgcttcctgggttcaagcaattctcctgtctcagcatccycagtagctgaaattacaggtgtgcaccaccatgcctggctaatttttgaatttttagt

SEQ ID NO: 120129 - DNA, 583 bp, Homo sapiens
catttctcacaagcattgattttctgagatatataccactatgtaattgctggttcaaatcttcaactatatactcttttgcagtacacaaatgcctgttttcaccagcagtatgcatcgttcaacatgtagcagtataagaattctgttttcttcttctgatctaatgggtgtatgtggaaactcactgtgtgtttattgtgttttccctgggattgagatgtttccatgtatttattggccgtttgtttttcctgattagtggaagcatctgtttgtttttgattagtttttctattagattgggtgtcttcttattgttttattttgattagagtacttcattgattatgtatgtcacaaatttcttcttatgttttttggttttaattatttcttatctattttttttttttttgagatggagtgttgctctgtcacccaggctgaagtgcagtggcatgatcttggctcactgcaacctctgcttcctgggttcaagcaattctcctgtctcagcatcccsagtagctgaaattacaggtgtgcaccaccatgcctggctaatttttgaatttttagt

SEQ ID NO: 120130 - DNA, 574 bp, Homo sapiens
actaatttttgtatttttagtagagatggagtttcaccatattggtcaggctggtctcgaactcctgatctcgtgatccacccacctcagcctcccaaagtgctgagattacaggtgtgagccactgcacctggcctgttttctttttaaaccataaatcttttgggactttttgattatttcaactgtgtttgtacactaacttgataaaattcaaaatcaattttgaccaaaatctggctagcacatgtattatctgtttggtcttgggcaaccttatctgtctctaagccctactccaccatctgacatggmaataacgatgccaaccttacagtatctcaggaagctaacgtctatcatgaatgcaaagtgcttagcatacacagtttctatagaaggctcaacaactttatatataatgtgttctccaaagtttgctattttaactgactgagggaaactaataacatatatgagtaaaagacatttttatacttttagccacagccctggttttaaataatttcctcctacatgagctatattctgtctctccagccagggccataat

SEQ ID NO: 120131 - DNA, 574 bp, Homo sapiens
  misc_feature (1)...(574): n = A,T,C or G
gggcctccaagaatcttttatttattntattattattttttaaatttttttgagacaggatctcactctctcacccaggctggagtgcaatggtgctatctcagctcacttcaacctccacctcccagtgtcaagtgattctcgtgcctcagcctccccagtagtcgggactataggcatgcaccascacacctgactaatttttgtatttttggtagagacagagtttcatcatattggccaggctagtctcaaactcctggcctcaagtggtctgcctgctttggcctcccaaagtgctagggttacaggcatgagacaccacgcccagccccataaaggcattattcttatactctgtttatcacatacacaaaaaagagcttctaagaatttttaagatgtcccatagcccaaggtagagataggcctgcttgaaatttgtaggtgtttttttctaatagagattgtaatttgatacatggaaaacccacatcattttttaaagaattgtaaaagcttggaccaaatagtacaaagacaatttaaaattaaaaagcatctgggcccccaa

SEQ ID NO: 120132 - DNA, 574 bp, Homo sapiens
  misc_feature (1)...(574): n = A,T,C or G
gggcctccaagaatcttttatttattntattattattttttaaatttttttgagacaggatctcactctctcacccaggctggagtgcaatggtgctatctcagctcacttcaacctccacctcccagtgtcaagtgattctcgtgcctcagcctccccagtagtcgggactataggcatgcaccagcacacctgactaatttttgtatttttggtagagacagagtytcatcatattggccaggctagtctcaaactcctggcctcaagtggtctgcctgctttggcctcccaaagtgctagggttacaggcatgagacaccacgcccagccccataaaggcattattcttatactctgtttatcacatacacaaaaaagagcttctaagaatttttaagatgtcccatagcccaaggtagagataggcctgcttgaaatttgtaggtgtttttttctaatagagattgtaatttgatacatggaaaacccacatcattttttaaagaattgtaaaagcttggaccaaatagtacaaagacaatttaaaattaaaaagcatctgggcccccaa

SEQ ID NO: 120133 - DNA, 653 bp, Homo sapiens
gccaatgtggtctggcccatccatcccctctttgacaggctcttactattccctgctgctggatcactacttcagctatgcaggctgccttgcaggaattcctttgcctcatttctttcttttttttttttttttggtagagacagggtctcactaygttgcccaggctggtcttgaactcgggagctcaagtcagcctccacctcagcctcccaaagtggtgagattacaggcatgagccacattgcctggccttctgttgccttattgctttgcacttgctgtttcctctctttggaaacctcctcccctaaatatttaggtaaattgttttcttacctcttttaaatctttgctcaaacattcctatctctggatagctttccctgatggtcctgtttattattgcaacccacccacacttgacactcttatctcctttcatgttttatttttctccatagcatttaccatcttctagcattctgtaaaatttacttatttattccttaactctccatctccccagcaagaaaataagatctacaagggtggagacttctggtttgtttgcattttttgctgatgtgtccctgccatctaggacaatgccttacataccacagttgcttagtaaatatttgctaaatgaa

SEQ ID NO: 120134 - DNA, 541 bp, Homo sapiens
gtctattgatattttaatagatgtatatcaacctatgatatataattcaatacaataataatatacaaatccctttaaaaatttttttatagccaggtgtggtggtgcatgcctgtaatcccagctacctgggaggctgaggcaggagaactgcttgaacccgggaggcagaggttgcagtgagccaagatcgcaccattgcactccagcctgggcaacaagagtgaaactccatctcaaaaaaaaaaaaaaagaaagaaaaagagaaaagaataaagtaggaagtcaatggggaaacctgagctagaaaattagagcccttctagcagaaatgaggtatatcccactaaaaaaaaaaaaaaatttagatacagggtctcactctgtcacccaggcatgggttcagtggtgtgatcatagctcactgtaaccttgaactcytgggctaaagtgatcttcccaactcagtttcccaagtagctaggactacagatgcatgccaccacaccagataactaaaaacaaaactattttttacaca

SEQ ID NO: 120135 - DNA, 578 bp, Homo sapiens
aacacaccttttctacctagatcagacttaacatctgcacaaacctcaaaagcatcatttattttgaaaaataaagtaagacctatgctgagtcctgtccacagtgaccatcccagatgactgccccctggtgaaacaagacatttctccaatccccacgttatattctatctctataccagtgacttcatatcacaagtccagatgcactccagaaatcaggcctatactttcagctgcctactttggatcttcaaaataacacaggcaaaasagaactcttaattttcccccaaacctgctccttctggtgccttccttgtctcacctagttcctaaacctaaaaattattgatccctttcttttcctaccacaatcacaatctggcaataagaactgtggtttctcccttcaaaacacactttggatctaaccagtcctttccatctacacaacaatcagcctgcccaagtcaacacatctcttgcttgaacaaccatggtggcctctttttgtttcctctttccctttacatccattccccacctagcagtcagtgttatctttttaaaacgtg

SEQ ID NO: 120136 - DNA, 553 bp, Homo sapiens
cagtgaattcaatccagccaattctgtttctgtcagcagctctgataaaagggttttatgtgggaggaggtaaaaaatctacctaaaactagctaaactraagttttaaaaatgcatccacagattttacttagcctagccagctactactgcactttagaattggacatttaccatatttcagctacgtatggaggcaaaaaggatgttaaggttaaaagaaagtattataaggaaagcagaggttgagtcccaaggatgagttcaaaaagaggaaaaaaaaaggggtaacaacagtgagagagatttcttatcgtcccttttctccctttgtccccacccccaccactatccccttccttatcttctggagagtcacatcacagagtagagctaggaatcaccctaaacccataagaatggctaatgttagaaaagaatgaccctacctcggatgataaggatgtggaggaactggaactctcatcttgctggtaggattgtaaatggcacagtcacttttgaggaaactgccagtttctcaaattttgac

SEQ ID NO: 120137 - DNA, 432 bp, Homo sapiens
aatttatacttagaggacgataagtactgcagaaaaagattagagaagagggcttggaattggggaggtatactttaaaataaaaagccagagaagaccacctttgagaacataatttaagaaaagacttgaaggaggtaaattatgtagctatctgagggaagamcttcccagagagtggaacagcaggtacagggctgaggtgggcatgaacagggaagagtaagaacggtcttttgggtttgaagtagaaggagcttgcaggagaatgacaggagagatgaggtcagatattacatctcaataggatctctctggctgcaatattgagaaaagccagaagggggacaaggtggaggtgggaagacgaattagaaggccactgcaataatacagacaggagatggtggtggcttagaccagggaggcagc

SEQ ID NO: 120138 - DNA, 623 bp, Homo sapiens
tattatgcattaacttatggagttggaatgagactactgttcatcttaaatttcaagtgtttttctttttcttayttttagtcatggcctgaagatgctcttgaacgtgtagctgtgaaattcttagaaacactggagcttactgaggttgaacaacaagagatagttccaatctgtaaacactttcacacctccattatggatctttcagaaaggttaatattagtgaatttaaaaatgacaatgaagggatttgtgaaggccatttccaaattaattcacatgtatttgctatcttatctgctatcccctttcctactgtacttaacctggtttacatgatatcttgggtctcttaccaagttagatcctcctggcttatgaaacatgtgaaatagtctgattctttcttgttgtagttcatcttttattagacatatttgttgatttgtggttttttaaaagataggatctcacttgatttgtgccttttaaatatgtcaccactagttggtattttagagacaagaaattataatgtggtaatatgtaggattctagtcttaaaatgttcaagtactcagtagcttctgtataaaatgtaatctttattaaatgtctgt

SEQ ID NO: 120139 - DNA, 623 bp, Homo sapiens
tattatgcattaacttatggagttggaatgagactactgttcatcttaaatttcaagtgtttttctttttcttacttttagtcatggcctgaagatgctcttgaacgtgtagctgtgaaattcttagaaacactggagcttactgaggttgaacaacaagagatagttccaatctgtaaacactttcacacctccattatggatctttcagaaaggttaatattagtgaatttaaaaatgacaatgaagggatttgtgaaggccatttccaaattaattcacatgtatttgctatcttatctgctatcccctttcctactgtacttaacctggtttacatgatatcttgggtctcttaccaagttagatcctcctggcttatgaaacatgtgaaatagtctgattctttcttgttgtagttcatcttttattagacatatttgttgatttgtggttttttaaaagataggatctcacttgatttgtgccttttraatatgtcaccactagttggtattttagagacaagaaattataatgtggtaatatgtaggattctagtcttaaaatgttcaagtactcagtagcttctgtataaaatgtaatctttattaaatgtctgt

SEQ ID NO: 120140 - DNA, 621 bp, Homo sapiens
aaactcaggtaagactggagtaagtacatccacacagacacttgaggcgggaagatggagctctggatgtcaaatatgaatttctcttctgaactgtcttatgactcacacacacacgtgcctggaagtccaaagtgtagttggtttttaaatgcttctgtcaggtaaccatggccttgggaaaaattatattatgttttcataactgcagtgaaatgcaaccacagagaggggaaatatgccaagtacaatcagtcattccttttattatactagtttttaaaggrgaggaagtgctcatggctgcatttatatgaggcagattttttctaataatggtacaactattaacctaaaatataactacttattccttattaatttggcctatatgcatttattccaatgaagagttgaaagtaagcagttaaggtgaaaactatgtttttgaccatcctactaaatcttttaacattttgtccaggtctgagtgagagctgttgcattttctttctcatctgactcaccattcatggttatccaactcatttgagggatagggaaatactttctttctatttgtctgaatataccaatttgaatttgtcattttgatggcta

SEQ ID NO: 120141 - DNA, 613 bp, Homo sapiens
tttgagtctaggtaactgaaagactagtgttgtcaaaacaagatctcttttcatggggaaaattgatatgtcaactttgtacctwctgagcctgatgtgctggctgtacaagttggagcccccaacaaggagctagggatgtgggtctggagcccagggaagacaggttagtgggacccttgcccagaattcacttctgcatctaagctcaggctacacagcttatcatgtcatcatcactacagctataggataaagggttatctgctgagtccaaaatctgttgccttcttgagaaagatattgagaaacatccataactcttcagagttctttttttaaaaaactatatatccattcaaaatatgactctcactatgcaacctggtggaaaactctgcatttggcctcgaaattcttctgttaataacagacattgttctcagaaaaggccattccctctggaatttcaaagattcaattatgcagtgaattttctcctttaccaaagccgttgtcttctactcctcacataaacatgagcacgtggcatgttttaaataagtactgctggctttgtctttgagtcaccaagaagaaaagccagtcccca

SEQ ID NO: 120142 - DNA, 613 bp, Homo sapiens
tttgagtctaggtaactgaaagactagtgttgtcaaaacaagatctcttttcatggggaaaattgatatgtcaactttgtacctactgagcctgatgtgctggctgtacaagttggagcccccaacaaggagctagggatgtgggtctggagcccagggaagacaggttagtgggacccttgcccagaattcacttctgcatctaagctcaggctacacagcttatcatgtcatcatcactacagctataggataaagggttatctgctgagtccaaaatctgttgccttcttgagaaagatattgagaaacatccataactcttcagagttctttttttwaaaaactatatatccattcaaaatatgactctcactatgcaacctggtggaaaactctgcatttggcctcgaaattcttctgttaataacagacattgttctcagaaaaggccattccctctggaatttcaaagattcaattatgcagtgaattttctcctttaccaaagccgttgtcttctactcctcacataaacatgagcacgtggcatgttttaaataagtactgctggctttgtctttgagtcaccaagaagaaaagccagtcccca

SEQ ID NO: 120143 - DNA, 613 bp, Homo sapiens
tttgagtctaggtaactgaaagactagtgttgtcaaaacaagatctcttttcatggggaaaattgatatgtcaactttgtacctactgagcctgatgtgctggctgtacaagttggagcccccaacaaggagctagggatgtgggtctggagcccagggaagacaggttagtgggacccttgcccagaattcacttctgcatctaagctcaggctacacagcttatcatgtcatcatcactacagctataggataaagggttatctgctgagtccaaaatctgttgccttcttgagaaagatattgagaaacatccataactcttcagagttctttttttaaaaaactatatatccattcaaaatatgactctcactatgcaacctggtggaaaactctgcatttggcctygaaattcttctgttaataacagacattgttctcagaaaaggccattccctctggaatttcaaagattcaattatgcagtgaattttctcctttaccaaagccgttgtcttctactcctcacataaacatgagcacgtggcatgttttaaataagtactgctggctttgtctttgagtcaccaagaagaaaagccagtcccca

SEQ ID NO: 120144 - DNA, 621 bp, Homo sapiens
agtggggcctcatgggaagtgtttgggtgatgagggtagatccatcatgaatagattaatgacctctctgttggtgagttactccctactctgttagttcccatgaaagctggttgttaaaaagagtgtggtgcctcttcccttctctcttgcttcctcgctccccatgtgatctctgcacacacagccccccttcacccttgccatgagtggaagcagccagaggccctcaccagaagccaaggccaataccaggcttctcgtacagcctgcagaactataagccagataaaccttcttctcttcttgaattacccagcctcaggtatttctttatggtgacaactaaacagactgagacagtaacataatacctgcacagtgtctrgtaaatagttggtcctaattcagtgggagtgaagtttgttctttcctctgactgtaggagctgggatgctcaggtgaaatgtggcctcaggctcacctgggaatgagcgagtgaagttaggagaggtaagaatgaacactgcctttttccagactgtcacatatgataggaatgtggaggtccttgcttctgtcattctcttcatttggtagaaattgttctgtaaccacaga

SEQ ID NO: 120145 - DNA, 606 bp, Homo sapiens
actaacactaatatttctttctgatttcttttgtgaatggcttgtattttctatatgaagtttctcattactgattatctccttcacagaatctttctcatttttattcatttcatcccttgtgaaatttattttatgtctctctaacttgccctctgatctgcaaattatctttaatatcaggtccccctctcagatattcacctgataccatgccacaagatttgtgtttatcagaaattatttgttttgatgtcaratgctcattctcagccgaggcttttccacctgattagagaagaagaaatacatacaaataccacctctcagcaatgccagagggaagtataccagaagttagcaaacatttcttgtaaataactagatagtaaatgttttaggctcttcaggccatataatttctgttgcaagtactcaatcctatcattgtaatgtgaatacagccatagacaatacataacgaatgaacataactgtatttcaataaaacttcatttatagacactgaaatttgaatttcaaataattttcatgtgttacaaaatattcttcttttgacttccttcagccactaaaaaattcaac

SEQ ID NO: 120146 - DNA, 559 bp, Homo sapiens
tgcagggggatgggaagagggtggggcaggagagggacataaaagggctctgaggcattgtactgtgaattccttcagtctcctgctctgctcagccagtcagccctgcctcccttgtttaggaccacacagcactgctgggtgtctgcctttccttgtgactcttctctagcctctgcatggccagcagccctcttcttttctcctattctcttaagaaacatgcccatcacctgcagtttctctgggctccccgttaatctgccttcctcatctcctaatgctgcctcctccctcccattgccggtgcctggaaatagtcaaggctgggttctgttcttttgcttgaatttctttcacttggcttcttgactctttctaaactacaatccccccattctcactgccttagtttyccctctctctgtgtttctcaaactatatcccaccacgccctgacaagggcttctctcctgtagatcatcccttttctagtattttgctagaaatatatagtgggattttctcctttgccctacatcatcactaaacttcccaa

SEQ ID NO: 120147 - DNA, 595 bp, Homo sapiens
ataaatttttgttgtttataaactatccagtttatggtatttttgttgtagtatcctgcatggactaagacattgggtcatgtggtagttccacatttaactttttgaggaactaccaagctttaccacagcagtggcatcgttttacactcccaccaccaatgtacaagggtcccaatttcttcatgtcctctccaacatcctctccttgttattttccattaaaaaaaattatatccatcctagtaggtgtgaagtggcatcaggcctcctgttttcaggcctccatggtttctgatgcgaaatcaactgttaatcttattaaggctcccttgtacaggatgagttgcctctctctcactgttytcaagattctctttgtcttctgacaatctgcctatactgtatcttggtgtatctcttcgtgtttattttgcttgggctttgttgagcttcctggatatgtagactcatgtcttttatcacatttgggacacttttggccattcacatataatttctgtctctctctctcccttgtccttctgagactctcataatgcatatgttggtccacttgatggtgttccacagg

SEQ ID NO: 120148 - DNA, 543 bp, Homo sapiens
ttgtctgtgtgacccatgctcccttctcctcttgtttccagctgggttcagtcaatgggaagaaccagcaagagatgagaaagtaggaaaggaaagagggcagagtatttattccttcagctcccacctggccaggctgaagttgagcaagcaacagctgtggttccttcacttaaggctgcagctgtttctgggttcagctatcactgttgccacaccttgttcactcaagcytaaggcaataacagcttcctgctcttgctagtccctgagtgcttccccaacccttgttggtttccttaaccctatgcacatctctgtaaaaaggcccttgttcaaactccctgcagttacccccttttgagtgtgccaggttttctctcatgaaactgacattgactgatgcatatgattatttaaggaagtttaaatattcatcaaaggtcccttgaaacttcttcttcttattattttgagacagggtcttgcactgttctctaggctgaagtgcagtggtatgatcacggctcactgcaggcttga

SEQ ID NO: 120149 - DNA, 695 bp, Homo sapiens
aattacccagtctcaggtatttatttatagcagtgagagaacagactagtgcaatgccctctgataattattgacagaaaacataaatatctccaatgctggttcttaaaaataggcaattaaaaaattaaaaaattatatatatatatatatatatatatatataatttttaaaaaataggatatatatcatttttaaaaaaataggccaggcgtggcggctcacgcctgtaatctcagcactttgggaggccgaggtgggcagatcacttgagatcaggagtttaagaccagcctggccaacatggtaaaaccccgtctctactaaaaatacaaaaattagccaggcatgrtggtgcatgcctgtaatcccagcaacttgggaggctgaggcgtgagaatcacttgaacccagaaggtggaggttccagtgagctgagattgtgccactgcactccagcctgggtgaaaagagagtctccgtctcaaaagaaagaaaagaaaaaagaaaacataaatatatgcacactaatgccttttcccatgggtccatccacatatgtcttctccagacctcctttctccagtctttcaatcttcttccttccaggccccagaccagccagccaagctattcttcatggtccaggagtccatatatatcttcacctctgaccactttgccatccatacaa

SEQ ID NO: 120150 - DNA, 635 bp, Homo sapiens
ttcttttctctatccatgtgtggtaggcataataatagacatacaaagatttttacatcctaatcctatgaagctatgaatatgttatgtcatatggcaaaggaaaattataatttcagataaatttaaggttgttaatcagctaagtttatgatgagaagagtatctggaattatccaggggcactcaatataatcataaaaaagtattttaaattagaagaggaaggaagaagagaaggtcaagataagtggatgtgataactcaaactactgttcctgattttgaagatggaaaaaggtaatttttaaccaaggaatttggacaccagtgccagctggaaaaggcaagaaaacagatgatctactaaagsctcctgaagaaatacagccttgattctagcctagttgtgctttgtacatttgatctccagaaactataaaataataaatttgcatggttttaaaccatagtaacttttacatcatccataagaaactattatactaacttttacttatgaatgtatcattcaaaaccagaattgtcttctggactgctttcttcctgtcattcttcctgacgctcaggatgggataatttgtttaccttttcttcttttttcttaagtcgca

SEQ ID NO: 120151 - DNA, 647 bp, Homo sapiens
caattgctctaatagatagcttatgagttgtgtctcgttttgatctctcatttctaccttcccatcctaacctgtctacaaatcctgcccatgctatgaacaactctttctactttcactgacatcatcatagttgaagataccaacatctccagtatgatttattcaaatggtagcttaactagtgttttttttcttctgtcttcagctaatccaatgactacatagtagaaatattgaattctgaaagatttagataaaataatattattcccagctttatttataggtccacattacattcatttaaaataaactcaaaactgtaccataatctgtaaatttcaatatgatcagcccctgccttattttaacttcattttatatgatttttttctctctctcattatgtttcaaccatgttgactatgctttgtgaaaagaaaagaattcagacccttttaaattgcttatgyctatgttattctttccctcacattttacaagaccatctcattttatccctttgagcacaaaataaacacaatttcttaagagagaaatcactgactaacctatatctaaccatcctccttcccacttatctcactgataagacttaccagtgtttattcattaattacata

SEQ ID NO: 120152 - DNA, 637 bp, Homo sapiens
tatgcctccacctctcctttattagtgagacaacaaattattttatttcgagtctcaaaatatacagaagtaataacctcactcaaaacatttggactctattaaaataattagctttataattttaaaataagtaaataaaaatatgtagcagtacctaaatacattgcatatttgaaaatattgtgaaattctaagtaagttgccaaacctttgatattcttgggagagtcctacaaactcatgtgaccttttgctgatctataacacttatgtcaaaaccattcttaatgttgtaatttcaaatagaatgttcaaaacttggatttagattccakatctttgttggcatacaatgacacttccttcaaaacagtcaaaattaattaaatgcttattagttacaataggtaggaagaaataagacagctagttgcccatatgactgtatagttaactaatgtggaatagcatcaaacagattgatcagagaaaaaataagtactagaagaatatactaagaaataagttataaaatgcgagtgatatagaaagcaggagatatgattcttattgcatgcataggaatagggtataagaacaggaataggaaaaaggatagaagatatgattctta

SEQ ID NO: 120153 - DNA, 570 bp, Homo sapiens
ttgtatacctaatgtgttgtgattcattgtatatttaatctatttgtaacagtccttggtgcacagtaaaaactcaaaaaatattattttaatttttattattgatacaatgctgaacaattgaaaatacaagattttaaaaaaggaaaattttattcaagtcatatacttgtaaaaaggtagataactgaggtctaacactaaatctattttagtttcttaattattcaatttagtggggtagatgaccaaaatgaagcaaatagtgaccatgtagtaactattttcaggaatgtttatacacagcttatttctttatagcaacggtgaaccaatttaaattagcatcacctctacctagcactacagaaaattgactgatacaagagtgttggaggtgtcaaagcatagattgcatgataacacacagcaggcaaacctagtctttcgcctgaatatgatatgcttatccaagttgtagtggtgattgcacaaatctatgacttacaataatttccttgcatttaatctattcaatatttaaygtataaaaattgtatagatggatta

SEQ ID NO: 120154 - DNA, 514 bp, Homo sapiens
gggattttgcttgatggacttttagtctgtgcctatttacttagtcttttttttttttttcatgactttcccaggttttgtcaggaaacaatttctaataaatcaggcttatttgatttctcattttaaattctgcctcttgggaacccaatctaaacagcaaataaaatgcctatataaataaggcatggatgacaaagagttcagacaagtagtgacatctaattgtttttcttcacttgtattacatctttgtttcccttaattcaggcgctatggaaacaatcaaagtgaatgtatcaactacagtcattccttggcctcaggagggcgttggttcctaggtctcccccctcaaggggtatcagaatccacggatgttcaagtcccttatatgwaatggcctagtatttgcatataacctcctaaaatatgctttaaatcatctttaaattacttatgatacctaatgcaatttaagtgttatgtaaacatgtgttatactttttcattt

SEQ ID NO: 120155 - DNA, 577 bp, Homo sapiens
aagaaagaaaaaacattaccaggagaggaatacaagtgagctgtggagcaaccacttggtagagtgatttgcgtgactaggagggagccacatgccaatagccaaggcaatggaaaaaaaggccttgaaggtatttcagagatctttgaggaaaccctcccatcacaggcccagacgcctacaagaaaagaatggcttcatgggccagtgttgggatgccactgctctgcaccatcccagsagagtgctcctcacatgacagccattccagttccagccttggttcagagggcttcagatataactctggccaccccttaaaagtgtgcaagctacaagctttggcagcttccatgtagtgttagcctgtaagtgcacagagtgcaaatatgaaagagactcggcagcctctgtcaggatttcagaggatatacgagaaagcctgggtgcccaggcagaggtctgctgcaggggcggagacctcacagagaacttctgctaggcagtgtagaggggaaatgtgcagttggagactccacataaagtccccaccagtgcactgcctagtggagctgta

SEQ ID NO: 120156 - DNA, 577 bp, Homo sapiens
aagaaagaaaaaacattaccaggagaggaatacaagtgagctgtggagcaaccacttggtagagtgatttgcgtgactaggagggagccacatgccaatagccaaggcaatggaaaaaaaggccttgaaggtatttcagagatctttgaggaaaccctcccatcacaggcccagacgcctacaagaaaagaatggcttcatgggccagtgttgggatgccactgctctgcaccatcccaggagagtgctcctcacatgacagccattccagttccagccttggttcagagggcttcagatataactctggccaccccttaaaagtgtgcaagctacaagctttggcagcttccatgtagtgttagcctgtaagtgcacagagtgcaaatatgaaagagactyggcagcctctgtcaggatttcagaggatatacgagaaagcctgggtgcccaggcagaggtctgctgcaggggcggagacctcacagagaacttctgctaggcagtgtagaggggaaatgtgcagttggagactccacataaagtccccaccagtgcactgcctagtggagctgta

SEQ ID NO: 120157 - DNA, 603 bp, Homo sapiens
ccaatgttatcagtatgaagaactctacagagaaattagatatttaggagaggtctaaattctatcataattcaattattaatttattctcaaatatttataacccatcttctctgacacattggagatagaactataaacagaacaaagccctgtcctcagtttaatatgcaatacactaaaataagcacttatttaaatattgaattatacagtcagyacatgaaaactttaaaaaaaatgtttgatttataataaatgttgtattagtctattttgacactgctgtaaagaacttcctgagattgggtaatttataaaggaaaaaggtttaattgacttacagttctgcatgtctaggatccgcaggaaacttacaatcagggctgaaggggaagcaagcacatcttacttagtggcatgcaagagagaaaatgaagaggaaagagccccttataaaaccatcagatcttgaaagagctcacttactattatgagaacattacgggggaagaccaccccgatgattcagtcacctcccatgaggtctttccctcaacacctgaggattacaattcaagataagatttgggtggagacaca

SEQ ID NO: 120158 - DNA, 566 bp, Homo sapiens
ataaatgttgtattagtctattttgacactgctgtaaagaacttcctgagattgggtaatttataaaggaaaaaggtttaattgacttacagttctgcatgtctaggatccgcaggaaacttacaatcagggctgaaggggaagcaagcacatcttacttagtggcatgcaagagagaaaatgaagaggaaagagccccttataaaaccatcagatcttgaaagagctcacttactattatgagaacattacgggggaagaccaccccgatgattcagtcacctcccatgaggtctttccctcaacacctgaggattacaattcaagataagatytgggtggagacacaaagcctatttatatcagatgtacatattttggggtacatatgataatttaatacatccatatctgtttaaagatcaaatcagtttaattgagatgtctgtcaccttaaatatctgtctttcctttatgctaggaacattggcaataattctcttctagcattttgaaatttataacagtttattgtgaactatatttaccctactgatctatcaaac

SEQ ID NO: 120159 - DNA, 566 bp, Homo sapiens
ataaatgttgtattagtctattttgacactgctgtaaagaacttcctgagattgggtaatttataaaggaaaaaggtttaattgacttacagttctgcatgtctaggatccgcaggaaacttacaatcagggctgaaggggaagcaagcacatcttacttagtggcatgcaagagagaaaatgaagaggaaagagccccttataaaaccatcagatcttgaaagagctcacttactattatgagaacattacgggggaagaccaccccgatgattcagtcacctcccatgaggtctttccctcaacacctgaggattacaattcaagataagatttgggtggagacacaaagcctatttatatcagatgtacatattttggggtacatrtgataatttaatacatccatatctgtttaaagatcaaatcagtttaattgagatgtctgtcaccttaaatatctgtctttcctttatgctaggaacattggcaataattctcttctagcattttgaaatttataacagtttattgtgaactatatttaccctactgatctatcaaac

SEQ ID NO: 120160 - DNA, 600 bp, Homo sapiens
gtctacaatcaattcagcatatttaactaataagttcaatttatgttaattatgctttcctatttcacaaagttcctcaacttcctctactcacacacattacttgccccattgtacttctaaaattatttctttggtgtattttcatagaatttggaaaatattggaatcttcctatggagatattcaatatattttgtaagttttataatgagggctttgttacattaacagaaaaaatgtattataacctacaataattaaaactatttaggaattcagacaagaaaagataagccagaggaatagtatattaaagttggaaaagttccaaagaacaaaatcgttgttttaactattaaagaacattttagactcaattttttaaaaaaattactgaataytaccagtatttatcaaacattatttttcttttccacaaagtttatatagcataaattatgttatttaatatgttatattaaatatagcatttaatatataatattataaaatatagagctatacattatatagctatatttatgctataaattatatagcatatacatttatataacataaacatacatatgtata

SEQ ID NO: 120161 - DNA, 574 bp, Homo sapiens
aaacttacaatattaaaaagaaaggtagtactcaaaactcaccactttttaattatttaagtacattttactattattcttgcaattgaagttatttatrtctttttgtttgttttagagacagggtcttgctctgttacccaggttggaagcccaggccggagtgcagtggcacaatcatagctcactgcagcctcaaagctctgagctcaagtgatcttcccagctcagcctcccatgtaggtggaactatagacactagccaccacgcctggctaattaaaacaattttttttttagagactggggtcttactgtgttgcccagactggtcttgaactcctggcctcaagtgatcttccagactcagtctcccaaagtgctgagatgacagacctgagccaccacacccagcctatttgtgtctattgtatctgtaaatggaaatactatataatgccgcagttagcatgagagtacagatatctctttgacatactgatttcatttcctttggatgtatacccaggagtgggattgctggatcatatggtagttctatttttaatttttt

SEQ ID NO: 120162 - DNA, 591 bp, Homo sapiens
acgtgacaccatcagcttacacaacagaaaaacacaaactaagttcctgacagcggaatgatgaaccacccaacttgagttaaaaagaaacaaaagtacaccactgtatcttaataagyatccagtctttgggttaaaattgtattctctttccccagttttagtcattttgtaacaaattttaacaagcctgataggtatttcatggccatgtctgaagttggctgaacttaagcatccctatataacacactttacacttagtaacttgctagttacctatggttaacaaatgtttcatatggtatgtttttaaaactttcagtgaaacactttaacatttttaacccagcaaaacaaacaaaaactgtgtctaataacccacacgagtagaaaaatgaccttaagcttaaccttaaacacagatataataagtaaaacaaatggagagaagtccatctctattcaggaggcagaagaaccccccctgcccccaacacacacaaagacgggtggcagtggagggcaggctcataaaccagaggtgtaatggacaagtcgagcgattcctcccgttttccgcattctgca

SEQ ID NO: 120163 - DNA, 540 bp, Homo sapiens
tggtgccctatccctcccagggaggtactgtgagcccttgaatgggtgctgtggggagacggagctctatcttcttgacctcaccttccatccacaaatctctgtaaagcagatctagggatggagatgaaggaattgagttgtggctcaagtgccacagactcttactgttcttatggagatgtagtagatgtttatgaataaatgtgtcttcattgatatatacccttttggcaatctccagagactgaaatatttttttttctaggcagaatcttgctctgttgtccaggctggagtgcaatggcatgatcacaactcagtgtagcctcaacctcttgggttcaagtgatcctytcatctcagtcccctgagtcactgggactgcaggtgtgtgccaccatgcctggctaattgtttttaattttcatgtgggtgtagaaatgggatctcaccatgttgcccaggcttgtctcaaactcctgggctcaaaggattctcttaccttcacctctgaaagtgctgggattacaggcatga

SEQ ID NO: 120164 - DNA, 458 bp, Homo sapiens
tctactcaaaaaaccaaaaccattaaaaacttctcaagcatgtttaaaacatggcattttttcactgctctttcttttcacattaacaccagacatcactaatcagtcaggatacccttttccactgagagcactgatgaaatttcagaatccttctcaccacagtgctccaggttttcgctacmggtaaaccaaagcaatacacaatggacaatataattgcaattatgtaacgagattcacatactgaaaatatattctagttagagagttctatctatatgagattttccaagcaacttggctataacattaaacagtgtacgttttaaatagtactttcccagaaaattaaaaatgaataaatatgctaaatatgtactatgttactacaatttctgattggatatttagaatatacacacctctctgccagattcaggacaaaacacacagca

SEQ ID NO: 120165 - DNA, 447 bp, Homo sapiens
atgagaccaactctatcataagacacttaataacatcataacactttgatggcaaagaaaaggcatgtcagctgaggggctgaaagtcccttagttccttttctgttcacagggatcatcttcatctgatctaaatgaatctaagctatgaccagttttttttttttttaaacacttgattcagtcaccaaactgaccactgggattaaatcaaagaagacstaacactcagtttcaatgttgagaatactgtttgcattgaacatcagatctatacaaaattttggttcagctcttttacaatttttgataggtataatattttactttagaaatgctcattcatgtcactggaacaacattttagactcttaaaaatgccacagagttgcagttatgcaggatgaaaaagtctagagatctaatgaggactatagttaatcatgt

SEQ ID NO: 120166 - DNA, 588 bp, Homo sapiens
ctacaaacaaagcgtttccaaattgctgcatgaaatgaaaagtttaactatgtgagatgaatgcactcatcacaaatcaatgtctcagatggcttccttctattttttatcctgggatattcactttttcaccattggccttagtgagctcccaaatgtccattcgcagaatagacaaaaacagtgttttcaaactgctgaatcaaaagaaaggtttaactctgtgagatgaatgcacacatcatgaagcagtttctcaaaatgttctttctacttttcatctgaagttattttgtttttcaccataggagttaatgcactcccaaatatccctttgcagattctgcaaaarcagtgtttccaaactgctgaatgaaaagaaagttttgtctctgtgagatgaaagcacacatcacaaaacggtttgtcagatagcttccttcaattttttatcctgggatatttgctttttttgcccttggcctcaatgagctcccaaatggaatggacaaaaccagtgtttccaaactgctgaatcaaaagaaaagtttaattctgtgagatgaaaacacacatcacaaagcagtt

SEQ ID NO: 120167 - DNA, 592 bp, Homo sapiens
gaagtgccttttgcctgtactctatgacccccgatgatcccagaatcttatcacttagctgcaygcatagcatcttatccctattgatttgacttctccaggaaactgtaagccttttgaagactgtaattctaatttactcacttatgtaatcctgtgccttccacagcacctggcacatagaacattttctctattgaagtgaaactgactatccctattacagcatccgtcacttgggagggagagcccctgctgtcccaatcctatcatcctccaggactttgtggtttatcagtgcatacagtgtgtcacctactgacccctggcaaactgagcatttgctggtggacctttagtgagcaccaggagggagaagaaatttcagttaagcattttgcaaacatctgtctgaggactgactaatgttggcctagggtccatgacaagtttccactggtctggggtaaaggacaaggaagacattctcataaagctaaattgattcagtttgaaggactgttttttttaaatctcaaattatgttcttcctgtgactttggttaagagactttcttcctgaattgatgat

SEQ ID NO: 120168 - DNA, 600 bp, Homo sapiens
gtttaaaaaaattaaactatcgaccagactcggtggctcacgcctgtaatcccagcactttgggaggctgagtcagggggatcacctgaggtcaggagttcaagactagcctggccaacatggtgaaaccccgtctccactgaaaatacaaaaattggccgggtgtggtggcacatgcctgtaattccagctactcgggaggctgagccaggagaatcgcttgaactcaagaggcagaggttacagtgagccaagatcgctccactgcattccagccggggtgacagagagagactcatctcaaaaaaataaaaaaatcgttggcaacatataggagataaaatggatgatatccttgttatatagggttcttcaaattcatctcaagaaaatcaayaaccaaatagaaaaaaacaaaacaaaaaacgagcaaaggcaggaacagaaaacttcaccccaagaaatatcattgtttccaaaatgtgaaagatgttcaacttcactaaaaatcaaagagattcatatgaaaattaaatctgacatataaattttatgctacgatatcacagattactcaaaagtttgacaacatcccagtgg

SEQ ID NO: 120169 - DNA, 600 bp, Homo sapiens
gtttaaaaaaattaaactatcgaccagactcggtggctcacgcctgtaatcccagcactttgggaggctgagtcagggggatcacctgaggtcaggagttcaagactagcctggccaacatggtgaaaccccgtctccactgaaaatacaaaaattggccgggtgtggtggcacatgcctgtaattccagctactcgggaggctgagccaggagaatcgcttgaactcaagaggcagaggttacagtgagccaagatcgctccactgcattccagccggggtgacagagagagactcatctcaaaaaaataaaaaaatcgttggcaacatataggagataaaatggatgatatccttgttatatagggttcttcaaattcatctcaagaaaatcaacaaccaaatagaaaaaaacaaaacaaaaaacgagcaaaggcaggaacagaaaacttcaccccaagaaatatcattgtttccaaaatgtgaaagatgttcaacttcactaaaaatcaaagagattcatatgaaaattaaatctgacatatraattttatgctacgatatcacagattactcaaaagtttgacaacatcccagtgg

SEQ ID NO: 120170 - DNA, 589 bp, Homo sapiens
ataatggtaaagcacttaatatagtatctggcatataataagagttcactaaatgttaacttttataattactatgattaagtattattatttccttaccctggcccttgcaatttgctcttccttatgctgggagtgtttttctgtctgaactaccccaagtttactcctacttatccttcaagtttcagtttatctagcacttacccaaaaattactttcttggtccatttcaactataccacccccactagttttttctcataatggcgtttttccctcagagaactcatgaagrtttgcgatcatgtatttttttgtatgttcgtgtatctactgctaattcccccatggagctacaagtttcaggaagaggagtcatgactgcatgtgccccatcaggtgccagcacccagcttgacattttgctccatacgtaaaggacctcagtaaatgcttttcagatgaatggcccagccctcctggtggcaaatataacagaaattgctaatgatacagagaaatgcatcaccaacacattctaacataaagaacacaggttttctttgccatgaaacagcccaaaata

SEQ ID NO: 120171 - DNA, 582 bp, Homo sapiens
tgtttcctcaaaactatattgctgctgtgatgtcatttcccagtctgcagaagatttaagtgggaactggaaattaatctcaaacttttagttgttyctgggccaggggaaggctccacattagcacccggtgatacacccaaatctcattttgaaatgtaatccccagtgttggaggtggggtctggtgggaagtgtttggatcatgggggaggacctctcatgaatggcgtaggtcatgcccttggtgataagtgagctctcactctgagttcacacaagatccagttgtttagaagtgtgtggcacctccccactccccaccacaccttctctctctctctctctgtttctcctgctatcaccatgtgatgtgcctgctctgccatgagtaagtttcctgaggccaccccagaagtgaaggagatactggcatcatgcttgtacagcctgcagaactgcgaaccaattaaatctcttttctttataaattacaaagcctcaggtatttctctatagcaatgcaagaatggccttacacatctgggctttgtgaaaagtccatacagggatttgggcctt

SEQ ID NO: 120172 - DNA, 582 bp, Homo sapiens
gaattaaaagtggaaaaatactgacccaaaagtttaccatttttagctagtcagtttgaatgtcttcctatttctgcatttgccattttttaatagtctgatatcagattgacttttaatctgtgcttaagtatcagttttctgtctcttccttaaaattgaatgtctttgttggtaaaagaaaaagaacatgagctttggagctaaggagaaggattcaaatccagctcaaccactccctagcttagataagttgttccatcttttgaaacctcagctgctctatttgtctagtccttatcaccctctatcttgcttctagtgctagaaattctgtccatttcttaytacccctaaccataaagcttcccaataaaagaagtagattaacatgaaaataggtcagaacgaaggtttgagggaagggcaatgagcacagacctaatagatccaggacataaaagccaaatgtccccagttttacatggtctctcccagagttgatgcctcttaggttgtccctgcagtggcttattaaataagaggaaaccaggaagcaaaaaacaaacaaacaaacaaaaa

SEQ ID NO: 120173 - DNA, 642 bp, Homo sapiens
ttgagttgtttgactccagcccaggatggctgcccctttgatgcacaaatttggaaggactctgaagcaaaataaaggctccagggtcaatcagaatgataacaaaagctaacattactgagatttttttcatgtgccaggycttagtggagtaggacagtgcactttcgttattccactaagtgctaaggttattttatttaaccgcacaatattatgggataggtactttgaacaacttttttttttcatcaatgaagagtatatagttcaaaagggaagatatttttggtctcttttgctgtgtacaggtcttttgcccagacctgtacttgctatatattaggtgctcagtttatatctattgaatgaaaaagcccaaagtcactgagctggtaggcagaggaacacaggcagtctgatttcgaggctttctctagggaccgttacatgacatgacttcatgtataagtttggcacttattaaatgtgaggtgtagtgtttgctaatcattgcatcatccctcccaccgtattatgagcacctccagagacagagatgatgccgatctctcctgcacttcccctgcccttcaaagctgtgtagacagtaggtgtgaattacatgctgattggttgctt

SEQ ID NO: 120174 - DNA, 642 bp, Homo sapiens
ttgagttgtttgactccagcccaggatggctgcccctttgatgcacaaatttggaaggactctgaagcaaaataaaggctccagggtcaatcagaatgataacaaaagctaacattactgagatttttttcatgtgccaggccttagtggagtaggacrgtgcactttcgttattccactaagtgctaaggttattttatttaaccgcacaatattatgggataggtactttgaacaacttttttttttcatcaatgaagagtatatagttcaaaagggaagatatttttggtctcttttgctgtgtacaggtcttttgcccagacctgtacttgctatatattaggtgctcagtttatatctattgaatgaaaaagcccaaagtcactgagctggtaggcagaggaacacaggcagtctgatttcgaggctttctctagggaccgttacatgacatgacttcatgtataagtttggcacttattaaatgtgaggtgtagtgtttgctaatcattgcatcatccctcccaccgtattatgagcacctccagagacagagatgatgccgatctctcctgcacttcccctgcccttcaaagctgtgtagacagtaggtgtgaattacatgctgattggttgctt

SEQ ID NO: 120175 - DNA, 641 bp, Homo sapiens
tcctaccatatattaaatcacattattatgtttctataatttaaaaaattaatatttgtgcatgaaccagtggaaaagaataggaaatccaaagtagatcaaagtacatctggaaattctttaaatgacattctatcatatcagtagaagaaaggtagaccttttaaaaatgttgattggaaaactgaatgtttgtttgaaaaataatcactggaagaagaatccaaaaactatttttttaaaaaagaagttatctatacagaaagacaggggacctagagacagaataggaagtgaaatttcactaaaaatgctctgatatatagtgctaattttggaagtccatgcttcatatatctaacaattaaataggctgggcacagtggctcacacctgtaatcccagcactttgggaggctgaggtgagcggatcacctgaggtcaggagttccagaccagcctggccgaattggtgaaaccccatctctactaaaaatacaaaaattagccaggcatggtggcgcacacctgtaatcccagctacttgggaggctgagacatgagaatcatttgaacccgacaggcggaggttgcagtgagccaagatkgcaccactgtgctccagcctaggtgacagtgag

SEQ ID NO: 120176 - DNA, 507 bp, Homo sapiens
gttctagctttatgtaaaatcaatttcgaaagtaattggtaaagccctttccaaaggaaaaacaaagtatgccctctttaatatgattcatcatcttgtagagcaggcaatagaaatgtatagttgttttttatttttattttttgagtttcacataattgtaatttacacatacaaatcccacaggcacgtgtcaataacagatggtatttattaaaaatccacatgtattcttggttggtgaaagtttcattctgcttgaaggcaagaaaatggattagatgacctttcaaggtcatgccacttacaatttttaaggttgggatctaaaactgtctcactgtttaaagtgtgtttattttaaatacgtatacaaatcaggtatgtttggttgcaggtgacaaagtaatacaaaagtacaatatgtaggcttacttagaaaagggcatgyttagtgctggcctgcgagagaactggatccaaaggctggagtgtggtgaagtcccc

SEQ ID NO: 120177 - DNA, 562 bp, Homo sapiens
tatacagcatattagttctcaatcacccgaacatttgataagctctgaaattattactaaaaatgtctaactgggtaagaagaaggaaagagtcctgaattatatactcttctgtgtcccctctaatccactaatcaacactattaggtttaatcagataattcaactggctatatttttataaagggccttctacattcctaagaatgccaatggaccaaacattaacagctctgaccttgagacttttggcaaaggatttctgtgcccagccttaacatggaaagagaaagctgcttttcagccctcaggcagcagcaacactttcccaagtagactggagagtaggaagtagctggatgttttggcatatctaaaatccctgagaatcttgtataatattagagaattggagcaggctctttccccasagcagattactagcagcaaattataagccaaccagatagatacatggaggctcacaattgattgatctgattttgcaaaccaaagagaagtatccatttctattttatggtttcatttatttatttgagac

SEQ ID NO: 120178 - DNA, 584 bp, Homo sapiens
agagctcaaagtcatccctctgctcacctgagacaaatgcatacctgatggcttcctgtgccctacgtttgttttatcttagtagaaatgcaggttcactgagccagactaagttgtgtattcagtgaaagactgwtcgaggactcaaaagaacacaactgtttgtctcttagctacctgtgacgtggaagcccctgcttccagtggtcccacctttccagaccaaaccagtgttcatcttacatatgttgattgatgtctcatgtctccctaaaaatgtataaaagcaagctgtgcccgaccaccttgagtgcatgtcatcaggacctcctgaggctgtgttatgggtgtgtccttaacctgggcaaaataaactttctaaattggttgaggcctgtctcagatattttgggttcaaatacccaagggaggtatgaagctttttttttttcttccagtctttgcagctgtcttatatagggataaaatgggaggcaggttgcctgatgcagttcccagcttgactcttccccgtggcttggtgattgtgttctgggagcaccgtcgtaggtgtgttctgtggt

SEQ ID NO: 120179 - DNA, 535 bp, Homo sapiens
ttccccgtggcttggtgattgtgttctgggagcaccgtcgtaggtgtgttctgtggtggactgaaacatcrcgatgcagtgcatggtaagcattaaacacgggtgaacggtgtgctttcaccagctcccagctgctctttcccaacacgggctttcatccaggaaatggctgccatggctgtttggaaccacctgacttgtccaccatgagagtcctcagtcaggggaagacagaacatttggagaccccaggttagggtagggagactgttcacacctggaacaggaggcagctgtgcccctgtctgttcctcacagtcctgctgcacttgggcagtttgcatccattgtcataggtaaacccccatggggtgttagtgacctgatgccatagaggagaaaactgaggctcagagaggttaagtgacttgcccagaatcacacagcaactgccagagtcaggatttccacgctgggctgcagcctcctggcagggctcttccctgtgaggcccttgaccagagggacactcggg

SEQ ID NO: 120180 - DNA, 355 bp, Homo sapiens
ttcaggaagtactagtactgagaaggactcatttgtaaactaaaacgcaccaaggtatcgatcaccaaagacaaagaaccgaacctaaagcaggttactttaaaatagaagaaacaattagactcacagcaggcttctcaacttgaactgtagagctgggatcagcaaactacaacccatggtctggatggctgcctgtgcaaatacagttttattggcacagatacgcccacttatgcacatgtctttatggccacctccactcttcaatagcattgttgagtacctgtgatggaaaccacatggkctgcatgtggttgattcttaaacaagccctctgtttcagaaaatgttt

SEQ ID NO: 120181 - DNA, 591 bp, Homo sapiens
agtgtcagagtgttgctcactctgtggcaggtgggcctatgaaatcctcttgactgggacttaagttttatacacaacactgggaaacgtgttttctgagaacgctgttttaactgatgggagtctggaggtgatgatatctgaacatcatgctttttaaccctcttatattttatttattaagtgaagtcttaatatttcttccacttttcttgggctcctaagagcacttttccaagcgtgcagggctctgctctttgagagctctgatgttggccactcccccgtggcmctctgcaggctgttacagccacgctgattccacggcatttagtgagtgctggtttccattagtgggcctgacttctcgggggtcagtggtgcagacaactgcttcgcagctggcttggaggctcctggtgggaaaggcctgggtgtgacttaacttcgtgcacttctttgattcattcatccatgcaaaaaacagtccaccaagcactgaagtgtcaagcattggatgagactggcagctccctgggagagaggcagcaaagtcaaggagcaaatgatctgaggcacagggcagatagc

SEQ ID NO: 120182 - DNA, 591 bp, Homo sapiens
agtgtcagagtgttgctcactctgtggcaggtgggcctatgaaatcctcttgactgggacttaagttttatacacaacactgggaaacgtgttttctgagaacgctgttttaactgatgggagtctggaggtgatgatatctgaacatcatgctttttaaccctcttatattttatttattaagtgaagtcttaatatttcttccacttttcttgggctcctaagagcacttttccaagcgtgcagggctctgctctttgagagctctgatgttggccactcccccgtggcactctgcaggctgttacagccacgctgmttccacggcatttagtgagtgctggtttccattagtgggcctgacttctcgggggtcagtggtgcagacaactgcttcgcagctggcttggaggctcctggtgggaaaggcctgggtgtgacttaacttcgtgcacttctttgattcattcatccatgcaaaaaacagtccaccaagcactgaagtgtcaagcattggatgagactggcagctccctgggagagaggcagcaaagtcaaggagcaaatgatctgaggcacagggcagatagc

SEQ ID NO: 120183 - DNA, 591 bp, Homo sapiens
agtgtcagagtgttgctcactctgtggcaggtgggcctatgaaatcctcttgactgggacttaagttttatacacaacactgggaaacgtgttttctgagaacgctgttttaactgatgggagtctggaggtgatgatatctgaacatcatgctttttaaccctcttatattttatttattaagtgaagtcttaatatttcttccacttttcttgggctcctaagagcacttttccaagcgtgcagggctctgctctttgagagctctgatgttggccactcccccgtggcactctgcaggctgttacagccacgctgatyccacggcatttagtgagtgctggtttccattagtgggcctgacttctcgggggtcagtggtgcagacaactgcttcgcagctggcttggaggctcctggtgggaaaggcctgggtgtgacttaacttcgtgcacttctttgattcattcatccatgcaaaaaacagtccaccaagcactgaagtgtcaagcattggatgagactggcagctccctgggagagaggcagcaaagtcaaggagcaaatgatctgaggcacagggcagatagc

SEQ ID NO: 120184 - DNA, 591 bp, Homo sapiens
agtgtcagagtgttgctcactctgtggcaggtgggcctatgaaatcctcttgactgggacttaagttttatacacaacactgggaaacgtgttttctgagaacgctgttttaactgatgggagtctggaggtgatgatatctgaacatcatgctttttaaccctcttatattttatttattaagtgaagtcttaatatttcttccacttttcttgggctcctaagagcacttttccaagcgtgcagggctctgctctttgagagctctgatgttggccactcccccgtggcactctgcaggctgttacagccacgctgattccacggcatttagtgagtgctggtttccattagtgggcctgacttctcgggggtcagtggtgcagacaactgcttcgcagctggcttggaggctcctggtgggaaaggcctgggwgtgacttaacttcgtgcacttctttgattcattcatccatgcaaaaaacagtccaccaagcactgaagtgtcaagcattggatgagactggcagctccctgggagagaggcagcaaagtcaaggagcaaatgatctgaggcacagggcagatagc

SEQ ID NO: 120185 - DNA, 538 bp, Homo sapiens
ttttgtgaaacataatctcttgttttatgtaactgcatgttagcatttgctaatgaacatggaaaayaaaaaatatatgcacagaaaattattataacaatgttaaataaaaccttcaatgaggctgggtatgatggctccagcctgtaatcctggcactttgggaggtcaaggccaatggattgcttgagcccaggagttcaagaccagcctggacaacatggcgaaaactcctctctataaaaaacacaaaaattagccaggcatggtggtgtgcatctgtagtcccagctacctgagaggctgaggtgggaggatcgcttgggcctagaggttgaggctgcagtgagccatgattatgccactgtgttccagtctgggcaaggagtgaggacctgtctaacattcaaataacaaacataaaaccaacaacaaaaaacttcaatgaatggtatctataaactgcaggtgaaggtatagttaatgaactggataatcaaataccaatattttataatcttaagttttctttacatag

SEQ ID NO: 120186 - DNA, 520 bp, Homo sapiens
ttttccactttatgggttgtctctctctttcttgttgatttgtaagatgtctgtatattctgtacacaaatcttggtggaggagccaattgtgatgattttttctcactttctggctaatggtttgaccagaatttcttaaatttaatatgtttagrctattgatatgttttttcttttattgttaataccttttaaaaatagttgcatcatcagacatcgtagaatattctctcgtgattggttattggaaatttgtttcatctttcaagttcagatctgtaatctctgtggaattataaagaatccaggtaactttttctgtatgaacatgcaactgacccagccccatttatggagaagtcaatccttttccccttgccctgagcagtgtggatttgcttctcacttctgttcttccctttgcttagctgtctttccttgcatcgaccattcagagtcttaagtaattaatttctggagtaaattttgataactggtagtgtaaggccccaagctct

SEQ ID NO: 120187 - DNA, 520 bp, Homo sapiens
ttttccactttatgggttgtctctctctttcttgttgatttgtaagatgtctgtatattctgtacacaaatcttggtggaggagccaattgtgatgattttttctcactttctggctaatggtttgaccagaatttcttaaatttaatatgtttagactattgatatgttttttcttttattgttaataccttttaaaaatagttgcatcatcagacatcgtagaatattctctcgtgattggttattggaaatttgtttcatctttcaagttcagatctgtaatctctgtggaattataaagaatccaggtaastttttctgtatgaacatgcaactgacccagccccatttatggagaagtcaatccttttccccttgccctgagcagtgtggatttgcttctcacttctgttcttccctttgcttagctgtctttccttgcatcgaccattcagagtcttaagtaattaatttctggagtaaattttgataactggtagtgtaaggccccaagctct

SEQ ID NO: 120188 - DNA, 562 bp, Homo sapiens
gacagacctaactatcctttcctaggcagcacttgactgaagctagttgaaaaaaataaagatcaaaagagctagtcagctttgttgatgatctggggtagtttgttttccttacaagctagagagggggatggcactatttcattgttatctctgagccaactagagccccgggtctttagtttctttaatttagttttatcactaaatggcttcttcatttgtcactcaagataaagattattggggaggggacggggataggtaaagggatattgcaacaatacatagagaaaaaaatagtcactccgaacaagtttcgcaggtatgcgccaaaagagaaaagggatggggagagagagtttaaaaagagcagctacatgtgrtaagtcatttgagggcatcaggataagacttagcatgaggatgatcccaggtgcacctgctcagaaggagctgatccttgctggagcatccacactctactgaggacgatgctggggatgtagcggattcaactgccacacgcttaaccaacaaaagccaggtccttagtaattag

SEQ ID NO: 120189 - DNA, 524 bp, Homo sapiens
ttattttcatctctgagaaaagcagaaatttgtacttcagcttttttcaaataattgatagcatcctgtgatgggatattgtcctcataactactccaytggcagcttcaagcttttatattttcgtttaaccgtttaacaatataaatgtcactaagtgtgccaataaatactgacaaacccctgaaaaggtcagattgattctataactcacacctgtctgatgctagaggcttttcaggattttctgtgaacactaataaatagtctcccataagggatcttccacttttctgatctgtgaatgtctcttaataaactcaacgctgatacagtcacgagatgggatcttgttaatgaggtacacagtttcgacaaatgtatctgataagcatgtatatgagaagctacttgctttataagcatggtagaatcatagacactaggtccattagaaactaggtacatttatttcagagcttactcatttgataggtgcatatatatatatatgaatgatgcct

SEQ ID NO: 120190 - DNA, 524 bp, Homo sapiens
ttattttcatctctgagaaaagcagaaatttgtacttcagcttttttcaaataattgatagcatcctgtgatgggatattgtcctcataactactccattggcagcttcaagcttttatattttcgtttaaccgtttaacaatataaatgtcactaagtgtgccaataaatactgacaaacccctgaaaaggtcagattgattctataactcacacctgtctgatgctagaggcttttcaggattttctgtgaacactaataaatagtctcccataagggatcttccacttttctgatctrtgaatgtctcttaataaactcaacgctgatacagtcacgagatgggatcttgttaatgaggtacacagtttcgacaaatgtatctgataagcatgtatatgagaagctacttgctttataagcatggtagaatcatagacactaggtccattagaaactaggtacatttatttcagagcttactcatttgataggtgcatatatatatatatgaatgatgcct

SEQ ID NO: 120191 - DNA, 524 bp, Homo sapiens
ttattttcatctctgagaaaagcagaaatttgtacttcagcttttttcaaataattgatagcatcctgtgatgggatattgtcctcataactactccattggcagcttcaagcttttatattttcgtttaaccgtttaacaatataaatgtcactaagtgtgccaataaatactgacaaacccctgaaaaggtcagattgattctataactcacacctgtctgatgctagaggcttttcaggattttctgtgaacactaataaatagtctcccataagggatcttccacttttctgatctgtgaatgtctcttaataaactcaacgctgatacagtcacgagatgggatcttgttaatgaggtacacagtttcgacaaatgtatctgataagcatgtatatgagaasctacttgctttataagcatggtagaatcatagacactaggtccattagaaactaggtacatttatttcagagcttactcatttgataggtgcatatatatatatatgaatgatgcct

SEQ ID NO: 120192 - DNA, 635 bp, Homo sapiens
tcttggctcttttagcaaatatttatgtgtgtcgttctctattgtggaatgggagaatctaaaaaaaaaaaaaaagccgatgggctggtggtgatcattctaaacacttgttttgttaaactatgtcctatcatgttctggcatcgtcattttcatcacacgtaaacataatggttactacagtgtgtacactcattaaaacaacctatatatgccttacttgatggttgacgactcaaagctctaagccctaaactccagtctggccttgttatgtatgccaactaaaaatgcattcacaagataatgatcaatgactactttactacataagtaaaggtaaaaggaatgacacctgaaattttagtaaaacttgacaggtataacagcagttggaatcgcaattgaaatacagaatctttgatatttaaattaaaacatataagccattgtttttcttttgtyccggctctgatatgtcatttgcaggctacttggaactaatgctaacaaactgtaacctttgagcgtggtttttggtggataggagctgagaaattagttttaatagcttgccctttaaggacaccagtattcagaattttcagcagaaaccaaagatttaaggtcacaaa

SEQ ID NO: 120193 - DNA, 559 bp, Homo sapiens
tgtttagtgtctctctctcggtcttctagttcagagctctgtctctagtgcctgagatcaactgaattgtaattatttactcatgatagaagagtaatcaacaccagaaagaaatctgctatctaacaaaataatagtttcttcttttttttttttcggcaacagatacaagacaaactaaaacaggttaatycaattaatgtgttttgggtgcaaatcccagttgggtattatcaaaggcatattttcacatttaactatattatcatttcagggattacttaattttcattttcatttctatttcatcctttcttttctggcagggaagcctaagctcatttgtaaaatttttctgtcctctgagcatacaattatattttatccagaacagaagtgcaccaaaagagctgaaagttaaaagaaatgttcagtagatgagacctataatactggttctgattaattaatataatcactctattaattatctatgtttaaaattcaaatttatctatgtgggcttattgagcattcttaaagaaaacatacttgtaat

SEQ ID NO: 120194 - DNA, 609 bp, Homo sapiens
ttgaactagtttacagtcccaccaacagtgtaaaagtgttcctatttatccacatcctctccagcatctgttgtttcctgactttttaatgatcgccattctaactggtgtgagatggtatctcactgtggttttgatttgcatttctctgatggcccatgatgatgagcattttttcatgtgttttttggctgcatgcaatggtgtgatcttggctcactgcaacctctgcctcttgggttcaagagattctcctgcctcagcctcccgagtagctgggattacaggcatgcaccaccatgcccggctaattttgtatttttagtagagacagcatttctccatgttagtcaggctggtcttgaagtcctgacctccctcggcctcccaaagtgctgggattacaggygtgagccaccatgcccagccaagttattgttttaatatatctatttaagaattcttgggtttaggttccatattatctttgggttaaaccttaaaaatagatttttctttgaatagctaaaggaaagttacctcaagtgcagatagaggatctttatttttataatacagtatatatgtgccaaatatagtttatatttg

SEQ ID NO: 120195 - DNA, 611 bp, Homo sapiens
agaaaatagaaaataaaagcaatttgtccaattccaatgtgtggtatctatgctgatttttctcaaggaaaagtgcttatcattgccaaaatccccaaagtaaccacagctgacaaacttctcagcatcagagcacttggcaactgacaataagacctgctccttccccaagcggataaaaagccaggaactccccaaacaaaaccaacagcttttctgtactcttagtctgccttcatgtcttttgagcacagtatattgtcctgtgtaactggaggttcatgtagcacactgattttacccaaagcatcaaaactaatataattaatttatataatcttctagttacactgactatagaacttaccttcactacctacccaaatgtctgctgctgatatatacatatgattgcacaaattctaaagagtactstcaataaacagaaatgtaagtctgctaaaaatgcttaaatatacaaagaaatgcaaatataagctctctaccatacataggatctttgtttataccagttgcacatgatcaatggaaaaggacattcaaaacacttttgaataaacaaattattatcttgcattagcttgtatcaa

SEQ ID NO: 120196 - DNA, 603 bp, Homo sapiens
tctgctaaatacatctttcagtatctctgccttcttagatactctaagctataactctactttagttttagggtcctttttgcctttttctggccagaacatattgcttttatatgtcttccttttcatcttcccaaatgccctaataccagcttaggctaaatgtgctactggtataaaatgtatctttctccttaaaaaacaccaattattctcaayctctgggatccaaagcatccggaataggggccctcttcaataataatcagtgagtgagtgatcttaaaagatatgtggtttaggaagatgaagttaagtatttaaggtcacaaatcaagtgtggagtggggctgcaacccagatccagatgttctttctgacatgatctctcattgtcttttttcttgtattaatcagttgctaagtcttattatttcttcttcataaaaaagctaatgatcatcttattgcaacaccacactctctataccacaactatatatacttattttggaaagctaagattattcaagtaagactaaacaacacataggaccttcaaaatatgctcctaatcttcccttcttgtcttcgtttctgtct

SEQ ID NO: 120197 - DNA, 564 bp, Homo sapiens
ggtgacttcctgatatggtttagatttatgtccctgcccaaatctcatgttaaattgtaatcccccatgttgggggaggaacctggtgggaggtgactgaatcatgggggtggatttccctcttgctgttcttgtgatagtgagtgagttttcacaagatcttgttgtttaaaagtgtgtagcacctcccccttctctttttccctcctcctctggccatgtaagaaatgcctacttttccttcaccttccaccactgttgaaagtttcttgaggcctcctcagccatgctacctatatagcctgtgaaaccatgagacaattaaamttcttttctttatataaataagttacccagtttcaggcatttctctatagcagtgtgagagcagattaatacagaaaattggtatgtaggagtagggcattgctataaaatatatctgaaaatgtggaagcaactttggaactgggtaatgggcagaggttggaatagtttagagggctcagaagaagacagcaaaatgagggaaagtttgaaactttctagagacttattaagtta

SEQ ID NO: 120198 - DNA, 552 bp, Homo sapiens
caactttttttttaatgaaacaatttaaatatacaaaatgtttttactgcaaaagcttaaaatgagttttakcaatagtagattaggctaatcagaacagaagtatttatgcagcatattcaattaaaatattagcagcatcataactaataacagcagacatttctatcagcactcagagaatatggtaaataggtattttatgttgaaagatattataaataacaaacataataaagaattcttccctccaaaattgtgtggtataataactgggttatgttggaagagcacaacgtcatgtttttagatagaaatagtctaaaaaattggctttatatttttaaatgcctggaagcagtgaacagagggacgggttcagtttatgaaaacttgagatataattctgtcttgggagagcaaagaaggggcagaatcatagccttggaagggaaattgatggatggagaaccctatggatactcacatctgttgaattcctgctcttttccctttgggtgcaatgtattcaatagtgcattcgagtcacat

SEQ ID NO: 120199 - DNA, 605 bp, Homo sapiens
gttgtgggagggatccagtgggaggtaattgaatcatgggtgcaggtctttcttgtgctgcttttatggtagtgaataagtctcccaagatctgatggttttataatgaggtgtttccctgcacaagctctcttctcttgtctgccaccatgtgagatgagcctttcatcttctaccatgattgtgaggcctcctcagtcatgtggaactgtgagtccattaaaccacttctatcttataaaatacctaatctcagggatgtctttaccagtaatgtgaaaaatggactaatacagttggttatttgcaaggtaattttattttatgggtttattttatggtcaagagtttctaaaactaaggctatataggatctcatgttaaaacctagcaatgagatttataataaaggatatggctacatttttgaccactgatagctttacttttctttcttttccacattaggccaagctgattttaaaacccgctagcttcttccctggtcactagcaggaagtttgaagcccataaattccctgtgggtgcataggaacatttmcccagaacattcctctagtcactataagggcccaatccactct

SEQ ID NO: 120200 - DNA, 560 bp, Homo sapiens
ctgcatttcctgtgatgtgggtgaaagtagtgattcgacaggttggtcaattctctctctggtttttcagaagtttgcgccatagactcttgtcttctgatgtcccctcattctttcttgtggttccctggggcaggatttaaaatggcaatctggctctccactgagagggctcagtgagccttaaaaacacttacacatcctttgctctgacgctgtaggagcacaggccacctgcccttcactcccttgtctttatcctgcttctgcatgtaatgccagcctgaagtctctggcttcaggactttccaaatgggagtcaggcaccaatccactcacttgatgtaaagggagaagggccctccactactcccctgaggtgggcagagaracaatcacagaatcatattctgcaggtacatgtaccacaaattcttctccttttaaaaacaatttgcttcctttatgctctcaatataggtcaagggttgttatgagccatgttaccagttttcaggtatctactttaagactcctttaggatggtttgtctcaaaact

SEQ ID NO: 120201 - DNA, 417 bp, Homo sapiens
cacgaggtcaggagatcaagaccatcctggctaacacggtgaaaccctgtctctacttaaaaaatacaaaaaattagctgggcgtggtggcaggtgactgtagtcccagctactggggaggctgaggcaggagaatggtgtgaacccaggagacggagcttgtagtgagcggagatgcaccgctgcacgccagcctgggcgacagagcgagactccatctcaaaaaaaaaaaaaaaaaaaaatagctagtgtggccaaggaactgaattcttaattttatgtaattttaatttcatttaaatatacatgtaaatagccagtggctactaaattggacagcacagatttagatartggtggggattttgcagctattgaaggactttagctcttcggattccttggggttggggcaag

SEQ ID NO: 120202 - DNA, 596 bp, Homo sapiens
attttcaccatatcttcaagaactattaaaataagttcatatcagtgctaatgttgttcacgtaagacttagaagaaatgactgtaagaaaaataatgtctgtctgccacctcagttctattacgactattaatargattcaagataggcagggtttcttgacctgtggcacatggactccatagtacctatgaaccattttaaaacatacgaaaattcatgtctatgtatttttgtagagaaagtcccaaaattttcaggatattattaaagaaaatcgagaactcaggcaaaaattacacatgtagagacaaaatgtcaaccaaaaaattttagtcatagggaactaaagggagaaataaaatgataacaataaaaagtaattctagagaagattgttacctttcatcgcatggtatggaaaagcaaggagtagaaaacagagagtagaaaaggctgaactcttctcctttctaattaatgaggccatgagtgaaataatctgatatagggagagccaggtttcatttctaaattcagggtgaaaaagcaaagagaagctgcccacattgtatacaaatccataaattatagag

SEQ ID NO: 120203 - DNA, 375 bp, Homo sapiens
ctcaccggaacctgtcttgccaggacctgacctcagcagactgagtcataccagcatcatccttgttggggcccaggtctgcatcccgcttccggccccagccccactgttagctccatcaggtcctctggggcacaccaaggaggccgttttctctccctttttctgaattagatccccagaaasaagacatcaggcttcctggggaaatctaattttgctcatgaatttgaccattcattgttgctcagttacctgtgcccagctctttctgccttttcaaactgcactcagctgtgcccttgaatgaactggggcagaagtccttaggtcctgatcacacatgctgttcccaacttcccttccccttgacac

SEQ ID NO: 120204 - DNA, 577 bp, Homo sapiens
ctatcatgaaacaaacacacaaatacagttctccacaaatgtacatatagtagctattttggacttttaaatctggcttayagctgcagttgtataagccattttctatatcctctttttttttcttaaccaatccaaatatatgcttttttttttaaccagaagaatgattacaacatgacaaaatgtttgttctctcttgcatttaaagaattattgtgaaagtccatatatacatttctttgtaaaatgggaatttcacaagaagtatatggaacgatatatctaaggctgatcatagagttttgatggaaataattttatttacaataaattttaaagagtgctaaacacatattggaaacagaatgctaacacattagaatgcaagggtgaccaaaaagaaaaagaaaaagtagttcaagaagtgaccagtctgcatgccaagctcatgcctccccataacataataagaagggccctgctatggcaacatatctcctcagccatctagtcgcccatccacccacccattgttttctttttccacatcacatttttttaatttattatgttt

SEQ ID NO: 120205 - DNA, 543 bp, Homo sapiens
atgtgctctccttgctgcccttccctgctttggcagtttctacctttagttatcctgattagttttctttctttaatgtggggagtggagggtgtggtgaggagtatcaaacacaagattagagtagttgtacttgaactagtatttttcttaacaaaatgtctttatttttaaattaaatcatacctctaaagtttartaggagagaataaaaatagaaaagggcttcactagactatacagaactcctaggaaattttctttataatttgagtcttgtttccattgtgtgttacttgtatagctctgagtaagttaccgaactcttcgaaatttcagtttactcagagacgaaatagacaatcaatcataagaatctttcagggatcaagtaagattgtcaatacaaatacatttctaaaatataaagcactctggaaatcaagatcttggcaattattaggtctctgaaggcagagtttgtatcttactttaaacaaatattcttgtaacactttgtagcatattgctgagtgcatggag

SEQ ID NO: 120206 - DNA, 621 bp, Homo sapiens
catgtatgtgtgttaacctactgagccttctttttagtatgtattgaaagtaacttggcagaggtaattttttctgaaaaatgtctgggtatattatggttagtcagttgtagtatatcctgcagacctaataaggacaagttattgtttgttcattcaagcagaatatttactatttcacttctgttccaatatattaattttattcttctcttaagctcataccacactctatattttcctttgagaragccgtggcagatagtagtctaagcccgagactggagtgtggggtgagtgtgcatggggtggagggtcgtgatgattgtgtaaataggtcaaagacactataggctagatgtgagttaaataatgagtcaaccattgtaaattaaaatgacaaaaggatggctttattttcatattacactttctgcatgcactaacagaaaatgaatttactctgtaaaaatattactaagtgcaggcccaaaagattattaaccaaaagtatgggtattgattgtatagctcaagattattatgaagctgcaaaaagtagttctgatagagcatttttcaaaaaaatttaattgagacagatatagttcgcatttaata

SEQ ID NO: 120207 - DNA, 526 bp, Homo sapiens
gcttcctacagttcctaaatatagaaaggaagatgacacattttagtcctaactgataagcaaaattggaattgctctaggaaaatctgataaaccactcctatcgtgatgaaaaatggaagggcttcattcatgatagaaaaattctagggagtagaattgtaggctgsaatcaatccttctttgctgtatgtaaacttttactccacatttgtatcagggaaaaagatccctttggtttagtactacctacgtgtgtaagaataacatataaacagttggagatgtggaatttttatagttatcacaaatatttaagccaatctgtaaatttctacatgtttagacttggctatgtgtcaaaaaacttttttttattttttaatatatggattctcactatattgcccaggttggatggcatgtggtgactattcacaggtgcgctcacagcacaccacatccttgaactcccaggctcgagggatcctcttccttcagcctcccgagtagctgggactacagg

SEQ ID NO: 120208 - DNA, 526 bp, Homo sapiens
gcttcctacagttcctaaatatagaaaggaagatgacacattttagtcctaactgataagcaaaattggaattgctctaggaaaatctgataaaccactcctatcgtgatgaaaaatggaagggcttcattcatgatagaaaaattctagggagtagaattgtaggctgcaatcaatccttctttgctgtatgtaaacttttactccacatttgtatcagggaaaaagatccctttggtttagtactacmtacgtgtgtaagaataacatataaacagttggagatgtggaatttttatagttatcacaaatatttaagccaatctgtaaatttctacatgtttagacttggctatgtgtcaaaaaacttttttttattttttaatatatggattctcactatattgcccaggttggatggcatgtggtgactattcacaggtgcgctcacagcacaccacatccttgaactcccaggctcgagggatcctcttccttcagcctcccgagtagctgggactacagg

SEQ ID NO: 120209 - DNA, 526 bp, Homo sapiens
gcttcctacagttcctaaatatagaaaggaagatgacacattttagtcctaactgataagcaaaattggaattgctctaggaaaatctgataaaccactcctatcgtgatgaaaaatggaagggcttcattcatgatagaaaaattctagggagtagaattgtaggctgcaatcaatccttctttgctgtatgtaaacttttactccacatttgtatcagggaaaaagatccctttggtttagtactacctacgtgtgtaagaataacatataracagttggagatgtggaatttttatagttatcacaaatatttaagccaatctgtaaatttctacatgtttagacttggctatgtgtcaaaaaacttttttttattttttaatatatggattctcactatattgcccaggttggatggcatgtggtgactattcacaggtgcgctcacagcacaccacatccttgaactcccaggctcgagggatcctcttccttcagcctcccgagtagctgggactacagg

SEQ ID NO: 120210 - DNA, 526 bp, Homo sapiens
gcttcctacagttcctaaatatagaaaggaagatgacacattttagtcctaactgataagcaaaattggaattgctctaggaaaatctgataaaccactcctatcgtgatgaaaaatggaagggcttcattcatgatagaaaaattctagggagtagaattgtaggctgcaatcaatccttctttgctgtatgtaaacttttactccacatttgtatcagggaaaaagatccctttggtttagtactacctacgtgtgtaagaataacatataaacagytggagatgtggaatttttatagttatcacaaatatttaagccaatctgtaaatttctacatgtttagacttggctatgtgtcaaaaaacttttttttattttttaatatatggattctcactatattgcccaggttggatggcatgtggtgactattcacaggtgcgctcacagcacaccacatccttgaactcccaggctcgagggatcctcttccttcagcctcccgagtagctgggactacagg

SEQ ID NO: 120211 - DNA, 623 bp, Homo sapiens
gcttataaaatccactcttctttttagtgagaacctacatggactgtttgccttacctcagcatgagagcttttattcccttaagtaaagttgcgaaacagtccaagtgggctctggcagtgtttcatcagttagcgaagtctgcagtagagaaagaatatgaaaaaaaataaagaaaggaagaaatgctttcagttctctgaattctacgatgcagataaagttggaaagaaaggagaaattatctggaaaaattggtccagttggagatacagagcagaaaatggaagacacattttagatatctcctctcgttactttatatagtgtgagttttccataaatggaaagtgttgtgcagaagggtttagaaatatatttgcaattttcacattaaaagtgaagggaaacatacagggaataagaacagggcaaactctgaatctggctgaggaaaaaaaaatccattttaccagctggagaaaagcctggrtaataagtagagacaatgtgatttgtgaggcaagttgcaaaaaggcacttaagatgggagagggaaagcaaaagacgacagcatttggggacttattgggcaacaataaaatcgctttcaacatgcatcc

SEQ ID NO: 120212 - DNA, 619 bp, Homo sapiens
gaatattcaatatcctccctctagctatatattatcaactacagtcatcctacaatgctatagaaatgctattattaacttcattttatagattaaaaaataagaggcttacagcataaataacttgctaatagggttgatagctgaaattttaatctaattttgtttaactacaagtactctatctgctcttcgtaggagaaacaacactgagtccatgattcagaaaatctgggttctagtcacatttcgctattaattagttatgccatttaagggaaaatgtagaatctcttcttctctastctattaattgaaggagcagtaattctcatgaaattaaatctttatatttgtaattgatcacacagaagtgaatatgattttacatagaaaagttaaattataaagggcaattatatgaaatgttattcgatcaaatgagccatcttctctatatgagacccaaaacccatactgaaaacagcaatattttggagcaatgcacaaagcactggaaatggataaggaaattctaagagctttcttattttaaaatccatgcactgctttacatccatttctggcagacatcctggttaaagcaggaaatgaaaag

SEQ ID NO: 120213 - DNA, 606 bp, Homo sapiens
tgttacatacaccatgggatactacttaaccataaaaaggaacgaaataattgcattcacagcaatctggatggaaatggagactattattctatgtgaagtaactcagaaatggaaaaccaaacatggtatgttctcactcataagtgagagctaagctatgggggcgcaaaggcataagaatgatacaatggrctttggggactcaggggaaagagtacgagtggcgtgagggatgaaagattacacattggacatattgtacactgcctgggtgatgggggcaccaaaatctcagaaatcaacactaaagaacttattcatgtaacaaaataccacctgttcccccaaaacctattgaaatgaaaaataaatttaaaaaatagtgttgggaaaactatatacaggagaatgaaactagattctcatctttcaccatataaaaaattaactcaaaatggattaaacacttaaatgtaagacctgaaactatgaaactaccagaggaaatgatacagaacattggtctcaaaaaagatttttggggtaaggcctcaaaagcacaggcaacaaaaacaaaaaaaataacaatagacaaattggatt

SEQ ID NO: 120214 - DNA, 606 bp, Homo sapiens
tgttacatacaccatgggatactacttaaccataaaaaggaacgaaataattgcattcacagcaatctggatggaaatggagactattattctatgtgaagtaactcagaaatggaaaaccaaacatggtatgttctcactcataagtgagagctaagctatgggggcgcaaaggcataagaatgatacaatggactttggggwctcaggggaaagagtacgagtggcgtgagggatgaaagattacacattggacatattgtacactgcctgggtgatgggggcaccaaaatctcagaaatcaacactaaagaacttattcatgtaacaaaataccacctgttcccccaaaacctattgaaatgaaaaataaatttaaaaaatagtgttgggaaaactatatacaggagaatgaaactagattctcatctttcaccatataaaaaattaactcaaaatggattaaacacttaaatgtaagacctgaaactatgaaactaccagaggaaatgatacagaacattggtctcaaaaaagatttttggggtaaggcctcaaaagcacaggcaacaaaaacaaaaaaaataacaatagacaaattggatt

SEQ ID NO: 120215 - DNA, 633 bp, Homo sapiens
gggctattgtgaataatgctgcaataaacatggaagtgcagatatttctttaacatgctgatctcaaatccttggctatatacccagaagtgggattgctgcatcatatgacaattctatttgtagtttttgagaaacyccatactgttttccatagtagcagtggtaatttacattccaccaacagggtgcaagggttcctttttctgcacattcttgccaacacttgttaaatttcatctttttgttaatagccattctgacatgtatgagataatatctcattgtggttttaatttgcatttctttaatgattagggatgttgagcatttttaatgtatctgttgaccacttgtatatcttcttttgagaaatgtctattcatgtcctttgaccattcttaaattgggttgttttattgctattgggttacttgagttccttatatatttgggatattaaccctttgccagatgtatggtgatatggtttgactgtgtccccacccaaatctcatctttaattgtagttcccataatccccacgtgttgtgggagggactcaatgggagttaattaaatcacagggggcagttacccccatgctgttctcatgatagtgagttctcataa

SEQ ID NO: 120216 - DNA, 617 bp, Homo sapiens
gagtgcctaacgcagctcatcgctactcccaacaggacagttccagtaattcaatgttattccctcttatggtacacacccatgtccacactgtccaatctataaacaaaaagactgttaaacagggcttacggttcgcttcacagaggcctcaggagaagtctccatgcttgcttttaaatcaactctttgttcccacacagactgaccacygttatctcctttgactctcactgcatcatgcagtagcaggtggctaaccccatgcaccaggaaggaaagtgaagcacaggcacagcccatgacacactttgtgtgagatgagctggaacctgcagctcctggctccaactcctaagaactcctctactcagcagggctctgcaggttcccactgggtccacttgtgcagaagggattgtgaggccgcccatgccagaggcagctccctgcaccctcaggaaaggcttccttacctctaacccagaccttcctggtctgctcagcctgcttctttggacttaactggagctgccacccttaaccacatctattccatgtctctgttcttgtattctcccaaatatccagagcccagtttctttcctttcttctct

SEQ ID NO: 120217 - DNA, 617 bp, Homo sapiens
gagtgcctaacgcagctcatcgctactcccaacaggacagttccagtaattcaatgttattccctcttatggtacacacccatgtccacactgtccaatctataaacaaaaagactgttaaacagggcttacggttcgcttcacagaggcctcaggagaagtctccatgcttgcttttaaatcaactctttgttcccacacagactgaccaccgttatctcctttgactctcactgcatcatgcagtagcaggtggctaaccccatgcaccaggaaggaaagtgaagcacaggcacagcccatgacacactttgtgtgagatgagctggaacctgcagctcctggctccaactcctaagaactcctctactcagcagggctctgcaggttcccactgggtccacttgtgcagaagggattgtgaggccgcccatgccagaggcagctccctgcaccctcaggaaaggcttccttacctctaacccagaccttcctggtctgctcagcctgcttctttggacttaactggagytgccacccttaaccacatctattccatgtctctgttcttgtattctcccaaatatccagagcccagtttctttcctttcttctct

SEQ ID NO: 120218 - DNA, 631 bp, Homo sapiens
agtgtgtgagaatagatgcactaccggggaattttattaccagaagaaaccctccagtataatttataaatacaaaaactgaggttttaatgttactaagttaatgttaaagctcattattattactccttaaagattctgggtttcgaggtgtctatattacctcatgagtttggtaaaaacagagaacattgaatcagtgactgaaaaaggaggaaattcagttccgggtaaagaaggttttgaggcactattctctttcaaaaatctcaatatactagatgttgcagtgagacactgttgtttccatrttttgtttcatcacttttatgtcagtgttctgtaacctattgtgtccagaattggtgggttcttggtctcactgacttcaagaatgaaaccacagaccctcgcagtgagtgttaccgttcttaaaggcggcattgtctggtgttcgttccttttgatgttcagatgtgttcggagtttcttccttctggtgggttcgtggtctccctggctcaggagtgaagctgcaaacctttgtggtgttacagctcttagggcagggcgtctttagctgttccttcctcccagtgggttcgtagtctagctggcttcaggagtgaag

SEQ ID NO: 120219 - DNA, 457 bp, Homo sapiens
cccagaaataaatctacacatttccagacatctgatctttgacacagatgccaagaacacacaaagggaaaaagatagtttgtttaataacaaatgttcaaaaaactggatatccatatgcagaagagtgaaattgtattcttatctcacatcatatacaaatatcaacttaagatggattaaagccttcagcatagtaaatgaaactttaaaatcctaccagaaaacaggaaaagagtttctcaacaytggtcttgaaataatattttggatataacaccaaaagcataggcaacaaatgcaaaaaacagacaagtgtatttcatcaaatttaaatgtttctgcacagcaagggaaatattccatagattgcacaatctatggaatgggacaaaatgtttgcaaactatacatctaataaggggataatatccaaaatatataaggaacttgtaca

SEQ ID NO: 120220 - DNA, 595 bp, Homo sapiens
gaaccagggcacttagccgtgcaggaacaatggcaagcctttagcccgatcgggagcagcaatgagtgccttgctggatcaggagcacagcagacaccctgccagatccagagggatggaagtcagcggtgggtctgtgaaggtggccagcagcagtggtggagggcgactgaaagctcagcccgagccataacaaacatggaccagaagagtgcagttgcaagatttaatagagtgaaagcagagctcccatacaaagggaggggacccaaaggtggttgccgttgccggctcgaatgcctgggtttatatcccgatgcttgtccctcccrctgtgctctcaggcaatagatgattggctatttctttacctcctgtttttgcctaattagcattttagtgagctctctgattggtcaggtgtgagctaagttgcaagccccatgtttaaaggtggaagcggtcaccttcccagctaggcttagggattgttagtcggcctaggaaatccagctagtcctgtctctcactagtagaggggaaatgtggggttggaggtctcatgcagagtccccactggggcactgcctagtgg

SEQ ID NO: 120221 - DNA, 602 bp, Homo sapiens
caaagtaagacgtgaaaagaggaaaatgtttcagtcttacaattagatctcagtcttttggtgaccccctatccctggactgtgaactttcaaacacttctcaggtccccacctcccaaagtgggctaggaaaactagaggaagctggagttggatatttcccttcccctaactgcgttaggctctgataaacattggcacattaggttctggtaaaatagtttctcctgagggcagactttgttacagaatgttctgatgtatttgaaatggctacaattcccctccctctactgaaaatgagatttttttttcctttgataattgctgtgaggaggtggtagagctcctgtaggtaaaactcacaaaagaacgggtatgcccctatgactaatcctttctagacacttttggaacaagtctcactttcagacttgttcaaactgagccttcascaatttgtcatttacagcttaggttttccttacccagcactgcttccagtggaggtttatactcatggatttctgctcaggtaagttgtgattttctatatttgcctttctcaccaatttttgaagcagtggtttgccctgtaacct

SEQ ID NO: 120222 - DNA, 609 bp, Homo sapiens
gatgtgtgcattcatctcacagagttaaacctttctatggattcagcaatttggaaatacttttgttgaagaatctgtraagggatatattggaacttaatgaggtcaatggcaaaaaagcaaatatcccaggaaaaaaactagctggaagctatctgagacactgctttgtgatgtgtgcattcacctctcagagataaacctttcttttcattcagcagtttggaaacactgtttttgtagaatcttcgaagtgatatcttggagtgcattgaggcctaaggtgagaaaggaactatcttcagataaaaactagaaagaagctttatgagaaattgctttgtgatgaatgaattcttctcacagtgttaaaactttctgtggattcagcagtttgcaaacactatttttgtccattctgcaaatggacatttggaaactcattaaggccaatgatgaaactgcaaatatcctaggataaaaactagaaaagagctatctgagaaccggctttctgaggtgtgctttcacctaggagagttaaaactttcctttaatacagcattctggaaacactgttttggcagaatctgtgaagggatattttgg

SEQ ID NO: 120223 - DNA, 609 bp, Homo sapiens
gatgtgtgcattcatctcacagagttaaacctttctatggattcagcaatttggaaatacttttgttgaagaatctgtgaagggatatattggaacttaatgaggtcaatggcaaaaaagcaaatatcccaggaaaaaaactagctggaagctatctgagacactgctttgtgatgtgtgcattcacctctcagagataaacctttcttttcattcagcagtttggaaacactgtttttgtagaatcttcgaagtgatatcttggagtgcattgaggcctaaggtgagaaaggaactatcttcagataaaaactagaaagaagctttatgagaaattgctttgtgatgaatgaattcttctcacagtgttaaaactttctgtggattcagcagtttgcaaacactatttttgtccattctgcaaatggacatttggaaactcattaaggccaatgatgaaactgcaaatatcctaggataaaaactagaaaagagctatctgagaacyggctttctgaggtgtgctttcacctaggagagttaaaactttcctttaatacagcattctggaaacactgttttggcagaatctgtgaagggatattttgg

SEQ ID NO: 120224 - DNA, 518 bp, Homo sapiens
agatatctgacaaaccgctttgggatgtgtgcattcatctctcagagttaacttgttttwcattcagcagtttggaaacactgtttttgtagaatctgtgaagggatatttgggagctcattggggccaaaggtgaaaaagtaaatatcccacgataaaagctagaataagctatctaagaatatgctttgtgatgtgtgcattcatctgacagagttaaatgtttcttttcattcagtagttttaaacacattttggtagaatctgcaaaatgatatatgggggtgcattgaagcctatggtggaaaaggaaatatcttcatataaatactagaaagaagccttctgacaaattgctttgtgatgtgtgctttcatgtcacagagttaaacatgtctttggatacagcatttgggaaacactgtttctgtccattctatgaatggacatttggcagctcattgaggccaatggtgaaaaagtgaatatctcaggataaaaacttgaaagaacctgtc

SEQ ID NO: 120225 - DNA, 518 bp, Homo sapiens
agatatctgacaaaccgctttgggatgtgtgcattcatctctcagagttaacttgtttttcattcagcagtttggaaacactgtttttgtagaatctgtgaagggatatttgggagctcaytggggccaaaggtgaaaaagtaaatatcccacgataaaagctagaataagctatctaagaatatgctttgtgatgtgtgcattcatctgacagagttaaatgtttcttttcattcagtagttttaaacacattttggtagaatctgcaaaatgatatatgggggtgcattgaagcctatggtggaaaaggaaatatcttcatataaatactagaaagaagccttctgacaaattgctttgtgatgtgtgctttcatgtcacagagttaaacatgtctttggatacagcatttgggaaacactgtttctgtccattctatgaatggacatttggcagctcattgaggccaatggtgaaaaagtgaatatctcaggataaaaacttgaaagaacctgtc

SEQ ID NO: 120226 - DNA, 518 bp, Homo sapiens
agatatctgacaaaccgctttgggatgtgtgcattcatctctcagagttaacttgtttttcattcagcagtttggaaacactgtttttgtagaatctgtgaagggatatttgggagctcattggggccaaaggtgaaaaagtaaatatcccacgataaaagctagaataagctatctaagaatatgctttgtgatgtgtgcattcatctgacagagttaaatgtttcttttcattcagtagttttaaacacattttggtagaatctgmaaaatgatatatgggggtgcattgaagcctatggtggaaaaggaaatatcttcatataaatactagaaagaagccttctgacaaattgctttgtgatgtgtgctttcatgtcacagagttaaacatgtctttggatacagcatttgggaaacactgtttctgtccattctatgaatggacatttggcagctcattgaggccaatggtgaaaaagtgaatatctcaggataaaaacttgaaagaacctgtc

SEQ ID NO: 120227 - DNA, 621 bp, Homo sapiens
ggaaatactctttttgtccattttgcgaatggaaatttgggagctcactgagggcaattgtgaaaaagcaattatccccagataaaaactagaaggaagttatttgacaaactgttttgtgatgtgtgtgttcaatgaagagagagaaaattttcttttcattcagcagttcagaaacactgtttttgtagaaactgtgaaggaatatttgtgagtgcattgaggcatgtgktaaaaaaggaatcatcttcagataaaaactagaaagaggttttctgagaaactgttttgtgatgttgcattcatctcacaaagttaaaattttctttggattcagcagttttgaaacactgttattgtccattctgcaaatgtactcttgggaactaattgaggccaatggctagaaagtaaatatcccaggataaaaactagaaggaaggaatcagagaaaatgctttgtgatgcatgcattcatctcacagaggtaaacttttcttttcattgaacagtttggaaacactgtttttgaagaatctgtgaaggaatatttgggaacgcattgatgcctatggtgaaaaaggaaacatcttcagaaaaaaataagaaaagttttctgag

SEQ ID NO: 120228 - DNA, 621 bp, Homo sapiens
ggaaatactctttttgtccattttgcgaatggaaatttgggagctcactgagggcaattgtgaaaaagcaattatccccagataaaaactagaaggaagttatttgacaaactgttttgtgatgtgtgtgttcaatgaagagagagaaaattttcttttcattcagcagttcagaaacactgtttttgtagaaactgtgaaggaatatttgtgagtgcattgaggcatgtggtaaaaaaggaatcatcttcagataaaaactagaaagaggttttctgagaaactgttttgtgatgttgcattcatctcacaaagttaaaattttctttggattcagcagttttgaaacactgttattgtccattctgcaaatgtactcttgggaactaattgaggccaatggctagaaagtaaatatcccaggataaaaactagaargaaggaatcagagaaaatgctttgtgatgcatgcattcatctcacagaggtaaacttttcttttcattgaacagtttggaaacactgtttttgaagaatctgtgaaggaatatttgggaacgcattgatgcctatggtgaaaaaggaaacatcttcagaaaaaaataagaaaagttttctgag

SEQ ID NO: 120229 - DNA, 482 bp, Homo sapiens
attcactttttccccattggcctcagtgagctcccaaatrtcccttcgtaggttctacaacagtgtttctaaactgctgagtccaaagaaacgttttactctgtgaaatgaatgccaacatcagaaagcagtttctcagaaagcttctttcgagtttttatctgaagatatttcctgtttcaccatgggcctcaatgcactccctaatatagctgcacagattctataaaaacagtctttccaaacggctggaagaagagaatggtttaattctgtgaaatgaatgtacacatcacaaagtggtttctcagaaagtttctttctatttttttagaagatactttctttttcaccagagtcctcaatgctctcccaaatacaccttcacagattctacaaaaaaagatttccaaactactgaataaaaaaatgatttaactctgtgatatgaatgcacacatgacaaagaaggttctcagata

SEQ ID NO: 120230 - DNA, 482 bp, Homo sapiens
attcactttttccccattggcctcagtgagctcccaaatgtcccttcgtaggttctacaacagtgtttctaaactgctgagtccaaagaaacgttttactctgtgaaatgaatgccaacatcagaaagcagtttctcagaaagcttctttcgagtttttatctgaagatatttcctgtttcaccatgggcctcaatgcactccctaatatagctgcacagattctataaaaacagtctttccaaacggctggaagaagagaatggtttaattctgtgaratgaatgtacacatcacaaagtggtttctcagaaagtttctttctatttttttagaagatactttctttttcaccagagtcctcaatgctctcccaaatacaccttcacagattctacaaaaaaagatttccaaactactgaataaaaaaatgatttaactctgtgatatgaatgcacacatgacaaagaaggttctcagata

SEQ ID NO: 120231 - DNA, 508 bp, Homo sapiens
atagcttccttttagtttttgtcctgggatagtcaccttttcacctatggcctaaatgagctatcaaatatcccatcgcagaaaaaaaacaaaaaaagtgtttccacactgctgaatccaaataaaacttcaactctgtgagaggaatacacacatcacgaagcagtttctcagaaagcttctttcaagtttttatgtgaagatatttcctttttcaccacaggcctcaatgcactcccaaatatacctaggaagattctaccaaaatgttgcttacaaattactgaatgaaaagaaaggtttaaytctgggagatgaatgcacacatgacagtgcagtttctcagacagcttcctgctagtttttatcctgagatattagctttttcacctatggcctcaaagagctatcaaatatctcttctcactttctacaaaagcagtgtttccaaactgctgaatccaaagaaaggtttacctcagtgagataaaatcacacatcacaaagc

SEQ ID NO: 120232 - DNA, 590 bp, Homo sapiens
agtgtttacaaacagctgaatgaaaaataatgtttacttctatgagatgaatgtacccatcacaagtcagtttctcacatagcttccttttagtttttgtcctgggatagtcaccttttcacctatggcctaaatgagctatcaaatatcccatcgcagaaaaaaaacaaaaaaagtgtttccacactgctgaatccaaataaaacttcaactctgtgagaggaatacacacatcacgaagcagtttctcagaaagcttctttcaagtttttatgtgaagatatttcctttttcaccacaggcctcaatgcactcccaaatatacctaggaagattctaccaaaatgttgcttacaaattactgaatgaaaagaaaggtttaactctgggagatgaatgcacacatgacagtgcagtttctcagacagcttcctgctagtttttatcctsagatattagctttttcacctatggcctcaaagagctatcaaatatctcttctcactttctacaaaagcagtgtttccaaactgctgaatccaaagaaaggtttacctcagtgagataaaatcacacatcacaaagcagtt

SEQ ID NO: 120233 - DNA, 566 bp, Homo sapiens
gattcagcagtttggaaacacggttgttgtagaatctgtgaagggatatttgggatctcattgaggccaatggtgaaaaagtgaatatccctggataataagtagaaggaagctatttgagaaactgctttgtgatgtgtgcattcatctcacagacttaaacgtttcttttcaataagcagtttggaaactgttttcatagaatttgtgaggggtatctgggagttcattcaggtctatgatgaaaaaggaaatatctacagataaaaactagaaagaaggtttctgagaaactgctttgtgatgtgtgcattcatctcacagagttaaaactttctgtggagtctacagtttcaaacactgtttttgtccattctgtgaatggacatttgggagggcattgaggccaatggtgaaacagygaatatcccaggataaaaacaagaaggaagctatctgagaaactgctttgtgatgtgtgcattcagcttgcagagatagaacatcgttttcgttcaacagcctggaaacactgttttggcagaattctcaaagggatatttggg

SEQ ID NO: 120234 - DNA, 533 bp, Homo sapiens
cttttgttgccactgtactgcactgttcccctccattctccctgaaggtttaaatttaatgcctgcctgacagcctttcgtctgccacgctgctgttacattgatacacactttatacctgactcagtgagggagaaagggcaggtaccactgagcagatggagaggtcctgtggtttacccttcctttaaagtcgccagattcctattgcacctcagtgatcactgatgtgaccctgtgaagtgtgacccagccctggatgatcaggggctgtgcactaaacttcagctctaatcctaaagtatatgttggggatttaaaaccagacgtttctaatctaaagggcgtgaaagcatcatattgatccactagataatgttaagaaaaaaacyatatggcccatagatgtttgcaaccaattaaggattaagggaaaaaaatgtttcaaagtccaatctctttaactctttgaaacttcccaaggtagctgaggcaataacccttgttctcgatagttataataaaacaaggat

SEQ ID NO: 120235 - DNA, 533 bp, Homo sapiens
cttttgttgccactgtactgcactgttcccctccattctccctgaaggtttaaatttaatgcctgcctgacagcctttcgtctgccacgctgctgttacattgatacacactttatacctgactcagtgagggagaaagggcaggtaccactgagcagatggagaggtcctgtggtttacccttcctttaaagtcgccagattcctattgcacctcagtgatcactgatgtgaccctgtgaagtgtgacccagccctggatgatcaggggctgtgcactaaacttcagctctaatcctaaagtatatgttggggatttaaaaccagacgtttctaatctaaagggcgtgaaagcatcatattgatccactagataatgttaagaaaaaaactatatggcccatagatgtttgcaaccaattaaggattaagggaaaaaaatgtttcaaagtccaatctctttaactctttgaaacttcccaaggtagctgaggcaataayccttgttctcgatagttataataaaacaaggat

SEQ ID NO: 120236 - DNA, 602 bp, Homo sapiens
ttttctctccttggatttttgttttgctggraaaaaaaatgtttttttttttcttctcggtcaactgaattatttttctccatcttgttttgccactcttactgcacacaagtggccctaagataacttctgagagcatgggactccttgggaaaaacaaaggaggtgccactgaccctgttttggaaaaaacttctgtttttcttatggaatcccaggaatgaaaaatggatatatccctctcaaaatctgtttttatcttccagctatacctgcttattaggccctagaaactgcatgctttcctagccctgctgcttgacgagctctaccctgaggccagtaatccaattaggagattggcaaacaaaaaattcttacaactactgaatcttcttctgtctgtctgtgtagttttatatgtgttatgtgtgtgatgtttacattaaaaagagctctaatgaattggtttaaacaaaataagcactagatcaaatatttttaaagaaaaaataaaagctgtaatgccttttagttcatgtgactttaatctttaagaaataaaaacacagtttgaaagattggtaaaatacaaatgtctt

SEQ ID NO: 120237 - DNA, 504 bp, Homo sapiens
gttttcctacatctgtgtcactcattctggataagtatttaatagccaagatattttgaagtttacaagttgttcacagtgtgaactccaaaacatggatagaaactagtagtttttactctgattacaaatacagtgcattctctatagataatttgaaaaataaamatcaaccgaaattatatcacctcaagataacacctgttagtattttctccctgtaatcattctatccaatttaatttatatttatataatccattttgacttatgaaattttaaagtcatataattatacttatttaaaatacatttatatttttatttaaaatggcaatatttgactgttttgactaaaaaaaagggtaatgacttacaattcaattttatttaacacacagttttatcctgctttctcctctaatattatattgtcatcatttaaacatgtcttgatttttgttcgttgcctaaaatttctttccacagttgttactatatttt

SEQ ID NO: 120238 - DNA, 504 bp, Homo sapiens
gttttcctacatctgtgtcactcattctggataagtatttaatagccaagatattttgaagtttacaagttgttcacagtgtgaactccaaaacatggatagaaactagtagtttttactctgattacaaatacagtgcattctctatagataatttgaaaaataaacatcaaccgaaattatatcacctcaagataacacctgttagtattttctccctgtaatcattctatccaatttaatttatatttatataatccattttgacttatgaaattttaaagtcatataattatacttatttaaaatacatttatatttttatttaaaatggcaatatttgactgttttgactaaaaaaaagggtaatgacttacaattcaattttattkaacacacagttttatcctgctttctcctctaatattatattgtcatcatttaaacatgtcttgatttttgttcgttgcctaaaatttctttccacagttgttactatatttt

SEQ ID NO: 120239 - DNA, 504 bp, Homo sapiens
gttttcctacatctgtgtcactcattctggataagtatttaatagccaagatattttgaagtttacaagttgttcacagtgtgaactccaaaacatggatagaaactagtagtttttactctgattacaaatacagtgcattctctatagataatttgaaaaataaacatcaaccgaaattatatcacctcaagataacacctgttagtattttctccctgtaatcattctatccaatttaatttatatttatataatccattttgacttatgaaattttaaagtcatataattatacttatttaaaatacatttatatttttatttaaaatggcaatatttgactgttttgactaaaaaaaagggtaatgacttacaattcaattttatttaayacacagttttatcctgctttctcctctaatattatattgtcatcatttaaacatgtcttgatttttgttcgttgcctaaaatttctttccacagttgttactatatttt

SEQ ID NO: 120240 - DNA, 608 bp, Homo sapiens
gggccctcctaaagtataaggtcagactaagcctaaaatatctactcgtgcaaagcggcccaacattaattggatcagactgttttataatacatgccccgttggtcaaaaacwatacaacaatcagctagaatttggtggaggtcaacaatggaggctgagtgtccgatcatgtgttagtctgttttcacgcggctgataaaaacataccagaggctgggtaatttataaattaaaaaaagtttaatggactcacagttccacgtggctgggaggcctcacaatcatggctgaaggcgaaatgcacaccttacgtgtcagcagacaagagaagacaacttgtgcaggggaactcccctttataaaaccatcagatctcatgagacttattcactatcatgagaacagcacaggaaagacctgcccccatgattcaattacctcccactgggtccctcccacaacaggtgggaaatgtgggagctacaattcaagatgagattgcgttgggaacacagccaaaccatataagataataagaggcagatgagccagttaatcaactgagaaagcaaaggtcaaagagacatcctggctaaattaccagt

SEQ ID NO: 120241 - DNA, 608 bp, Homo sapiens
gggccctcctaaagtataaggtcagactaagcctaaaatatctactcgtgcaaagcggcccaacattaattggatcagactgttttataatacatgccccgttggtcaaaaacaatacaacaatcagctagaatttggtggaggtcaacaatggaggctgagtgtccgatcatgtgttagtctgttttcacgckgctgataaaaacataccagaggctgggtaatttataaattaaaaaaagtttaatggactcacagttccacgtggctgggaggcctcacaatcatggctgaaggcgaaatgcacaccttacgtgtcagcagacaagagaagacaacttgtgcaggggaactcccctttataaaaccatcagatctcatgagacttattcactatcatgagaacagcacaggaaagacctgcccccatgattcaattacctcccactgggtccctcccacaacaggtgggaaatgtgggagctacaattcaagatgagattgcgttgggaacacagccaaaccatataagataataagaggcagatgagccagttaatcaactgagaaagcaaaggtcaaagagacatcctggctaaattaccagt

SEQ ID NO: 120242 - DNA, 608 bp, Homo sapiens
gggccctcctaaagtataaggtcagactaagcctaaaatatctactcgtgcaaagcggcccaacattaattggatcagactgttttataatacatgccccgttggtcaaaaacaatacaacaatcagctagaatttggtggaggtcaacaatggaggctgagtgtccgatcatgtgttagtctgttttcacgcggctgataaaaacataccagaggctgggtaatttataaattaaaaaaagtttaatggactcacagttccacgtggckgggaggcctcacaatcatggctgaaggcgaaatgcacaccttacgtgtcagcagacaagagaagacaacttgtgcaggggaactcccctttataaaaccatcagatctcatgagacttattcactatcatgagaacagcacaggaaagacctgcccccatgattcaattacctcccactgggtccctcccacaacaggtgggaaatgtgggagctacaattcaagatgagattgcgttgggaacacagccaaaccatataagataataagaggcagatgagccagttaatcaactgagaaagcaaaggtcaaagagacatcctggctaaattaccagt

SEQ ID NO: 120243 - DNA, 561 bp, Homo sapiens
caagtttctcacagaacttctacgtggtctagagatccaaacttgggtgctggaaaaaaataggtcaggtggaggcaaccccagtaggagaaataccaagccacacaccacggtactcaaacaccttgcacaatattttttaatacaaaagttattcatagaacaataaagsggacaaattcccaaacattcagtggttaactgtattaatccattttcacactgctgataaagacatacccgagactgggcaatttacaaaggaaagaggtttaatgaagaactcaaagttccaggtaactgaggaagcctcacaatcatggcagaaatcaagaaggagcaagtcacatcttacgtggatggtggcaggcaaagagagagcttgtgcagtcaaattcccatttttttttaaaccatcagatctcatgagacttattcactattataataacagcaaaggaaagacccgcccccaaaattcaatcacctcccactcactgagttcctcccatgacacgtgggaattgtgagagttacaattcaagatgagaattgagtggg

SEQ ID NO: 120244 - DNA, 561 bp, Homo sapiens
caagtttctcacagaacttctacgtggtctagagatccaaacttgggtgctggaaaaaaataggtcaggtggaggcaaccccagtaggagaaataccaagccacacaccacggtactcaaacaccttgcacaatattttttaatacaaaagttattcatagaacaataaaggggacaaattcccaaacattcagtggttaactgtattaatccattttcacactgctgataaagacatacccgagactgggcaatttacaaaggaaagaggtttaatgragaactcaaagttccaggtaactgaggaagcctcacaatcatggcagaaatcaagaaggagcaagtcacatcttacgtggatggtggcaggcaaagagagagcttgtgcagtcaaattcccatttttttttaaaccatcagatctcatgagacttattcactattataataacagcaaaggaaagacccgcccccaaaattcaatcacctcccactcactgagttcctcccatgacacgtgggaattgtgagagttacaattcaagatgagaattgagtggg

SEQ ID NO: 120245 - DNA, 532 bp, Homo sapiens
tgttccttttttgaattttttagttcaaaacccagatcacattttcaggctttcttccttttaaaaatgagcatttaaatatacagttttccctctctaaaattatttagctatatcttatttatttaaatatgggtttcttaaatagtttaattgtatgttccttattgttgttataatttcttctttcatccttgagctattaagaartaaagtcacttatctccatcttaattaccttactatacaggggatacagtctgtataatctttcctttttggaatttgttgaggcttgctttatgacctagtatgtgctcaatttttgcaaatatcccaattaaactggggctgtggggctccaagattcaccaacttatcaggacaacacaagctccagtgtttgtttattcctctgatttttcaatttctgattgtttctggactgtgaatttttttttcagccatacattaaaaataattttgaaaacatttcatgcatcagggattgactagagccaagggtgttagt

SEQ ID NO: 120246 - DNA, 604 bp, Homo sapiens
tacattgttccttttttgaattttttagttcaaaacccagatcacattttcaggctttcttccttttaaaaatgagcatttaaatatacagttttccctctctaaaattatttagctatatcttatttatttaaatatgggtttcttaaatagtttaattgtatgttccttattgttgttataatttcttctttcatccttgagctattaagaaataaagtcacttatctccatcttaattaccttactatacaggggatacagtctgtataatctttcctttttggaatttgttgaggcttgctttatgacctagtatgtgctcaatttttgcaaatatcccaattaaactggggctgtgggsctccaagattcaccaacttatcaggacaacacaagctccagtgtttgtttattcctctgatttttcaatttctgattgtttctggactgtgaatttttttttcagccatacattaaaaataattttgaaaacatttcatgcatcagggattgactagagccaagggtgttagtggatgattatagaggacataacttttcagggtgatgaaaatgttctatatcttgattgtaatatggt

SEQ ID NO: 120247 - DNA, 604 bp, Homo sapiens
tacattgttccttttttgaattttttagttcaaaacccagatcacattttcaggctttcttccttttaaaaatgagcatttaaatatacagttttccctctctaaaattatttagctatatcttatttatttaaatatgggtttcttaaatagtttaattgtatgttccttattgttgttataatttcttctttcatccttgagctattaagaaataaagtcacttatctccatcttaattaccttactatacaggggatacagtctgtataatctttcctttttggaatttgttgaggcttgctttatgacctagtatgtgctcaatttttgcaaatatcccaattaaactggggctgtggggctccaagattcaccaacttatcaggacaacacaagctccagtgtttgtttattcctctgatttttcaatttctgattgtttctggactgtgaawttttttttcagccatacattaaaaataattttgaaaacatttcatgcatcagggattgactagagccaagggtgttagtggatgattatagaggacataacttttcagggtgatgaaaatgttctatatcttgattgtaatatggt

SEQ ID NO: 120248 - DNA, 604 bp, Homo sapiens
tacattgttccttttttgaattttttagttcaaaacccagatcacattttcaggctttcttccttttaaaaatgagcatttaaatatacagttttccctctctaaaattatttagctatatcttatttatttaaatatgggtttcttaaatagtttaattgtatgttccttattgttgttataatttcttctttcatccttgagctattaagaaataaagtcacttatctccatcttaattaccttactatacaggggatacagtctgtataatctttcctttttggaatttgttgaggcttgctttatgacctagtatgtgctcaatttttgcaaatatcccaattaaactggggctgtggggctccaagattcaccaacttatcaggacaacacaagctccagtgtttgtttattcctctgatttttcaatttctgattgtttctggactgtgaatttttttttcagccatacattaaaaataattttgamaacatttcatgcatcagggattgactagagccaagggtgttagtggatgattatagaggacataacttttcagggtgatgaaaatgttctatatcttgattgtaatatggt

SEQ ID NO: 120249 - DNA, 604 bp, Homo sapiens
tacattgttccttttttgaattttttagttcaaaacccagatcacattttcaggctttcttccttttaaaaatgagcatttaaatatacagttttccctctctaaaattatttagctatatcttatttatttaaatatgggtttcttaaatagtttaattgtatgttccttattgttgttataatttcttctttcatccttgagctattaagaaataaagtcacttatctccatcttaattaccttactatacaggggatacagtctgtataatctttcctttttggaatttgttgaggcttgctttatgacctagtatgtgctcaatttttgcaaatatcccaattaaactggggctgtggggctccaagattcaccaacttatcaggacaacacaagctccagtgtttgtttattcctctgatttttcaatttctgattgtttctggactgtgaatttttttttcagccatacattaaaaataattttgaaaacatttcatscatcagggattgactagagccaagggtgttagtggatgattatagaggacataacttttcagggtgatgaaaatgttctatatcttgattgtaatatggt

SEQ ID NO: 120250 - DNA, 628 bp, Homo sapiens
attcataatatataatgagccagagcagtccagataagagattggaggggcaaagaggaaggagaagatggggaaaatatataataacaatataatttcatgctgtttcatgctttcttgctatatttttgtgttataaatttctaaatttgtaacaggtgagctaacactagcaattgataaaacacaatccatttaataaaaagaggttaaataaaatgtaatatgaaaacaagtgcacacatgtgagccatatattactttattccarctatttccttgtataccatgccaataagaataaataaaagaaaatttggcctccaaatatgttatgtacttgctgtttttatttatttattttatatgggttatagcctatgagaagttctgaagagctaacaataaccttcttcatacaaactgggttttcactcaatgaaaaatagtgtagtacgattcagcttaatatgattttaaggaaggcaaaggtgtataaacaaagtacagaaatcatttatgtatagcttcaacttccatactgttaacgaagagttattgatcatgtggaataaagaacacaatggccagtcagttgcactttaagttacttttccacaagtggtga

SEQ ID NO: 120251 - DNA, 529 bp, Homo sapiens
tgttatgtacttgctgtttttatttatttattttatatgggttatagcctatgagaagttctgaagagctaacaataaccttcttcatacaaactgggttttcactcaatgaaaaatagtgtagtacgattcagcttaatatgattttaaggaaggcaaaggtgtataaacaaagtacagaaatcatttatgtatagcttcaacttccatactgttaacgaagagttattgatcatgtggaataaagaacacaatggccagtcagttgcactttaagttacttttccacaagtggtgatgctcatgtggtgccttactaaaattgtaagcaagaatgttgattctatgtatttttctcaggtgctaatagtattgattcttctttcctttctcactgtaatccactagctttatattacaccaaaacttataggataaagaaaatgtacgaragaaggaaaaatatggttcccctcctctttagccatgatgaataaaattagtcaagcttcatatggtcaacagcatg

SEQ ID NO: 120252 - DNA, 601 bp, Homo sapiens
cactgttaggcacagattaatggggagtaatttatctccttctacatttacagctcccacaatgaaagcagacgggccacaaatatgcttttcctaagtggtcatttttagtggcaaactgctaacacagcaacatttctgggtccatttcttcaacacagactcacaggaaacccaacatgctgtagtagaatgaatcctgagtygagagacatcagatggcatctgtggtactgctctggcattgtgtgactatgtgtcatgtggcttcttcctctatcctaaagtggttccttacacattgtacattctcttcaatgtttaggagtttgacaaagtactctgtaatatatagagccctttgctgtgtacattaatttattttcacatctccacaggataacataaccctgattttacaggtaggaaaactgctactcctctaggaagtgtaagtaaatgtctgatgccacattactggcaactgccagaatcagtacatcttctaagttctcatgtgtttagtgttaggtaagaaagttatctcagctcattatcccacagaggtcccacacgccaaagactggggccagagtggagc

SEQ ID NO: 120253 - DNA, 601 bp, Homo sapiens
cactgttaggcacagattaatggggagtaatttatctccttctacatttacagctcccacaatgaaagcagacgggccacaaatatgcttttcctaagtggtcatttttagtggcaaactgctaacacagcaacatttctgggtccatttcttcaacacagactcacaggaaacccaacatgctgtagtagaatgaatcctgagttgagagacatcagatggcatctgtggtactgctctggcattgtgtgactatgtgtcatgtggcttcttcctctatcctaaagtggttccttacacattgtacattctcttcaatgtttaggagtttgacaaagtactctgtartatatagagccctttgctgtgtacattaatttattttcacatctccacaggataacataaccctgattttacaggtaggaaaactgctactcctctaggaagtgtaagtaaatgtctgatgccacattactggcaactgccagaatcagtacatcttctaagttctcatgtgtttagtgttaggtaagaaagttatctcagctcattatcccacagaggtcccacacgccaaagactggggccagagtggagc

SEQ ID NO: 120254 - DNA, 426 bp, Homo sapiens
gacgggcatggtagcacacacctataatcccagctacttgggaggctgaggcaggagaatttcttgaatctgggagacggagctttcagtgagccaagattgtgtcattgcactccagcctggcggagagagtgagcctctgtctcaaaaaaaaaaaataataataataataataataataatgtacacatagccacagactycaaggcagttgggaaacgtaagaagaatctaaaaattcccctggaaggaatagcaatgggtgttgaagaaccttttgggacctccaccccatcagatgatacatctgcaccaggaggccttgggggctttgaaagcaagggggcttatttctcttaaggagatttttctcaagtcttttcaattgcacagttacctaagcatagtaagttatattatttacat

SEQ ID NO: 120255 - DNA, 551 bp, Homo sapiens
gcttgggcacaaacttaaaataaaataaatgtgttttaaatagttaaaatactgtagctccatttcagagatacacaaaaagtacttaatgaccccaacacaatctccaaaataatttgacctaattgtaaaaggacataamctaaaaggattatgaaagataaaaaggaggtataagttaacctggttggggaatgttcttgaagtcagaaatcatgttttatttgtctctgtattcttcataacacctaacatagttccacatgcactgtagaaacagtatttgttgaactgaagttcatggaattaatgtgtcatacttggttacatattgaatagtagaaattaaagtcattcactgaccccttgataatataaaaacatattcatctgcaaaaacttctcacaaaactcaggcagaacctgagatgttttgaaaagctaggcttatttttatttcttctaaaaatgaaaccacttaaatttaaaaggtttacatggctgccactgtgtttggtttctacaccccatttcataaacattttcatgaa

SEQ ID NO: 120256 - DNA, 591 bp, Homo sapiens
atgagactcctaaggaagtaggtactttttctactgaaagacactgaaataaaaacaggtgaggtaacttacctacctaatttgtttctatcacctctttcctacctttatatcttttatgctcaacacatatttattttcccactcatcctacaatttctttctttcctttcttccactgccaaatcttaaaatgagcatgtagatttttttcagtgtctccatgtcctcatctaccactcaccctcaattcattacaggatgatctactctaaatagtcttttacaatatagactatctttacttaacttttaaaacacagtcttgcaaagcttcaaagactgcaattcagtaagtctttggtagaatccagaaatctgcatttttcacaagtaactgctgtagttctccctaatctttttctcaaggattatcaatttcagtttgtcacaatttcataaactatatgggttggtcttcttgtgcgtacttttatatgttgattactctaamgctatcatgtcagccttcttcctaacctcatttttgggattccttataacccacaactccaaccactgtctatggag

SEQ ID NO: 120257 - DNA, 618 bp, Homo sapiens
attaaaaagtgggcaaagtttatgaacagacacttttcaaaagaagacatatatgcagccaacaatcatgtgaaaaacagatgctggtgaggtttcagagaaaaggaaatgcttgtacactgttgatgggagggtcaattagttcaatcattgtgggaagcagtgtggcaattcctcaaagaactaawaacagaagtaccattcaacccagcaatcccattacttagtatatacccaaaggaatataaatttttcggtcataaagacacatgcatgtgtatgttcattacagtactacttgcaatagcaaagacataggacccacttaaatgcccattagtggaagactggataaagaaaatgtggtacatgtgcatcatggaatactatgcagccataaaaacgaaaaatataatgttctttgcaggaatgtggatggagctggaggccaatattcttagaaaactaacacaggaagagaaaaacaaataccaaatattttcatttataagtgggagttaaatgataagaacacatgaacacaaagaggggaagaggagacattggggcctaccagagagtagagtttgggaggagggagaggaacagaaaaaataa

SEQ ID NO: 120258 - DNA, 609 bp, Homo sapiens
aatctggcttgcaactcaaagctaaacatgatttttgcatttttacatggttttaaaaaacaatcaaaggaagaatgggatattaagacatgttaaaattctatgaaatgtaatacataatgcatgtaatacatactgttttattcgaacatagacacgctcattcatttacttattgtctctggctgcttgcacgctacaaaggctcacagtctaaaatatttactatctggctctttatagaaaaagtttgtggacccctttctaaagtgataaatgataaatatattgccctgacaaatttctcactgacgaattgtggaattgtrgtttttaattattagaaaatagtgaagcattttgtgacttatctcagtaattaatttctaaaaaaccaattctaaatagacattgcagcttattactcattctaacgataagttgcaagtccttaattgttccaaggggtgtgttttctcttacactaaaatgatgtatgactgatacaaaccaggaaatttcttcaaacgcctgagtgaaacaaagcagaaaacatcccatgcacatgcatattcacttggcaggaacattttgctgcttagcttgaaa

SEQ ID NO: 120259 - DNA, 609 bp, Homo sapiens
aatctggcttgcaactcaaagctaaacatgatttttgcatttttacatggttttaaaaaacaatcaaaggaagaatgggatattaagacatgttaaaattctatgaaatgtaatacataatgcatgtaatacatactgttttattcgaacatagacacgctcattcatttacttattgtctctggctgcttgcacgctacaaaggctcacagtctaaaatatttactatctggctctttatagaaaaagtttgtggacccctttctaaagtgataaatgataaatatattgccctgacaaatttctcactgacgaattgtggaattgtagtttttaattattagaaaatagtgaagmattttgtgacttatctcagtaattaatttctaaaaaaccaattctaaatagacattgcagcttattactcattctaacgataagttgcaagtccttaattgttccaaggggtgtgttttctcttacactaaaatgatgtatgactgatacaaaccaggaaatttcttcaaacgcctgagtgaaacaaagcagaaaacatcccatgcacatgcatattcacttggcaggaacattttgctgcttagcttgaaa

SEQ ID NO: 120260 - DNA, 609 bp, Homo sapiens
aatctggcttgcaactcaaagctaaacatgatttttgcatttttacatggttttaaaaaacaatcaaaggaagaatgggatattaagacatgttaaaattctatgaaatgtaatacataatgcatgtaatacatactgttttattcgaacatagacacgctcattcatttacttattgtctctggctgcttgcacgctacaaaggctcacagtctaaaatatttactatctggctctttatagaaaaagtttgtggacccctttctaaagtgataaatgataaatatattgccctgacaaatttctcactgacgaattgtggaattgtagtttttaattattagaaaatagtgaagcattttgtgacttatctcagtaattaatttctaaaaaaccaattctaaatagacattgcagcttattactcattctaacgrtaagttgcaagtccttaattgttccaaggggtgtgttttctcttacactaaaatgatgtatgactgatacaaaccaggaaatttcttcaaacgcctgagtgaaacaaagcagaaaacatcccatgcacatgcatattcacttggcaggaacattttgctgcttagcttgaaa

SEQ ID NO: 120261 - DNA, 598 bp, Homo sapiens
gtttggtatgctaataagaagactagtgagtggggctgtgrgatagcctcaggatgggagcctcagaggaagcaaccttgtgattagagaattggaattttcagttctacctcaggggctgcaggataaatttatcactaatggccaatgatttaatcattggcctacataatgaagtctccataaaaaaagagagagagagtttgcagctagctgaacacatggagagtggcaagcctggggagggcacggaagcttcatgcctcttcctccatacattgctctacgcatctcttccatcgggatgttcctgagttgtagccttttataataaattagagatagtaagtaaaacactttcctgagttctgtgagccactctagcaaattattgaacccaagaagggagttgcgagactttcaatagaagcacaggttaacaacctagactttcagttgacgtctgaagtagggggcagtcttgtgagactgagcccttaacctgtgagatctgtgctaacttcagttagtgatagaattaaattgaactgtaggacaaccagctggtgttggaaaattgcttggtgtgggaaaaagc

SEQ ID NO: 120262 - DNA, 547 bp, Homo sapiens
tgtttatcttcctatgtatatgggccatatttctaccaggattttaagcttttttatttttttgagatgaagtctcgctcttgtccccaggctgcagtgcaatggtgtgatcttggctcactgcaacctccgcctcctcggttcaaggaattctcctgcctcagcctccccagtagctgtgattacaggcacccgccaccacgcccagctaataatttgtatttttagtagagacaggatttcaccatgttggccaggcttgtctcaaactcctgacctcaggtgatccgcctgcctcggcctcccaaattgctgggattacaggcatgagccaccatgcycagccttaagctctttgaaggcaaaggctatgtcatgaacctcttgttcctgtacctaccactgtatcctacacttaacaggctagcttagtaggtttcttttaatattggtggtggtgctgctgatgtgagtgattgagatcagttcaaagtagagaagaaagaattagagagtttgctcccttactaccaacaaaaaggtgtgt

SEQ ID NO: 120263 - DNA, 566 bp, Homo sapiens
ctggcttgcacatgtaagaaagtttatgagaataaataaatcagactacctttccctgatgaaccctgtttacactcaaagtggactagccagaagagatcctagcaggggataatccaagaacatctgcacctacaagtgagatggaaaatttcctgccactcaagagtctcatgtctgttgtttgaatgccttattttctttaccacttctcatcaaagcttacattttggaaacatccatggcaatggacaaggacaaatatacttgagggctttgagtaactccarggaatttgagttttatattaatgccctccattttcttagaaaacaaattcatttggtcaatctataacttttggtaagcaacctattatctgcaagttctgttaccattcctgcctgtcatcggacagcataaaatttatcaccggtttagatcagaagataacaagaaaaatggaatggaaagcagtccttcaaaactgagacaacctcagcaaacattttcagtattcaaaggagtatgctttgacttaatcgttcaacaagtttttgttgtag

SEQ ID NO: 120264 - DNA, 571 bp, Homo sapiens
ccatgccaaatggaatcctttggaattgctcaagctctccacagtagtaaatattaagcaatgcagaattccaagggcacaataagagactactgttgtaattaagaaaatggtttagaaggaagttccccctccccacattaacttcccttttgtagttctaactggtcaataagtaggtagcccctggacatttacagtagagtatcaaggtggttcatttgcatgcttcatctctacctgatatgatgaagaatgtacagaaaataaagtagacaagaggctctgatatgctatcaagattaactacataattcatagagctgagtataaaatgaaaatgcatggatacttactcaaaaattattaagaatttygagatagctacaacagagcattaaaccaatctcaggggcctcctaagattttttttttttaatttcaagtaggaaaattttaagctttgcagaatagaaacaagtacatgtttactgtcttatcatggattaaaaaaaattcattatcacatttccataatctggtaaagaataacctaaaagatagagttcat

SEQ ID NO: 120265 - DNA, 632 bp, Homo sapiens
actttaggctgtggcttcagagggtacaagccccaagccttggcagcttccacttgatgttgagcctgtgagtgcacagaagtcaaaaatgggggtttggggatctmtgcctagatttcagatgtatggaaatgtctggatgtccaggaataagttcactgcaagggtgaggccctcataaagaaccactgtttagggcagtgtggaagggaaatgtggggttggagcccccacagagagtccctactggggcactgcctaatgcggctgtgagaagagggccaccgtcctccagaccccagaatggtaaatccactgacagcttgcaccgtgcacctagagaagactaagacactcaatgtcaccctgtgaaagcagccatgagggaggctgtaccctacacagccacgggggtggagctacccaagaccttgggaacccacctcttgcattagcatgacctggatgtgagacatagagttactgggagatcattttggagctttaaaatttgactgtccctctggatttcacacttgcatggggcatgtagccctgttgttttggccaatttctcccatttggaatggctgtatttacccaatgcctgtacccccattgtatctaggaag

SEQ ID NO: 120266 - DNA, 632 bp, Homo sapiens
actttaggctgtggcttcagagggtacaagccccaagccttggcagcttccacttgatgttgagcctgtgagtgcacagaagtcaaaaatgggggtttggggatctatgcctagatttcagatgtatggaaatgyctggatgtccaggaataagttcactgcaagggtgaggccctcataaagaaccactgtttagggcagtgtggaagggaaatgtggggttggagcccccacagagagtccctactggggcactgcctaatgcggctgtgagaagagggccaccgtcctccagaccccagaatggtaaatccactgacagcttgcaccgtgcacctagagaagactaagacactcaatgtcaccctgtgaaagcagccatgagggaggctgtaccctacacagccacgggggtggagctacccaagaccttgggaacccacctcttgcattagcatgacctggatgtgagacatagagttactgggagatcattttggagctttaaaatttgactgtccctctggatttcacacttgcatggggcatgtagccctgttgttttggccaatttctcccatttggaatggctgtatttacccaatgcctgtacccccattgtatctaggaag

SEQ ID NO: 120267 - DNA, 632 bp, Homo sapiens
actttaggctgtggcttcagagggtacaagccccaagccttggcagcttccacttgatgttgagcctgtgagtgcacagaagtcaaaaatgggggtttggggatctatgcctagatttcagatgtatggaaatgtctggatgtccaggaataagttcactgcaagggtgaggccctcataaagaaccactgtttagggcagwgtggaagggaaatgtggggttggagcccccacagagagtccctactggggcactgcctaatgcggctgtgagaagagggccaccgtcctccagaccccagaatggtaaatccactgacagcttgcaccgtgcacctagagaagactaagacactcaatgtcaccctgtgaaagcagccatgagggaggctgtaccctacacagccacgggggtggagctacccaagaccttgggaacccacctcttgcattagcatgacctggatgtgagacatagagttactgggagatcattttggagctttaaaatttgactgtccctctggatttcacacttgcatggggcatgtagccctgttgttttggccaatttctcccatttggaatggctgtatttacccaatgcctgtacccccattgtatctaggaag

SEQ ID NO: 120268 - DNA, 632 bp, Homo sapiens
actttaggctgtggcttcagagggtacaagccccaagccttggcagcttccacttgatgttgagcctgtgagtgcacagaagtcaaaaatgggggtttggggatctatgcctagatttcagatgtatggaaatgtctggatgtccaggaataagttcactgcaagggtgaggccctcataaagaaccactgtttagggcagtgtggaagggaaatgtggggttggagcccccacagagagtccctactggggcactgcctaatgcggctgtgagaagagggccaccgtyctccagaccccagaatggtaaatccactgacagcttgcaccgtgcacctagagaagactaagacactcaatgtcaccctgtgaaagcagccatgagggaggctgtaccctacacagccacgggggtggagctacccaagaccttgggaacccacctcttgcattagcatgacctggatgtgagacatagagttactgggagatcattttggagctttaaaatttgactgtccctctggatttcacacttgcatggggcatgtagccctgttgttttggccaatttctcccatttggaatggctgtatttacccaatgcctgtacccccattgtatctaggaag

SEQ ID NO: 120269 - DNA, 433 bp, Homo sapiens
tgaagactgattatttaagttaacacagccagaaaataaataaagaaaagaagaattttaaaaaatgaaaggtcaggcatggtggctcatgcctgtacctgtaatcccagcactttgggaggatattgagaccatcctggctaacatggtgaaaccctgtctctactaaaaayacacacacaaaaaaattcactgggcatggtggcaggtgcctgtagccccagctattcaggagtctgaggcaggagattggtaggaacctgggaggtggagcttgcattgagccgagatcatgccactgcactccagcctgggctacagagcaagactccatctcaaaaaaaaaaaaaaagaaaaaaagaaaaagaaaaaaaccttggagaaataagggattctataaaaaatttccccaatttcactagagagattgaca

SEQ ID NO: 120270 - DNA, 639 bp, Homo sapiens
aagtgctaaacgtgaaaatgaaggactgttacctagcaccagaaaaacacactcaagtatatagaccatcaacactataaagtaattacacaatcaagtttacgtaacaaccagctaacaacatgctgggaggatcgaatgtgcacatgtmaatattgaagataaacaagctaaacacccacttaaaaggcatggagtggcaaagtggataaagaatcaagacccaactgtatgctgtcttcaagagacccatctcacatgtgagaacacccataggttcaaagtaaagggatggagaaagaactaccaaacaaatgaaaaacaaagaagaacaggtgttgctgttcttattttagataaaactgacattaaactaacgatgatcaaaacagacaattaagggcattacgtaatgatgaaggattcaattaaacaagaagacttaactatcctaaatatatatgcacctaacactggatcactcagattcacaaaacaagctcttagagatatacaaagaaacttacataactacacgatgacagtggcagacctcaacacctcactgacagtgtaagacagatcactgaggcagaaaactaacaaagatattcgggacctaaacttgacacttggcca

SEQ ID NO: 120271 - DNA, 631 bp, Homo sapiens
caaatagaatgacgtggctagtgtgtgtggttggtgggaaaataaagagggaaatgatgtgttttaagtttgaggttagaaaattagagtaaaattgagaaatacggttttaagttcaaactattgaatctattaaatctagaaaaatcaacaataaagtatctatttagagtaataactaaatctgcctttccttttttcaattaaaatagaaacaaatattgtkgcattatttttattgttgtaacagttttgggctgcttttgagtctttgttttgggaaagtttttatttttaggttatttttcttttgtaatattctagacaacgtcttgtataaatgttaaaatgtaattttactacctttcaggcatattttaatgtgccctagttgttaacaaatttattcaagattaagtactatatttttaacttcttaaaaaaattaatttctttctatgcaatgattgaccttgaaaatacaaaagtatgtacagtatgcacataatattcatactgaatctaattgtttaactgttgtttaattcatttaatcattcatttttcaagggaaacatattgaataattaggtaaaaatttatcagcagccactgtgtttatttggtaatt

SEQ ID NO: 120272 - DNA, 606 bp, Homo sapiens
tttttttgttttttgttttttgagacagagtctcactcactctatcactcaggccagagtgcagcagcctgatcttggctcactgcaacctctgcttcctgggttcaagcgattctgctgcctcagtctcccaagtacctgagaatacaggtgcccacaaccatgcctggataatttttgtagttttagtagagatggggttttgccatgttggccaggctggtctcaactcctgacctaggtgatccgctcgtctgggtctccgaaagttctggrattacaggcatgagccactgttccctgccaaattaaaagtttttgtatgaaaaagatatacacaaagcaaagatacttttacagtatgaaagtgaattataattgagaaaaatatctgcaggccataatagaatagttctatttcaatagtttgcaaacaatttgttagttctgctgaataaaaaaatttccaacacttgttaaaatggttaaggatcactttatttaagattaaaatgataggtgtcaagatgattctaataggaagagagataaggttcaactctgaacacagcaaagatatctgggaagtgcagctaatgagcagag

SEQ ID NO: 120273 - DNA, 518 bp, Homo sapiens
tacttatgatttggccatgagcattcctatctttacttagtttggaggagtggactcagcagcatgtatgttatgggaaaaaaagagattcagaaaaattacttacataagtttgaaaggcaagatgaatctggccatatggtaaaatccaacagaactcttctggttatgagtaatttgtaaaataattcatacattgcccattatatgcgttagatatatgtaaattttaccatgctyattcttcagaacagaaaaagtgaaatacaaaggcaaacatggtaaagcaatttattttagttttcatgagaagttgttcttctagagtatgttatatgactctatgccctcagtttgaactctcattgaaccatatctaaattaactaataaaatgaactttgaattacatatgccactgtgtgcaaattaacattcattgactgtatgtgtatgtaaatattggccagtaaacagagccatttacatcttcataaagagaataacatttccaactaa

SEQ ID NO: 120274 - DNA, 518 bp, Homo sapiens
tacttatgatttggccatgagcattcctatctttacttagtttggaggagtggactcagcagcatgtatgttatgggaaaaaaagagattcagaaaaattacttacataagtttgaaaggcaagatgaatctggccatatggtaaaatccaacagaactcttctggttatgagtaatttgtaaaataattcatacattgcccattatatgcgttagatatatgtaaattttaccatgctcattcttcagaacasaaaaagtgaaatacaaaggcaaacatggtaaagcaatttattttagttttcatgagaagttgttcttctagagtatgttatatgactctatgccctcagtttgaactctcattgaaccatatctaaattaactaataaaatgaactttgaattacatatgccactgtgtgcaaattaacattcattgactgtatgtgtatgtaaatattggccagtaaacagagccatttacatcttcataaagagaataacatttccaactaa

SEQ ID NO: 120275 - DNA, 322 bp, Homo sapiens
aaaaatcaagatgtactccttaaataaaatattgagtgagtacttataaggcaataagttttgtaaaatatgctaaaaatttttaaaaattctctacatattcgagacatacttgaagatactgtgggttttgttccagaccatcacaataaagcaaaaatcacaataaaacaagtcaacaaaaatttttggtttctcaatgcatataaaagttatgtttacattgtactgtaaagtgtgtaakagtattatgtttaaacaaataatgtacttaccttaattttaaaaagatttattgctaagtaatgttaatcatctgagc

SEQ ID NO: 120276 - DNA, 351 bp, Homo sapiens
ttgtaaccaattgataatactttcttttggcctctgccattttacaatggtggcctgggtttaatcctggcttagggaatgagtatattgtggctaatatctgtgtgacttttaccatttgctgattctcttcccctctataaacaacttctagcttcctttcttaaatcttcctttgtctgaaccaactttaaagatcttagattctgtaaaaactgcttagcacctctttgaaaataacttttacacttacagttaagtcataatcttagttgargcttgttggtttcacctgtgaggttatttttaataaagttctaaagccagaaatattgactgctcggcatggct

SEQ ID NO: 120277 - DNA, 496 bp, Homo sapiens
cactccaggtcctaatctttccccagaggtaggagtgtcacattcttgttcagggcgggagggctttgctcagcacaaaagactacacagcatgcttgtttacataaagaggaacaatgcacattgcagaatatggcgtgggaaatttagtcatcatcagtggaaatgcaaatctccttattttacattcttctttttgcacacctaacccccaagggttaaaagcagccaaagcctctatggagttgaaccaatcagcttgtctcttgatgacatcatgcctctaatgagamagagctggaaagggcgaggtggcgaggccacttctggacttggcctgaaagggtgccctcccagttgctgccacttcacttctcaggaaaaggattcaagagccaagggtttcctcagctaccatttcagacaaagccaggacattcccaaaatcctgtgccagaaattattctcatcttatacaaaatgcatacaaagcatg

SEQ ID NO: 120278 - DNA, 553 bp, Homo sapiens
gcatttctctgatggctaataaggttaagaatattttcctatgcttattgcyaatttgcatttctgatttgataaactatctggccaaatatctcataaaaattggcttgtcttttattattgagtagtaagggttctttacatatttcagatacaaatatgttataaaatatatatttcacaaatattgacttcaaatatggggcttagctgttcattttcttaacaacattttgtaagaacagaagattttgattttgataaagtcaaatttatcattttttcttttattatttggaatttttatatattaagaggatctatttgctaatgccaagatcacacagatactcttctacatttccttctgtaagaattacagttttagctcttgcatttaggttttaattcatttcaaattatttttatatgatatgtgtagtaatagtcaaaattattatcattattatttattttgcatttgaacttccaaatagtctggcaccaatggttaaaaagactctctttacccaatttattcactttgtcactt

SEQ ID NO: 120279 - DNA, 588 bp, Homo sapiens
ggatgtgtcacacatctctcacttgaagtcaaaagctgcaaatgatgaagcttagtgaagaaggcatgttgaaagccaagacagaccaatagctaggtctctctttccaaacaattagccaggttgtaagtgtaaaggaaaagttcctgaaagaaattaaaattgctatcacagttaacacatgaatgataagaaatcaaaacagaattattatttgttagatacagctagrttcctattcaaacagtttgttcaattcccctgttctttattctctaaattccaagtaccccccacccccagcttttgctgcacagtaacctgtctaaacacgcttacacatgataagccccagtccacatttcttttcttatgtggaataggttagctttctagtcccccacaggtgacctcttcctcctctccctctctcctctatcacacacatgccttatccaagaaagtttaaatgattagccaatcgggactagtttagagtctgtggtccaaccccagccaatgggggaaagatacagaggtagaatctgcattaggaataaaaactcctactctcctttgttctgtgtg

SEQ ID NO: 120280 - DNA, 588 bp, Homo sapiens
ggatgtgtcacacatctctcacttgaagtcaaaagctgcaaatgatgaagcttagtgaagaaggcatgttgaaagccaagacagaccaatagctaggtctctctttccaaacaattagccaggttgtaagtgtaaaggaaaagttcctgaaagaaattaaaattgctatcacagttaacacatgaatgataagaaatcaaaacagaattattatttgttagatacagctaggttcctattcaaacagtttgttcaattcccctgttctttattctctaaattccaagtaccccccacccccagcttttgctgcacagtaacctgtctaaacacgcttacacatgataagccccagtccacatttcttttcttatgtggaataggttagctttctagtcccccacaggtgacctcttcctcctctccctctctcctctatcacacacatgccttatccaagaaagtttaartgattagccaatcgggactagtttagagtctgtggtccaaccccagccaatgggggaaagatacagaggtagaatctgcattaggaataaaaactcctactctcctttgttctgtgtg

SEQ ID NO: 120281 - DNA, 521 bp, Homo sapiens
gttacagaacaagggtctgtttcaaaacagaaagaaattccccctgttcaaatctgagccatcrgttttatcctttccttcccttgaaattggggctcttctctttgctttttttttttttagattcaaagttacaggatcactgggagatgaccccagagagggagcaggagggggtgtggaaggtggtgagcagcaggaactcactgttgattaaggttctgaaaagcctaactggagatagagggcaatcaatgaagagttcatcagattcaaaagctttcttaatttgaattcagaaaaggaaagctaagatgaactcaaaatttaagaaaaaaaacctgtttttgagaaagtctgcattttaatatgctgtttttaggatatgacttattattctaaggcagtggttctcagccagtgatgatttttgtctcctaggagacagtatctggagacatttttggttgtccaactggtggcggagatggggcagggggatgtattactgatatctatga

SEQ ID NO: 120282 - DNA, 521 bp, Homo sapiens
gttacagaacaagggtctgtttcaaaacagaaagaaattccccctgttcaaatctgagccatcggttttatcctttccttcccttgaaattggggctcttctctttgctttttttttttttagattcaaagttacaggatcactgggagatgaccccagagagggagcaggagggggtgtggaaggtggtgagcagcaggaactcactgttgattaaggttctgaaaagcctaactggagatagagggcaatcaatgaagagttcatcagattcaaaagctttcttaatttgaattcagaaaaggaaagctaagatgaactcaaaatttaagaaaaaaaacctgtttttgagaaagtctgcattttaatatgctgtttttaggatatgacttattattctaaggcagtggttctcagccagtgatgatttttgtctcctaggagacagtatctggagacatttttggttgtccaactggtggcggagrtggggcagggggatgtattactgatatctatga

SEQ ID NO: 120283 - DNA, 647 bp, Homo sapiens
tacctaaccaacattaagggcagatgttccagaggctaactgcccagcctttaatcccggtctttgctggtttgcaagcttgggcatattgaatgaagtttgggaacttctgtttctctctttcattttctatcaaatagagcaaataataaaacccacttgatgaaatcattgagaagactaattggtcaatataaacgaaaggtgcttagcacaaagcctggtatatattcaatattcaayacacgttgttattggtaaggttcattttgattggatctttgatcaaggtttgaattggaactcagaaaatgttcagttcttttctgctcttatactagggaagaagatcactctagtgtgccctccacagttcatctatcattttatccttacttgggatagaagaggccactttggcctttcttgttaatcttatacacagctcctagcaggtttttagtttaggacatgcaaatgagtatataataaatgaacctgctaggctgctaaatctcatatgaatttttacccagagcataaattgatacaagtttctcaggccttgacttcataagcccttggctgacatttttgatggcaatctaacaccttgccagaaagtgtcttcagtttaaataaaatga

SEQ ID NO: 120284 - DNA, 587 bp, Homo sapiens
tggtgtctgacaggcacacctgtaacagctacagcaggtaatttatctcctaacakgcaaatccttcccccagttcctcattggtcgagtattatggggttacaatcttcccagacgttgcctaagcttaattattccccttataaggtcataccccagtcccttttcccacttaagtttcgacttcccaataactaaactttcttcccttttatgggctgacccctcctctaaattacgttcatttatcatggctttctagaagaatgagctgtgtggcttgttacatctgcaggctggctcccagtgcttagatttatcatgcctgaaaatggaccatttaaaatgccttctcacaggactcacctaagagttgcagtccctatgacagattgcctttcaagtttacttggagacacagagtgcttgcagcaatggaggtgaggtttgaaggctctcaagtttggaccactaggattggtaattcccctctggctagggctagtttaaatgctccctttgtgggcatgggtgggtgacagctaaatttgggccagttttcctctctgttctaacaggacagcact

SEQ ID NO: 120285 - DNA, 587 bp, Homo sapiens
tggtgtctgacaggcacacctgtaacagctacagcaggtaatttatctcctaacatgcaaatccttcccccagttcctcattggtcgagtattatggggttacaatcttcccagacgttgcctaagcttaattattccccttataaggtcataccccagtcccttttcccacttaagtttcgacttcccaataactaaactttcttcccttttatgggctgacccctcctctaaattacgttcatttatcatggctttctagaagaatgagctgtgtggcttgttacatctgcaggctggctcccagtgcttagatttatcatgcctgaaaatggaccatttaaaatgccttctcacaggactcacctaagagttgcagtccctatgacagattrcctttcaagtttacttggagacacagagtgcttgcagcaatggaggtgaggtttgaaggctctcaagtttggaccactaggattggtaattcccctctggctagggctagtttaaatgctccctttgtgggcatgggtgggtgacagctaaatttgggccagttttcctctctgttctaacaggacagcact

SEQ ID NO: 120286 - DNA, 561 bp, Homo sapiens
agtctgacttaatcaggtgagcccattaaatgagagtgtataggtcagagaaattttcctgcttgccttgaagaagatgcaactattgatgagctctacaaatataatgacattaatttactagctacttgaatgaaattagaagagccatcccaggcaagtctccatatgagaacacagtctgactgayaccttgcttttagcctagtgagttcttaagtagagggcccagataagctttgcccagactcctgcctgagagaaactttgacataatatatgtgtgatgttttaaatggcttgtgataatttgctgcagagcaatagaataatacactgccataacttgtagagaatattattgctgctcacatcactattgatgagctctaaaaatgtaatgaaattaacttactagctacttgaatgaaattagaagaagagccctcccaggcaagtctccatatgagaacacagtcttgactgacaccttgctttcagcctagtgagttcttaagtagagggcccagctaagccatgcccagactcctgcctcagaga

SEQ ID NO: 120287 - DNA, 501 bp, Homo sapiens
aatgtcagttttttaaatgaaaaattatagggagakgggacttgataccaattccaaagcaaaaatattctaggaagaataaaagatttgaaaaaggcaaggcttctataagaaacacacactttaaagggttataaaaataatatatgcgaaagcactttttttttttttttttgagatggagtttggctcttgttgcccaggctggagtgcaacggcacaatcttggctcactgcaacctccacctcccgggttcaagcgagtctcctgcctcagccgcccaagtagctgggattacaggagtgcaccaccatgcctggctaattttttgtatttagtagagatggggtttcaccatgttggtcaagctggtcttgaactcctggcctcaggtaatccactggccccggcctcccaaagtgctgggagaaagcactttttaaactgtgaagaactgcataaatctgtggacattttatgattaccattgtgacagcatc

SEQ ID NO: 120288 - DNA, 553 bp, Homo sapiens
tgttaataccccaaagtctaaatcttcaaaaagaaaacataggaagaaatatttatgacaatagamtaagcagattttttagatcagaccaccaaagatcaagaaccaaaaaagaaaaattttatgatgtgtactgtaccaaatatattaattcatgttcttataaagatggttttaagaaaatggaaagttatgatatcagatagggagaaagtattcattacaaagaacttgtatctgaaatatatattttaaaattcacaatacttacgtgtgagcatgtatacacaatacataatgaactcctacagttcaataaaaacacaagtagcccaaattaaaaaaaaaaaactatgcaaatgacttgaagaaacacttcacaaaagaaggtaaacaaatagccaaaatgaaaagttatatagcatcattagtcaaagaactacaatgaaatcagtgtaatttcgttacatgatgaaatgccactaacacattctagaatggctaaaaataaaataactgtcaataccaagtgtctgtgagaatgtggggcaac

SEQ ID NO: 120289 - DNA, 613 bp, Homo sapiens
catatttcccttgtgtcctccaattttgacagtcttactgtgttttcttccttttcataaccttgacacttttgaagagtactgttctcatattttgttgaatgcttctcaatttaggtttgtctgatgatttcatatgattatactggggttctgatttttttggaaggctactacaaataagaagtgctcttcttattgggtgatatcaaggaacacacaaaatcaacaagatttattactagtgacactaactttgatcacttggttaagatgctatcttctggtttccctattatagcgtcacttttttttctctttctgcactctgttcatcagaatgagtcactaagtttagccacattcaaaagawattttaaaccaatgttttaaacctttattctctccatggctttaaatggtaggtgtcttcctgattaacaatatgtggcctactcattacatataaatttctgcctctggaaggtgatgggttagctttcaaggtgtcacagagatttcaagtcaaagttacacatcccacttgaccataatattaactcaaactatttgaaacctatttaattatggtgaaaattcaaactaagctcta

SEQ ID NO: 120290 - DNA, 485 bp, Homo sapiens
ataaatggggttctttattttatttttggatagtttattgttagtatgcaggaatacaattgactttttatttttttaatatttcacttttaagtcctcataaaagcctttattatagcctaatggtaaagcactggatttataatggtgattttgcaacatggtgaatcaagacatttatcttcataaaaacactttgaagcagtgacttcaactcaccgtttctatagttctgacaacaattaatgtcatttttcttcttttggcattgatggatgcttgatcatgcaactatataaagtacccatgcccttatcaataaacaatatccttggtcaatgaataagggtgtgtacaatttttaaaattttttccgtatagtttcttttgtaccctgtcacccaggctggagtacagtggtgtgatcatggyttactgcagcctcaacctcccaggctcaagtgatcctcctatctaagcctcca

SEQ ID NO: 120291 - DNA, 535 bp, Homo sapiens
aatgttttatacacagtaggtgctgaattaataaaagaatgagttgtcagtagtatcagtttgtggtataatgtgtggttttcttttactgggaaggcagtggaaagaagttactgtgaccatcacagatgattagcttttcatcgtggcttggagagtttgaaatcaggttgacgtatcttctgctactattagcaaccagcctctggaaccaaaacactaaaatcttagaaaagtgtagaagattccagaggcaaattttgacaactgtctagtttctaattctacctaaagattttcaaggccatgagtgctgtcagcttaaatcaaatttaatatttatstttctgagaatctggctttttggactgaaatcaatgtggtgatgacaaacaatgaggctgactaatgagtaacaaaagctgttcattgtatggacctgtaataaaactcagctattgccatgatgtgattatatttatgagtgttacatttaattaaatataacctctcttttaataatgttcaccaacat

SEQ ID NO: 120292 - DNA, 535 bp, Homo sapiens
aatgttttatacacagtaggtgctgaattaataaaagaatgagttgtcagtagtatcagtttgtggtataatgtgtggttttcttttactgggaaggcagtggaaagaagttactgtgaccatcacagatgattagcttttcatcgtggcttggagagtttgaaatcaggttgacgtatcttctgctactattagcaaccagcctctggaaccaaaacactaaaatcttagaaaagtgtagaagattccagaggcaaattttgacaactgtctagtttctaattctacctaaagattttcaaggccatgagtgctgtcagcttaaatcaaatttaatatttatgtttctgagaatctggctttttggactgaaatcartgtggtgatgacaaacaatgaggctgactaatgagtaacaaaagctgttcattgtatggacctgtaataaaactcagctattgccatgatgtgattatatttatgagtgttacatttaattaaatataacctctcttttaataatgttcaccaacat

SEQ ID NO: 120293 - DNA, 575 bp, Homo sapiens
ggcagggattgcaatcctagtctctgataaaacagactttaaaccaacaaagatcaaaagagacaaagaaggccattacataatggtaaagggatcaattcaacaagaagagctaactatcctaaatatatatgcacccaatacaggggcacccagattcacaaagcaagtccttagagacccacaaagagacttagactcccacacaaaaataatgggagactttaacaccccactgtcaacattagacagaacaacgagacagaaagttaacaaggatacccaggaattgaactcagctctgcaccaagcagacctaacagacatcaacagaactctccaccccwaatcatcagaatacacattcttttcagcaccacaccatacctattccaaaagtgaccacatagttggaagtaaagcactcctcagcaaatgtaaaagaacagaaatcataacaaactgtctctcagaccacagtgcaatcaaactagaagtcaggattaagaaactcactcaaaaccactcaactacatggaaactgaacaacctgctcctgaatgactactgggtac

SEQ ID NO: 120294 - DNA, 602 bp, Homo sapiens
accatggaatactatgcagccataaaaaatgatgagttcatgttctttgtagggacatggatgaagctggaaaccatcattctcagcaaactatcgcaaggacaaaaaaccaaacaccgcatgttctcactcatagctgggaattgaacaatgagaacacatggacacaggaaggggaacatcacacactggggcctgttgtggggtggggggctgggggagggattgcattaggaggtatacctaatgtaaaatgacaagttaatctcttaaaagaaaatatagtaaaaatactttgatactgatcttggtaatgattgttttgaatatgataccaaaagcaaaggcaaaaacaacaacaaaataaacaaatgggactatatcaaactgagtttctgcaaataaaatcatcaacaaaattaaaggccactgaagattagcagawcatatttatttgcaaaccatatatctgatatgcatatataaaagaaactcatataactcaataacaaaaaaaaccctcaaattttaaaatgggcaaatgacctgaatagatattttccaaagaagacacacaacagatggacaatagatatatgaaa

SEQ ID NO: 120295 - DNA, 639 bp, Homo sapiens
aaacaattcaagagcagaaagatgaaatagccatttaagaaagaacctaactgatctgatagacatgaaaaactcaccacaagaatttcataattcaattggaaayactaacagcagaatatactaagttcaggaaagagcctcagaactcaaagactggctcttcaaatctattcagtcaagaaaaaaataaggaaaaaagaatgtaaaagaatgaacataatatataagatatatggaatttttatagaccaaatctatgactccttagtgtcactgaaagagagggggagagagcaagcaacttgtaatacatatttgaggattttcttcatgaaaatttccccaacctcactagagaggttcacattcaaattcaggaaattcagagaacccctggaagatactatgcaagatgaccacccccaaaacacacagtcatcagattccccaagctcaatgtgaaggacaaaatattaaagacagctagagagaaggggaggtcacctaaaaagggagccccatcaggctaacagcagaactttcagcagaaaccctgtaagctagaaaagactgggggcctatattcaacatcattaaagaaaagaaatgtcaatcacaaatttcatatcccaccaa

SEQ ID NO: 120296 - DNA, 580 bp, Homo sapiens
aacactttttaaattttctatttgtttgctgttggtcatcctaatgggcataaggtgatatgtcattatgattttgatgcatatttgttttctcttatgaatacagatgttcttcaacttacagtcatgttatatcctgatgatgaaagtgcatagaaaactcgcttttgacttacttcaamttgtgatggggttatttgtatataaccccatcataagtggaggagtgtactgaatgtgtataatttttgcattatcataaagttaaaaaattgtaagtcgaaccactgtaagtcaaggaccatttgtagtgatattgaacatctttttatatgcttatggaccatttgtatgtcatctttggaatgtcatctactccaatcttttgcccactttttaattaggttgtttttagttactgaattacagatcttctttatatattctggatattatcctcttatcagtcatatgatttactaatatcttcttccacacctaaggttgccttttcactctaccgattatttcctttgatgtgcagaagttttttggtttgatgaagtcccatgtgtctata

SEQ ID NO: 120297 - DNA, 580 bp, Homo sapiens
aacactttttaaattttctatttgtttgctgttggtcatcctaatgggcataaggtgatatgtcattatgattttgatgcatatttgttttctcttatgaatacagatgttcttcaacttacagtcatgttatatcctgatgatgaaagtgcatagaaaactcgcttttgacttacttcaaattgtgatggggttatttgtatataaccccatcataagtggaggagtgtactgaatgtgtataatttttgcattatcataaagttaaaaaattgtaagtcgaaccactgtaagtcaaggaccatttgtagtgatattgaacatctttttatatgcttatggaccatttgtatgtcatctttggaatgtcatctactccaatcttttgcccactttttaattaggttgtttttagttactgaattacagatcttctttatatattctggatattatcctcttatcagtcatatgatttactaatatcttcttccacacctaaggttgccttttcactctaccrattatttcctttgatgtgcagaagttttttggtttgatgaagtcccatgtgtctata

SEQ ID NO: 120298 - DNA, 438 bp, Homo sapiens
tgtgggtctttgccacatgatgttctaatttgtmtaacactgtgctgagactaggccagcactttctgatgctgagtaatgcaccatcttcagggcaagggaccagtgtccaggggccacagaaagcatcgcagaccaggaagagcacacggctttcacccaggtgactgttcccatccactggtagtagctggcttgtcatctggaagagccgggatcaaagccaaagaggattatgcctgagcaccctatgagctgcccaggccatctgcatactaagccctgctcttctgggattgggggttctccttgaatttccagatccttctcagggctcctctacgtctggcattgaaaatggcctctttgtcactccttggattatttttcatttttatttcttcagcttccagaagtactttaaaatttgggatccat

SEQ ID NO: 120299 - DNA, 587 bp, Homo sapiens
gaacaccacatccctcttctcttccaggactgggttctcagggataaagagaatgccacttgatttaagttgcattaattttcacctatttatccaactcctcttattctctttactcaagggcagaccctttgggggcactacagagcagggcagaaatagctaaacctagaagctgttttaaaaggcttggagaatttaaaatcttttccaattaccagataaataagtataatatgaagtaaactaatttgaaagaggattatcttccttgcttycctatatattgtagtgtagagcagtggatctccaccttgactatacattagaatgacccgagatactaaaaaaaagcccaagtccctgactggcccagagtttggactttttaaggctccccagaaagcatcttactggttatgcaaccttaggcacttttttcttaaagtttctgacttcattcagaatttacctccaaaattgaggggaaacccttacaataacagttacccaataggcctggtgtgaggattgaatgaaacagcttgtgtaaagtgcctacatgatgctttacatgtgtcaggtat

SEQ ID NO: 120300 - DNA, 490 bp, Homo sapiens
attttgtggaaaagttgtgttctgcatcctggattcaaccaaacctgaggtcaaaaatattcaaaaataaaaaacagcaatacaacaataaaacataatgcaaatgaataatattgtataacaattatttacagagcatttacattgtgttaggtattagaggtaatctagggggatttaaagtagatgsgaggatgcatgtaggttatatgcaaatactagaccattttattacatacaagggacttgagaatccttggattctggcatccacaaagggttcctggagccaatccttcccctactccaggataccgaggacaactgtattctcatggttttcatatcaacattaagaaaatctgaccactctacaaggctggcatttggaagaaagtgaagggattctagcagtttttaggcttgactctgccagttgtggaaagagtgcaatgtgctcccactgtcttcgggtgggggacagctagca

SEQ ID NO: 120301 - DNA, 616 bp, Homo sapiens
ccaaactgtacatatatttaaaatacctttacttttttttctcttcttggatcttatttttctaaagaaaaaaaaggttttttcttctcagttgactgaattgtttttctccacttttgtcttctcaacactcttgatgcccacatgaaagaacctaagataaattctaacagcctgggactcttagggaaaaacagaggaggtgccacagaccccattctgggaaaaagctctgtttttctcatggaaccctaggaattgaaagagaatagatccctctcaaaatctaaggctgtrttctgttttatattacattacctgacattttttactttggcaggtatcaaaaattactttgcattatttgagagcttttagtcttggtgtgtaataaccaggtaggaaatatactttaagggataactaatagcagttaagagggatacttggctcttggatttttggattagagaagcatgctcttggccacctggaaggtatggaaatatccccaccccgaactgagaggagactcccatggaggatgggctgatttcaaaatgggctaattggctttgggttgctttgcaatgacatgcatggtagaagtattgca

SEQ ID NO: 120302 - DNA, 469 bp, Homo sapiens
gtggggtgaggtcagagactggcatgaaacagaaggaaggacttggttttgtcctgccaggatgagggagtcatgattgggtggcaattattttttcagcaaagtaggagctgaggtctgtctcatgaagtgggaaagggaaataacccagaaattctacaaaatagctactgtaagggaagttaagagacctcccagagagagctgaggtctgagcagagccacagaacacggctctaagctgccaacagcaactgatttgagtggataattccctcaggctgccatcagcatcccatctttggtaggagggcaggaggatgggaaaagctgtgaaactggtggagttaaaggatgtaagttcaaatgctgaatctgctacttactaggaatcagcaagatagctgatccttctgaamctgtttcctcatctaaaaaattggagataagatttgtcgtaaaacatttg

SEQ ID NO: 120303 - DNA, 654 bp, Homo sapiens
tgggacaatctcaagatcagttagaaacctttaagacagcaaacctgttgctggtgttgctgcagtgttccaggtaasagctttggatatttttgtctaagcatatttgggtttcctctcatgtgagtggacactgaaacaaatgaactagctatgaaagatgcacctttattcattgtaatctcaatcccaacttcttccttttcatcatttcacatgggatgagagaccttatcacactgtcttcatcagtagataactcccactaactcaagaataagcagaagtatccaatttgtatacactgatatataaaaccatggtattctcctacttactttgatcaaccccaatttggcatgtccagttactgccctggggacccattaagagtctatggaaacaaaaaatgcatgaacgagtgttgggagttgattacaagtccaaccctctataaaggccacggcatacttctgtttatttaatatgcacaacaccaagagagagaggtagtaattcagtctgctgggtttctccacaaaatctaccctaaggacaccagcataacaggggaacaagtcaaactggggtggaaatcagttggtatttaaaaaaattatacaagtagcattcatcctaggaaaaagcagaact

SEQ ID NO: 120304 - DNA, 620 bp, Homo sapiens
gagcccagaactttgagaccagctgggcaacatagtgagaccatgtctcaaaaaaaaaaatcttattaactattattttatattggttacatgttgaaaccaaaatattttggatatgttacgttaaataagctgcattatcaaacttaatttcacctatttatttttattcattttaaggtagttactaggaaatttaaaattacatatgccacttccattatagttcaattggacagtcctggtctagaatgaaggcttgccaaagctatttaaagactgttaaagttctgtatcatacacaggctctttttgtttcagtttaatcctagaaggaagaaatgtgttgaaattgcagctatataaaatccttgatggactgaaactaagggggaaaaagaggaagcaggtgggtttgaaagaaggaaaaaaggagtatctagcattttcttttwaaaatgtcattcttgatttatttggtggcacaaagtgattttcttacgtttctcagactgcttgagtcagtctatatagaggctattcctggatcttagttgaaagctgttgcctttctaattgtttaactgatcacttctgaacgacaattacagttcattgtt

SEQ ID NO: 120305 - DNA, 428 bp, Homo sapiens
gtgtcctgggtttcccaggacagtctggtttatgcctgttgtgctgacacacatatgattagtacctactgccatgctgaaaagcgtcttgtttgggcaataatgtaygtggttacctaagctctaccaagttgtttcaaaactgattggagggaaaaaaaaaaaaaaaacctatagcgccaccaacaattaaattataagattatttttccaagatcacagtgactcaaagttttccctcatagatgttatatatttagtttgaggtactggtggggagggggtcgtaaatgcaattcagtgttataagattagacaagcaagaatggtattctgtagccttacgaaatcacaaacacatgtcagtcgtcagtttaacaaaggatcctctgtttaaaaataaaatgttatgctaaaaacaaattaca

SEQ ID NO: 120306 - DNA, 637 bp, Homo sapiens
atcaacatggccagcctagtaggtataaagtagtaccttactgtggttttgatttgcattttcctaatgaataattttcatgtgttctttcatgaacatctttttgcagtggctttttgtgtatctcctttgaagaaatgtctattcacacccttwgcctattttattttaatttaatgattcagttgtctttttgtagttgagcttcaagagttcttacatattttggatactaatctcttacaaaatatcctatatacaaatattttatcctattctatgggttgcttttcactttcttggtagtgtccattgattcacaaaagtttttagttttgttgaaatccaatttaccaatttttttcttttattgcttatgtttttggtgtgacacttaagaaactattgcctaatccaaagtcctgcagatttatacctatgtttctttctaagagatttataactttagattttacatttaaatctttcatctattttgaattccttttttgtacatagtatgaggtaagggtccaacattattcttttgcaggtggctatccaattgtcctggcaacatttattgagaaatttctctcccatttgacacccttgttgaaaatcaattgaccataca

SEQ ID NO: 120307 - DNA, 557 bp, Homo sapiens
gacaagagtttaggatcaaattcaggtttgaatgttcctgtatttctttcactacactgatatatagcatcagaatagaccaaggatggtaatttgcacaattacttagatttgggttttatttcttgtaacacatattagagtccctaccatgtaatagatatcattcctacctctggggttggagcagtgtacaagacaactagagaccccgcctttcaaaggataagaacatgtcataatgtaagattaatgagatgacagtaaccaaagaaggggaagactttagaytgatcggtcaggaaaggcttctctggggaagcctgaaacaagagtggagaaatgaaggcagccacgggagaactgtttttaagccaagtgtctagcaattgcaaaatccccaaggcaagaaagcgtggtgtccgagggacacaaataaaccagcatgactagaagacagagggcaagagttccgaaaagtagaaagagactagagcttatgggatcttgcaggcacagaaaggtgcttggatgttattctaattgaaatgtgaagc

SEQ ID NO: 120308 - DNA, 360 bp, Homo sapiens
tctcaataaattcttaggattcaaaataaatgaatgaggatgtggtaggaagaattctaacatggcccccatgacattcatctcctgatgttactctgttaataatgttaccttacatggaaaaggggtcttgaagatgtaactaaggctaataattagtcaaccttaagacagggagattatgtggattaattttgtgtattaatcaattttacacaaraattttaaagtcagagagataagcatgtaaacatctctagataagagcccagctcagctgatgtcttgatttcaatcttgtgagaccttaagtgcagaacccagtcgagcccacctggacttctgacttacagagcagtg

SEQ ID NO: 120309 - DNA, 621 bp, Homo sapiens
atgtactgttatccaggctttgttgtttcatttatggagcaagggtaaagtaaatttagcataattcttaaaggtcctaggattttcagaatgacaaatcagcattggctccaacttaaagttgccagccacattagcccccagtaagagagtcaacctgttctttgaagctttgaagctagtcattgacttctgtctagctatgaaaagtcctagatggcatgtttttccaatggaaggctgtttggtctacattaaaaatctgctgattagtgtagccatccttaccaattaccttagctatatcttcaggaaaacttgcatcttctccatcagcacttgctgcttcacctcgcacttttatgttatgaaacaaattattttctgaaacatcttsaaccaatttctgctaccttcaaactttgcttctgcagctttctcacttatttcagccttcagagaattgaacagagctagggtcttgctctgaattaagttttttagcttaaaggaatgctatgaccagtttaatcttctatttagacaacaaaaaatttgttcatcaataatgctattttactttcttatcatgcacattttcattagagttgcacattcaat

SEQ ID NO: 120310 - DNA, 650 bp, Homo sapiens
actttaaagtagacagaaatgctgtaagttgcaaccaacaatattaaatcagcccatttattatagcatcagtgtaatataaaaatgttcccttagccttatgtgtcatttaacggggataaatgtgttaaccaattgtttttgagattacatcactttcattgaagacaattgaatagaaggaccttgtatttattactttttatccacctgtagtttttaaactctaaatataaaagagtttcttaaattcagagaaggagatgaaaatgtaaaattgaccagtcttttggaataagtacaaagtataagcaaatagaataacttcaaaagagaatttacttgtttaagagtatattatctatagaaagtagagatattaatataatcataatttaagcattttaaagattattaattttgagttttyattaagcctagaaaagtaaaggaacccaagtatgaaatctttatacaaatactcaaattaatataaaatgttccctcttgttgcttggtttttctaagtataccagttgcacttaaattcatattccattttaccaaacttaacataaggacaataagtaaaataagaaacttgtcactctgtattcaaatacacacataagtaatttaagatgacagga

SEQ ID NO: 120311 - DNA, 671 bp, Homo sapiens
ttgggtggcttaaaacaatggaaattcattctctcacagttctgcaaactagccgaaatgaaggtgtcagcagggccgtgctccctccaaagactctaggggagaagacttccttcctccttcctaacttctcgtgcttccagccctccttgstgtttcttgatgacagcttcatcacttcaatctctgtctctgtcttcacatgggtttcttccccgtgtcactcctctgtatctctgtgtctaaatcttcctctcctttctcttataaagactttaatgcttttgtcttgctgtaatggtaaggatgatgggcaaaaatgcatcctttttttgaccaggcaaaaatacatccttaccattacaacaagacaaaagcattggtgttagggcctaccctaatccagtatgacctcatcttaatgattttatctgcaaagactctttccaaataatatcatgttcacaggtactgggagtaaggacttgacataacttttcatggagacacaattcaactcattacacctagagaatgacacacataagaaaaagatataacaaaattctaagcacttcacttgcatttgttaatttaattcagacatcagccctcgaccatggtaggcactattatttttctacttaagatgcagaaatggaggcacagag

SEQ ID NO: 120312 - DNA, 671 bp, Homo sapiens
ttgggtggcttaaaacaatggaaattcattctctcacagttctgcaaactagccgaaatgaaggtgtcagcagggccgtgctccctccaaagactctaggggagaagacttccttcctccttcctaacttctcgtgcttccagccctccttggtgtttcttgatgacagcttcatcacttcaatctctgtctctgtcttcacatgggtttcttccccgtgtcactcctctgtatctctgtgtctaaatcttcctctcctttctcttataaagactttaatgcttttgtcttsctgtaatggtaaggatgatgggcaaaaatgcatcctttttttgaccaggcaaaaatacatccttaccattacaacaagacaaaagcattggtgttagggcctaccctaatccagtatgacctcatcttaatgattttatctgcaaagactctttccaaataatatcatgttcacaggtactgggagtaaggacttgacataacttttcatggagacacaattcaactcattacacctagagaatgacacacataagaaaaagatataacaaaattctaagcacttcacttgcatttgttaatttaattcagacatcagccctcgaccatggtaggcactattatttttctacttaagatgcagaaatggaggcacagag

SEQ ID NO: 120313 - DNA, 671 bp, Homo sapiens
ttgggtggcttaaaacaatggaaattcattctctcacagttctgcaaactagccgaaatgaaggtgtcagcagggccgtgctccctccaaagactctaggggagaagacttccttcctccttcctaacttctcgtgcttccagccctccttggtgtttcttgatgacagcttcatcacttcaatctctgtctctgtcttcacatgggtttcttccccgtgtcactcctctgtatctctgtgtctaaatcttcctctcctttctcttataaagactttaatgcttttgtcttgctgtaatggtaaggatgaygggcaaaaatgcatcctttttttgaccaggcaaaaatacatccttaccattacaacaagacaaaagcattggtgttagggcctaccctaatccagtatgacctcatcttaatgattttatctgcaaagactctttccaaataatatcatgttcacaggtactgggagtaaggacttgacataacttttcatggagacacaattcaactcattacacctagagaatgacacacataagaaaaagatataacaaaattctaagcacttcacttgcatttgttaatttaattcagacatcagccctcgaccatggtaggcactattatttttctacttaagatgcagaaatggaggcacagag

SEQ ID NO: 120314 - DNA, 671 bp, Homo sapiens
ttgggtggcttaaaacaatggaaattcattctctcacagttctgcaaactagccgaaatgaaggtgtcagcagggccgtgctccctccaaagactctaggggagaagacttccttcctccttcctaacttctcgtgcttccagccctccttggtgtttcttgatgacagcttcatcacttcaatctctgtctctgtcttcacatgggtttcttccccgtgtcactcctctgtatctctgtgtctaaatcttcctctcctttctcttataaagactttaatgcttttgtcttgctgtaatggtaaggatgatgggcaaaaatgcatcctttttttgaccaggcaaaaatacatccttaccattacaacaagacaaaagcattggtgttagggcctaccctmatccagtatgacctcatcttaatgattttatctgcaaagactctttccaaataatatcatgttcacaggtactgggagtaaggacttgacataacttttcatggagacacaattcaactcattacacctagagaatgacacacataagaaaaagatataacaaaattctaagcacttcacttgcatttgttaatttaattcagacatcagccctcgaccatggtaggcactattatttttctacttaagatgcagaaatggaggcacagag

SEQ ID NO: 120315 - DNA, 559 bp, Homo sapiens
tatatgcaatgtgttgtaccaaagtaagtctacccctttatttttttgagacagggtcttcctctgttgtccaggctggagtgcagtggcatgatcttggctcactgcaacctccacctccctggctcaaactattctcccacatcagcctgctgagtagctgggactacaggcacatggcactgtgcccagctaatttttgtatttttagtagagacagggtttcgccatgttgcccaggctggtcctgaactcctgggctcaagcaatctgcccacctcagcctctcaaagtgctgggattacaggtgtgagccactgtgcctggcctagccctttattttatatataaacatgtaaatccattcaacagtctcagctgaatgtggttatggagactgagatgatagcatcagctaaggccttagagtaggaaaggcagttggaataatgcaggmagcaaagctataaaaatctggatgacagaaacatagcacagtgaggctgggaaatcagctcagctaagtgaggacctgtattgaggttagtgttagaagcag

SEQ ID NO: 120316 - DNA, 644 bp, Homo sapiens
gcctcctttgccttgactataagcgtcgtgtttccagtagagagctaaggagcagaatggcactagaggagtgcgttttcactagagaagcactgcctctaatactcccctctggggtgactccatgactttcagtagctcaatytcctcaacaactgaaacagctgttttagaaaataagccaactcatctacaggccttaagttatacaactgcagagagaagaggtgccaagttcaggaagcccaacagagaccaaatcagagccagacgctggggaactccaggtttaatatgccttccactactcacttccacactgcaagaaatgtctccaacctttctgagagttctttatggctcagaatttctccttaagatttaaagacccaattacttcaaggagcagcgaccaagattccaggggagctttaaccgagaagtcctcctctagagctgcagtaagatgtatgaatgctactgggaaactgtagagcacttccaaaacatcagacattttctaaagaacagaaagctacacttaattcacattattgaaaagctgccaaaccactgatttttagactttattagtcaagtcaacgctatggtaaactatatttcaataaagccactaaaaaaat

SEQ ID NO: 120317 - DNA, 621 bp, Homo sapiens
agagtcaccctataaagttatagaactaataccatgtccttttgacagatctttccctagatcattctgacctagttgcagagttgttgaaggagctgtctaaccataatgagcgtgtagaagaaagaaaaattgccctctatgaacttatgaaactgacacaggaagaatcttttagtgtttgggatgaacacttcaaaacaatattgcttttattgcttgaaacgcttggagataaagaggtaaatggcaaaatatgtaaacagtagcctttccttcctgtctcttttacattgcctgttaatctratgctacacggatttagcaattgggagaatgaatctcttctgctgctgctttctgcatgaacttttcactgtgaagtactttttcttctaaaccaagtagctcaacaattttgaacaattaacaggaaaaatgaaaggtcgcaggctgaattcttatagaaaagtacatgttacttgttttacatatttagattagttgttcaggagcaacttttatttatttatttatttatttatttattttgaggaataatctcactcattctcaagcccaggctggaatgcagtggtgtgatctcagctcactgcaacc

SEQ ID NO: 120318 - DNA, 621 bp, Homo sapiens
agagtcaccctataaagttatagaactaataccatgtccttttgacagatctttccctagatcattctgacctagttgcagagttgttgaaggagctgtctaaccataatgagcgtgtagaagaaagaaaaattgccctctatgaacttatgaaactgacacaggaagaatcttttagtgtttgggatgaacacttcaaaacaatattgcttttattgcttgaaacgcttggagataaagaggtaaatggcaaaatatgtaaacagtagcctttccttcctgtctcttttacattgcctgttaatctaatgctacacggatttagcaattgggagaatgaatctcttctgctgctkctttctgcatgaacttttcactgtgaagtactttttcttctaaaccaagtagctcaacaattttgaacaattaacaggaaaaatgaaaggtcgcaggctgaattcttatagaaaagtacatgttacttgttttacatatttagattagttgttcaggagcaacttttatttatttatttatttatttatttattttgaggaataatctcactcattctcaagcccaggctggaatgcagtggtgtgatctcagctcactgcaacc

SEQ ID NO: 120319 - DNA, 630 bp, Homo sapiens
gtcataagaatttgagtaagtcttgagttatgcctcatgcatcttcaaatacattctatcctattaattttataatgatgtagttgaaagaagcctggaattatacttaggttttccattctggatgccatttatacctcttccttattacataatgttaaggaaaacacttgactatctctgagctaggtcatttttatccttaatctagagagcataattgctgtcctgactacttcactggtgatagcaacaagagacagcctaatgcctaggcagataggtgcaggtccccagtgaaaccccacctccaagccaaacaccgtttatagcctgaaaactaagctacaagttaaatcctcggactggattgataacttgtctttctgtttggcatactctcttctgattgaccttcccactccagtattagtctgttctcatgctgctaataaagacatacccaagactgggtaatttataaagaaaaagagttttaatgaactcacagttccacatggctgaggaggcctcacagtcatggtggaaggtgaaagaggawcaaaggcatgtcttacatttgggcaggcaagacaacacgtgtaggggaactgttctttataaaactat

SEQ ID NO: 120320 - DNA, 607 bp, Homo sapiens
acttaagcagttatctagttttcattttttgtagagacgatgaataccagctcattaggagaaaaactatcattgaaattttgaatggtatttttcatctgcagcattatgtaaaggaagagtgatgtaaggatagggtatatccttaatacttccagaaaatgtatatcatcttcacctagtattttttattttcttctaacaatattaggtaaatgttgagaaaatgacattaatatgtaaatacataaagagcatgactctgttactccttactgatctgttgtaggagcatagagaaacttaaggcctggaaaacttttagttttgtaaatactggttaataatttttggtgtgtgaaggatccagaatgctgagctatttattttaagataggggaaaagtcagtgttagaccagactgactattakaaagaaatgtcagatttatttatttgattcctctgagacatgtaccctgttaacaattacagacctgcaggtaatttacttgatttccttggaacattttataacttgtttttaaattacagatacagatataagaaagaaggtaatggttcagatgaagagacaggtaaattgt

SEQ ID NO: 120321 - DNA, 509 bp, Homo sapiens
gcgtctgtagtctcagctacttgagagtctgtagtgggaagatcagctgagttgggaggtcaaggctgcagtgagccatgcatgattgtatcactgcattccagcctgggcaacataaataaattaaatatacatatgtgtgtgtgtgtgtatgtctgtctatataatagatataagattgcaaatacarattagtgcagtcccattttacaaaggacatttccagaaatcaattccatatctcttgaacctttgggccatatcacagatttaaaaggaatcatagtaaagggaagagaattatgtatattatgtagactttttttttaagagaattgcaccactcagaatgtcctgccttcattcctcccttacccttactgaatcccaaggaggtagaagagggataaattacacctatttcaccagaagagtttgtttttttttttttaatggtcattcagagagatggcaatgtccctgcattggggtaatagatggcctattgc

SEQ ID NO: 120322 - DNA, 661 bp, Homo sapiens
tttttttttttttaagaattcttatcttctagaaattttggttgaaatatttatagacaaagtaagatgacatctgtgatttgcttctaaagaactggggcgagggggaaaggtgaatgggggtgaagataaaacaagcctggccacaagatgatagctgctgaagccggccacagccatgtggaagcttgttactctatgtctatgtttgaaattgtccatgataaaaagtatgtatttaaaaaagcagctgggcatggtggctcatgcctgtaatcccaacactttaggaggccaaggtgggaggatcgtttgagagcaggagttccagactaacctgggcaacatggttgagaccctgtctctacaaaattaaaaaataattttaaaaagtaaccacattcacttcagaaaacatggaaaacacasaaaagtataaagaaaaaaagacacccatatgaatcttaccactcaaagttaccacaaacagaagtcttgttctcattgtaattattcaagccatccacatttactataaaaatactgggcgaaaaggctttagagaaagagggaagagcaagtatgggatatgcacagggtctcaggttcatgaggaaaacaaattttttgaattttgaattgggtaaatgaaattcaaaat

SEQ ID NO: 120323 - DNA, 609 bp, Homo sapiens
aatgggagttccagaaaaaatcaaaactgacaatggaccaggatattgtagtaaagctttccaaaaattcttaagtcagtggaaaatttcacatacaacaggaattccttataattcccaaggacaggccatagttgaaagaactaatagaacactcaaaactcaattagttaaacaaaaagaagggggagacagtaaggagtgtaccactcctcagatgcaacttaatctagcactctatactttaaattttttaaacatttatagaaatcagactactacttctgcagaacaacatcttactggtaaaaagaacagcccacatgaaggaaaactaatttggtggaaagataataaaaataagacatgggaaatagggaaggtgataacgtgggggagaggttttgcttgtgtttcaccaggagaaaatcagcttcctgtttggatacccactagacatttgaagttctacaatgaacccatcrgagatgcaaagaaaagcacctccgcggagacggagacatcgcaatcgagcaccgttgactcacaagatgaacaaaatggtgacgtcagaagaacagatgaagttgccatccaccaagaaggcag

SEQ ID NO: 120324 - DNA, 609 bp, Homo sapiens
aatgggagttccagaaaaaatcaaaactgacaatggaccaggatattgtagtaaagctttccaaaaattcttaagtcagtggaaaatttcacatacaacaggaattccttataattcccaaggacaggccatagttgaaagaactaatagaacactcaaaactcaattagttaaacaaaaagaagggggagacagtaaggagtgtaccactcctcagatgcaacttaatctagcactctatactttaaattttttaaacatttatagaaatcagactactacttctgcagaacaacatcttactggtaaaaagaacagcccacatgaaggaaaactaatttggtggaaagataataaaaataagacatgggaaatagggaaggtgataacgtgggggagaggttttgcttgtgtttcaccaggagaaaatcagcttcctgtttggatacccactagacatttgaagttctacaatgaacccatcagagatgcaaagaaaagcacctccgcggagacggagacaycgcaatcgagcaccgttgactcacaagatgaacaaaatggtgacgtcagaagaacagatgaagttgccatccaccaagaaggcag

SEQ ID NO: 120325 - DNA, 609 bp, Homo sapiens
aatgggagttccagaaaaaatcaaaactgacaatggaccaggatattgtagtaaagctttccaaaaattcttaagtcagtggaaaatttcacatacaacaggaattccttataattcccaaggacaggccatagttgaaagaactaatagaacactcaaaactcaattagttaaacaaaaagaagggggagacagtaaggagtgtaccactcctcagatgcaacttaatctagcactctatactttaaattttttaaacatttatagaaatcagactactacttctgcagaacaacatcttactggtaaaaagaacagcccacatgaaggaaaactaatttggtggaaagataataaaaataagacatgggaaatagggaaggtgataacgtgggggagaggttttgcttgtgtttcaccaggagaaaatcagcttcctgtttggatacccactagacatttgaagttctacaatgaacccatcagagatgcaaagaaaagcacctccgcggagacggagacatygcaatcgagcaccgttgactcacaagatgaacaaaatggtgacgtcagaagaacagatgaagttgccatccaccaagaaggcag

SEQ ID NO: 120326 - DNA, 609 bp, Homo sapiens
aatgggagttccagaaaaaatcaaaactgacaatggaccaggatattgtagtaaagctttccaaaaattcttaagtcagtggaaaatttcacatacaacaggaattccttataattcccaaggacaggccatagttgaaagaactaatagaacactcaaaactcaattagttaaacaaaaagaagggggagacagtaaggagtgtaccactcctcagatgcaacttaatctagcactctatactttaaattttttaaacatttatagaaatcagactactacttctgcagaacaacatcttactggtaaaaagaacagcccacatgaaggaaaactaatttggtggaaagataataaaaataagacatgggaaatagggaaggtgataacgtgggggagaggttttgcttgtgtttcaccaggagaaaatcagcttcctgtttggatacccactagacatttgaagttctacaatgaacccatcagagatgcaaagaaaagcacctccgcggagacggagacatcgcaatcgagcaccgttgactcacaagatgaacaaaatggtgacgtcagaagaasagatgaagttgccatccaccaagaaggcag

SEQ ID NO: 120327 - DNA, 617 bp, Homo sapiens
atcttgaatttattcgagtgtcctcaaaaccgctaatgtgaattctctctgaaaggttgcatgtctccgtttctctaggattagtccctgatgccttatttagtttgttttgtgaagtcatgttttcctggataatcttgatgtttgtagatgtctgggaattgaagagttaggtatctattgtagtcttcactgtctgggcttgtttgtcaccattttccttgagaaggctttccaggtattcaaagagaattaggcctcaatattgctgtggtttttcaygctggtagaggtactgcctttgtggtcttggataaattccaggattctctagattgccagacagagacacttattcttccatcctaatttccccaaacagagtctctctctctctctctctgctgagccacatggaactgggggtgtagtgattcaaggacacatgtggccaccaccactgacactgcactgggtcagacctgagccaggacagcactggaacttgcccaagacctgttgtaactactacttgctaccacctgtgttcactgaaggccctagggctttacaatcagtaggtgtctaagccatccgtgtttgtgcccttccttcag

SEQ ID NO: 120328 - DNA, 617 bp, Homo sapiens
atcttgaatttattcgagtgtcctcaaaaccgctaatgtgaattctctctgaaaggttgcatgtctccgtttctctaggattagtccctgatgccttatttagtttgttttgtgaagtcatgttttcctggataatcttgatgtttgtagatgtctgggaattgaagagttaggtatctattgtagtcttcactgtctgggcttgtttgtcaccattttccttgagaaggctttccaggtattcaaagagaattaggcctcaatattgctgtggtttttcatgctggtagaggtactgcctttgtggtcttggataaattccaggattctctagattgccagacagagacacttattcttccatcctaatttccccaaacagagtctctctctctctctctctgctgagccacatggaactgggggtgtagtgattcaagsacacatgtggccaccaccactgacactgcactgggtcagacctgagccaggacagcactggaacttgcccaagacctgttgtaactactacttgctaccacctgtgttcactgaaggccctagggctttacaatcagtaggtgtctaagccatccgtgtttgtgcccttccttcag

SEQ ID NO: 120329 - DNA, 654 bp, Homo sapiens
ttagcagtaagtaaacaattatagaaaagcaagctaaggaacaatggctagttaccatttaacttctgtctatgtcttaacagatttcaggcctttaccacaattctaaccttgtggcctttcattaatgctatagtttttgtctctgagtgaggaggaagttagtctaggggaagggctgttaccatatttgttttaaactatagactaaattccttccatagttaacttggcctacttgcaagaataagaaagggtagttagctttagaagcaagatggactcagtgatattatctccctcttattgctataatctttgcaaagacagtttcagaaattgttttatgtgtacgctgaatagagaagagtgtgtaraagaatgatagtagaaagttgaaaagatgatctggacccagaaagttctggatccaaaaatttagaagtatgaatcagattctgatattcatcatttatgccacagcaagaaaagagaaccctggattgggaattagtaatcaaaaagtgcagagagggtcaaggtgaagaaagaacagaacagaatatatcacatttagcaggggatggcaattacactgtctttactgatttagacaagaccacttggggaattctggtatcaaattcaccacgt

SEQ ID NO: 120330 - DNA, 586 bp, Homo sapiens
tttgcttaacaataagtaaagaaacaagtaacttcaatatcttcaatatcatcaataaagattacagctagggttggagactgatttataataactctgtctcccatgtggctgacctcatgtaaattaaattatttctttactgcaatatcatagtcttaataaattggttttgtctgtgcaccakttacccactcagcacccaagtattgacatgacaaagctcaaacttgcctccattggccctgttatattttatccactcaaaatgggatggaatgatctttgaccaaaagttatacggatggtctccagtcaaggtagaagagtggatagtcactctgagttaggcctaatgagcttccttcagggctcaccaaatgtgaatagtcaatcaaactaggagagcctacagaacttctgccagcaatttttttgggaaatcctctccacacttacaaacacacacaacacggtaaaggaaaaaaggccttcaaaaccaagatttctaacaaaaattttctaagagtatttttccaaaggaacctcctattttccatctaactggggataaatctccccaaac

SEQ ID NO: 120331 - DNA, 610 bp, Homo sapiens
ctcaaatcaaagacactttcagtcataggatgcatcatgttataatgtgccaccaaccttttcaaaatgctgccggttattataaaacagcatgaattataagccagacacattttatattaaaatgaaaacatatagactttttcataagtaattttttattatgtgttacagtctcactcacatttttattacattcctgaggtaaaattattgtatgtgtactgttttatgtggaggaagttgaatggagatcagaaaatattggttactgaatattgttgtaggacaatatgtctatacaaatatgtctatgttgtagacatattttaaacataatattagtaaaacaaatagttttgctcttcatctgattggggagcaagatgaggatatgttgaatagcaccattcttaaaagagctacatatgtgtcatgaaatttaatgaaataactattctgtgttagagataagtttggaagattagatatgttaatttatatagaaagttctgccctgatagtgatagagtagatgttgtcagacmttttctccaagaaataacaattatgatcttaggagaaaaataaataaataatataggtaaat

SEQ ID NO: 120332 - DNA, 578 bp, Homo sapiens
gtgggaattatagactacctgtatattgagatccaagatatttcagtaatgttaaagtttataaatatatgttgagtagaaagctaaagctaaatgtattttatgaactattacttaaagggatatatgtataatatttataactcataaaacattgacttgagttgcttatagaatgttagacatatacatatatatgttttttcttaccagatctagaatatcagataaaagtcaagtatttaatttggcagatcttattgatgtgacctaacaattttataaaacartcttagagactgtaaagcaattaacccattcttctgacctgaaaaatttggactgtgggaaatggcaggtcaggaactacccacaatgcagagccatttggtcatggtctgttagtataccctacataaaaagcctgaagataacactgatcttcatctccttttcatttccatctctttttttaatttaaaagaattgtgtggtgcttgtgtgtatttatatgaaattttgctcttattctatttttattctttggtagtattacgtagtatgtaccttgatatttc

SEQ ID NO: 120333 - DNA, 578 bp, Homo sapiens
gtgggaattatagactacctgtatattgagatccaagatatttcagtaatgttaaagtttataaatatatgttgagtagaaagctaaagctaaatgtattttatgaactattacttaaagggatatatgtataatatttataactcataaaacattgacttgagttgcttatagaatgttagacatatacatatatatgttttttcttaccagatctagaatatcagataaaagtcaagtatttaatttggcagatcttattgatgtgacctaacaattttataaaacaatcttagagactgtaaagcaattaacccattcttctgacctgaaaaatttggactgtgggaaatggcaggtcaggaactacccacaatgcagagccatttggtcatggtctkttagtataccctacataaaaagcctgaagataacactgatcttcatctccttttcatttccatctctttttttaatttaaaagaattgtgtggtgcttgtgtgtatttatatgaaattttgctcttattctatttttattctttggtagtattacgtagtatgtaccttgatatttc

SEQ ID NO: 120334 - DNA, 553 bp, Homo sapiens
ccctggaaatattgtgaaaaacagaacagtatattttggtcttaccagaagttctcaacttctctgagcctcagttttcttcactgtaaaatgagtataattcccacctcacattttttttttcttggaagaattaaatgatccaatacaagtgaaagtatrttacaaagttaagccttatagcagttatgggaaatggctgttaaaagttattttctcagatgacatatatgaaagaaaatattcaaatgcattttataaatgtatttcctgacaaaaaatatattttttcctatataaatggttaatgataataacatttgcatgtcagattcaaatttactttatattggttgtttagattcaagaacccttggagtcttacgatgaagtcatttcagattacattaaaaaaatccataattataacatttgccacattgcactagacaattaatttgttacaggaggcacatggtaataattttaaacaataactatgttgtaaatgagtatgcaatgcaatacaatacaaccaaaagtaaattgaact

SEQ ID NO: 120335 - DNA, 558 bp, Homo sapiens
atttattatataaccatttcaacttatggttagatatccgaaatgctgcgcttgccccaagtggctttagggcttgagttatccctttgttagcaagggtacaatctagggtatataacacacagatacctgtatgtgttctcagtgtcacactcaaaagttctttcatgtgggcctaaaacttatagattgttttgtaaaatggagtaaaaagccaaccaatgtcgtgtcctgattaatctgattctgggctaagcgagaaaaactatgcaacatttagagtgatgtgagtcttttatttcaacattttaatgtgagatcaagatacmttaaaataaagaaactaatcccttgataataagggttagtcactaagtggattaagaagttaatgatgacatcattagggaatcatttctttaaagacagtgactgatacttcaaaagaatgttacaggtatttgtcacctagctcttcaataaaattaaatttctcagttaaagaaatgacagattggcccacctttgctgaaaaaagtagaaaagaactcataattg

SEQ ID NO: 120336 - DNA, 558 bp, Homo sapiens
atttattatataaccatttcaacttatggttagatatccgaaatgctgcgcttgccccaagtggctttagggcttgagttatccctttgttagcaagggtacaatctagggtatataacacacagatacctgtatgtgttctcagtgtcacactcaaaagttctttcatgtgggcctaaaacttatagattgttttgtaaaatggagtaaaaagccaaccaatgtcgtgtcctgattaatctgattctgggctaagcgagaaaaactatgcaacatttagagtgatgtgagtcttttatttcaacattttaatgtgagatcaagatacattaaaataaagaaactaatcccttgataataagggttagtcactaagtggattaagaagttaatgatgacatcattagggaatcatttctttaaagacagtgactgatacttcaaaagaatgttacaggtatttgtcacctagctcttcaataaaattaaatttctcagttaaagaaatgacagattggcccacytttgctgaaaaaagtagaaaagaactcataattg

SEQ ID NO: 120337 - DNA, 614 bp, Homo sapiens
acctcgtaactgaggctggctgaaggaaaggaagcaccagagatgattcccgaggtgtttttaggtcaggaggcactggcatgaggcaggctctgcagttgggtatgacctgccctgctttacctgggaccagagattcctgggaagggggctctcagygctgaaatggtgatgtggggaagacgtggtcccttccatctcaggggaaggtttcctgaggtatcattagatattcttttttagactaaaatatttcctaaggggtcaccttctcctttctttgcctttcctccatggaagaatatttgactatttgatccaagctcccttgccactccaaatctgttagaaatgtaagtcagaattgagccccttcatagtggctcacatctataatcctagggctttgggaggctgaggctggagcattgcttgaggccagggttcgaaactagcccaggtgatatagcgagatctcgtctctatttcaaaaaagaaaaaaaaaaaaagaattgagccttttgttattgacgcccagggtccactccagtgagtctgagtcctccctatttccgccaggattgctgagcaacactgccacggaggggctttcc

SEQ ID NO: 120338 - DNA, 614 bp, Homo sapiens
acctcgtaactgaggctggctgaaggaaaggaagcaccagagatgattcccgaggtgtttttaggtcaggaggcactggcatgaggcaggctctgcagttgggtatgacctgccctgctttacctgggaccagagattcctgggaagggggctctcagcgctgaaatggtgatgtggggaagacgtggtcccttccatctcaggggaaggtttcctgaggtatcattagatattcttttttagactaaaatatttcctaaggggtyaccttctcctttctttgcctttcctccatggaagaatatttgactatttgatccaagctcccttgccactccaaatctgttagaaatgtaagtcagaattgagccccttcatagtggctcacatctataatcctagggctttgggaggctgaggctggagcattgcttgaggccagggttcgaaactagcccaggtgatatagcgagatctcgtctctatttcaaaaaagaaaaaaaaaaaaagaattgagccttttgttattgacgcccagggtccactccagtgagtctgagtcctccctatttccgccaggattgctgagcaacactgccacggaggggctttcc

SEQ ID NO: 120339 - DNA, 631 bp, Homo sapiens
aaatgtataaggtcaaagttatcaaaaatgcaaatgtaaagcatatggcaaattttaatccattaaatgatcaaaaataatattaatgctgacaagagtacaaagaaagcaagcctcttgcgcggtgctgacrgcagtctgaaatggcacactgtgcagagactaataaattactaacactgctgaactccataatcaaacactgctagttctttttaagtaaaaaagactcgaaatacaggaaaaactgtatgcacaaagattacattatttcttataaaaccaagaaaatgactaaaaatagtggaactgctaagcaggaaatacctactagacagattatcatatagctgttaaaataagggttatgaaaactgtaaggaaatgaggagtataatattgggtgtaaaatcattttaaaaatgggtaaaaagattaaatgaaaatatactaaatgtcaacagtacctatgttaatgtgataagactataaaaagtcccatagatatcttccaaattttctatacttacaattctactgtagtgaagggggaaatgatctctatgtgaagtgttaaactccgagttatggctgtggggcaagatcacacaaactcctcatctaacttccc

SEQ ID NO: 120340 - DNA, 523 bp, Homo sapiens
ctatgtgaccttgctctagtatcccaggagcctgtgatgtgattttcccactgggacttcccataaattccacatgatatctttcccaaccactgatatctctaatataagaggatctcatggctcaagcggtagggcacagcttgatccttacaaacagtcctgaaatgtctttggcttgattttattttaactctgttactcttttagcaccatttccaagagctgtgaataaggatctgagcaaagtgacttcacaggacagaagctttagctgagctgtcaggtgagacacctgatatggattctgggragggctgtgtttactctgtagtttctggaggatactatctgctgtccttaatagacgagttgcttatgtccataatgggaatcctggtggtggtggtagggctggtggtagagtatgtgtatatatgtttactaaaattggagttgagagggaaatacagaagaatagcatagagggatagtaaaagtccttcaaactggcttccttttt

SEQ ID NO: 120341 - DNA, 629 bp, Homo sapiens
ggggtgaatactatttttttttacccgtggctatttccccaatactaatggaacccctgttctttcagtggtatcggagtgctcagattccttaaagaagcttgtgcaccttccaaattgtagggagcgaattgctattgtmcacatcaatcatagtaatgtcattcatcttgccatatgattggtatatccatgagcattttacacaatcttgccaatatcttcctcccagtcttaacatacgataatacccatattccaataaaatattattgcatttaacaaaacagctttaatttgggggtataatttcaaaacttcagtactgcttataagcaattactctaccctgaaaaatctttcactatctaacatgaaaagaattataattattataatttattgctttcttgctatatgccagacatggtataatgtgctctatgtatacaatatttcagccaaacccccaacaactttgtgaagcaacattactcttatttttcaaacaaggtatttaagacttagagaaattaaatacccaaggtgataatcaggtaaatgggagaagccattggtgacttactcaacccatcagaatcactcattccctacaaaataaaatatac

SEQ ID NO: 120342 - DNA, 629 bp, Homo sapiens
ggggtgaatactatttttttttacccgtggctatttccccaatactaatggaacccctgttctttcagtggtatcggagtgctcagattccttaaagaagcttgtgcaccttccaaattgtagggagcgaattgctattgtacacatcaatcatagtartgtcattcatcttgccatatgattggtatatccatgagcattttacacaatcttgccaatatcttcctcccagtcttaacatacgataatacccatattccaataaaatattattgcatttaacaaaacagctttaatttgggggtataatttcaaaacttcagtactgcttataagcaattactctaccctgaaaaatctttcactatctaacatgaaaagaattataattattataatttattgctttcttgctatatgccagacatggtataatgtgctctatgtatacaatatttcagccaaacccccaacaactttgtgaagcaacattactcttatttttcaaacaaggtatttaagacttagagaaattaaatacccaaggtgataatcaggtaaatgggagaagccattggtgacttactcaacccatcagaatcactcattccctacaaaataaaatatac

SEQ ID NO: 120343 - DNA, 629 bp, Homo sapiens
ggggtgaatactatttttttttacccgtggctatttccccaatactaatggaacccctgttctttcagtggtatcggagtgctcagattccttaaagaagcttgtgcaccttccaaattgtagggagcgaattgctattgtacacatcaatcatagtaatgtcattcatcttgccatatgattggtatatccatgagcattttacacaatcttgccaatatcttcctcccagtcttaacatacgataatacccatattccaataaaatattattgcatttaacaaaacagctttaatttgggggtataatttcaaaacttcagtactgcttataagcaattactctaccctgaaaaatctttcactatctaacatgaaaagaattataattattataatttattgctttcttgctatatgccagacatggtataatgtgctctatgtatacaatatttcagccaaacccccaacaactttgtgaagcaacattactcttatttttcaaacraggtatttaagacttagagaaattaaatacccaaggtgataatcaggtaaatgggagaagccattggtgacttactcaacccatcagaatcactcattccctacaaaataaaatatac

SEQ ID NO: 120344 - DNA, 594 bp, Homo sapiens
tcttgctatatgccagacatggtataatgtgctctatgtatacaatatttcagccaaacccccaacaactttgtgaagcaacattactcttatttttcaaacaaggtatttaagacttagagaaattaaatacccaaggtgataatcaggtaaatgggagaagccattggtgacttactcaacccatcagaatcactcattccctacaaaataaaatatacttactattacatctattaaagggatgttttgcccctgtgctcatctattcttgcctgttttcttccttgctcagacttgcccttttgattctatgggctttcagccaactattacamatgaagattaaatatgttgattttacaggcagagccttctgtaatgataagctttctctgaagacattggagaaggggttgggttatttaaggactgatcataataagaagcataaattaacaattttgttaccatgcaaatttgtattagattaaaggacaaaagtgaatattataaagggaaatcaaagaaatattacacagaattatacaacactgacaaagttggattttggtggaatatttaaattttctt

SEQ ID NO: 120345 - DNA, 594 bp, Homo sapiens
tcttgctatatgccagacatggtataatgtgctctatgtatacaatatttcagccaaacccccaacaactttgtgaagcaacattactcttatttttcaaacaaggtatttaagacttagagaaattaaatacccaaggtgataatcaggtaaatgggagaagccattggtgacttactcaacccatcagaatcactcattccctacaaaataaaatatacttactattacatctattaaagggatgttttgcccctgtgctcatctattcttgcctgttttcttccttgctcagacttgcccttttgattctatgggctttcagccaactattacaaatgaagattaaatatgttgattttacaggcagagccttctgtaatgataagctttctctgaagacattggagaaggggttgggttayttaaggactgatcataataagaagcataaattaacaattttgttaccatgcaaatttgtattagattaaaggacaaaagtgaatattataaagggaaatcaaagaaatattacacagaattatacaacactgacaaagttggattttggtggaatatttaaattttctt

SEQ ID NO: 120346 - DNA, 594 bp, Homo sapiens
tcttgctatatgccagacatggtataatgtgctctatgtatacaatatttcagccaaacccccaacaactttgtgaagcaacattactcttatttttcaaacaaggtatttaagacttagagaaattaaatacccaaggtgataatcaggtaaatgggagaagccattggtgacttactcaacccatcagaatcactcattccctacaaaataaaatatacttactattacatctattaaagggatgttttgcccctgtgctcatctattcttgcctgttttcttccttgctcagacttgcccttttgattctatgggctttcagccaactattacaaatgaagattaaatatgttgattttacaggcagagccttctgtaatgataagctttctctgaagacattggagaaggggttgggttatttaaggactgatcataataagaagcataaattaacaattttgttaccatgcaaatttrtattagattaaaggacaaaagtgaatattataaagggaaatcaaagaaatattacacagaattatacaacactgacaaagttggattttggtggaatatttaaattttctt

SEQ ID NO: 120347 - DNA, 557 bp, Homo sapiens
ctgtcgtcttgcttttagattcatgatcacgaacctcaggtggtctcttaatgctaggcaatcacactgtatttccctagtgcattcactgtcccactttctcttagacacctttttcacctgttagcatcttcacctggatactctgtttttctcctttttcaactatttgcattgctatctaagattaatccctttgctcctatgttagatcctattctctctcatctgctgaagggcattgcttcagcaattctcccctctctctcctgcrtattttttttctctctactgggtcatgccaactagcacacaagcatgctgtcatttccccatcttaataacaaaacttataaactttccttgattccacttctcagatcagttaccagaacattttctttcttgcatcgacattagatatcgatgctcccttgggtttctccagtgtcacttacgcttccttcttcatctcctctgctggtagctcctccttaactttttaatttttgaatgccccaatgctcagatcttgattatcttcttttctttctcta

SEQ ID NO: 120348 - DNA, 587 bp, Homo sapiens
atttttttacctttgattttatttatttgggtctgctctttttttcttagtctggctaagggtttttcagttttgtttatcttctcaaaaaacccagctttgtttcattaatctcttacattgttcttttcatttcaaaataatttatttctgctctttattatttcttttattctactaattttggatttggttgctcttgctttatagttctttagtatgcatcattaggttatttatttgaatttttttttctttttcatgtaggcatttatggctataagtttctctcttagcactgctttcactgtatcccatagatttcggcatgttgggtttccattatcatttatttcaaggaaattttcaatttcctctttaatttcttcactgacacactggccattcaggagcataytgtttgatttccatgtgtttatataatttcaaaaattcctcccattattgatttctagttttattccactgtgttcagagaaaatgcttgatattatttcaatttttttaatggttgaagacttgttttgtgatttaacatgttatctaacattgagaatgacccatgt

SEQ ID NO: 120349 - DNA, 600 bp, Homo sapiens
tatgttctgtaaatatctattaggtccattttttctatagtgcagattaaattcgggggttctttgtcgaatttctgtctgggagatatgtccgttgctgaaggtggggtgttaaagtctctagctattattgtactgaggtctctctctytttagctctgataatatttactttatatatctgggtgctccagtgttgattgcatatatatttatacttgtatcttcttgctgaatcagcccctttatcattatgtaataacttctttgcctcttcttatagcttgtgtcttaaaatatattttgtctgatatgaacatagctattcttgctcttttttggtttcattggcatggactatcttttcctgtccctttatatttagtccatgttatctttataggtggaatgtgtttcttgtaggccacagatcactgggtcttgtcttatcatccgttcagctacactatttcttttgattggataatttagcccgtttacattcagtgttattgataagtatgaacttatgtatcttgctatttgttttctggtgttttgttgtcttcacttccttctttcctttcttcctgtcttcct

SEQ ID NO: 120350 - DNA, 600 bp, Homo sapiens
tatgttctgtaaatatctattaggtccattttttctatagtgcagattaaattcgggggttctttgtcgaatttctgtctgggagatatgtccgttgctgaaggtggggtgttaaagtctctagctattattgtactgaggtctctctctttttagctctgataatatttactttatatatctgggtgctccagtgttgattgcatatatatttatacttgtatcttcttgctgaatcagcccctttatcattatgtaataacttctttgcctcttcttatagcttgtgtcttaaaatatattttgtctgatatgaacatagctattcttgctcttttttggtttcattggcatggactatcttttcctgtccctttatatttagtccatgttatctttataggtggaatgtgtttcttgtaggccacagatcactgggtcttgtcttatcatccrttcagctacactatttcttttgattggataatttagcccgtttacattcagtgttattgataagtatgaacttatgtatcttgctatttgttttctggtgttttgttgtcttcacttccttctttcctttcttcctgtcttcct

SEQ ID NO: 120351 - DNA, 568 bp, Homo sapiens
agaacacatttgcatgcctcatctaacaatcctcacaataaatggaaaaaatcagatttattctcattttttaaattaatgaactaaagcatggaatagcatttgtaaaattttgagataattttcaccactattaaaaattaattttgttaaaacaagatggaaattattatttgcagacttgtaaaggtatgcagatttgagtttcattaattctagaccctctttctactayacaggaagaattattattattattaatgcttattccaaagatgattctaaaacataaagctcaaatacccataaagtgatagatggctccccattttcaaatgcaaaataatttcatatatgtatactatcacacttgatcttcacattgactgcatgaaacaagcaagattattactatacccttttccataatgagagaattaatgctaaaattatttatctgcctaagatcatgcagctaataagtggcaaaatcagaactcagactcatattttctcactccaagtctataccctttctcttatatctatagatgcccacagattacag

SEQ ID NO: 120352 - DNA, 591 bp, Homo sapiens
tattttctgttttttttttaacagattacttgctgcaaataaacactttgtgcatattaaagttctgaacattaatctgtaaataytgcacagggaaattgcctaagagcctagaaaaacccatctattatgtgtagccaccgtgttaggccataggtgtagaggaatgggcaagacaagcaagctccttccccatgtctcgtgttatctcacaatacatgagagaaccaatttaaagagctgggataagaagaaaaccaagggtagcaagacaggcttggcttaaggtggattgaattggtgagataatttcttcctaggaggggaaggcttggagcagatggcagaagaagctgtttaggtagcctaaaatgcattgtcattacatttgtctggaaggcaaagcctgggctggagatctaggcgggatctggcacatcatcaccacctttcctggtaagttattatctttctgttttcttccgtttgctttcatgactgggctgctagcgtgttgatgttacttatccaatgcatcctcaaaggatttctgtagcctgcttgagagagaattttgacctatgctacgaa

SEQ ID NO: 120353 - DNA, 591 bp, Homo sapiens
tattttctgttttttttttaacagattacttgctgcaaataaacactttgtgcatattaaagttctgaacattaatctgtaaatactgcacagggaaattgcctaagagcctagaaaaacccatctattatgtgtagccaccgtgttaggccataggtgtagaggaatgggcaagacaagcaagctccttccccatgtctcgtgttatctcacaatacatgagagaaccaatttaaagagctgggataagaagaaaaccaagggtagcaagacaggcttggcttaaggtggattgaattggtgagataatttcttcctaggaggggaaggcttggagcagatggcagaagaagctgtytaggtagcctaaaatgcattgtcattacatttgtctggaaggcaaagcctgggctggagatctaggcgggatctggcacatcatcaccacctttcctggtaagttattatctttctgttttcttccgtttgctttcatgactgggctgctagcgtgttgatgttacttatccaatgcatcctcaaaggatttctgtagcctgcttgagagagaattttgacctatgctacgaa

SEQ ID NO: 120354 - DNA, 364 bp, Homo sapiens
agtccccatatgttgtaggattgacctggtgggaggtaactgaaccatgggagtgggtttttcacatgctgctctcgtgatagtgaataartttcatgagaactgatggtttcattaaaagcacagttcccttgtacctgctttcttgcctgccaccatgtaaaatgtgcctttgcttctccttcaccacccaccatgattgtgaggcctcctaggcatgtggaactgtgagtccattaaacctgcttttctttataaattacccagtcttgggtatttcttcatagcagtatgaaaatggactaatagagtaaattggtaacaggtagtggggtgctgctataaggatacctgaaaatgtgga

SEQ ID NO: 120355 - DNA, 364 bp, Homo sapiens
agtccccatatgttgtaggattgacctggtgggaggtaactgaaccatgggagtgggtttttcacatgctgctctcgtgatagtgaataaatttcatgagaactgatggtttcattaaaagcacagttcccttgtacctgctttcttgcctgccaccatgtaaaatgtgcctttgcttctccttcaccacccaccatgattgtgaggcctcctagscatgtggaactgtgagtccattaaacctgcttttctttataaattacccagtcttgggtatttcttcatagcagtatgaaaatggactaatagagtaaattggtaacaggtagtggggtgctgctataaggatacctgaaaatgtgga

SEQ ID NO: 120356 - DNA, 590 bp, Homo sapiens
gcaaaccttcctctacctgctcagctcgtctgactgtggtgataacattctgtgggaccatcttcctcatgtacatgaagcccaagtctcaagagacacttaattcagatgacttggatgccactgacaaacttatattcatattctacagggtgatgactcccatgatgaatcctttaatctacagtcttagaaacaaggatgtgaaggaggcagtaaaacacctactgagaagaaaaaattttaacaagtaaatgagaaaggtgagagtaattttataatcacaatatggaaatcaattagagaaaccaaggttaaacagataggttctcgttgctgtttcacattcatctctcgaagttctaaagctccaaaatacacttctctgattgcgatayataatgaaaagaagtaaataaataaatttcagtgtttggaaataagtttctattctgttccattggttgatatgtctatttttatctgagtaccatgctcttttgattacaataactttataacatattttaaaactgcagcatatggtgctctcagctttgtttttgcttcagattgctttgcccaggcag

SEQ ID NO: 120357 - DNA, 616 bp, Homo sapiens
ggcaaccaactcatctaaaatgatatgtgatcattaaataacaagtaaaagaatgagggttcaaaacaaaacaactctacattttttgctggaacatgttagctctcttattagaaaattatgyttattggcttgtattttgtgagatgaggggtatatagtgatgagtctattttgagcttgtacaccttggcctataacttattgttaacattaaaatgtaatgggataatatctatagacaaatagaaaatttcaaataatcccttattccccatcattgctagggattcgacagttctcttaaaattgcctcatagctatacatttgcacatatacttctttttgttctatggatttgtatatgccattgctttataagacatccttgatatactttttgcaattagccttttcaggctcttacagacagcctctattatactaaaagctacgtaaaatgaaatctttaaaaatgagatgttattctcggtccctaaatactggggtagtttgaagatgtcaggatgtgttgtctgccatgattctgaaaagactaacattaaaagccatagttttcattctccactggcctggggaaactgatgttctgtt

SEQ ID NO: 120358 - DNA, 616 bp, Homo sapiens
ggcaaccaactcatctaaaatgatatgtgatcattaaataacaagtaaaagaatgagggttcaaaacaaaacaactctacattttttgctggaacatgttagctctcttattagaaaattatgtttattggcttgtattttgtgagatgaggggtatatagtgatgagtctattttgagcttgtacaccttggcctataacttattgttaacattaaaatgtaatgggataatatctatagacaaatagaaaatttcaaataatcccttattccccatcattgctagggattcgacagttctcttaaaattgcctcatagctatacatttgcacakatacttctttttgttctatggatttgtatatgccattgctttataagacatccttgatatactttttgcaattagccttttcaggctcttacagacagcctctattatactaaaagctacgtaaaatgaaatctttaaaaatgagatgttattctcggtccctaaatactggggtagtttgaagatgtcaggatgtgttgtctgccatgattctgaaaagactaacattaaaagccatagttttcattctccactggcctggggaaactgatgttctgtt

SEQ ID NO: 120359 - DNA, 611 bp, Homo sapiens
caccgttgtcattggttttccacatcaggcatttgctgactctagcctagtcagaacaagaagccaggattgtacaaaaaataactaagaatgttagttgagattgtgactgcctcttgtgtttatgagatcaaaattggagtctgggacctaaggaaaaaaaagctttttaatgaaatctccagaatctcagttgggactctggagactctggagaaaagaatctaagaaaaggaggtgaattagattttggcttatatttacaaagtctgaaatccaactgtaagttatttcaacccrtctttgacctaagacaatctcccctactctgggtttctactagagaataaagtaaatcctctttggataaataaaacatcacccagagattctacatttttttcatctacaatatctggcatttaataaaaaaattacaaagaataagaaaacaggaccaagagacaaaaacagttaattgaaagaccatcaggtgatctaaatttagaagtaatcagacgcagactttaaaataactaatgttaacctgccgtgagcatagataacaagatgaggacttcaccagacaacttaatattatattaaaaaaa

SEQ ID NO: 120360 - DNA, 611 bp, Homo sapiens
caccgttgtcattggttttccacatcaggcatttgctgactctagcctagtcagaacaagaagccaggattgtacaaaaaataactaagaatgttagttgagattgtgactgcctcttgtgtttatgagatcaaaattggagtctgggacctaaggaaaaaaaagctttttaatgaaatctccagaatctcagttgggactctggagactctggagaaaagaatctaagaaaaggaggtgaattagattttggcttatatttacaaagtctgaaatccaactgtaagttatttcaacccgtctttgacctaagacaatctcccctactctgggtttctactagagaataaagtaaatcctctttggataaataaaacatcacccagagattctacatttttttcatctacaatatctggcatttaataaaaaaattacaaagaataagaaaacaggaccaagagacaaaaacagttaattgaaagaccatcaggtgatctaaatttagaagtaatcagackcagactttaaaataactaatgttaacctgccgtgagcatagataacaagatgaggacttcaccagacaacttaatattatattaaaaaaa

SEQ ID NO: 120361 - DNA, 333 bp, Homo sapiens
tccgtattgggttaatatatacttgggatagttgaatcttcttgttgtattgagccttttatcattacacaatgcctttgtcttttttttttaactgttgttggtttaacgtctgttttatctaatatgagaatggctattcctgcttgcttttcttttccatttgtgtgawatatctttttctacctttttactttaagtctgaatgcatctttactcagtaggtgagtctcttgtagacagaagatggccatgtcttttttaaaatcctatttgccattctacatcttttaagcagggcattgaggcatttatgttaaaagttaatgttga

SEQ ID NO: 120362 - DNA, 404 bp, Homo sapiens
tgcaagtcactatagatacagaaatgcatgaggcatatgycttgccctatataaacttacagttcaagtgggaaagagagacggagagacaagataacacgtaaactgctatataacatggtaaatgtaatgaatgtctgtttaagtgtcactgtgcccagaatattagacaacaaatggtgaatagttacacaggtaccataagacattgtttctgcctgaggaatatggatcttactggagagtgtattagtgaagtggagataagtgtgggtgggcagatgccaggagagttatttcagaggcttttaagagtgtcgtcattgagaacagatagggtggtggttaccagaatagcagaatgtatatttgagataggtcatggagaaagaatgccagaattc

SEQ ID NO: 120363 - DNA, 610 bp, Homo sapiens
ggattaaggtgaggggagtaaagccatgttacacagaaaaaaaattcagtaatcaagatacttccctcacttcacctggcyctgctcttactcctgccagtaccatgacttcttccttcctcgtgagaatagtatcaagcttaattagataaattctccaaagagccttgcccatcctcacaactcttaggtagataaaaagcaacatttcacaactcaaaacaaagcctctcctgaatgtaaatatctttgcttagtcaatacatgtggagtctgtgacctctagaaatttctgataagacaaggtgggctgtttccacttaaagcagagttctcaatcatttttctttctgccattttcttgctgagatgctaccatttccagcagctctgctcgagttgtttggcctgcagtctagggaagaggtggtggttgtgcacaatgcccagcactcccattccaccacctttgctttctctaatttgagatacaaagattttgaaaatgggtgttctaggatggtgtttttcaagctatggatcatgatttatcagtgagttgtaaaataaagttactgggttgtaactgacatcttttaaaaataaaatg

SEQ ID NO: 120364 - DNA, 610 bp, Homo sapiens
ggattaaggtgaggggagtaaagccatgttacacagaaaaaaaattcagtaatcaagatacttccctcacttcacctggctctgytcttactcctgccagtaccatgacttcttccttcctcgtgagaatagtatcaagcttaattagataaattctccaaagagccttgcccatcctcacaactcttaggtagataaaaagcaacatttcacaactcaaaacaaagcctctcctgaatgtaaatatctttgcttagtcaatacatgtggagtctgtgacctctagaaatttctgataagacaaggtgggctgtttccacttaaagcagagttctcaatcatttttctttctgccattttcttgctgagatgctaccatttccagcagctctgctcgagttgtttggcctgcagtctagggaagaggtggtggttgtgcacaatgcccagcactcccattccaccacctttgctttctctaatttgagatacaaagattttgaaaatgggtgttctaggatggtgtttttcaagctatggatcatgatttatcagtgagttgtaaaataaagttactgggttgtaactgacatcttttaaaaataaaatg

SEQ ID NO: 120365 - DNA, 498 bp, Homo sapiens
ttgccattccagtgttttgccaatttcagtacagctttttaaaaactagcatgtcattgttaacatagttagtacaagttgtctttatttcttattttgatgaagcatgcggcacagatgatcttggggagacacctagatatccaaaaaagcctcttcagaaaaactcatctgttccttttggatcaaaagcagatactgtaacaactgtctgagcttgatgtagtggagtttactgtatgtgtagtaagtagctcttacctagtgtgaggtagtaagtaaagtgaatttcactgataactaaaacatattactttctaatgttaaaagttttaattccggggccagacaccatggctcacacctgtaatcccagcactttgtgaggccgaggcacrtggatgatttgagctcaggagttcgaaaccagcctgggcaacatggtgaaaccctgtctctacaaaaagtacaaaaacataagtgagtgtggtggtgcac

SEQ ID NO: 120366 - DNA, 498 bp, Homo sapiens
ttgccattccagtgttttgccaatttcagtacagctttttaaaaactagcatgtcattgttaacatagttagtacaagttgtctttatttcttattttgatgaagcatgcggcacagatgatcttggggagacacctagatatccaaaaaagcctcttcagaaaaactcatctgttccttttggatcaaaagcagatactgtaacaactgtctgagcttgatgtagtggagtttactgtatgtgtagtaagtagctcttacctagtgtgaggtagtaagtaaagtgaatttcactgataactaaaacatattactttctaatgttaaaagttttaattccggggccagacaccatggctcacacctgtaatcccagcactttgtgaggccgaggcacatggatgatttgagctcagragttcgaaaccagcctgggcaacatggtgaaaccctgtctctacaaaaagtacaaaaacataagtgagtgtggtggtgcac

SEQ ID NO: 120367 - DNA, 608 bp, Homo sapiens
taatcaacagagatggatgactaactggatttagggggccgaggcaaagagaatcagagcccaaggcgtgagtggaagaatgctggtgccatttgcagaagcagagagaaagctccttgataattcagactggcgaatgcatttgagttggagtggaaactgttcatgttgtagctcctgcatctaaaactcagtgggtgctcataaatagctgttcagtaaatgaacaaataatggttgaagtaaggggaatgggtcatcccttaagaataaagcatttgctaagaacaaaaaaccaagggtcaggcctgggtgaatgtcctcagttgggagaggccaaaaaagccgggggcagagtggggagggggtggcagggaatagggttagtaataggagaatttgagacaaaggcctgggtaggaattctaaaagtttatggttattagaccatgaaggatgctttcttacygtttcagaaaaggtatatagttttaggcatttcttcattgtagcaaaacattgactaccaggtcccttttgctttggataaagaggttcctccccagttcattcacccttgcattgtttctcacagggtcatcccacag

SEQ ID NO: 120368 - DNA, 582 bp, Homo sapiens
aatactttctaaattggcagctaacaacctcaaggtctgggattatattttactgtaagctatagacagagatgtttaaaaatttatactttcctaatttatgatttgtggatttctataatttatgacaagaaaaaatttctcaacctcttttatatacacaatgtttttctcactgctgaaattgattttacattttcttgtgcatttctcctctcctttcctcacatgctgaatttatatcaactaccagttttcaatcctcagaacaataattcaagttagaaatkactatctagagttgtcctcagttattcaaaacatattctaactcctctgatttccaaaactcaagtaattttaattcctttaaagcataaattcaatgtcatacagatgtttaaaaaaagggagagctatttttaaaaatacacatgaaaacaagaaaaatatgtacaatatacctccaacagctcaaggtaagtaattcttctcataataggataaaaaagtttcctggtcttgacttgaatgtcatttgatatgaaagataataagagaaaaagcattttagtgttatac

SEQ ID NO: 120369 - DNA, 617 bp, Homo sapiens
acataaataatgaatataaagaactacagatttagaaaggagatgagtgattcttagtgatagctaatagagttatctaccaggaaaattctattaattcagttacaaactgttaggactgaaataaaagtttagtagaatgactgaattataggcaaaattttgatacaaaagcagtaattcattatctcacaaactatcttttttttgttgaaaaaacttaaaatctactctcatagcaacgttcaaaaatacactaatttttcagtttagccatttcactatgtatacatacttcamaatcaacaagttgtatgtggcaaatatatacacattttatatctcaattaaaaatttaaagatatagttaaaaataaagctaatttgggtgtgataattaaaaagtagtaatgaaatatgatggagaaaaatatagtgcccacatagaaacatcaaaacaagtagataagaaatgtccaggtaatatacaagggaagatttaaggtataacagtaaaagccttgtacaaatagtgtgaataaacattttctggatgtaatatagtaagagtgttaagtatacttatattaatatgcaacacttactataatacctat

SEQ ID NO: 120370 - DNA, 575 bp, Homo sapiens
gcaatcatgctccatgacttcacattcttacacttaggaatttatcctaaagagaaaatcagtcaggtcacagagttatgtgtataagaatgttcaacacagccctgtttacaataacaaaaaatttagattctaaatgcccataaactggaggttacagtacattcacaaaacagaagaaaatacagcttttggaaaagattatatrtctccatacctactggcagggaaagatccctaagataatactaaagggttgcaaaatagcaggtataatatgatcccaattatataaaatcatatatctatatatctttatgcttatatatgaagagggaaagggcttgaacaatgctcaccaaaatattaactctgggatgtgggacttgaagccattttccctgtcttctttaattgaggtgaaattcacaaaacaaaattagtctgccttctttaaacttttctgtataacttgaacttctacagtggtcatttattatttttataagcagaaaaaacaactgaaaaaattttaaaaagtgtaagtagaaagtatctatcaactaatactataa

SEQ ID NO: 120371 - DNA, 641 bp, Homo sapiens
taagaaagtaaagacccgaagagccaattagaatcgaacacttacatactgaattggacaaagagtagtaaattatgagactgtaattaggcaaaggggcttgggcaagggtagttaactgggtagagaagtgagtaggaagataagggttagtttaaccaggtttgtttgtagagaattctcccccctcaacttcctattactgaaaataagaatagaactttctttctggtacaggaggatttttccatgtaggggttttatcttcaactttcaggaagaaaaaggggaggattagagygcctttcttgcagccactgttgttctttttctaaagtgcctttatatcaaaataatccttatgccaaagtggtgtatttgcagatggcatattctgccatccttcatttccctcctttgaaccttccccaagaagtttcatagttcagaagctgagttgatagattgcaaccttatcttactgaaaatctcttactcctggagaacaggtcagttccattaaacaaacagttgtgtttcatttcaggagacaatgttgcaggtgggttcctaccaaagttaggcctccatatggtccgagcaatcaggcattcctatggaaacaaacaaacaaacaaaaa

SEQ ID NO: 120372 - DNA, 583 bp, Homo sapiens
caccttgctgctggctcggcgagaacaccgtgcctgcttcctgacaggtcaattattccaggactcagcttcgttctacagatgtgaaagaacccaaatcgccgctcatcattcccagacacagcccagctgagttccatttgttaccatcacatagccacagaaattggagatgaatgtatacccaacagggacaaatgtctaatccagaggaaaagtctaactgcagtgaaattgattttggtaacaggcttcaaagagagcattctgtgttaaggttacctgctccactcattaatactaccaatttgcaacacagagtgaaatttaacgatgaataaagatatgatgataatgattattatttttaaacatgttggcaaggagaaaagatactattataattactggyaacttttcaacatatcctaaaaatagattaatgatgcctttttgaatatgcatttttgcccctgccagtgtatcacactgcaaaacaatgggaagatgacatttttgccatgttgtgtaagaaatgtataatttaagagctctttggtcaagcacatagatgttaacgtgg

SEQ ID NO: 120373 - DNA, 583 bp, Homo sapiens
caccttgctgctggctcggcgagaacaccgtgcctgcttcctgacaggtcaattattccaggactcagcttcgttctacagatgtgaaagaacccaaatcgccgctcatcattcccagacacagcccagctgagttccatttgttaccatcacatagccacagaaattggagatgaatgtatacccaacagggacaaatgtctaatccagaggaaaagtctaactgcagtgaaattgattttggtaacaggcttcaaagagagcattctgtgttaaggttacctgctccactcattaatactaccaatttgcaacacagagtgaaatttaacgatgaataaagatatgatgataatgattattatttttaaacatgttggcaaggagaaaagatactattataattactggcaacttttcaacatatcctaaaaatagattaatgatgcctttttraatatgcatttttgcccctgccagtgtatcacactgcaaaacaatgggaagatgacatttttgccatgttgtgtaagaaatgtataatttaagagctctttggtcaagcacatagatgttaacgtgg

SEQ ID NO: 120374 - DNA, 576 bp, Homo sapiens
gatcattcaacaaacagttattaaaaagagtacttcataatagacactctgctctgaaaaaaacagaaatgaaagaaattggctgtagcctcacagaagttacagcccatgacggggatagatgtgcaaactagtaatgatagcttcttggggtacagagatgaatagacaacgtccccctcctggaagaactcccagtctgctgtcatgcaattttgatctaatgctatttactcttgaaactaagtgactttaaagtgattaacttcatcaacataatgactttgattcttacccaaagacttcccacatttagatgcagcttaaaagaatccgccttataacttgcaacagaacagagacttttttcaattgagaatgaggaaaamtactacgctgtgaaaaatacagcgtagtattttggctttgttagttttgtatctactcaagggtactgaaagatagaaaaggcatggcagataataccccctactgtgccactgtaaaaataataacgtaattgtgttcccttcatgggaacagaagaatagaaaccaatatatgcagaaaatagaa

SEQ ID NO: 120375 - DNA, 576 bp, Homo sapiens
gatcattcaacaaacagttattaaaaagagtacttcataatagacactctgctctgaaaaaaacagaaatgaaagaaattggctgtagcctcacagaagttacagcccatgacggggatagatgtgcaaactagtaatgatagcttcttggggtacagagatgaatagacaacgtccccctcctggaagaactcccagtctgctgtcatgcaattttgatctaatgctatttactcttgaaactaagtgactttaaagtgattaacttcatcaacataatgactttgattcttacccaaagacttcccacatttagatgcagcttaaaagaatccgccttataacttgcaacagaacagagacttttttcaattgagaatgaggaaaactactacgctgtgaaaaatacagcgtagtattttggctttgttagttttgtatctactcaagggtactgaaagatagaaaaggcatggcagatartaccccctactgtgccactgtaaaaataataacgtaattgtgttcccttcatgggaacagaagaatagaaaccaatatatgcagaaaatagaa

SEQ ID NO: 120376 - DNA, 602 bp, Homo sapiens
gcaactccacattcatttcatacttgacccctgcacccagctcaccggtgctgttgaataaatgagaaaacaaatgttatgtttttgtgtccagctattcagctgggatgtctatagaacacttttgttagtaaatgattttatctaacatttctccagtgattrgaaaaatttcataccctagaggacgttattctctctccagaactttgaaacaatggagactggggtctttgcctgtgggactacaacctccgagggtattgaaggggaggaaagatttcttgtttcacacttcactaggttcatggctgaggcctctataacaaaagacatattaacaagagaaaaacatacaaatgtatttgacataatttttacttgacataggagccttcagaaatgaagacctaaaggaagaaaacctgtgtaattttatatttagatatgatgaagtgtggatagtcatgcagaagagtgattggacaaagagtgtataatttaatggcaatgcatgggacaacttagcaaggactgcgtattcagattctcctctgtgtcccagtgtgtttagagatcaaaggacattcctttcctgcagc

SEQ ID NO: 120377 - DNA, 612 bp, Homo sapiens
aggaacacttcccaataagcagctgcaactaaatgagacgattgctgtaatgatgtgtatgccaagtgcagtagagagagaagaggcacctaattttgccttaggggtgtcaagtgcagtgtcacagagagtgcagcatttgagctgaaagtttaaaatgtaaaaagttggttataatcccaatagaggagcatcccatgcagtgcataaagtctgtatattggatgaaaatatcggggagcaaggtttgtcctggatctatacatagttcaataatgtakgattcaaaatagaagttaatcttgttttagtccattttctgttgctataatggaatacccaaggctgggtaatttgtagacaaaaagaaattcctcacacttctggaagctggaagtccaatattaagctgcagacatctgctgaaggccttccagctgcatcatctcatggcagaaggcagaaggacaagagcatgagagaacaagagtcaaactcacagccacaagccctttaaaacgatcactagtccatttatgagagtggaatcttcatggcgtcaacacctccctaatttaggccaaacctccaaatactagtgcactggggact

SEQ ID NO: 120378 - DNA, 545 bp, Homo sapiens
ggaaatgacaaaaacaacaaatgcttctgatttactttcattcgcaaaagaaattgtaaggaaatgtagataaagtggcttggccaaagagttgagtagaagaaaaataaagakatgagactgagtacataaacggcgagtttgcctggttagtgggaaaccttaggttgtaggttaagttgttgtgtagtttagatttaaacccatggaaagaacaaggcattggtggttttttactgacgtttacatgataaaaaatgagcattcctggcaacttaacaagtcagtcctgcttcaggagcaactcaaaataaaatgtctacttctgaatattgtatcagttatctattattatggaacaatatgaacaaaaatacagtggctaaaagcaacacacatttattacatcacagtttctgtgagttaggagcctaggcatgactgagctgtgtcttttgcttctgggtcttacaaggctccagttaggtgtcatttagagttgccgtctcatctgaagattgacacaggatggatttgcttccaat

SEQ ID NO: 120379 - DNA, 561 bp, Homo sapiens
ctgtgtggtaaaaccttatttttataaaataaaaggcaaatcatgaagaaatgtaattgggggtctgaaatacaccagatgactaacctcatggcaaatcttttctgaatgctctggagtggagtaaaggttcaaacttttttcttgagagagggaatgaggaatatgatagctgcagagaaacatgttatcatttcccttcctccttccacagagaaataaaaggtctcctcatccaaatcatgttttagactgcataggtccccaagacttatgtttgtgggaggtgtggaagaggatccagcacagtctgtgattctgctgaggtatagcagaaaattgggataggcagagaaatgacactcctttggaccaaagtgatgcttcttattttctggcattagaaacctgtttctgaccttgatggggcagcttatttactacatcgttctgtgttctctgggggcaaaaaawaaaaaaaataaaaaaaaagggatgaatttaattacatcctaattacatccttgtcaagaggtaattccatctcaaaaattaattttc

SEQ ID NO: 120380 - DNA, 505 bp, Homo sapiens
aatttaattacatcctaattacatccttgtcaagaggtaattccatctcaaaaattaattttcagtgctttggagttattgcacattaaaaaatattgtcacacaaaaaacatgggtggcctgtcacaaacattatgaaactattgaccttacatagcttcatctgcacaactattgatttttttctgtctttattttgacctttcatatgatttcatctaagattcatcacggtggaaatgtcaggtttaagggtatgcttttattgtttggggagagcaatcttggaaatggtttactacttatctatttgaggcagtaggctggattcatcaatgctgaaatgattcagcatcaagttatcatacttatttttcyagaggcttccagattgctcttttttcccccaaaagtaaattgggttgtcactttgggttttagatgccaataattctttaactgggctgtaaaacactaagcccatgaatacttttaatttgaggtt

SEQ ID NO: 120381 - DNA, 578 bp, Homo sapiens
aggggtggtccagcacatctggcaccctggactgtctttactggctcaagcaggaaggggctggtggggccgagactctggtctagggagcatgtccagacggtagcaacattgctgttgcttctgtcccggttaaaattagagccaacggcatcttgagagcactttctccaaaactcgtttcataattagsaaaagtgaggcccagagagtttctgggaattttctccccttattttgaatcctgaatgtataaaattttgaaaaagtaagtaattgatttgaacataaaggtcctaaatatacaaatccaaatggtaaatgaacacataggaaaatatttagcttcactaataatcaaagaaatgctaataaaaaactggtgtaccatttctttcctatttttacaaatgtaatgctaatgctcagaagtagaggaagtatgagagacttgggccatctcattctctcagggacgacacgaattgattggtgcaatctttctaaagggcattttggcaatacatgtcaataagtgtcaagaagcttaaaaatgtacactcagtttttgacacagc

SEQ ID NO: 120382 - DNA, 581 bp, Homo sapiens
ctggttatcattaaaaagcatagactgtgctatttcatggttatcacatgactccatgttttggtaataataaacaaaataaagtccaactttgaaatgcatagatttctaaagtgtactcaaatctggtaggctctgagtgaacagcaggctgataactattacaattaatgactgagatcatttttcyatgaactttataaatcacttcaaaccactgatgaccatttacattatgtgggaattagaaatttacagtccaattttcattatatgttttatttctattgcatgtccataataatgcatgtccttttttcttttgttggagacagaatctctcgctctgtcatttagactggagtacagtggcgtgatttcggctcactgcaacttctgtctcctgggttcaagtgattctcccacctcagcctcccaagcatctgtgagacaggcatgcaccaccacgcccagctaatttttgtatttctagtagagatgcggtttcgccttctctactaaatgttgccaggttcttcttgaactcctgacctcaagtgatccgccagtgtcagcttccc

SEQ ID NO: 120383 - DNA, 579 bp, Homo sapiens
aagagagtacttgctaagcttcccccatgagttaactgggtacccagccagggaaagaaacccagagaggttaagttaaatcgctcaaaatcatgcatctagtaagtggtagagctgggattcaaatgcagttctgtgattccaaagcccaagttatcttgttgcctccaagaatagtcttctgctttcttagttatattataaaacctttaaacataaaaagaactgggaacaattatagtttctayaggttcagtgcatccctgcaaactcgagaattaaaaatagaagttactgaaaacattaccatttgcaggtgcaggggcctgagcacaaaccagtgactctcaaatttttaaaaatcatatcagaattacccaaagagcttagaaaatgtgctgactctcacaggtcctgattcggtaggtctggactaggtgattccgggaggtgtgtgcagggggatggtatttaatgcacccactgaaaaactctcatgtgtggtatgaatttcctgggtgaatatgggcagaaaagccatgtcgccatttacttgacacctttcagtgccacacacac

SEQ ID NO: 120384 - DNA, 546 bp, Homo sapiens
tcattctaaaacaaaacaaaacaaaacaaaacaaaacaaaacaaaacacaagtgcctaaatcttttccactgtctcctttggcctaaagtataatgtctagctccaattaagtgccatttgggagaaaagttgaacagctaactccagggatgttctgattttagtttctgaggaatataatactttttattgggaataaaatacattttttttcacaagagctttaggatgtcttttcaaattcttaaaatacctgaaaaatatatacttaaaaatatatttatctgttttaggtatttcaaaaaatacrtgagtaactgaggtattagaaaatgttagggcaaaaaaaatgcctaaataaaaccatttaaactatttggaagtctgccaagtgggttacacaaataactcctagagattttaataataatcaagttacaatcaaaagatggaaaagagatgttatcaataatctagaaaatctttttctaagtactttctaataagcataacttactatactgtggggttccagtgtaaatcca

SEQ ID NO: 120385 - DNA, 546 bp, Homo sapiens
tcattctaaaacaaaacaaaacaaaacaaaacaaaacaaaacaaaacacaagtgcctaaatcttttccactgtctcctttggcctaaagtataatgtctagctccaattaagtgccatttgggagaaaagttgaacagctaactccagggatgttctgattttagtttctgaggaatataatactttttattgggaataaaatacattttttttcacaagagctttaggatgtcttttcaaattcttaaaatacctgaaaaatatatacttaaaaatatatttatctgttttaggtatttcaaaaaatacgtgagtaactgaggtattagaaaatgttagggcaaaaaaaatgcctaaataaaaccatttaaactatttggaagtcygccaagtgggttacacaaataactcctagagattttaataataatcaagttacaatcaaaagatggaaaagagatgttatcaataatctagaaaatctttttctaagtactttctaataagcataacttactatactgtggggttccagtgtaaatcca

SEQ ID NO: 120386 - DNA, 611 bp, Homo sapiens
cttgagttcttagcaattggtcataagtataatttcaagacaaataagcttcaatgtgaagttcaatttcgatttgggttatttgaacatatcacttatgcaatttctttattataaggttaaattattattaaagagtttggagaatccaatatcaaaaccacttgtcttcaagaataaagttaatactaaaaaaaatatttcaatagttttgggggaatgggtagtttttgttatgtggataagttctttagtggtaatttctgagattttcatgtacccatcactagagcagtgtacactgtacacaatgtgtagacttttatmcctcattcctcttcctacatccccccagtcctgaagtccattatattgctcttatgcctttgtgtcccatttaaaagtgagagaatacaatatttggttttccattcctgtgttatttcacttagaataatggtctccaattccatccacattgctgcaaatgccattatttcattcctttctacagctcagtagtattccatggtgtatgtataccacattttctttatccacttgttggttgatgggaatttaggcttgttccatatttttgcaattgcaaa

SEQ ID NO: 120387 - DNA, 503 bp, Homo sapiens
cagattcctacattaaaaagccaaaaataaatattttaatttccacttctcttcttttgacactagaaattattttctttctgggcctttcatgtcaaatcatgtgaagtgccacttagtactgcagcctagagcatataaatagagatttttattcattaggttcaaggtgggaatcagaaatctgtattctattaagactgggaagaaaaatagttgcacgttctacagtttgttggtacttcagcctattataaagcagtaccacatttgtgtagtgacctcagattcaggtggtatctgtaagagcaggrcataaagaaacacaatattattgttatagtgaacatctaaatatgcacatgaaaagggataaagaccataaatcagctcaggtcaattcatatttttccaccaaataattttataaaaaagtattcagagcatgttggacttttgcatttgggataagaaattgtggactatattaacctgagtcctgc

SEQ ID NO: 120388 - DNA, 570 bp, Homo sapiens
gagtgcccattgtgttagactgcattgccataaaagaatacctgagcctgggtaatttataaagagagaagatttattttgactcacagttctgcaggctgcacaggaagtatggcaccagcatctgttccttgtgagggtacaggaagcttacaattatggcagaagaygaaggggagcaggcacatcacgtagtgagagcaggagtgagagaagtgggagaggaagtgacacactcctttatataaccagatctcatgttaattcagtgcaagaatgtactcactttaacaaggagggcaccaagccattcatgagggatctgccccaatgatccaaacacttcctaccaggcccaacatacaaaactggagattacatttcaacatgagatttataggggacaaacatccaaactacatcattccatccttggccctcgaaatctcacatctttcttacaaagcaaaatgcaatcatgccttcccaacagtctccaaatgtcttaaatcattccagcattaacttaaagtccaaagtcttatttgaggtgcaaagtaagtttcttcc

SEQ ID NO: 120389 - DNA, 559 bp, Homo sapiens
aggacacatatgatctgtttcaacaagaacatgaaatctcactttcctttgattaatgttctattgtttatttggtgtttttttcttttttcttttttttttttttacttgaaaaccattgtattttaaaattaagtacagctgagctgggtggctcatayttattatcccagcactttgagagccctaggcaggaggatcccttcaagtcaggagttcaagagcaactgggcaacaaagtgagactccgtctctccaaaaaataaaaataaaagaataagctgagggtgatggcgtgtgcgtgtagccctatctactctggagggaggctggagtcagaagatcaagtgagcccaggatttggaggttacagtgggctatgattgtgccaatacacaccaacctgggcaacagagcaagatcctgtttcaaaaatataaataaataagaataaaccaagtgcattattcttatagagtctattctcccaaatttgtcgattacaaataaaatttaaatcactaaaacatagttgttttggtgctcccatgctctgcaa

SEQ ID NO: 120390 - DNA, 559 bp, Homo sapiens
aggacacatatgatctgtttcaacaagaacatgaaatctcactttcctttgattaatgttctattgtttatttggtgtttttttcttttttcttttttttttttttacttgaaaaccattgtattttaaaattaagtacagctgagctgggtggctcatatttattatcccagcactttgagagccctaggcaggaggatcccttcaagtcaggagttcaagagcaactgggcaacaaagtgagactccgtctctccaaaaaataaaaataaaagaataagctgagggtgatggcgtgtgcgtgtagccctatctactctggagggaggctggagtcagaagatcaagtgagcccaggatttggaggttacagtgggctatgattgtgccaatacacaccaacctgggcaacagagcaagatcctgtttcaaaaatataaataaataagaataaaccaagtgcattattcttatagagtctattctcccaaatttgtcgattacaaataaaawttaaatcactaaaacatagttgttttggtgctcccatgctctgcaa

SEQ ID NO: 120391 - DNA, 465 bp, Homo sapiens
ggaaaatagcccactggagctgcagtgatggcagcctcccctccctcagagaacttgatcatcttaggcagtctccagcatatgtgagaggccaccaagagtctgcacagctctgtgcttggacccaaggccctggtggtgtggactcacaagaggatctcctgatccatgggttgcacagatctgtggcaaaagtgtggcttccctaacagggtagcacagtcacccaccacctcctttagctggggatgggagttccccttaccctgtgaggctcccagctgggtagttgttcaccctacttttcctcactytccgtgggttgtgctaactgcctagtcagtcccagtgagagaacctggatacctcagctgaagctgtaggattcacttgctgtttttgttctcagtgggagccacagactggagctgcttctaatcagccatctcagatccttcccatccc

SEQ ID NO: 120392 - DNA, 551 bp, Homo sapiens
ctcacttattttgacttacagtggctgaaaccaaaacctaatggcaaaactgggtcaaataccaagataaaagccaaagtatagtgtgtcctgtaaaaagagaatgcaaatcagattggctttggacatcagaataacttgattctagaagtcaatagagccacgctttcaaaagtctgaaggaaaactattttgaatttagaattctatgaaattcagactagtgattttgaggacaaaatacygatatgtttatgtatgcaatgatgcagacgatttatgtctcatgcctactttctgaaaacaatgaggataggctccagcaatgcagaaagaatccaaaaaaggtaaagacatgagagtcaaaagacagtgaaaaactcaagagatcaatagaaaaatcattccaagatgacagctgagaatctgactaaaaaaaaattatgtccaaaattaaccatcaataatgtttatctcttattaacatcagtcatgaataaaatattaaagatacatatggtgacagaataagatgtaaatgttacaaatta

SEQ ID NO: 120393 - DNA, 551 bp, Homo sapiens
ctcacttattttgacttacagtggctgaaaccaaaacctaatggcaaaactgggtcaaataccaagataaaagccaaagtatagtgtgtcctgtaaaaagagaatgcaaatcagattggctttggacatcagaataacttgattctagaagtcaatagagccacgctttcaaaagtctgaaggaaaactattttgaatttagaattctatgaaattcagactagtgattttgaggacaaaatactgatatgtttatgtatgcaatgatgcagacgatttatgtctcatgcctactttctgaaaacaatgaggataggctccagcaatgcagaaagaatccaaaaaaggtaaagacatgagagtcaaaagacagtgaaaaactcaagagatcaatagaaaaatcattccaagatgacagctgagaatctgactaaaaaaaaawtatgtccaaaattaaccatcaataatgtttatctcttattaacatcagtcatgaataaaatattaaagatacatatggtgacagaataagatgtaaatgttacaaatta

SEQ ID NO: 120394 - DNA, 582 bp, Homo sapiens
tttgtacattggttcagtacttatttcagtaattttcatgttcatccttattctgtacctttgcctccaaaacttccctccttatgtttctttgttgttaacttcccacaatgtttgtttagaattgctcagcagcaggagacactcccagcagcaaatgcccacattacaaggcagagatttttttttttttttttttttttttttgcttcctcacatctggcaaggaaggcctctgctgctttcatttcacagaataatatacaaccaacaaggactatttccaactcttcataaaagcccctctccatcaagagggaacttaaggcttagtggtcatggaggccacaactggtcagcattggctccttcctatgagacaatgagggagagtagggcaaggcttgacttagtgctattccaggaggcatgttcacttccagggcttgacagattaaactcatattactacttcaagcacttgtcatcaaccttgcataaacatccttgcccagttattttcaaagaacaagatcccaattgcaaagrcagccagaagatccacaatggactctccaacat

SEQ ID NO: 120395 - DNA, 621 bp, Homo sapiens
gtgacttgattttttttggtgaatagcaataataacaaccaaaagaagaaacagtagcaacaacaacaaaaacagggcaacagggctcaaagtaattttagattgggctgaattaattaacgagactgcccttgccatatattctgaattcaagcagccagttctatttgtttcgtttgactaaaacttgtacttaatgatggcctatgtgaaataaagtagtgatgccagaaatatctatgatgtaaaagaaggaattcaaaggcttatgatgataaaaatattggagtgtatttatcatgttcaactggcttacytaacctacagctatgtcttctgagagaacctagaagatattttcctcaccgtggcaataaagaataaattggtgaaggtggaagcagcatcctggaaaagcatagtattgatgttttctgtaggcaagggacaaagatgggaaatgcaactattgaaacagggtggctgaggcagaggctgagtaatagcacttagtcactagaagccagtgggtgtggttatcataataggcaacaaacctaaatgcttgtcatactggcttgacccacagggatctttggcagtagctaattgattatggtt

SEQ ID NO: 120396 - DNA, 599 bp, Homo sapiens
gtcgatccacctcccacaaacacattttctccaataacctttatagaccttcttattttttctcattgggccagcatgagccatttttattttcaaagcaatagttaaacttgaacatccttgagctgattcagccagggatgctatttaatcatgttgtacaggaattgccatgttatccacatttcagactaaaagggaaggggaagaagaatgcagtttgagcctgaacttttatcagaaattgcctctcctctcccaaaagaagtagaatatgtctttctcatcttcacagcttagcagagaaaacaaaaactacagctcacaaaccatgtatatgtatgtatatatagttattaattgcaactttgtcatagcaaaagattgctaacagcctaaaagctagatggattcacaaagagaggcaatgatttggaggggtgggggaggagataccaatcaatcaggaggaggtaggaagatttctcaatgtcattttgatttttgaaccaattgaatattacctatataaaaatgaaataarattttaaaatagatctagtgcaagcacatagagaatactctccaaatagtaatta

SEQ ID NO: 120397 - DNA, 520 bp, Homo sapiens
gacttaaagctgggccatgtgttatcatgtggtatcccggtcatgtggtatcagttgacctgaaagctaagatcaaccacatgggcaattaattaktccatcatacctatgcaatggggccccaataaaaggtttgaatatggaagctgcaatgcattgttttgtgctctcactccacagagacaggacaggaaatactccatgtttggaaccctcctggattttaccctatgaaattcttcatttgcctaattttaatctgtatcttttctctgtaataaactctaactgtgagtataatagcttctagtgtgttctatgaattctagcaaattatcaagactaagggtggttttgtaatcccctgacattgcagttgatattagaaagggctagccatctctggaggactctgtgctcaaatgttacagtctggatactgcaggcagggccctgggtttattggatggctgctgtattgcaaggctctccactttggccatacactgggtttaaacca

SEQ ID NO: 120398 - DNA, 594 bp, Homo sapiens
aattgcattgagtgtgatttttcccaataaggaagatccaatgttaatttccatatgtgttaaatctaatcaacattgcacagtgttatagttcacccaataactgaacgttttttctaaaacaatttatttttggtgtgggccyaattatttattgcacctcctagttttagatttttttcccttgcttgactttttttttcagaaatgtctagagatgtaacatactgtggtgtaatatctgacatttctgtgctaggatcttaacttcactctcacagatggacccacctgtggctacgtttacacactatgatcctagctatttttcctagtgttggaatgttggtctgagatatggaaatggtgagtagcattagaaggttagccttagaaatagttcagcttttaaggtggggtagttaaaccctgtcattgagactaagagcttttctttgtagaaaacttgcaaggaaattttctcttggattggattctgtgagacaagatggcccaatgtttcatatgaaatagtttttatttgttgtttacttgttttgcttaagtcaatctacgttagtgtctattctctca

SEQ ID NO: 120399 - DNA, 637 bp, Homo sapiens
tcactcaatttagtaattatgacattgctatggagtattaattgcagatgaggaaacagtcaatgagaaagatacatggctattataaatgggatattcaagtttaaaattctgatactcctttcttcctgtattctgttaacttgataggtctttcccaagttcaaagaaccacaaaggatccttcaaaactattaagacaccttctttctttctgatttaaactctagctagaactatttcagctgctcctgtatgtctctcagttgcatcaaaatttagttctcagtatctgcaatctatggtctagcagcaaaagaaaagaaggtaaaaaaagggatgaagaaaaatagaacagtasaactgaaaaaagataaaaagatgtagaagaagagaaagtagatgaaaaaatagaaacacagccccaattcgctacgttttagctactgtacctgagaaatgtagtgatagtgtgtttcaagagcccccagctaaactggagttccagcaccggagtggctagcaagaagagtgggacataggtggatacaatgtgccttccccaggatacttctgttacctgctgggcagactgatacctaattgacccatgacaaggtggctctcaacaggaaaa

SEQ ID NO: 120400 - DNA, 628 bp, Homo sapiens
gctgctccattttttcatgattatgaataaagcttctataaaaacccatatgcagatttttgcatggatatgttttcaaataagttgggtaaatacctaggagtgcaattgctgaattgcatattaatactctgtttagctttgcaagaaagtgccatactctcttccaaagtgtctgtaccattttgcattctcatcagcaaaaatgaatgttcctgatgctatgcatccttactagcaattgatattgtcaggtttctgtggatgtatgtcactctaataagtgtgaagtggtatcacattgccattttgatttgtatttccctagttacaaatgatgttgagcacattttcatatgctttttttttattgtatatcttctytggtgaggtgtccattcagatcttttgcgtatttttcagttaggttgttgtcttcttatggttgagtttcaagatctcttgtgtattttggatacacgcgtctataaaaagatatgtggtgtgcgcatattttcctcgtagtcggtgattggactttttattcttaaataactcattgtaattttaaaattcattttaaggtattaataagatagatgtgataactactttttatgctattgac

SEQ ID NO: 120401 - DNA, 630 bp, Homo sapiens
tctctgaatcttcccaaattactcatacatatataacgtggaaagggagcggtttcttctcctggagcacaaaccaatcccaccttaaggttgacaagaattaagggagaaaatgtattgattagcttccatttgcatgtttcctcatgagagatttttttatacctgcattgtgtgmattttgaggtgtttttaccttaatttggcttaacacttccccagataagtattcttgacattgcagactagattgagtcaaccaatgttatgatcttagagaatcctgtactttccgtttgccgcatttgttagaatttataaatttataactgcatgtttgtaaactatttgaaaaagtttgtcttccttactcagtcataaaatctaaacagcaacaccatgtctactttgtctaaaatgttggatactggcatagtctcctgcttgtaagtacatgttgatgcatgaggatgtagagcaacaggaactcttcatgcattgctggtacaagtgtaaaatggtgcagtcactctggaaagcagtttggaagtttctcagttaaaaatgaaaaactctattataaatgaatgggcatagctgctttatttgtaataacttaagtccaaaaat

SEQ ID NO: 120402 - DNA, 630 bp, Homo sapiens
tctctgaatcttcccaaattactcatacatatataacgtggaaagggagcggtttcttctcctggagcacaaaccaatcccaccttaaggttgacaagaattaagggagaaaatgtattgattagcttccatttgcatgtttcctcatgagagatttttttatacctgcattgtgtgaattttgaggtgtttttaccttaatttggcttaacacttccccagrtaagtattcttgacattgcagactagattgagtcaaccaatgttatgatcttagagaatcctgtactttccgtttgccgcatttgttagaatttataaatttataactgcatgtttgtaaactatttgaaaaagtttgtcttccttactcagtcataaaatctaaacagcaacaccatgtctactttgtctaaaatgttggatactggcatagtctcctgcttgtaagtacatgttgatgcatgaggatgtagagcaacaggaactcttcatgcattgctggtacaagtgtaaaatggtgcagtcactctggaaagcagtttggaagtttctcagttaaaaatgaaaaactctattataaatgaatgggcatagctgctttatttgtaataacttaagtccaaaaat

SEQ ID NO: 120403 - DNA, 630 bp, Homo sapiens
tctctgaatcttcccaaattactcatacatatataacgtggaaagggagcggtttcttctcctggagcacaaaccaatcccaccttaaggttgacaagaattaagggagaaaatgtattgattagcttccatttgcatgtttcctcatgagagatttttttatacctgcattgtgtgaattttgaggtgtttttaccttaatttggcttaacacttccccagataagtattcttgacattgcagactagattgagtcaaccaatgttatgatcttagagaatcctgtactttccrtttgccgcatttgttagaatttataaatttataactgcatgtttgtaaactatttgaaaaagtttgtcttccttactcagtcataaaatctaaacagcaacaccatgtctactttgtctaaaatgttggatactggcatagtctcctgcttgtaagtacatgttgatgcatgaggatgtagagcaacaggaactcttcatgcattgctggtacaagtgtaaaatggtgcagtcactctggaaagcagtttggaagtttctcagttaaaaatgaaaaactctattataaatgaatgggcatagctgctttatttgtaataacttaagtccaaaaat

SEQ ID NO: 120404 - DNA, 630 bp, Homo sapiens
tctctgaatcttcccaaattactcatacatatataacgtggaaagggagcggtttcttctcctggagcacaaaccaatcccaccttaaggttgacaagaattaagggagaaaatgtattgattagcttccatttgcatgtttcctcatgagagatttttttatacctgcattgtgtgaattttgaggtgtttttaccttaatttggcttaacacttccccagataagtattcttgacattgcagactagattgagtcaaccaatgttatgatcttagagaatcctgtactttccgtttgccgcayttgttagaatttataaatttataactgcatgtttgtaaactatttgaaaaagtttgtcttccttactcagtcataaaatctaaacagcaacaccatgtctactttgtctaaaatgttggatactggcatagtctcctgcttgtaagtacatgttgatgcatgaggatgtagagcaacaggaactcttcatgcattgctggtacaagtgtaaaatggtgcagtcactctggaaagcagtttggaagtttctcagttaaaaatgaaaaactctattataaatgaatgggcatagctgctttatttgtaataacttaagtccaaaaat

SEQ ID NO: 120405 - DNA, 588 bp, Homo sapiens
catcaacaaatgaaccagtgttgatatggaatatatttacctgtatatcaaaataaaataatggattataagaaaatcagtgttgtagagaatggctatacattctcaccatgtacattgtacaattattaaccactgagggagaatgaggaaattatgtgaaaaataagatgctcaataactgactttcagatattattttggagaaataagatattactttaaatcagataatgataagagggtgtcaaaggagataaaaaagttagcacctaatttaaatatttctcatggcacaaagtatcaataaataaaatcaaaggaaaagcaagagtgagggattaaggrtagtacataaaggcattgtatgtgtgtaaaaaattagtataggatatataaatagcactttgtgtaaaatatatagttatattttaaaattcgaaaagataaaccttttttatcaaaaagttactaatagtttaaaggtataaataagctggagggaacaccatttgtatggatctagacttctttggatatactctggtagatcttaatttggaactatgaaaattataaaagtataaa

SEQ ID NO: 120406 - DNA, 588 bp, Homo sapiens
catcaacaaatgaaccagtgttgatatggaatatatttacctgtatatcaaaataaaataatggattataagaaaatcagtgttgtagagaatggctatacattctcaccatgtacattgtacaattattaaccactgagggagaatgaggaaattatgtgaaaaataagatgctcaataactgactttcagatattattttggagaaataagatattactttaaatcagataatgataagagggtgtcaaaggagataaaaaagttagcacctaatttaaatatttctcatggcacaaagtatcaataaataaaatcaaaggaaaagcaagagtgagggattaagggtagtacataaaggcattgtatgtgtgtaaaaaattagtataggatatataaatagcactttgtgtaaaatatatagttatattttaaaattcgaaaagataaaccttttttatcaaaaagttactaatagtttaaaggtataaataagctggagggaacaccatttgwatggatctagacttctttggatatactctggtagatcttaatttggaactatgaaaattataaaagtataaa

SEQ ID NO: 120407 - DNA, 636 bp, Homo sapiens
aaggactctagttagacatgaagagttatataaaatgcaatcataaaacatacagagctaaattgtttcttctaaaaacctaaacaataaacaaggttgtatgtaattgaactctaaaatattacctaaatacaattctttaccaaaaaagaaattcataagtacttaagtagaggccagtctaaaggatttgctagataatttgcttcctaggcctcaactttacttacaagattcacttctgactcccaaagatatgtagaaatatctgggttctgacaaatctagatattacactaacaatcttggcagttaacacaaaaatctacacatcacattttaaaagtttaatttgctaatgcaatcaaacccacatttgttgtcttatgcttaaattataataactgtaaagtattaaacatatcattaaattgttaccccccaaaattgctgatgtcttagatcagtgattatttaaaataagtttctctgctatgcatgtattgayatgcagaaaaaaatacaagttttctaattaataagttgtaatagagcagctagaaattggcttccatgtaaaattttaagaattccattttgggaaaaactatgttataatttttaaaaattagagtt

SEQ ID NO: 120408 - DNA, 533 bp, Homo sapiens
gaattccattttgggaaaaactatgttataatttttaaaaattagagtttcataaatattgaaaataagactctggactgtgagaatatatcacagtggtgccaccaatactcactggctggtttccagartgttcaatgttcactatgtatttcccatgttttctgtccattcttgaactgcaaatatcacaagcttaactccagaaacgttttccagcctcttcattgccctttatacctaaaatcttgagaaataattgagttgattaatagtaaatcaactatgagacatcagtgccagtgtggattagactaaataataaataattattctttacatgggatccacccaccttaacacctgcggtgttaagtaatcacgtaaaggcacaagaaaatcaatgccacctctgtgactacactctcaatactcctccccaagcagcctgcttagtagaaagaaactgcagtcagatacatttcttccttctctcccctgtcacatcacttctcaggactcttccttctgac

SEQ ID NO: 120409 - DNA, 578 bp, Homo sapiens
atttattctggttattaatcccttatcagggtagcttgaaaatattttctcccattctctgggttgtctctttactttgttgattatatattttgctgtgcagaagctttttaacttgatgcgatccatatttccatttttgctttgaytgcctgtgcttacgggaaattgctcaaaaaatatttgcccagaccaatgtcctggagatttcaccagtgttttcttgtaatagtttcgtagtttgaggtcttagcctttaatccatttttatttgatttttgtatacggtgagagataggagtctagtttcattattccacatatggatactctgttttcccagaaccatttattgaagaaactgtctttttcccactggatgttcttgacacctttgtcaaaaatgagttcattgcaggtgtgaggatttgtttctgaattttctattctgttccattggtctatatgtccgtttttatgccagtaccatgctgtttttgttactatagctctgtagtacaaattgaagtcaagtaatgtgattgctccagttttgttatttttgctcaggatagctt

SEQ ID NO: 120410 - DNA, 412 bp, Homo sapiens
tgtccttgtttgaccttacctgggaacatgcatctcaggaggctcaaatattttgctacgctgcacatcttcatgaatggccacaagagcaccttgggtgttgattttagagttacaaataaactttagtaagtaaccatttacaaataaaaaatccatgaataatcaggatcaaatatgactcctgctcctgctgaagccatagagctatgtgctgcaagagtcagaggagaatagatatagacagtagggtatctaggaaaaatgtcatggagggaarcacataaaatgggttttagagaactgtcaaaatctaaatagtaaaaaaggtctccaggttgattctgtttttcttcttactctctaatatagtaagataaacatgttttctttcttctggaaaatctgtttt

SEQ ID NO: 120411 - DNA, 556 bp, Homo sapiens
cagtttactttttcctgattctgtaaagcagtataagaggtgctatcatcaaggagataaaacaatcaatcatctaacatattttgatatacatttccttgtctaggaatacaacatagtataagaggcaccacccaaaacattaaaatgaaatataacagctaaatgaatgacagggggaggaaaaagaaaagccaacttaccagtttggtggatagttagaatgtttagggacraaataaaatacttggccagagctttaaagaaatgtaagagtaagcgttagataaaagaataaaaattgagtatttcatgcatgagaaataatatgcacaaagatgacaatacacatataaagtttgggggaatctgagtaaagcaatttaactaaagcaaatttgctgaaacaaatcagtaaggttagagtggtgatacacaacagagtcttgccaagaccagtcactctggcttctgtgtaaaagactaagacagtagatgttaaaggttgaaatagctatttgaaaatgaatgaactagtcccagtgaaggtcctgaa

SEQ ID NO: 120412 - DNA, 619 bp, Homo sapiens
acctaatgttttagatattcctttgaaaacaggatacagtttaatttttaaaatgcaatctgacagtctatatccttaaacaagaccatgtaatcaatctgtattttatgtcattatcaaaatattatgatgtgacttcaccatcttacattttctattggtgcctgttgttctatgttacagtttctctcggtttttttgttctcttttagactgagtgttctttgtacygagcattttacttcttgtctatttttatacacttttgtgctcccttagatttactctaaaaattgcagcatgcatccttaacttatcaaagtcttacgtccttgttcaaataatttaagggccaaagaaccaatttaacttcacttaatttccccttgattcatattatttttgttttttattctctccattcaatttattcaatttcagtattattttatgaaaccaaatttcatttagatttctccatacatttaccaccttctttgctctttactgcttcctacgtctctgggataattttcctactacataaagtaactcttttaatataggtttgctattaataaactcaggattcttgtttagttttgtttgaaactggctt

SEQ ID NO: 120413 - DNA, 605 bp, Homo sapiens
gttaaaactatcaaaaaccatgactaatattcagtgcaaaatattaaagtcaaaagggaaaatagttgttttttcatttaaaaattttttaaagttataaaatattctagaaaactggacataaaaataaagaggaaatcatctctattttcaccattttacaacatatttataatttcagtgttcatatgtgtatattttgcctatttaaagtaggacttgtacgtaattttgtaccatattatccccaagaaacattaaagcatgtgcatttttatattttattataatcattttatattttattacaatcacatatttactcttaatggttgcatattattctcaaatgtatgtgcataagtctattgttggccatttgagttatttctgattttttattatacataatacattcatcaacatcttcaaacatatgacctttyccatattttgtactatttccttagaatagattcctagaagtagtattaatgcattagacagtaagaattttttttataattattttccccacatactgccaaattgttttccaaaagggctataccgatttcaattgcaccaaagagtatctgaaagca

SEQ ID NO: 120414 - DNA, 632 bp, Homo sapiens
taccttctaaacttaacttgattgcatgaagtagaggaaggacataggcatagttgtggtggcagatagaaagggacattattcgatattggaatattatcaaaagtaagtagctaaaaaatgtaagtgacttatactaatrtcaccagctagacatatttaagtgctaatatttgctaatgtgaaaatgatgaaataacagtcattcactatttactgagtggaacaatataatgcattataataggacatcattgtgagtattgttcaaaggaaaataattaaaaatcaagatactaattgtctggtatttcactgtctgttgtggtaagtactaatgacaaatggctgtttaaatttaattatatttctaatgtaaattaattaaacttagataaaattaggaattctgatctttagttgtactagtcacattgcaattgctcagtaaccaaaagtggatattggctgccacatcaaacaaggaagaactttccattatcacaaaaagttgtattggacaagtggttgagcctagggttaaatggtttctgtatacctgaagaagacaggaaacacaaaacagtcaagcaaacacaaatggttaataacagtgtaaaaatatttagtaa

SEQ ID NO: 120415 - DNA, 632 bp, Homo sapiens
taccttctaaacttaacttgattgcatgaagtagaggaaggacataggcatagttgtggtggcagatagaaagggacattattcgatattggaatattatcaaaagtaagtagctaaaaaatgtaagtgacttatactaatgtcaccagctagacatatttaagtgctaatatttgctaatgtgaaaatgatgaaataacagtcattcactatttactgagtggaacaatataatgcattataataggacatcattgtgagtattgttcaaaggaaaataattaaaaatcaagatactaattgtctggtatttcactgtctgttgtggtaagtactaatgacaaatggctgtttaaatttaattatatttctaatgtaaattaattaaacttagrtaaaattaggaattctgatctttagttgtactagtcacattgcaattgctcagtaaccaaaagtggatattggctgccacatcaaacaaggaagaactttccattatcacaaaaagttgtattggacaagtggttgagcctagggttaaatggtttctgtatacctgaagaagacaggaaacacaaaacagtcaagcaaacacaaatggttaataacagtgtaaaaatatttagtaa

SEQ ID NO: 120416 - DNA, 542 bp, Homo sapiens
cagcaacccaagtagctgggtctacaggggcgcaccaccacgcctggctgatttttgtatttttagtagagacagggtttcactgtgttggccaggctggtcttcaactcctgacctcaggtgatccacctacctcggcctcccaaagtgctgggattacacgagtgagccaccacgcctggtcacagtctttatactttttaaatgtaggtgttttttgcyataaattctgtctcagggaatcttttgctctaccctacaggttttggtatgttgtgtttccattttattacaagaatttttaaaatttccatcttaatttcttcattgacccagtggtcattcagtagcatgttgtttaatatccatgtatttgtatagtttccaaagtttttgatattcagttttagttttattccgtactggtctgagtggatttcatgttttttaaatctgttgagacttattttgtcacctaacataatgtgtatcctggagaatgttacatgtgctgataagaagagtgtgtattctgcagttgt

SEQ ID NO: 120417 - DNA, 542 bp, Homo sapiens
cagcaacccaagtagctgggtctacaggggcgcaccaccacgcctggctgatttttgtatttttagtagagacagggtttcactgtgttggccaggctggtcttcaactcctgacctcaggtgatccacctacctcggcctcccaaagtgctgggattacacgagtgagccaccacgcctggtcacagtctttatactttttaaatgtaggtgttttttgctataaattctstctcagggaatcttttgctctaccctacaggttttggtatgttgtgtttccattttattacaagaatttttaaaatttccatcttaatttcttcattgacccagtggtcattcagtagcatgttgtttaatatccatgtatttgtatagtttccaaagtttttgatattcagttttagttttattccgtactggtctgagtggatttcatgttttttaaatctgttgagacttattttgtcacctaacataatgtgtatcctggagaatgttacatgtgctgataagaagagtgtgtattctgcagttgt

SEQ ID NO: 120418 - DNA, 521 bp, Homo sapiens
gactaggcccagagagaaggtcactgttaggaacaggaaacaagcagagctttttataaccctattgggctggagaaacaaaaatggagcttgagggttttcaaatgcatgtacatttttcaactctgacatttcatggattctaaagctgcacaagatttgaacaaaaactttgtgaaaacagagtgcrtttcttgcatgtatgcactgttcaataaataaatacctgccaagggttggagcaagggaaggtacatgagatcaataaatgagagttgaaagtacttgtaggagtaccagtttgaccttgatcatctcctcaacctctttttccctaggttcacttaaaaatctgaacgtatttagagggtgataaaccaggcttgcaccttgagggaagaccattgctgtggtacagggagaaaaaaaaaaaaaaaaaaaaaacagagcttttggcaatggaacaagggttggtgtgacaaaatctgaaacttgagggacctctaaagaacatgcagtct

SEQ ID NO: 120419 - DNA, 521 bp, Homo sapiens
gactaggcccagagagaaggtcactgttaggaacaggaaacaagcagagctttttataaccctattgggctggagaaacaaaaatggagcttgagggttttcaaatgcatgtacatttttcaactctgacatttcatggattctaaagctgcacaagatttgaacaaaaactttgtgaaaacagagtgcatttcttgcatgtatgcactgttcaataaataaatacctgccaagggttggagcaagggaaggtacatgagatcaataaatgagagttgaaagtacttgtaggagtaccagtttgaccttgatcatctcctcaacctctttttccctaggttcacttaaaaatctgaacgtatttagagggtgataaaccaggcttgcaccttgagggaagaccattgctgtggtacagggagaaaaaaaaaaaaaaaaaaaaamcagagcttttggcaatggaacaagggttggtgtgacaaaatctgaaacttgagggacctctaaagaacatgcagtct

SEQ ID NO: 120420 - DNA, 630 bp, Homo sapiens
ctgttcacagttcccctctgcaggtggctgcttcagtactgatgaaccaagcacctcacagccgtttgcaatataaactttcagttattgacattgtcaaagtttttctcaacatttccctaatgtagcttcttccgcatttcaagttttatgattaacgttttatattttatggctaaacattttattrtgcattttaaaatgtaatataacactactataacactttctaaagttgatgtcatacttttaaaatgcaaactatttgcacataggttacacatacatggctagagactgtggattagagtaaagagcaccagttacttcagtaaccagcgatttgaactaaagcaagcctttccattttagttttaaaatagtagcgaaaaaccgtgattcctttagtggatgagatgtggtgcatcttgtatgagataatgtattagaagagtttgaaaactatatttaaataccacacagtgttagctattggtaaaatggtgctgtctaattatcttttctggatccttaaagataaggaactctactagaaagcattcttcctccctgggtggtacagatgcatgccagataaaccttgtttactgacacacctctcttttccct

SEQ ID NO: 120421 - DNA, 630 bp, Homo sapiens
ctgttcacagttcccctctgcaggtggctgcttcagtactgatgaaccaagcacctcacagccgtttgcaatataaactttcagttattgacattgtcaaagtttttctcaacatttccctaatgtagcttcttccgcatttcaagttttatgattaacgttttatattttatggctaaacattttattatgcattttaaaatgtaatataacactactataacactttctaaagttgatgtcatacttttaaaatgcaaactrtttgcacataggttacacatacatggctagagactgtggattagagtaaagagcaccagttacttcagtaaccagcgatttgaactaaagcaagcctttccattttagttttaaaatagtagcgaaaaaccgtgattcctttagtggatgagatgtggtgcatcttgtatgagataatgtattagaagagtttgaaaactatatttaaataccacacagtgttagctattggtaaaatggtgctgtctaattatcttttctggatccttaaagataaggaactctactagaaagcattcttcctccctgggtggtacagatgcatgccagataaaccttgtttactgacacacctctcttttccct

SEQ ID NO: 120422 - DNA, 577 bp, Homo sapiens
actgccatggccatgtctgtctggcagaaacatttttacagccattacagggcagcttctcatttaattgagatgccttggatagcagtggtgcaggtggcttcattaggtgcgtgatagaatgcagtttgctgcagccttctgaaatcctaggaacatgtgaaccaacaggagcagtacataccaataattgagttagaagcctccgactagaaaacatcttcaaaacatgtgtcaagtttcccttagaatgcatgcactgtgttatgtttcttagagctcagaatagttgttaatttataggakgaatagaaatgaattggataaaatttaaatttaaattattctgtaaaatataattacagccagtgtaagtgtaatgtaataacacctgtgtcactagaaagtgtatttttagcatcaagtccagatggcttacactcattctctcttcattcttttttcttttacatccagtgatttaaagtcatgacatgttataatttagcatttattgtattgctttcaattcttcccaagttttttatttttgtttttttctgattcatagaagcag

SEQ ID NO: 120423 - DNA, 594 bp, Homo sapiens
ataggtaatttataaactcattttgctgttacgagcacaggaaaaaatcccgaatgtcaataagccaatgttttaattattttatccccaccattactgctgattgtacatttgttttcgcttctcagacaggaaggatgggcctttgagttactgcccttaaggattgactcatttgagccatgatgagtaagcatcatattgctacaatagtttttacataataagaattcttgagrtttctaataggtatagccagtttataaatgctattatttaagtatctataagtataaagtagctgtcaatcacatcaggagcaaatatttaattctatatcagtagtagtaaataattactatcatttaaaaggactatgttttaataatacttttaataatcctaaatgtgtccaatttattaaattaagaatgtttaaaggatattgaacttccatgtgttgttaatattaactataacagtgcaataattattttccaaatgctattcttcttatagaaatctttccttattataatgaactcagtttcctggagtgttattaggtcagaaaagctcagaaattgaggtgat

SEQ ID NO: 120424 - DNA, 515 bp, Homo sapiens
taaaaataagaattataaaagcaacaagacaaaggaaacaaataacctacaatagtgctccaataaatctggaagcagacatttcagtggmaaccttacaggccagcatagagtggtataacacatttaagtatgaaaggaaaaatgcttttactctagaacagcagattgagcgaaaatatccttcaaacatgaaggagaaataaaaactttcccagacacacaaaagctgaggaatttcattaacatcagacctgtcctacaaaaaatgctaaaaggagtactgagtacttcaatcagaaagacaaagacattaatgagccataagttatcacctgaaggcacaaaactcactggtaatcataagtacatagaaaaacacataatattataacccagtagcagtggggtgtaaaccactcttatcctaaagtataaaaactaaatggtgaaccaataaaaagaaaataactacaatgactttttaagacagcacaatatagtataaatagaaa

SEQ ID NO: 120425 - DNA, 515 bp, Homo sapiens
taaaaataagaattataaaagcaacaagacaaaggaaacaaataacctacaatagtgctccaataaatctggaagcagacatttcagtggcaaccttacaggccagcatagagtggtataacacatttaagtatgaaaggaaaawtgcttttactctagaacagcagattgagcgaaaatatccttcaaacatgaaggagaaataaaaactttcccagacacacaaaagctgaggaatttcattaacatcagacctgtcctacaaaaaatgctaaaaggagtactgagtacttcaatcagaaagacaaagacattaatgagccataagttatcacctgaaggcacaaaactcactggtaatcataagtacatagaaaaacacataatattataacccagtagcagtggggtgtaaaccactcttatcctaaagtataaaaactaaatggtgaaccaataaaaagaaaataactacaatgactttttaagacagcacaatatagtataaatagaaa

SEQ ID NO: 120426 - DNA, 515 bp, Homo sapiens
taaaaataagaattataaaagcaacaagacaaaggaaacaaataacctacaatagtgctccaataaatctggaagcagacatttcagtggcaaccttacaggccagcatagagtggtataacacatttaagtatgaaaggaaaaatgcttttactctagaacagcagattgagcgaaaatatccttcaaacatgaaggagaaataaaaactttcccagacacacaaaagctgaggaatttcattaacatcagacctgtcctacaaaaaatgctaaaaggagtactgagtacttcaatcagaaagacaaagacattaatgagccataagttatcacctgaaggyacaaaactcactggtaatcataagtacatagaaaaacacataatattataacccagtagcagtggggtgtaaaccactcttatcctaaagtataaaaactaaatggtgaaccaataaaaagaaaataactacaatgactttttaagacagcacaatatagtataaatagaaa

SEQ ID NO: 120427 - DNA, 578 bp, Homo sapiens
aagttttcgccttactaaaaactttcagatgtcttttggttttattattcaatttttgagatgtataattaaatccctgggaatgagtggatataatttagaaggcaattcagctctgtgaacttatacagatgtcactaaaatcatgtttgatggataatttcagaaacaatgaaagcatcattaactagagtaacttggaaaagcacaagtaaaagacmctgttattttgacaatattgagttaaatagaggccacaggaaaaaaaaaaaaaaaaaaacctgcacatcaaagttaaatgatcagcattcaatgtaagacattcttggagaactggaatgtttgctttggttttgttgaagtgattaacatgaatatgtcagctgcgtaattcagtgaacaaaattcatttcactgtaggaagtccatgtgggttaaaggaaaacaaaatctctttgtatgtccaaatggttttaaaaaggatctagggaacagttagtatggttcttactaattgttttctttctttaggtggaataaataattctaataaataaagggaataatcataagaatat

SEQ ID NO: 120428 - DNA, 578 bp, Homo sapiens
aagttttcgccttactaaaaactttcagatgtcttttggttttattattcaatttttgagatgtataattaaatccctgggaatgagtggatataatttagaaggcaattcagctctgtgaacttatacagatgtcactaaaatcatgtttgatggataatttcagaaacaatgaaagcatcattaactagagtaacttggaaaagcacaagtaaaagacactgttattttgacaatattgagttaaatagaggccmcaggaaaaaaaaaaaaaaaaaaacctgcacatcaaagttaaatgatcagcattcaatgtaagacattcttggagaactggaatgtttgctttggttttgttgaagtgattaacatgaatatgtcagctgcgtaattcagtgaacaaaattcatttcactgtaggaagtccatgtgggttaaaggaaaacaaaatctctttgtatgtccaaatggttttaaaaaggatctagggaacagttagtatggttcttactaattgttttctttctttaggtggaataaataattctaataaataaagggaataatcataagaatat

SEQ ID NO: 120429 - DNA, 578 bp, Homo sapiens
aagttttcgccttactaaaaactttcagatgtcttttggttttattattcaatttttgagatgtataattaaatccctgggaatgagtggatataatttagaaggcaattcagctctgtgaacttatacagatgtcactaaaatcatgtttgatggataatttcagaaacaatgaaagcatcattaactagagtaacttggaaaagcacaagtaaaagacactgttattttgacaatattgagttaaatagaggccacaggaaaaaaaaaaaaaaaaaaacctgcacatcaaagttaamtgatcagcattcaatgtaagacattcttggagaactggaatgtttgctttggttttgttgaagtgattaacatgaatatgtcagctgcgtaattcagtgaacaaaattcatttcactgtaggaagtccatgtgggttaaaggaaaacaaaatctctttgtatgtccaaatggttttaaaaaggatctagggaacagttagtatggttcttactaattgttttctttctttaggtggaataaataattctaataaataaagggaataatcataagaatat

SEQ ID NO: 120430 - DNA, 580 bp, Homo sapiens
aagttgtgtcaatagaagaatttaaaaacatatttgcttttaaaaattgttttatggccatataatttgcattcaataaagtgcacacatcctaaatgttcattttgatgagttatgataattttatacactcctgtaacaaacaccctaagtaagatatagaacatttgtatcaccctagaattacattatatgcctttctattcaatttccacctagaagtgggagctactttctgatttccaccaacacatatcagtttgttttgcatagtcctggattcttataaattgaatcatgtagtgtgtaatcttttgtgtgtctgacttttttcactcaacataatatcgttaagatccatgcatrtggttgcatgtatcattaatttgttagtttattgctaaatagtacaccattataggaaaatatcaaaatgtattaatccattctcttgttgatagatattcgagttgtttctattttatctactgtaattaaggctgttataagcatttttatataacatgtttatggacgtatgttttatttttatttggataaagactctagaacacaattg

SEQ ID NO: 120431 - DNA, 551 bp, Homo sapiens
aatttcttctgtcagatatcctaagtcaacactcttaagttaaacatcccataaatccctacagcatggacacaatgcagccaagctctttgctaggatgtaacaagggtgaattttgctccagttttcaaaaaattctcattttcatctgatacctcatcagcctggcctttactgtttatatttctaccagcattttggttacaactacttaacaagtctctaaaaagttccaaattctctcttgtcttctttcgagaccttcaaactcttccaacctctgactgttacccagtaacaaagatgcttccacattttcaggtatctttatacaagagcccactcttagtaccaattttctgtattagtttattttgcattgctatgaaggaatacttgaggctgggtaatttattttttaaaaagagggggttatttggctcacrgttctgcaggctatacaagtggggcaccagcatctgctcagcttctggtgagacctcaagcagcttttactcatggcaggaggcaaagagggagcaggcatgtca

SEQ ID NO: 120432 - DNA, 579 bp, Homo sapiens
gtattctttttttatacttttctgagatttcatatcctgtgtactaggaaaatagtatctttcggagaagtattctatctatattttgtagaacaaaataaaacagaaaatgtatttttccaaagctgttttaaaaatatatattcataacttaatggagaactgatacaaataaaaaatagtttaagataatgtgttttaaaagattttggttgtcttcaaaagaggaaaattcagagttaaaaaaactacatatattttattgagtctctgtagcactttcatgttctttaatctctttttctttcttytatatcacttggtttttgaaaacttaattctctgtgctgtactttgggcagtaaaaagtatatccagaatgagaaaacttcttaaattgtgctttttattagagcaaagatctttgaacggaacaggagagaaacaaaccttataagattgataggcgaagaaaaagagaaagagaagttgaagaaactgaaccgctaatgatgagcatttgtttgttcccaagctacaaagctttctacaaagctgagcgcaaacgcctcatcctct

SEQ ID NO: 120433 - DNA, 590 bp, Homo sapiens
attggcaagtattagttttcagagatgtgagcaaggaatggacatgccctatctccagcctacgtgtatcctcaattaaaaatgatttggattctgttccatgtctccatgcccactcttggatccccaattttgggcagwcagatcgatcaatttctttagaatatattaatctggactcagcatgaaagaaaataccccattgcaaatatggcttggaaggcagaatagtttatctaatttatatacccatcttctcaaatctgagatctctgtaaataccaacttccaaggactcttttgtgaagagcagctttctccttcactgactcctttttctgctaagtctatgagcatttcagttcattcctaaatgtgatatcatttgccttcctactgcaaggaatgtctttgtctcctggtatcttccttttctcctattcttaatagatttatgaattattctctattttaatgtcttgtggttacgggaatctcatggaagttgacacatttctcaatatgtgttatatgttggatcccatcacattgctcaatttgcatttcataattgtgtctttggtacttgt

SEQ ID NO: 120434 - DNA, 567 bp, Homo sapiens
agatctctgtaaataccaacttccaaggactcttttgtgaagagcagctttctccttcactgactcctttttctgctaagtctrtgagcatttcagttcattcctaaatgtgatatcatttgccttcctactgcaaggaatgtctttgtctcctggtatcttccttttctcctattcttaatagatttatgaattattctctattttaatgtcttgtggttacgggaatctcatggaagttgacacatttctcaatatgtgttatatgttggatcccatcacattgctcaatttgcatttcataattgtgtctttggtacttgttcatcttcattgtgttcctagcaagcaaaaccatccccttagcctaacatcactgtaacataaataagcactcccctagtttctatgcatccccaaaataaattcagcttcatgtaaatatgactattgataaagatgtccacttattgaatacacttatcaaaagatttttctggtgtaacatggatataatttctgtcttaagaactctaattctaaagaaacctgtgtatggatttcacc

SEQ ID NO: 120435 - DNA, 589 bp, Homo sapiens
aaaatcaaagagtatttcaagaaaaggggaacacacaaggtcaggaaacagtggatccaaccatcagagttatgatgagaagcactgaaayggcagctgaacttgtgacctaaatcacaaccatgtggattaaaacaagaggaagcgattcttcatgaaagaggtttacagaaaacgtgaaactacagaatggctagtaagatcaaacatttaggaaaacacaaatacataaggcaaatcatgactaaaaaaaagaggaaagaaagaaaaaaacagttataaattcttggaaaaatgtaacatttcacaaaaagtcatggtccaattttgaagcaatgtaacctgcatgatggtttcaggcaattatgaaagatgatttattttaatgtgatgctaagaaaattctcctgtgtgtgacacaagagtgcagaaattggatcagagacaattaaatgcaatctacctataatactttcttggacaacaaaaaatacttatataattttaaaaagtaaaacagactttagcattaacccaaggacagtgtgtgttaagtctgcttgcagttggaatataaagtaacagttaa

SEQ ID NO: 120436 - DNA, 568 bp, Homo sapiens
ctaatgtctttttcacaggattaaatcaaacaatacatataaataattaagattagggccaagtacatagtgcataataattattggctacaatggggttaaaggaggaaattttaacrtggcatagaaatttgcaccttgaaattcagcctttttatctcattgctcaggaaacaaatgttcagagcatgaaatcacttgatcaagataattcatgtgatctttatttctcttcataagttactattatgaaatgtgctatttattaatcatctgctatgtaacaggtgttccacaaaagtccgggtatagagtaatgccctcacaaaacttccttatagtgtcacacattctgggtctaaaacttgaattaaacccatttaagatttaattacatcaaatattaaaaagtgttgatactcaggtttagcttgaatcttagcagacaggatatggtctaattaaaccactaactacatctgctatttatatccattaactttaattttatagtgtagttcatagaaccaaagaaatggctgagatgccaggcttggttagggtagaa

SEQ ID NO: 120437 - DNA, 603 bp, Homo sapiens
tgccatcagacattcttaataaaaagccataccttgaccccacacgtaatggcaacctaaattttctactctgcttcccagcaaaactttgtaaaataatttttttattgttctcatcacttctacttacattccacagggacttgactcttagccaccaataatctctagattgccaaattaaatagtgtcatttttacttctatctcaatcttttattagctttagacagggatcgctacacccttcttctgggagcttttttatcctcggtttcattgacactaaacaatgttggtttttttctttctaacctctccttcttgatctcagaattccaactcttgaaatgtttcaagacgttatccttgggtctcctttcctttttttgtctacacactcaggactggtgatttcattcaatacaargtgttaaaaagtcccaaatctcaatctcaagcctgatttctcctcagaattccagaattatatatccaaatgtctattggatatttccatttgaatgtctgataaacatttcaaatttaacatgtcctgaacaacatttttgttctattccaggtgctggcaaactatagctgt

SEQ ID NO: 120438 - DNA, 613 bp, Homo sapiens
tacaggagtgaaccaccatgcctggactttggcaggactcttagtgacctgaacctgttatggtatcaagaaactgttataggaatcccttcaagatatgttagtaatgtaatttccttgtcaaaatcccacaaaattccatgtgctactactgctggtacagaagggaaccctgaaaccaacattagaattaattagatctcagagcagtgattcctcatagttaattggggtgcatcaatagaaagggactttgagacttaaaaagtgttggaactgtctgtctagaatgaagatgaatcagacactcactttcacagcaaaatcttatcctaattccaaacctgggcttttgacctccaattggccaatgaattctgagttccttgcttatattgtttaaatattgccattcctcattggcagctgatgcagaccacttcaccctctgtactttaatttgacttcccaagctgaatttggggwgcttggtcatgtttcttatcagctatccctattctaatctctaattgggcttttcaattctcatcttgttgataacctatactgatggcgtttgagacacaattcccccagggagctgcaggagaag

SEQ ID NO: 120439 - DNA, 661 bp, Homo sapiens
tggggacgctgggtgtattcgcaggacaccatgaccaatttggtttgaggtcctggaagaatacccagttgaaattttttttctagactattgatatgcaatttttgaaggcacaaagtcattttaaaatggacttttagaaattaaatcatttgaaatagtaggacatggggatctggaaaggctgtactatccrtctgaggtaacacctagaaatatgaagtgaatataaatccagagggtgagttctgtaaaagagcgggtccctgtggggagagcttagtgctacattgtgatttgggtccctcatttagttagcaagcaagattaacttttctccaaagttgaagactaaatctaaggataaaaaatgtagaaactgctttcaagtacaatgcatatttgatcttcatgtttatcatgagttaggcaggatagtgttattcccctgttagattaggaaaattagacttttgttagtctctgaacactttcctttcatgccaggcctctggtcatagcaggggaattttagaaaccaagaaatcagaggggcagggagtttcaataaaggggatcaccaagtgtaactgaaaatcaaaaagaagataaacttccctctctcttgtttactatcataacatgctgtgcttgtattact

SEQ ID NO: 120440 - DNA, 598 bp, Homo sapiens
gacatgtctgttttttgtttgatccacactactgacaccatatccaccagcaatctagatgaaataattaattttctcctcattcagagattctgttactcaaatgggttggtgattattttcaaggaatacttatactctgttctttctatcattcagacctcttcattgtgtcctaaaagtaagaggtaagggtttgtcctcagttttaagaatatagcatagtattatttttagatcttattttattctaactagaagagtaattataaataagaggaaactgaaattctagaaakttgaggtttgaggtggggctaatgctggatcccatagattgtgatccctgagaattggcacagatagtggcttcatgaggagaattgagtcccacagtcagacacacctgactgcacatccttaatcttttgttttgtgacattagggaattcctcatttattcagaaaatatttatgagttccttattaggcactaaaagttagtatctctgagctgcctcttagcattattatcaatttggaaaagtggtattgtgtaatgtgactggcacatggctggctgttggtaaatgcaatt

SEQ ID NO: 120441 - DNA, 625 bp, Homo sapiens
atccagcctttagtatataaatacaccttttattttttcacctttatatatgaaagcaatgatatgcacctatcctcatttataactagttgcttgttagttagatgtatcctccatcacactcacacacccctttaataatctggttctcacccttttcactccattgaaactgcccattcttattgcagccaccatctgactgcctgaccatttctcatcgctctcctcctcaatctctctgcactatttggtatgttttatggcacctttccaccatacacatgttcttgaactcctctgtactatcttgcattgcccctccattctgtgtcttctttattagcctgcctttcttcttttgtctgcaactagattacatgctcagatgagtgctctctttcaaactcccttgattcattcattcccataaattgagtacgattgatacctctagggacatgaatctcaaatctctatatgtaggactgacatcttacatatatatgcagctgctgcggagtatttcttcctggaagtaccastgcacacctcaaagtccaaagttccaaggcaaaacttactatttccccatggaaatgtacttcttcttttattctcaccc

SEQ ID NO: 120442 - DNA, 620 bp, Homo sapiens
gtcaataggttgagtaggccatgtcttattgttgactatgtcaagtttacttgaaattgtatacttctgatgttcagattaagttacttatttgggaaaataatattatagattcaacatgcatcttctcctacgtttgttgagtctctacttcacagacatgaattattgttatgctgtattacctagtctcacttccatatctacttgtttttctttaatcattttaatcctcttcatttacaatgaagcagcattcattatataaacctcaacatttttaacaatatcacttatttgatttctagtcaagtcaattttgttttcactatttctgaattatatattgttacataatggtggaatattkatcctcaacttgtgttcataagtctgatagacattttaatcatgtgtacttgtttctcacatttgagctcatttttgaagaatttacattctcaatgtgttatttaataatatgaaataattgtgagtaattccattctgttccatcagttacttttcttccattttggacacttggctttgcttcctttctttgatcattttgagagttctataaagttctatctgctctgataaaacatgggtaacgt

SEQ ID NO: 120443 - DNA, 583 bp, Homo sapiens
tcaattctgatataagctcattaattctaaataattattttgcaaaataaatagtgatgatgaagctctaggagattcaggggttctttcatccctttctcatatggttattatccataattaaattcagccattacttgtttttattcacctaaactgctataatcacaatatttggcagtaatctgagaaytttgacattcaaataaataaaatgaacactactaaactctatgaaggaaaagaaaacaaggcaaggaaatgtactactttagtatcaagaattctttctactttgctgatatacagctacctccattttaacacagatgagatataactcaaatgagtgcatacgagaaagtaaaatcaaagaaggcaggaaaataatttttcatctgtttgtgagcagaccagaaatgcatttctacctttaaagcaccttgcagcataatggaaacaaggtgaagctaagtttaaagctcatataaaaatattcagcagctttttatttactgaggaaatttatacacttgacaggtgaaatttttgagatgtagacaattgctagtgaaaaaaagta

SEQ ID NO: 120444 - DNA, 535 bp, Homo sapiens
gtgccctgttgtcttgttatccttggtgtagtgtagtcatcagttatatctttataaaaacaaacacatcctcaagtttaattattccatatatttgtaggtaatcattaaatgtatttggtttagaaaaactcctcatacaatttaagcttttgaaaataattatactttaaagagcatttaaacaatcttcatatttaattcataaacatggaaattacttgcattttatgactgaataatatgatacgcaaaacaacctaatgttttttcctgactcaacatgtggtttcctactaataaaaataatcactctcattttctcaatatatacaaaactatgtgactgcacaatctaaacactttgtgtattacactcatcatcacaaccaccatgcaaratagttattattttccccattttgtagagaagaaaaataaaagttatgtgacttgctcagtcacaaaggtaaaaactgatgaaagtaaaattaaaacctgacgttatttcataatttttaaattaagttgtatt

SEQ ID NO: 120445 - DNA, 535 bp, Homo sapiens
gtgccctgttgtcttgttatccttggtgtagtgtagtcatcagttatatctttataaaaacaaacacatcctcaagtttaattattccatatatttgtaggtaatcattaaatgtatttggtttagaaaaactcctcatacaatttaagcttttgaaaataattatactttaaagagcatttaaacaatcttcatatttaattcataaacatggaaattacttgcattttatgactgaataatatgatacgcaaaacaacctaatgttttttcctgactcaacatgtggtttcctactaataaaaataatcactctcattttctcaatatatacaaaactatgtgactgcacaatctaaacactttgtgtattacactcatcatcacaaccaccatgcaaaatagttattattttccccattttgtagagaagaaaaataaaagttatgtracttgctcagtcacaaaggtaaaaactgatgaaagtaaaattaaaacctgacgttatttcataatttttaaattaagttgtatt

SEQ ID NO: 120446 - DNA, 710 bp, Homo sapiens
cttatttttccatatttataaccactacattaggtgaaaaagataaaaaccttgccttggaaccttatagaatgtagcatagagttacaactttgggatttaaaccaaagtctcaaaaatggctgtaataaaatctaacctgtattttttaaagtatgtattagtttttagctcctcatggtcccatccttattcttttttcctttttttcatctttatttcttcatttttctcttcctccccctctgtcttcattcttttatccgatttttcccgttttttttcttaaactttggtagctaatagggtgtatttaacccccttcctccgtttttggcattgcattggtaaagtcatactcaaatcagttaaatwttcaggttcaaaataattcactgggttgcaacagtgagattccataacagatagaagatgatatatagataaatagttagatgatagatagatggatggatagataaatataaaaacacagacgtgtggaagacagagaggtatttaaatatatccacatgattatatttcacaagtgtacagtaatcagatgtcccatattttaaaatcacattgaaaatacaagtagcttctttcatgttggctcccatataattaactgagcagagaagagcaaaagtgattttaaagatagcgcaggttaaagactacagaattagaaaccaggttatgta

SEQ ID NO: 120447 - DNA, 557 bp, Homo sapiens
gctttcatttttcctcttgattttgttttttttctctgcattttcaccaccatttatcttgaatgtaggcttaagcttcccattttgctttatrcctgaagtccttcacttctagctggtacctcattgaccctataacttgtactacactaaacttcttaagattctgttttttaggcattgtatctttcttccaaaaatcttcagtggatcctcaacacaaacaaaatgagatccagataaaccagcaatcatggtctgtcacaatcaaagtccttcacttactctcatttattcttatttactattacttttctatgtgacactacactttagacaaattggtttattggtcttctcacattcgatttaatgtatagacttttatgcatgctttttcccatgtgtaatattctcagcacttttaccccatctatcaagtcattatcttgttctacataagcagtttcaaaggttacacaaatctttttcaaattttcgtaagcacttcctcttttttaattgcctaatcactctcatgatgctcagcatcttct

SEQ ID NO: 120448 - DNA, 557 bp, Homo sapiens
gctttcatttttcctcttgattttgttttttttctctgcattttcaccaccatttatcttgaatgtaggcttaagcttcccattttgctttatacctgaagtccttcacttytagctggtacctcattgaccctataacttgtactacactaaacttcttaagattctgttttttaggcattgtatctttcttccaaaaatcttcagtggatcctcaacacaaacaaaatgagatccagataaaccagcaatcatggtctgtcacaatcaaagtccttcacttactctcatttattcttatttactattacttttctatgtgacactacactttagacaaattggtttattggtcttctcacattcgatttaatgtatagacttttatgcatgctttttcccatgtgtaatattctcagcacttttaccccatctatcaagtcattatcttgttctacataagcagtttcaaaggttacacaaatctttttcaaattttcgtaagcacttcctcttttttaattgcctaatcactctcatgatgctcagcatcttct

SEQ ID NO: 120449 - DNA, 539 bp, Homo sapiens
ttttatgagtacaagatgatgattgatttagcaactgagataattgatactattcatctcaaagtgtagcaaaccttagtgagaaagagaaaactggttattgaaggacttagctcagatttctgctcacctatgtacttaaaaatgatttactaatkgaaatgatatgagaggcattaaagacattatgggtgagattgtcatctcctactgggtttttttttttccactttcaagtcagaacgtgggtggaagacagcattctttgagcacatggaattaaggtaagaattgggctaaacatgaatggggattatgtttattttgtgagaactgatctcaatcttctttggctttatactaatgatggaagtactagctagtagttattgagtgttctggggacacattgtgctaaacccttgtatggatcagctaatttgatctgcgttcattttagagatgaggaaacaggcacagagatataatttactcagttaatgagtggtaattattccagagcctgaactactaaagca

SEQ ID NO: 120450 - DNA, 552 bp, Homo sapiens
tgccattaacaacattgacaggaagctttgaggttgctgcacagctgatgggtcttcttgagagtcttgaattagaagtcggcctgtccttatgatatgcggaaatgccccggctccttttgcagaaggatgttcaggcaataattggaactgtatatatgtgaatgtctaaattatttcatctcctatatctcttcatattctaccatttattacatggaagtgcagtaagtcatggatgttgtctgtatggtratggcttgtattgaaccttgaagttcaccatgccctgggagacgggatttacagagggacgtgcagaaccccttcctttcctaggccttgccctgcagccaccctgcttccctaccatgctgagccagtgttgggcaaaacagacatttccagggtttgtcaccccattatagtcctttaggcttgttaaagttcatgatctggtagtgatattgtttggctctgtgtccctgccaaaatctcattttgaattgtaatcccccatattggaggaggggcctggtacaaagtaattgg

SEQ ID NO: 120451 - DNA, 605 bp, Homo sapiens
ttgtttccttattgccacagaggtcgggctggtccagtaaaatacatgtaaataacacttttacatgaataactgagaaacagccaatgaccagcctggtagtgagggctttggctttaccaagcagtgaagcaaaattgtgttcatttcacaaacctcttgtgacaagaaatggaacagaaatatgaactgacaatggttctggttctcttcacttctaattctaactcaggaaagaaacatccaagtcgaatgctgaggcctcaaaggagaccacagaaaagtatgtggacatgtccttttacccccaaaggatttcactagtcaaaatcttagattttatctggaaaaaaagaatttaaaaaaattttaaaaatatattttccctccatttctgacaacttctatggctagattagattagaatttgtactttaataattaaaatgtgctcacagattcattgacattttacagttttagaaaccttatctcactgcaaattttaaattgttgtggcaagcaaaattatctgaaacttatcacaacattgtccagtctgaaaatacaaagctcttakccctgtttgtctcttttactgcctt

SEQ ID NO: 120452 - DNA, 541 bp, Homo sapiens
actccagcctgggcgacagagctagactctgtctccaaaaaaaaaaagataagctgataaaaaccagcaaatgattgatacatgcaacaacgtggaagaatctcagaactacagtgttgagtaaaagaagccagacacaaaagagaaactcatatgatcccatgtctatgaagatgaaactcagtctaaactaatctgtggtgtaggaagctggaaagtggttaccggagatttggggtggggaagggttggggatagtattgcctgggaagggacccaagagaactttctggaatgttgtcagtttgctatgaatagtgagtacatgagtacatacatactttaaaattcatcaagctgcatacttacttcactcaaggtttttgcattttaccatagagttggccctctgtattcgaagtttctgtgtccgtggattcaaccaaccmtagactgaaaatatttgggaaaaaaatgtatctatactgaacatctacaacatctttcttgtcattattatgttataaacacatttatatct

SEQ ID NO: 120453 - DNA, 601 bp, Homo sapiens
cagaacaagaagtgtgttcatttctaggtgttaatactattgagtgcagtctcttctgttattttatacacagtgtctgacattcaatcaaaaataacaaggcacataaaaaaagcaagaaaaaatatgactaaacaagcctttgtcttcattaagttcctgcttaggggagaggcctattagccaataactaaaatggactataataaagagctgtattaggaatatttcaaagtgtattagaaatattamatatatagggaaatgaacaatcatttctgcctagggagaggggccagggaaagcaaataagagacgttaaatgagagttttctatgaggacaaatggaaaaagcatttcagtagaggaaattgcttgtgcaaagtgtggatggatgacgagggcataaaatattggcaaatacatgcttaggccaatacagccttaggggaaaaaacagttctctcaattgtttggtgcttttttcatggtgtctgtgaatgcgcatctatatacaatgctaattattctttgggaaaaaaaaaacacaaatcgactatatactggaatgaagtgaccccacttacctcttgcatatca

SEQ ID NO: 120454 - DNA, 534 bp, Homo sapiens
taactgctttgctcaaccacatagattgaaacaagaagaatgaaaaaaactgaatcaaagtcttctcattctgaatttccaccatactttgttgttctagaaatgggatttatttatttatttattttttgagacagtctcactctgtcacccaggatggagtgcagtggtgcaatctcggctcactgcaacctctgcctcctgggttccagtgattctcgtgcctctgcctcccaagtagctgggactgcaggcgcccgccaccaygcccggctaatttttgcatttttagtagacacaagttggccaggcttttcttgaactcctgacctaaagtgatctgcctgcctcagcctcccaaagtgttggaattatgggcatgagccaccactcccagcctagaaatgggatttaaagagatatattaaaatttttttaaactatttatgacataggtcagcattagcctacaagtagctaaataaatagctaaagttttctatttttaaaaaagtaataaatgtatcaagtgaa

SEQ ID NO: 120455 - DNA, 591 bp, Homo sapiens
ataagacaatcttatgggaaaatgcatctataaatatctatgataatttaccataaattacacattatcctgctcccacctccacccctcagtggagtaaatgcccttaaccaaagaggtaggatgagaaccaattgcaccattctttatcttttctacataagctctgttaaatgcaaccctaaatggagcagctattttcagggtaatataagatgacacttgggatattgccaggagtgtttcaattattcaaaagtgcctgagcatggaaggggctggcttgctcactttttggttgggcctctaaggtgacaattcacaaggctccctactaactacgatgcaaccaccatacaccctctaacctccccatccctttacagtgccgatgtcccatggccttgctcccaagcccccgcccrccatccctgggcacccttcctgcttcctccatagtggtgagcttggcccagagctcttctgctgcccagcccctttatgctactctgaggcttcatcctcttggggttttttaatcccattatctgtgttagatactcaactcaatcccattctctctgttagata

SEQ ID NO: 120456 - DNA, 501 bp, Homo sapiens
caacattcttttttcttacactatattcaggatccataacattcatccaccattgagatcttgaacctccttaagccagagatcrctcctagacttttggagctagaagagacttcaggatcatgtagtctaggtgtttgatttttttaacagctatgtggtagagtcctgggatactgcagaggtaattaaggttgtgagggattgggtttgggttcatgtgttggggaaatggtgtggtagagggaagcggctttattcgatctggccagaagttagtggctgggactggaatccagcactcatgcatttgctcatttattcactcatttattcattttactgaacattaagatcttactctgtatcatgcactaggaaaataaacggctttatagtccctagcaaattagacctgtctccctatcctaacagagctgagagtctagtagggagacagacaacatacaagtaaatatccaagtaaatgtatgataaatg

SEQ ID NO: 120457 - DNA, 591 bp, Homo sapiens
ggaactcacaacacaaacatatttcccggtttctggataccacaaacttaatacttcrgctgaaattcattacaatctgattacaaattcagcaatgacccctttgaagaatgcaaaccactattttccaagaaatttaatttggcattcctagccttttctttactctctgcaatattttctacatcctcaattaaatgaatcagctctgctacagccaccgtttatagtgattaacaaaaataggccagtgggtttgttttgagcttctttctatttcagcctaaagtgcaggaatcttggctaatgagaagcagctgagaattagagcggcctggcttgatcaagactgtggtgaatacaccaggtgattatatgacatctttatctgtcccatgatatggctagaaatgggacagggagcacagggtcaggttgggggatcaggcagatctgcattcaaatcccagtcccacaacctacgagctgtgaaacccctgacaatgggctgaactctccgaggcccactttcctcatctgtaattagagataataattcctgcttcaaagagctgtcatgaagatttaatg

SEQ ID NO: 120458 - DNA, 554 bp, Homo sapiens
ccaatctctgattccccatcacttccaaacatctgatctatgagataataagtttccttacttttaaagcctcttgaggttgagtttctattccttacagtcaaaaggattggaccagtgtgccaaaatctatggattagtggttgcttccaaattgcccttgacattgctcacctgccttctgagtagtgcagagggactgattctcactgccagggaggctgagcaccagaggcttcatctggctgcctggcatatttgtggcctgcagatgtattcagggttcaggcaggaggactgccagaaactaccctacctgccagctccttagcggagttcagactgcaccattctgggcttcagtttctccatgtgtgaactgcggatggtaaaaaaccaccaatgtcacagggtgttacaaggattaaatgagttatttcaagtaaagtaatgggcacaatgccagcacatggtaagtgctcagtaaatatgagctattactgttatcatgttgttattataasttggggagagggatgaaggaactcaggcag

SEQ ID NO: 120459 - DNA, 609 bp, Homo sapiens
ccatgtctccagggcttaggagcctccagctctaggctgcggggatcccctctgccattgaggcctggcccctctatactgggccctgagcatgtacctggctcccccagtgtacccgagggccttgctgtcactggatggattgaacaactcaaccgagtgtgcatgctcatgctaaccaacattcagtcacttcccctcacattcatggaccagttggttccttctcatttctcaggggacaccatgacccttcctgtgaactctccatgatgcaggcaagaatctgagtcacccagagttagcaacctgatgcaagtttgtctcccaatcccytggcctggctctcagatgaaaacaaataataataataataataataataataataataataatgaatacagccactaattcccacagtgtcctgagagctttacaggtacctgcactgactttcaggtatttacatgcttgtcctcattttctaggtgaggagactgagtcccagagaagttgagtaacttgcttataaggaggagtcgcgatctgaagctaagcagtagggtagatacattcaagcatgtttgattagacatttagcaaaac

SEQ ID NO: 120460 - DNA, 344 bp, Homo sapiens
cagcttgtctctgctccacagtgtctggggccttggctgggacaccctggaggctgagggtgacttggtggctggggtgctggccttggtcagagagtcttcacttgtgtgtttggcagctgcgcagcaggtgccacagaagacacctgtgtgtgacttctccgtgtggtctcttcatttgggctggtttgggtctcctcacaacatggtgggaagggggagtractgctaataggtgtgagattccttttgggggcaatgcaagtgttttaaaattagatagtggtgatgattgcataactgtgtgaatataccaaaacccactggattgtgtactttaaaag

SEQ ID NO: 120461 - DNA, 344 bp, Homo sapiens
cagcttgtctctgctccacagtgtctggggccttggctgggacaccctggaggctgagggtgacttggtggctggggtgctggccttggtcagagagtcttcacttgtgtgtttggcagctgcgcagcaggtgccacagaagacacctgtgtgtgacttctccgtgtggtctcttcatttgggctggtttgggtctcctcacaacatggtgggaagggggagtaactgctaataggtgtgagattccttttgggggcaatgcaagtgttttaaaattagatagtggtgwtgattgcataactgtgtgaatataccaaaacccactggattgtgtactttaaaag

SEQ ID NO: 120462 - DNA, 477 bp, Homo sapiens
aattcactgcgtaagcacgcgtatcaacaaagctgtgttaacttaactaaagttacagaacaggatatggagtttaacacctacttttccaactcagccctgtattccacctcgtttgtacatgagtaaatctctgttctagcttttacacagaccaatgtctcttctcttgttctatcatctcaaactcaatagcaagttgtaytgatttggttctcttcgtaatgtttctatcgtgcccttggcacttcaagcctctacttataaacttcctcttttctttccctttctttttgaccttctctggtttcttcctacccaaccctcaatctcactttcttttcttcagaaaccacatgtggttttattcacaattattttctcactgcctaggatagcgctttgcaaatactaggatctcaatacacacttcttggataaataaataacacatatggatgctacaaatctataaga

SEQ ID NO: 120463 - DNA, 556 bp, Homo sapiens
ctccccgttcccaccccacgccacagaggagcggaactgcaccaggcacccacggaggaggctcacttaagaatcaagtgatggggaagaatgaggatgcccctcccagcctgcctgcatgagcttgggagggtgggaaggtgtccttgcagcaccaagcggaggctcccgagcttttttccccactttccctttctttttcactttttttttgtgtgtgtgcgcctgttgacagtgtcctctctcaacttgataaacttgtcagagggagctccgggaaagtgtgacacagaggttggagtgattgctgagtatgcagggagaagaggccagggagctgcgggcggcagcaggacrttagcctggggacaggcagatgttctggggtgtttgtggctctcaggcaatatgcaccactcccacagtgcagtctcaccagaccagggacctggaggagggaagtcatggaccagagtgcaatgtgggtgaatggcaccagccaagcagtgtgtgagctgtatgtgtgcaccactgtacggtactgtgaaccatgcgt

SEQ ID NO: 120464 - DNA, 412 bp, Homo sapiens
taacctgtaaaaccaggatttgaactcgggtttagagaactccaaagctctagtcccacttagacatcacttttccaagcatggaattggttctccttttatgagctcctaaaacgctataaacttccttttatatatatcataccacrtgataattgcctgtttaccgttctgtatctcccactattatgtaacctgtcagggctaggatcatgtctgtattggtcaacattttgtcaccaaggccttgtatacaataggcatgtagcaaatattttgttgaacaagtgttctcattattttagattaaccttaattctccctccttatgacatatttggtgtttcacaagcattcccaatcagtaaggtcccaaaagttctattatgaacgtaggtggtttatagctgtt

SEQ ID NO: 120465 - DNA, 651 bp, Homo sapiens
gactgtcccttagggactgctaatgtttgatctggtgagtarcaatcacaagtttgagggaaattttcccttggatatgtaaactcctagatttaccacatatatacatatacctatatatatatgaatatatatatgaatatgtatgtgaatatatatgtgtgtatatatacacacacacatgcatgtacacatatatacatatacatatatgtgtatgtatatatatgtatgtaaagtaaaacagaatagttatatccaaagaaaaaaaaatctgaaaagaataattcaaaacgtgcgagacacactgtacttaaaatgtacttgaaggcttgtttctgtaagggttgcctaaacatccctaggctctactcttcaggaatcttatttccaggcacagtgtcctggagcatttgcaatttttcaattggaactctcagcactttactttaaaaatagtctaaagtcagaaactgaaatagtgatctatttttcaacccccaaattgctccttagtcaatataacgctgaacatttctgaacaaaggattcttaaggctggctgtggttcaggcaagtcctaaacttattaagggtaaaataagttattcacaaaagaaaaaatatatagtctattctcagttggagaaa

SEQ ID NO: 120466 - DNA, 651 bp, Homo sapiens
gactgtcccttagggactgctaatgtttgatctggtgagtaacaatcacaagtttgagggaaattttcccttggatatgtaaactcctagatttaccacatatatacatatacctatatatatatgaatatatatatgaatatgtatgtgaatatatatgtgtgtatatatacacacacacatgcatgtacacatatatacatatacatatatgtgtatgtatatatatgtatgtaaagtaaaacagaatagttatatccaaagaaaaaaaaatctgaaaagaatmattcaaaacgtgcgagacacactgtacttaaaatgtacttgaaggcttgtttctgtaagggttgcctaaacatccctaggctctactcttcaggaatcttatttccaggcacagtgtcctggagcatttgcaatttttcaattggaactctcagcactttactttaaaaatagtctaaagtcagaaactgaaatagtgatctatttttcaacccccaaattgctccttagtcaatataacgctgaacatttctgaacaaaggattcttaaggctggctgtggttcaggcaagtcctaaacttattaagggtaaaataagttattcacaaaagaaaaaatatatagtctattctcagttggagaaa

SEQ ID NO: 120467 - DNA, 599 bp, Homo sapiens
tttttcatagctttattcataactgcccaaaactagaaacaaccaaaaccctctttaaaatgaatgaaaaaataaacagtggtacatttaatagaacattctttacctttaaaaataaatgagctacctagccatgaaaacacctggaggaaatttaaattaacatagataagtgaaataatccagtctgcaaaggctacatactgtataattccaattatatgacattctggaaaaggcagaatttgagacagtataatgatcagtggttgccatggattctggaggcaatgagagaagactggtgaaaggcaggggaggttttagagctgagaaacaattctgcatgataatataatggtgactacatgacactatgcctttcccttaacccatagaactttataacgtagatagtgaactataatgtatgcaaatgtgaaagaatttatttcagaggtgggaaaatcccgtgaagtaatgcagagtatgacaatgaatctaaactgtaatataaatgtaaaaaacaacctcactgaagagagtggtgggggamaaggaggggaaagatgatgattaacttcttaaatgagtgagga

SEQ ID NO: 120468 - DNA, 601 bp, Homo sapiens
catacttaccatagcaaggcctaggcttctggaacaccataccggccacagctgctctgtacttctgacatatgacagaattgtgtctgctgcagggcttttccagagaaagccagcctgtgaagactaaaatgaaaatctacattttcaaatccatagacattgatgaactaccaaaaagatcaagaataatcagggaaatattacatcatcaaatggacaaaataaggtgccagtgactgattctaaagaaatgaagatgtatgcacttcctgacaaataattcaaaatractttaaggaagctaagtaaacttcaagaaaatacaaagaaaaaactcaatgaactaagaaatcaatcagaagatgaaatttaatacagaaattcaaataataattaaaaaccccaggaattctggagataaaattgacaatgaatgaaattttaaaaagcaaggaagagcatcagtagcagaaataatcaggcagaagaaggaatctgtgaactcaaagatgggttatttgaaaatatacactcaaaagagaaaaaagagacaaagaatgaaaaagaataaagaaaacatataggatttttgagactg

SEQ ID NO: 120469 - DNA, 560 bp, Homo sapiens
atataattagatgattaaagaattactcatttattattatttttggactaaaacctctattttgctacctgttttctgtttgcttcaaatgtcctttgaccactttgcactctgcctgcatttggattgagtatattttacccaattattagctttcatttatactttttaaaatcactttctttattactgtcttctgtttggttagtttgctttcttttgttttaccctggctttgtggttgccctaggattcacaatataattttcgtataaatcacwttctgtatttttgaagaacaatgtacatgttggtaaagtttaaatgagaactaagcaaaactaaatttatttatttattattatttcttcctttgcttgcttccttgtttcaccactcactttatgggtcagactttcaaaaacaggtagtcttttcagtgtgcttattaccgggctaggtagtatgctattatagatacaaccttttgagggaaagcttatatttaattaacttgcttttatatcttcaacacataggatatattatgtgtcagataa

SEQ ID NO: 120470 - DNA, 630 bp, Homo sapiens
gcacaccccctgcgatgtgaaaagtaatatcacctccccccttggatattatgaataatatcacagagggtgaacagcttctgctatgtgaggagtaatatcacctcctttggatattacgaataatatcacataggttgtacaccccctgcgatgtaaggagtaatgtcaccttccccttttgatattataaatactatcacagagggtgtacaccccctgtgatgtaaggagtgatatcacctctcccttggacattactcctaatgtcacagaaggtgtacagagcctgcattgtgagcagtaatatgacttccgccctttgatattacaaatattattgcagagggtgtacaatccctgcatagtraggagtaatatcacctccccttttggatattactaatattataacagagtgtgtacagcccctgcgatgtgagcagcaatatcacctccccccttgtatattatgaatattatcacagagggtgtagagcccctttgatgtgaggagtaatccccagtcggatattaagtatatgatcacagaggctgtacagcccctgtgatgtgaggagtaatattacctttccccttggatattacgaatataatcacagagggtgt

SEQ ID NO: 120471 - DNA, 619 bp, Homo sapiens
tctattgtgttctgaatttggtatgaccattttagaacatgcctcctgcaaaggcatgttaaagttacagattctattcatttgtgttctgtcaaatattttcaatttaatccagttaaggtctcatttttcttcccaactttcaaaaaaawatatatatttttctctatgaggccgctactttttcaagaatataaccaggcattaacaaacatgaaactactcatagcaactccataaaaattgatttttcaaaattgaataagcatctggtggtctgaaaatgttttatacctgatatttaaaagatattttgactgttgccaaaaggaatcaattccttcatgctgtttcccttgcggatgctgtcatatgccactgtgttgtgtagagcacaggctctggaggaagggcagacttggatttgcacttaaactctgccgcttacatgcctgtgaccttgactttacctcttaaggaggtcagtgaactgtaactgccctttcctcagtgtgttacagagttcataatagtacttatctcatggtgttatataagagaagatgcatgtaaaaacctcaaacatgtggctattactataattaatgtatgtatatat

SEQ ID NO: 120472 - DNA, 532 bp, Homo sapiens
atcagaccattggtagcatttcaggtacactgtaacgtgcccagaatgtaagctgcctgataacagagaccctgcccaccactcaatcccaggctggacagagtgtctgtcacgtgctagaaaccctgtaaatatctgataaattcatgatcttgaggtcacttgcccaaatacaacacaatacgtttgattttctttatgtatttcaagtcgctaaatyaagtttttcttttcttctatgagctcactagtccttacagacaatcactgcaaataaggactagtgagaactggtagtattgggtccaccttttaccctaaactctgagatcctgatattctacttatcaaatgcagagtctatatgaaattattaaccatgaacttgcttctgaacagacccagatgggtttcaaaatgtatctcatgtgcatttatttactaatgtcaattctccaccttgaaaatcaggtcagaatatttctgatgttgcattaacagttagccattcagtcttacaattttcaaagaa

SEQ ID NO: 120473 - DNA, 639 bp, Homo sapiens
tgatttgagtgagatacactgagaaatcattctctatcattaaacaataatcttattaggttgtatttaaatatgttcacaaaggtagattttagctaaaaaaaaaaaaagggacccctataagaagaagaaggagctttaaaagtaaacctgttagttacgagatccacacttgtaattcttaaaattaaagaaaactgaggatttttacctacaggcatactgctagtcatccaccttgcaaaatgtatttttctcctattcctgggacatgttcacacaactaaaacattaccaggttcttttgctgtgagtgccatgtgacaaagttccttggcaggaaatgtatgggcagaagatgtgtgcaactctgttctcactcactyacttgctctgagctcactccttttccatgtcctgtagctggaacatggacatgctcaagatccaacgtgactgtgggatgagaactatgccccagggtgtggtagagcaccagggtaaaaggaacatggccccttggtaactgaaaggagtggagctactctcccaagctggccactcaccttgggaggtgtctgagagatcaatgcttacttctttaactcattgttttcaggggtttctttaatacagaag

SEQ ID NO: 120474 - DNA, 520 bp, Homo sapiens
gaattctgtgaaataaagcaattcagtgacctggttaattctgttgccctaaaaaactctcgtattagtttcccccattttctaatatgcaaaatatttctgaaataagaagctgtaggtcctgttctttacttagagaagagatatttgccaaagataaagtacttgactttgcttttctttggtgattttttttcattcaataacttttggcatagggtaccccatcacatcaaaaactctatagtttaaaactcattaagaacaggtttaagaattttgaatttatttattactagttatttcaaggtgaatacaaaagaggtaaacttattctattttctactcaaactgtctgaaaaacactattttaaacttytctgcagtttaaaataagggagatggcttagttttttggatatatgagggattatcacacatatggacatatttctaacatatttccaggagacaagctatagaacataaaaagtctggtggataaccaagaaatgaagca

SEQ ID NO: 120475 - DNA, 542 bp, Homo sapiens
cttcccaaatgctgagtataaagagtttcttatttactcccatatgttgacttgaaaatccctttaggtagatagttctggtgctttctgaggaagagttgagagaagatattgaggaaaagatcacaaaatcacatgttctggtcttcactagatgattgacagccatcagtcatttgtgtggctaccatgtctacccaaaccaatcagagttccactggtggttattttgtgtttttggatcttatcaktccatctttcccaaacctttaaatagcttttaatattaaaacaaacaataaacagatttttaagtgtaaaaacttagggtatcattatagtctcttacgtcatattctaatacatgtaatgcatctataccttcaatatattcttgtttttgctttcaagagtgagttgagagtcatcagaattgattggcatctattctattaatggttaaggccaaacttagagaaatttggggaattaggcatacttgatctttggtgcccctccatccagttctgattttaactagt

SEQ ID NO: 120476 - DNA, 633 bp, Homo sapiens
acctctttatttttggcccaggtgggctttgaggagtactatgtaaaataaagcaaattactcaaaccccaaattacttttcaaacccctctcctttccatgacgtccctcttgaaaaggaattgtgtgcttttccaagagcatgcaacatatatttgtttgtatctaatcaagtcatttatcttcacttagttttataactcctgtaggtgcagtcaacatatcttataaacctactcacagtgaaagcagaagaatgcctatgcagtcctaggatttggcacaggcaatctaagctttaaattatggtattggtatcccaattaaagccaagatgtgcttccaaacacccttggacaagtaagcaaatacatgtaatgtcacctcctttcttagctaattcttatcctttatttatgtcacttactcartatgttttctactttttcttctttttttaattgctacataaaccatcagaaaagaccatgcacagccaacctgctgcccaagcgaaatctctgtttaatatttcagtgtttccaaaaatgatgtgccactggcttggctctgcctgtaatattgttttcaatttccatctgccttgggcatcttcctcctgccacgtatcca

SEQ ID NO: 120477 - DNA, 597 bp, Homo sapiens
tggggactttcgggaatggaggggccaagatctctgagaggagagaaattctctgaggtgagcccaatattctgcagacagtttttccccttggggcatttgctgagtcttaagtaagaagggagaggttgaaggcagaggctaaaaagttttgcagaatgcaaattctaagaatcaaaggagccaactgagctttctcattgaaataagaagaaaaatattgtactttgggcccactaaggcagccagaagatctaggtttgccaagaccacggacagagaaaaagcacagagaagtaagcccaaactcgtgggttttcctctcgtggcactgaccaattcttaaattacacaaggataagaagctgagcaaaaagctgcaggaaatctcartagaggtcttccactgtctcatagtgctgatgattagagttcaggctaatgattggaatgctaaaattagagttcgggacctgccaagtcctgaaggccctggtaactatcctaggttctcctgagggttcttttgagtgctgtcttctgagatgggaaaaaaacctgagatctagacttcaaaagtcacaaacatagcctaga

SEQ ID NO: 120478 - DNA, 563 bp, Homo sapiens
gagggttgggggtaggggggcagtggagatgattaatgggtaccaaaaaatagraaggatgaataagacctacaatttgatagcacaacagagtaactacagtcggtaataattgtacatttaacataacttaaagagtgtaattggattgtttataactcaaagaattaaatgcttgagaggatggataccccattctccatgacgtgcttctttcacattacatgactgtatcaaaacattccatgtaccccgtaagtatatacaccactatgtacccacaaaaattagaaataaaaaattaaaatgtatattctgctcataagaaccacaacttaaaataaaaacacataaataaaatgatggaaaaattatataatatgcaaaaactaatctttaaaaaacctgttacagtcatactatcataaaaatatactttaaggcaagatacaagatgccaacaagtaaagaaggattcccataatggtaaaagagaatacataataagaggtaaagaatgattttcataatggtgaaaacagagatacaacaattttacactt

SEQ ID NO: 120479 - DNA, 563 bp, Homo sapiens
gagggttgggggtaggggggcagtggagatgattaatgggtaccaaaaaatagaaaggatgaataagacctacaatttgatagcacaacagagtaactacagtcggtaataattgtacatttaacataacttaaagagtgtaattggattgtttataactcaaagaattaaatgcttgagaggatggataccccattctccatgacgtgcttctttcacattacatgactgtatcaaaacatyccatgtaccccgtaagtatatacaccactatgtacccacaaaaattagaaataaaaaattaaaatgtatattctgctcataagaaccacaacttaaaataaaaacacataaataaaatgatggaaaaattatataatatgcaaaaactaatctttaaaaaacctgttacagtcatactatcataaaaatatactttaaggcaagatacaagatgccaacaagtaaagaaggattcccataatggtaaaagagaatacataataagaggtaaagaatgattttcataatggtgaaaacagagatacaacaattttacactt

SEQ ID NO: 120480 - DNA, 499 bp, Homo sapiens
acacagttagttttattccaacagtaaaaggtgacttggtactttcctccataatttacctgaataagttatttatataacttatacatgataaacttatstaataagtatgaatcataatctctatgaaagccaaatataaattctaaaggactatataatatgccgtggcattattttctactattgtaatgcttctctaggaagttatttgacgtcataccagtttgacatcttcccttcaaatacttcatatactgtctgcaacaaaatacatcctgacacagattatgacagatgtttatatttaatctttgaagggcaaataacataaacaagcaagtaactttttaattagaagatcttgcttggagtgatattagaaaagtatacagctgaatggtttgatttcatatttgttaagttagagtcaaaataagaggccactaaattcaaaagagttttaaaattttaaagagtaagaagatagttgatatga

SEQ ID NO: 120481 - DNA, 547 bp, Homo sapiens
aaaataagccaggcacaaaggataaatatttataattccacttacctaaggcacctagattaggcaaattgatagagacagatagtagattagaaagtaacagagaccagaaggaggaagaatgaggaggttttacttaatggttacagagtttctatttggggcaataaaaatgttttggaaatagggttacacatcatcatgcacataattaatgccactgaattgtacacttagaaatagctaaaatggtaaatcttatgttatgcatcccttattacaataaatttatatatagcaaaaatgggcagagatatagagaaataatacatattcagaattatggtgggaaatttttacctgcatctatcaaaaaacattagtggacaaaaaaattttaaaggatatagtacatttaaacaataaaaccaaactgcttgataggatggatrgatgtggtgtatataaacagtgcccccaacaaatacatgaaatataagccttttttttttcttctttttttttttttaaagacagaatctcactc

SEQ ID NO: 120482 - DNA, 623 bp, Homo sapiens
ttatatatagcaaaaatgggcagagatatagagaaataatacatattcagaattatggtgggaaatttttacctgcatctatcaaaaaacattagtggacaaaaaaattttaaaggatatagtacatttaaacaataaaaccaaactgcttgataggatggatggatgtggtgtatataaacagtgcccccaacaaatacatgaaatataagccttttttttttcttctttttttttttttaaagacagaatctcactctgctggccaggcttgagtgcaatggcatgatcatagctcaccacagccttgaactcctggacttgagcattcctcatactgcagcctcctaagcagctgggactacaggaatgtgccactacgctcagctaattttttaagcttttgtagagatagtgtctgaytgtgctgcccaggctgttttcaaattcctggcctgaagcaatcctcccacctcagcctcccaaagtattgggattacaggtgtaacccaaaacaccggctgtgaaatatattcttttaatgtgcacatagattattcagaaaagttgaaatgcattgaatattctttgctgatatctggtcaaagaattaatagcatgta

SEQ ID NO: 120483 - DNA, 417 bp, Homo sapiens
accaatgtggtaccactacaagtctgcaacagccacagtgatactgagcttggggtgtcctctaatgcagatatagctacagtgaccaaagacttagatgacaacactcaatttcatttgaatacctgaaaagtattctcaagaaggatgggtacaaataagctaagactgcaaacattagaatacatacataactgttcaacgcccagacacaaacatccacaagcatcaggaccacccaggaaaacataacctcatcaaacaaactaaataaagcaccagtgacctatccaggagcgacagagatatgtgaccttgcagacagagaattcaaaatagctgttttgaggaaactcaatgaacttcaagataacacagrggaggaactcaaaatctatcagataaattcaccaaaga

SEQ ID NO: 120484 - DNA, 503 bp, Homo sapiens
atatctcaatagcagaattgatcaagcagaggaaagaatcagtgagcttgaagacaggttgtttgaaaatacacagtcagagaaaacaaaagaataaaaaataaaaaagaatgaagcatgccttcaagatctaaaaaatagcctgaaaagggcaaatctaagagttattacctcaaggaagaggtagcgagagatataagggtagaaagtttattcacagagataagagaaactttacaaacctaaagaaatataycaatatttaagtaccaggaggttatagaacaacaagcagatttaacccaaataagactaccccaagacatttaacaatcaaactccccaaggtcaagaatgaagaaaggatactaaaagcagcaagaggaaaggaacaaataacatacaaaggagctcaaatacatctggcagcagacttctcagtggaaaccatacaagccaggagagagtcgcatgacatattcgaagtgctaaaaggaaaaaaa

SEQ ID NO: 120485 - DNA, 578 bp, Homo sapiens
ggatttggcagttgattcttataaatgatacagagcaacagaagaaaaaaatagataagatgaatcttattttaaattagaaattttgtaccttaaaaaatattgtcaagaaagtaaaaaaaaccctaaaatggatataaattgtatatctgataaggtctggtatgtagaatatctataaagagctcttctattacaacaacaaaaacataagcaacctgttttagtctgctggggctactataaccaaataccttaaactgggtaatttataaacaatgggaatttgttcctcacagctcttgattaaagatcaaggtgccagtagatttagtgtctggtgagggactatttctcatggatggcaacttttatatggcctcacatggtagaattggcaaggcaactccctccaaccactctcatgctttgtttcccaaaatgctttgcttcttaatattatcacattgggtattaggttccagcatatgaattttagggggatgytaacattcagaccataatacaacccaaataaaaatatgcaaaggacttgaatagacacttctttaaagaag

SEQ ID NO: 120486 - DNA, 597 bp, Homo sapiens
gttggtgagcaaaaattggacagatgatcaatacgacgttggtttcaaggagactcttctatgatccttgacagcaaggaaaaggaaatttttataagactttgtaagtatcagtttctatcctttagccacagctgtgattctgttgactgttagaaattttgtagccaaagactaacagtcattatctgactaacagaagttttagaattaacaaaaagaactctaaatagtagccctctcataaagacctatctacttgggcatggcaatttggagcctaaaaaatggtctatttcctttgagaaaaattttggaccaagatgcaacatttaatgagatccctggaactcaaagtcaatggcatagttcagaacaatcaaattaaatatggtttgaggttttgcaataaaatctcatatgatcttacgcaaaatatgaaactcccttcccaaagtctaggaaagaaygtaaactgatgttactaaaaaataggttaaaccaaaccaaaggaaacagacagtaggatgggaggttctgccaacacttgatggactggaacagatagtcacatatattatcattttccaaaacatc

SEQ ID NO: 120487 - DNA, 597 bp, Homo sapiens
gttggtgagcaaaaattggacagatgatcaatacgacgttggtttcaaggagactcttctatgatccttgacagcaaggaaaaggaaatttttataagactttgtaagtatcagtttctatcctttagccacagctgtgattctgttgactgttagaaattttgtagccaaagactaacagtcattatctgactaacagaagttttagaattaacaaaaagaactctaaatagtagccctctcataaagacctatctacttgggcatggcaatttggagcctaaaaaatggtctatttcctttgagaaaaattttggaccaagatgcaacatttaatgagatccctggaactcaaagtcaatggcatagttcagaacaatcaaattaaatatggtttgaggttttgcaataaaatctcatatgatcttacgcaaaatatgaaactcccttcccaaagtctaggaaagaacgtaaactgatgttactaaaaaatrggttaaaccaaaccaaaggaaacagacagtaggatgggaggttctgccaacacttgatggactggaacagatagtcacatatattatcattttccaaaacatc

SEQ ID NO: 120488 - DNA, 586 bp, Homo sapiens
tgctttcaattcttttgagtttatacccagaactgaaatcatttggcattaaaaaaaattttttttaagaactgctatgctgttttccctaaaatctgtaccattttacattcccactaacaatgcacaagtattgtattttctccacatcaaagacaacacctggacaccggttattttctgtttctgcatrtatataaggatgttacttgtgattatatattatattataatataatatataatcacaagtaacatccttatatacatgattacatgtaataattatacatctatattatcatatgtaatatatgttattcatgtaattatatatgtaatatacatgtaatattattgcattataataatacaatatgtataatatacatatatagtagctatcttagggtgtgtgaggtggtatctcattgtagtttgggtttacatctctctgatgatcagtgacgttgaactttttttcatgtgcttatttgctatttgtacatcttctttgaagaaatgtttttgtaggttctttgcccatttttaatcaggttgtgtttttgttgttgagttacaggag

SEQ ID NO: 120489 - DNA, 605 bp, Homo sapiens
aggcaacctaatgaattggagacaattggtggtagtttataataatttagtccaaaggtaagttggagtttgtagaaaatagcatggaattmtctccctttgttcctgcctaggctcttggtggctgccaatgttctcagttctcttcaggtcaagaaaacctgcagacaactagaagaatgcaagtcacagcatctaaaacatacagttgttacagtaaatacaaacacagtcaaagactactgcaaattggcatttttgaaaatagacacatccacgtgccatgctcggcagggggcatatgggcaacaatccaggctggccactaagtgagaaaccagctctctttggtcttgtttcagggatcaaatttcctttgcggactctgggtaagctttgaggactctgggtaagctttgaggactctgggtaagtcttgcctgcctggctgacctggaaatctataccatgcatcaaaggaactggtaggtgatgagatagggttcagatttttcgtcttctagataggatctctccacttcattccagaaaaaagtcaaagaactcaccctctgcaaaactgacagaaggttttccaagggaat

SEQ ID NO: 120490 - DNA, 605 bp, Homo sapiens
aggcaacctaatgaattggagacaattggtggtagtttataataatttagtccaaaggtaagttggagtttgtagaaaatagcatggaattatctccctttgttcctgcctaggctcttggtggctgccaatgttctcagttctcttcaggtcaagaaaacctgcagacaactagaagaatgcaagtcacagcatctaaaacatacagttgttacagtaaatacaaacacagtcaaagactactgcaaattggcatttttgaaaatagacacatccacgtgccaygctcggcagggggcatatgggcaacaatccaggctggccactaagtgagaaaccagctctctttggtcttgtttcagggatcaaatttcctttgcggactctgggtaagctttgaggactctgggtaagctttgaggactctgggtaagtcttgcctgcctggctgacctggaaatctataccatgcatcaaaggaactggtaggtgatgagatagggttcagatttttcgtcttctagataggatctctccacttcattccagaaaaaagtcaaagaactcaccctctgcaaaactgacagaaggttttccaagggaat

SEQ ID NO: 120491 - DNA, 574 bp, Homo sapiens
tctactacttttaattattctgcaatgaatttggattgtttatataataaatatgctgagtgcaataaaaaaggatatttcccagcgcccagtccttagtcactatgaaatgaaagtaggtccataaatttgtagagtaaccttgtggcctttctaacttttgtgtaaagtaccagctcctttgctttggaaactcctgtcctacattaaatgccagatgggtcaacagaaaacccttgatggccttagcttttactgtaagtgaaacgacctcattttaacatgtagtttgaataaaatttacagtctagatatagaatgattacctcctcttgtttttttttaatacaatctyactcacatctgtctgtgggatttaacctcttcctagttccctctttttattaaaacattttctcctcaacacggacaggaatactcatcaccactcactgaattccatgatggagagtaaaaaggcttttttttttccctgcatatttatatcattcaatacagtcagaatgggaacatgatctgtttcagaaatagaaaattttctgtgcatgtgtac

SEQ ID NO: 120492 - DNA, 574 bp, Homo sapiens
tctactacttttaattattctgcaatgaatttggattgtttatataataaatatgctgagtgcaataaaaaaggatatttcccagcgcccagtccttagtcactatgaaatgaaagtaggtccataaatttgtagagtaaccttgtggcctttctaacttttgtgtaaagtaccagctcctttgctttggaaactcctgtcctacattaaatgccagatgggtcaacagaaaacccttgatggccttagcttttactgtaagtgaaacgacctcattttaacatgtagtttgaataaaatttacagtctagatatagaatgattacctcctcttgtttttttttaatacaatctcactcacatctgtctgtgggatttaacctcttcctagttccctctttttattaaaacattttctcctcaacacggacaggaatactcatcaccactcactgaattccatgatggagagtaaaaaggcttttttttttccctgcatatttatatcattcaatacagtcagaatgggaacatgakctgtttcagaaatagaaaattttctgtgcatgtgtac

SEQ ID NO: 120493 - DNA, 635 bp, Homo sapiens
attggtcacggacttattaccatatatcagaaacctctggagaaatgcttccatctacttaaccaaaaatttaggtctacaaatatttcccttgtttcatgatgaagacaaaaaacattgcaagatagcgtscttaatagaagggtgttacatcaaatatatatctggctcttacaatgactatatctaaaatttgttaattttatccccagctatattttaatatggttgcttgtttacagaccataatactctgagacaaactgagatgtagtaacaaaatattatctggaacatggattgataatgtatcaagcttcaacctcatcgaagaagagagttagacattggcaacttggaaatccagtgatcaaacattaatttatagatgtcagttagaatgtgtaggcagtaacctcaaatacgtatgatgaattataacaaacactacaattctattatctatccatctctctacctacctatctatctatctgatatctcagaatgggtggagaaaggcatgcagtacttgttaaatcaatgctgacctaacttggaaggtattaattaagtatctcaactaaatgtgtaatggaatgaattcacttagctggaatgcattcatttgtgtt

SEQ ID NO: 120494 - DNA, 635 bp, Homo sapiens
attggtcacggacttattaccatatatcagaaacctctggagaaatgcttccatctacttaaccaaaaatttaggtctacaaatatttcccttgtttcatgatgaagacaaaaaacattgcaagatagcgtccttaatagaagggtgttacatcaaatatatatctggctcttacaatgactatatctaaaatttgttaattttatccccagctatattttaatatggttgcttgtttacagaccataatactctgagacaaactgagatgtagtaacaaaatattatctggaacatggattgataatgtatcaagcttcaacctcatcgaagaagagagttagacattggcaacttggaaatccagtgatcaaacattaatttatagatgtcagttagaatgtgtaggcagtaacctcaaatacrtatgatgaattataacaaacactacaattctattatctatccatctctctacctacctatctatctatctgatatctcagaatgggtggagaaaggcatgcagtacttgttaaatcaatgctgacctaacttggaaggtattaattaagtatctcaactaaatgtgtaatggaatgaattcacttagctggaatgcattcatttgtgtt

SEQ ID NO: 120495 - DNA, 609 bp, Homo sapiens
gagtttattgctgtctgcttttaaaagtcaaatttagcttttcttgmacagacaggtttaagtaatatgttttatattatagactattaacctattacagtgatttcatcagtctatgaaataaccatctacataatgtaaattttatagccacctctccaaatcaaatccacaaggattccatggattctgggcaccctggggttcagtgcccccagaatacacaagggacagtctcaggggacaaatctgtgggagaactgtttgctgggtgctggaggaacatagcttctaccctgtagacaaaacccagaacctatctcaggcaaagggcaaagcagagaccactgcctgcaataactgcagctcccacccccagccctttggagtctttcatgccagactctcagagccttcctcctcccaggtcctaactgtgaccttccctccacccatcagagtggagcatctcaaactcagacaaactcctaaagatcatctcctaacaagtctctctgcttcacttcttgcctcccttcagtcacagcctgttaatatgcaagtcatatcatgtctctttttagctgggaaaaatccaatggcttcttg

SEQ ID NO: 120496 - DNA, 609 bp, Homo sapiens
gagtttattgctgtctgcttttaaaagtcaaatttagcttttcttgaacagacaggtttaagtaatatgttttatattatagactattaacctattacagtgatttcatcagtctatgaaataaccatctacataatgtaaattttatagccacctctccaaatcaaatccacaaggattccatggattctgggcaccctggggttcagtgcccccagaatacacaagggacagtctcaggggacaaatctgtgggagaactgtttgctgggtgctggaggaacatagcttctaccctgtagacaaaacccagaacctatctcaggcaaagggcaaagcrgagaccactgcctgcaataactgcagctcccacccccagccctttggagtctttcatgccagactctcagagccttcctcctcccaggtcctaactgtgaccttccctccacccatcagagtggagcatctcaaactcagacaaactcctaaagatcatctcctaacaagtctctctgcttcacttcttgcctcccttcagtcacagcctgttaatatgcaagtcatatcatgtctctttttagctgggaaaaatccaatggcttcttg

SEQ ID NO: 120497 - DNA, 560 bp, Homo sapiens
tactgaggaaaaaggtttgcaaacattattttgtgacatttgtttgagaatgtttaacatatattgcaatattgtatatatatgtggcagaagtatacaaatactaatgtcactggtctacccagatcacaattcatttactacttagtattttgcaaacttgtttttctcatcctagggacctgactttagtgacttctcaaatctattggtcacaattgatctcttgatttttgctgtgtttattttcgaatccttcctttttgagagctcttctctgaggcttgtggcaacttgttccccaggggctcaactgtrttttctatgttgccttcaaatgtattggaaacatttcagtactactccaaatcaaaccctttgacctcacccttcctttgagccatactgggaccagtttcacccaggagcaatacaatctcttccccatgcagcaccttcttctggaccctctgacattgctgcatagatgcccgtggcaacctgcactgcactcccatgtataaaccagaaagcccaaggagtcacacttgaaaacgctt

SEQ ID NO: 120498 - DNA, 604 bp, Homo sapiens
ccaatcctactcatactattccaaaaaatacaggaggaaaaaatactttcaaattcattctacaaagcccgtattaccctgataccaaaaccaggcaaagacacatcaaaaaagaaaactacaggccaatatctctgatgaatgttgatgcaaaaatcctcaaaaaatactagcaaaaatactagcattctaattcaacaatacgttagaaaggtcattcctcatgaccaaatgggatttatccctgggatgcaaggatggatcaacatatgtagattaatcaacatgatacatcmtatcaacagaatgaaggataaaaaccacaggatcatttcacttaatgctgaaaaagcatttgataaaattcaacattccttcgtgataaaaactcttaaaaaaatgaggacagaagaaacatacccaagcataataaaagccatatatgacagacccacagctaatatcatactgaatggggagaaacagaatgcatttcctctgagatctggaacatgacaaggatgcccactgccaccactgttatttagcatagttctgaaagtcctagctagagcaatcagacaaaagaaagttatgaagggca

SEQ ID NO: 120499 - DNA, 583 bp, Homo sapiens
aagaaccggtgaacagcaggtcatatgtggcacgggattctgcagcttgtgatgttgccaagtgcagtcttagaagcattcaatggcctcaccaccgtgctgttgtgtcttcatcagtcattcatctagaacctgttatgtgaccagaactgtcttagacagtggggatacaagagttatttgatcacacaaggtgttaactctatggagcttacagtctggtcaataagtaagtagttaacaatactcaacaatacagagtgataggagctttgatagggaagagcagagcaatggggacatatgggagggataccaatgtggtcttgtgggttagggaagccttcctaaaaagaggcacaattaagaaatccctgtagagcaagctaggcaggtgacggagagggcagactgttccaggcaaggcagagacagtggtgcaaagttgaacactgggagatgtggggaagtgaaaatagttatttcctgggtgtcaagcatgtaaatgctacagatgatgtcyacattaaagaactacattgacctgattcccttttctgcagaactgggataaggagagagg

SEQ ID NO: 120500 - DNA, 632 bp, Homo sapiens
ccacattgtaccacaccttaaaatcaatggtttttttcttctcagccagcatgtggatgcctcaataaagcagactcctttcatgacctaaaactaatttcaggggggaaaaaaagacgagctgggcgcagtggctcacrcctataatcccagcactttgggaggctgaggcgggaggatcacttgaggtcagaagaccagcctggccaacatggcaaaaccccgtctctactaaaaatacaaaaattagctgggcgtggtggcgcacctataatcccagctactcaggaagctgagacatgataatcgcttgagcctgggaggtagagcctggggctgcactccatcctgggcaacagagggagattctgtctcaaaaaataataataataatataaataaataaataatttttttaaaaaaagactctttcctatattaatctttgcatcctgtgcccatggccccaaacctgaccaatgaaggccccagtaaatattttttgaacaaaagaaaatatagatgatcaaagataagaaagataagaagacacctcaattcttgtaggcatatagtggtaggggaaatcactaattctgtgtgtttatgtatcttcatcttcaggaaaaata

SEQ ID NO: 120501 - DNA, 597 bp, Homo sapiens
gtcaatgaggttttacatttttctcaacaaaagttatgccaacaaggaaggaagcaacaaagaaatggaacatcaatgcttaaaaaagggattcatttgactgaaaaaaaaatactcagggaagaaataagatccaaaagagaaaaagcaaataggtctttaaaaatatatttagcttaaatatcagcttttaattaagccaaattttgmacataaagctcattaaaaaaaacaagcaaccacaaaagcttctcaaataaaaacagaaaccaataagcttttttttgacttaaccaacaattcataagttgtccttaaagaggtataaagaagctgtcctcacaaaatctagacccactccccaaagacaactaagagaaaaaggagacttagattaacttcttaagactggcaatagtcagtatgctagctgcaaatgaggtccaactaatgttttgtcaggccatcttgatttttttttaatgatgtcttcaagcttttggttgtgtttctacacaagcaaacatgataacttgcattcccccaacaggaagtaagccaaaccaagttctcagttcacaaagaagtatgacaaaa

SEQ ID NO: 120502 - DNA, 434 bp, Homo sapiens
cttcatgagatatcaaaggtagcaaaaaaggaaggcatagtagaagtaaattgtagaataagtattagagaagacaatttgaggagattttaaacttcccaataaggtcaatgaggttttacatttttctcaacaaaagttatgccaacaaggaaggaagcaacaaagaaatggaacatcaatgcttaaaaaagggattcatttgactgaaaaaaaaatactcagggaagaaataagatccaaaagagaaaaagcaaataggtctttaaaaatatatttagcttaaatatcagcttttaattaagccaaattttgcacataaagctcattaaaaaaaacaagcaaccamaaaagcttctcaaataaaaacagaaaccaataagcttttttttgacttaaccaacaattcataagttgtccttaaagaggtataa

SEQ ID NO: 120503 - DNA, 609 bp, Homo sapiens
cttttcacaattttaaactatatatatgtatatatatacatattttttgagatggagtctcgctccatcacacagcctggagtgcggtggcgcaatctcggctcactgcaagctccacctactgggttcacaccattctcctgcctcagcctcccgagtaactgggactacaggtgcccaccaccacgcctggctaattttttgtatttttagggagacagggtttcacagtgtcagccaggatggtctctatcttcctgcctcrtgatccatccccctcggcctcccaaagtgctgggattataggagtgagccaccacgcctggccaacaatatatatttttaataatacagtatatatatccttctctgacatttttttcactcagtgttatatttgtcagaataatacttgcttattaataaaattacttgtcattgatttttacttctgtcagttattgcatgaatgagtgtacaaaaattgtccattatcctgttgatggttatttgagttgcttacattattaaacttacatacattgtttttatggatataattttacatgtctccttgagcaaatatgcaagaatgtatttagggtttag

SEQ ID NO: 120504 - DNA, 609 bp, Homo sapiens
cttttcacaattttaaactatatatatgtatatatatacatattttttgagatggagtctcgctccatcacacagcctggagtgcggtggcgcaatctcggctcactgcaagctccacctactgggttcacaccattctcctgcctcagcctcccgagtaactgggactacaggtgcccaccaccacgcctggctaattttttgtatttttagggagacagggtttcacagtgtcagccaggatggtctctatcttcctgcctcatgatccatccccctcggcctcccaaagtgctgggattataggagtgagccaccacgcctggccaacaatatatatttttaataatayagtatatatatccttctctgacatttttttcactcagtgttatatttgtcagaataatacttgcttattaataaaattacttgtcattgatttttacttctgtcagttattgcatgaatgagtgtacaaaaattgtccattatcctgttgatggttatttgagttgcttacattattaaacttacatacattgtttttatggatataattttacatgtctccttgagcaaatatgcaagaatgtatttagggtttag

SEQ ID NO: 120505 - DNA, 593 bp, Homo sapiens
ggagcccccctccctctgtctctgtacaggggagcttcttccttctgccttcttccttctttcttgccaattaaactctccactccttaaaaccactctacgtgtgtccatgtcgtttcttccagttcaacttgaaacggagaacctggtgttactccactcattggaggcatatcaatactacaaacaggataaataaaaatgtcatcatgaaattgtacaaaaccaaagataaaaacaaaaccttaaaagtagcaagaataggctgggcgcagtggctcatgcctgtaatcccagcactttgggaggccaaggtggatggatcacgaggtcaggagattgaaaccatcctggccaacatggtgaaatcctgtctctactaatacaaaaatgagccaggtgtggtggcrtgtgcctgtagtcccagctactcaggaggctgaggcgggagaatcacttgaacctgggaggtggtggttgtagtgagcagagatcacgccgctgcactctagcctgggcgacagagtgagactccatctcaaaataaaataaataaattcaaaaaatttaaaaataaataaataaaaataaaa

SEQ ID NO: 120506 - DNA, 608 bp, Homo sapiens
atcaacaaaattcagatgagtcagtaatatactttgagggctgtggaaaaaattttaaagaatatttagttttatccgaagaaagctgtgctaatcatcgaaatgatactcgactccagtttwacaaatgagttagatgaattggaactaacaatgaaaagacaaagttgggccacttctgatactcatgatttggtcagtctcattgaccggttatctgataccttaactgaagaagaaagagagagggaagccaaacaaaagagcgaggctaatacaattatgaatttacaattaaaacaactattcacacaattttggccttcacaatacccctagaaactccctaatggacctaaccttccactttgcaatttttgcaaaaagcatgattactttcaaaagagttgccaaaaatgaaaaaggaaagaatgttaaccagtggaggcagaaaagaaaacaggggtgctccaaggaacttaaaggggcctttcatttcctccttactaacactgggagaaataaaaattattataaatggagaactaacacaagcacttattgacactggagccacattatctggaattaatcccatcttggtacaa

SEQ ID NO: 120507 - DNA, 516 bp, Homo sapiens
tatatatatatatatatacacacatacatgtaatttctatatggttttgctgatattgctttaatttttatttatttgtacaatatattagctgtttaaactataaacatgttttaagctaaagtaaatctatcctttaagacctgttaaacttgatagattatacatatttccgaactcggctattagtattgttcgttgttgctttttggtggcttaaggttatcagcacatctctgtataaatgaagacaactactaaccaaagcacctaagcattttaacccagacaatataaaaagcctcataattcagaatttactgtaattattgcagttaataaatagtaaaggctatttaaaracttcctgtcttgagatggtatgcccttgtattccaaaaacttaataagggataataataatgattaggataatgataatcacattaagatcatgaaagtatgtttaaaaagcttaaaacgagattcctgcagagatgataaaaagggttctct

SEQ ID NO: 120508 - DNA, 621 bp, Homo sapiens
acaccaggaacaaggaagctatgagttgaaattattttatctgtcaataaaggactgcatggtctcccatctctccttctctgtgatcaactatatcattcttctgtctctttctctctctctctctagcataacttcctctattttataatgcattagatctgaacatggccattccaagctctaggttaacattgcccaagatgacatattctcaggctctgatttctaagtaatggaggaaaagaatgtacctgaaacaactaacaccaagggtccatccatgtccccgatagctgtgacagggttggagagagctgaggcttaactctcatgtagagttcagagagctgaggcttaactctaatacaggtacaagcaatgtgaaaggagggtataaatctttatctaagaattggatatgggacaaaaaaaattatcatatatttggtatacacacaatcttattgcacagcagaatgtggwaagaatgatgcaacagatgtagacaattggttatgataatgaacatgtaagacattgtttgtgcttatgtatatatgtctcataatatatataacagcaatgggaatatataacatcacattcaagttgatagtt

SEQ ID NO: 120509 - DNA, 548 bp, Homo sapiens
atcagcaccctctgaaatcctactaaaacgtgtccaatgggaaataagttattttctgccgttctgattagcagtcatctctttttcccatgtgttcttggggaaaaaatttattttctgcctttctgattagcagtcatctctttttcccatgtgttctttaagtgtccagaaactctagggtctctttccccttctcctgttaaaatctttctaaagaagaaagctgagagactcatacaactcatagtgatctcaggtacatttgtattttaaaagcacttaattttattttgttgctcttaaaacttgtatttaccttatcttagctactgtatcaccataggaatagttcaataagacaaatgatgctattattttagtgatgtatacactacaataagataaatacaaacttgagttgtacatgctataacctagtacatctgcaaacatatatacaygcatatacacattcagtcaaaaagagaatccagaaagcactcattttactttattttaacccacagaatacaaacctaaatgac

SEQ ID NO: 120510 - DNA, 536 bp, Homo sapiens
gcttgaaatcggggaccccaagagcccacttttgctatactccattgtggctgggatggtgcctaaggtgcaagacagtgttccctttgcttttccttctgcttttctcaagcagaagttctctctcactgtagccatcagatcttggaatgtgctgggtctcacctgaagccagcacatctcagagtctcaycaaaggtttttgatactaactgggtattgctgcctgttattccgtgcccatgtgctctttagttaggaagtgatagatcctcctgaaactggttcctccctttcaaggcagcagatttccttctggcctagggtatgtctagaaatgtcatcatcccagttagggactggaagggtggcctcacaatcctgaccggtgtccaatcctactttggctgaattggtatccaagatgcaagacaaagtcctctttactcttctctctcccttcctcaagtgaaaggaagaaatctctcttggatccacaagctgtgctgcctgggattgggaaagggatggtgcaa

SEQ ID NO: 120511 - DNA, 577 bp, Homo sapiens
gccctcatcctaagtgaattaacgcagaaacagaaagccaaataccacatgttctgttttcacttataagcaggagctaaacattgggtacacatggacacagagatgggaacaatagacactgggatttcaaagtggggaaggaagggargggggcaagggttaaataactacctatcaggtactatgttcactacttggatgatgggatcattagaaacctaaacctcagtatcaggcaatatacttatgtagcaaacctgcacatgtaccccctgattctaaaataaaagttaaataaataaataaaattactaattctctcaaaagaagttttaggattagtttcttcttaggcatgttgtgttacaggtaggagtcagcaaactaagacccatgggccaaatctggccttcagcctccttttgtaaataaatataaaaacagccacttctacttttttacataaggctactttcagactgtattggcagagttgaatccttgccacaggaactgtatgagctgcaaaactgaaaatatttactatctgagcctttccaagatgtttgccaac

SEQ ID NO: 120512 - DNA, 531 bp, Homo sapiens
gagtttaaaggcaaagatcttttgtcacttaaagaggggccagcaaacactccctttactttcagcctagcagcaagtacagagaaatgttatctacaatrgagggaggtcaggactattgagaaagcccaaccccagggcataggtatacagagactaagactaaggctgaaacaagagagccaaaagaagtcttcttatgatttagattctgcctgagagtgaggtaggaggtcattagccacagtgggagggacaagaattctatttgtattccagaacttgtacagagaagaagacaaaggttttctcctgcctatactcttgattataggttgaaccatgaggcagaagtcatctgttactaagtgaaggggtggaaaacatgcacatggtgtaaagtctgcaatgactaggaagaagtgtatgcttctgggaaaagagcagaaaaattgagagtgatttcctctggggtgtaggtgcagggtgagcctgcacccaatatgactaaatgcgaagcaaagaactgga

SEQ ID NO: 120513 - DNA, 612 bp, Homo sapiens
ttctcaaaaacacgtagtaaagattgatggaaacaaagggaactatggaccaatcacaaaatgtaagtgcagaattttatatcttttcactagtaattgataaaacaagtaggcacaaatttccgtaaggtaatacatgatttaagcaaaactgttaaccgcttgacataatgatatttatagaacttgaaatacagcaaacagaataaatattttctgctttcaagtgcacatggtatatttgccaagatagaccataggctgagtcagtataaacgtttctacaactatcttaaaaacatttatgaaactgtccaagacctgacatyatgcagaatatgttctctgaccaaaattgtattaaaatagaaattagtaacaataagatatccagaaaatgtgtgaatatttagatgttattgaaagcatactactaaataatatctggttcctttaaaatattaataaaattaataatcactagaaagactggtgaataatatagaatacacagattgccaatatcaggtttaaatgagttaacattgcattagatgcttcaaatatcaaaagaataaaaagaaaatttttggaacaatgtttcgacaatta

SEQ ID NO: 120514 - DNA, 574 bp, Homo sapiens
taagtaataagtggcgactcagaaagggtcagaaaccttagagtgtaatccagacagatataagttggcttgaytgtgaaatggaccatcctgacagttaatggaggatacttgaaaagctaggcagaaatgatctacagtgaccatggtaagcagactgaaactattacagctcacgagatatttagcacaacctttaacatctaaaccagacacaaagacaatataacactacaaaacagaaaaaaacttgacctatgcacaaattagattatatgaaaataatgtaaatatcactgagattgaggcaaagtagtaaaaagataacttttgcctaccttcttgtcttcacaacaaagtttatttaaatgattttttccttaacagccttcaaaagcaggaccagtgaactttttattaccttacagaaatctacattttattcgaaagaacttgaaattaaatgatagagtttaaaaaatgtaaatttttaaatttttaaaaaataacctttagacttcaaaaatacttattaaaataaagactttctacaataagaatcttttcactttct

SEQ ID NO: 120515 - DNA, 651 bp, Homo sapiens
ctattaatatatttaggagctatactagcagtgtattcactcaagggacactcagcagggtgatcaaatatgtattttggaaagtgctttaacctacctaaaccctttttattcaaacttagtcccacgacctttggtccagcatgctcaaaatccagtcccatgcttctgggacagtaagtcccagcttctgccagtgcatgttagctaggtccttcattcctttgagagatagttcctttcttcccttagtaggctcaatacttccccagatggattataaagtgactttgccacagttatttcctcaaagcccaggaatggtggttaagagcatatacaagagggaaatacctgttatattgtgatggagaggcctctgcctaatggtctagcaaggtaggtgtgctatccctttataagaatgagtgaacttctttctcaggcttatagggttaaggagaatctygaaactcaacataatcaggcatcaatccggacagcctcatcccatgtgccaggatctcagacattgctttggttgggaattgaaactttagcttgattgttcttatgattaagtctcagacctagtcctcaacttctcttcccttctgctacaggaagtaagaacttcttcatatgctaccc

SEQ ID NO: 120516 - DNA, 583 bp, Homo sapiens
tgttgattctttacttttgctccaacaattctgcatcagtgtgtatgcctgtatatatgggggtgtgaggattcgagtgccagttatttttacagtaatctttccagcgcccaatcctcacagctctcctatatttataacacaaaatgcacagtagatttgaagtcaaacaatctggtgtttggcttcagttcctctcttgtaaagctatgcaaagttgaacaaatcaattggcctcttggacctcagaactgaaggagcataataatgctttytctacccctattttggggtgggtgagaggagcaaataaaacaatatataccaatgccttttggaaaatataagctgctataaaaattgggggcactgtgattactattactcatttgttttaataaccgatctgatactttggctttgaaaacttgtcccagaaattttcttagtttatctctattcctaaaaatgcttatgctgtttagctctcagttacaaataccacttgagcatttaacaatgtagtatgtccagccttgtatgtctcttataaagttagaaactcaaagtttggtaggcccca

SEQ ID NO: 120517 - DNA, 598 bp, Homo sapiens
tgagttttctcagcaaacactgttgttcttgagactagaacatattgaactcctagcaaaggttagtaagtattgagtctccccttcctttacttaaggattactaaggattttcaattcagggagaaaagagcattcttgtagaaataagaacacamaaaaaatctataaagaaaattaaaaattaaatccaaagttcatatgatcacaatgaaaagacaggttttgcaagaacatatacaaacaaacgatatacattaaacacattagaatgtgttcttgcagttgaaaaggaaaatgggattgtggataaagggaataaatagagaaaataaacaaaatagaattttaaaagtgtttgtttgttgggggcatagagtagtagtgacagcaatactattttcctacaagaaatatccattcattatgaaccatatcacttgacctgactacataaggaactcaggtgtccaagttgttaagtccatggcacaaatttgtaataaaatcttacattctgtggtttttataagagtgacctgtgagagctctattaaaacgcaaaatgctataaattactgcattcaaccaggagaga

SEQ ID NO: 120518 - DNA, 598 bp, Homo sapiens
tgagttttctcagcaaacactgttgttcttgagactagaacatattgaactcctagcaaaggttagtaagtattgagtctccccttcctttacttaaggattactaaggattttcaattcagggagaaaagagcattcttgtagaaataagaacacaaaaaaaatctataaagaaaattaaaaattaaatccaaagttcatatgatcacaatgaaaagacaggttttgcaagaacatatacaaacaaacgatatayattaaacacattagaatgtgttcttgcagttgaaaaggaaaatgggattgtggataaagggaataaatagagaaaataaacaaaatagaattttaaaagtgtttgtttgttgggggcatagagtagtagtgacagcaatactattttcctacaagaaatatccattcattatgaaccatatcacttgacctgactacataaggaactcaggtgtccaagttgttaagtccatggcacaaatttgtaataaaatcttacattctgtggtttttataagagtgacctgtgagagctctattaaaacgcaaaatgctataaattactgcattcaaccaggagaga

SEQ ID NO: 120519 - DNA, 598 bp, Homo sapiens
tgagttttctcagcaaacactgttgttcttgagactagaacatattgaactcctagcaaaggttagtaagtattgagtctccccttcctttacttaaggattactaaggattttcaattcagggagaaaagagcattcttgtagaaataagaacacaaaaaaaatctataaagaaaattaaaaattaaatccaaagttcatatgatcacaatgaaaagacaggttttgcaagaacatatacaaacaaacgatatacattaaacacattagaatgtgttcttgcagttgaaaaggaaaatgggattgtggataaagggaataaatagagaaaataaacaaaatagaattttaaaagtgtttgtttgttgggggcatagagtagtagtgacagcartactattttcctacaagaaatatccattcattatgaaccatatcacttgacctgactacataaggaactcaggtgtccaagttgttaagtccatggcacaaatttgtaataaaatcttacattctgtggtttttataagagtgacctgtgagagctctattaaaacgcaaaatgctataaattactgcattcaaccaggagaga

SEQ ID NO: 120520 - DNA, 598 bp, Homo sapiens
tgagttttctcagcaaacactgttgttcttgagactagaacatattgaactcctagcaaaggttagtaagtattgagtctccccttcctttacttaaggattactaaggattttcaattcagggagaaaagagcattcttgtagaaataagaacacaaaaaaaatctataaagaaaattaaaaattaaatccaaagttcatatgatcacaatgaaaagacaggttttgcaagaacatatacaaacaaacgatatacattaaacacattagaatgtgttcttgcagttgaaaaggaaaatgggattgtggataaagggaataaatagagaaaataaacaaaatagaattttaaaagtgtttgtttgttgggggcatagagtagtagtgacagcaatactatyttcctacaagaaatatccattcattatgaaccatatcacttgacctgactacataaggaactcaggtgtccaagttgttaagtccatggcacaaatttgtaataaaatcttacattctgtggtttttataagagtgacctgtgagagctctattaaaacgcaaaatgctataaattactgcattcaaccaggagaga

SEQ ID NO: 120521 - DNA, 548 bp, Homo sapiens
ataactcccataatgtgactgaacagtcaggattcttttggtctgtccaatagatccagattttcaagtgttttcctcctgaaaagcagtatcctttcagtgggcacccgcaggcaagatgggatggtgacatgagggcacatggaactgactgataatttggtgcctcttacaactgataatcactttcagtgttggctggccattatttaggagaagccaaaggcttctttggggaaggacagagaaagtgctggtagtaatccrgctctcattttgtgtataaaccaatcagcactggtaccaaacttgaatacagtgctttgcaaaacaaaagccctgtagttaactaatctaccctactcaaaataatttagtgacaatctgttgtcactcaaacttgttgctggaggtatcatctcaatcacccccaagtggttcctttttcaatatttctactaactacatcagtattttccctcaaaaggacccagggagataaaacttggtgcttgtttataggtccttggttccccagaaatgtacct

SEQ ID NO: 120522 - DNA, 628 bp, Homo sapiens
ccagcctggtattatggtagttttaaatgtttgccatcagctcttctgcattcttaggcagatgaactaaaggaggacatacacttacatctgtttctaaacttgttttcccttcttatcctcaagtttagtagatatatggatgtctcctgccacatatttcccacagtatcttgaaatggtgatgcatcttgctgattttgtttaaaaggttttctttattttgagacagagtcttgctctgttgcccaggttggagtgcagtggcatggtctcggctcactgcaacctccgcttcctaggttcaagtaattctcctgcctcagcctcccgagtasctgggattacaggtgcctgccaccacgcctggctaattttttgtgtttatagtagagatggggtttcaccatgttggccaggctggtctcgaactcctgaccttgtgatctgtctgcctcggcctcccaaagtgctgggattagaggtgtgagccaccacacctggcctaaaagtatttttaactagaaaatatttcaaaaatcacaaaaattaaatagtgcattacagacaggtggttcagtttagaatgtatgtttcccttctgtctttcacatgagcaacattttat

SEQ ID NO: 120523 - DNA, 427 bp, Homo sapiens
agatacactggccagcttctttcccagagaggagcttgcagaactggtgttctaagaaccgcatcttgggaaaacacttgtttatagattcatttgtgtttgaaaagatttagtacagaggaaaagtggacacagggaaggcaaaagactgtaaaggggtttattttggagggcgaacggcatgaattggcatatcattttggaaaacctgatttttttttttttttttttgaggatctcaatctgttgcccaggctggagtgcagtggctcattgcagcctcaacatcccagactcaagccatcctcccatctcaacctgccaaccccctcagcactcccaactcccttcccccsaccccagtagctgggactacagacatgtacaccaccatgcctggctaattttttttttttaaattttttat

SEQ ID NO: 120524 - DNA, 564 bp, Homo sapiens
gcagaggaacagatacagatcagtgagacagaacagaaagtccagaagaagatccatacaaacatgtcccattaatttttggcaaaggaacaaaaacaactcggttgaggagggatgacctttttaataactgttgctagggtgactggatatccacaggcaaaaaaaggaattatgagctaaacttcatatcttatacgaaaattaaaacaaaatgtatcaccatgcttaaatgtaaaacagaaacctgtaaaacttttagaataaaatataggagacgatattaagcctgaagccaaatgcacaatacataagaggaaaactaaattgaacctcatcaaaattaaaaactgactctggaagaccctgttmcaaattacagactggaagaaaatatttgccaattacatatacaagaaatgactcatgtctagaatatatttaaaaatccctctcaaactcagtagtaaaacacaagtaattcaaaagcaaatgggcaaagaaatgtacaggcatttcactgaagagattatatagatgccacataggcagatgaaaatatgt

SEQ ID NO: 120525 - DNA, 507 bp, Homo sapiens
cagcatttcagctataaaatgctatagattttgacaagtgcataatgtcatacatttaccatgacagtatcacttagaataattttctgccctaaaaatgcccctgcacttcctcttttcgtccctcccgccaaacttggaactgctggcagccactgattattgttctatatttatagttgtgcctcttccaagggtcatataatgggaagtatatactatgtagttttatcaaactggcttctttcttttttttttaaccttttttttttttaacttagcaatatgcatttaagattctttcrtgcattttcctggcttgatagctcattttttttttttattggcaaataaaactcccattgtgtggatgtaccacagttggtttattcattcacctattgaaggacatcttggttgcttccagtttgggacaattatgaacaaagctgctataaacattaatgcacaggtttttgtgtgaatatgttttcaaattagttgggt

SEQ ID NO: 120526 - DNA, 565 bp, Homo sapiens
ggtcttgtgcagctccactcctgtgattttgcagggtacagcctcccccatggctgctgtcacaagatggtgttgaatgtctggcttttccaggtgcacggtgcaagctgtctgtggacgtatcattctgggatctggaggatggtggccctcttcacagctccactgggcagcaccccagtggggactctgtgtggggcttcaaccccacacttcccttcagcactgccctagcagacgttctccgtgagggccctatctctgyatcaaacttctgcctggacgtccaggaatttgtatacatggtctgaaatctaggcagaggttcccaaatgccaattcttgacttctttgcactcaaagactcaacagcatgtggaagctgccaatgcttggggcttgaaccctctgaagccacagcccaagctttacattggcccccttcagccccagctgtagcagctggaaacagggcaccatatctctaggcattacacagcagggggaccctgtacccagcccacaaaaccatttctttttcctaggcctccaggcctttgatgcg

SEQ ID NO: 120527 - DNA, 577 bp, Homo sapiens
agaaatataataaggacaaataataatgagtatatttttaagaaaaaggaataatactcttttgcaatcaggcataatattcccatacactgaaagaatgcagccttagaaacaggctatcaattcaaaggtttagagtgacaattttgccatttagaagtaagcataataatattcctgccttgatcacttatggtggttattaaaataaaatgaaataattttatatgaaataacacattgtaatatataacagtgaaaataggaggattttgtagtaattaaaaacattttttcctttctcaaacaccatacttcacacacacacacacagaatcctttaaagaaccacagttatattttaagtaagaaaataattaattttaattttgttgttactaccaggattatagacagtcactaactgaaaaatcttcawctactttatttgtccattggggctgctataacaccatagactgggtgacttataaaaatcagaaatttttttctcatagttctggaggctgaaagcccaagatcaaagtgccagtagtttctgtgtccagcgaaggtg

SEQ ID NO: 120528 - DNA, 565 bp, Homo sapiens
ggtcttgtgcagctccactcctgtgattttgcagggtacagcctcccccatggctgctgtcacaagatggtgttgaatgtctggcttttccaggtgcacggtgcaagctgtctgtggacgtatcattctgggatctggaggatggtggccctcttcacagctccactgggcagcaccccagtggggactctgtgtggggcttcaaccccacacttcccttcagcactgccctagcagacgttctccgtgagggccctatctctgtatcaaacttctgcctggacgtccaggaatttgtatacatggtctgaaatctaggcagaggttcccaaatgccaattcttgacttctttgcactcaaagactcaacagcatgtggaagctgccaatgcttggggcttgaaccctctgaagccacagcccaagctttacattggcccccttcagccccagctgtagcagctggaaacagggcaccrtatctctaggcattacacagcagggggaccctgtacccagcccacaaaaccatttctttttcctaggcctccaggcctttgatgcg

SEQ ID NO: 120529 - DNA, 549 bp, Homo sapiens
tcaacagcatgtggaagctgccaatgcttggggcttgaaccctctgaagccacagcccaagctttacattggcccccttcagccccagctgtagcagctggaaacagggcaccatatctctaggcattacacagcagggggaccctgtacccagcccacaaaaccatttctttttcctaggcctccaggcctttgatgsgggggcctgccatgaagacctctgacatgccctggagatatttttcttactgtcttagtggttaacatttgtctcctcattacttacacaaatttctgcagctggctcaaatttctcctcagaaaatggatttttcttttctataacatcatcaggctgcaaattttctgaacttctgtggatcatctccttcaagttcagagttccacaagtctctagggcaggggcaaaattatgtcagtctctttgttaaaacataacaagagttacctttgctcaagttcccaaaaagttccttatttccatctgagaccatctcagcctggatttcattgtccaatcattatcag

SEQ ID NO: 120530 - DNA, 612 bp, Homo sapiens
tctttgggtttgtgattattatctaaataataaaatttcttctaaaataaagaatttatctggcatttaaaattatttattaaataatcaattatatatttaataaactatattttttatagtttgtaatgaagcatatttttaaaaatagtctgtrtgattgttctgaatccagtaatgacacagtagcatctatcacattcatactcctgaagattaaaactttaaactctaggcaaaatttttaaaagactaaaaatgaagaatctggaaggtgaccaaaacaggcataaactgtatgagattaaaccttagaaataaataatatccatgtttatctgacttttcctcaaaggcaacactgaagtctatgcagtgagaaatggctaaaacttaaaaataaaatgtctcaagttgtattagaggaagacatcatgttgtcagaagagctactaattgagaaagaagattctttgatggagaaatcccaaagggaagccccaaattctgcatatacactcatctctcttcctgatctgaatattgaactacatttcagcaggtagattctaaagtccccagaaaagtgcagtcttgaagagttggaaagag

SEQ ID NO: 120531 - DNA, 594 bp, Homo sapiens
ctcactctgtcatccaggctggagtgcaatggcacaatctcaggtcactgcaacctccacctctcaggttcaggccattcttcctgactcagcctcctgagtagctgggattacaggcacccaccaccacgcctggctaatttttgtatttttagaagagatggtgtttcacctgttcgccaggctggtctcgaactctggttcaggaacttcttaacagttttctggatttttcacacagggtctttttttcatgtattgttgaattgaagtgtttgttttgttttgttttgttttttgtttttgtggggaagaagsgtctggaacttcctattttgccattttgctgaaagtaattttgccattttagaaagtaattatataagctttagattatttttatatgagtgagactcaactattgtacgatttttttttcttttgtgacatttatttatctgcaatttgaaactaaggaaagtagcagctgaccctcaaagctcccaagcagataatttaagtctttttttgacattagttatgaacatcagagagatggaggctgaagcttaattaagtttccatatactcaca

SEQ ID NO: 120532 - DNA, 550 bp, Homo sapiens
catctgtggactgatttccctgtgctctctttcactgctcatgttcaaaagttccaagggctaattttaagatggaaaaaaatagaaaaggaaagtaataaatataaatgagaagtccttcaaaattatgaaactatagtcatctctccttatctgtggtttattcatcatttgaaacagaaatgtttcaaatctaaaacatttgaaaaaataaaattaatacaaattttaaaaaatgatatgacaactatataacatttacattgtattaggtattatgtcatctagatatgatttaaagaacaggagagaatttgctttgtttrtatgcaaagaatacatcattttatatcaaggacttgagcatccatatatttggatatgcactggtgagtaggagggctagggagggtcctgaaatcaatttcccacagatattgaggaatgactgtacagtgtacattttcagtctgaaagcagcaggtattttatgaatgtatgaagaataccagattaccagaacaaaattacatgctttccataccactcc

SEQ ID NO: 120533 - DNA, 556 bp, Homo sapiens
tcaagggtccaattatgcatgaatttttttctaaccaaagagcggattgaaaatatactgttcatgggatgcaaaccccacataggcagaggggcaaattttcacttaagtggctccatagggtcacctgtgggacttgagtgtgtgtggaatttagtctacacagaggttctggagtcaattccatgggcatactaagggatagctgtatttaaaagactgaacttcataactgrattaaagacactgtccaaaacacagaaacattatataaaaacaaatacttttttttaagagtagttacagtttctccgatttcacaaaaccttagtatagaggattttaagtacatttagaaaaattgtcctgattttacttccagaagttttttctttctcatttacaaatgaagaagctagcaagctaataatttacctgctatgatctccaaagaagtcacaatttaaggatgcacattaaataaagttatctcaattctccaacctgaagggaccaagtaaggaaaaatatacaggtaccatctcatatgtggtct

SEQ ID NO: 120534 - DNA, 631 bp, Homo sapiens
ccttttgactttacttatttgtgtcatgcaaatgttttaatatttatgtagccacagtaaatcacatattgtctggatttttagtcatattacaaagacttgtactgcttcacatttaaagaggaatttgcccatctattattctagtcttctatggtttaaattttttttgcatttagaggcttaatccatytggagtttatgtatggtgtgagacattttatctaaaggcagtcagatgttatggtaccacttatttaaaagctcatctttctccagtgatttcaaatgtttgttgtgtcaattactcaaatttcatagatagatagatagataggtgatagacatatatgtatccatgtgccagtagtacactgttttcattacagcaaatatttatactgtgttttggtattagtagagcttttgatcctagggcggctgtaacaaagtaccaccaactggggagcttaaaacaatagaaatttattctctcacaataatgtaagctagaagtcctaaatcaaagtgttggagggaccatgctatctttgagggtattagagaagaaactgttccatgcccttctcttagcttctggtgaagctacacatccatggcactctttagc

SEQ ID NO: 120535 - DNA, 631 bp, Homo sapiens
ccttttgactttacttatttgtgtcatgcaaatgttttaatatttatgtagccacagtaaatcacatattgtctggatttttagtcatattacaaagacttgtactgcttcacatttaaagaggaatttgcccatctattattctagtcttctatggtttaaattttttttgcatttagaggcttaatccatctggagtttatgtatggtgtgagacattttatctaaaggcmgtcagatgttatggtaccacttatttaaaagctcatctttctccagtgatttcaaatgtttgttgtgtcaattactcaaatttcatagatagatagatagataggtgatagacatatatgtatccatgtgccagtagtacactgttttcattacagcaaatatttatactgtgttttggtattagtagagcttttgatcctagggcggctgtaacaaagtaccaccaactggggagcttaaaacaatagaaatttattctctcacaataatgtaagctagaagtcctaaatcaaagtgttggagggaccatgctatctttgagggtattagagaagaaactgttccatgcccttctcttagcttctggtgaagctacacatccatggcactctttagc

SEQ ID NO: 120536 - DNA, 579 bp, Homo sapiens
cactgaaatatagtgttaactgtgaggtcatggtcaggtgacttcatctatgtcttttttctatcttaaaatacttatgagagacctctgcttcaagacagaatgttctagcagttaaacactcatactgacttatagagaaaactatgggttttatcttaaagacatatttaaaggcatccagagagctatgaaaaaaaatgttaaatgaactaaaattccagaaagggaaaatatcttctgaggtgagctaagcaacatgcagccacttctattttaaataagtgtgtcagagcttcttggatttgggctaaaactcttgctttggtagagaaagtaagctgatagagcaagaagaaataactcttagaggttctgtagagatggagcaaaaaacgctggatatgaaagaratctcaagtaaatacactatcagtcctatcattaatttatttgctataatttaaaggctgaaaatcccaaaagctaaagagttaagctgaaaatatctaatgggcagaactgaatttcccacagtctttcaggaacaagtaggaaaagcaaaggaaaacaaacaaa

SEQ ID NO: 120537 - DNA, 414 bp, Homo sapiens
ggaagcatccagcatgggagaacgatgtaggctgggaagctagctcactctcccttttcacatttttctgcctgcctatattctagccgtactggcaactgattagatcgtgcccacccagattaagggtgggtctgcctttcccagctcactgactcaaatgttaatctcctttggcagcaacctcacagacacacccaagatcagtatttgtaacctgcaatccaatcaaattgacaatcattattaaccatcacagttagtaacttcctattcaaatactrtatgtatatatgtatacatgcagaaaattatagttctcaaatataaagcatgatgaatttgcaaaacttaatatacccatgtaagaactcatccatagcagaatattattataaaactgaaaatgtaaat

SEQ ID NO: 120538 - DNA, 369 bp, Homo sapiens
gtatttggaaaaagtagcttggggatcctaaataaacccacgctaatttcctgtcatatcatctacagttagaaatagaaccagttctttcattttcattattatacttgtcttttctaatgtcatttaaataattcaaaaataatatcaaatgacagagatgacatgaacatgaaattacaatttggaaattacmgtttggtaatttcattgccaaacttgaaaacgatccagatgtctttcaaaaggtgaatctataaactgctaaatactattcttcaacaataaataatgtgtcaccaataaacattacaacatagatgcatctccagataattatgttgaaggacataagctggaaaaaacact

SEQ ID NO: 120539 - DNA, 564 bp, Homo sapiens
taggcatttcaacataatgattcaggatgaccctctgtgagcacaggaacagccacacagactagttcatcttttcaaagcaaggggaaaggacagtctctgaaagggaaagtctaccatggaattcattttgcaattcagggagtatttggggaaccaaagatgtaaaaagacattttgacttattcaaccttttggtattccattaaagttaaaacatacaatctgtttgctgaaagatatttctaacttattgaatatcagyccatcaaggaagaatatggcaggaaacgtcttacagttgcttacaatgggcagcagccaagactaaacattcattattatggggtaaacctttgtatatctaagcacacaatttttcagatagaatgcatatatagacttagcatctggaaaatttctaataatctccaatctgggttcattttttaatggtagactaaccacagctatggaaatgcttggactgcacttccacaaggatattttgggccaagtaaggttggcggtatagggacttcatttcagaacttggcagtgctt

SEQ ID NO: 120540 - DNA, 508 bp, Homo sapiens
ctgtaatctcatgacaaaacatgaacagatgaagagtgttttcttatggacgagcaagaaagttgtttcttaagatataatttactcctggtgaagatgctgtgaacactgttgaactgacaacaaaggatttagaatatttcataaacctagttgataaagcagtagcggggtttgagaaaactgactccagttttgaaagttctactgtgggcaaaatgctatcaaacagctttgcatgctacagagaaatcttttgtgaaggaaagtgttgatgtgacaaacattatttttctcttattttaagaaactgccacaaccactacagccttcagcaaccaccatcctgatgtcagcaaamaacaatattgaggtgaataccactaccagcaaaaatttatcactcactgaagcctctgatgatcattagcaataaggtatttttatcattttcttaatttttaatttttgtgggtacatattaataggaggtgtatatatttatgga

SEQ ID NO: 120541 - DNA, 620 bp, Homo sapiens
  misc_feature (1)...(620): n = A,T,C or G
cagcaaaaatggtggctggcctctctcactgggaactccatccagggaagtgcagagctgctactagcccaagagcccagatggggagtggctggagacctcagccagtgggccttatcctgtgaaatacagtaaagacgaggcctgcagtctgtaactgctcagccccctgtacttggcccctttcctggggaagtgtgggggaacttgacctcctcaatgaccagagctgcagctgctaactccaggatgcctgaggaatcaaggctccaagagttgggacttcatgtgtgcctgagtaccgtctgctcagactccgcatgggtctctgtcagtctgcaggccctggtgaggtgggctcacagggggatcaccttgagtccagggttgcaaaggcccacggcagaagtgttggtcacaaggaattctcgcactctcrccatttcaccaggtaaggaagcctcccctggctccgtgccacccttgagggaaccaaaccacttgttcttctccattctgagttgtttccttgatgaatcccaatgtgacctcgatgttccagctgaagatctagtaattacaccccactcttttnnnnnnnnnnnnnnnnnnnnnnnnnn

SEQ ID NO: 120542 - DNA, 551 bp, Homo sapiens
gaattctgttctatatctaccattacgtgctcttgtttgaagcaatcacttccaagccttctctacagtctgcctttatcttctccaggagggagaaaatataggggtagagtaggcaagcctctctttttaggcagtgttttgcaaataccttttacctaacacagaaggttaagtgaaacagatttgatgagaaacaaatgatgacatgaatcccaccctctgcatgttgtgaaggttccttagaaataagagtgcagcagcttcctccatattccttcataaaaacaaatccraagtatttcacaattacttccctgggaaaatgctcctaccccgactcccaaacccaacattttcaattctgccaagtcagagaattatttttaatcttcagagtaatttcctttttatcagctgggtcagttatacaattacaatgattgactagtttaaaagttgaaacatgaacattttctttcattagcaattattgataaacaactgccatctcattaccataataaatttcttagtcctgtgtctctgga

SEQ ID NO: 120543 - DNA, 630 bp, Homo sapiens
gccaggaatgaaaaattaaaaagtaaactgagtttctttttttttttatccccaaaatggtggattaggtgtttgtagcctctcatcaaatctttgtgactgttttgctatttccaaatgccacaaaagagcaaaatagagctcaagaatcaactctttgagctttaattccaaaaggaaaatgggaatacaccaaaatcatgatggtcacaccagatcccaaggaggagaatgtgggcaaacagcccctgtgacagtgtatagccaataaaagtgagtgaagtctgagtatgtgagagagcttggaatgcgtgcctcggtgtggagcagaaagtgggcctctacaccacaatcacygtcaagagaaggtggggcagctcaggcgccaaaaaagacacatcaggagagggaggagaatccctccctccataactcacctttccactggggatccaagcaactcaggctaaaggagagcactttgattttcccaagccctggagctaacatggggagaggcttggagactctgggagggagagacactcggaaaagcttctggcattttcccagacccaaggccaagagaaggatgccattcttaatccaggggcacatgaagtcaatcat

SEQ ID NO: 120544 - DNA, 679 bp, Homo sapiens
ctatgcttataacagacaaaaaagaccttatgttgaaaactttaaccagagacaaagaaaataattatataatgataaagaagttaattcattaagaagatacagtgatgataaatatacatgcattcaawgttggagcacctaaatatataaagcaaatattatcagaacttgaaggagaaattgacagcagtacaataataataaatgatttcaatacctcattttcaataatgtatagatatcatacaaaaacaaggatatattggacttggacaacagtttagaccaaatgaacgtaacagacatatatgcatgcaacattttatccaagagcagcagaatacacatttctcacaggagtacatggaacattccccaggataataatatgttaggccacaaaataagtcttaaaatttttaagaagattggaataatatcaagtatctttttcaaacataatggcatgaaactataaatcaataatagaaggaaactggaaaacttacaaatatatgcaaatcaaacaatactctcttgaacaaccaataggttaaaggagaaatataaacaccttcagacataccaaaatggaaacatacataccaaaacttatgagatgtagcaaaagcagtatgaagaggaaatttcatcatagaaaacacattaaaaaaaa

SEQ ID NO: 120545 - DNA, 679 bp, Homo sapiens
ctatgcttataacagacaaaaaagaccttatgttgaaaactttaaccagagacaaagaaaataattatataatgataaagaagttaattcattaagaagatacagtgatgataaatatacatgcattcaatgttggagcacctaaatatataaagcaaatattatcagaacttgaaggagaaattgacagcagyacaataataataaatgatttcaatacctcattttcaataatgtatagatatcatacaaaaacaaggatatattggacttggacaacagtttagaccaaatgaacgtaacagacatatatgcatgcaacattttatccaagagcagcagaatacacatttctcacaggagtacatggaacattccccaggataataatatgttaggccacaaaataagtcttaaaatttttaagaagattggaataatatcaagtatctttttcaaacataatggcatgaaactataaatcaataatagaaggaaactggaaaacttacaaatatatgcaaatcaaacaatactctcttgaacaaccaataggttaaaggagaaatataaacaccttcagacataccaaaatggaaacatacataccaaaacttatgagatgtagcaaaagcagtatgaagaggaaatttcatcatagaaaacacattaaaaaaaa

SEQ ID NO: 120546 - DNA, 679 bp, Homo sapiens
ctatgcttataacagacaaaaaagaccttatgttgaaaactttaaccagagacaaagaaaataattatataatgataaagaagttaattcattaagaagatacagtgatgataaatatacatgcattcaatgttggagcacctaaatatataaagcaaatattatcagaacttgaaggagaaattgacagcagtacaataataataaatgatttcaatacctcattttcaataaygtatagatatcatacaaaaacaaggatatattggacttggacaacagtttagaccaaatgaacgtaacagacatatatgcatgcaacattttatccaagagcagcagaatacacatttctcacaggagtacatggaacattccccaggataataatatgttaggccacaaaataagtcttaaaatttttaagaagattggaataatatcaagtatctttttcaaacataatggcatgaaactataaatcaataatagaaggaaactggaaaacttacaaatatatgcaaatcaaacaatactctcttgaacaaccaataggttaaaggagaaatataaacaccttcagacataccaaaatggaaacatacataccaaaacttatgagatgtagcaaaagcagtatgaagaggaaatttcatcatagaaaacacattaaaaaaaa

SEQ ID NO: 120547 - DNA, 679 bp, Homo sapiens
ctatgcttataacagacaaaaaagaccttatgttgaaaactttaaccagagacaaagaaaataattatataatgataaagaagttaattcattaagaagatacagtgatgataaatatacatgcattcaatgttggagcacctaaatatataaagcaaatattatcagaacttgaaggagaaattgacagcagtacaataataataaatgatttcaatacctcattttcaataatgtatagatatcatacaaaaacaaggatatattggacttggacaacagtttagaccaaatgaacgtaacagacatatatgcatgcaacattttatccaagagcagcagaatacacatttctcacaggagtacatggaacattccccaggataataatatgttaggccacaaaataagtcttaaaatttttaagaagattggaataatatcaagtatctttttcaaacataatggcatgaaactataaatcaataatagaaggaaactggaaaacttacaaatatawgcaaatcaaacaatactctcttgaacaaccaataggttaaaggagaaatataaacaccttcagacataccaaaatggaaacatacataccaaaacttatgagatgtagcaaaagcagtatgaagaggaaatttcatcatagaaaacacattaaaaaaaa

SEQ ID NO: 120548 - DNA, 564 bp, Homo sapiens
tgagtctcttcattgctgaaactaactttattttccatctatgtattcatagtttattgttaaaatatattttcaaaatcactttacctcatagcttaggaaatattgctccatttgggtcttacattcagtgtagctgatgagaagtctgagatcagtctgtttcatactcttttttgggtcacttgtttctgaaccctggactttttttcatattctcaaattttttgaggctatgtctaggtatgggtcctctgtcattccttctgctackcacttgtgaagacttttacatgaaaacttatgtctgggaagtagcccttcattaaatctctcagaataaagatatctcctgaaaaaattattttattatatttcttctccatttttttctgtactctctgtctgagacacatattaaactgatgggataacgagaattaaacctcagcgtgttctaagttttctctttttattcatctttaccttgatttgttttaaatttctagatttcctaaaatatgttccactcctccagttagttatttcatcaattgtaattta

SEQ ID NO: 120549 - DNA, 616 bp, Homo sapiens
ctgcactccttaccaccatgatccagatatctgggaacctagaacttcctgccctgcatagcctcaagcctatttccaaggaatcactgagcatctctcccagccatatcctgtcattcttcactcctgctatacaactccttagacctgtagaagtctggggtggggtgtttgcaggaatggaggtgggtagagtatagagtgaagatggaggtagttagagtgacatacatgtccaagacctttacctagtaagatggagtctgtagtattaagggaggtgggctgcaggatggagaccttcatctatattttttcacaagtcccacaaatattagaagtgaatcttattggagagaaataacagggatatgaaccacttsaggtaaaacagcttgctttttcattgtatacaaaaatatgaccacaggaatgcattgctagcatctctcagggacttggaaggggtctatgcaattgtgcggttctgaagattacactgcattagcttctcagcaaatctcctgtgttctttgccattaataaaactgtacatcaaaacaatgggcctattggcatctccccatcaatgacatcatcttcctattgaaaagtc

SEQ ID NO: 120550 - DNA, 695 bp, Homo sapiens
ggtctgcagtgtatatgtgcctgctggagtggcatctatgttgtttgtggtgcaggttttcacagagtggttgtggagctggagtctagcttgcagatacatgtggagtgacagcggctctagagtctagggtatgggctcatgtgttgtgctggtggctttaatttccaaggtgtgggtgcttgtagtgtggccacagagctgggactggagcrtgggaatctgtggagcatccatgtttccagggtctgaggtatgtgcagggttggtggaggtggaggccctttttctaggatggcacagcagcagctccttctaggtggcagggagcacagaagcatctcccacttttggggttctgtgacagtgatggctgctggttatctcagtgatgaaagctcttgatgtcctctgaggaggaggctgctagcatctttgttgctgaacactaaggggatctttactgtgaaagctatgaggagtgcatggctgaaatgggttgttgaggtcctcagtggcaaagtcttctagggccttccacatagtaggccgctggggactgtggtggcacatgctgcatgttcatatggaggattatgacaggcaccatcttttttcttcgttcttagacatctccagatatctcaagtatgctaattactgatcttccagcaaatctttttatgcagttactc

SEQ ID NO: 120551 - DNA, 609 bp, Homo sapiens
gtcacctctaaaaccgttaaaatctgtatttatgtagggtattcagttttactttttgctttgtaatgtgtctcgactgtatagagctgtaaaacaaggttccagtgtatccrttggtaatttttattttccatctgttgaagccatttgaaaaagccgatggtctcttactagctcaaactcagagcttggaaaataatagtttataacattcccatggtgctttttaagagtctttttcttccttggtacttaatttttttccttctctgggtgacagttttttacttccagcatagaactgtatgtgtttggctgtctcttttttagatttaatgccacacgctgcattccactgctacaacatgtgtgtacaataaattttcttgtaaactgaggatttcaaggctagaattctgtcaagcttatattttcagagctcttgaaatattttccacttagcaacctctttgcattacttggaaagcttttatggggtttgtcagtcaaaaggatgactctaaccaaagaaagaacaattcagagaatgattttgagaattagtattagcttcacagatgattcaatggctgtaacaacttgcattgg

SEQ ID NO: 120552 - DNA, 506 bp, Homo sapiens
ttcattgtttgggaggctgaagcgggcggatcaagagatcaagaccatcctggctaacacggtgaaaccccgtctctactaaaaatacaaaaaattagccgggcgaggtggcgggcgcctgtagtcccagctactcgggaggctgaggcaggagaatggcgtgaaccccagggggcggagcctgcagtgagccgagattgcgccactgcactccagcctgggcgacagcgagactycgtctcaaaaaaaaaaaaaaaaaaattagctgggtgtgatggcgtgcacctgtagtcccagctactcaggagactgaggcaggagaatcgcttgaatctgggaggtggaggttgtagtgagctgagattgtgccattgcactccagcctgacgaccgagtgaaactccgtgtcaaaaaataaaaaaagagtggttcattgtaataacaaatggatcattaaagagggacacacacaaaaaaatttaagcttgactttagtcaaataaaat

SEQ ID NO: 120553 - DNA, 537 bp, Homo sapiens
ctcatcatcttcccggtgctatatgtcccttgtgtatctaaatatatttttcccaaatagttgttctacttctttgtaaccatcatctatgcttatttgtcacaacctgggaatwctctttctggatgttctctcatgcccatctgtgttttgtattagtgcatcagctttccatcgctgttattgctgacaaagttcaaagaaatttggtttattaatatccatgaaaaactatatgaaaaatgtagcttttctattaaaccagactgtagcctccatggcaatactgccttttgaatttagccattatcttcacatccattttatgagtgtggaaggcatgtcttctctctccagattaaccagtatggtactttgttctgaatcaaagccccagtgaacctctccttcctacctcacattaggcctcactcagttacatgaagaaaaataaagaactaagcctcttataatttttgcagccaagaagacattagtagatggagatttattttcttcccagacattgtgacattt

SEQ ID NO: 120554 - DNA, 604 bp, Homo sapiens
tttatagttttaggttttacaattaagacttcaatccaacttttgttgatttttgtacatggtgtaaggaaagggcccagttttaatactctgcatatagctatccagttattcccgcatcatttattaagaagttcttccctatttcttatttgtgtcaactttgtcaaagagaagaaccaaataaacataatcagaaatgacaaaggggacattaccactgactccacagaaatacaaacaaacaaacaaaaaaaaccccagggactacaattctaccagatgtataaagaagagagtgcgccatttctaccgaaactatccccccacaaaaaaaaaaaaaaaaaaaaaaaaaaaaaagaggaggactccacactaactaattctatgagaccagcttcattttgattccaaaatctgccacagacaccacaaaaaaagaaaatgtcaggccaatatccttgatgaacacgatgccaaaatcctcaacgaaatactmgcaaactgaatttagcacatcaaaaagtgaatccaccacaatcaattaggctgtatttctggcatgcaaggttggatcaacatatgcaaatcaataaatgtgatt

SEQ ID NO: 120555 - DNA, 598 bp, Homo sapiens
aggatcttatttttgtacaataaataaagattaggcttacatttgccactatttatgtggtttatcaagtttgaaataaatagttgggctacaaattattgcagacaatggtttctgagtgattaccaatgtttcaattacaaaatcatctatgattaaggattaatacatgtcttggttttgaagtatttccctctaaaagtttctatagaaaatataaaagaacatctttataaaattaatatcattgaagaatccaaagcagaaataattacatgtttaatgtttaacttagtttcaattgaagtacttcttatcacacagctgggtgctattaggaaagagctcttctctctgagaccattcactctctggtatacaatttgtacaatgttttgaagaatgctgagtgtgaagaactagtttactattcaatcttatcttataagtctctaatactgatttcagaaacaataaaggatgtctttgctggtagacaccatctagtcagattcaycttctccatatctaaccatattgtttatttcaaagtaaaaggccaagtgatatatttagagataatgtaatgaccatcaca

SEQ ID NO: 120556 - DNA, 544 bp, Homo sapiens
actgcaccataattcaaatgatagcttgataactgaagaaaagatcagaaataaaggatgctaagtaattaattagggctttctgtgtaatagggattattatttttttaatccttaataaaacttgttaaaaatttctagcaatttatgtacacctggctactctttaccaatgacttttgtggcaatagagaataaaatcttatcaaagtttaatgctgccaaaaagttggttttgtgattgtcaaagagaccttatagtaatactctatgcatatacttgttcatattttgmattttttaaatattcactctgtcctttggcttttggcttttgatttcttctgttactatatcacacctcattctaagtacttaccactggctttatgtaatggtgtcacaaagatggaaaatgaaaaaaaatgttactttgcagtatgactggatgaattaatgattgacacataaaagtaaacacgtagaataagtataatgcagtatattaacacacacattagttttcactacttaagaaacaatt

SEQ ID NO: 120557 - DNA, 544 bp, Homo sapiens
actgcaccataattcaaatgatagcttgataactgaagaaaagatcagaaataaaggatgctaagtaattaattagggctttctgtgtaatagggattattatttttttaatccttaataaaacttgttaaaaatttctagcaatttatgtacacctggctactctttaccaatgacttttgtggcaatagagaataaaatcttatcaaagtttaatgctgccaaaaagttggttttgtgattgtcaaagagaccttatagtaatactctatgcatatacttgttcatattttgcattttttaaatattcactctgtcctttggcttttggcttttgatttcttctgttactatatcacacctcattctaagtacttaccactggctttatgtaatggtgtcacaaagatggaaaatgaaaaaaaatgttactttgcagtatgactggatgaattaatgattgacacataaaagtaaacacrtagaataagtataatgcagtatattaacacacacattagttttcactacttaagaaacaatt

SEQ ID NO: 120558 - DNA, 579 bp, Homo sapiens
gactatttcttctgaagcttttagttaatattctatacaagaagcatcttatttactttaatttaaatgtttagtttgtctcttccttcttctttgggttctctggttaatctaactggcatctttgatgccaaaacacttttaactccggatttgattgtttggctcattttgtttattaacttttcatcctctctagtaaaccaagtgtaaatttgccatttctcaaattctttcacatttttctagacaatggatggtttgtaattatggcacctgtgcttgtattttaacaaatgctgcagatctctcaggctgtttatatgagaacatatttcygagatttagattaactcttatttttctcctcttcccctctaagtgactacagtttttttgttgttgttgttcttcagaagcttataagaaagctgtcttttgttaatttactcatcactgtgttcactcattgcatattacatgataaccaccatgctaggcattagcacaaaaagtaagacaaagactttaaaccatagaagttcaaatcttgataggacataggatcttaaacatata

SEQ ID NO: 120559 - DNA, 579 bp, Homo sapiens
gactatttcttctgaagcttttagttaatattctatacaagaagcatcttatttactttaatttaaatgtttagtttgtctcttccttcttctttgggttctctggttaatctaactggcatctttgatgccaaaacacttttaactccggatttgattgtttggctcattttgtttattaacttttcatcctctctagtaaaccaagtgtaaatttgccatttctcaaattctttcacatttttctagacaatggatggtttgtaattatggcacctgtgcttgtattttaacaaatgctgcagatctctcaggctgtttatatgagaacatatttctgagatttagattaactcttatttttctcctcttcccctctaagtgactacagtttttttgttgttgttgttcttcagaagcttataagaaagctgtcttttgttaatttactcatcaytgtgttcactcattgcatattacatgataaccaccatgctaggcattagcacaaaaagtaagacaaagactttaaaccatagaagttcaaatcttgataggacataggatcttaaacatata

SEQ ID NO: 120560 - DNA, 539 bp, Homo sapiens
tctttatagctgcattgtctgtgaagctgagtctacttaactgacttgtgcacacaccatactgaaagagatgccagcatacaagaactaaagagcctgtctttgaatgttcatgacaaaacaaaagtagcaagaaagcaacatcggcagaacatacaaaagtagcaaaaaataattgccaatcattctgtaaccttaaaaaaaatttactcattgaaaataaaatgaaaattcatccttaaagttggcataaaaaacagtgctaaaatttagttccccattggaatgaatgctttctcracagggtaacaaatgaaaattggatcagggacacattttcagtgaaaaagacgcactgccagatggcttcttggcaaaggaaaaggaagagttgattaaaccgtcatgtgacgacttcaaattcagctaagtacagcttagcaactttttgttgagaaggagaaaggaggatattcaggttctaggcatgattgtaacattattaaggtttgagatcactttgcagcttcaccggtttt

SEQ ID NO: 120561 - DNA, 458 bp, Homo sapiens
ttctccacacaagcacagccatctccgctgtcatcgtcaccagagtggtgcatttgttaccactgatgaacctacattaacacatcattatcacccaatgtctgtagttgacacgagggttcactctagatgttgtacattctatgaatttttaccaatgtgtaacaacatgtatctaccattaaggcatcaaacagtagtttcactgccmtaaaactcctctgtgctctgcctattcatccctctactccttagcccttggcaaccactctttttactatctctatggttttgccttttccagaatgtaacatagttggaatcatacagtatgtagcctttacagattggcttctttcacttagtaaatgtatttcagattcttccattttatttatttatttatctatttatttatttaggtatccctgggtgggcacaaacctccatttcttttc

SEQ ID NO: 120562 - DNA, 508 bp, Homo sapiens
ggacaatcttatctgcattaatatctgttttatatatattatatatacagataccatatatatatatatatatatctgtatctcatatatacagatagttcttgctttgcctggtgccgtgttaactgaaacaggtgcatattggaaccatgtgtttgttttgtgcggtttaccataaaaccatgcaaagtaaggacacatttcctacatgtacaatatttrgttaataagataccatgaaaaatgaggactatcttcattaattatatactccatctttattctgatccctacacctgaatacatagttttctaccagttatctccactggttttccaaaggtctttttcaaatttatatgtccaaatataactttttcagcctccatcgccagtcctcctggccatattctctatcacaagtaattagttaatcaacagaaaattattagtgtatattattcccaggcactatgctagatactactgatataatggtgatggtatt

SEQ ID NO: 120563 - DNA, 595 bp, Homo sapiens
atttctgcatatagatccagtatatacttagattcatgtgtattttattttttggtgtaattgtacatggtactatgtttttaatttcaaatttcaattgttcattgctggtttaaaggaaagcaattaacttttgcatattaactttggatcctatttgactagttcaggagayttgttgtcaattcttgggtatttgctatagagacaacaatgtcatgtgagaatactgtttttccacagtggttgtactagtttatattcccaccagcagtgtagaagttttcctttttcaccacatccatgccaacatatattattttttaacattttaattatggccattctcacatggtatctcactgtggctttaatatgcatttcctgataaatagtgatggtgagcattttctcatatgtttgttggctatttgtatatcttctgattatgagacagacgtcctgcctgctgtgctatggaggcacggcttgtgggtacatccttttttgagaattttgtatttatgtcctttgcccattttttgatgagaatgtttgtttttttcttgctgatttgtttgagttacttttagat

SEQ ID NO: 120564 - DNA, 546 bp, Homo sapiens
cttgcattgttttccttcattccacagacattgaccacaagagtatgccttaataagtgtcctgtgtgctaaactccatctcaatgtctgatacctgaggaaccaaacttctgacaagrgaaattaaaggaaagagatattgaggaacttacagcttcaaactactgagaaacatcatgcctcatatacaagaagctcaccatagccatgagaataagtaaaatgaagttatatccaggcatatcacaggaaaattaatgagaattaagaacaaagagaagccttaaaactagccagagaaaaaggaaggctaattttaaggaataatagttagacagttaactccacattagaaatagtgtacacccaggaaaatggagtgataacaatcaagaataaagaagatataaggatttttgttagcaaaacaaacaggaagaaaaaataaagaaacaaaaatcaaatagaaaaaaactgagagatcattgggtcagaaaccaatgataaacctctgcatattgtataaattaactagattacttttac

SEQ ID NO: 120565 - DNA, 599 bp, Homo sapiens
tctggattgggaatatctaaattttgtctaaaataattatatttcaaagggctaggaagtcttttatcattggcagataataaatatttttgaaaaacacaggagctgtagtaatagtaaaatagtactaatattttgaactcttttggttaagcaaatgttaaagtaataaaattaaattttattcaggaaaatgaaattgtgccttaatttattggcatctattcttgggkttttttttttttttccgttattttgttgtttgtttgtttttgtttttgtctggagacagggtctctctctgttgctcaggctggagtaaagtggcggcaatcatagctcactgggccatttcctgagctcaagtgattctgctgccttagcctcccaagtagctggggccataggcacataccaccatgtccagcaaatgttttaaattttttttgtagaggtgggggtcttgttttattgcaagagccatcagtcaggttggtcttgcactcctggctataagcaatcctcctaccttgatctcctaaagtgctgagattacaggtatgagccactgtgccagccagcaactattcttaagtcaa

SEQ ID NO: 120566 - DNA, 602 bp, Homo sapiens
ctttatcattttcttgtgaatgagatagattattgattatagaataaattctcttgagaacatttagatgcatccctgccaactcattacaccatcctctcttggattggactccttcatattcttcacttttgagagctcccattgttccaacctcttaatagctcctcaaaatatttaattcacaaacactgccacatttttaatttacagaaagcctgtgaagtttatattattttatcagctttacaaaagaaaaattgaggttgccggtaagtgtcaaaacatacttagggggattccatggcttgcccaaggtcacaaagattcaaatgcagacttctaatttcaggttcaaaattgttttccctaaaaactcagttttgtrtgcgaactatgatctcttaattctctttacctattggaataacacatcagtaatagaaacaatcaggactcccatgaataattttataggcttggatagaaaactctacataaattttaactaaacctcagcaatacccatatgaagtatcattattttcacattagtgtagagaggaataaaacagaaattgaaatcacctagtttgcctgag

SEQ ID NO: 120567 - DNA, 630 bp, Homo sapiens
aaaaaacaaacaaacaaacacttcaatactaattgtctggaccatcgctcttgcattgaaatccaccagtgagctcttatggctggattagtaaattgaaacatatccataacagcatttgagttccgcaagtgccttaggaagccaaagaacagagtcttttaaaatcatttcatctgaatgtggagagtttttgagttcctttgtccagaagcatgttcagggttgattagaattttttcttataggaaaattttgtatttctcagaaacagctaccacaaaacttactaacattacttacataatttcctccatcatctattttcctgctcttccaaactttgtggagaaaaacaaaattgattgtacattcttgagccgtatccccatggagacggttaccaaagcaaaggcaattcttcatagtgtctggtttgatgacagtagcctgctgcctctcttctgtttttccacttgcctatttgctggttccctgcrggcttcgttttagagagacctttgattcattagaaaatgtctcttctttcttgttattgggtatgcccagtactcaaggtcattttttagttcctccaggaatcttaaaaattcaataaaatgttccata

SEQ ID NO: 120568 - DNA, 419 bp, Homo sapiens
gcacaaaatatcaatatttgttgaacaaaggattcaaatgagttaaatgatttaaaaaggaaattaaaaactactgctatatggaataaggagccattaaaatctcctaagattttttttttttttggaagcatgtgaggagtatatttttgggagtatgtcctttttggkaatatgtgaggtcagctctctaaatatacatttattctagagtgttacagacttttaaaaaaatttttttttatttattttttttaaagaatgcattcctttgttcatgagggccatcctcccatcttgttctcatttgcttaaaatttgttttaacctaacattaattaaacatttttggatgtgtgcagaagaggcaaggagacagagaaaggggacttaaacccgtggagacagcggcaagaaag

SEQ ID NO: 120569 - DNA, 419 bp, Homo sapiens
gcacaaaatatcaatatttgttgaacaaaggattcaaatgagttaaatgatttaaaaaggaaattaaaaactactgctatatggaataaggagccattaaaatctcctaagattttttttttttttggaagcatgtgaggagtatatttttgggagtatgtcctttttgggaatatgtgaggtcagctctctaaatatacatttattctagagtgttacagacttttaaaaaaatttttwtttatttattttttttaaagaatgcattcctttgttcatgagggccatcctcccatcttgttctcatttgcttaaaatttgttttaacctaacattaattaaacatttttggatgtgtgcagaagaggcaaggagacagagaaaggggacttaaacccgtggagacagcggcaagaaag

SEQ ID NO: 120570 - DNA, 443 bp, Homo sapiens
aaccccaaaacttagaatagaacctggcacaaaatatcaatatttgttgaacaaaggattcaaatgagttaaatgatttaaaaaggaaattaaaaactactgctatatggaataaggagccattaaaatctcctaagattttttttttttttggaagcatgtgaggagtatatttttgggagtatgtcctttttgggaatatgtgaggtcagctctctaaatatacatttattctagagtgttacagacttttaaaaaaatttttttttatttattttttttaaagaatgcattcctttgttcatgagggccatcctcccatcttgttctcatttgcttaaaatttgttttaacctaacattaattaaacatttttgratgtgtgcagaagaggcaaggagacagagaaaggggacttaaacccgtggagacagcggcaagaa

SEQ ID NO: 120571 - DNA, 644 bp, Homo sapiens
aggagccaataactccctttcctctaacctataaagttcatcaccctgagctaatttactttctaaatatatctttggttcatccatttctttcatttccattgagagtaacttttctcctctaagctgtcatttgtctctcccttggaatgatgtcattcagtttgccaattagcaatcaaatgattactctcaaaattattgagcattctctttataaaatacaaatataaacatgacacttcactgattcaaaacaaacagaaaacattctccattgttcttaaagaytgaaatccttaatgttgcctaaaagtaaaatatccataaaatgtattgtcaaaaccagtacacttttaagaggagtgtgtgcgtgcatgagtgtgtgtgtgtttgtgtgtgtgtgtgtgtgtgtgtgtgtgtgtgtggtggggaaatattaaaaattattccaaggcaaatgtaaacagggactgtccctgtttacatttgcataccctgttgctacttgcataccctgttgataagtcctttgttgcttcaccctgcctgcctctcaaaattcatctcatattattttcctttcccttttgactttccagataaattggactttatatgatgctatcttctatgtgcctctt

SEQ ID NO: 120572 - DNA, 509 bp, Homo sapiens
ttcttcttaagcagtggatacagtcacagatttgaaatcaaggagactcaagtcttcccttttctatttaccatctctaaactagagtttcttataccgatgcctactccctgggtaatcaggtatgcaaagagctcaatacatttcctggcatatattaggtgttcaataagaggtggatttttatagtagaaggctctgggatcaaggatgtataactcttcacaggaaggaagaatggaaagatgagggatggaaggacggaaggaaggaaggargtctggtttattaaaaatgaagccacagttcagaaacgtttacagttctgtagtactgcctcagacttttcgcagcattctttgtgccaccactctagataactttaataaaccagtcagggaaaatgcctttggcagttgtataaaaaatatttttgtctattttgtggagatgatttttgccaaattgagttggtttgtaaatacatagcttagtactaccaaggcatg

SEQ ID NO: 120573 - DNA, 607 bp, Homo sapiens
gtgatataggcttcactgaatgactcagggaaggctccctctttctttatcttgtggaatagtgtctatagaattggtaccaattcttctgtgagtgtctggtagaattctgctgtgactccatctggtcctggacttttctgtgttggtaacttttttatcacartttcaatctcactgcttgttattggtctcttcatggtatctaattcttcctgatttaaactagaagtgtggtatctttccaggaatttatccacctcttctacgttttccagtttatacacataaaggtgcattggcatacaagggacacacctcaatataataaaagccatccatgacaaacccacagccattgtaatactgaatgtggaaaagttgaaatcattccccctgagaactagaacaagacaaggatgcccactctaaccactcctcttcaaaattgtactggaaatccaagccaaagcaatcccacaagagaaagaaataaggggcatccaaattggtaaagaggaagtcaaactgttgctgtttgctgatatgattgttaacctggaaaaccctaaagacttttccagaaagctcctagaactgataaatt

SEQ ID NO: 120574 - DNA, 637 bp, Homo sapiens
tgtcattatcatttttttcaagaaatttttatatttccttcttaatttctcgatttacccactggtcattcaggaatatgttgtttaattttcatgtatttgaatagtttccaaaattcctctttttaatttctagttttattccactgtggtcagagaagacacttcatgttatttcaattttttgaatgttttaagacttgttttgtgacctaacacatgatacatgatgtatctttgagaatgatcygtgtgctgagaggagaatgtatattctgtagcttttggatgaaatgttctgtaaatatgtattagaatcacttgttctgtagtgcacattaagtctgatgcttcttagatgattttctgtctgtaaaatctgtccaatgctgaaagtagggtgttgaagtctccagctattattgtactggtacctgtgttagtctgttttcatgtgctgataaagacataccccagactgggtaatgtataaagaaaaagaggtttaatagactcacagctacacatggctggggaggggcctcacaatcatggcagaaggttaaaggcacattttatatggctgcagaaaagggagagaactagtgcagggaaactccccattataaaaccataa

SEQ ID NO: 120575 - DNA, 655 bp, Homo sapiens
gggtgtcactcaggattaaatgattaagtgaagggcactgagaaagaaagatgtaaagataattaaaataatatcctattatgaaagtaaaagtcaaagagaattcaactagtaaaccccaacttagtgcctttaaatgttctggatcctctaaattcctttccacattgctgttaatctcacattctcttttatcatgattatttcctaacttmtaggtctacttctctttggctgtacacctacttcttaaacctgacttgttattcagctcagtgtttttgatgattccagcatctgcaaggcacttattaggcaattggcacacacatagaaaatcaattttagactatttttaaaacccttttagaaacaataaagcaatattgtgagctaatactatcactaataatagtttaatgtgatgaagagtaagttttttttcagcaaatttttcagagcaattatgtatgatgtaatcctgaatagcttggagtatagatcagattttatatccaggcagtttcagtttattttcttactctttatatttgctaattatgaaacttcaaatttacatacattatcatcagtggcaacaatggcccaaacatgggcttataaattatggaaagatctctccataacatactac

SEQ ID NO: 120576 - DNA, 655 bp, Homo sapiens
gggtgtcactcaggattaaatgattaagtgaagggcactgagaaagaaagatgtaaagataattaaaataatatcctattatgaaagtaaaagtcaaagagaattcaactagtaaaccccaacttagtgcctttaaatgttctggatcctctaaattcctttccacattgctgttaatctcacattctcttttatcatgattatttcctaacttataggtctacttctctttggctgtacacctacttcttaaacctgacttgttattcagctcagtgtttttgatgattccagcatctgcaaggcacttattaggcaattggcacacacatagaaaatcaattttagaytatttttaaaacccttttagaaacaataaagcaatattgtgagctaatactatcactaataatagtttaatgtgatgaagagtaagttttttttcagcaaatttttcagagcaattatgtatgatgtaatcctgaatagcttggagtatagatcagattttatatccaggcagtttcagtttattttcttactctttatatttgctaattatgaaacttcaaatttacatacattatcatcagtggcaacaatggcccaaacatgggcttataaattatggaaagatctctccataacatactac

SEQ ID NO: 120577 - DNA, 655 bp, Homo sapiens
gggtgtcactcaggattaaatgattaagtgaagggcactgagaaagaaagatgtaaagataattaaaataatatcctattatgaaagtaaaagtcaaagagaattcaactagtaaaccccaacttagtgcctttaaatgttctggatcctctaaattcctttccacattgctgttaatctcacattctcttttatcatgattatttcctaacttataggtctacttctctttggctgtacacctacttcttaaacctgacttgttattcagctcagtgtttttgatgattccagcatctgcaaggcacttattaggcaattggcacacacatagaaaatcaattttagactatttttaaaacccttttagaaacaataragcaatattgtgagctaatactatcactaataatagtttaatgtgatgaagagtaagttttttttcagcaaatttttcagagcaattatgtatgatgtaatcctgaatagcttggagtatagatcagattttatatccaggcagtttcagtttattttcttactctttatatttgctaattatgaaacttcaaatttacatacattatcatcagtggcaacaatggcccaaacatgggcttataaattatggaaagatctctccataacatactac

SEQ ID NO: 120578 - DNA, 655 bp, Homo sapiens
gggtgtcactcaggattaaatgattaagtgaagggcactgagaaagaaagatgtaaagataattaaaataatatcctattatgaaagtaaaagtcaaagagaattcaactagtaaaccccaacttagtgcctttaaatgttctggatcctctaaattcctttccacattgctgttaatctcacattctcttttatcatgattatttcctaacttataggtctacttctctttggctgtacacctacttcttaaacctgacttgttattcagctcagtgtttttgatgattccagcatctgcaaggcacttattaggcaattggcacacacatagaaaatcaattttagactatttttaaaacccttttagaaacaataaagcaatattgtgagckaatactatcactaataatagtttaatgtgatgaagagtaagttttttttcagcaaatttttcagagcaattatgtatgatgtaatcctgaatagcttggagtatagatcagattttatatccaggcagtttcagtttattttcttactctttatatttgctaattatgaaacttcaaatttacatacattatcatcagtggcaacaatggcccaaacatgggcttataaattatggaaagatctctccataacatactac

SEQ ID NO: 120579 - DNA, 566 bp, Homo sapiens
ttgtaatctataacaagctttagatattgtttgtaaatgtgactaatatattattgttttgtttctccaatgagaaatgaaagtcataaaacacaagggagtgtcaactcttaactatcaaaycattttagcttttggtatcacaatgtgattattacaaattctgacttttttcaggtcttctaaatgtgacattacataaaagtaacatggtttaaaacattaccatttttatgaaaaaattttaaatcattttaaaaagtcatgtttttgaaaacttatgcctacacagaaacttgcacctgaatgtttatagcagacttattcataattgccaaaacctggacacataattgccaagatatccttcagtaggtgaatggataaataaactgtggtacatccagacaatggaatatcattcagtactaaagagaaattagccatcttgccatgaaaagacatgtaggaaagttaaatgtatattaataaataaaagaagccaataagaaaaagctacatactgcgtgattttaactatatgacattctggaaaaggcaaaact

SEQ ID NO: 120580 - DNA, 566 bp, Homo sapiens
ttgtaatctataacaagctttagatattgtttgtaaatgtgactaatatattattgttttgtttctccaatgagaaatgaaagtcataaaacacaagggagtgtcaactcttaactatcaaaccattttagyttttggtatcacaatgtgattattacaaattctgacttttttcaggtcttctaaatgtgacattacataaaagtaacatggtttaaaacattaccatttttatgaaaaaattttaaatcattttaaaaagtcatgtttttgaaaacttatgcctacacagaaacttgcacctgaatgtttatagcagacttattcataattgccaaaacctggacacataattgccaagatatccttcagtaggtgaatggataaataaactgtggtacatccagacaatggaatatcattcagtactaaagagaaattagccatcttgccatgaaaagacatgtaggaaagttaaatgtatattaataaataaaagaagccaataagaaaaagctacatactgcgtgattttaactatatgacattctggaaaaggcaaaact

SEQ ID NO: 120581 - DNA, 566 bp, Homo sapiens
ttgtaatctataacaagctttagatattgtttgtaaatgtgactaatatattattgttttgtttctccaatgagaaatgaaagtcataaaacacaagggagtgtcaactcttaactatcaaaccattttagcttttggtatcacaatgtgattattacaaattctgacttttttcaggtcttctaaatgtgacattacataaaagtaacatggtttaaaacattaccatttttatgaaaaaattttaaatcattttaaaaagtcaygtttttgaaaacttatgcctacacagaaacttgcacctgaatgtttatagcagacttattcataattgccaaaacctggacacataattgccaagatatccttcagtaggtgaatggataaataaactgtggtacatccagacaatggaatatcattcagtactaaagagaaattagccatcttgccatgaaaagacatgtaggaaagttaaatgtatattaataaataaaagaagccaataagaaaaagctacatactgcgtgattttaactatatgacattctggaaaaggcaaaact

SEQ ID NO: 120582 - DNA, 606 bp, Homo sapiens
caactcttaactatcaaaccattttagcttttggtatcacaatgtgattattacaaattctgacttttttcaggtcttctaaatgtgacattacataaaagtaacatggtttaaaacattaccatttttatgaaaaaattttaaatcattttaaaaagtcatgtttttgaaaacttatgcctacacagaaacttgcacctgaatgtttatagcagacttattcataattgccaaaacctggacacataattgccaagatatccttcagtaggtgaatggataaataaactgtggtacatccagacaatggaatatcattcagtactaaagagaaattagccatcttgccatgaaaagacatgtaggaaagttaaatgyatattaataaataaaagaagccaataagaaaaagctacatactgcgtgattttaactatatgacattctggaaaaggcaaaactatggagacagtaaaaagatcagtggttgtcggggattagagggaagggaggaatgaatagacagagcacagagggattttatagcagtgaaactgtatgataccataatggtgaatatacatcactacacatttgtccaaaccc

SEQ ID NO: 120583 - DNA, 561 bp, Homo sapiens
aaatattgttaactaaatagattgaactaaaattagcctcttaggacttaaagtgcttccacataaagtccaagagctagaaacgagaatgatgttcyctacaaccaaatattgccttaattccaaatttagcttctgccacttgatctaatgttacatcaaggcacatgagccctctgcatgtgaagagcttacaccaatttgaagcaaatgcatcacatgagcaagaatgcaaattccaatagtaataatgtttctttcactatttatttcattccttatttttcatacttgttgccactttgtgaacctgcctccaatcactttacactggcttattttaaaagccttttaactgttctccttactgtcacccttttttcctaattccactgctcctacaaatggttgctagaaaaatcttccccaaacacagcttttatcacaggctcaaaaacctatcacaattctctaatgcctggtctataagactcttaaagtctttcccccttctcaccagcctagtctctccctgaggcagtttctctattaagaagaaac

SEQ ID NO: 120584 - DNA, 561 bp, Homo sapiens
aaatattgttaactaaatagattgaactaaaattagcctcttaggacttaaagtgcttccacataaagtccaagagctagaaacgagaatgatgttccctacaaccaaatattgccttaattccaaatttagcttctgccacttgatctaatgttacatcaaggcayatgagccctctgcatgtgaagagcttacaccaatttgaagcaaatgcatcacatgagcaagaatgcaaattccaatagtaataatgtttctttcactatttatttcattccttatttttcatacttgttgccactttgtgaacctgcctccaatcactttacactggcttattttaaaagccttttaactgttctccttactgtcacccttttttcctaattccactgctcctacaaatggttgctagaaaaatcttccccaaacacagcttttatcacaggctcaaaaacctatcacaattctctaatgcctggtctataagactcttaaagtctttcccccttctcaccagcctagtctctccctgaggcagtttctctattaagaagaaac

SEQ ID NO: 120585 - DNA, 561 bp, Homo sapiens
aaatattgttaactaaatagattgaactaaaattagcctcttaggacttaaagtgcttccacataaagtccaagagctagaaacgagaatgatgttccctacaaccaaatattgccttaattccaaatttagcttctgccacttgatctaatgttacatcaaggcacatgagccctctgcatgtgaagagcttacaccaatttgaagcaaatgcatcacatgrgcaagaatgcaaattccaatagtaataatgtttctttcactatttatttcattccttatttttcatacttgttgccactttgtgaacctgcctccaatcactttacactggcttattttaaaagccttttaactgttctccttactgtcacccttttttcctaattccactgctcctacaaatggttgctagaaaaatcttccccaaacacagcttttatcacaggctcaaaaacctatcacaattctctaatgcctggtctataagactcttaaagtctttcccccttctcaccagcctagtctctccctgaggcagtttctctattaagaagaaac

SEQ ID NO: 120586 - DNA, 561 bp, Homo sapiens
aaatattgttaactaaatagattgaactaaaattagcctcttaggacttaaagtgcttccacataaagtccaagagctagaaacgagaatgatgttccctacaaccaaatattgccttaattccaaatttagcttctgccacttgatctaatgttacatcaaggcacatgagccctctgcatgtgaagagcttacaccaatttgaagcaaatgcatcacatgagcaagaatgcaaattccaatagtaataatgtttctttcactatttatttcattccttatttttcatacttgttgccactttgtgaacctgcctccaatcactttacactggcttattttaaaagccttttaactgttctccttactgtcacccttttttcctaattccactgytcctacaaatggttgctagaaaaatcttccccaaacacagcttttatcacaggctcaaaaacctatcacaattctctaatgcctggtctataagactcttaaagtctttcccccttctcaccagcctagtctctccctgaggcagtttctctattaagaagaaac

SEQ ID NO: 120587 - DNA, 581 bp, Homo sapiens
tgaagcaggggctgcattttgatattctttgtggcacttggcacagtatcatttctgtgaaggtggcttgtaagtagcctggggtgattatggtggtgtaattttcatcacaaccacagataacccaggtaactgtgcaggtacaatgatgttcagcttaacttaagtggctttgttccaaacaagggcctctattgtaaaaacamagcaggtgttaaaacatagagatattgaagataggggtcactttacatactaacatgcactgaaaagtaaatctgagctgccccacattattgccaggaattactgtatacttaacatgaatccattaagtacacaactggacaaatgatgaaattttatgttagtaaaattcctgacatatttcacacctcttactctattaaattacgcttttttaacaaagaaaagcttgcctacttctacacattttcaattttttctcctatgtatttcatattaaaatttcaaaataatttgatcagagatccagtgcacaaaggtgcctaagtggataataatcaccaaaaacacttgcaatggctgcagtagtggga

SEQ ID NO: 120588 - DNA, 604 bp, Homo sapiens
cactctcagaatgcacagcagtgatgtggattacgcgcctgtgaaacatgagccactattttttttgtttattattattttttcttagacagagtctcactctgttgcctaggctggagtgcagtggcatgatcttggctcactttaacctctgtctgccaggttcaagcgattctcctgcctcagcctcctgagtatctgggactacaggtgcctgccaccatgcccagcttatttttgtatttttagtagagacggggttttgccatgttggccagggtggtctcgaactcctgacttcaggtgatccatccacctcggcctcccaaactgctgggattacaggcatgagccaacgcgcccagccgtgagctactgtcttattcactctggattctctctccttgtgctcccttcagagtccatttttcagatatcacccaaaatatgtacttctgttctatcctaaaccagagacttcaaacaactatttrcgaaaatattaaattaatagaagttaatatacgtatacctggtgaatatactgtctattcttgttttgctttgtcttgtttttttagatagagtctctctctgtcaccca

SEQ ID NO: 120589 - DNA, 604 bp, Homo sapiens
cactctcagaatgcacagcagtgatgtggattacgcgcctgtgaaacatgagccactattttttttgtttattattattttttcttagacagagtctcactctgttgcctaggctggagtgcagtggcatgatcttggctcactttaacctctgtctgccaggttcaagcgattctcctgcctcagcctcctgagtatctgggactacaggtgcctgccaccatgcccagcttatttttgtatttttagtagagacggggttttgccatgttggccagggtggtctcgaactcctgacttcaggtgatccatccacctcggcctcccaaactgctgggattacaggcatgagccaacgcgcccagccgtgagctactgtcttattcactctggattctctctccttgtgctcccttcagagtccatttttcagatatcacccaaaatatgtacttctgttctatcctaaaccagagacttcaaacaactatttgcgaaaatattaaaytaatagaagttaatatacgtatacctggtgaatatactgtctattcttgttttgctttgtcttgtttttttagatagagtctctctctgtcaccca

SEQ ID NO: 120590 - DNA, 546 bp, Homo sapiens
taagcaataaatatactctttattatggtctgaatgcaaaattcatatattgtagttcaaaactccatgatgggtattagcaggtgggggtattagcaggtggggtcttatgggaagtgattaagtcacaagggcaggcagagttctcatgaatggaatgagtgcctttttatagtaggccagagagtgacccctctccacttctcccatatgaggatgcaacagggagttggcaatctgcacagaaaaggaccctcrccagaggaccctccctagaaaagcctcttcagcagaacctgactacgctggcaacctgagtttggacttcccagcttccagaactgtgagacattcatttttgttattgttgataagctatccacctctaaggaattttgctatacgagcccaaatagacttagataacccttctatttcctctgcatttttctcagatatagacacctattattcatatcgctagtgtttgagaacaaatatagtgcctttttattttttcctcaaaagaaagcctttccaattttt

SEQ ID NO: 120591 - DNA, 567 bp, Homo sapiens
agttacttaacaatgatgtgaactttgacatacttaaactctttcggtctcaaatttattgttcagtacaatggttaacaataaggtggttataactattttataatcatcctataacaattgagtgactgtaaaaatgaaataagataaactttcattaaagaacctagcatagtataatgacaggtacataaaagtcctcaagttttaattcttatccaaattcccgtaactctatttccaaggcctcaattttctcacgaaaggcctcttactttctgaaattctatgatttagtttttagttcaattaatattttagcaaatgagtaagttaatgaattaatatatttcctttagagtttactttctaatgcacatgctgttatggtcctatatgaggaaatgtcttttaatgtgcaatattaaaattcacrgtcacataaaatgaataaagttttaatgtagaatataacatttttgaattctagaattcaacttaccagagaaagaaaatcttagaaaacctggttaaaatggcttttgataagcacattgaatataaaaa

SEQ ID NO: 120592 - DNA, 567 bp, Homo sapiens
atgtggcacatatactccatggaatactatgcagccataaaaaaggatgagttaatgtccttcgcagggacatggatgaaactggaaaccatcattctcagcagagtaacacaagaagagaaaaccaaacactgcattgttgggagcaggcccccaaaaatctggccataaattggccccaaaactggccataaacaaaatctctgcagcactgtaacatgttgataatggccctaatgcccaagctggaaggttgtgggtttacaggaatgagggcaaagaacacctggcccgcccagggtggaaaaccacttaaagacattcttaagccacaaacaatagtatgagcaatctatgccttaaagacatgytcctgctgcagttaacaagcccaacctattcctttaattcggcccaccccttcgtttcccataagggatactttcagttaatttaatatctatagaaacagtgctaatgacttgttagctgtttataaatatgtgggtaactctctgttcagtctccaccccaaatcaacagaatatacattcttctcagcaccac

SEQ ID NO: 120593 - DNA, 567 bp, Homo sapiens
atgtggcacatatactccatggaatactatgcagccataaaaaaggatgagttaatgtccttcgcagggacatggatgaaactggaaaccatcattctcagcagagtaacacaagaagagaaaaccaaacactgcattgttgggagcaggcccccaaaaatctggccataaattggccccaaaactggccataaacaaaatctctgcagcactgtaacatgttgataatggccctaatgcccaagctggaaggttgtgggtttacaggaatgagggcaaagaacacctggcccgcccagggtggaaaaccacttaaagacattcttaagccacaaacaatagtatgagcaatctatgccttaaagacatgttyctgctgcagttaacaagcccaacctattcctttaattcggcccaccccttcgtttcccataagggatactttcagttaatttaatatctatagaaacagtgctaatgacttgttagctgtttataaatatgtgggtaactctctgttcagtctccaccccaaatcaacagaatatacattcttctcagcaccac

SEQ ID NO: 120594 - DNA, 516 bp, Homo sapiens
cctgtaagcctcaggcttcttaggcacagactttctatcaacaaggttaggtcctccttgctgaggatgtgattaggtaagagattctggggctggtttccttgtcattctggcttaaatattacttgatttacctcagtatttcataatgtaaaacataatttattgttcaatttamtttagaatttcttttttcacattgcaagattttcacattacttggaattcagtgactctttcttgacaaaagccaagtctttttccttggcaaaaaccaagtatttttcccctagggattgttctccagaagacaagtgttcatgtgaatttggtccaaatattctggttcatctgtaggaagcttacggtctttttaattgaaaatattgatgatgtaaaagtcatagactatgtctacacatataaatggaagactttttttcctgatagaataacctatgagatagataggttaaacattaaaatttctgcccaagctacagtatgtcttcaact

SEQ ID NO: 120595 - DNA, 565 bp, Homo sapiens
accattttcatttaaaagacatttcatgagaagccctttaacccacacatttgctaattccaaaattatcattttctttttcaaattcattcttattcacagttcctgattttcaagcacgatggtaaagtctctctgactgagaattcattcggatctttctttgtattgctccaaattagtaaggatcattagtcttaagactgggagaatattcaaaaatgaaattctgggttccagacctcaccagaaattcctgaaatcactgtctggaaaagtggggttatttttaagactgctgcatctgttgcttccttctcaaggccagggtgttgaaacgtgctccaggcagggagatctgccttttataattgaggttctctggaggcccacaygattcaaacattccgaatagtttgtttcatctatttttcagaattatatattgaaatataaactagaaatcatcaacaatttttgctgctaaaatactttccccttttctctctggcttcccctggttgactttgtagccatgtagtaaatgtgatattttctctttcaa

SEQ ID NO: 120596 - DNA, 565 bp, Homo sapiens
accattttcatttaaaagacatttcatgagaagccctttaacccacacatttgctaattccaaaattatcattttctttttcaaattcattcttattcacagttcctgattttcaagcacgatggtaaagtctctctgactgagaattcattcggatctttctttgtattgctccaaattagtaaggatcattagtcttaagactgggagaatattcaaaaatgaaattctgggttccagacctcaccagaaattcctgaaatcactgtctggaaaagtggggttatttttaagactgctgcatctgttgcttccttctcaaggccagggtgttgaaacgtgctccaggcagggagatctgccttttataattgaggttctctggaggcccacatgattcaaacattccgaatagtttgtttcatctatttttcagaattatatattgaaatataaactagaaaycatcaacaatttttgctgctaaaatactttccccttttctctctggcttcccctggttgactttgtagccatgtagtaaatgtgatattttctctttcaa

SEQ ID NO: 120597 - DNA, 615 bp, Homo sapiens
ctcattttatccacgttcaaaaatcctaaataaatcactgacttttgatgggaaatatttcttggggctgtctgttaccttggccattccgcaaagtgttgttgctggtggataaagtaagagggacgttcggtctggtagaattactaggagaggctataccctcccaaccaagtagctattagctatcgaatcgtgtttttgkaaacaaatcatggaagtaaagggggagacggatttcaggagacaggaaaaacatccatgcacgtgaatcttcaacatcatgataccccacggtcagtccgtacctggagtagctccacatctgctttatggcacatttgcttcagatcctcatacattcctcttaaaagctccctggaatgttccattctggctttgctttcattgagttgctgaaaaatatcctcgccctcctttcgcagcctctccaagtgatgttgctcttcttcacggagaaatgcaagcatcttctgatattcagctctgattgcttctatccttaaactcacataatcctgcagtgacaattagtcaaaatagaaatgttttatccaccttctcttgaatttcactgattcctcttagcattct

SEQ ID NO: 120598 - DNA, 615 bp, Homo sapiens
ctcattttatccacgttcaaaaatcctaaataaatcactgacttttgatgggaaatatttcttggggctgtctgttaccttggccattccgcaaagtgttgttgctggtggataaagtaagagggacgttcggtctggtagaattactaggagaggctataccctcccaaccaagtagctattagctatcgaatcgtgtttttggaaacaaatcatggaagtaaagggggagacggatttcaggagacaggaaaaacatccatgcacgtgaatcttcaacatcatgataccccacggtcagtccgtacctggagtagctccacatctgctttatggcacatttgcttcagatcctcatacattcctcttaaaagctccctggaatgttccattctggctttgctttcattgagttgctgaaaaatrtcctcgccctcctttcgcagcctctccaagtgatgttgctcttcttcacggagaaatgcaagcatcttctgatattcagctctgattgcttctatccttaaactcacataatcctgcagtgacaattagtcaaaatagaaatgttttatccaccttctcttgaatttcactgattcctcttagcattct

SEQ ID NO: 120599 - DNA, 655 bp, Homo sapiens
tatattcatgatgcatacatatctattgcagcaaacactagatatctaaaatttttcaaaaatatattaaacacttttggaacacacaaaataacaattaaaaacctcatgtcataaaatgaatagcaataatatgagttaaaaataagatcattaagtaagtttagacagttagatatttttgtcacggtaatttactattttaaaggaagagagaaataattttctccataaacgttgcactcaccccaaggttctatgaatgtttctggcagtgattcttccaagagaaaattcttttaagtactccccaagatcaggacctcgttccctgcagagttgactttcagaggtcacctgaatgcagttaactctaagtgctgtcctcctctggagaaatatgagcttgtctcttctacatccttttatgtgaamctttgaagaccacacccacctctttagtgatatttagggtattaagaaaggtggagacagagatgattagatttctgcaatatttagtacacgccttttcatcactgattaaattagcatcacactatcattgtaaaaaccactgcctgaatgaggcatatctatcatcagtcttatcagagtaaacgtatgctagaaattaactaaaattgattaatac

SEQ ID NO: 120600 - DNA, 603 bp, Homo sapiens
gactattttggtcattattcataaaaatctgtaacagtagaaayacatgtttaaatataactcacctgtaaattgaagaccctagtattatcttgagaaaaaatgactaataaggtaaagaagtaatggggtcattcaatagcaagacatcttatttgtagagagcagtttgcatggagttagcattcactggctcatcactaactgctgctttgcagatttcatccatttttaacttaagtattatatatgttttcctcaattggtgacttaaaatgactggtaagagaaacttcctaaatacagctgagttcatgggctggatttattttgctctgttgggtcacatcatcctgtgagtgtgagacacaagcatctgagctcagaaatgaatgtgaatttctcttgtcagcttccaaaggctgacttcggtttccattagtcttcaacagatattgatgggaaaaatacctagccattgaaggacatctttccccaagtctccttagaacacatttgccaggctttcttggtgaccaggtgaagtgtattataaaaatcacttgatctgaggtctaacccaatttatagccctgaatattg

SEQ ID NO: 120601 - DNA, 603 bp, Homo sapiens
gactattttggtcattattcataaaaatctgtaacagtagaaatacatgtttaaatataactcacctgtaaattgaagaccctagtattatcttgagaaaaaatgactaataaggtaaagaagtaatggggtcattcaatagcaagacatcttatttgtagagagcagtttgcatggagttagcattcactggctcatcactaactgctgctttgcagatttcatccatttttaacttaagtattatatatgttttcctcaattggtgacttaaaatgactggtaagagaaacttcctaaatacagctgagttcaygggctggatttattttgctctgttgggtcacatcatcctgtgagtgtgagacacaagcatctgagctcagaaatgaatgtgaatttctcttgtcagcttccaaaggctgacttcggtttccattagtcttcaacagatattgatgggaaaaatacctagccattgaaggacatctttccccaagtctccttagaacacatttgccaggctttcttggtgaccaggtgaagtgtattataaaaatcacttgatctgaggtctaacccaatttatagccctgaatattg

SEQ ID NO: 120602 - DNA, 603 bp, Homo sapiens
gactattttggtcattattcataaaaatctgtaacagtagaaatacatgtttaaatataactcacctgtaaattgaagaccctagtattatcttgagaaaaaatgactaataaggtaaagaagtaatggggtcattcaatagcaagacatcttatttgtagagagcagtttgcatggagttagcattcactggctcatcactaactgctgctttgcagatttcatccatttttaacttaagtattatatatgttttcctcaattggtgacttaaaatgactggtaagagaaacttcctaaatacagctgagttcatgggctggatttattttgctctgttggrtcacatcatcctgtgagtgtgagacacaagcatctgagctcagaaatgaatgtgaatttctcttgtcagcttccaaaggctgacttcggtttccattagtcttcaacagatattgatgggaaaaatacctagccattgaaggacatctttccccaagtctccttagaacacatttgccaggctttcttggtgaccaggtgaagtgtattataaaaatcacttgatctgaggtctaacccaatttatagccctgaatattg

SEQ ID NO: 120603 - DNA, 603 bp, Homo sapiens
gactattttggtcattattcataaaaatctgtaacagtagaaatacatgtttaaatataactcacctgtaaattgaagaccctagtattatcttgagaaaaaatgactaataaggtaaagaagtaatggggtcattcaatagcaagacatcttatttgtagagagcagtttgcatggagttagcattcactggctcatcactaactgctgctttgcagatttcatccatttttaacttaagtattatatatgttttcctcaattggtgacttaaaatgactggtaagagaaacttcctaaatacagctgagttcatgggctggatttattttgctctgttgggtcacatcatcctgtgagtgtgagacacaagcatctgagctcagaaatgaatgtgaatttctcttgtcagcttccaaagkctgacttcggtttccattagtcttcaacagatattgatgggaaaaatacctagccattgaaggacatctttccccaagtctccttagaacacatttgccaggctttcttggtgaccaggtgaagtgtattataaaaatcacttgatctgaggtctaacccaatttatagccctgaatattg

SEQ ID NO: 120604 - DNA, 636 bp, Homo sapiens
tatcagcactatcactctgctaartgtggaatctcatctaattcacacctagtccctgtgaggaaggtatttattccattttatatgtaaggaaattgatgctcactctacgtatcatttggtcaaggtcaaagagcaaataactggcagttcaaatttaaatccagattgatttaattctaagcctgagctctaactattatgccattatatgtgattatatactgattccatgctgtgtctcatccattgggtgtgatgggagaggaggtgctgacacataccagctttgcgttgcttagcaaactttgattccaccaccaatggcaagcagagaaaattcctccatcagataacatgggcatcagtagtttataaaagaggcatagagaaaagagaatgcctctcatcttcctttcctaccttcggccctcatccaggggaattgcttcagcgctgtcttggaatagttgattctggaaatttcctgatgcctgtggagtggaagggaagactgaacagaattcagacttaggaccagggacatcctctacatgaatgggatctggtagggtcttgagaaataatatacaatagacataacctgggtatgatttcaaatacttctatttacca

SEQ ID NO: 120605 - DNA, 500 bp, Homo sapiens
gagagacagagagagaaagaaagagaagttaaagatacaagagggtaagaagtaatcaataaaggcctgttggatgggtaggcagttatttacccacagagaagctattttctatcttattcagctttaatagaaatccattttgttctggtgtgaggtggtcatgtgtttgggacaaagtggagtccatccaggccataggtgtgaatcaggattagttgaaaccatttataataatgctcttcactttccagtgatttacataggyatgtgacacaattccagcccatgagacaagaaagaaaaactgctggagagcttctgtgtgatgcttctctgatcctaaaaggggagtcatgaggaaaaatgtctcttctgaacaatgccttctgcaaaagatatggaattactaattagtggtaaccactggcattttggactggggagtttcccaaaacagctaaaaagtacacacttatttgaaaagtgattgctcattt

SEQ ID NO: 120606 - DNA, 591 bp, Homo sapiens
gtttccctctttctctatcgtgtggaatagtttcagtaagattggtaccaattcttctttgagtgtctgatagaattcacctgtgaatctggctggtcccagactttctttgttggcattttttaaattattatttcaatctcactacttgttattgatctgttcagggtttttatgtcttcttcgtttagtctagaagggttgtatatttccaggaatttatccatctcctttagattttctagtttatgcacatmaaagtgttcatagtagccttgaatgatcttgtatttctgtggtatcagtactaatagcacctgtttcatttctaattgagcttatttgtatcgctctcttcttggttaagctccctaacagtctatcaattttatttattcttttctttcatttttttttctgagacacagtcactctgtcacccaggctggagtgcagtggcacaatcttggctcactgcaacctccacctcctgggtccaagtgattctcctgcctcagccttctaagtagctggaattacaggtgcacactaccatgcccagctaatttttgtatcttagtaaagatgggg

SEQ ID NO: 120607 - DNA, 615 bp, Homo sapiens
acaataaagtaacatgcagaccttttcatagggagggggcccagaatgagagacaaataagtccctcggaatggcacttattctatttcccttcttcttcaaatctcagaggtttgaagctaagaaagcccaaaagagagatgcttaaagggactcagagttggctttacccaatctccaagaaaataggctcacaggaatttcatgtgtcctttatagaaatagatattcagaggcatcacttgttgccatactcagtgactttattaagcagctcaatgaaagttccgtaaaacctaaaaaataaataaataaatgaataaaacaaaaaataaataaatgaaagaaaaataaaggaagtgagcatctctcttcctaatttccattttattgctcaaaagmcttcatatttcaaagagaaaatattacgtttactacagggctacaaagtcaaccaggggaagccagagagaaaaggggaaagtattttagcagtgaaaagtgttgatgatttctagtttatatttaaatatataattctgaaaaatggatgaaacaaactattcggaatgtttgaaccgtgtaggcctccagagaacctcaactataaaaggc

SEQ ID NO: 120608 - DNA, 615 bp, Homo sapiens
acaataaagtaacatgcagaccttttcatagggagggggcccagaatgagagacaaataagtccctcggaatggcacttattctatttcccttcttcttcaaatctcagaggtttgaagctaagaaagcccaaaagagagatgcttaaagggactcagagttggctttacccaatctccaagaaaataggctcacaggaatttcatgtgtcctttatagaaatagatattcagaggcatcacttgttgccatactcagtgactttattaagcagctcaatgaaagttccgtaaaacctaaaaaataaataaataaatgaataaaacaaaaaataaataaatgaaagaaaaataaaggaagtgagcatctctcttcctaatttccattttattgctcaaaagccttcatatttcaaagagaaaatattacrtttactacagggctacaaagtcaaccaggggaagccagagagaaaaggggaaagtattttagcagtgaaaagtgttgatgatttctagtttatatttaaatatataattctgaaaaatggatgaaacaaactattcggaatgtttgaaccgtgtaggcctccagagaacctcaactataaaaggc

SEQ ID NO: 120609 - DNA, 551 bp, Homo sapiens
caaaattcttggctgattttgtttaaggaggctaaagataggacatcaatcccttctagcttgtaaggtttctgctgagaaatctgctgtgactctgttagagttttttttataggttacctgatgcttttgactcacagatcttaagattctttccttcatcttgaatttagataaccttataactatgtacataggcggkgatccttttgcgatgaattttccacgtgttctttgagtttcttgtattcagatgtctagatccctaggaaagctgggggatctttttctcaaagattcctccaaatatgttttccaaacttttagatttctcttcttccttaggagcaccaattattcttaagtttggatgcttaacatagtcccaaacttcttggaggctttgttcgttttttttttaaattatttttccattgtctttgataaattgggttaatttgaaagccttgtctttgagctctgaagttctttcttctgcttctttgattctattgttgagactttccagtgtgcatttccctaagtgtgtc

SEQ ID NO: 120610 - DNA, 560 bp, Homo sapiens
ccttgtcttgttcccaatcttagagggatagtgttcatcattaagtggaatctgtaaggctatatgctctatcattattgacatgagttgtctcttctctctctcctcccttacttctttccatcttttgctccttcacattaatctagctaattgtttatcaattttattgttcttttaaaataatcagatatttgttaaattgatttttctatttttaaaatttacatttcattgattcttgttctaatccttattatttcctatcttctacttagtttctgcttaatttgttgttattttttgtgtctgtagtacaaaacttttgatgtttgttttcagacattattttatttatttatttatttatttatttatttatttatttatttatttattttgagatggagtcttgctgtgtcgcccaggctagagtgcagtgacgtgatcttggctcactgcaacctccacctcccagggycaagtgattctcttgcctcagcctctggagtagctgggattacaggcgcccaccaccacgcctggctaatatttgtatt

SEQ ID NO: 120611 - DNA, 617 bp, Homo sapiens
taattacgtaacttgacaatatgttttaatactggcatgaagtcagtactctttttctactccatttttcaagatatttttgaatattcttacttattacctaagcatgaagtttaggaccaacttgcccagtttaaaaaaaaatggggagggcaaactaagtgttttattgtgaatgcaatgagtattttatcatattaaatgtataagttaccaaggaaagtcataaggtcttaggaatatttaaactcttatattcaaggggagctacaccattccagtgttgttttctgttttttcatatagttattacaascttatttttcagtatttttctagctatttaaaatgtgttttctattatacatgaaatacaaccttttatacattttctaactaatgtattttatgcaggagagatctgatattatatattaatactaagctatttgtctatatggtatgctatattttacaattgaacatgggtataactgaaagttcactaaaattttccaggcatactattataccatgtgcaaataaataaaatttgactccttttccaatttttataactcaatatttattctaatttatttttctcactagcaacc

SEQ ID NO: 120612 - DNA, 617 bp, Homo sapiens
taattacgtaacttgacaatatgttttaatactggcatgaagtcagtactctttttctactccatttttcaagatatttttgaatattcttacttattacctaagcatgaagtttaggaccaacttgcccagtttaaaaaaaaatggggagggcaaactaagtgttttattgtgaatgcaatgagtattttatcatattaaatgtataagttaccaaggaaagtcataaggtcttaggaatatttaaactcttatattcaaggggagctacaccattccagtgttgttttctgttttttcatatagttattacaaccttatttttcagtatttttctagctatttaaaatgtgttttctattatacatgaaatacaaccttttatacattttctaactaatgyattttatgcaggagagatctgatattatatattaatactaagctatttgtctatatggtatgctatattttacaattgaacatgggtataactgaaagttcactaaaattttccaggcatactattataccatgtgcaaataaataaaatttgactccttttccaatttttataactcaatatttattctaatttatttttctcactagcaacc

SEQ ID NO: 120613 - DNA, 600 bp, Homo sapiens
ttggtaaataaggtaactctgttgaaagctctatttagaataaaaaaaaccaaattttatataaagtgtagtgggaccacaaatataatctcaatgaaaaggctctcactgaggctaatacagaatttctgcatctcacaaatctctgacatgtttcaggacatatattaaacactaccgatggtaaacaaccaaacaagcaaaaagtatttatttttgagatgtttgacataaactacatcttaagtcttagggatggaggagtagaaatacatagatttgatgttatttttctgtgccaaactatgtgtctccccaataaccatttattcttccaatttccctggaaacattacaacaaaatgtcaaatctgcagtttcagcacaccactcaaaatggtggcacaatcttcaagtgacctcttctaatgctcaatttttcccacagaaaatatctatttttatccatatttactccttcagcctcaattctcatccatttgaataaactagtgctctatttttatgtgaccttgaamctaactaatttaggattcagcttcctcagtctaacctttcttacctgcaaatgtagagtag

SEQ ID NO: 120614 - DNA, 596 bp, Homo sapiens
gtagaattgtataaattttatttaggaaattttgttgttagcattgctcatatactgtaaatgcttastggttattttggtataaattttctattaacaatcgagaaagggatgttaaaatttctaattatgtttctgaatgtatcaatttgtctctttaattgtatcatctttttgttcttatatttgaacttcttttagtaggtgtgtgtacattttggttatcatgtctccttgataaactgaattttgtatcattgagaattttttcttctatgtaatagcattgtttttctctaagcctacatttataatattcatatagccatatcagctatcttaagttcagtgtttacattatatatctatttacatccttcagtttaaattttcactaatgtctttatatttaaaatgagtttactgtacatagcatgtagcttggttctattatgtctctaatcttatgctttcttttttagtggtttattttactttatgtattaatataatcatttatattatttactttatatatttataaaataattgataaagatgcttcaaatctaccttatttttatttattttctctc

SEQ ID NO: 120615 - DNA, 596 bp, Homo sapiens
gtagaattgtataaattttatttaggaaattttgttgttagcattgctcatatactgtaaatgcttacyggttattttggtataaattttctattaacaatcgagaaagggatgttaaaatttctaattatgtttctgaatgtatcaatttgtctctttaattgtatcatctttttgttcttatatttgaacttcttttagtaggtgtgtgtacattttggttatcatgtctccttgataaactgaattttgtatcattgagaattttttcttctatgtaatagcattgtttttctctaagcctacatttataatattcatatagccatatcagctatcttaagttcagtgtttacattatatatctatttacatccttcagtttaaattttcactaatgtctttatatttaaaatgagtttactgtacatagcatgtagcttggttctattatgtctctaatcttatgctttcttttttagtggtttattttactttatgtattaatataatcatttatattatttactttatatatttataaaataattgataaagatgcttcaaatctaccttatttttatttattttctctc

SEQ ID NO: 120616 - DNA, 340 bp, Homo sapiens
aataatattcacctaatttattatgttattttaagtgttaattgagatgaaatgtgtaaaatgcttgagtattctttggtccatatcattactttatctggttaattgctgccaaggcaattaacagtaaatctaaaattctcatttataatttatctttcaagcaagcaaacacaattactgagaaaacccattgcagctacccttgaagtaagagcttaccgtagaaaatttwaaaaaaaggtctgttcttagacccaatcggatttgggagcttatgtccaacaaggaaacagtctcagatgtaaagagaaaataattatgaaaataatattattca

SEQ ID NO: 120617 - DNA, 556 bp, Homo sapiens
ttttcataccaaattgatgacagttagttatttttgtmagaatcccaaaagacaatgacttagcgcaataataaaaagaataaatgacaaaaatttgataagataattgattacagaggtggggggcagtttaatggaaaccaagatggaattgtggagcgctctgggagaaacaatagagagaaacctgtgaccacattcactcacgaagaagccaggagattcaggagttgccagaactcaggaaagctggtagctgttagcaagggccatgaacacagaacctatagccttaagtagaagaatgcaatcactgacagtttctagcaggacaaatgggaaagacctaaggaaaaaatactttgagattcagtatccttctgccttcggttctcctgttggtgcctctcagtcatacccaatcagcagttagagagcaaggaaactctcatattgatataatgaacacagttcaacattctagaccacagagcttggtggaaaggttaaggggtgaacctggaggagaaaaaaaggtaagtaggtaaaagtcata

SEQ ID NO: 120618 - DNA, 637 bp, Homo sapiens
tttcacttctgtgaaagcataaccttctggattttcttctccttcacagggcaagtttatttatgctgtttcctgctcctctcttgagcttgatctttaaatgtcagaatgcctagggtgtttgtcctgtccttcttcttgttttctacctctatgcaatatcgtttgattctaaagccttaaatactatccattttctacaacttccacatgtatgtaaagcctagacatagccataaactaaagactagtatttccaacttacttgtccattaggattagaaagaacgactcaatcctartaaaacccaatatttcgttatgtgtctacaacccttcaatgtcccaacctcagccaatgttatcaccattcacaagttttgttcagtacaatgaaagatattcctgatctttgacttttttgctaatttcctgtatttgatgcaattcttactgattattctcccaaaaaacctgataaatcttcccaaataacctggtctagtttgtagacattacctacatcaatcacttcactccaggcacacagtttatttctttctctgcaatgaaccaaatcagtttttaaagaacatttattttagctattttctctaactgaggttcttatccttgc

SEQ ID NO: 120619 - DNA, 626 bp, Homo sapiens
acatctggccaattttgttctatttcaagggcactcaggttgatggaagagggatctctcaggcatctagctccatctgccaggccctccctgctgaaggccacamtgccacccctaaacctggctctaccccctactgtgttcattaaccttgggcaagtggctccatctctctaggcttcagtttccccacatgtaaaataaggatactgacatttgtcccctgggctgtctggggatgaaatgggatgatggcagcaagtccccagcacagggcctggggcagcaagcatgcaaccctgagagactacgaggtcacatacgccccccacatctgccaggaccacatgcctttgccagagaggggcaggttatcatctggcttggtgggaaccttccaacaacagcgaaggccatgaccacagtccttctgtaattccattaaatagtttagtggctggggccatgattcaaagagaacctggacctccttcacgtagtccctcagatgactacaccttaatttgctgtgcttgcattgggtccatggttatttttcttggcttcttagcaccagcattagccaggctgaataggggtttctgtctccaaagtaagatgaggaa

SEQ ID NO: 120620 - DNA, 626 bp, Homo sapiens
acatctggccaattttgttctatttcaagggcactcaggttgatggaagagggatctctcaggcatctagctccatctgccaggccctccctgctgaaggccacaatgccacccctaaacctggctctaccccctactgtgttcattaaccttgggcaagtggctccatctctctaggcttcagtttccccacrtgtaaaataaggatactgacatttgtcccctgggctgtctggggatgaaatgggatgatggcagcaagtccccagcacagggcctggggcagcaagcatgcaaccctgagagactacgaggtcacatacgccccccacatctgccaggaccacatgcctttgccagagaggggcaggttatcatctggcttggtgggaaccttccaacaacagcgaaggccatgaccacagtccttctgtaattccattaaatagtttagtggctggggccatgattcaaagagaacctggacctccttcacgtagtccctcagatgactacaccttaatttgctgtgcttgcattgggtccatggttatttttcttggcttcttagcaccagcattagccaggctgaataggggtttctgtctccaaagtaagatgaggaa

SEQ ID NO: 120621 - DNA, 545 bp, Homo sapiens
aaaattaaaggttgaaattagtcctataatgttttagcaattgtaagtatctgaccagataattaaaataagtgagcctgatcaggccttgtttacaaaatttagttctcaagccataatcatcaatagataccaaatcaaatcatcgatttggtttagaaacgtgcattttgttttgcagtagaaggttggtcacctaaaattaamatggaaaagaaagctaacaacacaaaagaattcattgtcataatcattcaaaataaatattatataatcagtaggattaataattaaatttatattcaaaattcaaaattattttgaaattactctgacattttcttgaggagaatgtcatagaaattgtcttgtaacttgaaacatgtaaatctgtaatgcttcgtagtttatttaactacaaagatttcaatgccaaatagaactaattatactatattataaaggcattcataaaatcaaaaacacataaataataaacaaattttttacaccttgaagatgccattgacatcatgatgtacatt

SEQ ID NO: 120622 - DNA, 581 bp, Homo sapiens
aaaagggaatccaaatggccaataaacatgaaatcatgcgcagccttgctgggagtgagggaaatgcaaataaaataacaacaatatatcatgtcatagccattagactagcaaaaattgacagtgaaaattgctgctgaaaaggtttggggagaagagtactctcatatatgtggaaatgttcattgtttcagtctttcaaaaatgtaatctggtattatccattgtaattaaaaatacatttacctatcccatcataggaatctatcccatggaaataaaatcactrctaggtaaggcatacacacatttatgtgtattgcatcattgtttgtactaatggaagactggagacagagtgagtgcccctcagtagacaaatggctcaatatactgtattacagcatactcatatcattagtatcatacaaccattaaaagaaatcaattcggttcttattaaggacttcccttgagctaggccctcttttgatcctcaccacaaccttatgtggtaggtggtaataattttacagggtaggaaactgaagcacagagagtttttaaaaacgtacccaagg

SEQ ID NO: 120623 - DNA, 581 bp, Homo sapiens
aaaagggaatccaaatggccaataaacatgaaatcatgcgcagccttgctgggagtgagggaaatgcaaataaaataacaacaatatatcatgtcatagccattagactagcaaaaattgacagtgaaaattgctgctgaaaaggtttggggagaagagtactctcatatatgtggaaatgttcattgtttcagtctttcaaaaatgtaatctggtattatccattgtaattaaaaatacatttacctatcccatcataggaatctatcccatggaaataaaatcactgctaggtaaggcatacacacatttatgtktattgcatcattgtttgtactaatggaagactggagacagagtgagtgcccctcagtagacaaatggctcaatatactgtattacagcatactcatatcattagtatcatacaaccattaaaagaaatcaattcggttcttattaaggacttcccttgagctaggccctcttttgatcctcaccacaaccttatgtggtaggtggtaataattttacagggtaggaaactgaagcacagagagtttttaaaaacgtacccaagg

SEQ ID NO: 120624 - DNA, 482 bp, Homo sapiens
acctagtttataattgacatctctattaatcaagtttcctcaaagtaattgtgacctaggatgctcctttctggtgcaaaggacatgacatttaaatccggagaatacctctggattaagatgattatgtgagcaaacgtgttttcttctcataattttacccttaccttctttatgactatctagtagagtagaagattcataagcaagattaattaggatagcttataggaaatagagaagttattatctttgtaaatatgagtaatttaaaaattgtaatacagtaatattttaaattgcttatacacatattaattttataactttctgtttaagcagaatattcttctccccagccactctaggtaatagtagtctaagttggggaaaaacagagttaaaatcttttgaaggaaaacaaggcccaaaataaygttgaatatatacaaaagagaagcttgtaattaaaagtcaatgaa

SEQ ID NO: 120625 - DNA, 512 bp, Homo sapiens
gcaccattggtcattgctcttcggtgaccagagcattggtgtacatcttcacatatacatggagcttaatgaagatgtacaagaagcttaatgttgttttcatgcttgtgaacacatccattctgtagcccatggatcaagcaggaattttggctttcaagtctactatttaagaaatatattttataaggctatagwtgccatagacggtgattcctctgataaatctggagcaaagtaaactgaaaatgttgtagaaagaattcaccattcgagatgccattaagaattataattcatggagaggagatcaaactctcaacattcacaggagtttggaagaggttgattcaaaccttcatgaatgactttggggggtttatgacttcagtgaagatagtcactgctgatgtgatggaaatagcaagagaactacaacgctgatgatatgcaatctcatgagaaaacctgaacagatgaggacttactgctgcttctttctttttttcttt

SEQ ID NO: 120626 - DNA, 530 bp, Homo sapiens
tgtaaaaattgttcttgaatagatctagggtaaatttggcaactctgaacatgtgggtagagatcagtggcatgaacsaatcatgccacagaaatccagatgaaaaagtatattgacctggcctaccgtaatgcctgagacaataacaaagaattcaaagaaaatgttttgttttccccagcaagttattttccccccataaacttagtctatttgtgggtattcttgccactaactaccaagatctgaagctcttaaaacttaatggaaacactgtccattgaatttaagtattttgagtaatatgaaattttttctggccaaaaaaagagaaataaatatccaccaattatatatttattgagtagagttgaagaaaaatggaatcacgtcagtgctcagtaaagcaaggtaaggttattagctgagactgagagaactaagaattttagagaaaggcttgtatttttttgaacttataaaaaaactttacaatgcagattgattatacttgtagtcagaaaaaaagt

SEQ ID NO: 120627 - DNA, 622 bp, Homo sapiens
acattttgccatatttatctttcttcttcctgttcttcctcctcttcttcattctttctctttctctctttaagtatgaatacatgcagtaatgcatagcttaatgacaaggctatgttctgagaaatgtgtcttcaagtaatttcatcattgtgtgaacatcatagagtgtatttacacaaacctagatagtaccacctactacatactttggctatatggtaaagcttattgctcctaggctacatacccgtaccgtgtgttattgttytgaacactgtaaacaattgtaccacaacagtaagtatttttgtgtctaaacatatctaaacaaagaaaggtaatatattgctctatgatgttatgaaggctatgatgtcaataagcaatgggaatttttcagccccattagaatctcatgggactaccgttgcatatcatcattcactaaaacattattacgtggtatgtgactgtgtgtctatataaacatataagtatatatttatatatgttcacacatatatgcattttttataaaccacttaataagttatagatacgacattttccccctaaacatttcagtgtgtttttctaaaaataaggacattctgttact

SEQ ID NO: 120628 - DNA, 477 bp, Homo sapiens
agaaaagcctaataagagctgtttgcaccagtcgtttggatctttcccagtgttttccctcaaagcctcactccggtacttggagtgagacatgagagatattgctgtgtactgtcccttttaatcctcccagttctaggtagttctctcaacaaagagtgccatgcagagtattgtaaaggaagaagatcccccagaaacaaaggccttctgcattatagatctaccttctaagaagctatctgctctcttatctgttagattggacatctctgaaaggcagagaatatgtctttcatttttatctctgcacccttcccttccttggtaactgaaagcttcctgaaaattgaattaayataaagaaagaacatgttccaaaaaaataagacttttccattttgttgccttatttgaaagcaatcaatcctatcaatacgatagccttataattcaaagctgtgactttatgttttc

SEQ ID NO: 120629 - DNA, 477 bp, Homo sapiens
agaaaagcctaataagagctgtttgcaccagtcgtttggatctttcccagtgttttccctcaaagcctcactccggtacttggagtgagacatgagagatattgctgtgtactgtcccttttaatcctcccagttctaggtagttctctcaacaaagagtgccatgcagagtattgtaaaggaagaagatcccccagaaacaaaggccttctgcattatagatctaccttctaagaagctatctgctctcttatctgttagattggacatctctgaaaggcagagaatatgtctttcatttttatctctgcacccttcccttccttggtaactgaaagcttcctgaaaattgaattaatataaagaaagaacrtgttccaaaaaaataagacttttccattttgttgccttatttgaaagcaatcaatcctatcaatacgatagccttataattcaaagctgtgactttatgttttc

SEQ ID NO: 120630 - DNA, 636 bp, Homo sapiens
tattgtctgtcttttgaataaaagctattttaactggggtgagatgatatctcattgtagttttgatttgcatttctctgatgatcaatgatgttgagcactttttcatatgtctctttgtcatttgtacatcttcctttgagaaatgtctgtgcagatcctttgccctttttaaaatcagattattagatttttctcctatagagttgtttaagctccttatatagtctggttattaaccctttgtgagtttgtaagtattttctcccattctgtgggttgttccttcactttgttaattgtttcctttgcagtgaataaactttttaacttgatgtgataccatttgtccatttctgctttggctgtttatgcttgtgggatattacttgagaaattttgcccagaccaatgtcctggagagtttctccaaagttttcttgtagtagttccatagtttgacgtctgagatttaagtctttaatccattttgatttgatttttgtatatgatgagaaatagaggtcaagtttcattcttctgtatatggwtatccaattttcccagcaccgttttttgaaaaaactgtcctttctccaatgtatgttcttggcacttttcttgaaaatgagttca

SEQ ID NO: 120631 - DNA, 612 bp, Homo sapiens
tctgttgctttttctttaatactttaagtattaatattttaatgggtttctttttttgatatatgtcccttattttaaaatacatttctgtaagtgacattgtggagtaagtcatttaaaaatacttgaggcttttaatgaatgtttccaaatttcctctagattatgtgccyaagtatacattttccagtatcatgtgttacatacaacaggcttattagtaaccgtgttagtgaaaagttgcaataaaataataatcaggtaggggcagggttaggcatgtaggagctcagacactcctaaggacataatctcttgggagctttatggccctgcccaccatctgagaaacctgaatacttatccaaagacaaccctcaagcaagcttgtcttctccctatacaatcatagctgatgtggtcttgaaagtgcaaattcctggctggaggccaaccaacacaaaaccagcgcacttaacaaaaatacaaccaaggaccctcacaaagtctacttcactccctagctacctccactagtgtaggttctggcatccacggatgaggaatctgaagacggatcacataatgggactctttgcagacactccccac

SEQ ID NO: 120632 - DNA, 585 bp, Homo sapiens
cctgagagatcttcaccagttccttgtggactagaagcccttcccaagggatatacacgagggctcactcacttgacaatgtaatttatttgcctgcttcaatttccacaagttgttccatgtattgttggatctaatatgcttgtttctatgtttaactcaactgtctagatttccaagtttcctgaaaatgtataatgtataaatggttaaaattcattcaattcaatacttatttcagaagtaaaaaaaattcccccatttctctctctctctctctctcwcacacacacacacacacacacacacaccacatctaattgagtttttcaaggtagccagccaacacttaattgggattgtatttttagattaattttctgagaatttatatttcaaaatgatcaatggaataattcttcatctattcattttgacttatttttattattgtagttgtaaagccttctctgtggattttatgtatcttcttggtgaataacttcctagaaacgttacaattctattgcctctttaaagggtatcttacatttctgaattaaaattaccagtatgcatgagttt

SEQ ID NO: 120633 - DNA, 589 bp, Homo sapiens
gcaggcaagttgataaaaggactgtatgttgttcacatattttcaccaggtgccttttccagtcttttttttattactccttaataaataattgctcaatakttgatattttaaattattcacatttaactatgacttaaatataggcttaaaagtttttttgaaagcaactttgttgatgggaatacgtgttttttgaaataaaaatttgatttaaaaattttagattaggccgggtgctatggctcacggctgtaatcccagtacttcgggaggccaaggtggatggatcacctgaggtcaggagttcaagaccagcctggccaacatggtgaaactccatctctactaaaaatacaaaaatcagctaggtatgatagtgcatgcctgtaatcccagatactcgggaggctgaggtaggagaatcacttgaagctgatcctgggagggggaggttgcagtgagccgaaatcatgccattgcactccagcctgggcgacagagcaagacttcatctcaaaagaaaaaaaaatagattaacaaaaatattttgaagttggtacagagaattccaatataaccaacatgt

SEQ ID NO: 120634 - DNA, 589 bp, Homo sapiens
gcaggcaagttgataaaaggactgtatgttgttcacatattttcaccaggtgccttttccagtcttttttttattactccttaataaataattgctcaatagttgatattttaaattattcacatttaactatgacttaaatataggcttaaaagtttttttgaaagcaactttgttgatgggaatacgtgttttttgaaataaaaatttgatttaaaaattttagattaggccgggtgctatggctcacggctgtaatcccagtacttcgggaggccaaggtggatggatcacctgargtcaggagttcaagaccagcctggccaacatggtgaaactccatctctactaaaaatacaaaaatcagctaggtatgatagtgcatgcctgtaatcccagatactcgggaggctgaggtaggagaatcacttgaagctgatcctgggagggggaggttgcagtgagccgaaatcatgccattgcactccagcctgggcgacagagcaagacttcatctcaaaagaaaaaaaaatagattaacaaaaatattttgaagttggtacagagaattccaatataaccaacatgt

SEQ ID NO: 120635 - DNA, 550 bp, Homo sapiens
aatccatatttcagctaaccaagcaactaaactattagaacattttttaactccctgagctgcaacactaaatgcagaatccctacttagtgggcccaaatcaaacaatttagcctgatccaactctatattccttctaccattatcccatacccttaatatccattaccatgcctcttctccagatttctgcttatataaattagaaaactcaagcarttcttctcaagtgtagcacacctcctcatgggtcatactcttaacctcacctctaggggcccactgggactttagtctagttataggtctagaaacaaacaggggcattggggtgttggggtggcttcagaggagaatcgacattatcttccccagcaactgcctcaggggaggccatcaatgttgcctgaggtagcacagggtttatctcctcagacaaaggtggaaaggctgatgggagcataggttggggaggggatgttgccactactgggaatggggaagctgttccttctgtcaaaaagtttcatcagagtttacaagctcagtg

SEQ ID NO: 120636 - DNA, 464 bp, Homo sapiens
agtgagtcaaatctagtactgtgtcaaatgattataaattgtgacctaagtaagatttatgccaggaatgccaarttgtttcaatatgaaaagttaatgaatgtaatatatcatattaatagaataaaggaaaaataataaccccagttgatgccaaataaaacccttagatagaatacagtacactttcatgatataactgtcaacaaactaagaaaaaaggggaactttctaaacctgacaaaggaaatctacaaaaacaacaacaacaacaacacatagataacattatacatgatggtgagatgctgagtgttttcttcctaccttcatgattaagacaaagatatcagttctgtccatttatactgaatattatactagcaattttagcctaggaaactagtcaagaattaaagagacatcaaggttgaagaggaagtggtaaaattctctctttgcag

SEQ ID NO: 120637 - DNA, 545 bp, Homo sapiens
taaattgtgacctaagtaagatttatgccaggaatgccaaattgtttcaatatgaaaagttaatgaatgtaatatatcatattaatagaataaaggaaaaataataaccccagttgatgccaaataaaacccttagatagaatacagtacactttcatgatataactgtcaacaaactaagaaaaaaggggaactttctaaacctgacaaaggaaatctacaaaaacaacaacaacaacaacacatagataacattatacatgatggtgagatgctgagtgttttcttcctacmttcatgattaagacaaagatatcagttctgtccatttatactgaatattatactagcaattttagcctaggaaactagtcaagaattaaagagacatcaaggttgaagaggaagtggtaaaattctctctttgcagatgatatggtcatgtatatataaattctaaagaaaacacaaacattactagagctcataaggctagtaaggctgcaagatataatataaatttgtttttgttttgttttttgtga

SEQ ID NO: 120638 - DNA, 545 bp, Homo sapiens
taaattgtgacctaagtaagatttatgccaggaatgccaaattgtttcaatatgaaaagttaatgaatgtaatatatcatattaatagaataaaggaaaaataataaccccagttgatgccaaataaaacccttagatagaatacagtacactttcatgatataactgtcaacaaactaagaaaaaaggggaactttctaaacctgacaaaggaaatctacaaaaacaacaacaacaacaacacatagataacattatacatgatggtgagatgctgagtgttttcttcctaccttcatgattaagacaaagatatcagttctgtccatttatactgaatattatactagcaattttagcctaggaaactagtcaagaattaaaragacatcaaggttgaagaggaagtggtaaaattctctctttgcagatgatatggtcatgtatatataaattctaaagaaaacacaaacattactagagctcataaggctagtaaggctgcaagatataatataaatttgtttttgttttgttttttgtga

SEQ ID NO: 120639 - DNA, 555 bp, Homo sapiens
ccacttcgagttgtcctgcccttccagattgaaccaatgtgaatcttacaggtattgattgacgtattatgtctccctaaaatgtataaaagctagctgtgccccaaccaccttgggcacctgtcgtcaggacctcctgaggctgtgtcatggatgtgtccttaaccttggcaaaatgaactttctaaattgattgagacttgttgcagatactttctgtctcacaaattggtaaccacagagggattctgagtggaggttctgagatttggcaaatctcctatcagtgcttagcatcaccttgagccatccttgtggctaaaaccaataggacaatttgctgaggcctgggagttcccctccctccagagaatccctaatctcccaaaatttggttgagatccaatgtttattttgctgtatgattctttttctggagttttatttgcttccaacaaaaaaaggcaaattttcctgctycccatgatgatggaagacaggtaaatccttttggagtttcagttcacttccaacagggaaggcgcgtttcagttt

SEQ ID NO: 120640 - DNA, 555 bp, Homo sapiens
ccacttcgagttgtcctgcccttccagattgaaccaatgtgaatcttacaggtattgattgacgtattatgtctccctaaaatgtataaaagctagctgtgccccaaccaccttgggcacctgtcgtcaggacctcctgaggctgtgtcatggatgtgtccttaaccttggcaaaatgaactttctaaattgattgagacttgttgcagatactttctgtctcacaaattggtaaccacagagggattctgagtggaggttctgagatttggcaaatctcctatcagtgcttagcatcaccttgagccatccttgtggctaaaaccaataggacaatttgctgaggcctgggagttcccctccctccagagaatccctaatctcccaaaatttggttgagatccaatgtttattttgctgtatgattctttttctggagttttatttgcttccaacaaaaaaaggcaaattttcctgctccccatgatgatggaagacaggtaaatccttttggagtttcagytcacttccaacagggaaggcgcgtttcagttt

SEQ ID NO: 120641 - DNA, 653 bp, Homo sapiens
  misc_feature (1)...(653): n = A,T,C or G
tcagggttggtgtacaccttaagttagtctggagtgaagctaatggctttggtgtaggtgttgaatagtataatcttaggaactcctagcattcatcttgtggtcatttgagggcactaatcttaaaatgaaactgataatttaggaggcagaagtaggtcttcagtgatatcatctacctgatgartcaaattccatatttctctaaaatttattattctaggagtcagaacttaatccctttagcttcaaattggttttctgttacttcagattaaaagtaccatgtcaaactagtttcccaggtactacagctagcctagaggttggttgattataggtctatctggcagtaataattattaaagatgagctgaaaccaatactcagttactgatatttctgtatctacaagggtggtgtggtttaaaatgtaggaaggacacacaaacaattgatagtctaataactatgaaatttaaaattggttcagagccaagaccttggacagttggaaaaagaaaataaataaacaacatatgatttttgaaaaataaggtgtatggtattttgtttgagattacctccctattccagaatgagtaaattagaaattttnnnnnnnnnnnnnnnnnnnnnnnnnnnnnnnnnnn

SEQ ID NO: 120642 - DNA, 667 bp, Homo sapiens
atgcaaaactcctctaatgttcagtgtgtgtctttgtgtgggcatgcctatagaaaggaaatgcaccaaaatgtttgcaatgtaattttgagtgttgggattatcaatgagtgaggtttcttctttatatttttctatattttctaaaattacctttttataagaaaatacaatcttaaaacattttaaagtgggtatctgtaaatataaaaataaatatatatatattccaatttgctctaccactcatgccaaacaaaaakctactgtaagatcttttctatgataacatatggttatctgaaaatgattgaattgtatacatatagggtggcattctcagctaaaatttcttggtaatgttaagtatccctggaatcatattactgctgagtaactacagccttagttactataacaaataaatcaacagtaaaacaaacaaacacacaaagcccccacaaaacccacataatgccttctatttgacgtatgaatacctgtagctatttaaatatactgtgttagcaatgtgtactttctacaaactgcatagcttatatgtgtagtgacttttttgcaataacagatggtttggagtagacatcatcaaaattaatatgtaactctaactcctatcacacaataatttttcaattatcaattt

SEQ ID NO: 120643 - DNA, 667 bp, Homo sapiens
atgcaaaactcctctaatgttcagtgtgtgtctttgtgtgggcatgcctatagaaaggaaatgcaccaaaatgtttgcaatgtaattttgagtgttgggattatcaatgagtgaggtttcttctttatatttttctatattttctaaaattacctttttataagaaaatacaatcttaaaacattttaaagtgggtatctgtaaatataaaaataaatatatatatattccaatttgctctaccactcatgccaaacaaaaagctactgtaagatcttttctatgayaacatatggttatctgaaaatgattgaattgtatacatatagggtggcattctcagctaaaatttcttggtaatgttaagtatccctggaatcatattactgctgagtaactacagccttagttactataacaaataaatcaacagtaaaacaaacaaacacacaaagcccccacaaaacccacataatgccttctatttgacgtatgaatacctgtagctatttaaatatactgtgttagcaatgtgtactttctacaaactgcatagcttatatgtgtagtgacttttttgcaataacagatggtttggagtagacatcatcaaaattaatatgtaactctaactcctatcacacaataatttttcaattatcaattt

SEQ ID NO: 120644 - DNA, 557 bp, Homo sapiens
gcactaaattcatttatattcatcctgtaatttttgcttatgaaagtgtatagtagtattgaatttcttctgatcaatgtttttaatacgctacatagaytctgatatattgtttttctattactttttagttagaaattaaatcattttaatttgtttacttcctttcatataagcattctttagcagaaggtgcaactgacatttttaagcaaaaattataaacatgtattatggggttataaaatctttggaagtaaagcatataaaaatagtagcacaaagtatgagagggggtgtaaatggaagtataatattgtaaggctttagcataatacatagagtaatatactattaaggcagattgtgataatttaagaatttaaggatttgtattggaatccctagtgtacttgctttaaaaaaaattgccgtatagctaacaaaaagaaaagagtatataaaaaggaatactgaaagaataaagcacttgattaaccagaacaaggcaggaaaagaggagaaaacgcacaaaatatggaacaagttgaaaacaa

SEQ ID NO: 120645 - DNA, 557 bp, Homo sapiens
gcactaaattcatttatattcatcctgtaatttttgcttatgaaagtgtatagtagtattgaatttcttctgatcaatgtttttaatacgctacatagactctgatatattgtttttctattactttttagttagaaattaaatcattttaatttgtttacttcctttcatataagcattctttagcagaaggtgcaactgacatttttaagcaaaaattataaacatgtattatggggttataaaatctttggaagtaaagcatataaaaatagtagcacaaagtatgagagggggtgtaaatggaagtataatattgtaaggctttagcataatacatagagtaatatactattaaggcagattgtgataatttaagaatttaaggatttgtattggaatccctagygtacttgctttaaaaaaaattgccgtatagctaacaaaaagaaaagagtatataaaaaggaatactgaaagaataaagcacttgattaaccagaacaaggcaggaaaagaggagaaaacgcacaaaatatggaacaagttgaaaacaa

SEQ ID NO: 120646 - DNA, 553 bp, Homo sapiens
ttgttgcataagatttcccctcccctgcccttttcaggtttagcctaaagtgttttcagtggttgcatttgaaacctttgtagggagccagaatgctttttttttttacattttaatcagactgtgcttacagaaacaccagtgaatcgggaacttgtctgcaagtgtgtgtgtgcatatgtatatatgcacacagacgcatacacaaacacacaacacacaacacaaacaacaagaatgggcttaaaagaaatgaacaaaacttgctygttttaagaataactgaatttagagcagaactggacaaacttgagacccaaagtccataaaaaaaatcaaagaaaccaaaaatttgttctttgaaaggataaacaagattgatacactgctagctagattgacaagaaagagagaaaatccaaaccataaatgacaaaagtgacattaaaagcaatcccacagaaatacaaaaaatcctcagagaccattataaacatcttctatgcacacaaatttaaaaatctagaggaaatggataaattcctggcaacac

SEQ ID NO: 120647 - DNA, 553 bp, Homo sapiens
ttgttgcataagatttcccctcccctgcccttttcaggtttagcctaaagtgttttcagtggttgcatttgaaacctttgtagggagccagaatgctttttttttttacattttaatcagactgtgcttacagaaacaccagtgaatcgggaacttgtctgcaagtgtgtgtgtgcatatgtatatatgcacacagacgcatacacaaacacacaacacacaacacaaacaacaagaatgggcttaaaagaaatgaacaaaacttgctcgttttaagaataactgaatttagagcagaactggacaaacttgagacccaaagtccatawaaaaaatcaaagaaaccaaaaatttgttctttgaaaggataaacaagattgatacactgctagctagattgacaagaaagagagaaaatccaaaccataaatgacaaaagtgacattaaaagcaatcccacagaaatacaaaaaatcctcagagaccattataaacatcttctatgcacacaaatttaaaaatctagaggaaatggataaattcctggcaacac

SEQ ID NO: 120648 - DNA, 516 bp, Homo sapiens
cccgcctgcctcgtccccactgactcagcttgtagcaacctggcccstgggtccccagtgttcagtttcttcaataaggctgtattgttctcacggggaaatgcttctcttggggagcttcaggcagtgcgtgcaggaagccagctgaggtctgcattgcaccacgtgagcaggggtcagccgccctggccgctgactgcccagtagctgcgcctagggaatggcggcctctggacacctggtctctaagcacaaccaggttggatgtgtgcatgtctgcatttacaaactcactacaagatcaacagaagcagggcactcaccccttttatcagctcatgcacactggctctgaatttgccttcagttcatcaggctatggaaaatatactgttccccatggttgggcacaaggaatgccctcctctctcctgctcacgtggtctcctggcaggccttccacactctggaacaggcctgagaaggaagccacaaaccgcgcgtcacatgccaacc

SEQ ID NO: 120649 - DNA, 507 bp, Homo sapiens
gaattcagcaatatttctcctacacactttctgcaagaagaaaaatatggctgtattctgcctgaccccgcaacaattaactaagaatctagcaccttttaaagatctgaataggaagcacttgtcatctattgtctctaagggcagccactatgagagtttaaaagaaccttggtctccacaatcttttatctcaccctgaacatttcctttctattgattccaggtctttagacaaactcaacccattgtcatccaaaaaatgtttaaatttgcctatagcctggaagtctccctcccctcatccccctgccctgtcccctctccctcttycccctccccctttcccttcccctctcccccactttgagttgtcctgcctttttgaacaaaaccaatgtatttctgaaatgtatttgattgatgtttcacgcctccttaaaatgtgtaaaaccaagctgtgccctgaccaccctgagcacttggagagctttgtcacgggccatg

SEQ ID NO: 120650 - DNA, 573 bp, Homo sapiens
acatatattgattgatgtctctctgtctccctaaaatgttcaaaaccaagctgtgcctccgaccaccttgcgcacatgtcataggacctcctgaggctgtcacagatgcatcctcccttaaaaaaaaaaagagagagagagatgcagcaaagggtgccctttcctacataggggcctctattgcccaggctggagtgtactggcatgattgtgatcatagttcactgcaacctcaaactcctgggctcaggtgatcctccttccttggcctcctgagtagctgagactacagatgcacaccaccacacctagctaattttttttttttaatgagacarggtctcagtatatttcccaagctggtgttaaactcctggcctgaagctatcctcctatctcagcctcccaaagtgctggaattatagccatgagccaccgtgcctggcttctccagtatatttatctctctctcttttttttttttttgagatggagtctctcttgtctccaggactggagtgcaatgacccaatctcagctcactgcaacctctgcctgccaggttcaagtgat

SEQ ID NO: 120651 - DNA, 531 bp, Homo sapiens
gacctagctcccaagagggttctagcacacacagaagcaaagagctatgccccaatatccaagggtacctctaagatgctacttaatcctattatgcctggcactcatgagcagtggayaaaaaagaaggacaggaatgcaatacagccatgatcttttcatacccaaccccaccctgtgacccccacccggtccacatttaccacaaacttatcatcatcacttgcttctgcagtaaatgcaattaaacttccatgcccaatccactggaaacttgaagtgtggcttgtagatgacccaccttcttctgccatgatggtgactgttgaagccagtattgcactctataacaaccagtggggaactatggaaaaggcaaggcttggaaggacaagggacctgagtttatatcctgcattggagtggtctcacatctcaccatttagtatatgcctcagcaaaatttaattttaatgtaccattacagaagctttcattgaaaaccccaatccctgcagacttgctattggc

SEQ ID NO: 120652 - DNA, 531 bp, Homo sapiens
gacctagctcccaagagggttctagcacacacagaagcaaagagctatgccccaatatccaagggtacctctaagatgctacttaatcctattatgcctggcactcatgagcagtggataaaaaagaaggacaggaatgcaatacagccatgatcttttcatacccaaccccaccctgtgacccccacccggtccacatttaccacaaacttatcatcatcacttgcttctgcagtaaatgcaattaaacttccatgcccaatccactggaaacttgaartgtggcttgtagatgacccaccttcttctgccatgatggtgactgttgaagccagtattgcactctataacaaccagtggggaactatggaaaaggcaaggcttggaaggacaagggacctgagtttatatcctgcattggagtggtctcacatctcaccatttagtatatgcctcagcaaaatttaattttaatgtaccattacagaagctttcattgaaaaccccaatccctgcagacttgctattggc

SEQ ID NO: 120653 - DNA, 531 bp, Homo sapiens
gacctagctcccaagagggttctagcacacacagaagcaaagagctatgccccaatatccaagggtacctctaagatgctacttaatcctattatgcctggcactcatgagcagtggataaaaaagaaggacaggaatgcaatacagccatgatcttttcatacccaaccccaccctgtgacccccacccggtccacatttaccacaaacttatcatcatcacttgcttctgcagtaaatgcaattaaacttccatgcccaatccactggaaacttgaagtgtggcttgtagatgacccaccttcttctgccatgatggtgaytgttgaagccagtattgcactctataacaaccagtggggaactatggaaaaggcaaggcttggaaggacaagggacctgagtttatatcctgcattggagtggtctcacatctcaccatttagtatatgcctcagcaaaatttaattttaatgtaccattacagaagctttcattgaaaaccccaatccctgcagacttgctattggc

SEQ ID NO: 120654 - DNA, 531 bp, Homo sapiens
gacctagctcccaagagggttctagcacacacagaagcaaagagctatgccccaatatccaagggtacctctaagatgctacttaatcctattatgcctggcactcatgagcagtggataaaaaagaaggacaggaatgcaatacagccatgatcttttcatacccaaccccaccctgtgacccccacccggtccacatttaccacaaacttatcatcatcacttgcttctgcagtaaatgcaattaaacttccatgcccaatccactggaaacttgaagtgtggcttgtagatgacccaccttcttctgccatgatggtgactgttgaagccagtattgcactctataacaaccagtggggaactatggaaaaggcaaggcttggaaggacaagggacctgagtttatatcctgcattrgagtggtctcacatctcaccatttagtatatgcctcagcaaaatttaattttaatgtaccattacagaagctttcattgaaaaccccaatccctgcagacttgctattggc

SEQ ID NO: 120655 - DNA, 603 bp, Homo sapiens
tttacacaagaagaattagaattcttataaggagagtcatcttgagtttacaaattgatcatatattttcagttttaatatctactgtagtggaattggtaccaggttagtaatttggaaaccaagtacaaagtgttctccagacatgaaagtttactggcaatagagatgagaggtatttttactctctgtctatgactgctcctcaactcattgcactgcatcttctggccccatcactccattgaaactgtttttttccatgtcccggtgactcctagttgtttaattcaatggaatccactcagtggcattccatacaggakacctctcttcacctttttctcatttgtcaggacaccagccacttagattttccttctgctctttgttgtggcgctttcaccaagttctttgctgcaccttctccttacgagagctccaaatgctggatgaaagtcctggatggaagtcatactggttctttattgagcaacatgcatttcctaggagattgatcacatttatcaccatttagatatctatgtgccaaagtcttcctaagtgtctttccagtacaggtctttctttagaaatacagga

SEQ ID NO: 120656 - DNA, 486 bp, Homo sapiens
atacatattaagcttcctttatttaatgtcaacaatacatttatacattttcctaccagtctcctaataactttatattatttcttatttacctcttatatcattttagaggacggatgactactttaccctgtttctgttataaggcatagcaaggaatggtagttagattggttgtttctgctttggcagagattagaaatgaagtgctcactgttgatgaattatatattgggcacatcaggcccattttgttttcttctgggtcaaacaggccgagtgcctaagaccatacactgctgggatattctcttccccaagaacattcttggtgtgtttctttgtgttgcctatcagttatgtgagcacttactctaagaatgtgaatctgtgcccaagggaatattatgtctttcwgcggttgactagagagttattgaattatgtaaaatatcacaagttcattttgatgaaatgtatattgtc

SEQ ID NO: 120657 - DNA, 621 bp, Homo sapiens
aagaaaatctttgcccctcgtctagaaacttttgtgtaataaaaatacactataactttaaaaaattttaggaatgacaactagaattagcaaaaccaaagctaaaaccaaacatttgttaggactgtaagttcagacccttctaattggtaggtatttctggaactaattatcgggtactttgttgattgctgtcctgcatgccagatttctgttcagatgagttggttagagcatcttattgtagaaggtcaaaacacttggtcacctctaggtcttatgtaattgctgatcttacataattaattgaatagttttaaaaaatcttattctgcaggcataatgaagctagggatttgggggtggatcaaagcaaatccatcattgtttctggaaaaggaaatcaaaatataagtcctgcaagtggtaggtgagtaacatcacctttccagatgaggccgatatagsaccaagaaccctcccacatggttcttgggtatgattcatcactaacttgctctgtcaccttggacaaatcactcaactcccctacatgaaggccaagagaaacttgaggttaccatgcgaaagtactttcaaaaattctattaaaaatgcccc

SEQ ID NO: 120658 - DNA, 618 bp, Homo sapiens
caagaaactgaaatttaccagatcactgcatctggacaatgacactccagacccttcattcatcatgattacttccatacccctccctaattcccgttttcccacacatggttacttttttttttttttcctgctgtataaacccctaattttagtgagttgaagagatggatttgggactgattttctatgtccttgcctgcagcacctgaataaagccttcttccttggcaatacttgttgtctcagtgactggctttctgtttgatgagcaacagggccttagaccaaatccctggtgttttggtaactgtattagtccattttcacactgctgtaaagaactacctgagactgggtaattyatggagagaaaaaggtttaattgacttacagttctgcaaggctaggaggcctcaggaaacttccaatcatggcagaaggcaaaggggaagcaaggaccttcttcacatggcagcaggagagagagagagagagaaagagagacaaagggaagtgccacacttttaaaccatcagatcttgtgagaactcactcactatcacaagaacagcatggagaaaattgccccatgattcaatcacctcccacctggtt

SEQ ID NO: 120659 - DNA, 488 bp, Homo sapiens
tccattgaatgataaaattcaatggaacatctacaccctcttttctgtggggataagggctaatttatctacaaggttygttgaactccttaaagattagagactgaaaaaagtgccccaattgcaattaaagttttaccaatgtaccgtatgaaatctactttaatctgtaggtgaagtaaactataggttactttcttcaagaaaatttaaaaatgtcatttcattatatttctgcttctacgtaaacatgaagaacaacaacaacacagtttctagctctagctcagggctaaatgtcctgaggataatagcatgaagtgcagagggaagaatagcccagagtcctgattcagacttaccaagtagaatttcttctttcttaacaatgcagggggcagcactagataattggaggacttggggaaattgaagaaacttgggagcagaaaccacaacaaaatcacagcatggtaaagctgtaacac

SEQ ID NO: 120660 - DNA, 488 bp, Homo sapiens
tccattgaatgataaaattcaatggaacatctacaccctcttttctgtggggataagggctaatttatctacaaggttcgttgaactccttaaagattagagactgaaaaaagtgccccaattgcaattaaagttttaccaatgtaccgtatgaaatctactttaatctgtaggtgaagtaaactataggttackttcttcaagaaaatttaaaaatgtcatttcattatatttctgcttctacgtaaacatgaagaacaacaacaacacagtttctagctctagctcagggctaaatgtcctgaggataatagcatgaagtgcagagggaagaatagcccagagtcctgattcagacttaccaagtagaatttcttctttcttaacaatgcagggggcagcactagataattggaggacttggggaaattgaagaaacttgggagcagaaaccacaacaaaatcacagcatggtaaagctgtaacac

SEQ ID NO: 120661 - DNA, 565 bp, Homo sapiens
atttaaggctagagcatattttatacttgccattcagttctgcctgtggtggcccttctccagacccagcactccaatctttagcccaagatactctaatgcccttggcagtagcttcttctaggcttgctgaatcctgtacagcttagtctaagtcacaattgataatggtgccctcctattggtcctgggtctgggaaaatgcctggggtacatcctggtgcctatccttttagagtttcccagcctcttgccaggttagctctagcccttggaaaggacaagatgctctcccgtggaatggggttatacagttttccagtggaaaggkggaccacagtgggacactcacttcccctctcattttgggccttcactcacagacttcagttagaccatgccgcagaggttgcctgtccaccttctcttccctctggtatctgaagtattctttacttttctggtgaattcccatgttccttcttggataaaagatcatggtgcaaatctctacatattattttgcttctttcaagtgggtaaggcatgctggaaaagcctctaa

SEQ ID NO: 120662 - DNA, 547 bp, Homo sapiens
gcagagaagatttagcatcatgtttaactatcaaaattactcatactactctcactatgttgggaatatagtaaccaaatactatgggaattaaagyacatgcccattcttcatgttaaagatagaaatattatttttccattctgtcctggaaatgaataactgtcattgacaggtccctcagttttggaggcagcctgaaatgactatcagatcccaggtgcccttgggtcaaaagatgaattctgtgactttccaagatgacctataaaggttgtatgatagtgatgttttaagcactttctctagtaaatagaagtcaaggggctcgtggttttcacaatttttccagaaattatctagcccagtcctactgctagccttttccaggcagttataatggaagcatctccaaggacaagagaaggaattattctttcaccttgagtatttttactgtccagtcacttcataatctaatgatttaggattaatgaacaatcactaaatatataaccatcaatagagagtttgtagagggttaatc

SEQ ID NO: 120663 - DNA, 504 bp, Homo sapiens
gatggttttaaaaaacgggagttttcctgcacaagctctctctttgcctgccaccatgtatgtaagacgtgacttgctccttcttgcctttcaccttctaccatgattgtgaggcctccccagtcatgtagaactgtaagtctaataaacctttcttttgtaaatttgccagtcttgggtatatctttatcagcagcgtgaaaacagactaatacaaccctcctcccccattcaaagatgtccagttggggtkgtggaaacagtaaaggagaatcagtcatatctagctacttggcctgggaagcctccttgttctttatggcttgcaactctcctgtactccctagagatacttgggcaatcagggtacactggtaacagggatcccaccataccacttcctctcagagagacacctggaagccaggggtggggaaattcatcctcccttcccacacacacactttagtcaacattagcagggaccagtgagaactgcagtag

SEQ ID NO: 120664 - DNA, 504 bp, Homo sapiens
gatggttttaaaaaacgggagttttcctgcacaagctctctctttgcctgccaccatgtatgtaagacgtgacttgctccttcttgcctttcaccttctaccatgattgtgaggcctccccagtcatgtagaactgtaagtctaataaacctttcttttgtaaatttgccagtcttgggtatatctttatcagcagcgtgaaaacagactaatacaaccctcctcccccattcaaagatgtccagttggggttgtggaaacagtaaaggagaatcagtcatatctagctacttggcctgggaagcctccttgttctttatggcttgcaactctcctgtactccctagagatacttgggcaatcagggtacactggtaasagggatcccaccataccacttcctctcagagagacacctggaagccaggggtggggaaattcatcctcccttcccacacacacactttagtcaacattagcagggaccagtgagaactgcagtag

SEQ ID NO: 120665 - DNA, 461 bp, Homo sapiens
gatcttctacctcagtaaagtttctaggggtccaatggtgtggggcctgtcgaaatattccttctaaggtgaagaataagttkctgcatttcacccctcctacacccaagaaagaggcacaatgcctagtgggcctatttggattttggaggcaggacattcctcatttaggtgtgttactgttgcccatttattgagtgatacaaaaggttgccagttttgagtggggtccagaacaggagaaggctctgcaacaggtccaggctgctgtgcaagctgctcttccacttgagccatatgacccagcagatccaatgatgcttgaggtgtcagtggcagatagggatactgtttagagcctccggcaggcccccataggtgaatcacagtggaggcctctaggattttggagcaataccttgccgtcttctgcagataactactcgtcttttgagtgacaa

SEQ ID NO: 120666 - DNA, 643 bp, Homo sapiens
tgtaaactcatggctagaagttttggcaggaacatcttgtaaatgaaaataaagatccatattcagagtaagtgtcttttccagtaaagtcaaagtgctgcacctttcatgatgaaagtgatccagtgtaatcaacccgtttttaggtagcaggctccagggaatggttccatatcaaggactcagtattgttctctacctctggcagattggacagtaaagagtagctgtggccaggttgacaatgggagtgaaagtccaattgcttaacccagcataacctccattcctactgccatggtcactttctttgttaacctgttgggcaatggcaggaggggctggagaaagaggctgactagtacccgcagaagagataatcttatccacttgtttaattaagtctactcttttgagatcatccttttatgagaattcacacaggacaaaataattctcattattcrtccattcagataagtctataaacatacttttccccacgctatcttggaactaatttaccaatcgtgctccttccaaatccctgaccacctagtcaaataattgatcagagcttgggagttaatatagactcttacttctgactgttttttgcttcctaggaaaataaacagtccag

SEQ ID NO: 120667 - DNA, 508 bp, Homo sapiens
tcttttgagatcatccttttatgagaattcacacaggacaaaataattctcattattcatccattcagataagtctataaacatacttttycccacgctatcttggaactaatttaccaatcgtgctccttccaaatccctgaccacctagtcaaataattgatcagagcttgggagttaatatagactcttacttctgactgttttttgcttcctaggaaaataaacagtccagaatactgcttgaagttctaccccctgggaagattctcctttatcactgtttttcaggaatgttccagaaagggcctttagtgctacagctgtccatttgtaggtggtacctgcatatcaagcagaaccaataataaatcaggcctcagttttcccttcctagtcaacaggtcacaggaaattatttatgtgggcataggagtgggcttagagaaaaaaggtaatgtagcaggcgtagaggtcatgggtatttggaccattttctcatacaatt

SEQ ID NO: 120668 - DNA, 508 bp, Homo sapiens
tcttttgagatcatccttttatgagaattcacacaggacaaaataattctcattattcatccattcagataagtctataaacatacttttccccacgctatcttggaacyaatttaccaatcgtgctccttccaaatccctgaccacctagtcaaataattgatcagagcttgggagttaatatagactcttacttctgactgttttttgcttcctaggaaaataaacagtccagaatactgcttgaagttctaccccctgggaagattctcctttatcactgtttttcaggaatgttccagaaagggcctttagtgctacagctgtccatttgtaggtggtacctgcatatcaagcagaaccaataataaatcaggcctcagttttcccttcctagtcaacaggtcacaggaaattatttatgtgggcataggagtgggcttagagaaaaaaggtaatgtagcaggcgtagaggtcatgggtatttggaccattttctcatacaatt

SEQ ID NO: 120669 - DNA, 643 bp, Homo sapiens
tgtaaactcatggctagaagttttggcaggaacatcttgtaaatgaaaataaagatccatattcagagtaagtgtcttttccagtaaagtcaaagtgctgcacctttcatgatgaaagtgatccagtgtaatcaacccgtttttaggtagcaggctccagggaatggttccatatcaaggactcagtattgttctctacctctggcagattggacagtaaagagtagctgtggccaggttgacaatgggagtgaaagtccaattgcttaacccagcataacctccattcctactgccatggtcactttctttgttaacctgttgggcaatggcaggaggggctggagaaagaggctgactagtacccgcagaagagataatcttatccacttgtttaattaagtctactcttttgagatcatccttttatgagaattcacacaggacaaaataattctcattattcatccattcagataagtctataaacatacttttccccacgctatcttggaactaatttaccaatcgtgytccttccaaatccctgaccacctagtcaaataattgatcagagcttgggagttaatatagactcttacttctgactgttttttgcttcctaggaaaataaacagtccag

SEQ ID NO: 120670 - DNA, 537 bp, Homo sapiens
tcccattcttttccattcagtgccctcactttaacagtagacacctgrtgaggctgtgcatgcacttttggttgcagatcagccacttgcatgataagagcttgtgtctgtttttccacaatttcagctctttctctacaggagataagactctcactcaaggcaatcttagaagacttgaggctcagtatctgcttctgaagccgggagttagaattcctgagttcataattttctttcatcacttcgtacagtgaacttaggagaaaccaacaagcttcattatgttccttggttctccacatatggccaaaggtattatgtatagagtcactaagctcctgcctctcaggattggtgaatcagtagtgtcaaatgcatttattttgtctaactctctaaacagttcatgccaacgactaatagtgttctccatactattagaagtagagtccttagcattttgggtattaagcaccgaactccagaaaccccaaaaccaatgaaagaactccatccttaatattctgttcctct

SEQ ID NO: 120671 - DNA, 582 bp, Homo sapiens
attataaattctttgtcagcagggattagacccctgcagtttcctgtatataatattttgcaattagatgtttgatagtgctttgaaataggaactcagtttttaacttttggtctttttattttcaacataatgaaccatgaaatagtgaaaattccatttttcttgttatacgattttaggcattgtcattttttycagttacaagctcagttacagagagaaggaattatactacctcttacagaatcagcaaccaacagactcacaacacaaccaactggaaaaagcagaacaacccaggagctgtatactatggaagaccaggttgaaagactgggctgactttaggtcggccttcttcatgtagtcacccacagatgggttttaggagctctggacatcccccaaaattccttgttggaaaatttgggggtgaattagtgtctgttgcttactcagatgctcaaagaagctcaggtatccccacttccctcaaaaaggtaaaatcacaattctgtgttttctgttttcctgcttccattagattgagaaggcaatgtgtttaagggcagctaaggc

SEQ ID NO: 120672 - DNA, 591 bp, Homo sapiens
tttttacctaaggcttggttccagcgttcagtcaataatcttttaaatgctcagctaatctcaacaagatagtgacctagcccttgagtcagcatttgggtgctgggaacaactgataattatcattcattggcaattcaaaaaaactaatttttactcaaagttttttttaatatccagaagaattaattggatattttttcagcaggactgagggacttcttaataaaaatttcagctagcttaggcatccattacagagacaaattattattttccattaatagggctttmtgaaaatattaagatacactcttgctattatagcatttaaacaacacctccctgaaagttcttttgctctgagaaacacaatttgactcacattacagttaacgcgattttaaatataccagtgaaacgatgcctgcggttgggggaacagagcaaactcagactctatcaaccttctaaacatgaatcttgataatttcatatggagagaataaatatttttccacttgaatactccagaatacctgcagaaataaagacttacaaaaacaaatactaagaaaactacctgtttaa

SEQ ID NO: 120673 - DNA, 546 bp, Homo sapiens
tgcctaaaatatattctaagagacactagcttggagagatgcccagggataaaaatgttcccaaaatccaagtaaacttgagtgaggccgtgcacattttccctctcatggtacaataaaccttagtgtaaagacttagagactttcagtatatagaatcttgtttcaatatcttaactcagcttttccccaataattgcttaagactaacaattttcatgacaacaattattcatagagcctatttcagtggtgcttttgtaggtgaaaattwtgggcaattttctgatttttaaaaatctattactgacattacttatttgtcctttcaaaaagatacaaagctgaaaaggattttgaagttagctgctaatgtggggactgaggtgcccatccatactcatgggcattcacaacaggccaatttccttttaccacccttggccaaaattacaggattggaggacgcacattgttagcccagcccatccccctcgacctcattcatgccatcactagagtcttcacagagcaatttccagcttg

SEQ ID NO: 120674 - DNA, 603 bp, Homo sapiens
ggttctacatataagcaaataaaagccagaaaagttgagcaaagagtacaaatgggaaatttattgaagataaaacttattttctcattgtacttgccaaaatttaacatcttcatgaaaaatctatactggaaagcatttgagaagtaggtgctttggggaaagctaatttaaagcagccttcttggagggcagcttggggtcattgattkaaaagataaatacctatcatttttgatccagaattccttttttagcacctaacagaaatacttgtagttatattcaaaggagcacatttgtaaggatgtctaatacatttattataaaagcaaaaatttgtgaacagctaaatttattgaaagagtaagtgtcaaaaatacagaatattttgtttgaattaccattgaaaaggtttagatttaaatgtactgacaagaaaaaattatctaggatatacatttatggaaatagaaacacattgtgaaatcttatatagggtatcaccaacttgatattttatacaatagatagaaggaaatactaaggtatgaatctatatgcatatatagaagccaaagggtatgtttataagacacacaa

SEQ ID NO: 120675 - DNA, 603 bp, Homo sapiens
ggttctacatataagcaaataaaagccagaaaagttgagcaaagagtacaaatgggaaatttattgaagataaaacttattttctcattgtacttgccaaaatttaacatcttcatgaaaaatctatactggaaagcatttgagaagtaggtgctttggggaaagctaatttaaagcagccttcttggagggcagcttggggtcattgatttaaaagataaatacctatcatttttgatccagaattccttttttagcacctaacagaaatacttgtagttatattcaaaggagcacatttgtaaggatgtctaatacatttattataaaagcaaaaatttgtgaacagctaaatttattgaaagagtaagtgtcaaaaatacagaatattttgtttgaattaccattgaaaaggtttagatttaaatgtactgacaagaaaaaattatctaggatatacatttatggaaatagaaacacattgtgaaatcttatatagggtatcaccaacttgatattttatacaataratagaaggaaatactaaggtatgaatctatatgcatatatagaagccaaagggtatgtttataagacacacaa

SEQ ID NO: 120676 - DNA, 599 bp, Homo sapiens
atttccacctaacttattgaatcataaaacaatcctctggtaataaaaattctcattcttctgctttccaatcagagtgaagtacagaacttatggaaagaaaatttgattattctggatactgcaaaaaaacatggctatgaagtagttgacacattcactataacaatggggcgttacaaagagtttctacaggggamgtgtggatgtcatttccatgaggtatttatgctggctatctgagttttatagcttttgatcttttaaaattgtttgttgtatctttaattgtattgtcagtcttattttgcatgaaacaaaaaacaatgtcaggtggagattaaatgatatatgttcatcatcattcagccaaggcatgtagtaaccacaactttagctctaccaaatgagatgttaaaaaatttatgtttgtttagacacttcaaaactagaacaattggtcaatgcaggcaggaatatgggaacctggagagcacttattttctctaatagacttcaagccttcccatcagaaattgcatccaaaaaaaaggtggcaaaggttttcagtagcagcagcttgcaaagcacgactactt

SEQ ID NO: 120677 - DNA, 625 bp, Homo sapiens
cataaaaattctggcttgggggacttttatcttctgatgttcaactaaactattcccacaatagattcaaggatacctgagaagggttggtataatcattacagtaagatattgatgttttttctttggtttgtggttagaattctatcatagacataacaaacttgcttcagtgagctctcactgccataggtgagatkaaagatcttgaggtgtttctttcatccgtcaaggcaccaaaagagaatatgttgccaccaagaatctgtaaacaatttcccaactggtgtgcatcaattttgactaacatgttcctgctgattagaaaagcaggtgtttctttttatgagtggaaatggattacgttttcctagtgtttacataggacaacaaacaggatccaggtagctcttgcccaagagaggttttggatggtgccttcggttatgtggcaaacacctactgtgaacaagctaaaacctggaaagaatacaataatgttatcaacacaaacctggctgcagaagggacaaatccacaaccaactgatatgttattattcattagtctaatcaattatgcagaccttatataatatcttccttttttggcaaatgtagctaca

SEQ ID NO: 120678 - DNA, 535 bp, Homo sapiens
ttttagggaaaaaaaaagatacaaatatggttaacatagttagctgatatagaagaacccagaatttaactttcagcatggctatttttaatgaattagtatggaaatttaattcaatagatatttttgagtatctactctatgcaagcattgtactactgctgtaaagtgagttagaagagcattttataggactcccrtaagtatctcaaaatcagcatatccttagagggagaattaatatttcctttaaactttcctcccctctggtattccctaatttactctatcacactaccatttataaactagagctatcttcgacttttgcttatctttctccagccctttcacgacccttaaccagccagttaccaaatcctgtttacaagctatatattttccacgtctttctcctacactacattccaactgccttgaccttgtttattcttttactaaatcattcaacatttattttgtggtccagttcttgaactaaacagtagtaatataaaaataaatatgacgtact

SEQ ID NO: 120679 - DNA, 498 bp, Homo sapiens
gaattcgaggtagagctatatctgtcccaggccacagtccccagagttaaagctgtagaaggtagaagaaatggggtttygtatgtaggcttctcagggacccagcaggagatgaaaagatacctgaggcttttgatcaggatcagctggaaaaggtagctgagcctctcaatgctccagacaactgcctcaacatcatggcttttttgaggctaccccccaacaatgagacaatgatcgaggtcaacagggatgacccccaaaagatttattttgccatcttctcccaccttaaatcaaaaggaaaaaatttaggaaagttatgagggaacggaccccattcaccacctccaacccttccgtgttactttttttattgctgtgcaacaaattaccacaaatgtagcaacttttaaaacaacatccattcagtaggtcaggtttggtagcttagaaatccaggggcagtgggacggtgttctctgctcagagctcaaa

SEQ ID NO: 120680 - DNA, 561 bp, Homo sapiens
cacagcatcagctttttaaagtgaaaactgtggagacttagaaatatgtgatctataagaacagacttgccagacttggccttgaataaaagagtcattttatcctacagaagaattgtgacaactgcttaatagtaatgatcaaatcacagcaacagcattcaagttcaggaaataatgagctaaagtaaaaccaggaggaatttaagacaagctaaaatgacactcttatatcttgacatttcttcactacaccttattttataactggggccatggtgtcttaagttcctccattaaggcagacaacccctaattttgcattgcctggcaaagatgatagcctatttcccacaggaaaatgccaacaccttactgggcatgcttgatgataactgacaatatcagagcctgaaccgatayggctgtgttgggttctgaacaaactgcttcagagttttgtaactgataccatatgctttactcagtccccaaatgcaactagacaaaacccatcgtcaatctgttccagattgtcttgtgtattttatggctaaggac

SEQ ID NO: 120681 - DNA, 545 bp, Homo sapiens
ccatgtgtccagctaaacctcctgggttaaaagaaagaaggggagaaagaatactgggaggaaattagcaggctctgctagaaccttcctctctggttttagactcccacctacccagagaggtgggagtctatatagaaytctatatagaacccctattctccccaaaggagaccacccagttcagagtcttaagatttctgggagatgtactggatgctgcaagtttttccttatggtccaatcacctatagccaaaaagacaaattatgtgccatatccacttcatactctgtatggagaataacctcaaagataactctcattcagataagaaaggaatggtaaatatatggtggtccgttgtccacagcaattatcatatttggtggcaggacttacagactccctgttccaacatggaatatgttctttggtttgctcaactgttacacttttttttggagctttttggtttgcttagctgttacgcttttgaatattgcatttttttggagagttattccttacttattatctggagg

SEQ ID NO: 120682 - DNA, 545 bp, Homo sapiens
ccatgtgtccagctaaacctcctgggttaaaagaaagaaggggagaaagaatactgggaggaaattagcaggctctgctagaaccttcctctctggttttagactcccacctacccagagaggtgggagtctatatagaactctatatagaacccctattctccccaaaggagaccacccagttcagagtcttaagatttctgggagatgtactggatgctgcaagtttttccttatggtccaatcacctatagccaaaaagacaaattatgtgccatatccacttcatactctrtatggagaataacctcaaagataactctcattcagataagaaaggaatggtaaatatatggtggtccgttgtccacagcaattatcatatttggtggcaggacttacagactccctgttccaacatggaatatgttctttggtttgctcaactgttacacttttttttggagctttttggtttgcttagctgttacgcttttgaatattgcatttttttggagagttattccttacttattatctggagg

SEQ ID NO: 120683 - DNA, 639 bp, Homo sapiens
aagaagacttaattaaactagaaagcttctgcacagcaaaagaaaatcaagagataacttgctgaatgagagaaaatatttgcaaactattctcctgatgggggactaatatctagaatacacaaggaactcaaacaacaagtgaaaaagcaaataattccatcaacaagtgggcaacttatagaaatagacatttctcaaaagaagacatacaaatcgccaatgggtacatgaaaaaatgctcgatatcactaatcatcagagaaatgcaaatgaaaaccacagtgagatattacctaactccagtcagaatgactrttattaaaaagacaaaaaaaatagatgttggcaaggatgtgaagaaaagagaactcttatacactcttggtgggaatataaactagtactgctactatggacaatgatatggagatttctcaaaaaaaaaaaaaatccaaaatagaattaccatccaatccagcaattccactactgggtatctaaccagaagaaaaaacatccgtttatcaaagggatacctgcactcatatgttgcagcactattcacaatagcaaagatatgaaatcagcataagtgcctatcagtggatgaatggataaagaaaatgtggaacatgg

SEQ ID NO: 120684 - DNA, 612 bp, Homo sapiens
tatgtcactccctctggagaaaaacatgttcttcattcccaaggtcaaagccatgttcttcaaccaacgcttacagtctcctccatggttttgtcacatcagtcattcctttccctttgccttgtacctgctgtctttttcaccacttccctctcagctcatgaactctagcgagtttcctccaatctttaaaaatctaaaggagaaaccacctccatcttgtgtgtctccatccctcaaggtcaaagaacttttatgcttgctgtcacccttcataacccgtggatgaatagttactgtatcctattgtgctaataaaatagtttcttaatacccaccaatgactttctaataaaatagcttcttaatgcccaccagtgaccgcattctgcctagttgacaagctgttccactttggatctctctcatcccatggactgcctgactttgccactccttgttcccatccttttctgtatctttgtcaggctctcttctctttctccttaaatattygtcagtatcccaaagtttatagagaatgttacttaacagcatggatatgaggaacaggtaggcctgaattcaaatccttgctccactacttatatg

SEQ ID NO: 120685 - DNA, 440 bp, Homo sapiens
ggcctctgttcaaaattcacctcttcagagaggccttccctgaccactcaacctaacaatctaaaatagcatctcatcactctctccttttcctgcttcaattttattcatagcatttatcacctctttaacagtttcatttgtttctggtctgtatcccctagaataacactacctccatgagggcagtgattgttggctcattcactcacatccactagctctagtacataagagattctcaggaggcaagagagaaggaaagtctcaaggaaasagacaacgactgtaataccatgtgataactgctctcacaagatatgcacaagatgccaaggattacagacaaagcatttctatcattccagcaagtcattaaatgctgctcaccctgtttcttcatctaggatgtgaagtggttagagaaaatcatcactgaa

SEQ ID NO: 120686 - DNA, 452 bp, Homo sapiens
gaattcattcatttttatgatccaaaattgttatcatatatttccagtggcatttacaaacgtgcattgtaatagaacagttgttctacccttctctaaaacctttgacaaaaattgaaatgggtaagcaatgacttttctgaaattcaatgatgaatttttactataattcttactgtgttccttaacaacaatttctctttctcttttgaagtccttgagtagtttacactcaaatcaaaattgaataacacttttcaacaaatcagctgttagctctaactttaagtttaggcttctaagctgamtttttcactctgctatataattaaaaggtcttgttacccagggctgcgtccctcatttttatacctatccctcctgatgctctgatacctgagattggttttcatcgtggggtttaaatatgaaaatataaagagattttatga

SEQ ID NO: 120687 - DNA, 548 bp, Homo sapiens
gggctttcatgtgcttcatagctttcttaaccatgaagagggttgagtagtgagatggatgttaagcctactttcaacccatatgaaagggcataaattaaaaatagattatgcaaaatttctaatgaaagatgagtctaacttataggtacaactgccttgaggtctgtttatgccaagcagttaccatagtaaagccacaattacatgacatatccacattcatattaaacctaaaattaaaagacaaaaaaatcacattaagggaaaagaaacctactaaggccacaaaggtcaaagttaaagccacccatcagcctcaggarctccatgtttctacttggttctttattcaaacgagccaccaagtatgttagtacagaacagtgtgctcaaggatagttcccatctaattcattaatattctgaacatacctcttaagagatctctgggaacacaagcactctcttctttagaaacccatttcaaaccaggtttcttggcacaagaataccatgcattccctttgattttctaaacaaactgc

SEQ ID NO: 120688 - DNA, 588 bp, Homo sapiens
gagggaatctgaaaaactattagaggtatgttttaaaatcactataattgggggaagtgtgtgtatgagtattttaagagagtgttattaagctagaactaggttctacaatccatactttcttccctactttataaatgatggatcagatattgatagttttactaatattgtgactttattacaatatttacaatattgtaatattgttacgtaacttatmgtctgacttcctggcttctcgtgaaatagaaaaattgtaataatagctggcttagaaatttctgagtattttgcaggttctgcaggaattaaaaagaaggaaaattataatcatatttgacttttttgcaggctctgcaggaagaaaagagagaattgaaggcagctcttcagtctcaagaaaatctcatacatgaggccagaatacaaaaggagaagttacaagaaaaagtaaaggcaactaacactcaacatgctgtagaagctataaggtaaatttaatcttaaatattattcatcttagccacttaatgactaggtattaagcactaggcttatttttatttttatttttattttattttc

SEQ ID NO: 120689 - DNA, 562 bp, Homo sapiens
ggtccagtccctcccagcaaggtggaagtcagaaccagactggaaccaaggtagaagtgcaggtccatcaggtgctttctcacatggccctactcttcccagacttccctaccataccctggggtctctccagcacacctcacttgcccagcacccagaggctcccgacatggaggctgaaggtgggtgggtccacctggatcaggggctcagttcctctttggtcccaacttcttcccacccccatcctgtcttcccacccagctttcctgattttratctgcctgactcagggacccttggttcagaaaggctctgccagagccaaggctctcttctgggccgggacaggggtctgctgtccatgcacctgttggtctaaccattggccaggcagccttgcagcagcctcccagcaatagctgattatggctgtcctatgtccagtgggaagtcttgcatgattgctggccctgcatcagcactggtctctagttttctctccttcctgtatctctgtctcagagacctgactcgtggcttggtctctggtcagcaggct

SEQ ID NO: 120690 - DNA, 562 bp, Homo sapiens
ggtccagtccctcccagcaaggtggaagtcagaaccagactggaaccaaggtagaagtgcaggtccatcaggtgctttctcacatggccctactcttcccagacttccctaccataccctggggtctctccagcacacctcacttgcccagcacccagaggctcccgacatggaggctgaaggtgggtgggtccacctggatcaggggctcagttcctctttggtcccaacttcttcccacccccatcctgtcttcccacccagctttcctgattttgatctgcctgactcagggacccttggttmagaaaggctctgccagagccaaggctctcttctgggccgggacaggggtctgctgtccatgcacctgttggtctaaccattggccaggcagccttgcagcagcctcccagcaatagctgattatggctgtcctatgtccagtgggaagtcttgcatgattgctggccctgcatcagcactggtctctagttttctctccttcctgtatctctgtctcagagacctgactcgtggcttggtctctggtcagcaggct

SEQ ID NO: 120691 - DNA, 602 bp, Homo sapiens
gtttcacacttgaaaagtgaagtaaaactactacacatttttttttactccaaatctaaatcccagataaataatgtgattactctgtttagaaaagattttatgacacggttattgcaaagtataactcttcctttccctagagcactgaatggtttttaatcgttaattacagattagaaagcttaggaatctgagtacttaaaactactgttgtgcctcgtttctactgggtgaaggtaagttggtttgagatgatgtggttaaaaaaaaaaataaaactgggcaccatgatttactttccaaatatcagtaacacaccattttagaaacctgtctactggactaaacaaagaacayttatttgtccatatctccatacttggggctcaaaataaacatgtaatattggtcagtcattaaggtttgattgttacagtcattctcacttgccattcttatttaatagttagtagtgaatagtttttctccaggccctaaggataatatgtagacttttgaccctgtaaggcaccttgtagaaaggtccatttctatattttggtctagacttgaagaatatgaagcccatggagccattt

SEQ ID NO: 120692 - DNA, 614 bp, Homo sapiens
tcttcaaatcttctcatgactcgggggcccactgagcatttcctttccttcagttagatcaccctttcrtgtattcattaaaagcacattgaacacttaccatatgcatgatacagtgctgggaaatacagatctgaaatagacaaagatcctaccccccagaggagctcacaatttctaccactggaagaggaatgaagagaagacaacgaaggctcagttctaaggaaggcttcagcagatgaagatacagtaagttgcgggcacattgccttgtagaacatatccaacagcattctcaccatgatcacatcaagttatcagaacacagcctgcctcaggttaagcactctatggatgttagcttttatttgtgttgttattatcattcttgctattatgtattacatttatgttgtattactttttttcttattctactgttcctgtacaataaaattgaagggtaagatgctatctccaccacaaatggtttagtttgtgaaattactgcaatactcagtgattgctgtgattgctgataaatatcaatgccaatgacactttattcctctccctgtaaaatgatgctaccagtaactatcttttcagat

SEQ ID NO: 120693 - DNA, 614 bp, Homo sapiens
tcttcaaatcttctcatgactcgggggcccactgagcatttcctttccttcagttagatcaccctttcgtgtattcattaaaagcacattgaacacttaccatatgcrtgatacagtgctgggaaatacagatctgaaatagacaaagatcctaccccccagaggagctcacaatttctaccactggaagaggaatgaagagaagacaacgaaggctcagttctaaggaaggcttcagcagatgaagatacagtaagttgcgggcacattgccttgtagaacatatccaacagcattctcaccatgatcacatcaagttatcagaacacagcctgcctcaggttaagcactctatggatgttagcttttatttgtgttgttattatcattcttgctattatgtattacatttatgttgtattactttttttcttattctactgttcctgtacaataaaattgaagggtaagatgctatctccaccacaaatggtttagtttgtgaaattactgcaatactcagtgattgctgtgattgctgataaatatcaatgccaatgacactttattcctctccctgtaaaatgatgctaccagtaactatcttttcagat

SEQ ID NO: 120694 - DNA, 579 bp, Homo sapiens
ttaggtttgggggccagtctcaaatacagtactctcattatatatgctatgattttattaatctgtgtttccattagccttggaagtcagactatgtatttctaaagagttcactggtcctcaacwtctttaagtctttgttacctgcaccagcatatcatccttccccatcttgttccttcttttggaaacaagtataagagctttcatcaatcctcactgcatttcatcttggcctatcaatttataacctgcgaagatgcttgttgattctgattctgttacctaaattattcattttctctccaatcctctaattatatatatatatttgataaacatgcattttgtattttcatgtaaatcactgacaggcatgtggtcctagaaacttgcttccagattaatattggtccatcaatcatcttgctttaggcactagttactataatcaaatccatgtttattattaatcctctagaggcttttgtcatttaacatggcctatataatactctggtaattacttcttacatactgatgtaccacccatatgaacacttgatttttgtaagatta

SEQ ID NO: 120695 - DNA, 564 bp, Homo sapiens
tggaacatttctagcctcagtacacaggtagcgtagcttctgttatgctgggctttgtgcagtgaggccacttcagactgcctcggaatacgtggccatatttttttcatttctcccacagatatttaaacctcagctcctgaaccatgtattcgatataagtactcacaggaatttttcttggcttaaactttcactcacagctgtaaaaatttgagttcacttstcttttttttctcttattgggagaagtgtggaagcgagatggagctaattctcagcctatcatcttgcctgatgtctggagtatgaattaataaatacaatttaaaaacaatatgcttctctcatttgtaaaacgtcctttgtttattttgcaaataggtgaattaactaatggatatctgtgtccctgaacaagataatgaaattgttcacgattcagtttacagtttattaggtacttagtgcatttagcacgtcagatgcaccacattaaaagaaataacagcaaattcacaaccacaaatgccttcctaatccacttgtcccactagagctcat

SEQ ID NO: 120696 - DNA, 588 bp, Homo sapiens
agagttgtactctggccaggcacagtggctcacacctgtaatcccagcgctttgggaggccgaggtgggaggatcacttgaggtcaggagttcaagaccagccttgccatggtgaaacaccgtctctactaaaaatataaaaattagccgggcatggtggtgcatgcttgtaatcccagctacttgggagtctgaggtgggagaaccatttgaatccatgaggggcaggttgcagtgagctgagatggttccactgcactccagcctggacaacagagcatctcaaaaaaaaaaaaaaaaaaaaaaaargaaaagtatcatattctagatcttgactgacaaatggattcttaaaaccaaaatagagataatagttttcaaagcccccaaatttgattgaatgaatcagttttctaactgaagaatttttttgagccctgtacgcctcaaaaatttaaatttatactattaatggagaaaagtggatattaatatgacttggctttcccattcaaaaggacataaggttcaaatagattggaggaggagaaatgttgggttaagaggcttgcctttatagctcttgag

SEQ ID NO: 120697 - DNA, 472 bp, Homo sapiens
aattgagtgacagacaccttgattgtggccaaacccactgtgttacacacaccaaccatccctaccgccctatcctctcccccaaaataaacaggtttttatgcctacagccatatcttattctcaaaagtgacctggtttggacactgaaacatataatcaccctaacccagtaggcaagtagggggcaaccctttccagaaggaaagattggcatctygttttttggatgaaagttggtttatgtcacgaacccaccaatcttcttctagggcctattttagcaggcagaaaagagaattacctagaaaagacagagtaaagagataagaacaatggagcaggctgaatttccacagtttaatgtggtgagaatacagcagattttaataagtcagcagatagtacaaacagtacccagatttgagccatcttactggtcccctctcaagaatgtatggccacaaggaga

SEQ ID NO: 120698 - DNA, 570 bp, Homo sapiens
tttgaaaatggagaatttaaatgtcaatacaaatgattttataaatatgcagtgctttggaaatcacaaattctaaagtttttgaatgcaaagagatgtcagcactcttaaaggttttaaaatacgtcatttgctcttatttctgttacatggttttatgataaccattttaagtagctagagactgttactctaaattgagtttctcagaaagagatttttttaaaaccataacaacaacaaagttattactaaagagaaaggatttattccccaagttgctttgcaaaagtcaatcatgcctgcagaggaacttgattaatggtgcataatctacagatgttatggaagcattgtaagtgagaatgttaattatctaactttttagcaaaaagataagagtttaacctttagaaaaagaaagacaggactaaataactcatgggaattagtaatgggatagtgagctttttrtattcacaatggcaactgaaatccatcccagatgacaactgacagaaacagatgaacgtcagtttttaccaaggctgacacataaagcatcagcag

SEQ ID NO: 120699 - DNA, 507 bp, Homo sapiens
tcagttgcatcatattgtttatgaactcctaggctcatctgagagctgttcatgagtgtatctagtcttgacagtgtattaacatctttgagaacttcattaaagtataggccaccggccaggcctcagacaggccactggggctatgcatatggaacasacctaagtagctctgaaagtaatagagaaatgagtagatattggaactatagctggaagagagtgggtcagaagttgtagactgaccagccaagagccaaatcatgaatgaactctctttcacaattgccacaaagagaataaaatatctaggaatacagctaacaagggaaatgaaggaccaccataaggagaactacaaatcactgctcaaagaaatcagagaggacacaaacaaattgaaaaacattcaatgctcataaataggaaaaatcaacatcatgaaaatggccataccgctcaaaacaatttatagattcaatgctattcccattaaactaccattga

SEQ ID NO: 120700 - DNA, 366 bp, Homo sapiens
gataacatttgcgttgccatgtgggatatggccttgcatactcccagacaccctgaggggaggctggagaatgttattcacacaaggccagcatcagatcctgggctaatcaacaggggtgcttgtaacatakgaatcacgtccattatctggcccacacttaggattctgagtctgtcaatgaagttggtcaaattggcaaaaatgtctgttctgatctctgtgaacaccagagagctataaaatttctctgagtggaaaattcaactctagcagaaattacaagtctgcagccaacaccaccaagcaaactgaataccggccagaatattaaaaaaacaaatgaccacaaaccatagaaaatat

SEQ ID NO: 120701 - DNA, 534 bp, Homo sapiens
gctgcagggctgcatttcttctggagccccatggagagagccattccttgtcttttccatcttctagaggctgcctgcatttcttggctcatggctgcacttctccaatctctgcttctgtcatcacatctctcattcctctgcctaactcttttcattttaatcactatcatgattatgttaggtataccttgctaatccaggatagtcttcctatctcaagatacctaatttaattacatctgcaaagtcycttttgtcatggtgggtaacatatgcacaagttccattgattaaaatgtgaatgtctttaaagggccgttgttctgcctgtcataagaacgtataggttaaaaaattaacaatataaattagaaaatgttttaaattgaatgaaaaaaccccacaacatatcaaaatatgtgggattcagtgaaagcagtgcttagagagacatttatagattttagtgcattaaaaaaaaagtaaggactcaaatctatgatactctttaaaaagaagagcagattaata

SEQ ID NO: 120702 - DNA, 549 bp, Homo sapiens
ttagctgttttcattaaatcaacaacattaaattagtcttatttatcaaaaattacacaaacaaaaaccattctgttttagcctggatttatagctttataacctttgtgccaaatcgtggcaccttaaaatataaatataaaaactacatgagcaataaacccaggcaaaaatgtatgctgacaattctgaatacatgtctagttttattttaccaataattttaaagccagcttatttaytaatgatctactcaagttacatgaacttgaaaggcacttgggcttatttacttaatttatgagtacttcattatttataagccaatttggaaccaggcagacacaacataatacatgtatatccatagaaacacatctaaacacaaacacacgcacacacagagttcagggggtgggggagagagagagagagagagagagacttttactttgggaccctagccatgggatagcagtacaaacttactggcttacaaaagatgactggattcaaattatttctggcaagattggggcctgttcatac

SEQ ID NO: 120703 - DNA, 621 bp, Homo sapiens
aaaaacatacagatattggtataacagcttgaagcaatagttatactctataaatttcatctcttttaagaaaaaaatatttcatggtgatgttagtgagtcttagtatatttttaaggatcaatcattacaactatgtaagttcttgttttttatttatttttattttttgagacagagtctcactctgtagcccagggtggagtgcagtggcgtgatctcagcttgctgcaacctctgtctctcaggttcaagtgattttcctgcatcagcctccccagaagctgagattacaagtgtgtgccaccacactcagctattttttgtatgttcagtagagacagggtttagccatgttggccaggctggtgtcaaactccttacctcaaatgatctgcgttccttggcctcccaaagtgctgggattacaggcatgagccatggcaactggccaaaactatttatgttcygatatgatttggctgtgtccccattcaaatctcatcttgaattgtagctcccataattcccacgtgttatgagagtgacctggtgggaggtaattgaatcatggggcggggggttttcccatgctttttctcgtgatagtgaataagtctc

SEQ ID NO: 120704 - DNA, 626 bp, Homo sapiens
gggagactccatctccacacacgccaaaaaaaattttaaatagccaggtatagtggtacttcctgtaatcccatctacttgggaggctaaggtgggagaatcacccaacctcaggagttcagggcttcagcaagccatgatcatatcactgcactccagcctcagcaacagagcaagatcctatctcaaaaaaaaaaaaaaaatcacatgtgggaaatagctatagcacaataaaaataaatgtattaagtatgaacaacaaaaaagctagtaaaggttgaacaacaactatccttaggaaagtggaaataatrtattaataaatatgaaagcaggctagccacggtgactcacatctgtaatcccagcactttgggaggctgaggcaggcagatcacctgaggtcaggagttccagaccagcctggccaacatggtgaaatcttgtctctcctacaaatacaaaaactagccaggcttggttgtgcactcctgtaattcgagctacttgggaggctgaggcaggagaatctcttgaacctgagaggcagaggttgcagtgagccaagatcatgccactgcactccagctggggcaacagagtgacactccatctcaaaataaata

SEQ ID NO: 120705 - DNA, 626 bp, Homo sapiens
gggagactccatctccacacacgccaaaaaaaattttaaatagccaggtatagtggtacttcctgtaatcccatctacttgggaggctaaggtgggagaatcacccaacctcaggagttcagggcttcagcaagccatgatcatatcactgcactccagcctcagcaacagagcaagatcctatctcaaaaaaaaaaaaaaaatcacatgtgggaaatagctatagcacaataaaaataaatgtattaagtatgaacaacaaaaaagctagtaaaggttgaacaacaactatccttaggaaagtggaaataatgtattaataaatatgaaagcaggctagscacggtgactcacatctgtaatcccagcactttgggaggctgaggcaggcagatcacctgaggtcaggagttccagaccagcctggccaacatggtgaaatcttgtctctcctacaaatacaaaaactagccaggcttggttgtgcactcctgtaattcgagctacttgggaggctgaggcaggagaatctcttgaacctgagaggcagaggttgcagtgagccaagatcatgccactgcactccagctggggcaacagagtgacactccatctcaaaataaata

SEQ ID NO: 120706 - DNA, 626 bp, Homo sapiens
gggagactccatctccacacacgccaaaaaaaattttaaatagccaggtatagtggtacttcctgtaatcccatctacttgggaggctaaggtgggagaatcacccaacctcaggagttcagggcttcagcaagccatgatcatatcactgcactccagcctcagcaacagagcaagatcctatctcaaaaaaaaaaaaaaaatcacatgtgggaaatagctatagcacaataaaaataaatgtattaagtatgaacaacaaaaaagctagtaaaggttgaacaacaactatccttaggaaagtggaaataatgtattaataaatatgaaagcaggctagccayggtgactcacatctgtaatcccagcactttgggaggctgaggcaggcagatcacctgaggtcaggagttccagaccagcctggccaacatggtgaaatcttgtctctcctacaaatacaaaaactagccaggcttggttgtgcactcctgtaattcgagctacttgggaggctgaggcaggagaatctcttgaacctgagaggcagaggttgcagtgagccaagatcatgccactgcactccagctggggcaacagagtgacactccatctcaaaataaata

SEQ ID NO: 120707 - DNA, 626 bp, Homo sapiens
gggagactccatctccacacacgccaaaaaaaattttaaatagccaggtatagtggtacttcctgtaatcccatctacttgggaggctaaggtgggagaatcacccaacctcaggagttcagggcttcagcaagccatgatcatatcactgcactccagcctcagcaacagagcaagatcctatctcaaaaaaaaaaaaaaaatcacatgtgggaaatagctatagcacaataaaaataaatgtattaagtatgaacaacaaaaaagctagtaaaggttgaacaacaactatccttaggaaagtggaaataatgtattaataaatatgaaagcaggctagccacggtgactcacatctgtaatcccagcactttgggaggctgaggcaggcagatcacctgaggtcaggagttccagaccagcctggmcaacatggtgaaatcttgtctctcctacaaatacaaaaactagccaggcttggttgtgcactcctgtaattcgagctacttgggaggctgaggcaggagaatctcttgaacctgagaggcagaggttgcagtgagccaagatcatgccactgcactccagctggggcaacagagtgacactccatctcaaaataaata

SEQ ID NO: 120708 - DNA, 585 bp, Homo sapiens
tttttctttctttcagtcttcaatgattcactgcttcatctcgctccaccaaagataaatgaaatctacatctcttatacattaacaatgcatgacaatttacaaatagctaaatttttggagctaactttaagtacctgaatggaatttaatcaacccactaatctccttctcacttctcagttatttatcaagtttatgtcaagggacaaggaaaaattatccaaacattgtttaaaacaatcatcattaattagtaacacttatccaggggggtttttaacctttcccccactcaaggattattctaatgtcagagtagaataaaaaataagtgcagygatgctgactcttccaagcttaacatttctcacaagtcaattagctttgtactgggaggagggcgtgaagggctgcttgcggtagttgtgtagcagcagcacaatggccgcagacaaggaaaacagtttctaggaattcctcgtatataattttatatttttgacaagattaatgacccatgctcccttcctctccatttctttttttggaattctgttggtatgtagttactatattttatta

SEQ ID NO: 120709 - DNA, 608 bp, Homo sapiens
cagtggtcaaggttgagtttgattctgattgaattattaagtaattttaaaaaacactactgcttttcccaatcctaccaagtaaaggatgctagataaaagaaatcccaagtcaggccaggtacagtggctcacacctatagttccaacagtttgagaggcagaggagatgggagtatgttttaaggccatgagtttgagagcagcctgggcaacacagcaagacctcctctctacaaaaataaaaaaaataaatttaataaaataaaataaatatagccaggcatgatggtatgtacctatggccccagttactcatgtggctgagatgggcagatctcttgattctaggagtttgaggccagcttgggcaacatagcaagtcttctctctctacaaaaatgaaaaaaatgcctgacatggtgrtacttgcctgtattcccaggtatgggggcagctgaggcaggagcatctcttgagcccagttggtcaaggttgcagtgagctatgattataccactgcactccatcctgggtgacagagtgggaccctgtctcaaaatacaaatacaaatgaaatctcaagtcagaccagtcccttctaggct

SEQ ID NO: 120710 - DNA, 591 bp, Homo sapiens
tacctcctactctccccacctacctttgcccccagccttaggcaaccattgattaatttttttgtcactatagatttgcctaatctggacaaatagaattgtacaatatgtgatcttttgtggctttttttccctcttagcacagtgttttcaaagttcctttatgtcatagtgtgtatcaatatttcattccttctatggcagtattccatggtagagacacactgcattttgtttatctgttcatcagttggtggatatttgggttgtttccatgtattccatgtattggtcattatgaataatgctgctatgaagattgttgtacaagtttttgtgtggacatatatttttatttttctgggatatatgcctaggagtgaaattgttgcattataggatgactgtacatttagccttttgagaaactgccagamtgttttctaacgtggctataccagttgggtgcaatggctcacacctgtaatcccagctactcaggaggctcagctaggaggatggcttgagcccgtgaattcaagaccagcctgggcaagatagtgaaaccccgtcttgattttttaaaaatcc

SEQ ID NO: 120711 - DNA, 607 bp, Homo sapiens
aatcccagggctttgggaggctaagacaggaagatgtcttgatgccaggagttttttttgttgttgttgtttttgtttttgttgttgttgttgttgttgacagtctcgctctgtcacccagggtggagtgcagtgatggggtccactgcaacctccacctcccaggttcaagtgattctcctgcctcagcctcccgagtaggtgagactacaggyacacgccactactgcccagctgatttttgtatttttgatagagtcagagtttcaccgtgttggccaggctggtctcgaactccagacttcaggtgatttgcctgccttagcttcccaaagtgctgcgattacaagcatgagccaccatgcccagcctgatgccaggagttttagactagcctgggcaacctagcaagaccttgtctctacagaatatttaaaaattagccaaatgtggtggtgcctgtgtatagtctctctccctctctcttttttttttctaactttttgtgacatggtctggctctgtcacccaggctgaagtgcagtggtgtgatcatggctcactgcagcctgaaactcctgggatcaagtgatcaatcctcccacct

SEQ ID NO: 120712 - DNA, 614 bp, Homo sapiens
tgccatggctgaccttgaactcctgcactcaagggattttcctaccctggcctcccaaagtattggtattacaggcatgagccattgtgcccaccgtctctggttcttaaccttctgcctccctcttccagttttaaagaatgcttgtaattacatgggctctcctagatactccaggataatcttgttttaaggtcagctgatgagcaacattaattttatctgcactcttaattcccccttcctmtgtaactgtgctgtgtaacataggacatgagcaattggtggcggtgggggttattactttggccaccacagtaactattttatgccaggtactcagctaagcactggtgaattaagcatgaataacacacactccctaatctccatccattcatgggaggagcacttcacctgccatgctcctgagaatctcgggagtcatagaagtcttctatgaggaggtgatgccaaagcggacaagtgacagaggagtcaaagctagctaggaagagagtagaggtttaaggggaagcatattataagcagaggatattacccacttcagagactcccagaggagaaagagtgtgcgttcaaggggcagatga

SEQ ID NO: 120713 - DNA, 614 bp, Homo sapiens
tgccatggctgaccttgaactcctgcactcaagggattttcctaccctggcctcccaaagtattggtattacaggcatgagccattgtgcccaccgtctctggttcttaaccttctgcctccctcttccagttttaaagaatgcttgtaattacatgggctctcctagatactccaggataatcttgttttaaggtcagctgatgagcaacattaattttatctgcactcttaattcccccttcctctgtaaytgtgctgtgtaacataggacatgagcaattggtggcggtgggggttattactttggccaccacagtaactattttatgccaggtactcagctaagcactggtgaattaagcatgaataacacacactccctaatctccatccattcatgggaggagcacttcacctgccatgctcctgagaatctcgggagtcatagaagtcttctatgaggaggtgatgccaaagcggacaagtgacagaggagtcaaagctagctaggaagagagtagaggtttaaggggaagcatattataagcagaggatattacccacttcagagactcccagaggagaaagagtgtgcgttcaaggggcagatga

SEQ ID NO: 120714 - DNA, 541 bp, Homo sapiens
tctgactttaatgtttgctttgttcatgagcaccacatattgcctctcctatgcagttaagcaggtaggtgacagaaaagcccatgtttgtctctactcacacacttccgactgaatgtaygtatggagtttctacaccagattcttcagtgctctggatattaactgggtatcccatgactttattctgacactacctggagttagcacagaccccacaagttaggggctcagtcccacgaggccatcctcacttcagatgacaatggcaagtcctaagttgtcaccatacttttgaccaacctgttaccaatcgggggttcccgtaactgtcttcttgggtttaataatttgctagaacagtttacggaactcagaaaaacagtttattttctttttttctgagagagagggtcttattttgttgcccaggctggtgtgcaatggtgcagtcatagctcattgcagccttgattgtctgggttccagtggttctcccacctcagcctccctagtagctgagactacatgcctgcaccac

SEQ ID NO: 120715 - DNA, 649 bp, Homo sapiens
ttggacttcatataaatgtaaccatattgtatatattcttcttcagcttcttagtttttcactaaacaatatgttttgctgatayttacattcatatgtacagtaatagttgatttattttaatggctatatattattccattgttagaatacaccaggatttatttttacttattttttttgctggaaaattgggtgtcttttttattttttgatataacaaacaatgttgtaatcattttgtatttacttcctagtccactcctgtaagtttctcttgagtacatactagcaatgaatatgctgagtcactgcatatacatactcacaactttattctataatgtaatattctataaagtagctgtatcagtttatactttaaccagtaatggacaagattttctattacttcccatctttgttattacttttagactctaacttttatcaggctcatggatgtaaaaagcatctcagggtggttttaatttgcatttatctgctcatctatgaagatgagcttcttttcatataattatgagtcattatttttgttttgccttcttttgtttatgcattttgcttgttctatgtcttatttttcctgttgatttttgggagttcatatatattctaaatgtatatt

SEQ ID NO: 120716 - DNA, 630 bp, Homo sapiens
ttcatataaatgtaaccatattgtatatattcttcttcagcttcttagtttttcactaaacaatatgttttgctgatatttacattcatatgtacagtaatagttgatttattttaatggctatatattattccattgttagaatacaccaggatttatttttacttattttttttgctggaaaattgggtgtcttttttattttttgatataacaaacaatgttgtaatcattttgtatttacttcctagtccactcctgtaagtttctcttgagtacatactagcaatgaatatgctgagtcactgcatatacatactcacaactttattctataatgtaatattctataaagtagctgtatcagtttatactttaaccagtaatggacaagattttctrttacttcccatctttgttattacttttagactctaacttttatcaggctcatggatgtaaaaagcatctcagggtggttttaatttgcatttatctgctcatctatgaagatgagcttcttttcatataattatgagtcattatttttgttttgccttcttttgtttatgcattttgcttgttctatgtcttatttttcctgttgatttttgggagttcatatatatt

SEQ ID NO: 120717 - DNA, 650 bp, Homo sapiens
aagtgaatgttcatgatttattccactattagacttctctttattcttaaaaatatttaagatcactaaatttttataggactttaaaaacagtaatgtgctgctttgagtgtgtaggactaagaaatgggattcagagtagtaaagagaaaagtggaatttccaagcactatgaattactgttctttaaaaaacagcaaaaatcaaataacagtattcctccaaaaaagatggcaagtgtaaactctataccttcatgtctcccgtggaatgttagtgatcaatttccacttctctcttttacatcttacttgcccattaactcttatacctaatccaaagattgttaatatggctatgyctcactttcaggacaccttttatttgttacttctcttcactgcaaaacttcttgaaacagtacttattttctctcctccatacacaattgaaatggctctcaactcatgcccagaagtcagtgttcagtctctcacctggcagatagcaacttacaaagatgccccaacaatacctccttgtgtctagacagtcatcattatcctttacctttttctgtatttatttctgctcctaaaagggatctctatgtaaagtattgttatactagtgcttgttataattattat

SEQ ID NO: 120718 - DNA, 500 bp, Homo sapiens
aagcagctagacaaaatcagaagaggtctgttttatatcagagatcttagcctgacagtctagagtgtgggcacagaacccaagcttataggaatttctgaaaggtctgtaaatcttatccagatggacagtgggagctcataaaggattctgcaagccatcacatctgtcaaacctgctatgtctaatccttaagcctgctttatgtgaagacctcctcttcactcctcatttccagctctcatgagtttctttcataggcaaacccagacctggaacaatgtgcctgaagacttcgggtgacacagtacccagacttaaataggaggggagccatggtggaagtggccatccagcacaattttcttggtctttactcatagttktgattccttaaaaaaattaaccacattaaaatatgtgtttcataatctacatctaataatacaaatatttaaagtcttttcaagtttgaatacgctacccatgttgctgctacc

SEQ ID NO: 120719 - DNA, 542 bp, Homo sapiens
gagtattgcttaaattgatgaattgaattagtattttaccttctctgttgcttagctaagcagaagaatttgtcatttttttaatktagtgactggttctattaaaagttacctttgtctatatcattttgttatactaaagcacaaatgtataaggtcaaaaaacattctcaagattttgtttaaaccacagccctcagttgtgtatatttatctcttgttttcatatgcaagatttctcctgaaatgggcaacaattacaagagtttttttcctcttctgaactaagaaaataaatatttaattcacaagtttagaaaagtgaacctgaaaaatcacagggctaggtgggttatgaggcccactggtacatgatagtgttgaatgtggattagaatgaactccgtggattagaatctcagaccataggcaaacatttacttgttttagaataagcacatttgagtctgcaataagtattactatttttaagttgaaaatgtaattggtttctaataataaccatattggctagcattatt

SEQ ID NO: 120720 - DNA, 641 bp, Homo sapiens
tgcttaaattgatgaattgaattagtattttaccttctctgttgcttagctaagcagaagaatttgtcatttttttaatgtagtgactggttctattaaaagttacctttgtctatatcattttgttatactaaagcacaaatgtataaggtcaaaaaacattctcaagattttgtttaaaccacagccctcagytgtgtatatttatctcttgttttcatatgcaagatttctcctgaaatgggcaacaattacaagagtttttttcctcttctgaactaagaaaataaatatttaattcacaagtttagaaaagtgaacctgaaaaatcacagggctaggtgggttatgaggcccactggtacatgatagtgttgaatgtggattagaatgaactccgtggattagaatctcagaccataggcaaacatttacttgttttagaataagcacatttgagtctgcaataagtattactatttttaagttgaaaatgtaattggtttctaataataaccatattggctagcattatttcaatcgtgtttaatgttttccaatgtcatttcatgtcagatatctctcttgattcttagtaacaatttggacaagacagcaaatgctattgtccaagttttcta

SEQ ID NO: 120721 - DNA, 647 bp, Homo sapiens
tattactatttttaagttgaaaatgtaattggtttctaataataaccatattggctagcattatttcaatcgtgtttaatgttttccaatgtcatttcatgtcagatatctctcttgattcttagtaacaatttggacaagacagcaaatgctattgtccaagttttctaaagaagaatctgaagtgaaatgacatcaagagacctatcaagacctgtatccaggaaaaggtaaatctgagctgaaattgtagcccttgtaarttacctacgtgacataccagatagtgttcatgatccatttagtactctgttctaaaaatgagacaatatccatttattcacttgttcatttatttagtgtttgttcagcccttactgcatattccaggcactattctgactgtggcaggagtgaacaaacaggcatggttcttacttgcatgtaattacagtcttatagtgaaaacaagtgttaaacaacaaaatctcccaattattttaaaattataaacttgattcgatactatgtggccatataattgttcctaatttggttggagaagggaggcagttagggaagccttccctgagttagtgccatttaacctgaattatgatagatgataagtaatttgtcaggggaaa

SEQ ID NO: 120722 - DNA, 647 bp, Homo sapiens
tattactatttttaagttgaaaatgtaattggtttctaataataaccatattggctagcattatttcaatcgtgtttaatgttttccaatgtcatttcatgtcagatatctctcttgattcttagtaacaatttggacaagacagcaaatgctattgtccaagttttctaaagaagaatctgaagtgaaatgacatcaagagacctatcaagacctgtatccaggaaaaggtaaatctgagctgaaattgtagcccttgtaaattacctacgtgacataccagatagtgttcatgatccatttagtaytctgttctaaaaatgagacaatatccatttattcacttgttcatttatttagtgtttgttcagcccttactgcatattccaggcactattctgactgtggcaggagtgaacaaacaggcatggttcttacttgcatgtaattacagtcttatagtgaaaacaagtgttaaacaacaaaatctcccaattattttaaaattataaacttgattcgatactatgtggccatataattgttcctaatttggttggagaagggaggcagttagggaagccttccctgagttagtgccatttaacctgaattatgatagatgataagtaatttgtcaggggaaa

SEQ ID NO: 120723 - DNA, 512 bp, Homo sapiens
gtatacatatgttagatatgtatgtatatatgtgtgtgtgtacataggctgggcatcggtggctactttctgtaattctagcactttgcggaggccaaggcagaaggattacttgagcccatggacttgagaccagcctgggcaacagagtaagatcctgtccctacaaaacaaaacaaaacgattatgcacaaacacattatatatatgttacttggcataaaattaatgctgactatatatatgtgtaatgctgacatatacatttacatatagtgtctctcacacacactgaagcattgtgcaaataaatacatgtaatgcygaaggagtattttctaataatttatattacattgtaagtcttaataattgggagaaataaacataatcatagttgtgataattttaactatagaacagcactgaagatgtctaaacttgttttttcagatatacaaatatgtttcctctttgccactacaatgtacatatatatcatgtatgttatt

SEQ ID NO: 120724 - DNA, 582 bp, Homo sapiens
aacttcggagtatttgagatttcagatttttggattagggatattcaatctgtatcattattgttaccgtttggaaacaaaatgaaataacttgctagtgccaaatagttaataaggggtaatgtcagtatttgacactaggcagcatgttctactgcctttctaaatacccactctcatttatccattaaagactctgtccccaaattcccaagtaccttcctaatctggttaaccaggttggaccatatctgacatgggatatttyaccagtatcttcattaacaataatacttaatatttttattcaataactataagaaagacactgagctaggcactttacatgcattcaatgactgcaataattacaaaactctgcataagattctttacacaattttacagataagtaagtaaacaaaacctctgagaagtaacttgccaatgacaaatatctctaccaagtagcacgctacagctcaatctgaatgggaaatctcatgtccttaatcatactatacttcccagactctgagcagatgaaaggaacatgcttcttgacctctttgtcctggccca

SEQ ID NO: 120725 - DNA, 582 bp, Homo sapiens
aacttcggagtatttgagatttcagatttttggattagggatattcaatctgtatcattattgttaccgtttggaaacaaaatgaaataacttgctagtgccaaatagttaataaggggtaatgtcagtatttgacactaggcagcatgttctactgcctttctaaatacccactctcatttatccattaaagactctgtccccaaattcccaagtaccttcctaatctggttaaccaggttggaccatatctgacatgggatattttaccagtatcttcattaacaataatacttaatatttttattcaataactataagaaagacactgagctaggcactttacatgcattcaatgactgcaataattacaaaactctgcataagattctttacacaattttacagataagtaagtaaacaaaacctctgagaagtaacttgccaatgacaaatatctctaccaagtagcacgctacagctcaatctgaatggsaaatctcatgtccttaatcatactatacttcccagactctgagcagatgaaaggaacatgcttcttgacctctttgtcctggccca

SEQ ID NO: 120726 - DNA, 664 bp, Homo sapiens
ggttttgattttcatgtccctgatggcaaatggtgctgagcatcgtttcatgtgcttattggccgtatgtttatctgccttggcaaaatgttcattcagaccctttgctaactgttttacttgggtcattttttaaataaaattattaacttgtaagagtttaacagatatgtcttatcagaaatgtaatttgcaaatattttctcccattttatgggttgtctttttactttcttatggtgycctgtgaaggacatacatgtatgctcgtgctctctctctctctctctctctctctctgtctctcaaaacttttggaccaaagagggaagtataactgtgatttattaagcagccccattgagggctaacagcacatttctgaccactttgtatgctggtaccagccgggggtgcccagcgggtgctccttggggtgtctgcttcagggctgctgcaagggtgcagggcagggctcctccagctgggaaaccatggaatagttggcagctgctttgtacgtcttgagagacaaaagaaagctcaaaatcaagagcaaacactgggtttgcactgaaaagaaatatatcatttccttgaagagaaaaattcaagatgtgaaaaatggaagcaaggaaagaagaactatgaagagaagagagat

SEQ ID NO: 120727 - DNA, 664 bp, Homo sapiens
ggttttgattttcatgtccctgatggcaaatggtgctgagcatcgtttcatgtgcttattggccgtatgtttatctgccttggcaaaatgttcattcagaccctttgctaactgttttacttgggtcattttttaaataaaattattaacttgtaagagtttaacagatatgtcttatcagaaatgtaatttgcaaatattttctcccattttatgggttgtctttttactttcttatggtgccctgtgaaggacatacatgtatgctcgtgctctctctctctctctctctctctctctstctctcaaaacttttggaccaaagagggaagtataactgtgatttattaagcagccccattgagggctaacagcacatttctgaccactttgtatgctggtaccagccgggggtgcccagcgggtgctccttggggtgtctgcttcagggctgctgcaagggtgcagggcagggctcctccagctgggaaaccatggaatagttggcagctgctttgtacgtcttgagagacaaaagaaagctcaaaatcaagagcaaacactgggtttgcactgaaaagaaatatatcatttccttgaagagaaaaattcaagatgtgaaaaatggaagcaaggaaagaagaactatgaagagaagagagat

SEQ ID NO: 120728 - DNA, 664 bp, Homo sapiens
ggttttgattttcatgtccctgatggcaaatggtgctgagcatcgtttcatgtgcttattggccgtatgtttatctgccttggcaaaatgttcattcagaccctttgctaactgttttacttgggtcattttttaaataaaattattaacttgtaagagtttaacagatatgtcttatcagaaatgtaatttgcaaatattttctcccattttatgggttgtctttttactttcttatggtgccctgtgaaggacatacatgtatgctcgtgctctctctctctctctctctctctctctgtctctcaaaacttttggaccaaagagggaagtataactgtgatttattaagcagccccattgagggctaacagcacatttctgaccactttgtatgctggtaccagccgggggtgcccagcgggtgctccytggggtgtctgcttcagggctgctgcaagggtgcagggcagggctcctccagctgggaaaccatggaatagttggcagctgctttgtacgtcttgagagacaaaagaaagctcaaaatcaagagcaaacactgggtttgcactgaaaagaaatatatcatttccttgaagagaaaaattcaagatgtgaaaaatggaagcaaggaaagaagaactatgaagagaagagagat

SEQ ID NO: 120729 - DNA, 664 bp, Homo sapiens
ggttttgattttcatgtccctgatggcaaatggtgctgagcatcgtttcatgtgcttattggccgtatgtttatctgccttggcaaaatgttcattcagaccctttgctaactgttttacttgggtcattttttaaataaaattattaacttgtaagagtttaacagatatgtcttatcagaaatgtaatttgcaaatattttctcccattttatgggttgtctttttactttcttatggtgccctgtgaaggacatacatgtatgctcgtgctctctctctctctctctctctctctctgtctctcaaaacttttggaccaaagagggaagtataactgtgatttattaagcagccccattgagggctaacagcacatttctgaccactttgtatgctggtaccagccgggggtgcccagcgggtgctccttggggtgtctgcttcagggctgctgcaagggtgcagggcagggctcctycagctgggaaaccatggaatagttggcagctgctttgtacgtcttgagagacaaaagaaagctcaaaatcaagagcaaacactgggtttgcactgaaaagaaatatatcatttccttgaagagaaaaattcaagatgtgaaaaatggaagcaaggaaagaagaactatgaagagaagagagat

SEQ ID NO: 120730 - DNA, 590 bp, Homo sapiens
actcagctatgagatatttaacrtatcatgggatatataaataaattaacttccatcaattcctagactacttacactgaaattatggaccaaagctttctaattcaattcccaagtggtattaaaaccaaactgtattgtatttcaagaaactttatccatggttacaaaagtttaaaaacttatcaaacacgtgggaaaactgcaatttaaagataaatgattaggtttcctatttttttaagaccaactacaatgtgaaccataactacactaactgggtgttctctatcaaagtcaacactgcaaacaacaaagggtatcatctggccaagaaaaagataatttctgattccaattcaacacagctcctgtgtaacaggtgtttctctagttctcagctccacatttatgcttgagttatttctatgctagttgtagttttctttttaagttgcctctgggcaaagtacacctttcataacagattgagaactgttccatttcctcaactctaagatacaattttgccccctaatatttctaaaaacaaatgtctcataatcaaaatgtaattgactgtactattt

SEQ ID NO: 120731 - DNA, 590 bp, Homo sapiens
actcagctatgagatatttaacatatcatgggatatataaataaattaacttccatcaattcctagactacttacactgaaattatggaccaaagctttctaattcaattcccaagtggtrttaaaaccaaactgtattgtatttcaagaaactttatccatggttacaaaagtttaaaaacttatcaaacacgtgggaaaactgcaatttaaagataaatgattaggtttcctatttttttaagaccaactacaatgtgaaccataactacactaactgggtgttctctatcaaagtcaacactgcaaacaacaaagggtatcatctggccaagaaaaagataatttctgattccaattcaacacagctcctgtgtaacaggtgtttctctagttctcagctccacatttatgcttgagttatttctatgctagttgtagttttctttttaagttgcctctgggcaaagtacacctttcataacagattgagaactgttccatttcctcaactctaagatacaattttgccccctaatatttctaaaaacaaatgtctcataatcaaaatgtaattgactgtactattt

SEQ ID NO: 120732 - DNA, 590 bp, Homo sapiens
actcagctatgagatatttaacatatcatgggatatataaataaattaacttccatcaattcctagactacttacactgaaattatggaccaaagctttctaattcaattcccaagtggtattaaaaccaaactgtattgtatttcaagaaactttatccatggttacaaaagtttaaaaacttatcaaacacgtgggaaaactgcaatttaaagataaatgattaggtttcctatttttttaagaccaactacaatgtgaamcataactacactaactgggtgttctctatcaaagtcaacactgcaaacaacaaagggtatcatctggccaagaaaaagataatttctgattccaattcaacacagctcctgtgtaacaggtgtttctctagttctcagctccacatttatgcttgagttatttctatgctagttgtagttttctttttaagttgcctctgggcaaagtacacctttcataacagattgagaactgttccatttcctcaactctaagatacaattttgccccctaatatttctaaaaacaaatgtctcataatcaaaatgtaattgactgtactattt

SEQ ID NO: 120733 - DNA, 559 bp, Homo sapiens
cactacccaacttcaatccgtactacaaggctacagtaaccaaaacaggatggtactggtacaaaagacgacccttatactaacggaacagtttaaagaacccagaaatgaagctgcactcttaacaaccatctgatctttgataaagtcaacaataacaagcaatggggaaaggagtccgaatttattaaatggcgctgggataatgggctatgtacatgtgggagattgaaactggaccccttcctttcaccatatacaaaaatcaactcaaaatagatagaaggcataaatataagtcctaaaataattgttttaaatcctagaagaaaatctaagaaatatcattttggacatgggctttggcaaagatgaagtctccaaaagcaagtacaacacaaacaaaaatagacaggtgagacctaactaaattaaagagctctgcagagcaaatgatactatcaacagagtaaacagacaacctacagaatgggagaacatattcacaaactatgtatcygatgaaggttctaatatccagaatctataaggaacttga

SEQ ID NO: 120734 - DNA, 536 bp, Homo sapiens
ggtttcaggtcttagattgaagtctttgatccttcttgatttttgtagaaggtgagacatgagaatccagtttcattcttctacatgtggcttgccaattatcccagcgccatttgttgaagaggttgtccttttccactctatgtttttgtttgctttgtcaaagatcagttggctgtaaatatttggctttatttctgggttctctattctgttccattggtctacatgcctatttttataccagtaccatgatgttttggtaactgtagccttgtagtatattttgaagtttggtaatatgatgccttcaaatttgttcttttttctcagtcttgctttggctatgtgggctcttttttgttccataagaattttaggattkttttttctaattctgtgaagaatgatgatggtattttgatgggaattgtgttgaatttgtagatcgcttttggcaagtatagtcatttttacgatattgattctacccatccataatcatgggatgtgtttccatttgtttgtgttgtcta

SEQ ID NO: 120735 - DNA, 598 bp, Homo sapiens
tgggcgcctgctcttccgtttcactgaactaataaatcatgaatactttccttagccatttaaaagtcatttcctctcattttccctgggcaccagaggcaatcttatacttgaaggctgatgtgtgtgtgtgtgtgtgtgtgtgtgtgtgttttgattgctgccttcaagaataggatgtgatagcaaacaactgctaagattttccatccaaaatttatcaacgacctaaattctagcactgcattcatcaaaaagcaaagatgtatgccttgtattacttaacctttccaagccacctgcttcttattatactttttatttcatattcaacttcctatttgaaattcatacatcttattataatcatgtgtatgctttctaaagtggaattttctaaaatctggtgtttcatgtataaaaattgcctttgtgatcattcatttattcaacaaatactattttgttccgagcgtaacccagttttctagatgtggaaaaggagtaaagaagggataatgtctgtcttcatggagcttagaatttcagtgtgtctggggtcarggagggaaagagacaacagataacgaatattgtg

SEQ ID NO: 120736 - DNA, 393 bp, Homo sapiens
agatctcttactaaaacgtgtcattttttaaaaaatcaattttgttcttctatctctcttctccttctgagtcccccataatgcatattgcttctttttatagtctcttataagtcccttaggctttctttactcttttgcatttcattttctatttttgattcgctgacagataattttacatgatttgtctttgggtttgctattcttttatttyctgaagtctgcttttgaagctatttaatttttcaattcagtttttgcattctttagctcttgaatttctgtttggttttctacttgtggtttttatctccttgttaatattctcattttgttcatgtgttagtttcctgattttgtttagttgtctgtctgtattcttttataact

SEQ ID NO: 120737 - DNA, 627 bp, Homo sapiens
tattcttatataattgtcttatttttgaatgccagtcttcaaactctgaaattctttcttctgcttggtctattctattaatacttgtgattgcattatgaaattcctgtagtgtgcttttcagctcatcaartcagttacatttttttcctatactggctattttgtctgtcagctcctgaattgttttatcatgatttttaacttccttgaattggatttcaatgtactcctgtagctcagtgatctttattcctatccatattctgaatgctatttctgtcatttccaccatctcagcccagttcagaatccttgttggagaggtgatgtagttgtttgaaggaaataaggcattctggctgagttttcaaggtccttgcactgattatttctcagcttgtgggcttatttaccttcaatctttgaggctgctgacctttggatttttttaaaaatcttttatcctatctgatgatcttcaggatttgattgtcatataaggtggattcagctgacaggcttcatttctggaaaattttaggggccaaccctcagctcctaactcctggattaagcgttcttactctgggagacttgtattggtcctcaactttgttctcttgc

SEQ ID NO: 120738 - DNA, 517 bp, Homo sapiens
ttgagactttttttcaacttgcttggtgttctcatgtaatattactatctcttttttataagaaatgtgattattgcccttgattcaaaaggatttattttgttacccaagaaagcaaaaatgctttgtgacacaggttatctgtagtgctacttagagaaattgcagttactgactgttttcaattcctagactttgggaaatattgayaggtcctctcatcctcaactttagtgttactaataactgtagagctggtgaaactgtctggagcttaggttcacagaggtgagtcagaggattttaatcttttggattttaacataatggcttttctcatattaggccccttcaggaagaagaaaatacgaaaaaaacctgttcttaaaattcaaagaaggtttactagctaacttcagaaagatgctggaaagtgattaatttttatacaacatatttcaaaatgtactagttaataagaggaatgctatccagagtggaaacaactttttcaaaa

SEQ ID NO: 120739 - DNA, 639 bp, Homo sapiens
tgagtaaagcaagttattctccataatgtgagtgggccttatctaatcagttgaaggccttaagagcaaagatggaagttttctgaagaaggaattctcaagactgcaacataaaaatcctccctgagctgaatttggtctcaagactacatcactgtcacctgaatttctagtctgctaatctgctctgtcaatttcagacttatcagaccccactattgcatgagccaagtcccggtttcttaaaataaatctctcttatatataaaatctgttatatatcaaatcatattggttctgtttctctgggggratattaattaatacagtaaacaataataacaaagacagaaatcttaagagataatttaatttcaactgctaggtgattttgagtacttcatacctgtacccacacttcagaattaagagtgcttatgaagttcttaaattattctacatttgtttaactttgcaaccctgataaaaatgcaagctccacatctcataatgctaatcttatatctcccatacctcccattgtttagacctcagctcaataaacctctataggttattctctggcagtgtgtgaaccagtttgctgttaatcatacaaaactattattgtgaggactg

SEQ ID NO: 120740 - DNA, 425 bp, Homo sapiens
ataaactgaagtttgcttgcttggaaaaaacatattgttttcacccactgcaagattttagagggagcatagggtctgcagcccgatccagctgaaggaatgcttatctccagtatctctgtcttgtttattgcaaacaaagctcatttttgtccttgtctgacggattttcttttcaatgaaacattttggtcttttcataaatgtaatttttgtctattacttaaccactctgtacctctatttcttcatctgtaaaagaagagtaagagtgkttctttcttacagggtgttgtgagtgttaaatgtattaatacgtacgaagtattttgaacatagtgaatagcgtgctgttagtagcttgtgaaagtgaataatatgctgtcaatagcacatagcgaataatgtgctgttagtagtagtag

SEQ ID NO: 120741 - DNA, 510 bp, Homo sapiens
gcttaatatttctctccagttaaattccaaatcctcaacaaaaacctcctgttttagcccctgcctgcctttccagttttatttcatgctattctgcaacttactttcagtactttggcaagtaaattcaatgaatccgtttccactagataataaatttcatgaagataaattctgcattaattttgagaaattagattcccaatgtctggtccatagtaagaataggataaatattaaatggaagaatgaaagtgaaactcatcaaaaattaaatctaagcaaatagagaaaagtaaaaacagaataaacgtattttatgcttaaaaaacaataagatctagccctcacttcagtatgtcaaggacttccaaaaagtgaagattgctgatagctctgaaagaagtccaggttgcattaaactaggtartacttcaactaagaggaaatagagaacccaaactggtaaacatggtgacactgagaagtgggaactacttatagaaaaat

SEQ ID NO: 120742 - DNA, 613 bp, Homo sapiens
tagctctaccattgtagcattaaaacatcaatagatgatatgtaatgtaaatgaatgagtttggctgtgtttcaataaagcttcatttacaaaaacaactgccaggcaggatttagcccattagccatagcttgtcggcacttacctttgctcatgttatcattttgctcagattatcgatcacctcatctacctggtgaacttctgggaataccattcaattattagcttttctttgaaaccttctacagctcccctgatgatattgtacccctgcartattaattatattacttctataaaacatggaatattcctttatgatggtatttataattttgcaatgatgtgctcataggcttgtttctcagagtactgtgatttcactgtgaatagagactaaatcttattaacatttgtacctctagcaaagtgccaagacagagtaggtgttctataaagacttgttccttgaatgaatgagtgaatgattaaaagtgaaccaacactctctagctcagaggagtttatcctgctagagacagttggccaaggatgtgctttaggttcaagcccagtaccacatcatagatgctttaatagccaacttttg

SEQ ID NO: 120743 - DNA, 623 bp, Homo sapiens
aatttttaagactaagtcttttaccatttagtacttaatagctaacttagcaatatttttagcaactcacttcattgagtctttccgaagaatacaagctgtttcaatagaaacaataagttcttctctttacatactcatattttatcagttaccttaatatttaattaaattatggagttaaaattacaygtacccaggcagtgacaggtttagaaagcacagtcttggtaagcacagtagctgagggacacaaaagtataggggtataccagggaattacctacgatccacaagcaggctttagtcagtaggtttgcaaaagtaatagagagttttagtttatctggctggatggttatgtggtggccatttaaaacatcattttaaaaataagcacttttcctactgatgtgctttggggcttgtgggctaatgttggagacctggttccagcttccctgtctcctggaaactttgccacctccctattcctggtcctagggcccgtgtccaggagcatagctctgtaggaagactgtgggattagctcacacttcctgctctgtgaaatctctttctgcttttaagcacctggatatttctatttctatatttcaaac

SEQ ID NO: 120744 - DNA, 601 bp, Homo sapiens
aactcaggaaataatattctgtcaggtcatgtgttctcattttaggtttgggaaatctggccaaggtaattggaaagtacggtagaattcattgacatatctggatattcagaaaggcttaagataatactgcagatggtaaaataaaaagttagagagccagttaattgtttctccatagatacacatacagttaacttcaactcacttgtttatttatytatgattatcctcagctcaagcatcattttttcagagataactttccaggctcccaatcccacacatggtctaggtcagggcatttattaaacaatctcaaagaatcatgtactgttgcttcatcacactggtctctgcatattcttatgtatacaatagtttgtgttatttatttttagattcatgcctgtctcccctagaagaatataagatcaaaaagaagagtcggagcctcatctgtttttgcttcccagagatagcatcaacatctaagacagtatttggcatgtaaaaggtgctaaataaatatttgttgaataggtaaagagaagcactcctgtctcactgactgaaatactgtgaatatgcaagaagcaat

SEQ ID NO: 120745 - DNA, 348 bp, Homo sapiens
gctggtcggtttgaggcacagatttcagatggcacaggaggagatagcaagcagtgttggacaggtcttcatgtaaggaaggagccaggacccgctcctaccagaaacccgagctctgccatttgatttctattaatgccatgtaagtctctccrtccccgaggtaatttgacacagtctgggaaggctcctgctctctaggagctgggcttttgcaagagatgctgcagacagaaaaactatgttagacctgtgcacatgtttatatctgtgtgtgtatatacatacatacatatatatgaccattttaatttatttaatttatgaatcatttttctataatacaaa

SEQ ID NO: 120746 - DNA, 348 bp, Homo sapiens
gctggtcggtttgaggcacagatttcagatggcacaggaggagatagcaagcagtgttggacaggtcttcatgtaaggaaggagccaggacccgctcctaccagaaacccgagctctgccatttgatttctattaatgccatgtaagtctctccgtccccgaggtaatttgacacagtctgggaaggctcctgctctctaggagctgggcttttgcaagagatgctgcagacagaaaaactatgttagacctgtgcacatgttkatatctgtgtgtgtatatacatacatacatatatatgaccattttaatttatttaatttatgaatcatttttctataatacaaa

SEQ ID NO: 120747 - DNA, 507 bp, Homo sapiens
tgaattcaatgttgccaagagcctctaattttaaagagaagataaaaatctacatgcatatatagaatcttgtgagtttaaaaaaatattggcaacaaattaaaaattgctttaaatacagtacagtggtataatctttaaaaatctaactttgttgtctctttggtttaaaggtttctcttactgttctgtcactaaggtgtaagtctttttttttttttttttttttttttttcagaaagagtctcatcctgtcgcccaggctggagtgcagtggcttgatcttggctcactgcaccctccgcctcccaggttcgagcgattctcctgcctcagcctcccgagtagctgcattacagccacccaccaccacatccagctaatttttgtatttttagtagagacgaggtttcaacatgttggccaggctggtctcraactcctgaccttgtgatctgcccaccttggcctcccaagtgttgggattacaggcgtaagccaccgcgc

SEQ ID NO: 120748 - DNA, 594 bp, Homo sapiens
ctactggacacagttgaggagactcaagttcctcatcacatcctgtaaggccttctacttctgggattgggccctacctccctccctggctccatttcctgcaaaacaaaaaactccctggaattttgaccagcagcaggaagagtgctctctcggtttatcatgattgctatccacaccaaccccttttactctgaaggttgaagaaatgcaagctttagacaagaaagagctggagatggacgcttggagctgcatttatcttcagctaccttctctaccttgagcccaagtcctattactcagcacatgagaacagagagcagggtcctctgccctccagccagttgtcagaagatctatgtttcaggcccattgctgccatggatggcgttaggagttgaacttcccctgtctgtcctcactttactcatctataatatgaggagggcagagcagcaaacaaaagttctatattyattaccattaagacaatgagattcttttgagcccactcaccccccctacaactctccaaccctccagtcacaaagacctaaggagcatctgccatgtgcaggcaatgagttgcat

SEQ ID NO: 120749 - DNA, 623 bp, Homo sapiens
tataatggccctttctttactaaggggtcatgaaatcaatgtaatggacttcagccagccttaacaaaattagaatgaaatagaatagaatggggtggggtgggataggatagaatagaacagatcagagtacactataaacagggtaagtattgttttattaaactctggttttaggggtctgtgtgtgcatgtgagtgcacacatgccaaattgtgatgcaaagtataatttttacagtaggtcataaaatcaaaatatcaaaacctcacagcactcaaccgttttgcatgttgttcatgccacctgtaaggccttctgtgtgcaayagatctttgtctcgctgacaaattccaactcagtgtccaggacacagtttcttctgtgaagccttgattaggcttttactatgtgccaggtatagtgttacatgctttagatattatatgccatttttatcttcacaacaaacttatcaggttggggctgttattacctcattttctcgacaaggaaatggaaggtgacagacccattaagtaaattgcctaaaattgcacaggtgccaagtggtcaagcttgaatttgaacccaagtcctctgaatccagagcctatgcactt

SEQ ID NO: 120750 - DNA, 615 bp, Homo sapiens
aagccgtctaggaaatttgttcattttgcaagattttggaaaatctacaaaatcaatggctgaaatatctgagagggctgtatggaagcatgctttcrtattggactttccaatggaaaattatgtcttgaactctccagactctatccaagaaggtctatggttcatctaatttatttcgatgtaatttctgcaccaaactaagcatcaggattctgccagaataaactagggaaacttccaaagcattataactctgagaaaggcccaggtaagcagaaactgcagctgaagtgatccatttattgatcagaaagtatttgctgactatctactattggatagtggtaaataagaaagatatattttctgtcctcacagagcttgacttcttctgtgatagaacttgtgaatgttcagacatttgcctaactaaaaataataaccctgcaattatgtagtgcttttcagattacaaaagtactttctcaaacataatttcatgttacttatgaaaattttacaagtgcgaattattattatctttttagggaagttaagtaaattataattgctaattataatgactatattatgagtatttaatacacatga

SEQ ID NO: 120751 - DNA, 615 bp, Homo sapiens
aagccgtctaggaaatttgttcattttgcaagattttggaaaatctacaaaatcaatggctgaaatatctgagagggctgtatggaagcatgctttcgtattggactttccaatggaaaattaygtcttgaactctccagactctatccaagaaggtctatggttcatctaatttatttcgatgtaatttctgcaccaaactaagcatcaggattctgccagaataaactagggaaacttccaaagcattataactctgagaaaggcccaggtaagcagaaactgcagctgaagtgatccatttattgatcagaaagtatttgctgactatctactattggatagtggtaaataagaaagatatattttctgtcctcacagagcttgacttcttctgtgatagaacttgtgaatgttcagacatttgcctaactaaaaataataaccctgcaattatgtagtgcttttcagattacaaaagtactttctcaaacataatttcatgttacttatgaaaattttacaagtgcgaattattattatctttttagggaagttaagtaaattataattgctaattataatgactatattatgagtatttaatacacatga

SEQ ID NO: 120752 - DNA, 615 bp, Homo sapiens
aagccgtctaggaaatttgttcattttgcaagattttggaaaatctacaaaatcaatggctgaaatatctgagagggctgtatggaagcatgctttcgtattggactttccaatggaaaattatgtcttgaactctccagactctatccaagaaggtctatggttcatctaatttatttcgatgtaatttctgcaccaaactaagcatcaggattctgccagaataaactagggaaacttccaaagcattataactctgagaaaggcccaggtaagcagaaactgcagctgaagtgatccatttattgatcagaaagtatttgctgactatctactattggatagtggtaaataagaaakatatattttctgtcctcacagagcttgacttcttctgtgatagaacttgtgaatgttcagacatttgcctaactaaaaataataaccctgcaattatgtagtgcttttcagattacaaaagtactttctcaaacataatttcatgttacttatgaaaattttacaagtgcgaattattattatctttttagggaagttaagtaaattataattgctaattataatgactatattatgagtatttaatacacatga

SEQ ID NO: 120753 - DNA, 615 bp, Homo sapiens
aagccgtctaggaaatttgttcattttgcaagattttggaaaatctacaaaatcaatggctgaaatatctgagagggctgtatggaagcatgctttcgtattggactttccaatggaaaattatgtcttgaactctccagactctatccaagaaggtctatggttcatctaatttatttcgatgtaatttctgcaccaaactaagcatcaggattctgccagaataaactagggaaacttccaaagcattataactctgagaaaggcccaggtaagcagaaactgcagctgaagtgatccatttattgatcagaaagtatttgctgactatctactattggatagtggtaaataagaaagatatattttctgtcctcacagagcttgacttcttctgtgatagaacttgtgaatgttcrgacatttgcctaactaaaaataataaccctgcaattatgtagtgcttttcagattacaaaagtactttctcaaacataatttcatgttacttatgaaaattttacaagtgcgaattattattatctttttagggaagttaagtaaattataattgctaattataatgactatattatgagtatttaatacacatga

SEQ ID NO: 120754 - DNA, 564 bp, Homo sapiens
catcaggtattccaaaattatatttccactatttatgatttcttcttaaaggaatgattcacaaactgggaacttcctatagaatagtaaatttatctgggatgagaagtacatgaagactagtaagactgataatttttaaaatcctcgcaattattttataaagagtgctcccacattaaccatctcatttagttctcaacaccagtctaggactgatgaatgaagaaacaaactcagagaggtgaggtaatgtggctgaactggtctttaagcccagatttctgactccacattcaaccctaccctcattgtactactactcactcatgcagcattcttcatgaatgttacagtttccagrttcatgacataaatatggaaaacagctgcaatctacgcggaggtcagtcgaataaaaaaggcaggcaagtcagcaaattattgcagaacaattaagcactgaaattctaggtgggaacaaaatacttcagaaaaacagaaaggagcaacaaattacctcgtggaaatggggaaggcttcatgggaaataatgtttaactt

SEQ ID NO: 120755 - DNA, 564 bp, Homo sapiens
catcaggtattccaaaattatatttccactatttatgatttcttcttaaaggaatgattcacaaactgggaacttcctatagaatagtaaatttatctgggatgagaagtacatgaagactagtaagactgataatttttaaaatcctcgcaattattttataaagagtgctcccacattaaccatctcatttagttctcaacaccagtctaggactgatgaatgaagaaacaaactcagagaggtgaggtaatgtggctgaactggtctttaagcccagatttctgactccacattcaaccctaccctcattgtactactactcactcatgcagcattcttcatgaatgttacagtttccagattcatgacataaatatggaaaacagctgcaatctacgcggaggtcagtygaataaaaaaggcaggcaagtcagcaaattattgcagaacaattaagcactgaaattctaggtgggaacaaaatacttcagaaaaacagaaaggagcaacaaattacctcgtggaaatggggaaggcttcatgggaaataatgtttaactt

SEQ ID NO: 120756 - DNA, 583 bp, Homo sapiens
aaggtcactacataaaaagcatcctgcaatccaaactccagtttaaragtccatgataggtgttaaatggctaagcaagctcctttgactttgcctatttgtagtacttgctataatcccatgctatgaggactagattgctgcagacagaccctaactgaagcacaaccctctgcattttccatatatactggtgagtagctaatggctattttctgttttgcaagatagagtgaaaacagccttcaatcaatccagctggacaagtaacaaaaagactatcatgtgttcagcaaataactccatccaacctgccccaaagacccccatagccaaagccattaaactttatgtgttttattttctccctcctgcaaccctgaagtctttgctgacgtttgaagactggtaataatcaatgtccccatccatgtttctgaattctcagccaaattcatggctgtctcattttctgagtcagatgtcctaatcaactaatccattccaaatagccttgcttctggatataaagggggaagaacaaataaacatctttaagtttcagggacataaaactgtgatg

SEQ ID NO: 120757 - DNA, 598 bp, Homo sapiens
aatccttccctcccactggtatagatccaaggtcactacataaaaagcatcctgcaatccaaactccagtttaagagtccatgataggtgttaaatggctaagcaagctcctttgactttgcctatttgtagtacttgctataatcccatgctatgaggactagattgctgcagacagaccctaactgaagcacaaccctctgcattttccatatatactggtgagtagctaatggctattttctgttttrcaagatagagtgaaaacagccttcaatcaatccagctggacaagtaacaaaaagactatcatgtgttcagcaaataactccatccaacctgccccaaagacccccatagccaaagccattaaactttatgtgttttattttctccctcctgcaaccctgaagtctttgctgacgtttgaagactggtaataatcaatgtccccatccatgtttctgaattctcagccaaattcatggctgtctcattttctgagtcagatgtcctaatcaactaatccattccaaatagccttgcttctggatataaagggggaagaacaaataaacatctttaagtttcagggaca

SEQ ID NO: 120758 - DNA, 583 bp, Homo sapiens
aaggtcactacataaaaagcatcctgcaatccaaactccagtttaagagtccatgataggtgttaaatggctaagcaagctcctttgactttgcctatttgtagtacttgctataatcccatgctatgaggactagattgctgcagacagaccctaactgaagcacaaccctctgcattttccatatatactggtgagtagctaatggctattttctgttttgcaagatagagtgaaaacagscttcaatcaatccagctggacaagtaacaaaaagactatcatgtgttcagcaaataactccatccaacctgccccaaagacccccatagccaaagccattaaactttatgtgttttattttctccctcctgcaaccctgaagtctttgctgacgtttgaagactggtaataatcaatgtccccatccatgtttctgaattctcagccaaattcatggctgtctcattttctgagtcagatgtcctaatcaactaatccattccaaatagccttgcttctggatataaagggggaagaacaaataaacatctttaagtttcagggacataaaactgtgatg

SEQ ID NO: 120759 - DNA, 617 bp, Homo sapiens
tcccctacatctgccttacatcaaatgcttaagggagttcttcaagtagaaatgaaagcatatgaaagtacaacattcactgataagggcaaatatatcaaatccagaataattcaatactgttatgttgctctgtaaatcatagatatctctactatgaaycattaacaaaacatcagtagtaagtccttatctatcaataaatactttgaatgtaaatggattgaaatctccaatcaaaagacacagatttgctgaatagtttaaaaaacaagatccaactatatgctgcttacaagagactcacattaaccttaaggacacacagaggctgaaaataaagggatagaagaagatattccaggcaaacagtaaacaaaagagtaggagtggctatacttagataaaatagattcactggggaaagcatagctttataaatggtgctgtgaaaattggaaataaaactagacttctgtctctctcaaaaatcaaatcaaaatgcattaaaaacttaaacgtaagatccaaaactataaaggtactatagtaaaacatgcggagatacttcatgatattggcttggacaatggttttttggatatgcctcaaaagca

SEQ ID NO: 120760 - DNA, 617 bp, Homo sapiens
tcccctacatctgccttacatcaaatgcttaagggagttcttcaagtagaaatgaaagcatatgaaagtacaacattcactgataagggcaaatatatcaaatccagaataattcaatactgttatgttgctctgtaaatcatagatatctctactatgaatcattaacaaaacatcagtagtaagtccttatctatcaataaatactttgaatgtaaatggattgaaatctccaatcaaaagacacagatttgctgaatagtttaaaaaacaagatccaactatatgctgcttacaagagactcacattaaccttaaggacacacagaggctgaaaataaagggatagaagaagatattccaggcaaacagtaaacaaaagagtaggagtggctatacttagataaaatagattcactggggaaagcatagctttataaatggtgctgtgaaaattggaaataaaactagacttctgtctctctcaaaaatcaaatcaaaatgcattaaaaacttaaacgtaagatccaaaactataaaggtactatagtaaaacatgyggagatacttcatgatattggcttggacaatggttttttggatatgcctcaaaagca

SEQ ID NO: 120761 - DNA, 607 bp, Homo sapiens
ggattacaggcgtgagctactgtgcccggcctaattatacctttttaaaaagaaaaaatagtattactttacctttttttccagattaaggtttttcattttaggtaatgcttattttgatattttattttaattaatctgctaataacatatttgaataatatgtttaaagtttatctttgtaaatacttaatcatttaggtttaaatgtttgtaattgaaattcttaaatattttactagttttaaatttataaattctgaatatacataaatraaataatactactaatatagaaaataaatgctgcaggtggagaagccagtacatcattttgctcccatattacaatcactagatttgagtcctctagacttacagggctcactgagtgtgattaataggaacacacacatacaacaagacgtatccttttcaaattttttactttcaaggataaactgaaaatcaaatgctcttccagaatgagaaatgtaaagtttacaatggaaagtaagttgaattctcatttgcaaaaccagaacttagaaaactgtagaataacttctatatgtcggagagaaaagaactctgatatgagtcagaa

SEQ ID NO: 120762 - DNA, 594 bp, Homo sapiens
ccagctgcctcacgagcagctgctgcagggagggagggcggtggagagctaatcccctctgctttggcccaacaccgaggcagagccatcccccagaaccagatcctactacgggaagagcctgacagccatctggctcttcttcccatcactgccagactcccttgtaccatggcactcccacgtctgggtccaggatgattcatycttcacagaggcttcgtccacagggaagtgtccacatgcagcgtctgggagagggtggacactggctggtgccaggaggccatgtctgatcttgagagccaggctgcatggaattatctggtaaacggggtgctgtcattgtttttattccccagggaccaggcccctcccttgctcaaaagagtctactattagttaccttgggtcccaaacaccaggattctgcgagtctacctgagtgagaatcaggggctggatgtctgccaagactcacttgtctcttcttttctctctgtgactctgcttcattctctctttctctctctctgaagcagggttctctgtatgccagacaacatgttagacaaataggctccccgctaccca

SEQ ID NO: 120763 - DNA, 447 bp, Homo sapiens
cttggcccacttctccccctgcccttctaggtccctccctcctcttgctcttcacaccccgctcaaagtccactggggtccagactcagttctgccagatctatctgtgaggtcacaggcaagcccctacacttttctgtggtttgatttccctgcaaataaaatgagaataacaaagcttggtccacctactgagctcacaaagactgaaggatcaagtcaggagatgaaaacacaagcagtttgtacaagttcaaaatgctacactaattcaagggattattaaataaccaggtgcckcgggttggagcacttctcccttgagagctgactgaggacacagcgcagctgaaacaggctcgaaagccacccactgcggctcatccagaacccaagaccccctccccagatgtccaagactcagaactgaagctggggaagcaaggc

SEQ ID NO: 120764 - DNA, 675 bp, Homo sapiens
tgttacatgtttagatggtccatgcccgttagcattagagattaagagaattagggaaattgattttattcaacctttattttccttaccaactcttccactgctcatatctccagtataggtctcattgattgcacaacatgaacaattttctatttttcttttcctttatacattttttattcacttgagatatacyggcatacgttttaagggaattttgtgatagaaaattatgttatattctagaaacatcttatgataaaaaagaacgcatagcaaagaaaataaaatgtaggtttccttgaggtaaaagaaaaacatcatgttttcagcttcaatttgaaattagaagcttatttggaaagggtgattataatattattacagacagagagatgccttttgggaacaaaaaggaaactttttgtatatattttatctgagggaaagtaatgctgaagcaacctgttgttaatcttgctttctctcaagatttactttacttttcttaactttactactgcaatttataatttaatatgctattatcttgttcagtgtttattattgtggccaatacattctacttgctaaggagactcagtctttgttatttgcttaaaattatgtataagaacatggatttttggtaacaggcatatacatatttgc

SEQ ID NO: 120765 - DNA, 675 bp, Homo sapiens
tgttacatgtttagatggtccatgcccgttagcattagagattaagagaattagggaaattgattttattcaacctttattttccttaccaactcttccactgctcatatctccagtataggtctcattgattgcacaacatgaacaattttctatttttcttttcctttatacattttttattcacttgagatatactkgcatacgttttaagggaattttgtgatagaaaattatgttatattctagaaacatcttatgataaaaaagaacgcatagcaaagaaaataaaatgtaggtttccttgaggtaaaagaaaaacatcatgttttcagcttcaatttgaaattagaagcttatttggaaagggtgattataatattattacagacagagagatgccttttgggaacaaaaaggaaactttttgtatatattttatctgagggaaagtaatgctgaagcaacctgttgttaatcttgctttctctcaagatttactttacttttcttaactttactactgcaatttataatttaatatgctattatcttgttcagtgtttattattgtggccaatacattctacttgctaaggagactcagtctttgttatttgcttaaaattatgtataagaacatggatttttggtaacaggcatatacatatttgc

SEQ ID NO: 120766 - DNA, 615 bp, Homo sapiens
ggaagtttctcagtttccctttgacttctaaaagcaatgccagacaaataactattttttagaatgttcatagttgagccataaacccacacaaactcttatgattgcctccttcttgatactagattttcccatttacatggcagaagggctgtcataatgaaggtctcagtttcaattaagaccaccagttagagaaaatacagacaagtttagctatgaacagagagtttctaagaggagactacagacatcaagtccagggggcagttgaagaggaacagcataaggactgatcatgggtaggaagcctaaaagttcctaaragtaaggctgcaggaaagagcagatgccagaggagtttatatactggatggtgatcaaagataataatatgagtcataataggttacatttatcacaaggttgctacgggattaaacctctttagtctattggatggagtgtaggcatgggaatttctaatgcctctccagcatcagctgtggccttgctccctagaggaatcgttgtttctagtggacagagagacccaagttttcttgaaaggagtaagcaatgatgcaaccactaatttactcatctccctttttt

SEQ ID NO: 120767 - DNA, 637 bp, Homo sapiens
aaatagtgataataacaatattattattatattattattattaggcctcagtacatgccagggatcttaaatgttttttaaatatataatctcatttaatcctcaaaataatcttataagtgtagaattaattttcccaattttaaaartgaggaaaccaagattcatagatggtacataagatcttgcccaggaccttataattagcaaatgacaaagtctttgatacctcagtattcaatcaacttcactcacctacccaaacagctgaatcttgcttgataatgtcagacaactggatcaccaaatgcaaatgtttctttagcaacacctgccaatcttatcacatttctgtattcaactcacccagccaacccttcactctcaaacttctcaccctccttcttgccttcctaccctaagcagatgaaattgccccttacttcaaaaataattgaagtaatcagggtggaacttctttaaatgctattattacacctctgtgactcatcacattagcacccatcatcttctctttcttcttgttactggcttctctcctgtggcaactaactcctgatcttctctcctttcacatcctcagaaccataacaccatcatgtatcctttctctctc

SEQ ID NO: 120768 - DNA, 611 bp, Homo sapiens
ttgggataaatgactcttgcggctttttctagctcaaaagtctctcacactgtgtagaatttggaaaagtgtacaattaaagatatttaaaactgtagttttttaataatgctttatagtttatgatatactctgagtcattacttattgcatattaaatcttctcaataattctattgttaatcatgaatattgttacttactcccaaaagggaaactgccataaaaatatttcagtgactcacctgaagaaaacattcttcttctttaagaattcaaggcttctatagttayattctaatccactattaaattttcagcattttaatttagtatagtcactaaactttgtcattcatttgtagattttttaatatattacagtttatatttggactccaacaacatttttaacttatacaaaagctcttttggtaagcagaatatatataaatatatatgcatattatgtgtaaaatgtggtgccaccttacctccatccccatcatcgatcctctgaactagatcttttaacatgtcaagtcagctaacatgcgcacataaagtgcattctgtctgaaggaaggataaaatctttcatctcgtagcat

SEQ ID NO: 120769 - DNA, 613 bp, Homo sapiens
aagaaacccactggtacaaaaaaggaggctattttcccctagacaacatttcattctctgcattttagttgttttttcaacatgtcaggagtcaacacagtccarcaaacaggagagtcaatctatgctctatatatatatatattttttttttcttttgggtgcattttgttaggctgggcctcagtccttggggccctctctctgccctctgcctaaagaggatctggtccctcaggttcacactaaaatttcagattctctcaataactgcaaaatccactggataaattggaactgatggcaattagactcttccctttgagtgcttaatctgccttattcctgaaaacctaagtcccttgcctgctggtcttattaaaatcagcttgtatgggtcctactgcttgctccatttgtgaatggaaaaattctgcttgtaatagggaagaaatggtgcacgtgccctgccagttgttggctgcaatttggtgagggccactggggactaatgtaatgggtccgtacaccctcctaaggtacctcttttgtcttcagttagaatcacttcttgacaggagagggggactatgtctgggagtccaccactccc

SEQ ID NO: 120770 - DNA, 553 bp, Homo sapiens
gtttttagataaaagaaacaagtaatcttttatcagaaaacctttactgtaaatgtccttaaaataaaggacaataatatcaaatggaaacattttaatctgaaaaaataaataaaattaaaggtaaatttgtgaataaaacaatatatttttatcttaataattttaacaacatttgattgtttaaaggcagaataaaaatgccttatggagcgtaaaatttatgtacttatgacatatatgtatatctctcctaagtatatgtaagatatatatatatatctcctaaatatacacgagagatatatatatctcctaagtgtatatgagatatatatgtctcataagtatgtaagatatatattrtatatgatatatattatgagtatgtatatattgtttaaaggcagaataaaaatgtcttgtggagcttaaaacttatgtacttatgatatatatatgtatctcataagtatatatgagatatgtaaatatctcataagtatatatgagatatgtaaatatctcataagtatatatgagatatgtaaat

SEQ ID NO: 120771 - DNA, 553 bp, Homo sapiens
gtttttagataaaagaaacaagtaatcttttatcagaaaacctttactgtaaatgtccttaaaataaaggacaataatatcaaatggaaacattttaatctgaaaaaataaataaaattaaaggtaaatttgtgaataaaacaatatatttttatcttaataattttaacaacatttgattgtttaaaggcagaataaaaatgccttatggagcgtaaaatttatgtacttatgacatatatgtatatctctcctaagtatatgtaagatatatatatatatctcctaaatatacacgagagatatatatatctcctaagtgtatatgagatatatatgtctcataagtatgtaagatatatattgtatatgatatatattatgagtatgtatatattgtttaaaggcagaataaaaatgtcttgtggagcttaaaacttatgtacttatgatatatatatgtatctcwtaagtatatatgagatatgtaaatatctcataagtatatatgagatatgtaaatatctcataagtatatatgagatatgtaaat

SEQ ID NO: 120772 - DNA, 537 bp, Homo sapiens
ccaccattttactgtttgtaataataagtttgactttttttcttttagattctacatgtaagtgaaatcatgcactacttgttttttatgtttggcctattttacttagcacaatctcctccaaatgtgttcatgttttcatgaatggcaggatttcctttttaagagctgaataatattcctttgtgtaagcagaaagataggtagatgatgatgatagatagatagatagatagatagatagatagatagatagatagagatagagcttgagctagaactatatcacatttactttatcaattcatctgttgtaagacacgtttttgtatgttggctattgtgaataatactgcaatgaacatgggagtgctaatatctattcaacatagtggtttaatttttttgtaatatatacccagaagtatcttgactttttgttagtcatcagartgatttttaatgtttgtctatttaaattaaatttcaattaatgaattattttacttgtctcacatcttaaaaaaactcactcta

SEQ ID NO: 120773 - DNA, 594 bp, Homo sapiens
tgtctcacagattttattgcaacagaatgttcatgcctattagttttatgaaagctaatacagaataattaagcatgtttagtaatgcataacaaaacacaaatttctctagagattattttgtaaagttcattcatttttccttttttttttctggaaataccaccattagctcacttagatgaaggggagaatctttggtggcacaacatctagagtgaatcaacatggatgaaaataaaaacagtactggtggagaagaatattgtaacatctctgagaattttgcctaaaatttctgtgaatacttcaaaacaaaataaaagaaacagaatgagaggctgtaaaattggcatgatttagatgcagatttaggtatgattcattattcaattactgtaaaagtgcagtacttttccaacaygttgtacaaaacatacaactttacagggaaacagtatatggcattaaaaatgtttccctatattcaaattagagaaaaataaagcagatgatgagtagtataattccttgattaggaatgatacctgtctagacaattcagaaccagtattgctgtgagttttaaataga

SEQ ID NO: 120774 - DNA, 645 bp, Homo sapiens
ccaatttactcaagcctccaatagcaaacagcaaatgtataggaaatcctttcaagcatttaagaggatgtaatctaaaatacaaattaatgcattgatctttatctgtatatttatttttcagttgaaatttggagacgccaagtagctgtctgatggacataaacctatcaagttatattattagatttttgattcaacatttcttctgtcagatctctagcttttatttactattttgagtggcatacttgctggaagttcacactttttctggtaatgggtgyttttatctttcttatcttctagaagaaatatttgcatcaatatttttaaatcagtaattttgcttttgtgttttagtgtgttttatttcatactgtatttcattttcaaaattaaaggctttaggaaaagtgcttttattgttattaaacacagtatattcgcacttacgtaaatttcagagagttgggagtggtcatcccaaagactctgaactcatctcttggcataactacaatgcacatagacatattttggatttgtgtaggatgctagaaaggataaagaaatgttttaatttagccaagtagtttaatgacttatagaccataaacatccaggtagaaagcaatgcctatg

SEQ ID NO: 120775 - DNA, 612 bp, Homo sapiens
ataataattcatatgattaatttacatgaaaaatcatagtgagttgaaaaagaacttcctgtctatgtgaaatataaattgtgaagttgctaaagaggaaaggaagaacaaaatctgaatgaaaattacagagttaaatatatgaaaattatgcttaaaaactgaaccagttttgctttatataaaaataaatattgaaaaagatttctctgtgaagatgtcatctatttagaagtcatatgttttaccattttcatatgtcaattaaaatacyttaagaaataaaacagaagataaaaactttatcagaacaccccaaacctaggccatcaattaatctgttggaaatactaagtatacatcactaaaaataaattgaaagttgaatctcatgttacatttgacatttgcatgcactgttgcagattatcctttctaaccattgtcttttatttttctcgtttaccttatctggttccaagactctgaatccaatcatttcttgactcaatcaggatgtccaatcttggatatgccactttttagtctttctgattctcctcaaatccctgcttttaaaaaaatcctgacttagattctgttgtccatcat

SEQ ID NO: 120776 - DNA, 521 bp, Homo sapiens
ttgtcgctgagtagtctagagaatgaggtcacatgagtaccttcttgtagggttgtgttgagaattatatgaaactttgtaaacagattattttggtgcatgatcagaaatcaatatatttgaccaattattttgcatatattatcttgagtaatgtttctatacattggctttatatcagcttcactgccttaaaattatttaatgaaattttaaagtgactcataatttctggcaattttagtgttttatcattatgtttaccttttttcctctttaattatgttgtgagaaatttaagtccataaacacagttgttacaattaagtttgagactgtaagtcctaatcattaaatatttacttatgtcctacatctatgatctgtgctgggagtgggaaattatcaatatacatatgctaattgtggttgaaaagaaacataawcatattagtgtgctcttttggataaagaaatttagaactgatttatgtgcctcatatgtttccacagggacaaaa

SEQ ID NO: 120777 - DNA, 620 bp, Homo sapiens
atttctaacttaagtccatagatacacaattccagaatgacttttaaaaggttttagtgctttttggcttcttaaacttaaatctgaaaccaaataatcaaatcagtgctttgaaaagtaaatatacacagtgtatatgtgctagtgtgtgtgcacgtactattcaatatcttgtagcattactctacttaagagctattgttttcatacctattttcatcaggctggtacttcacagataagctgcaataagggtgtttttaggaaattctatgattacttttcagcatatgaaatcatgtttggctttgttgaaatgtctgagtacattgacctaggaaagaaagaaaataatagacaagccaaattctgtaagtagacagttattcatatttgaattaacagattaaagagkgataaaaaggaattctataattcattttttctttttcatttacaatataacactaactttccaaactacattttcagaacagtctgtgttttttttttttattaactgatggaagcctttagatatcccttttaaagaaagagcaaatgatgaaaaggaaaggaaatggaaatcatcttagatatttgtgccattcttagcttac

SEQ ID NO: 120778 - DNA, 631 bp, Homo sapiens
attagttacttaatatagataattttggcaccatttcaattcaatattactagtaaggttgtaacttcatggatattcttactgtaaattgcaattttgttactaggtgtggctctcatggcaacccaagacatgtgagaagcaaaaagaaaagagggggtaggtctgaaaccagtgcttgagaaactgatgctacatgagggaatggctataggccctgggcaaagaccgagggtcactgatacttgggtttcccttggttggagcccagtgacagaaaattttggtagctaacacagaagcgggaggaaggctggtttggagctaaagctctagctgtgggtgaccatggtataaacttgagaacacaaaaacatttgttcgttgctttatctcctgtacctaaaatagagcctggcattataacctacttctaaggaggtatgcacctagatagaagccctaaacactgagatagcatggaagcgggcaaagcaatgccctagagatgtcctcrtgggaaaggggtcctgggtctgcctggctgaggagatttatagagaacaacatgggtgctcaggaatgatgactggcccctaagatcctatatctgagaagtcagataaattct

SEQ ID NO: 120779 - DNA, 631 bp, Homo sapiens
attagttacttaatatagataattttggcaccatttcaattcaatattactagtaaggttgtaacttcatggatattcttactgtaaattgcaattttgttactaggtgtggctctcatggcaacccaagacatgtgagaagcaaaaagaaaagagggggtaggtctgaaaccagtgcttgagaaactgatgctacatgagggaatggctataggccctgggcaaagaccgagggtcactgatacttgggtttcccttggttggagcccagtgacagaaaattttggtagctaacacagaagcgggaggaaggctggtttggagctaaagctctagctgtgggtgaccatggtataaacttgagaacacaaaaacatttgttcgttgctttatctcctgtacctaaaatagagcctggcattataacctacttctaaggaggtatgcacctagatagaagccctaaacactgagatagcatggaagcgggcaaagcaatgccctagagatgtcctcatgggaaaggggtcctgggtctgcctggcwgaggagatttatagagaacaacatgggtgctcaggaatgatgactggcccctaagatcctatatctgagaagtcagataaattct

SEQ ID NO: 120780 - DNA, 410 bp, Homo sapiens
cactgtattatgcaaccatcaccactaatttgaaaagatttttaacactacagaaaaaaatcctgtatctattaggagtcagtcccaaattctaccacctctcatccccaggcagccactagtcttctttctgtctctggatttgcctattctggacatttcctataaatggaaacatacaacatgtgaccttttgtgactagcttctttcacttacatgtttttcaagtttatccatattgaagcacgtgttagtactttattcttattgtgactgaataatattccatagtatggatattccatattttatatccattcaatctwttgatggaaatttggattgtttccacttttggctattacaaataatgttgccatgaatctttgtgtacaagtttttgtgtgaa

SEQ ID NO: 120781 - DNA, 557 bp, Homo sapiens
ctgggttttcttgaagcagaaagaattctgcttcaataactcttgacccctgtattatttggatctgtgtcccattcaagtctcatgtcaaattgtaatctctaatgttggaggtggcgcctggtgggaggtgattgaatcatgggtgcagattttctccttagtactgtacttgagatagtgagttccataagatctgtttgtttaaaagtgtgtagcaccttcccactcttttcctcctgctcagactttgtgaagtactgactcctcctttgccttttgaygtgattggaagcttcctgaggcctccccagaaacattagccatcacgctttctatacagcatgtagaactgtatccaattaagctattttctttataaattgcccagtctcaggtatttctttatagcagtgtgagaacagactaatatggaaagttgataccaggagtggggtgttgataaaaaagtttctgaaaatgtggaagccactttagaactggataacaggcagagattggaagagtgtggagtgtttagaagaagacacgaaaat

SEQ ID NO: 120782 - DNA, 557 bp, Homo sapiens
ctgggttttcttgaagcagaaagaattctgcttcaataactcttgacccctgtattatttggatctgtgtcccattcaagtctcatgtcaaattgtaatctctaatgttggaggtggcgcctggtgggaggtgattgaatcatgggtgcagattttctccttagtactgtacttgagatagtgagttccataagatctgtttgtttaaaagtgtgtagcaccttcccactcttttcctcctgctcagactttgtgaagtactgactcctcctttgccttttgacgtgattggaagcttcctgaggcctccccagaaacattagccatcacgctttctayacagcatgtagaactgtatccaattaagctattttctttataaattgcccagtctcaggtatttctttatagcagtgtgagaacagactaatatggaaagttgataccaggagtggggtgttgataaaaaagtttctgaaaatgtggaagccactttagaactggataacaggcagagattggaagagtgtggagtgtttagaagaagacacgaaaat

SEQ ID NO: 120783 - DNA, 559 bp, Homo sapiens
ttccataacagacttgaattcaccttttcctcctcctcccacacctcaycatcatggttattctatgtcagacactgtttctggggggttacatggctcatctcattttaaccttcattttagtgacaaaggtctgagaccaacacaaagtttacacaactttcatgtgataaaactaatataaaaaatgagatgcttttgtctaacattaaaataacaaaattttttttaggaacctccatatgtttttctataatgactatactagttcacattcccaccaactgtgcacagggttcccttttctccacatccttgccaaaacttatcttttgcctttttgataaaagccattctaacaggtgtgaggtgacatcttattgtggttttgatttgtatttccctgatgattgtgttgaacatatatacatgttggctatctggatgcctttttggagaaacatctattcaggtcctttggctaatttttcatctggttgctttgttgctgccgagttgcttgagttctttatatatgttgaatattgaccccttatca

SEQ ID NO: 120784 - DNA, 559 bp, Homo sapiens
ttccataacagacttgaattcaccttttcctcctcctcccacacctcaccatcatggttattctatgtcagacactgtttctggggggttacatggctcatctcattttaaccttcattttagtgacaaaggtctgagaccaacacaaagtttacacaactttcatgtgataaaactaatataaaaaatgagatgcttttgtctaacattaaaataacaaaattttttttaggaacctccatatgtttttctataatgactatactagttcacattcccaccaactgtgcacagggttcccttttctccacatccttgccaaaacttatcttttgcctttttgataaaagccattctaacaggtgtgaggtgacatcttattgtggttttgatttgtatttccctgatgattgtgttgaacatatatacatgttggctatctggatgcctttttggagaaacatctattcaggycctttggctaatttttcatctggttgctttgttgctgccgagttgcttgagttctttatatatgttgaatattgaccccttatca

SEQ ID NO: 120785 - DNA, 589 bp, Homo sapiens
gctttccacaaggttcaactaatttaccttcctattaacagtgtataagcatttcttttttactctgcactgacacttttcaaaagaagaaatatatgcgaccaaaaagtatatgtaaaaaaggctccatatcactgattattggagaaatgcaaatcaaaaccataatgagatattatctcacacaagtcaggatggcttttattaaaaagtcaataaatatatgttaacattcagtctattcccctaaaagagaccygggacatggctgacttaaattttttttatttttttctatatggtacttttattttactcataatacatataatacataatcaacagtatcctagcttcaaaattgtacttgtctacataaaaagtctaaggtattttccaaatatatatcaatttattacagacaaaaaggaaaaaaaacctgccagttgactaaatagaatctttttttaatcaaggatgactgagttaaaaatacagtgtactagctataaccccactgagtatgatttaaataactttttggaaaattttcaagagctatcactcaatatgatttgattcatgctca

SEQ ID NO: 120786 - DNA, 445 bp, Homo sapiens
gaagcttagtgagatatgagagaacttggaaaaaataaaatgaaaaacagaaaaataattcatcatgtgaataagaaatgttcaaaagaggtagagatcataacaaagaaccacacagaaattatttaaccaaaagattcattgaataaaacataaaatacatttgaaagcttcaacaatacaccagatcaagcaaatgaaagaatttcagaactagaaaaccgtcatttgaaataatccaactaggtacatttaagtgaaccaccttaagattaacagcagatttctcagcagaaactacaaggccaggacagaattgaacaatatatttaaagtgctgaaagaaaaaaaaaaacttaccagctaaggatatggtacgctscaaagtcattcttcataaatgagagaaatagtctttctgagacaagcaaagttgtgggaattc

SEQ ID NO: 120787 - DNA, 617 bp, Homo sapiens
ttttgactgaaaactataaggctaaagagaaagggaactttatataaacactgtattccagttggtcttttctcatggggtttcaggttaacaattctgaaactgctttacatatacatcagggttgacaaatggaaggtaaaggtcaacagtgagttttctcacgtgtctgggagggaagttactggtaaacaaaggatgaagcctagaatgaatcatrtggtgctaagttagcatgggagatatcagtataaattcatgttttgcttagtataagtacatatggatttacagacagtataggtatagatgagcatagacaaatgtgtggatgcagaggttagtattcatacatatattctctagctctgtctcctgaggagtcctaggttggttgttggcacccaaccaacactgagcaaagacctgggtttttaaattttattctcaaatataaagatctaaggtctttgtaaaaatgactgattctaaaaatagagctagaaaaaaaaaaacaagataagtctgtagcatcttgtagtatctgaaaggaaggaaaagctcccaagcaaaaagatgagagatgacaaaggatcagagaagccaaaataaaacag

SEQ ID NO: 120788 - DNA, 617 bp, Homo sapiens
ttttgactgaaaactataaggctaaagagaaagggaactttatataaacactgtattccagttggtcttttctcatggggtttcaggttaacaattctgaaactgctttacatatacatcagggttgacaaatggaaggtaaaggtcaacagtgagttttctcacgtgtctgggagggaagttactggtaaacaaaggatgaagcctagaatgaatcatatggtgctaagttagcatgggagatatcagtataaattcatgttttgcttagtataagtacatatggatttacagacagtataggtatagatgagcatagacaaatgtgtggatgcagaggttagtattcatacatatattctctagctctgtctcctgaggagtcctaggttggttgttggcacccaaccaacactgagcaaagacctgggtttttaaattttattctcaaatataaagatctaaggtctttgtaaaaatgactgattctaaaaatagagctagaaaaaaaaaaacaarataagtctgtagcatcttgtagtatctgaaaggaaggaaaagctcccaagcaaaaagatgagagatgacaaaggatcagagaagccaaaataaaacag

SEQ ID NO: 120789 - DNA, 605 bp, Homo sapiens
attacccaagtctcttgttcacactcctccaaactgtctacatatacctccccgcccaaatacacactgaagttattaagaattaaaagaacaaattgtttgcccatcctcataatcatctgtcctaaaatgtcatttaaacatttaatcaaacctgcagtcctccaggggaatgtgtgagtcatgccgttcatcccacacgctcgagcggggctttgtgtcagtcttaggaatgatgcagactggtcccacaaagaaatcagtcacagggacattttctgtcattaggcagagaacaaaaagctaacagtttcctggactctactgaaataaacttttgcaccaattaatgaaacccctatggaaagcatcatgccagaatccaaggaggctggccatgtactgacacgcaaactaacactcctgcaaaagagggggtaggtgagcatcctragtcaatatgaattgtttgtttttctgctactttggatcagctataccactgctccctttcacaggtacaaatacacaaaagagggcttctgtttcataaaagtggctccgacaaatgacactcctcagggtgctggacccaacactggcag

SEQ ID NO: 120790 - DNA, 646 bp, Homo sapiens
agcaaaatatcggacacgatgacctccaagtttccttccttctctaatgtcctctggttctctgttggcgagtaggattcaaattttatttaaattatctcatattctgatggattcttgagccctttttcagttttagatagtctccctgaggtttgctgaattggcgtatcyggagtctaggatctctcttggcaaagaactgaatattgctcccatccaacggcttagctagcactgtctattttctttctgaaaaagatctgggtaggaggcaggtgtagagcatctttccacctcccacagaagggctagggaaagctttgttgtgcatgaaccatgaacaaaaggataattcaaaccagcaataatgtccttaataaaaaataatcatcattttcccaaatgaaaatctacagttctaaccatttgatcacagtgatgtaagcaaacaaacctgcagctaaaggttatatacgggtcgaagatttaatggaaagtgatacatgggtggaatgacatcacctatttgtcagaatactaactcctctaccatatcctgtgtcggcccaccgttggggtgtaagggaaaggtgcataaagagataagtacccatttctaaacataatgcaagtttgacattta

SEQ ID NO: 120791 - DNA, 646 bp, Homo sapiens
agcaaaatatcggacacgatgacctccaagtttccttccttctctaatgtcctctggttctctgttggcgagtaggattcaaattttatttaaattatctcatattctgatggattcttgagccctttttcagttttagatagtctccctgaggtttgctgaattggcgtatccggagtctaggatctctcttggcaaagaactgaatattgctcccatccaacggcttagctagcactgtctattttctttctgaaaaagatctgggtaggaggcaggtgtagagcatctttccacctcccacagaagggctagggaaagctttgttgtgcatgaaccatgaacaaaaggataattcaaaccagcaataatgtccttaataaaaaataatcatcattttcccaaatgaaaatctayagttctaaccatttgatcacagtgatgtaagcaaacaaacctgcagctaaaggttatatacgggtcgaagatttaatggaaagtgatacatgggtggaatgacatcacctatttgtcagaatactaactcctctaccatatcctgtgtcggcccaccgttggggtgtaagggaaaggtgcataaagagataagtacccatttctaaacataatgcaagtttgacattta

SEQ ID NO: 120792 - DNA, 646 bp, Homo sapiens
agcaaaatatcggacacgatgacctccaagtttccttccttctctaatgtcctctggttctctgttggcgagtaggattcaaattttatttaaattatctcatattctgatggattcttgagccctttttcagttttagatagtctccctgaggtttgctgaattggcgtatccggagtctaggatctctcttggcaaagaactgaatattgctcccatccaacggcttagctagcactgtctattttctttctgaaaaagatctgggtaggaggcaggtgtagagcatctttccacctcccacagaagggctagggaaagctttgttgtgcatgaaccatgaacaaaaggataattcaaaccagcaataatgtccttaataaaaaataatcatcattttcccaaatgaaaatctacagttctaaccatttgatcacagtgatgtaagcaaacaaacctgcagctaaaggttatatacgggtcgaagatttaatggaaagtgatacatgggtggaatgacatcacctatttgtcagaatactaactcctctaccatatyctgtgtcggcccaccgttggggtgtaagggaaaggtgcataaagagataagtacccatttctaaacataatgcaagtttgacattta

SEQ ID NO: 120793 - DNA, 567 bp, Homo sapiens
caatatgctccttgatggaaagacctgctagtgagaactgactccttcccatattcgtctataaatttagcacaattctaatcaaaatctcagtgggatttgtcttagaactcatcaaaattattctaaaattcaccggaaacagtaaattcatgacaatagcaaagaaaaatttggaaatgagcatatttgccctatcagatatcaaacttctataaaaagccacgggggaggggtggtaatggaataaacacagaccgacctgtcactggaacagaactgagaatccagaaagaggccttatgtatgcagaaaagccttgtggcatttgaaatatgaacaagtcaatgaactgagagaggcaaaagcctatccatttaggaaaaatttagatccctacccttacactagatacaaaaggaaattccatacaaactaaaagagctcagtgtgaaaaaaattttttcayataaagtatatgaaaatattttaaagataatcttgggatggtagagattttgctaaaccagaaaaaaaaaaaaactataaatatgtgaaagattttcc

SEQ ID NO: 120794 - DNA, 583 bp, Homo sapiens
ggaatataattaagcttagattggaaaaaatatttaagcttatacaaaattcaaacatacataaacaagggaagctggataattttatgttcaaatacttttaacaagtgcaaaatgtatatgcttaaagaaatagggttggccgggcatgttggcttatgcctgtaattccaacactttaggaggccaaggcaggcagrtcacttgaggtcaggaattcaagaccatcctggccaacatggtgaaaccccatctctactaaaaatacaaaaattaggctgggcgcggtggctcacacctgtcactttgggaagctgaggtggccggatcacctgaggtagggagttcaagaccagcctgaccaacatggagaaaccctgtctctactaaaaatacaaaattagccaggcatggtggcgcatgcctgtaatcccagctactcgggaggctgaggcaggagaatcgcttgaacccgggaggtggaggttgcagtaagccgagatggcgacattgcactctagcctgggcaacaagagcgaactccgtttcaaaaacaaaaacaaaaagatattagccagatgtg

SEQ ID NO: 120795 - DNA, 592 bp, Homo sapiens
ccaataacagtttgaggattaacatatttgttaaatgcacaaatacattctttcagaagtgttagttgaataattttatattaaactccctatatacgtacaatatgaattagagaattcagaataaacattccattggaaaaaactaaacaatttgttataaaacatccttaaaagcatcagaaagttaatacagcaatgaagaattacaggaccaaattaagaatggtatggaagcctgtttgtgaggcttatgtttgggttatctctttacttagaatgactataaatctcaaaagagaactaaagggagaaataaccatatctactaacatggtaagggtatttaaacatctcttagtaattgggaaagttgaaagaaaagaaaaaagagaaagggagaaagaaacagagcgaaagggataatgaaggagagaagaagagaaaggaagaggaagaaaagtaaaaagaggagggggagggaggaagaaagaaaggtggaaagaaagaatggtaaagtttttaacataatktatccttctggaatatgaatgttggtctatttgatggtgtcccacagattccttagtct

SEQ ID NO: 120796 - DNA, 576 bp, Homo sapiens
attatacacatattattttataaacaatttatgataaagagaaaacatgcatttctactgtcttttataatgttaatattacctataccagtgcttttttaaaaatgtggattcaaatgactgtcttgtgtaacttgcttttagccttaggaatttattttggtgtttttggttttttttttttttttggtatgataggtctgscagcaacaacttcagttaatatttctgtttatctggcaaagtctttgtgttatcttcatttttgaaaaataattgctggataaggaattggtggctgacagttttttttcctttgcatcttttgaatatattattctactgcctcttgccttccattgtttctgttaagtcagctgttaatcttacaaaacataggtgctcaaataacaaacatgtgcatgaatatttacagcagtaataatcatacagtcaaaaagtggaaacaatccatatgcttgttgactcataaatggacacccaatttttagctataacaaagaaagaagtacttatacatggtataatgtgggtgaaatttgaaagcattaagtg

SEQ ID NO: 120797 - DNA, 516 bp, Homo sapiens
ccaactaacttcaaagtcatgactttatttttatagcaacsaggttgccaagaactgagtcaaaatgtgagggaaaacaagcacctgcaaggagaaagaggacagatgcacttacataggacagatgcaaatagacaccactatgacaagtaaagctggaataatcaataaattcctgaagacaaagtggggccggtcagattgggagaccgctgacagctgcagaagttgggaaagatccatcatcttgaaaacttttccccccaaacccactgtgatctctcaagcaattggtaaggaatccaagagagtctgtatatgatacagatcagggagagcagaacacttgggaggtgaccaggtcttggggccgagcccttatgaatgggattagtgcctttataaaagaagctcaatggagttcttgtgtgccttccactatgtgaggacatagaaagaaggcaccatctatgaaccatgaaatgggctctcatcaacactgaatttgtgagcatc

SEQ ID NO: 120798 - DNA, 606 bp, Homo sapiens
cctctgaccaactcagattagaaacagctacctgagccagcctttagttctattttgatcaaactgtcttatagacacagccttcagccttccccatgacctttgaaaactgccccagggtaaaggcgaattacaaatactattaaggttgatgagtaatcaactcagtaatgaggatactatttcacattcttaggggtagatgctttttctctgtgggatgcctgagtaggaaattttgatggctccaaatgtggccacaacaaacatcaggaggctctsctattgtagagatttccctgaaactgaactctggaggatgaaacatttggtgtagatacttgaccttctgaaaataaagctttatgtatgtgtgtatctatctattattctcatagcagcaattagtctgaaatctaatgccttgtcagtgaacataacaatttttgtaaatgttctcctcttagcttttaaggttttttttagcgatgagtcaaattttactcagatttttataggttatccctagtattcttgtttcttgttattgaagatattcaaatgttaatatatggtaataagaagtagctcaaaaagagcagaatg

SEQ ID NO: 120799 - DNA, 603 bp, Homo sapiens
tgaattcagtatactttctcccaaagagctcaccacaataaaagtttttttaaaaatattattttattatttttttgagacagtcttgctctgttgtacagtggcatgatcgtggttcattgcaacttctacttcctgggttcttaggattcttgtgcctcagcctcccgagtagctaggattacgggtgtctgccaccatgcccgttgaatgtttcgttttcgttttgcttttttggtagaggtggggttttgccatgttggctaggctggtctcaaactcctggcctcaagtgatccacccacctcagcctcccaaggtgttgggattacaggcrtgagccaccatgcctggccaataaagagctcttgtccatctttagatttcatttgctgacttggggagagtggtttaaatggagggttaaaagactggttttcagctggttgatggcaaatgaaaaggcttaggttaaagtacattttaaactgtaattttgtgtgtaattctgaaaaattccttcctagaaattactggtcttctctttgaacttcactggtaacattgcttattcatttcccttaaaatgctatttcaggctga

SEQ ID NO: 120800 - DNA, 510 bp, Homo sapiens
gaattcttgtcattgcagaaaatcaatgttgtgttctgatttggggcattctagcttgcaaatagaggcatcttagctgacaccaaatgctccctaaggatattccaaagataaaattgatgtcttcattttgaagggcattgataaagttttacatttgtctttattgtagtgaagatttttaaatttaaaaaataatgtctgaattgattgattaattgctttatgcaggcagcaacacagggtgaaatacaaataggtgattgacaagtgctgattattcaagagaagtagataatccatttatggtgattatgtctagtttttcttcgttttttaagtagctattttttgaatgcagagtttgtaattactccaaatgaagtcaagacccaagacataacaaaaagattagagtgtctgaagcaaactggatggttttgacacatgtgaacttatatcctagtctrttttcatattccaaaagcgaaccaaattgacattttggct

SEQ ID NO: 120801 - DNA, 610 bp, Homo sapiens
tatgttgaataacatttaatggttattttattaggaatttatctgtctatgttaatgagagctattagtctctatttttgtttttgttttgtagatattttgtcaggttttagcatcagatttgtgctgggcacatacatcagttggcaagtgtttcctctaattttctgaaagcacttgttataagatttgtgttaattgtttcccttaaatgttgataatattttactatctgggcatgtactttcattgtggggaggtttttatattaaattcagtttgattaatacatacagagttattcagattttttatttaatctagtttcaagttttattttcyttcagatattatagtaatttaaccagttgtaaaaggccctacagttaaaagaccaaacttgaaaggctaaatattaaaaacacaaactacaagttatttccatgaaatcagtcaaatcatgaaataaattttgtgcaaatactaaggaaatatatacatctatataaatattagaaaaaataaaattagactacaaaattgtattaggaaataagagtgtatttagcactcttaaataaaaatgtatttattaaaattatttttattg

SEQ ID NO: 120802 - DNA, 577 bp, Homo sapiens
tgataatattttactatctgggcatgtactttcattgtggggaggtttttatattaaattcagtttgattaatacatacagagttattcagattttttatttaatctagtttcaagttttattttctttcagatattatagtaatttaaccagttgtaaaaggccctacagttaaaagaccaaacttgaaaggctaaatattaaaaacmcaaactacaagttatttccatgaaatcagtcaaatcatgaaataaattttgtgcaaatactaaggaaatatatacatctatataaatattagaaaaaataaaattagactacaaaattgtattaggaaataagagtgtatttagcactcttaaataaaaatgtatttattaaaattatttttattgacaggtcataattttatacatttatgaggtacaatgtgatgttttgatatatatatgcaatgtaggataattaattcaagccaattgacatattagtcaacttgcaaacctatcattttttatggggaaattaaacttgtaatttactcttctagttattttgaaatatacattattattga

SEQ ID NO: 120803 - DNA, 465 bp, Homo sapiens
taatattgagtgtgaatttgattggattgaaggatgtaaactattgttcctggatctgtctgtgagggtgttgccaaaggagactgacatttgagtcagtggactcggagaggcagactcacmctcaacgtgggtgggcaccatctaatcagctgccagtgtggctaggataaaagcaggaggaggaacgtggaaggacttgactggcttaatctttgggactgcattcttctcccgtgctggatgcttcctgcccttcaacatcagactcagcttttggactcttggaccttcaactagagactgaaggctgcactgctggcttccacacatttgaggttttgggactcagactggcttcctttctcctcagcttgcagagggcctactgtgggacttcatgttgtgattgtacgagtcaatactacttaataaacttccctttatatatacatctatcctgtt

SEQ ID NO: 120804 - DNA, 599 bp, Homo sapiens
gtctgcctgaaaccttctgctgccagtgtgttccctacctcacagtacatggcatagctgtccacccagggtcctgaggaagaaaagaggacaccactgattctcctgtatccttcatatctagataatcacataattctcaccttctgtaagccacttactgccatccacgactatattccaccgctctttcacaattggatcaccaccgtggacaccctctgtgccttctcactagtttattcactgcagtttactttgcacactgaaaccagtacattttctgaaattaaaacatttctcccatatttgtttcctaaggctgccrtaaaaaatcaccacaaattgggtggcataaaataacaggagtgtattctcttgtagatttggcagccagaagttttaaatcaaggtgttggtttggccatgctcctaccaaaggctttaagggagaatctgttcctgcccttcctgccatctagaggcttctggcattccttgactggtagcaaaataactccaatctctacccatcttcacaaggatcttcacaaatggcatagagtactgtgggatttctaagtaaccacagggttttt

SEQ ID NO: 120805 - DNA, 649 bp, Homo sapiens
actagctgctaatccatctgcagctccttcaagcactccagttcctggcataatggtcaggtgtgcctgggatgctttaaatatttgttcttttaattttgcagtatctaaagacaagtttgtagagtgtccttctatatgattttttattctttcccaaattttgatcttattaagtgccattaatagtttccacaaattcttatgtttagctcctacagygggccatatcatttgaagttgaggtgccactatactgccatgtttccagataataggaactcttgccgtgtttcttaccatttctaccatctgaccattttgtttagaccagctgaacatagtgtggtcgtgggatgcagactgagaggtgcaattcaagctaaacatccccttaggggaccaatcaataatgattccataggattcgttgccagcacctctgcctgttctgcaatgaaatcttcccaaacaagcacgttcattatttctggtcaggtccaattctgtttacaaataggtttttgagggtggtatccctcaattataggagcagatttattatggtaaatactgagatcagaaagcatgtgtaactgtgttatagagtgattacatccaggcattattgccattcaagattgataaa

SEQ ID NO: 120806 - DNA, 649 bp, Homo sapiens
actagctgctaatccatctgcagctccttcaagcactccagttcctggcataatggtcaggtgtgcctgggatgctttaaatatttgttcttttaattttgcagtatctaaagacaagtttgtagagtgtccttctatatgattttttattctttcccaaattttgatcttattaagtgccattaatagtttccacaaattcttatgtttagctcctacagcgggccatatcatttgaagttgaggtgccactatactgccatgtttccagataataggaactcttgccgtgtttcttaccatttctaccatctgaccattttgtttagaccagctgaacatagtgtggtcgtgggaygcagactgagaggtgcaattcaagctaaacatccccttaggggaccaatcaataatgattccataggattcgttgccagcacctctgcctgttctgcaatgaaatcttcccaaacaagcacgttcattatttctggtcaggtccaattctgtttacaaataggtttttgagggtggtatccctcaattataggagcagatttattatggtaaatactgagatcagaaagcatgtgtaactgtgttatagagtgattacatccaggcattattgccattcaagattgataaa

SEQ ID NO: 120807 - DNA, 440 bp, Homo sapiens
gtctccaactcctgacctcaagtgatccacgcaccttggccttccaaagtgctgggattacaggcgtgagccactgtgcctggcccagtaagtgctttttcaacctttacccccctcccttcctctctcttcttgtagatgccartgtctatcattcccatctttatgtctgtgtgtacccaatgcttatcttccatttataagtgagaacctgcagtatttggttttctgtctctgagttaatttgcttaagataatggcctccagctgcatctgcgttgctgcaaaggacatcatttcctgctttttatgcctgcatagtattccaggtgtatatgtaccacattttttttaaatctaatccaccactgatagacatctaggtttattccatgtctttgttattgtgaataatgccacaattaacatacaggtgcatg

SEQ ID NO: 120808 - DNA, 585 bp, Homo sapiens
cctctcaattactatgcagccccacttggtacagttggcagagacccattgtgttaccttgtgctggctcatcctaatatacatattacatatacaggctaagggaagttacattctgtattcaccttttatgaaattagctcttcttttttggaaaatctaacaaaatatttgatgtgacgtcctctacctttttctgtaaccatcwtcttttctagctttctcctcttttcatttagcattgctgataagtggggaatgcttatagttcaaaataatagaagtagatacaaataagataaaactttagtctgtattgaaaaataaagaattttttccagactcttaactacctctggactggagttaactaaatacacaaacaaaaagtggcaaatcatgaagcaatttttaaattttttattttctctttattttatcattttttcctttcttttttattttttaaattttgagcataccaacaacctaaaacataaaaattctgggtcatgattctgttcttgaacatatttttctacataattgtgtagaaattatgtacctttttgttttccttttcta

SEQ ID NO: 120809 - DNA, 578 bp, Homo sapiens
aaatgtaatcaaagtcaatatccaaattactactttctaaaatrtgtgtgtgtgtgtgtgtgtgtgtgtgtatatggaagggatgtgtgtgcaaatgtgtaaccttatgagataataaaaaaattgttcctagagattattttctgaatgaaattatatcagatattctcaaatgacaagagcatataatctaatcacacactaggtttatacctaatgtaattcaaaagcataataatgtaaattatgaaaggacagttgatgatggatgaatacatttacaatatgaatttatttattgaagacctaatgcaaagaagcatctgtaaatatggcagcttcctgcagttaagaaggaataaataaccaaatattatagaaatgcctataaacattatagttaaagtagctagattaatcaaaacacattgaaatccttcgaatccatatttaacattataaaatacaaatctctaaatcattatttgtagtgaacttgtaaataacaagatattatatgcaactttcacaatctgcaatggacaaaaagcactgtaaaaatccttttttaaaggcac

SEQ ID NO: 120810 - DNA, 578 bp, Homo sapiens
aaatgtaatcaaagtcaatatccaaattactactttctaaaatgtgtgtgtgtgtgtgtgtgtgtgtgtgtatatggaagggatgtgtgtgcaaatgtgtaaccttatgagataataaaaaaattgttcctagagattattttctgaatgaaattatatcagatattctcaaatgacaagagcatataatctaatcacacactaggtttatacctaatgtaattcaaaagcataataatgtaaattatgaaaggacagttgatgatggatgaatacatttacaatatgaatttatttattgaagacctaatgcaaagaagcatctgtaaatatggcagcttcctgcagttaagaaggaataaataaccaaatattatagaaatgcctataaacattatagttaaagtagctagattaatcaaaacacattgaaatccttcgaatccatatttaacattataaaatacaaatctctaaatcattatttgtagtgaacttgtaaataacaagatattatatgcaactttcrcaatctgcaatggacaaaaagcactgtaaaaatccttttttaaaggcac

SEQ ID NO: 120811 - DNA, 609 bp, Homo sapiens
aaatagccacaaacacaaaactagtctacctctttctctccccattattggccctaacccaaaaatagtgggagtaaatgatttaataatttattttcatgctccattttgttcttaagttaaaattactgtggttggtgcccctcctttagcttctgctaaagactttacataatgaaagctcatgaagtgtctggattactaacagttacttatccaaaaagatgagacatggttcattgatttgattctattagttctctcttgaagatatttttctcctccctctgtgaagaaacatttctttctgtgtcatacaagacgmgtcatttttgtagttttaattccctcttgagtcctacagtaatactaaaatactcacagtgactacagtatcctttgcagggaaaaaattgtaaattaaccatttaaatatagtcactaagttatgtggcattcactgactcagagttgaaaaagactccaaaattcttatccagtattagagtatacaaggacaaaaggagaggccaaactaagtctaggacgcacaatacaaagaagaaaatgagaagaccaaagttacagtctcaatactatgacatgata

SEQ ID NO: 120812 - DNA, 609 bp, Homo sapiens
aaatagccacaaacacaaaactagtctacctctttctctccccattattggccctaacccaaaaatagtgggagtaaatgatttaataatttattttcatgctccattttgttcttaagttaaaattactgtggttggtgcccctcctttagcttctgctaaagactttacataatgaaagctcatgaagtgtctggattactaacagttacttatccaaaaagatgagacatggttcattgatttgattctattagttctctcttgaagatatttttctcctccctctgtgaagaaacatttctttctgtgtcatacaagacgcgtcatttttgtagttttaattccctcttgagtcctacartaatactaaaatactcacagtgactacagtatcctttgcagggaaaaaattgtaaattaaccatttaaatatagtcactaagttatgtggcattcactgactcagagttgaaaaagactccaaaattcttatccagtattagagtatacaaggacaaaaggagaggccaaactaagtctaggacgcacaatacaaagaagaaaatgagaagaccaaagttacagtctcaatactatgacatgata

SEQ ID NO: 120813 - DNA, 628 bp, Homo sapiens
atggtgggttttgatcttcttccccttcttttcttccccttcttctttccttctttgatcttcttccccttcttttcttccccttccccttcttttcaatttctgcaataaattcagacatggacagacacattaagctgattcccctacacacataacaatccactgtctaatcctcacacagggacctcaggctcctcagcataagaataggacactgtgagagatatatttcaggaggcctgaaggctggtcatgatagaaattcctcggtttttctcccagaaactgtgggtaaaatgtccctattctagtagatcgttatcccaatatcatttgtcccaagtttgtgcaaacagttatgccatatttttccaatcaayttaaagcaaataccctcaaatgatttctaggagaaaaactgcaatatttagccctgtctcatcaaatactcagattgttcatggttgtgaggactttagacactgaaattagagtgaaaaaggaaatctacaaacccttgagtcaaaatcatagttctctgaatttgtcacatctgcccaggtccaatgtcatgagaataggatcagggcgccacaggtatggcctgagactaggaagagagtct

SEQ ID NO: 120814 - DNA, 536 bp, Homo sapiens
gtgaaaatcttatcttgtatggtctaagctgactgagattggatagatttatttataaggttttattaaaacttagttttagtaatacattgattcaaaagtagaatttgatcttctccgttaaaatggtaaagttttcttggaatgttggtctgagaatgtaaagggtatttttttccttttmagtaattggcctcagaaacagagactctgtttcatcaagataatttcttgagtttcatgttgttttattaggtttttggttacttaagaaaagtgagtcttctcaatattaaaggagctaagttcttgttcacaactatgtaatctgaatttgcctttaaaatcttttaatggagcttttattaaatagataactatggtcatatttgttttaaatgttttaaactttttgacatttttgacaatcttcccaaaatcacattctaagttaagtctttttgacctcaaattaacttaggattctccatattggaccctcagaaagccacaaagtatatttttttttgtatgaa

SEQ ID NO: 120815 - DNA, 565 bp, Homo sapiens
acataaccagtacaagtttaatgagattaaacttatttagcaaacaaatcaatctgactttgattatctttgacagaaatgagagtgaatatagagagaaaagttatgtttcgggagagaaaactgcagtgcacccaatattagattctagctgtttttttttttctgaggttttattatctgcctgcaatctgcaatagatcctcaatttttctagtttactacaatatttagctacaacactccaaattaatatttcatttttttcctgctattctggcttggaatcactaaaattataaacttttcatttcttgaagtccttcaaactgaaactggatgacttgacataagcttcagaaaaattaccacaacagcttgtgtgtggcccatctttatggcattcaaactgcaaactaatccaatgcctcttctcacwccagctgaagatactacaagcccagcatctagaaatcttattgatcagctgccctctgggctcagaaactgtctttatagttcgttccaactattaatcttttttaattttatttttatagaaact

SEQ ID NO: 120816 - DNA, 522 bp, Homo sapiens
aggcagaacagaaagtgagaatcagagcagtatctcatttctgaaaacctggattgtagctttccctgggctgactgtcaaaggaggtggttttaaaaagcaagccaaacaggtttccatcctttaggaagaccctggaacgtgccagttgattctgacaatttctcatgaacagaaacacctaggaagggagaactggtgagtcttttcaagaggaggaagtccctcaaaaggggctgtgtttcgcaaacggcgccccaaaagggctgaaatacttcgatctggargaaaaagactcaggcactgagggaaggggagggtgcacatctggagtaatttcaaggctttttccgtgttatctgatgtggcaacaagtagagatttgttcgttttattatttttttaatttttaaagattttcttttccccccttttccccctcccggccactccggtttgtgtttgccacaagactcataattcctttagaaagtggagtcgaattcataaaagtgatggggg

SEQ ID NO: 120817 - DNA, 522 bp, Homo sapiens
aggcagaacagaaagtgagaatcagagcagtatctcatttctgaaaacctggattgtagctttccctgggctgactgtcaaaggaggtggttttaaaaagcaagccaaacaggtttccatcctttaggaagaccctggaacgtgccagttgattctgacaatttctcatgaacagaaacacctaggaagggagaactggtgagtcttttcaagaggaggaagtccctcaaaaggggctgtgtttcgcaaacggcgccccaaaagggctgaaatacttcgatctggaagaaaaagactcaggcactgagggaaggggagggtgcacatctggagtaatttcaaggctttttccgtgttatctgakgtggcaacaagtagagatttgttcgttttattatttttttaatttttaaagattttcttttccccccttttccccctcccggccactccggtttgtgtttgccacaagactcataattcctttagaaagtggagtcgaattcataaaagtgatggggg

SEQ ID NO: 120818 - DNA, 522 bp, Homo sapiens
aggcagaacagaaagtgagaatcagagcagtatctcatttctgaaaacctggattgtagctttccctgggctgactgtcaaaggaggtggttttaaaaagcaagccaaacaggtttccatcctttaggaagaccctggaacgtgccagttgattctgacaatttctcatgaacagaaacacctaggaagggagaactggtgagtcttttcaagaggaggaagtccctcaaaaggggctgtgtttcgcaaacggcgccccaaaagggctgaaatacttcgatctggaagaaaaagactcaggcactgagggaaggggagggtgcacatctggagtaatttcaaggctttttccgtgttatctgatgtggcaacaagtaragatttgttcgttttattatttttttaatttttaaagattttcttttccccccttttccccctcccggccactccggtttgtgtttgccacaagactcataattcctttagaaagtggagtcgaattcataaaagtgatggggg

SEQ ID NO: 120819 - DNA, 572 bp, Homo sapiens
cttctgatctggacactatgcttttactatttcagagtaagttcttaaactgagraggcatcgtgagagcgcagttcaagaaagaataatgctccgactcatacccaatggatatgtgtacttttttagaagccacaaaatactactatgtgctatggaatacacactcagctaaaatattcagagccttatttcacatgaactactagtgtaccctatttttctcatcttatacttgtagcacatgttttttgaacccaataattggaactatcattcattccttttaaatccatcatattgagtctttactccaagtttccttgattgagacaacttttacattatactcatacaatcacagaatttcagcagtgatctcagaaaccaaatggtctgaacccctatagcactgaaaaggacaccaaagctaactgatctacccaaagttggttatctgtgaatctagcaatttccccagtttaacaaatatagccctagcttcacctagaccttgcaatgaaacagtacttaactgaaagtgtatgactaagtcttgccccaagactagc

SEQ ID NO: 120820 - DNA, 561 bp, Homo sapiens
atgttttttgaacccaataattggaactatcattcattccttttaaatccatcatattgagtctttactccaagtttccttgattgagacaacttttacattatactcatacaatcacagaatttcagcagtgatctcagaaaccaaatggtctgaacccctatagcactgaaaaggacaccaaagctaactgatytacccaaagttggttatctgtgaatctagcaatttccccagtttaacaaatatagccctagcttcacctagaccttgcaatgaaacagtacttaactgaaagtgtatgactaagtcttgccccaagactagcacctattcaatcagctctaacatcctaaatggaccagcatcctatccatacctctcctctccctaaggacagtctggaaattccttgctgaacctaagcatatgactaaaagaataatctttcctaagcataattttcatgtcattcttctgctcagaaactagcaacagtattaataccaagcctttcaaatccaagttctttacaatctctgatctgcttgtctgtcccat

SEQ ID NO: 120821 - DNA, 561 bp, Homo sapiens
atgttttttgaacccaataattggaactatcattcattccttttaaatccatcatattgagtctttactccaagtttccttgattgagacaacttttacattatactcatacaatcacagaatttcagcagtgatctcagaaaccaaatggtctgaacccctatagcactgaaaaggacaccaaagctaactgatctrcccaaagttggttatctgtgaatctagcaatttccccagtttaacaaatatagccctagcttcacctagaccttgcaatgaaacagtacttaactgaaagtgtatgactaagtcttgccccaagactagcacctattcaatcagctctaacatcctaaatggaccagcatcctatccatacctctcctctccctaaggacagtctggaaattccttgctgaacctaagcatatgactaaaagaataatctttcctaagcataattttcatgtcattcttctgctcagaaactagcaacagtattaataccaagcctttcaaatccaagttctttacaatctctgatctgcttgtctgtcccat

SEQ ID NO: 120822 - DNA, 528 bp, Homo sapiens
ctgcactggaccctgagaaaatatctacttgtgattaaaacatggcaaacacattctagacatatgagtttacaaaaaacacccttcgatgtaatggacaaaactgaatgagttagctcagttgttcccaaggtatgggctgtggagttattgcaagggattgcaatccttataaatcactttctaaactactaaacagtatcttgtccatatttaaatatatgtatatgcttttatgactagtaaaacataaagatatattaaatgattcttgaattcttagattttgacagtatacattgtattcaaacaacacactgagaaattgtttcatctcaagctctctcctttatgcactatactcttgctaaacgcctttcagctcctagaaaatgctatagtacactacttctcacttccagacctctgtacacgcygttcagtcagcccaaaatgcttttccccaccttctcatggctaagccctaaaatttcattaagtctcaacttaaatgttatttcctgtgaa

SEQ ID NO: 120823 - DNA, 594 bp, Homo sapiens
tgataggattaagatgtccacaatataatgcatgaacttgaccctattatcccctccaatttaaaatatgtaagrtatcatgtgcttttcctcaattaagcattgagaaatagtaagtgcttctttctcttatttccactgaaacatcaattggctgatacctagttttctgggttatgttcaggtggctgacattacaacagaaaaagggaaaggaggtacaggaatggggaagagttcaaagggatatttaaaaatctgttaatatttaagtaggcatttttaaccaaataaaaaggcacaaaatataattaaataacataaaatatctaagataccatataaacaccaaagtgaaggaaggaatcaattgaagaataacattctatgatattttccacattgaggcactgaggaacctttttacatgccaccccttgattcataagatgtacaaccatttcaaactgtgtgtattatttatgacaattttctctgaacaatatcaaaaaggcatggtaagtctccattttcataatgaagttgtttaaatggaatctctgagaagcatttaaattaagaaacacaaacact

SEQ ID NO: 120824 - DNA, 594 bp, Homo sapiens
tgataggattaagatgtccacaatataatgcatgaacttgaccctattatcccctccaatttaaaatatgtaaggtatcatgtgcttttcctcaattaagcattgagaaatagtaagtgcttctttctcttatttccactgaaacatcaattggctgatacctagttttctgggttatgttcaggtggctgacattacaacrgaaaaagggaaaggaggtacaggaatggggaagagttcaaagggatatttaaaaatctgttaatatttaagtaggcatttttaaccaaataaaaaggcacaaaatataattaaataacataaaatatctaagataccatataaacaccaaagtgaaggaaggaatcaattgaagaataacattctatgatattttccacattgaggcactgaggaacctttttacatgccaccccttgattcataagatgtacaaccatttcaaactgtgtgtattatttatgacaattttctctgaacaatatcaaaaaggcatggtaagtctccattttcataatgaagttgtttaaatggaatctctgagaagcatttaaattaagaaacacaaacact

SEQ ID NO: 120825 - DNA, 594 bp, Homo sapiens
tgataggattaagatgtccacaatataatgcatgaacttgaccctattatcccctccaatttaaaatatgtaaggtatcatgtgcttttcctcaattaagcattgagaaatagtaagtgcttctttctcttatttccactgaaacatcaattggctgatacctagttttctgggttatgttcaggtggctgacattacaacagaaaaagggaaaggaggtacaggaatggggaagagttcaaagggatatttaaaaatctgttaatatttaagtaggcatttttaaccaaataaaaagrcacaaaatataattaaataacataaaatatctaagataccatataaacaccaaagtgaaggaaggaatcaattgaagaataacattctatgatattttccacattgaggcactgaggaacctttttacatgccaccccttgattcataagatgtacaaccatttcaaactgtgtgtattatttatgacaattttctctgaacaatatcaaaaaggcatggtaagtctccattttcataatgaagttgtttaaatggaatctctgagaagcatttaaattaagaaacacaaacact

SEQ ID NO: 120826 - DNA, 594 bp, Homo sapiens
tgataggattaagatgtccacaatataatgcatgaacttgaccctattatcccctccaatttaaaatatgtaaggtatcatgtgcttttcctcaattaagcattgagaaatagtaagtgcttctttctcttatttccactgaaacatcaattggctgatacctagttttctgggttatgttcaggtggctgacattacaacagaaaaagggaaaggaggtacaggaatggggaagagttcaaagggatatttaaaaatctgttaatatttaagtaggcatttttaaccaaataaaaaggcacaaaatataattaaataacataaaatatctaagataccatataaacaccaaagtsaaggaaggaatcaattgaagaataacattctatgatattttccacattgaggcactgaggaacctttttacatgccaccccttgattcataagatgtacaaccatttcaaactgtgtgtattatttatgacaattttctctgaacaatatcaaaaaggcatggtaagtctccattttcataatgaagttgtttaaatggaatctctgagaagcatttaaattaagaaacacaaacact

SEQ ID NO: 120827 - DNA, 557 bp, Homo sapiens
ttttattttgtttttaattgacataataattgcacatgtttatggggtacagtgtggtgctttagtgcatgtgtacattgcrtaatggtcaaatttaaaaattaaatgtattgatagaagaagtgtttggatatttgtatcctaaatgctaacagtgatgatatctggaatgtggaactgctggtaatttttccctttttcttttagagatttttgtacttatttttaataataaacatatactaattttataataaaaataacaatgaagtcctttccattttgaaaaattaattccaatagaaaaatactgtactcgagccactttccagggttttcttattcttagtgctggtataaggtaccagtgatattatattttcagatatgtttggcttttctgccttatggttgaagatgagcttaggaagtattgctgcctaattttcaggcttttgagccaatgcttggtgcacaaaaagcaccacatcaactttaaacagaatattctgcttctttagactgtatttcctactttttatagtatttattagcgc

SEQ ID NO: 120828 - DNA, 535 bp, Homo sapiens
ctattgagctcactcttttcatgatcacagtttgctgtgtgtcatgagggcactaactcagagtgtccttttactcccttaccagtatgtcacctggccaattcactaggtcactttctctctgtctctgtctctgtctctctctctgtctctgtctctctctctctctctctctgtctttctctttcattgttttctacctggccctgttctatcccaacataaaggcartaatttgttacctcattaatggatctgtcctttttcttttcaaactcttccttaacgttagccatgaaatctagctggggctgtgcggtttctgattccccctggcttattctttactttttcccacttttccaggctcagcagggagctgctggatgagaaagggcctgaagtcttgcaggactcactggatagatgttattcaactccttcaggttgtcttgaactgactgactcatgccagccctacagaagtgccttttacatattggagcaacagtgtgttggcttggctgttgacatg

SEQ ID NO: 120829 - DNA, 535 bp, Homo sapiens
ctattgagctcactcttttcatgatcacagtttgctgtgtgtcatgagggcactaactcagagtgtccttttactcccttaccagtatgtcacctggccaattcactaggtcactttctctctgtctctgtctctgtctctctctctgtctctgtctctctctctctctctctctgtctttctctttcattgttttctacctggccctgttctatcccaacataaaggcagtaatttgttacctcattaatggatctgtcctttttcttttcaaactcttccttaacgttagccatgaaatctagctggggctgtgyggtttctgattccccctggcttattctttactttttcccacttttccaggctcagcagggagctgctggatgagaaagggcctgaagtcttgcaggactcactggatagatgttattcaactccttcaggttgtcttgaactgactgactcatgccagccctacagaagtgccttttacatattggagcaacagtgtgttggcttggctgttgacatg

SEQ ID NO: 120830 - DNA, 535 bp, Homo sapiens
ctattgagctcactcttttcatgatcacagtttgctgtgtgtcatgagggcactaactcagagtgtccttttactcccttaccagtatgtcacctggccaattcactaggtcactttctctctgtctctgtctctgtctctctctctgtctctgtctctctctctctctctctctgtctttctctttcattgttttctacctggccctgttctatcccaacataaaggcagtaatttgttacctcattaatggatctgtcctttttcttttcaaactcttccttaacgttagccatgaaatctagctggggctgtgcggtttctgattccccctggcttattctttactttttcccacttttccaggctcagcagggagctgctggatgagaaagggcctgaagtcttgcaggactcactggatagatgttattcaactccttcaggttgtcttgaactgactgactcatgccagccctacagaagtgccttttacatattggagcaacagygtgttggcttggctgttgacatg

SEQ ID NO: 120831 - DNA, 494 bp, Homo sapiens
cattatcgattacatcttttcaagcaagcctgaattattcctactaacattgctgttggttttcattgcagtagatatttaggtttccatttcttcctccccttatcatttactaacctactgtaggtggaccagacttcaaaaactgtattctcatggcgactgcatggaaacttgagcacattttatggaaaattattgagcacagtcttttcatgatcmctgtatgctgtgtgtcctgagggcactaactcagagtgtcctgttactccctcatcagtgtgtcacctggacaattcactgagctcgttctctctctctctctctgtgtgtgtgtgtgtgtgtgtgtgcgtgtgtgtgtgtgtgtgtgtgtgtccatctgtctttctctttcattcttttccatttggccctgttctgtcccaacatgaaggcaataatttgttacctcattaatggatctatccttttagtttcttaaccacttccctatg

SEQ ID NO: 120832 - DNA, 494 bp, Homo sapiens
cattatcgattacatcttttcaagcaagcctgaattattcctactaacattgctgttggttttcattgcagtagatatttaggtttccatttcttcctccccttatcatttactaacctactgtaggtggaccagacttcaaaaactgtattctcatggcgactgcatggaaacttgagcacattttatggaaaattattgagcacagtcttttcatgatcactgtatgctgtgtgtcctgagggcactaactcagagtgtcctgttactccctcatcagtgtgtcacctggacaattcactgagctcgttctctctctctctctstgtgtgtgtgtgtgtgtgtgtgtgcgtgtgtgtgtgtgtgtgtgtgtgtccatctgtctttctctttcattcttttccatttggccctgttctgtcccaacatgaaggcaataatttgttacctcattaatggatctatccttttagtttcttaaccacttccctatg

SEQ ID NO: 120833 - DNA, 393 bp, Homo sapiens
gagctcgttctctctctctctctctgtgtgtgtgtgtgtgtgtgtgtgcgtgtgtgtgtgtgtgtgtgtgtgtccatctgtctttctctttcattcttttccatttggccctgttctgtcccaacatgaaggcaataatttgttacctcattaatggatctatccttttagtttyttaaccacttccctatgctacccatgaaacctagttggggctctgttgtgtgtgatttcccctggcttattctttactttttcctccttttccaggctcagcagggagctgctggaggtagtagagcctgaagtcttgcaggactcactggatagatgttattcaactccttccagttgtcttgaacagcctgactcctgccagccctatggaagttc

SEQ ID NO: 120834 - DNA, 576 bp, Homo sapiens
ctatgtggttcaccttagtttctattcaagtcagtaatatacttttgaaaaatgacatgtacattttatctggtatttgtagatttcatatagcagsatagtgattcagcaaatttagtctaccacaatgctgggaatagaattcccctaatttttgaaaacattatatcaaatcatgtttattgccattaatagtcttataaatgtgcttttaagtaactgcattttgtcatagctcattgtgattgtatatttaactagttcacccctacctcatgttttttgggagtgaaggttgtactcaactcattatgttaagtaatactacagtaaacatcaatctatacatgcattaataatgatttccaagaaagtagtgacacatggtcataatcatctttgaggctgatggtacatattttcaaattgcatctcagaaataatataccaatctgtgctctaatcagccgcatatgaaagtgtcatctttctgttctccaaccaatacaactactactgtttttatacctacaaatctgacaaagatgggagaagggatcttatagtttcaatttg

SEQ ID NO: 120835 - DNA, 576 bp, Homo sapiens
ctatgtggttcaccttagtttctattcaagtcagtaatatacttttgaaaaatgacatgtacattttatctggtatttgtagatttcatatagcaggatagtgattcagcaaatttagtctaccacaatgctgggaatagaattcccctaatttttgaaaacattatatcaaatcatgtttattgccattaatagtcttataaatgtgcttttaagtaactgcattttgtcatagytcattgtgattgtatatttaactagttcacccctacctcatgttttttgggagtgaaggttgtactcaactcattatgttaagtaatactacagtaaacatcaatctatacatgcattaataatgatttccaagaaagtagtgacacatggtcataatcatctttgaggctgatggtacatattttcaaattgcatctcagaaataatataccaatctgtgctctaatcagccgcatatgaaagtgtcatctttctgttctccaaccaatacaactactactgtttttatacctacaaatctgacaaagatgggagaagggatcttatagtttcaatttg

SEQ ID NO: 120836 - DNA, 446 bp, Homo sapiens
aaagatgccaatatatccatgaccacacaaaagagtgtctagtcatataataaagggtgtacatatgcaggcaactcacatcctgccaaatattaaatttctaattttattataatttcwaataaaacattagatttattattatacagagtcatactccttgactgggaaactctcaactcaataaacattctttagtctcatgtcttttctaaaggaaagaaattaatgttatattcttgggtgaaaaaaaatgtgaggtctcaaaagagtataatacaatttggggatgcatatatattttacatgtatatagacacataaaaatctaaaagaataaattttaatatgttaacagaagacagaagtcatgtattttttactttcttctttttggcatatctctttttctaactttttttttttctttttacaaaaaacaattg

SEQ ID NO: 120837 - DNA, 446 bp, Homo sapiens
aaagatgccaatatatccatgaccacacaaaagagtgtctagtcatataataaagggtgtacatatgcaggcaactcacatcctgccaaatattaaatttctaattttattataatttcaaataaaacattagatttattattatacagagtcatactccttgaytgggaaactctcaactcaataaacattctttagtctcatgtcttttctaaaggaaagaaattaatgttatattcttgggtgaaaaaaaatgtgaggtctcaaaagagtataatacaatttggggatgcatatatattttacatgtatatagacacataaaaatctaaaagaataaattttaatatgttaacagaagacagaagtcatgtattttttactttcttctttttggcatatctctttttctaactttttttttttctttttacaaaaaacaattg

SEQ ID NO: 120838 - DNA, 507 bp, Homo sapiens
attgttagaataaattaatcttactgtatatatagcagaagttttcaagcatatgtaaatgctactaataaccaaataattacaccttgtttttctttaaactgtaactctcaagtatgtctctacataattttttgatggtagtgtctgcatgctcaaaaagcttgaaaacactactggagaagaaggtctcgggagtgtgatgaaatacgtttacatggcagcttcatcatttaattggtgaaagtgactatgtgtcttaaactctctgagcctcagtttgcacatccaaaagcaaggatataatkccatgaacctttccacctcaagtccacaaggcagaatagcaagatgttaactgccactctgaggaccaccaaataaaaggacaatttattaggccacttgccagcatggacacaatcgactcttggcatttcttattatccacagaaaaattaaaagtataaatgtagaacaaaattatcgtgttttttttaatagtaa

SEQ ID NO: 120839 - DNA, 494 bp, Homo sapiens
tattttcagaaaataaaaggtcttcgccattaggtacaaatcataaagggattatctacrgttactacactgtaacaactttttacatattgtattatagaacaagcttttgagaagacaaagcaacacatcagcagtttaaccaattgtctttctcttttaacaggctggtctacattagattagatataaaaggcccaggtattacttgtgttcgatcttagccaaatggctgagaaacatccaggtacatttaagtcagtgacaaaagaaaacactatcccttagtaaaattacataaaataggaaacatctcttactttaagagcaaccatggtacttgttcctatggtgaaaactgatgttatctcgattagttaattattcatcccaacacctggtcttgctcccttttccacctctagctatgttaacaatagagttcagtaatttgctgataaagaatcttaactgcagtatctaacagaccttag

SEQ ID NO: 120840 - DNA, 494 bp, Homo sapiens
tattttcagaaaataaaaggtcttcgccattaggtacaaatcataaagggattatctacagttactacactgtaacaactttttacatattgtattatagaacaagcttttgagaagacaaagcaacacatcagcagtttaaccaattgtctttctcttttaacaggctggtctacattagattagatataaaaggcccaggtattacttgtgttcgatcttagccaaatggctgagaaacatccaggtacatttaartcagtgacaaaagaaaacactatcccttagtaaaattacataaaataggaaacatctcttactttaagagcaaccatggtacttgttcctatggtgaaaactgatgttatctcgattagttaattattcatcccaacacctggtcttgctcccttttccacctctagctatgttaacaatagagttcagtaatttgctgataaagaatcttaactgcagtatctaacagaccttag

SEQ ID NO: 120841 - DNA, 494 bp, Homo sapiens
tattttcagaaaataaaaggtcttcgccattaggtacaaatcataaagggattatctacagttactacactgtaacaactttttacatattgtattatagaacaagcttttgagaagacaaagcaacacatcagcagtttaaccaattgtctttctcttttaacaggctggtctacattagattagatataaaaggcccaggtattacttgtgttcgatcttagccaaatggctgagaaacatccaggtacatttaagtcagtgacaaaagaaaacaytatcccttagtaaaattacataaaataggaaacatctcttactttaagagcaaccatggtacttgttcctatggtgaaaactgatgttatctcgattagttaattattcatcccaacacctggtcttgctcccttttccacctctagctatgttaacaatagagttcagtaatttgctgataaagaatcttaactgcagtatctaacagaccttag

SEQ ID NO: 120842 - DNA, 491 bp, Homo sapiens
gaaaacactatcccttagtaaaattacataaaataggaaacatctcttactttaagagcaaccatggtacttgttcctatggtgaaaactgatgttatctcgattagttaattattcatcccaacacctggtcttgctcccttttccacctctagctatgttaacamtagagttcagtaatttgctgataaagaatcttaactgcagtatctaacagaccttagtgattaagcatatgacttaccctttgtacagaagtaaactgaggccaaaagaactgaggtatcttattaaaaatcagagagctagttagttgaaaagtccacctgtccttcctttccacatgtctcaccagaaaaacagcaatggtgaaaagtcaactctgtttttaatgggccactttgtatattttaactgttaaaataatccaagaggatagtagtcatatacgaagatcctttagatataatgtgtaggaccagcattaattt

SEQ ID NO: 120843 - DNA, 491 bp, Homo sapiens
gaaaacactatcccttagtaaaattacataaaataggaaacatctcttactttaagagcaaccatggtacttgttcctatggtgaaaactgatgttatctcgattagttaattattcatcccaacacctggtcttgctcccttttccacctctagctatgttaacaatagagttcagtaatttgctgataaagaatcttaactgcagtatctaacagaycttagtgattaagcatatgacttaccctttgtacagaagtaaactgaggccaaaagaactgaggtatcttattaaaaatcagagagctagttagttgaaaagtccacctgtccttcctttccacatgtctcaccagaaaaacagcaatggtgaaaagtcaactctgtttttaatgggccactttgtatattttaactgttaaaataatccaagaggatagtagtcatatacgaagatcctttagatataatgtgtaggaccagcattaattt

SEQ ID NO: 120844 - DNA, 573 bp, Homo sapiens
gaagcctaaagtttgaaactgaatatcccaccataaaaactagaaaaaatctctctgagaaactgctttgtgatatgtgcattcagctcacagggttaaacctttcttttgattcagctggttggaaaaactctttttgtagaatctgtgagggaacattttggagcccactgaggcttacagtgaaaaattgaatgttctgtgactaaaactaaaaagaagctatcagtcagactgcttttgttgtgtggattcagatcacagartaaagcctgtcttttgattcagcaggttggaaacactgtatttgtagcatctgagatgggacattttgtacctaaatgaggcccttagtgaaaaacagaatatcccacaataaaaactagaaagaagctatctgtgaaacttctttgtgatgtgtgtattcatttcagagagttaaagctttttcttgattcagcagattggaaacactctttgcagtatcagcaaagggacatttcagggcccactgggttcaaatgtcaaaaactgaatatcttgcaataaaaactagaaagaagccatatgtga

SEQ ID NO: 120845 - DNA, 576 bp, Homo sapiens
ctctctgagaaactgctttgtgatatgtgcattcagctcacagggttaaacctttcttttgattcagctggttggaaaaactctttttgtagaatctgtgagggaacattttggagcccactgaggcttacagtgaaaaattgaatgttctgtgactaaaactaaaaagaagctatcagtcagactgcttttgttgtgtggattcagatcacagaataaagcctgtcttttgattcagcaggttggaaacactgtatttgtagcatctgagatgggacattttgtacctaamtgaggcccttagtgaaaaacagaatatcccacaataaaaactagaaagaagctatctgtgaaacttctttgtgatgtgtgtattcatttcagagagttaaagctttttcttgattcagcagattggaaacactctttgcagtatcagcaaagggacatttcagggcccactgggttcaaatgtcaaaaactgaatatcttgcaataaaaactagaaagaagccatatgtgaaattgctttgtgatgtctggattctgctcactgagttaaccttttcttttgat

SEQ ID NO: 120846 - DNA, 617 bp, Homo sapiens
tcctttgtgatgtgtacattcagatcacagatataaaccgttttttgattcagcaggttggaaacactctttctgtagaatctatgaggggacatttctgagcccactgacacatttactaaaaaaactaacattgtgagataaaaactagaatgaatctataggtgaaatttctttttgatgtctgtattcacctcacagacttaaacctttcttttgattcattattttggaaacactctttttgtaggtctgtgaagggacatttcagaggccactaatgcctattgtgaaacagtgaatatcttgcaatacaaactagaaagaagttatctgtgaaattattttttgttgtgtgaattcagctcacagttaatccttgcttttgattcagcaggttggaaacgctttttttgtagaatctgcaaayggatattttggagcccactgaggcttatagtgaaaaactgtatagcctatgacaaaacttttgatgaaaccatgtgtgaaactactttgtgatgcctggattcagctcacagacttaaaccataccattgattcagaaggtttgaaatgctctttttgtacaatctgcacaggaacatttcaaagca

SEQ ID NO: 120847 - DNA, 532 bp, Homo sapiens
aattagcctggcattgtgctgtgttgcggtcgcgcccgtgactatagacccagcaactcgggagactgatgtagaggagaatcaatttaagcccagcagttcaaggtcgcagtgagctatgatcttacctctgcactccagcctaggcaacacagggacaccccatctctaaaatatacatgaaagaatgaataaatgaatgcaaataaaatgcaaggaggtggaagagcatgggaaggctctactctttcctaaagaccagagcagaaaaacaggaccatccatttgagacataggcgattccaaatcacagtggaggctgtgaggattttggagcaaggccttgccgttatctgcagattaccagctttctttygagcgacagagctctctcagctagcctctggctgttagtagaaaccaaatgcccaatcgtggggcctggaagttaccatgtgagctgagccactcctcacacacataagtgggtgtgcacggcagcactctagtgtgacatggaagtgcagtggac

SEQ ID NO: 120848 - DNA, 532 bp, Homo sapiens
ataaaaactttgaagaaactactgtgaaactgctttgtgatatgtggattcaactcacagagttaacctttattttggttaagcaggttgtaaacattctttttgaataatctgggaagggacatttcagagsccactgaggcctatagtgaaaactgaataccctgcgattaaaactagaaggaagctatgtgtgaagctgctttgtgatgtgtgggctcagctaacagaattaacccattcttttcattcagcaggttgtaaacactctttctttagaattagcatattgacatttcagagcaaacagtcctacagtgaaaaactgaaaagctcataattaaaattagaaagaagctatctgtgaaactttgtgatgtttgcattcagttcacagagttaaacctttcttttcattcagcatgttggaaatactacttttgtaggatctgtgaaggaacatttcttagcccgccaaggcctatagataaaaacaaaaaatcctattataaaaaccagaaagaagctatct

SEQ ID NO: 120849 - DNA, 630 bp, Homo sapiens
tttattccatagtcttagaataaaggttatattattcgtggagaagcaatgggctttcactgataatgcatcagaaaagatagtagcaaagaaaaatattatagaaccttaaaatgaaataacacattatcataaacaaggtaaattttttttccgagtatatccaagctttcctatgtaacctaagacttaactttagaaagattttactgggtattttggagaagtatactcaaagaaaaatgacttatctccacagtgctctgctaccttctcttacctaagcactggtaattgccttctaaaatccaagaaatacatgatcttgaacttcaccctccccaaatttgccctacatgagcatcattttgatttcttctttccatcaagatttccaagcttatatccrcttatatcctcctttttcttaatgtagcatgaaatttgatgactctgtggctttagtgacaccgtatcccctgcttaaacaccactcattctctcgcccaataggcaaaatctatttttcttcaaagactcaactcaaatgtcaccacctgtaatgagaatgtcctccaatcagagtcattcaatattacttcatttagattccaattatgagacttcatc

SEQ ID NO: 120850 - DNA, 572 bp, Homo sapiens
tttactaccatcgaattagtacattaaatagatataaataacacttctcccattggttatgacttttcaaatacaaatatttatcaccaagtacttgtactacttagattgaataattaattaactaaatgtaaattggtatttagtatctcataatcaaagcttaactgagctgtgtaatatgtctgtttctccttaataaaaaattctagtagtgccaatgtttttgttaatattcacactttccctatagagtcacttattcaccacctgtagattttatamgaaatttatatagaataattcacgtaatagactgtacatatgttctttttcttgaacttctatctagttaccataaacttaatttttattgatttattgagttattctaagctaccattgtccttgaaaaagttagcaaatatctaagtgtaaagaaactaacaaacaaatgaacagaaatatattcacatgtatatatgaaaaatgattaattttatttcacataatagaatatttgatatttaaatgaatatttccactgaaaatcagaaaagaatgttttctag

SEQ ID NO: 120851 - DNA, 574 bp, Homo sapiens
taatttttaactctattgcacttaaagattttagttaggttaccactgtcattttcattttctatgttaaagaatacctttcagtgctrtgctccagtatctaaaaattttatcaccaggggaataaactcaatacacattcattaaacttttgttgtaattaaactgctatatattgtttgccatatattatggcccaaggaatatagttataatcaggctacattcacattttcttttctcatcttaaaaccctttatgttcaaaatacattagcagaggccatgaaagtgaaaaaaaatcagatttttgctagtaagtttttatatttgacatcattttaaatgctcaaagagttgccctatatatgcatgttatccattataaatgcactcagcagctaagagaaatttgagaggaaaagtggaagaagtgttttctggagcagaagattccacttctttggtcctcatctttacttaaaaagctcttatagaaaggattaatcattttgactgcatacaaactatgtctctgacatgcacatacactgctttataatgaaaatgaggac

SEQ ID NO: 120852 - DNA, 607 bp, Homo sapiens
tttggcttttgttgccattgcttttggtgttttattcatggagtctttgcccatgcctatgtcctgaaaggtattgcccaggttttcttctagggtttttatgattttaggtcttaggctccggttttaactttatatcactgaaagaggcactgaagaggtggtaaaacagtcttgaatcaccgacaccacccctccctcatcctgtgacagcagtggcatggtgcagagagcttttctgtgcactggggagagagagagtgcagtaattatgaggcaytgagctcagtgctgtcctattataaaagaaaaaaactggatgaaacttaactgatgctcacccatggagggagcatttaatccagccctaaacagaggggaatcactgacccccagcagtctaaacttgagttccccgcaagccttgccaccatgggctacagtggcagtctaggccactgggactacaactcctaggcaagccctaatgctgaactgggcccagagacagtgatagtgggctaagcggggcatgtgacctaatgacacatcagtcaggggaagctaagggagtgctggcatcaccattcccctaaccccaggctgc

SEQ ID NO: 120853 - DNA, 525 bp, Homo sapiens
tggtggctaggtggcaagatgcctttcacgtgaagaacagaggatggaaaagtaaaggggactttgtcttsgaccttaggtgccaccttggctacagggggatagagcaccaagaggactctcagggtccccaattccaggagttggctcttggatggcatttctggacctgccctgggccagaggggagcctgttcccctgaaaagtgagtcccaaaccaggcagcattcaccacaagctgactgaagagctgttaggccctcaaggaacatcagaggtagtctggcagtactcctcatgagcctatggtagtgtggccacagggtgaggctcctctctgtttggaaaggggtgggaagagtgggaaggactgtgccttgtggcttgagtgccagctcagccgcagcacactagaataccacgtagaattctaaggtttttgcttttagttcttagctcccagatggcacttctggacctgcgtggggagtggaggaactcaccacctgaaaggaagaacacag

SEQ ID NO: 120854 - DNA, 525 bp, Homo sapiens
tggtggctaggtggcaagatgcctttcacgtgaagaacagaggatggaaaagtaaaggggactttgtcttcsaccttaggtgccaccttggctacagggggatagagcaccaagaggactctcagggtccccaattccaggagttggctcttggatggcatttctggacctgccctgggccagaggggagcctgttcccctgaaaagtgagtcccaaaccaggcagcattcaccacaagctgactgaagagctgttaggccctcaaggaacatcagaggtagtctggcagtactcctcatgagcctatggtagtgtggccacagggtgaggctcctctctgtttggaaaggggtgggaagagtgggaaggactgtgccttgtggcttgagtgccagctcagccgcagcacactagaataccacgtagaattctaaggtttttgcttttagttcttagctcccagatggcacttctggacctgcgtggggagtggaggaactcaccacctgaaaggaagaacacag

SEQ ID NO: 120855 - DNA, 602 bp, Homo sapiens
cattctttctggacctttaaaatatactcactttctcctgaaacagatcttaaaattaaggatctttaagaaaagtggactctaacaatgcaggcagattctggatacttkcagccagctctaaagcccattgtgatatacatttgggtttattattatcattgtggtaagaagacttaacataagatctaccctcttccatttttgagtgcacaatacagtactgttaactgtaggcactatattgtacagcatatctctagaacttattcattttgtataactgtagctttataaccattgaatagcaaatccccatttccctgtcccctagtccctggcaactaccattctgttctctgtttctattatttgaactattttggatcctgcatttaagtgagatcgtgcattatttgtctcttctgactggcttatttcacttagcataatatcctccagattcattcatgttgttgtgttttacttttttatacagttgtatatagcaggatttccttttttgaggctaaataatattccattgtgtatatataccacattttcttaatccattcattagttgatgggcattcagatta

SEQ ID NO: 120856 - DNA, 548 bp, Homo sapiens
tctccgtcagcatctccacaaggccctcgccaatggccccattgagtccagtttagtactcattccatttcattcatgtaacagactcaagctacccctccccactgtgtctatcccattagtaaagaacatttacaaaaattttttttttttttgagacaagttctcactctttcgcccaggctggagtgcagtgccacgatcttggctcactgcagccttgacctctcgggctcaagcaatcctcctgcctcagcctcccaagtagctgggatcgaaggcacacaccaccatgcccagctttcttttcttttcttttyttttttttttttttgtggcaatgggagtctcgttatgttgcccagtctgttctctaactcctggcttccagccatgatcctgcctcagcctcccaatgtgctgggattacaggcgtgagccaccatgcccagccaacaaaatatttaaaataggctattttgactaagacaaaatcaaaattatcccacttcctccatatgttaatccattttaaaaagtgaggaaaa

SEQ ID NO: 120857 - DNA, 523 bp, Homo sapiens
attcttgtttatagacaatatgattattatgtcagaccacataggctaggttatgccacaaacaaccccaaaatctcggggtcttaacactgcaagtttatcttctcataagcaaaatcaattgctaattcaggctactcttgaaggcaagcatacaaaggtcggtttattatcatatgctattttgatctaatggtatgctcatatcaacatttgctttaaacaagcagagcaaagacagctgggaaatcatgcacctgcaattcaatgtctcagcacacatccctttagctcccttttcattggccaggraaagccacatgctttgcgtaacttcaagaggtgggagaagcaaaatcctcccatgtgctagaaagacacaaataaccaaaatatctaatacaattatctacataaaacatccaagagactctacatgtaaactatcagaaccaatagaaaatgcatcacatttatcaaatttccgtggtattattaccaaaaatgcataacttcagtctgc

SEQ ID NO: 120858 - DNA, 596 bp, Homo sapiens
atgtcgggctgagctggaagctggatgggagagtcaggggctcaacgccagagaagaggcaggaagggtttcctgtgcagcaggggttgagggatggatagaagcctcagcatgtggacaacagacatgaattagaagctcctggagcctacagggaaagaagctgaggtttccagctgcttgttccagtggttacctctgtgtgcagtggaccttgctggccagaggtgaggcagctgggctgggaaacctgggaggagactcccccagctgcggtgacatctttcttcatgctcttcagagtcatgattcacacacttctcccmattcttcttctgggaggcttctacagtctgggactgcttcttcttaaggacctcctggatgcaccctttgtttgtatcccagtgtccagcactgtgccagacacagtaacttccctgtagatgcaggttgaaccaagggatcaattaggaaatcagtttgcatctgccacttgcctttcagttttacgacttttatctgcaaggcacaatcggtttggtggaatgactggccaagatggcaaagccaggaggaatttgcagcagggattt

SEQ ID NO: 120859 - DNA, 596 bp, Homo sapiens
atgtcgggctgagctggaagctggatgggagagtcaggggctcaacgccagagaagaggcaggaagggtttcctgtgcagcaggggttgagggatggatagaagcctcagcatgtggacaacagacatgaattagaagctcctggagcctacagggaaagaagctgaggtttccagctgcttgttccagtggttacctctgtgtgcagtggaccttgctggccagaggtgaggcagctgggctgggaaacctgggaggagactcccccagctgcggtgacatctttcttcatgctcttcagagtcatgattcacacacttctcccamttcttcttctgggaggcttctacagtctgggactgcttcttcttaaggacctcctggatgcaccctttgtttgtatcccagtgtccagcactgtgccagacacagtaacttccctgtagatgcaggttgaaccaagggatcaattaggaaatcagtttgcatctgccacttgcctttcagttttacgacttttatctgcaaggcacaatcggtttggtggaatgactggccaagatggcaaagccaggaggaatttgcagcagggattt

SEQ ID NO: 120860 - DNA, 578 bp, Homo sapiens
gaccctgagaagggtggctccttggcctcttttcctcagcctaagtttgggagacccctcaagcccccatctgacggcttgcaccaccagtcccatagggagtagaaagtggtgactatcaggacagccagcagcggatccataagtccccaggcatgagctctgcatgtctgactttggattggagcctccagtaggtacctccaccatcacacaggtcmccccccagcacatcccaagcccctacttggaagacacagtgctcactcatatgtggcattcacggtcagcagcagcctccaactgagaaggccgggctggtggtcggcttccttgtggcccccttggaactgggccctgcaaacaccctcttacctcagggctccctccacacctccaatctgccactgcccatgacagcttcattcagtacattccctttgatgaaccaaggatatgacatatcaaaccagctcaaccccagggtttctttgaggacacaaggtttggtgatgaatcttataactccagtcctgtcactgaccaagagccagctcatggaaaaatgctgatggtgc

SEQ ID NO: 120861 - DNA, 578 bp, Homo sapiens
gaccctgagaagggtggctccttggcctcttttcctcagcctaagtttgggagacccctcaagcccccatctgacggcttgcaccaccagtcccatagggagtagaaagtggtgactatcaggacagccagcagcggatccataagtccccaggcatgagctctgcatgtctgactttggattggagcctccagtaggtacctccaccatcacacaggtccccccccagcacatcccaagcccctacttggaagacacagtgctcactcatatgtggcattcacggtcagcagcagcctccaactgagaaggccgggctggtggtcggcttccttgtggcccccttggaactgggccctgcaaacaccctcttacctcagggctccctccacacctccaatctgccactgcccatgacagcttcattcagtacattccctttgatgamccaaggatatgacatatcaaaccagctcaaccccagggtttctttgaggacacaaggtttggtgatgaatcttataactccagtcctgtcactgaccaagagccagctcatggaaaaatgctgatggtgc

SEQ ID NO: 120862 - DNA, 606 bp, Homo sapiens
ttggggatgataaggatgttctataattagattatggtaatggttgtacaactcggtaaatgtcatcaaataaaaagcattgaattgtacactttaaatgcaagaattttatggtgtataaattatatctcaataaaactgtttcaaagaaaatgaaaagaatccacaagactaattatactctaatttttttgaaagtcctttggggtaaaggaactacaaataaaaagttaagttttgacactgtgcctaaaacatcagaaaagaatagtgataataataatggctgaggtctattcagatgctcttatgtactaagcatcatgtaattaactttccatgattatttcytgtacattttagagtaatcttttcaagtaggtaataatcttaaaatcattacatacacacaagatgaagtttaaacaatcactcagtcaacatttactgtctaccatataccagtcgctttgttaaggaggacattgatatagtttatgcacaaagattttttcaacataggtcctgcaatttaagtaaactttgtataaattatcaaagtaaatttcttctgtcacatttagaaatgactacagactattaaaa

SEQ ID NO: 120863 - DNA, 606 bp, Homo sapiens
ttggggatgataaggatgttctataattagattatggtaatggttgtacaactcggtaaatgtcatcaaataaaaagcattgaattgtacactttaaatgcaagaattttatggtgtataaattatatctcaataaaactgtttcaaagaaaatgaaaagaatccacaagactaattatactctaatttttttgaaagtcctttggggtaaaggaactacaaataaaaagttaagttttgacactgtgcctaaaacatcagaaaagaatagtgataataataatggctgaggtctattcagatgctcttatgtactaagcatcatgtaattaactttccatgattatttcctgtacattttagagtaatcttttcaagtaggtaataatcttaaaatcattacatacacacaagatgaagtttaaacaatcactcagtcaacatttactgtctaccatataccagtcgctttgttaaggaggayattgatatagtttatgcacaaagattttttcaacataggtcctgcaatttaagtaaactttgtataaattatcaaagtaaatttcttctgtcacatttagaaatgactacagactattaaaa

SEQ ID NO: 120864 - DNA, 580 bp, Homo sapiens
cgcgattggcatttagctcatgtaatcctttgtatgtgaaataacatatattttgacaatttaatggggtacaaacacagagaagcctcatttgaaggtgttacataaaaatttcrtcagttgttctagccaagatgtatcttgcaagtttggagctcctctttcaattactttctgtaagtttctgtttaaaagtattgccgtcatctaaatactccaaactgaacttattttctacaaaattagccactctcaattctccatttgtgtcaatgtatctctattctctcctctttatatggacttaaaattatgtggtcagttttaaatacttcctctcctccaatttggatctcctacccacttagtcattattattatttttaatcatggttagtcactgattcctgtttattcctggacactggctgcaaggccccttatttcacattactcctatgttgtaggaatatgactctagatcaaggaaatcctgtcatttgcaacaacatggatgaacctattgtatattatgctaagtgaaataagccagacacaaaaagataaacaatgcatgatc

SEQ ID NO: 120865 - DNA, 445 bp, Homo sapiens
tcttttgctttctatctggtggcattctctagccatggagctgtactgtgtccaaatacaaggcaggttctgggacattaagaaccaaggagcaatgctcaagcaatgagggatgggagttactggctagacccagcaaccactcagcctyctgagggctaatgctgagggtctctttgggactcagccccagttgctcactgtagtaagacacctgttaacaaaatgttgtctcactttactcctacttgatgctttcaggatcacctttcaaataacaacctgcccccaagtccttgtctcagagtcaacttttggaggaacacaacatagacagggaataaaaaatgtctccatatcacagtaagggttttaagagttaaatcctgtaaagctcctagaagagtgcctcttctatggttagcactgaatgtttgtcagggta

SEQ ID NO: 120866 - DNA, 647 bp, Homo sapiens
ttaggtccagttaatacttttaatttaaaattttcaaaaatgttattcatctgaagttctaacacatgagacaagttacttgtagctctattaactataggaaaatcaccttgagtaacttgtcattgtgaatcatctaattaggtaatgttttgtgttgggaagagcacataacctgasatctactctcttaacattttttaagtgtacagtacagtattgttaactgtgagcacaatgttgtacaaatggtctgtagaatttattcatcctgcataactgaaactttatacccactgaattagcaacttcccattttaccctcctcccagcctctggtaaccaccattttatcttctgtgtctatgagtctgtttactttcaatacctcatgtagatggaatcctgcagtagttctccttctgcgattggcttattgcacttagtataaaggcatcaaggtttatccatgttgtcacatttgacaggatttccttcttcttttatagcaggataactcatttactcttttgagaggtgatttttattggatagagattccagatattatgtatgaaattactgaaatagctgacttacacataggattcctctctgtgatggttttaacatatgaccataaattc

SEQ ID NO: 120867 - DNA, 647 bp, Homo sapiens
ttaggtccagttaatacttttaatttaaaattttcaaaaatgttattcatctgaagttctaacacatgagacaagttacttgtagctctattaactataggaaaatcaccttgagtaacttgtcattgtgaatcatctaattaggtaatgttttgtgttgggaagagcacataacctgacatctactctcttaacattttttaagtgtacagtacagtattgttaactgtgagcacaatgttgtacaaatggtctgtagaatttattcatcctgcataactgaaactttatacccactgaattagcaacttcccattttaccctcctcccagcctctggtaaccaccattttatcttctgtgtctatgagtctgtttactttcaatacctcatgtagatggaatcctgcagtagttctccttctgygattggcttattgcacttagtataaaggcatcaaggtttatccatgttgtcacatttgacaggatttccttcttcttttatagcaggataactcatttactcttttgagaggtgatttttattggatagagattccagatattatgtatgaaattactgaaatagctgacttacacataggattcctctctgtgatggttttaacatatgaccataaattc

SEQ ID NO: 120868 - DNA, 625 bp, Homo sapiens
ctagatattcattatcattaaataaccctcttaatgaactattaatcataattatctaataaactattatttaatgatagtgaagatgcctgattaataaataccttaattgataaactgataattgtattaattttaaatttagttttaaattgaaaaatraaaattttatttatcatcgatgttgaacacagtacagtgctgaagagacatgaagagacatacatattaggtaggttgtatgtactcttgctctttcatagtccctattattactttttaatgttttcttttggtttaagagggctgacaagtcacgttttttcctcctctgaatttgtaatcaaactgagaatataacaagcatctgttaggaataaaaacagtcaacgctggtgttatgactggattgaaaaccttaggagaaggaacaaagcatggtggctctttatttttcatcatattgaatgtaaactgtctgtgatcttctctgcttctgtttccaaatggtaaatattctggagtcacaactgactttttacaaatttaaaatacttactatgattcaacatgcttggtgattctagcaaaagctgtaatacaatagattagattatatcctagt

SEQ ID NO: 120869 - DNA, 625 bp, Homo sapiens
ctagatattcattatcattaaataaccctcttaatgaactattaatcataattatctaataaactattatttaatgatagtgaagatgcctgattaataaataccttaattgataaactgataattgtattaattttaaatttagttttaaattgaaaaatgaaaattttatttatcatcgatgttgaacacagtacagtgctgaagagacatgaagagacatacatattaggtaggttgtatgtactcttgctctttcatagtccctattattactttttaatgttttcttttggtttaagagggctgacaagtcacgttttttcctcctctgaatttgtaatcaaactgagaatayaacaagcatctgttaggaataaaaacagtcaacgctggtgttatgactggattgaaaaccttaggagaaggaacaaagcatggtggctctttatttttcatcatattgaatgtaaactgtctgtgatcttctctgcttctgtttccaaatggtaaatattctggagtcacaactgactttttacaaatttaaaatacttactatgattcaacatgcttggtgattctagcaaaagctgtaatacaatagattagattatatcctagt

SEQ ID NO: 120870 - DNA, 595 bp, Homo sapiens
gcatttttggccctctacatttaggtaatcttgaaaaaatgattttgttttgatttttttcctggtgaaaaaatataattcttacatttttttcttttggggaaaatcataatttatttaagatttttgtcatgtgactattttcatattctgtgcttcttttcctttttttcttataccttgtaacacatgtcttataaatttcttctaatgcatgtttatgagcacaggtagactcaagtttaacagtttaactttcttttagaaatacaattaactcacccttattttattgtgtatttatttaaacattcttttaaatgccaaaatatgcytaaaatctaaaactcaagtatgaggttttcataaatagctgaactcttgagctctgatgtctgtccaaaaaatccatttacttatctttaggttggagcactatattcacttgctcctaaaataatcggtaaaatataagcctctatcattcttattttctcagtgaagcacatcataatttgcccacttcggtctctttaaacttacccaaagaaagaaatctgctgaaaaatgcctttagtcaaactgaaccatgtct

SEQ ID NO: 120871 - DNA, 607 bp, Homo sapiens
gcctagagtccggggtatatcttccttacagagatgactgatttgaaatgatcagctctattatttattatttgataaaatgttatgataaaacgtgttaaggactcatcctatcttgggacttcatgattattttctaaagctgtcctaaattattaccaaaacagttctcctactgcacttattaattccatttttaattatcttatttactcattaaatatatattgaatggcgagtatttgtctgtgacttctatatragattttatacaatcaaatctggtgttatttatatgatagggagtttgcattctaatggaagaaatagtggagtaaaagggtgtggtatgtgtcatggtagatatacacataaggagggcatggaacagcaggggaataacatatagatcagctgctgaacaagggcaaggagtaaaagaaatctcctggaaatattaatgaatgaactgaaactttaaaataagaaaaagaaccctaaaacttttctgtcagattgcaaatgagactgaattgaagggaggagaataattgtgatgggaacaaaaatttggagactacaaccaaaattcaagttataagacatt

SEQ ID NO: 120872 - DNA, 627 bp, Homo sapiens
atatcaaacacatttcttatacagaagaataaataaatattttcttttgttttgtttgaaggaaatgcctgtartctatgagaagacaccaaatctattaagtggaggcaattccttgaccataggtttacagcaaaaattaaatgagtgatcttgatttagatctttaaatttttatactcatttttttattagtggaatagcttatatttgcttacttacattttgttgttgtttttgttttttgtttgtttaagacagagtctcagtgtgtcacccaggctggggtgaggtgacgcgatcttggcttactgcaatctctgcctcctgggtttaagcaattctcatgcctcagcttcctgagtagctgggattacaggcaagcaccaggcatgcccagtaatttttgttatttttagtagagatggggttttgccattttggctaggctggtctcgaactcctggccccaagtggtctcctgggcctcccaaattgctgggattacaggcattagccactgtggctagccttattgcaatgttttcagaagagatatatttaatttctccgaagtttagaggggactatgttattttgttttattataatcccatgtttatttga

SEQ ID NO: 120873 - DNA, 627 bp, Homo sapiens
atatcaaacacatttcttatacagaagaataaataaatattttcttttgttttgtttgaaggaaatgcctgtagtctatgagaagacaccaartctattaagtggaggcaattccttgaccataggtttacagcaaaaattaaatgagtgatcttgatttagatctttaaatttttatactcatttttttattagtggaatagcttatatttgcttacttacattttgttgttgtttttgttttttgtttgtttaagacagagtctcagtgtgtcacccaggctggggtgaggtgacgcgatcttggcttactgcaatctctgcctcctgggtttaagcaattctcatgcctcagcttcctgagtagctgggattacaggcaagcaccaggcatgcccagtaatttttgttatttttagtagagatggggttttgccattttggctaggctggtctcgaactcctggccccaagtggtctcctgggcctcccaaattgctgggattacaggcattagccactgtggctagccttattgcaatgttttcagaagagatatatttaatttctccgaagtttagaggggactatgttattttgttttattataatcccatgtttatttga

SEQ ID NO: 120874 - DNA, 627 bp, Homo sapiens
atatcaaacacatttcttatacagaagaataaataaatattttcttttgttttgtttgaaggaaatgcctgtagtctatgagaagacaccaaatctattaagtggaggcaattccttgaccataggtttacagcaaaaattaaatgagtgatcttgatttagatctttaaatttttatrctcatttttttattagtggaatagcttatatttgcttacttacattttgttgttgtttttgttttttgtttgtttaagacagagtctcagtgtgtcacccaggctggggtgaggtgacgcgatcttggcttactgcaatctctgcctcctgggtttaagcaattctcatgcctcagcttcctgagtagctgggattacaggcaagcaccaggcatgcccagtaatttttgttatttttagtagagatggggttttgccattttggctaggctggtctcgaactcctggccccaagtggtctcctgggcctcccaaattgctgggattacaggcattagccactgtggctagccttattgcaatgttttcagaagagatatatttaatttctccgaagtttagaggggactatgttattttgttttattataatcccatgtttatttga

SEQ ID NO: 120875 - DNA, 595 bp, Homo sapiens
gcttgaacacagtagatctttgataggtgagaggtggtgccatttaaaaaaatatgaacacccagcctggtatggtggctcatgcctgtaatctcagcaatttgcaaggccaaggctggaggaacacttgagccaaggtcaagaccaggctgggcaacaaggtgagaccccgtctctacaaaaaaataaaagaaaattgccaggcatagtgatgcgtgcctgtrgtcccagctacttgtgaggctgaggcaggagaatcgcttgagcccagaggttgaggctacagtgagccatgttcatgccactgcacaccagcctgagagagcaagaccctgtctcaaaacaaaacaaacaaacaaaaaaccaaacacgcttgatacagagcctgatggaaactaggcattcacttaacatgtttcttgcctagaatgtaagaatgatcagctgttggtctctgcggactctcaaatgttataattttatgacacgttatgcttgattctttgacaaataagaatgtatgtgtgtttctgtgatagggagagattgtatgagagagagttagtgaattagtgtggaagtagcggaacagaga

SEQ ID NO: 120876 - DNA, 639 bp, Homo sapiens
catccaatattgcaaaatttatctaagcgtttctcaaaactaagattttcaacacagcgaaattgctgtcaaacatggtgctactttacatagccgaagtccttcattcattcatggaagagattcaatagatacaccatggcaggacagggactagggcctaaagtcaccatggatatataaggagatgtagtgtctgtccccatggagtggaaactcaatgaacttatacctctctttagtaagataaaaggcgggtcacagaaccatctgcatctcaatttctgaacctgtaatgtgaagaaaatatcacctatcacaaagggctgttgtgatcatttcaatttgataatctataagagttaagcactttgcaggatgtgtagcagagaacaaatgctcagcaaatgtcaactcccaatatttcccctcttctcaaggtaaaaactggcccctgtacmaaaacattattttaccattcaaaatactatggagtcaggcgtagtggctcacacctggaatcctaacactttgggaggccaagacaggaggattgcttgagcccagaagtttgagaccagcctggacaatagagtgagaacttgtccctacaaaaaaatttaaaaattagccaagcat

SEQ ID NO: 120877 - DNA, 639 bp, Homo sapiens
catccaatattgcaaaatttatctaagcgtttctcaaaactaagattttcaacacagcgaaattgctgtcaaacatggtgctactttacatagccgaagtccttcattcattcatggaagagattcaatagatacaccatggcaggacagggactagggcctaaagtcaccatggatatataaggagatgtagtgtctgtccccatggagtggaaactcaatgaacttatacctctctttagtaagataaaaggcgggtcacagaaccatctgcatctcaatttctgaacctgtaatgtgaagaaaatatcacctatcacaaagggctgttgtgatcatttcaatttgataatctataagagttaagcactttgcaggatgtgtagcagagaacaaatgctcagcaaatgtcaactcccaatatttcccctcttctcaaggtaaaaactggcccctgtaccaaaacattattttaccattcaaaatactatggagtcaggcrtagtggctcacacctggaatcctaacactttgggaggccaagacaggaggattgcttgagcccagaagtttgagaccagcctggacaatagagtgagaacttgtccctacaaaaaaatttaaaaattagccaagcat

SEQ ID NO: 120878 - DNA, 565 bp, Homo sapiens
caaatttatttctcgttttatatctagttatataatatttgctcaataaatatcacattcatttaattatagaaggctttgattatgtgaagaataacatggttaacatggaattagggcaattgagatcctcaaatttagacattatatttcaataagtargcattttcttatggatccgtgctagtggctaatgactagaatgagggtatttatagaatgtgttgactttgtgatttcttattgaaagataatccaaaaagttgtggttaggagctatatagattcttgtgtgactttgaaaaatggtgattagggatggaaaatttcatcaaggttggaaaaatatacccctcttggaagaattaaattaggcattatgtatagaaaacctgtgctctttgttagagatatagtaagtgatccatagtcttccttcttccataaccatttccctttagaagcacagagtatgttgttgggggcgggcgtgggcagatactgttgttgtcatggttaatgcatattatgaccaggttaagcattttacttgtgttatctcatg

SEQ ID NO: 120879 - DNA, 618 bp, Homo sapiens
tgtcctccctcaagcaggagaggtccctagcccatcaaacagctgacatgcctgcccccaggccagcagagtggccatatgcagatgtacagggcctgaaaaacaggcctgtagcacctactccctccatgaacacacccttggattgcctcgcattcacaaccagggcttggagaaacttgagaagctgactgagtagctgtgtgaagcccataggtggmtgaatcccacaactccagctgcatggattctgggcccagaattgcctgtgactctggtcctgcacagcagtgaaaccaacctacactgtctggttttacagttggaggaagactctggaagtcttgtctgaggagagcctacccttaagccagctaaactgctgcacaccctctcccaagtgagagaggtccttgatccacctaacagctgacatgccactgggcccacagagcagctgtgtgcccatgcccagggcctaagacacagtagcagcatgggaccacacccctaccatggacatgctgctgacctgcccaaaggacctgcatgtgcagtcaacgcttgagaaacagccctgttggccacccccagcagacatgcacccaggccagccaa

SEQ ID NO: 120880 - DNA, 618 bp, Homo sapiens
tgtcctccctcaagcaggagaggtccctagcccatcaaacagctgacatgcctgcccccaggccagcagagtggccatatgcagatgtacagggcctgaaaaacaggcctgtagcacctactccctccatgaacacacccttggattgcctcgcattcacaaccagggcttggagaaacttgagaagctgactgagtagctgtgtgaagcccataggtggctgaatcccacaactccagctgcatggattctgggcccagaattgcctgtgactctggtcctgcacagcagtgaaaccaacctacactgtctggttttacagttggaggaagactctggaagtcttgtctgaggagagcctacccttaagccagmtaaactgctgcacaccctctcccaagtgagagaggtccttgatccacctaacagctgacatgccactgggcccacagagcagctgtgtgcccatgcccagggcctaagacacagtagcagcatgggaccacacccctaccatggacatgctgctgacctgcccaaaggacctgcatgtgcagtcaacgcttgagaaacagccctgttggccacccccagcagacatgcacccaggccagccaa

SEQ ID NO: 120881 - DNA, 618 bp, Homo sapiens
tgtcctccctcaagcaggagaggtccctagcccatcaaacagctgacatgcctgcccccaggccagcagagtggccatatgcagatgtacagggcctgaaaaacaggcctgtagcacctactccctccatgaacacacccttggattgcctcgcattcacaaccagggcttggagaaacttgagaagctgactgagtagctgtgtgaagcccataggtggctgaatcccacaactccagctgcatggattctgggcccagaattgcctgtgactctggtcctgcacagcagtgaaaccaacctacactgtctggttttacagttggaggaagactctggaagtcttgtctgaggagagcctacccttaagccagctaaactgctgcacaccctctcccaagtgagagaggtccttgatccacctaacagctgacatgccactgggcccacagagcagctgtgtgcccatgcccagggcmtaagacacagtagcagcatgggaccacacccctaccatggacatgctgctgacctgcccaaaggacctgcatgtgcagtcaacgcttgagaaacagccctgttggccacccccagcagacatgcacccaggccagccaa

SEQ ID NO: 120882 - DNA, 618 bp, Homo sapiens
tgtcctccctcaagcaggagaggtccctagcccatcaaacagctgacatgcctgcccccaggccagcagagtggccatatgcagatgtacagggcctgaaaaacaggcctgtagcacctactccctccatgaacacacccttggattgcctcgcattcacaaccagggcttggagaaacttgagaagctgactgagtagctgtgtgaagcccataggtggctgaatcccacaactccagctgcatggattctgggcccagaattgcctgtgactctggtcctgcacagcagtgaaaccaacctacactgtctggttttacagttggaggaagactctggaagtcttgtctgaggagagcctacccttaagccagctaaactgctgcacaccctctcccaagtgagagaggtccttgatccacctaacagctgacatgccactgggcccacagagcagctgtgtgcccatgcccagggcctaagacacagtagcagcatgggaccacacccctaccatggacatgctgmtgacctgcccaaaggacctgcatgtgcagtcaacgcttgagaaacagccctgttggccacccccagcagacatgcacccaggccagccaa

SEQ ID NO: 120883 - DNA, 578 bp, Homo sapiens
agaaaaggccctcgttcctaagacaacaattcaaggtcaagagaacaaaaaagaaattgaaaaaggtaagtatactttccagggtgttataggtcacccaagagaaagtcctgattttgacatttcatagacacagtaattcacggcatgcaatgaaaccttggtggtcagtgtatctctggtgacaaacaccctctacagtccctccctgttggccagcctctgttagatgtccactaacacaagatgcccagcagaagaaagctcactattcccaccactacactgtcatctgttaataatcataacctgtttgaaaatataataaaaaattatttattcacaatagccacaaaaccataaaatacytaggattaaatctcacaagacctctgtgaagatgactacaaaactttaccgaagaacgtaaaagaagacttgaatacctcatgcctggatggaataaagaatatcataaagaagagaatcatccccaaagtaatctatatatccaatgcaattccaaccctgattaaacaggattgtttaatgacatttgtcaagctggttgtaagatt

SEQ ID NO: 120884 - DNA, 571 bp, Homo sapiens
gaatggaaaggagcgttttcaggaggaatactgtgagtccctgggcrtatacttcggcaatcatggagactagtctttggtctgaacatccagggagcagtgattcagcatccttaagtgatttctaaagaagtacattaaacaatgctttttgggcttattgaagacccccagggcaacctcagaaatcagtggaggagatagcacaacagaaaaacaggacttctggtcagcagaaacaatcatttttgttaatattaacccacagagagagaggtctgtagaaaatcagtttacaacaggatgagcttttcctcagttcaaatctatacacattgattgaactcaggaacttgatctagaaggtactttcattccccctctttactcagtaaaggttacatacactacaaggctggaattaagtaattcttctactaagagtccagtcactttttctgttcatcaaacagaaagtataaatgaaatattcttctgtgatggggatggatggaagggatttggtccaagcaggtgtaaagaaaggtccctgctcacagggagccaggaa

SEQ ID NO: 120885 - DNA, 514 bp, Homo sapiens
ctgtgaaaaattaaatcacttttgtcacttaagccagtttgagattttttttttttatttttaagagaaagcttctcaactgatatagaaacttaccttcagttttactggaagattattctggatgaaggaaggataagtgacataccaactgttctctgtcataacagtctttgttcattatttgcatttttagatgacattggtgatggaggattaggagagaacctcctgacacagaccttcaatccacaaacgctgggtcaagtgaagagatttttccaatcaaagtacattgatgctgtaatcattagttttttccttactattaagtaaaatattttccagaaatgcactgaccacatactttgattttttaataacattttcttcattggattatgaaatttaggaggttagggactgtgtttttttkttttttttttccaagacagagtcttgctctgtcacccaggctggagtgcagtggtgcgatctgggctcactgcaacct

SEQ ID NO: 120886 - DNA, 600 bp, Homo sapiens
ttctactcattaaattaatatataaattaggatggtattattctatatgtatcattaagactttccagccatggacatgaaatatttctgtacttaactctttaatgcttttcagtaaaattttataacttatcctaaacatcatacacactttctttatatttattactgaatgctttatagttttcattgtttttatatcatcttgttttgttgtgtataggaatagacttatgatcttatatatagctatcttgctgaatgcacttatcaatttcaaatatttttctcttgaattttcaaagtatacaaacacattgagtgagcatattgacaattttgtttcttactttccaaatcttaatagcttttattatttttattatattatatcactggttargaatttgagcataatgttgaataaaaatggctacagcaggcatccttgtcatttctctgatttaaaagaaaacacttatttcatcaagtttgctgagattttaggagacattttttcccagtatttgctgagattttttgtaattatgaataaatgctgaattatgtaaaagtattttccacatatgaaaagatgaa

SEQ ID NO: 120887 - DNA, 622 bp, Homo sapiens
aagtactatacatggataagttgatcacagatgttattccactattgtttgattgccatggtttctgataaatccagagtcattttaactattgttcctctgtgtgtacattgttatttttctcttcggctacttccaagatttcatttttatccttagttaacaagagtttgactatgatgttcctatgtgaagttatcytgtaatttaccctgtttggggttttctgagcttcttgaaagtgttgtaaatgcacatcatttaagaactttaggaaatttcactatttaaatatttttttgggattcattctttttctctttttattctacattgtggttgcctatattttaaatttgttgaaatttttccaagtctgtgaaattctgttctattttttaaaatatattctctctcatctttagtttttttaaatccactgactctatcatatttattgtgtttctaaacctatgcactattttatatttcaggtatttttcagatcccctgatactttcttttcatctataaagatttttttctttaattactatttgtgcccacttataacagctactttaaaacaaaaaaatcaaaactatggaacagctaggagttg

SEQ ID NO: 120888 - DNA, 543 bp, Homo sapiens
agtgcattttacttatatgtagcatcaccaaattacacaatttgtattccttatcttgtatatgtatatgtacatcaatcttaccagaatggtggaatgattccacaaaactaatgttgggctcagaatgtgataccccaaaataaggcaccttagcataataagtattttaacatgaagaaaattaagaaaactacagaagatagatggtctctctgatcttctcaatccccctttctccctaaaagcaggccctaaaacctaggaaggtaactctctgacctcctcccctccttctcccctaaacgccttcatgtagcaggcatcctgccctaaacatggagaacgagaatgtcacagagacacagaaaagaatctgaacaaacaggacttgctgaattcccaacstattatcatcagagcataaccgtttgtgtctaatcacattgcttcatagctagattctttaatcagacttagcacaaagtatacacagatttccctgtttcttttgatcttcatttccttttaaaggctatctct

SEQ ID NO: 120889 - DNA, 568 bp, Homo sapiens
aaaaattgtattagtgataggttccaaactacttcaattatcagcctaatgaaataccactctttccatgtatcagtcctaaaatttcagtattattttttatacaacctagatttttaaagaagagcatgagctttcgaacaagaatagaaaaggatggtgcataatgtgatagccaagaaacaggagaaataaaagtaatgcctggggagagaagactcaggaggccagacatatttcagcatgatgaaagagtgctctgaagaaccgtaggccacttgagatttagtattcattgaaaagacagtgcccccaagaagagaaccatagttaggttttatctatttcatgtttttatcaagcatggaggggttctacagtacaggaagaaagtctatgggagaaatcaatccccttactttacrtaatattcacacatacatagctgcccctccctccagaagtttcttagattgccccatttctctgaacttacaaacgagaacaatgtaaatgccagaaacagtattctttacatataatagtatattcagcaaatgtttgttaa

SEQ ID NO: 120890 - DNA, 550 bp, Homo sapiens
caaatgctactatgggaaacttcagctgttgatacaataaatcctctaatcatactatacagtatttttctcaatttttgtttgctctaataaagctatcttgctttctacctgcctacctccaggaatcatgatattaaaaaaaatagaaagcaaagcttaatgaaaaataggtaatatgtacaatagatggcaattatttagctttgctaattgtartcacaaaaagtcacttggaaaaacaaattcaaaattatatatataagaagaaccttattaaaattatgcaaaatcttagtatccagagagaatgacatgagtatattttgcagaacattacatttgttctagttttttgctgtaataaaaatatgaaccctttaatatccttgttgatatatccacataagttgaaatatatattactgttttaaaacagatagatatgtttacctgtgtatagatatatgaaaacgagggattttacttaaatacaataaaataacatatcccagcttctgtgatgtgttcatataaaagtggccgaaga

SEQ ID NO: 120891 - DNA, 632 bp, Homo sapiens
ttgaccatccgaggcagagataccatgttgagctctctgggccctccacggtcacctctagaatgccatgatttgggagtaggccttaattagccctacmgtaatggctactacaaaacacgtttctcaaccttgcattattaatgttctgggcctgacaatcctttgttggagaggggtctgtaccatgcaatgtggaatatttaccagcatccctggcctctacccactatatgccactagcaggttccagttgtgaaaattaaaaaaaaaaaaattgacccccagttagaaccactactctagattcttcataacaaaactcataataaatttcaaaaagacaaggatgatttgcaagtaaattaactgtggcaaagcaaaccttgatgttcttgaaagaaagataacaaaatccatactgcaaacaaggctgaattcataatgttcagcatgcaaaccacagtgaatagtgtgtgtgtgatacagattgcttgataaagagcttacgtccctagttgctgtgattgcttttggcaggcagccttcagttgttaggctccttaagggtttgtctcagtaaaaagagttggcttgtctcaggccacatctccttactggagtagcctaca

SEQ ID NO: 120892 - DNA, 624 bp, Homo sapiens
gtttttaatttgcattctctgatgaccagtaatgctgaacagcttttcatgtgcttgttgacgattcctgtgtcttctttagtatagagtccataaaaaaaaccttttgttcattttatttggctgacttttattattgggttgtagagttttttatatattctgcactaaagcaaaaaaataggtttttaaaaaaatatcttctgtacacatattctctcagcctttgatttaccttttcattttcttcgctgcacctttctatgcagcaggctatatgaattttttccacttttcagttaatattttttgtggttgttctctttggcacaatgtccaatccagtgtaacaatatttttttcctgctttcttctagaggtcgtatagttttgactcctataactaggcctcactcaaccactcttggctatcttcagccactcatatatgaacacaaacatgtacatcctgagatctgactgttayggagaaaagatttaggaataacttattcacatatcatacttgccctgatcacaaaggcccactgaccacagctactgatgcacagatctgcagtatattctgccgaggacataattttcttccgcttttgagtatct

SEQ ID NO: 120893 - DNA, 504 bp, Homo sapiens
cttactgacacattttaaaaaaaaaattcaaggcacgctttcagactcattctgcatttgtggcccttccctgactcttgaacatgtgttattaaaattaaaattcaattcttattgcatcaaaaaggacccatgtaatttcattaaatatgttccccctcttcttactttttttttttttttttttttttttttttggagacagactctcactctgtcgcccgggctggagtgccgtggtacaatcttggctcactccaacctccacctcccaggttcaagtgattctcctgcctcagcctcccgagtggatgggactacaggcacacgccaccacaactggctaatttttgtatttttagtagagatggggtttcactatgttggccaggctggtctcaaactcctgacttcagatgatccacccgcctcagcctcccaaaatgmtgggattacaggtgtgagccactgcacccagcgcccttttcttactttttaagatca

SEQ ID NO: 120894 - DNA, 610 bp, Homo sapiens
agagggggcagagatgcctaacactttgaaatacacacggtagaccaacccaatgagagtcgtcttacccaaaatgcaatagcatcccactgacaaacaccaggatgaccttgcagccactcccacttaactcagccaagtagtctcctggccaaatgctcttcttcctgctcgcttggacctcagtgaagacaaaagctttatcatccaagaaagaggacagacaagggggccgcccgatgggtgttgttttactcacaataccagttgtgacaagtttctcttagcagagtttcaggaaacataggaaatattatcagaattttacacaaccctttttaatctaagcccaatcatcacacaaaactcagatcagagttccaaatcaattgttcccaaactgtatagactgtatttaggagtctgatggctaaaggataaatcgttcccctttgagatcatgaaaccattctaaaagtgactgtggcaatggtsgcacatatttgtgaatatcctaaaaaccactgaatgttatgcctttaatggggaaactgggggatatgtgaaatatatctcaatagagctgcttttacagtggagggaaatttaa

SEQ ID NO: 120895 - DNA, 566 bp, Homo sapiens
attcatagcctttcacactgtgaattcacactataaattcatattttaataaaactctatttataaaacgagccagttcaaatgaattctattagattagttagaaacaaattttattatatctagattatgatcaggtagaattgcttgaaagaagttaaggcaattcattattactattaaatcagggctaaagggtgaaaggcagacagagttatgcttttctgtctcataaaagaaaaacaactmtatatgagtagcaaatgcctggttgaattacaattatttataaaaatcaatgtttctacatagtgcgtgttacaaggggcaagccttacactgaactaagaaatgttaatgaaaacaggatatttataaggtactaaatgtagaatgattacataactttaaggatcttgtctcaacatgagttaagatttatattcataatatctttaaaaagtaaaaaaaaacttgcaaacattcaccatccctacttgcattattgtccaaaagactgtggatagcgacattccactgaatcttgtatccctactgatgttgac

SEQ ID NO: 120896 - DNA, 566 bp, Homo sapiens
attcatagcctttcacactgtgaattcacactataaattcatattttaataaaactctatttataaaacgagccagttcaaatgaattctattagattagttagaaacaaattttattatatctagattatgatcaggtagaattgcttgaaagaagttaaggcaattcattattactattaaatcagggctaaagggtgaaaggcagacagagttatgcttttctgtctcataaaagaaaaacaactatatatgagtagcaaatgcctggttgaattacaattatttataaaaatcaatgtttctacatagtgcgtgttacaaggggcaagccttacactgaactaagaaatgttaatgaaaacaggatatttataaggtacwaaatgtagaatgattacataactttaaggatcttgtctcaacatgagttaagatttatattcataatatctttaaaaagtaaaaaaaaacttgcaaacattcaccatccctacttgcattattgtccaaaagactgtggatagcgacattccactgaatcttgtatccctactgatgttgac

SEQ ID NO: 120897 - DNA, 575 bp, Homo sapiens
gctaaaacctgctaacttcttccaggttctgagcatggacaactcccaccgccccccaacctaaaagggaaggtcatgcatagaaagtttggattttaacttagagcctgactcaaaaataattgtgaactaaaaattcatagtcaatactttttaagcattctattatctcctataattttttctaatattaattccaaatattacaaaatttaatgtgatattaaagtatgaaaaatttgagaagattagaattttacatgtatttccattcctatttaaagagagaaaatrgggagataatttctgtgctagttttacttatattggatatataatattgaatttatagtataagctttattttatcagttcgcaaatctgaagtctcatactgttttctgtctctttaaaacacattcttctggtggcttgggttcattgtgcattcattggccactcttcttgcagcaaattttaaatcaatttaaaattaggtaaactttttatgatactataatatatatgacgttgaaatgacattggttctgagtctattaatttaaattttggga

SEQ ID NO: 120898 - DNA, 590 bp, Homo sapiens
gatgtaaaagggattgagttcttgatttgattctcagattggtctttgttggtgtataacagagctactgatttgtgtacattgattttgtaacctgagactttactaaatttgttcatcaaatctaggagccttttggatgagtctttagggttttctagctatacaatcatatcataggcaarcagtgatagttcgacttcctcttttccaatttggatgctctttatttctttctcttgcccgattgctctaaacaaactggctaatcttaagcctgcttaccatacctcaccatttcccctccatggaaaccacaatcaagcttcctgtccacatttcccacgtctcccttggcctcctgcctgacctggtgcttacttgtggggccctttatgtgtggcatgcccctttctcttgggctctgcgagtacataacaaacatcttttcaatggcagttgtttcctgatcttttgtccccaccataccaaaaaataatgaaacctattttaaaacacagatggctgggcaaaagggggcaggagtaaatttcttctaagaatatctgtgaatataacaataaagttac

SEQ ID NO: 120899 - DNA, 515 bp, Homo sapiens
tattgtagtacatccatacaacagaatactactcagcaatgaaaaggaacgaactattgatacacacaataatgtatgactcttgaaataattgagtctcagtgcaagtagctagacaaaaagtatacataatgtatgagttcatttctataaaattctaggaaatgcaaatgtatagtgtcagaaaggagatcagtgggagcctgtgaatcagatggaatgtgggaggaattactaaaaggcagaaggaaacattctagggtaatagatacgttcattgctttcattgtggtgatgatctcctgagtgtatatgtatcaaaatgatccaaatatacattttgaataygtgatgcttattgtatgtcaaatctacctctcaataggctttttaaaaaattagcaaacttcaagttgaaaaattaaaaataaaactaaattttggctcatcctaatgaaagcactgaataccaaaaaataaagaggaaatcttgaaagcatccagagaaaaacaac

SEQ ID NO: 120900 - DNA, 400 bp, Homo sapiens
cattgaattaaggcagttttgattcccaatgttgtgcctggggaaggtattctttctttatatagtatgtcctttttagaatcaaatgacttcctagattagaaaaaaaaattctgtcattctttctgtacattaattttgctccttctaatatttgtagctttggccttattttgtccattttgcctagaacacaaatactttctcttattcattgatggttttacgtgttttactagttggtgtagcagtttmtgatgtgctcaaactggaatatgtacttggcttttacatcagatgttgacaacagaagaggacactagaaaagtatttaaaagtggcacgtaactggaaaaatgtcacatgatgtttctttcgaaatttaacatcaaggaataca

SEQ ID NO: 120901 - DNA, 595 bp, Homo sapiens
ctacctgctctccttatcccaaggacactaacttaaaagaaagatcgtaayagattcagattccttttactataagaagcatacaacccgccctccttgttcagaactttatatatatgtatacacacatacatatatatgtcttcataatagcatatgcaactgtcatatggtagttatatatgtaatacagttagacacatataactgtctaacatatgtaactgtcatacatatataattttcctatacacataatgaattaatcagaaacattcactccagacaaactattttccaagatggaaatctctctcctgactggtgaggccatggatatatggtacacaaatatcaactatattcagagacaacaaatcatttttttttcaactccagagaagacagaaaggcataattatgatttaatgcaaaaatagttgcaacacactatccacagccaatcttttttcttcctcatcactgtgacttaaaagtttcatctaatgcattagctagacatggcacaaaatgttccattacaaggtattgtggggggcaggtaggagggactggcaagacttgtggagacaaa

SEQ ID NO: 120902 - DNA, 595 bp, Homo sapiens
ctacctgctctccttatcccaaggacactaacttaaaagaaagatcgtaatagattcagattccttttactataagaagcatacaacccgccctccttgttcagaactttatatatatgtatacacacatacatatatatgtcttcataatagcatatgcaactgtcatatggtagttatatatgtaatacagttagacacatataactgtctaacatatgtaactgtcatacatatataattttcctatacacataatgaattaatcagaaacattcactccagacaaactattttccaagatggaaatctctctcctgactggtgaggccatggatatatggtacacaaatatcaactatattcagagacaacaaatcatttttttttcaactccagagaagacagaaaggcataattatgatttaatgcaaaaatagttgcaacacactatccacagccaatctttttycttcctcatcactgtgacttaaaagtttcatctaatgcattagctagacatggcacaaaatgttccattacaaggtattgtggggggcaggtaggagggactggcaagacttgtggagacaaa

SEQ ID NO: 120903 - DNA, 632 bp, Homo sapiens
ctattacatacatttcaaccccaccttgttaaatttgcctgaagtacattcaggagttggttcagtctcagtgctgctctgcggatccattgttctacactcaggtcttgggctgagtctccaaagagtcccatcaaccatcttccaaggagtggcttgtcttcaaatgaactcttgcacaagagacaaacttctcagcctcttctaaacctcacagccccaggttgaaaagattgctttctatttcagtcccagaatcacctaagtttcactcctcaagtagccaacgcctcttgcacacccacctaagtgcttttgggggaccccattctcaggggatagaatttactaatttttaaaattttaatatgyctgctcttgtacaagctaggattgcaatcaaccacaaaataaaagaaagcccaaccatggcttaaactaacagagggttcacatttcaggaagagaaatagccagtcagtgggagccatggctaaatcttcccactgtggactcaggacttcctctccctccctggaggggtgcctgctggctttcatcttcttgctttttgcctcgtggttgcaaggtggctgctctacttctagctttcatccatgttcaacgcagga

SEQ ID NO: 120904 - DNA, 637 bp, Homo sapiens
tggtggcaaaatctcttagcatttgcttgtctgcaaaggattttatttctccttcaattatgaagcttagtttggctggatatgaaattctgggttaaaaattcttttctttaagagtgttgattattggctcccactctcttctggcttgtagggtttctgcagagtgatccactgttagtctgatgggcttccctttgtaggtaacctgacctttctctctggctacccctaacattttttctgtcatttcaaccttgctgaatctgatgcttatctgtcttggggttgctcttctcgaggagtatctttgtggtgttctctgtatttcctgaatttgaatgttggcctgtcttgctaggttggggaagttctcctggataatagcctgaagagtattttccaatttggtttcattctccycgtcactttcatgtacaccagtcaatcataggtttggtcttttcacatagtcctatatttcttggggactttgttcattccttttcattcttttttctctaatcttgtcttcacaccttatttcattaagttgatcttcaatctctgatatactttcttctgcttgatcaattttgctattgatacttgtgtatgcttcatgaagttctcatgc

SEQ ID NO: 120905 - DNA, 520 bp, Homo sapiens
taatatgtaaaagtcaattgctatttgtatgtagtagcaatggctaatcaaaaattaaaattacaaaaaccaacttcagagcctcaactagatttattaggaataaatttaatggaaaacacatgactttctttttaacaaatagaaaacattgcatggtaaattaaagaaaatttaaatttaggaacagctctatcatattcaaagatcagaaaattcaacatttaaaaaatggcaattttacctraactgctgtatacatttaatgtaattttaataaaaatcctaaagagaactccttttctaacgccgaacaccataacgtagttccttatttttgaccataagtggaatggtatagtatacaatcatttttgttgttcttatgctgcttaaaaaaatgatttttatactcaactatgttaatgcacagagagcttatttattaccttttgtgtataaaaatccattatgtgaataatctgtatcttttttatccattctataattaatggaattc

SEQ ID NO: 120906 - DNA, 621 bp, Homo sapiens
taaacagtgttgttatttctaggaagtgaaatttgagagacacaaaagtaaactgctttataatttttccatgaaaagagcagaaagtcagggtttytctcctttagtactgaatttagattaaaatgatgaataaatgcaaatcccaattaccatgttttgctttttaaagcaaattggaatgtgatgccattactatcttttgttaactgatattatgcttcaggttaaatcacatgaggaactcacataaatttaaattatatgaaatataaatagaagagaaaggcagtgttcagctcatataggagtttatttccttgggcttatttattcatttatatatagcacattggaagatcttttccatgttagttttgggaatccagataaattgtttattttattgttataaactatgcctctatctctagtgatgctcctcattttgaattatatattttttaacgttaacatggctatgccaggtttcttatagtttgcatcagataactttcccatgttttagatttttaatgaaatgttttttgagattattatagatttacatgcagttgcaagaaataacacaaggagtaatcatatactcatcaccctgtt

SEQ ID NO: 120907 - DNA, 568 bp, Homo sapiens
tttccaattccttcttgagttcattgctttataatctaatcatgccataaatggcatacacagttccttgaaattatactacaagggggtgtatgtgctagctcacaacatgaaaaaaaaaagtctcctctaatttgtttccatattgcagacatacatattctctaactaccctgcaggttttcctgcaagcattttaccattacttttacataatcaaacaataactgttcgaatatacgagggattcccttatgctgyacttcaaataagcaccaaaggctttttcttattctgtttttataggactattttctgtcacttctaaaagatctttaaacacgaactatgtgggggcagaggtttttttttttaagtttcgccctaagatacaaagaacaaaacataaccagaaagaaggagacagcagattatgaatgcgcctctcagctggactgccatcctcacaggtcgatatctcacaggtctataggggtgctggcttggcccagttcatcctctgacttggatctgtcctgctggtcctgatggcactgctgcaggctgt

SEQ ID NO: 120908 - DNA, 631 bp, Homo sapiens
ttgaatgtaatatccttaaccatctttagagagctttttgtctgggctacaatctcagtttattgtcagtacttaacaaaaggccatttaagctgcacagtctggtggttcagagaccctgttgcccaccaatgttgtgcctcacctcagtgcataccctcaggtgcttgggtgtctgttgtgatcagatgacagaagaaaatagcctttctaggttcagatatagaatgacttggtatatgggaaaagtaaaacttagtgaagtaatgcttccctctgggggccttgatagtcactgatgactgttaaccctctcaatgcattgagcttcaagtaatacaactgattatctactttgtgtataaataagataatcctgaggtaagaatacagagactaggagctccagatgactttgtttgatggactggacctataaacagaaagattggataataggaaggaaagaggtctgggaaagaggcatggggatgcacctgtggagtgggcatgaggtgtgaaggtctttstattacatggaacaccgtggaagaaggagagaagcactaaccaatcaaatatccataatgacagagttgaagtccaccaggctctgtcattagcctctcca

SEQ ID NO: 120909 - DNA, 567 bp, Homo sapiens
atagtttcttgtatctcactgagtttctttaatattgttattttgaattcattttctggcattttgtatatttgtctataattggggccggttacaggaaaattattgtggtcctttaaatgtgtcaaatttctttcctttgtaatgtttgatttgtctctacattgatttctttggttgagtggaaaggttgcctcttacaattttatgaagagatttcataaggaaaggcttatttgtatgaatgggtcttgtgtcgtcagttttatggggtgtgtcaggctttggttctaggtgggcacagtagtattctttctgtgtagtttcttcagctttaacctaggctagtgacatgtgctagtgtcttagtgrcataggctgcaagagttggttatggttgtggtaaggctttgctgggggtcggcttgccaggctgtttctcagatgtggggtgcatgcatgcacgtggtgatttggccaagttaagccaagttagacttatggagctattattctggccaggaacacatacatgaggttgctctgccaggctggtggcaagcctgc

SEQ ID NO: 120910 - DNA, 530 bp, Homo sapiens
agtgaactcatcatcaacaaaggtgccaaaaacatacattggggaaaaggacagtctctttaatacacaatgctgggaaactggatatccacatgcaaaagaataaaattagacccctatctttggccatatataaaaattaaatcaaaatgaattaaaaatttaaatctaagacctcaaactatgaaastaatgcaagaaaacattgggtaaactctccaggacattggactgggcaatgatttcttcagtaatacacaacaagcacaggcaaacgatgcaaaaatggagaaattggatcatatcaagttcaaaaaacttctgtacaacaaaggaaacaatcaacaaagggaagagacaacccacagaatgggaggaattttgcaagttacccatctgataagggattaataaccagaatatataaggagtgtgcacaactctgtaggaaaaaaaatctaacaatttaatttttaaatgggtgaagtatctgaagagacatttctcaaaagaagacacacaaaaaacaa

SEQ ID NO: 120911 - DNA, 320 bp, Homo sapiens
acacagggcagaccagagcagaggggctgcagcctcaccctggtgctactggtgggatatggagagtaaacaggggaggctgcccaggccgcacagcactgtcaggggcctaggtttgaatccgagctctgccacctcttcagctctcatactcttgggttgcatttgcatttgggaattggacagtgacacacgacagaagggcctaggagacccctttckccaaagttgagtctccttgggacagcctggggggcgggtccaggtgccggggctccagggcagccaggagcatggcagacctcatggccgggaggtgg

SEQ ID NO: 120912 - DNA, 484 bp, Homo sapiens
aagcagctgatttttttcacctctgcttttaaagtttattaaatcagtatcaaaatatacaagagtggaaaaaagtgaattaaagaaattccagcttaagtgccttttctaaatatattttacattgtttatattaataacatatatcatataatgctcatatcaacaacacataatggcaagtgcaaaacaccagagtgtgtatagtaggatatattcattatgaaaacagatagaaacttgcaaatcttttggaaggaaaaaaaatttggatataaaaaattatcttgcataatatgcctttgctctgatcttttaactaaatacrtgtgtgggcataattgtttctatataaagtgaaatgacatgagcataaaaataggaaaaaatgtgggttaaactagtttataacattgaagcaggtatacccatatttggaagctgtcgtgttgtcagaataattttaacattgggctttttaaat

SEQ ID NO: 120913 - DNA, 626 bp, Homo sapiens
acagtctttacctttgcaacatcggacctgttttacctatttgtattatcttttggccgctgtgggtttctgcatttgagacccaaaaggaacacatttggaaaagtgcgatgcctgtcaataagggcttctgctctaattgaaatattgcttttttctaaaaagccttgtttttcatttatctttaacagttccccctctttctctgttcctctttcccagcagcctagaaacttacctytatttactcatcttaaatgagaactctgtttccatgaaaatagtgctccttatttctctcccacccactcctatgacttctctcccaaccttctagcaacttcatagttttcactgagataatgtacatatttttatttcattgtagaaacatttttacacacttttaggcgttaaaggatataatgaagaggtagaaagaactttcttctctcaaattttattagaaaatattcactaacaataaaaaaatccaatatattttccacatatattcaataattgctattgtgttgccataatttctttatatatacttctttacatataaatatatatgtatgtgtatatatatatataaagctgaagcttttgaaagtaagctg

SEQ ID NO: 120914 - DNA, 642 bp, Homo sapiens
ttctgttttaggaaatatttaatcattattttcttcattaggaatgggtttatagtacagaaagaattaaacaaccataaaagcggactcatttgtaggacraaataacacagtatggggaaaatgatcctttgcacttctgagtagagaacagccagaagaaaccattcttcataaagatgttcactatcatgttacttataataacaaaatgaggaattgaaaagatgctagacaaaaacagtttcaactaaaatatgacttctttacttaatgagattacacaggcattaacagtgatgtcccatagtatatggaaatacataaaaatttaaggatatcaagttaagtgttaaaatataatgccacatggtatattcaggttaactttaaaaaggtgaaaaaaaaacctaaaaatcaggaaggtaattttaatagtgtttctatttatatattaattgtaattcttcttatataactgtatcacaggtttttaaatgtttaaattctttttctttattattttaaaattttgtatgattacatagttatggtatgataaaatgttaaaattcacttttcaaattacagcataacacttataatagtaatattagatgatatcatcttagcactcaccat

SEQ ID NO: 120915 - DNA, 642 bp, Homo sapiens
ttctgttttaggaaatatttaatcattattttcttcattaggaatgggtttatagtacagaaagaattaaacaaccataaaagcggactcatttgtaggacaaaataacacagtatggggaaaatgatcctttgcacttctgagtagagaacagccagaagaaaccattcttcataaagatgttcactatcatgttacttataataacaaaatgaggaattgaaaagatgctagacaaaaacagtttcaactaaaatatgacttctttacttaatgagattacacaggcattaacagtgatgtcccatagtatatggaaatacataaaaatttaaggatatcaagttaagtgttaaaatataatgccacatggtatattcaggttaactttaaaaaggtgaaaaaaaamcctaaaaatcaggaaggtaattttaatagtgtttctatttatatattaattgtaattcttcttatataactgtatcacaggtttttaaatgtttaaattctttttctttattattttaaaattttgtatgattacatagttatggtatgataaaatgttaaaattcacttttcaaattacagcataacacttataatagtaatattagatgatatcatcttagcactcaccat

SEQ ID NO: 120916 - DNA, 571 bp, Homo sapiens
agatgctagacaaaaacagtttcaactaaaatatgacttctttacttaatgagattacacaggcattaacagtgatgtcccatagtatatggaaatacataaaaatttaaggatatcaagttaagtgttaaaatataatgccacatggtatattcaggttaactttaaaaaggtgaaaaaaaaacctaaaaatcaggaaggtaattttaatagtgtttctatttatatattaattgtaattcttcttatataactgtatcacaggtttttaaatgtttaaattctttttctttattattttaaaattttgtatgattacayagttatggtatgataaaatgttaaaattcacttttcaaattacagcataacacttataatagtaatattagatgatatcatcttagcactcaccatcagctatgcatagttataagcaattttcatgaattaactcatttgattttatttacaaatggaatacagagggacaaaatgttaatagctcgcttcatatcacaaaactagtgaaaaacccaggattaaaatacaaatggtatactgccagagt

SEQ ID NO: 120917 - DNA, 443 bp, Homo sapiens
aatccacacctagccctaccattcacaagttattcatttttctttggtcttgatcctgaccctagccttacaggaaaagaggcagtttcttttacaggaaaaaggatatcacttttcaatagactgtacttttaaaaatctaaatatcatatgtctcaaatcagataagacaatatacccttaacattttattcttacactaaataccattgaatagctgaatgtgattttgtttgtcattatggcaaagcacaacataaacagcaaatgtcttaaatccccamgttcaaaattattaataaataagtcaattaatcaatctcaaagctctatttaggaaacaaggctaaccagggatctctggtggagttaaggcagagtcagaaagaaaaaaaaaggctgccctcttactaaactctctaaagtcctgagacttttatcca

SEQ ID NO: 120918 - DNA, 443 bp, Homo sapiens
aatccacacctagccctaccattcacaagttattcatttttctttggtcttgatcctgaccctagccttacaggaaaagaggcagtttcttttacaggaaaaaggatatcacttttcaatagactgtacttttaaaaatctaaatatcatatgtctcaaatcagataagacaatatacccttaacattttattcttacactaaataccattgaatagctgaatgtgattttgtttgtcattatggcaaagcacaacataaacagcaaatgtcttaaatccccaagttcaaaattattaataaataartcaattaatcaatctcaaagctctatttaggaaacaaggctaaccagggatctctggtggagttaaggcagagtcagaaagaaaaaaaaaggctgccctcttactaaactctctaaagtcctgagacttttatcca

SEQ ID NO: 120919 - DNA, 443 bp, Homo sapiens
aatccacacctagccctaccattcacaagttattcatttttctttggtcttgatcctgaccctagccttacaggaaaagaggcagtttcttttacaggaaaaaggatatcacttttcaatagactgtacttttaaaaatctaaatatcatatgtctcaaatcagataagacaatatacccttaacattttattcttacactaaataccattgaatagctgaatgtgattttgtttgtcattatggcaaagcacaacataaacagcaaatgtcttaaatccccaagttcaaaattattaataaataagtcaaytaatcaatctcaaagctctatttaggaaacaaggctaaccagggatctctggtggagttaaggcagagtcagaaagaaaaaaaaaggctgccctcttactaaactctctaaagtcctgagacttttatcca

SEQ ID NO: 120920 - DNA, 563 bp, Homo sapiens
atagcagcacaaatgaactaaagtaatctgtttctgattttttttctataggagttaagtttttaataaataacatattttacttaaatatcctcccatttactgttatgtaagtgtacatagtaaaattactggctcaaattyacctccagccccaggcagttaactgatgatagcttaccaataagtaaaaataagaaaacccatagcagatgaattggttcaaaacatttattcaatggctaccagatgccaggaacaatctcatcactgccaatccactctgaacaaaacggataataactcttgccctcacagccttatattttagtgatggaaaacatatattaaactaataaacaggtgaaatatacatatattagcagggaatgtaaacaaggagtgtgcattgttggtgagggtttcgtggttgttcttttaaatgaggtggagaagaactggctgagtatagatgtgaagatgaggaggtagctcattgtcatcttgtacaagagcttttaaggcagagagagcagcaagcataaaagcataatgattggaaa

SEQ ID NO: 120921 - DNA, 563 bp, Homo sapiens
atagcagcacaaatgaactaaagtaatctgtttctgattttttttctataggagttaagtttttaataaataacatattttacttaaatatcctcccatttactgttatgtaagtgtacatagtaaaattactggctcaaattcacctccagccccaggcagttaactgatgatarcttaccaataagtaaaaataagaaaacccatagcagatgaattggttcaaaacatttattcaatggctaccagatgccaggaacaatctcatcactgccaatccactctgaacaaaacggataataactcttgccctcacagccttatattttagtgatggaaaacatatattaaactaataaacaggtgaaatatacatatattagcagggaatgtaaacaaggagtgtgcattgttggtgagggtttcgtggttgttcttttaaatgaggtggagaagaactggctgagtatagatgtgaagatgaggaggtagctcattgtcatcttgtacaagagcttttaaggcagagagagcagcaagcataaaagcataatgattggaaa

SEQ ID NO: 120922 - DNA, 563 bp, Homo sapiens
atagcagcacaaatgaactaaagtaatctgtttctgattttttttctataggagttaagtttttaataaataacatattttacttaaatatcctcccatttactgttatgtaagtgtacatagtaaaattactggctcaaattcacctccagccccaggcagttaactgatgatagcttaccaataagtaaaaataagaaaacccatagcagatgaattggttcaaaacatttattcaatggctaccagatgccaggaacaatctcatcactgccaatccactctgaacaaaacggataataactcttgccctcacagccttatattttagygatggaaaacatatattaaactaataaacaggtgaaatatacatatattagcagggaatgtaaacaaggagtgtgcattgttggtgagggtttcgtggttgttcttttaaatgaggtggagaagaactggctgagtatagatgtgaagatgaggaggtagctcattgtcatcttgtacaagagcttttaaggcagagagagcagcaagcataaaagcataatgattggaaa

SEQ ID NO: 120923 - DNA, 605 bp, Homo sapiens
tccagtgatatcattgactatgcagaamtcagtaaacacaactatgctgaagaaacatgagcatctgctttaaaattaatagttaattctctgccccaaagcaatcatttagtatgcagaaagtccctttgcatatcactctttgaagcatgacttttcgtttagatcaaatgacttttcaaaattagtgttaattttcaattccaagtttctttatgtgtattattaatgaagttatagctgttaatatcttgactccattagcagaataacttttccaaaagatcaagtaatgccatttttatatcagagtgatcagaatgttttaaatgaaacatctgtttgttgcaaagatgatttgaattcattcaattcatgcactctaaataaagttttttggaagttcatttggatgaaggtgagacattagatattagtgataatgctatcataaaatcagtataaacgtttagcactactgatacaataatttccttctgtgggaataatttgaatgtagattctggtgaagcatgccatcatggcaaaaacgtgatttctaatacagtaatgaattgattgataaaaaagattgtgctttaaat

SEQ ID NO: 120924 - DNA, 605 bp, Homo sapiens
tccagtgatatcattgactatgcagaaatcagtaaacacaactatgctgaagaaacatgagcatctgctttaaaattaatagttaattctctgccccaaagcaatcatttartatgcagaaagtccctttgcatatcactctttgaagcatgacttttcgtttagatcaaatgacttttcaaaattagtgttaattttcaattccaagtttctttatgtgtattattaatgaagttatagctgttaatatcttgactccattagcagaataacttttccaaaagatcaagtaatgccatttttatatcagagtgatcagaatgttttaaatgaaacatctgtttgttgcaaagatgatttgaattcattcaattcatgcactctaaataaagttttttggaagttcatttggatgaaggtgagacattagatattagtgataatgctatcataaaatcagtataaacgtttagcactactgatacaataatttccttctgtgggaataatttgaatgtagattctggtgaagcatgccatcatggcaaaaacgtgatttctaatacagtaatgaattgattgataaaaaagattgtgctttaaat

SEQ ID NO: 120925 - DNA, 586 bp, Homo sapiens
tataggaaggatcttagcaatgtggttgtattgcctttctcatttgagtttttgatattttaaaaagagggtattttaactacaagaatttttatgaacaatgttagttaagccagctcagtagtaatgcatagagaggcaaatatatcaatggaagataattaagagccctcccccatgccctgtatatgtattggtattaaccagaaaaattgggcatctatatggaaaaataaaacagtaaaaaacaaaaaagacttttgtctccattccaactcctttttcatcacactttacctagtgactagtagcattggaatgagcatgagcattttagkatctgactaaaagaggatgaggtccaattacatgattgaaccctgagacttataatatgtggttcatggatatttttgtgtatggttgttattgctagttctcctggtgtaaaaatgacttccaggcatatccccattgctcagtgtgactttacactggttttctgacataaatttaaagagccagaagacatgtcttgataaaaatggtccagagcctgcctggtaacagaatatgtgtatagtag

SEQ ID NO: 120926 - DNA, 586 bp, Homo sapiens
agccactttacctcatcataaaaattatataaaacttagaatgaatgtaaaactaaaatataattctagagaaattgatcagatttgtagcctcctatatgagattactctaaaatcaaagggattctataggcctattttatcgatttctgtgacctcacaaatttatgtactacccaaaataatttcaaaagtatggacttaagccattgcagagaaacagaagagaaatttatgaatagaatagtgataaaggtatatataaacacataaaaataaacaacttatattccaacatcatagttcaatgttagtataaatttaattataagcttcttaagtaccaaaaataaaagcatgatggcaaygacacatgaagtctaagagataacatcatgataaacagaactgagaagaacttttgtcaggtaatgaaggacatttccaacatatctttttttgttaaaatagggagttttatatgattaatttttaaaactccctttcaatgcaggctgatgacataattgctgaagcccaatttaatttaagagaaactgagaagggctaaaacaacatagactac

SEQ ID NO: 120927 - DNA, 621 bp, Homo sapiens
gctaaggaaatgttcatcaaaatttaattgagctctgttgcaaatttcaaaaataaaaaattttctttactaatataaaagtgaagcactcaactctatccttctcatgattaatcataaaataaaatgcagatgattcggcaagctctcccccaattaaatgtgtaagcataattctgattctgccttggtcactggagtgatggagtrtgaaaattgattcatgcttctaaaattaaagatctatggattaataaaagtaacaaaaatatgttaccacaatgaataaggtcacataattgcttgcctttcacacaaatttccccctttgagtcattgtaggcctttagtcaccttttacatgcatccacaaatgcactatgattttaaagatgttgaaaagtctagcttttattatctatctcaccaacaaaggccaaatagcaattagactagagatctgtgtgtcactgtttaaagattattgcctatcaaaattgctgaaacactctaaagaaacaaacatgttctgaattggccatttgaaatgaccgtttcgtatttgtgtgtgtgctttaacttgtgttttattctgttctggctgctataacaaaatccctt

SEQ ID NO: 120928 - DNA, 523 bp, Homo sapiens
tttggtcctcaaattttccacctttactttattattagatttattcacccaacacacaggagtttctgtattttcattttcatcttaatggttgcatactaaataatagtgttgtcttaacatttttgtactttcatgttcaaaaatatttatttacagtttgtaatattctagcaaaaggaaataagagatttaataccctgcagaggcccaaatccatcataacattatttcactcataaaaacacctagtcatagctagaaaatatgcaatggtgttggacacttgctttgatcccctggaatgaaagctctgtggaaatgggattttcctgctttgttccatgctttatcctcagtacctggggtctggttttacatgactaatcttaagggtcctgaatatttattgtgtttatgattataaagggctagttgtatatctatcaaaaacacagatgagcaataagaaaaatcatacrtaaagatttggcaaatatatgtgcatgtttacacatgcaag

SEQ ID NO: 120929 - DNA, 626 bp, Homo sapiens
ccaaatgggtaattaaaaattcttttttatagagatgaagtttccctattttgcccaggttggctcaaactcctggactcaaatgatctttttgccttggcctcccaaaacactaggattacaggtgtgaaccactgaactcagccttcagaaaattttattggataacactggtgtagacagatctcatttttactgcttttaaaaagagtccaaagtttggaatgagatgatttgtcttcacctttttgctccgttgactgactggtatatgwtcacgaacagtttacttactgactttccactttctcatctttaaaacagaattgtagggtcaaataagaccactgtacaaaagtattgtttgcacacaaccagagctgttattaatgttgttccttcacagaggttactctgctcttaaaacgttatccccaaagacctatactttaagtccttctccctgtaattgcttgtttggggtttttgccaatgtccaaacagatgaaaaccagagtatgttctcagagaggtttgtctgatcccagtttcatatcagggactgtatctcacagtctgtcttctctttataaggaatcaccatctctattacatttcttattcac

SEQ ID NO: 120930 - DNA, 573 bp, Homo sapiens
attgaaaactctgagttagaaaattaaaaaaaaaaaactattagccaggcatggtggcacaatmctgtggtcccagatactggggaggatgaggtggaaggattgcttgagtctgggagattgaggctgcagtgagctataattgggccacagtactccaatctgagcaacagagagagaccttctcttaggaaaaaaaaaaaaaaaaaagaggtttgtgttttcccacattgcaagccctatctaatgccagaaaatgtgagataaattaattttgctccaaagaacacagtgaagaagtttgagaaagaagcttacattgtcagtaacacttcagcaataaataatgtgatgtcatcctgtagaaataatttaagaattgaggaaatttttactccattcttatatctgtaataggcttttatttttcaaaggaagattttttttttttagaattattgccttataaaagttgttatttgtctctgttatctgacacagaaatgttatagcaaagtgtttgagacacacaaaacctgaagtttttattcagaaagatgcaatgaattttac

SEQ ID NO: 120931 - DNA, 530 bp, Homo sapiens
tacctagatactttgcttttttcattgtgttattgttttataggccctgtgaaatttatgctttaggaaggttctattctgatgcatatcaaacttctgtttcaagatttagaagccttttccatctcttatagtgctggtttggcagtcacaaattccctcagcatttgtttgtctgaaaaagaatttatctctccttcatttatgaagcttaattttgctggatgcaaaattcttggctgactattattttgtttaaggaggctraagataggaccctaatctcttctggcttgtaaggtttctgctaataaatctgctgttagtccaacaggctttccattataagttacccgatgctttggtctcagttcttaaaactattatcttcattctgactttagatagcctgatgactacgtgacttggtgataatcttcttgcaatgaatttcccaggagttcttggagcttctcgtatttggatatctaaatctctagcagggccagaaaagtttttctcaattattc

SEQ ID NO: 120932 - DNA, 521 bp, Homo sapiens
aaatgacagcatcacttcaggaagcaagattagagggctcctatctaagatgcagcattggagtttggtttaagagagtaggacatgatacatccattactcaaaggacccttctctttttaaaataaattacttgcaaagattaggccaaagagatgggcaaggtagatttgggaagctgttgcttgctaatatcaccraatgcttgatggtcacttatgcttcaggcagtttagcccagaacagtcagcagaagattgtttccagaccccaactgctagttataggatcattcctcatacagcagagaggggtgaccaggtagtggctttatagtcgctgcagacaaagcccatttttggacagttcagtgagggcttatagacaaaagtttcacaaattatggagtgagctggatggagtgtgaagtgtatttacgggtcatgcaataaataataggtttactttttgaaattcaaaaacatgttttaaacttatctaggacttccacctgttttaaa

SEQ ID NO: 120933 - DNA, 596 bp, Homo sapiens
tatttaaggaaaattgacaaaatgaccactttaataataattcattatactcttcaattttcccaacactttcttttcattagatcaaaaaatataatattgtagagtccaatcactttgaactaattttgataatcacattgtttcttcttacaaaactctataagcatgtaagtttctaatcagcaaagaatacatgcactgttcaaaagttattttttcctacaaaggrgattgtctgtttcatctaaaatagacttactattgtgtgtgcaatatatagtttaaggattttgaaggagatataataaatcgtagcatgtttcattacttactttgtcacctacagaattctctacatttttttctttatgagaactaatccccaacccccttcacagctctttttacaacggatgtagagttctgcattaccacaacaaaagaaaacaatgtagaaaaaaaaaggaagaacagaaaagaaaatgtttacagagggaaaaagtttcctttccttctttgtggttttctgtgtaaaatcttagtttggcaatcttgatatcatccattaatttattgatgaataaaatgtgtca

SEQ ID NO: 120934 - DNA, 569 bp, Homo sapiens
gatatgtttaataaacctaacctacccaacttcatagcttagcctagcccaccttaaccgtgcttagaacactaacattagcctacagttgggcaaaataatcttacacaaagcctatattatagtaaactgttgaatatttcatgtaatttattgagtactgtactgaaaatgaaaaatataatggtagcatgagtacttgaaatatggttcctactcaatacgtatcactttcccaccatcatacagttgaaaatcttaagtgaaagcattgtaagttggtgactgtctgtatttgtttatttattttactactttccctttttcttgtaatagttgaaaggcatgataaggtaaaatattattgcctaaaaatactctgcctctctggaaaataaaaaagacagaagtttccaagaaatctttcaagagatataaaaatcgtatgaaaatgagataattaaagaataaatctgtaattatgcatgttgtaaaatacaaatgggaggctggaagagagactgtagatgagcygtgaaaatgaaagcagaaataaagtaggaatggaa

SEQ ID NO: 120935 - DNA, 562 bp, Homo sapiens
ctaatagaggaaggaatctggttagaatgctgtggatgggagatggataaattccaaatattttcagacctgtttttacttcttctgaggattcaaatctcaagaagaaagaatcaaactgattctttggcataagagagaaaaggacctgaataggagagagcaggacccctggttacagtttcatccagctaaaaaaaaaaaaaaaaaaagagttaaatcctggaaaaaaaagtctggctgctgtcaggaaggaaaatgtatgtaaagaagaaaagaactgtcttctttgcttggtaaacctacacatgcccctcagagaatggtgcygaagtacctcccaaagaacttccatttacccgtgagctttatcatatgagtttacacctgcttcttcccaagcctcactaaaatgataactaagaaactgcaaaagacataaccctcaataatcaaaaagagactggagatgacagcaacaaaatgctgttttgcaaaacagatggatgggtaaccaacttagcagaccaaggaaaacagaaacctaaactgtaagtgcagt

SEQ ID NO: 120936 - DNA, 562 bp, Homo sapiens
ctaatagaggaaggaatctggttagaatgctgtggatgggagatggataaattccaaatattttcagacctgtttttacttcttctgaggattcaaatctcaagaagaaagaatcaaactgattctttggcataagagagaaaaggacctgaataggagagagcaggacccctggttacagtttcatccagctaaaaaaaaaaaaaaaaaaagagttaaatcctggaaaaaaaagtctggctgctgtcaggaaggaaaatgtatgtaaagaagaaaagaactgtcttctttgcttggtaaacctacacatgcccctcagagaatggtgctgaagtacctcccaaagaacttccatttacccgtgagctttatcatatgagtttacacctgcttcttcccaagcctcactaaaatgataactaagaaactgcaaaagacataaccctcartaatcaaaaagagactggagatgacagcaacaaaatgctgttttgcaaaacagatggatgggtaaccaacttagcagaccaaggaaaacagaaacctaaactgtaagtgcagt

SEQ ID NO: 120937 - DNA, 629 bp, Homo sapiens
ggcgaggcaggagtcaaatgttattctgaggtgttgagtcaaggaaacacttgagaccattgatggaaatggacccatacacatagacagtgctagtgagctataaaggatgctgagcttcatgtggctgtggaggtgattatgtacaagagctgctaatgtaggtacaaaagttgaggtgagagtcaaggcggggcatatcagcttgggaatttgtatagctgcgctttgggtggtggagggctggtatgaagagtgtgcaaaccttatgggcagattggagttacaaaagaatacagtgtgtgtagtcagaagacttgatttctagttttatctctgtcagtaattctttgtagttgtggtcaaattatttatcttgcctgaacctccttmtatatttaggaacaataaaaatgcctgcctcaaaggattgttgtcaaggttgaatttcgtaatgtctgtggagttgctttgtaaattgtaaagggctgtaccagttttagttctactatgagggataaatcaatagaggtgcaaacctaaaatataaatgtcagatccagagtttagtcccagagtaaggaggcagtgagtaaaaaatcactctagttcatgccaacagacatgcc

SEQ ID NO: 120938 - DNA, 663 bp, Homo sapiens
gcattatttacatcaatgtaaaaatactctctagtatctcatcaccttaaaaaataagctcttctctgggtcctttatccctctagttatcccttgatttctctgcttccttatcaagaacaatgatcaaaagcattttgaacatgagatttctcaagttcctcacttccctgatctcctcaacccaccctargtcgctttccaactcatctgccacgttaccttgtcaaggttaccagtagtcccatgtggatagatttcaaggttactttttcatctttatttatatgatttttctatcagcattcaataacatatgaatgttgacatctcgatctcactccttcccactccctccccccaaaaaaacttctctcccacagctatgtgatgctataataagcttgagctttcctcttatctcatggagctagtcttccaaatctctctctctctcttttttttttttttttttttttttttgcctcaaactgttggtttgcagcattctcaatgttctttttctgagatttcaatttggcctaaagctttgaataccatctattttctgatgacttctaaatttatatttgcagacctgacctctgctctgaagtctagattcatctattaaactgcctatctaatatcttctcttcattc

SEQ ID NO: 120939 - DNA, 663 bp, Homo sapiens
gcattatttacatcaatgtaaaaatactctctagtatctcatcaccttaaaaaataagctcttctctgggtcctttatccctctagttatcccttgatttctctgcttccttatcaagaacaatgatcaaaagcattttgaacatgagatttctcaagttcctcacttccctgatctcctcaacccaccctaagtcgctttccaactcatctgccacgttaccttgtcaaggttaccagtagtcccatgtggatagatttcaaggttactttttcatctttatttatatgatttttctatcagcattcaataacatatgaatgttgacatctcgatctcactccttcccactccctccccccaaaaaaacttmtctcccacagctatgtgatgctataataagcttgagctttcctcttatctcatggagctagtcttccaaatctctctctctctcttttttttttttttttttttttttttgcctcaaactgttggtttgcagcattctcaatgttctttttctgagatttcaatttggcctaaagctttgaataccatctattttctgatgacttctaaatttatatttgcagacctgacctctgctctgaagtctagattcatctattaaactgcctatctaatatcttctcttcattc

SEQ ID NO: 120940 - DNA, 663 bp, Homo sapiens
gcattatttacatcaatgtaaaaatactctctagtatctcatcaccttaaaaaataagctcttctctgggtcctttatccctctagttatcccttgatttctctgcttccttatcaagaacaatgatcaaaagcattttgaacatgagatttctcaagttcctcacttccctgatctcctcaacccaccctaagtcgctttccaactcatctgccacgttaccttgtcaaggttaccagtagtcccatgtggatagatttcaaggttactttttcatctttatttatatgatttttctatcagcattcaataacatatgaatgttgacatctcgatctcactccttcccactccctccccccaaaaaaacttctctcccacagctatgtgatgctataataagcttgagctttcctcttatctcatggagctagtcttccaaatctctctctctctctyttttttttttttttttttttttttgcctcaaactgttggtttgcagcattctcaatgttctttttctgagatttcaatttggcctaaagctttgaataccatctattttctgatgacttctaaatttatatttgcagacctgacctctgctctgaagtctagattcatctattaaactgcctatctaatatcttctcttcattc

SEQ ID NO: 120941 - DNA, 663 bp, Homo sapiens
gcattatttacatcaatgtaaaaatactctctagtatctcatcaccttaaaaaataagctcttctctgggtcctttatccctctagttatcccttgatttctctgcttccttatcaagaacaatgatcaaaagcattttgaacatgagatttctcaagttcctcacttccctgatctcctcaacccaccctaagtcgctttccaactcatctgccacgttaccttgtcaaggttaccagtagtcccatgtggatagatttcaaggttactttttcatctttatttatatgatttttctatcagcattcaataacatatgaatgttgacatctcgatctcactccttcccactccctccccccaaaaaaacttctctcccacagctatgtgatgctataataagcttgagctttcctcttatctcatggagctagtcttccaaatctctctctctctcttttttttttttttttttttttttttgcctcaaamtgttggtttgcagcattctcaatgttctttttctgagatttcaatttggcctaaagctttgaataccatctattttctgatgacttctaaatttatatttgcagacctgacctctgctctgaagtctagattcatctattaaactgcctatctaatatcttctcttcattc

SEQ ID NO: 120942 - DNA, 587 bp, Homo sapiens
gagttaacattatttgaggagcacctgtttagacaattkccatttgcatcaggtccctcaggtcaagggctcagtcccacaagattgctcccacttaggacaccatttcaaagtccacgtggccacctgtgcttctgaccataaatcagaggttccctccttgggttcattcatttactagagcagttcacataactcaggaaagcactttactaattattacccatttgttagaaaagaatacaactcagggaaaggcagagaggcgtaaggtaatgggagtggtacatgcagcttccacgccctctctgagagctccatcctcccagcatctccatgtgttcaccaacctgaaaactgtctgaacctcatacattagggatttttatgcagatttcatcatgtgcgcgtgattgattatgaacctagtcttcagctcctctttcctctctggaggttggggagatggcactgaaatttccaaggttctaatcatggtttggtgtttctggtgatcatctcccactggaagcccaccaagaagtgcttcattagaacaaaagacattcctatcacccagggaattc

SEQ ID NO: 120943 - DNA, 587 bp, Homo sapiens
gagttaacattatttgaggagcacctgtttagacaattgccatttgcatcaggtccctcaggtcaagggctcagtcccacaagattgctcccacttaggacaccatttcaaagtccacgtggccacctgtgcttctgaccataaatcagaggttccctccttgggttcattcatttactagagcagttcacataactcaggaaagcactttactaattattacccatttgttagaaaagaatacaactcagggaaaggcagagaggcgtaaggtaatgggagtggtacatgcagcttccacgccctctctgagagctccatcctcccagcatctccatgtgttcaccaacctgaaaactgtctgaacctcatacattagggatttttatgcagatttcatcatgtgcgcgtgattgattatgaacctagtcttcagctcctctttcctcyctggaggttggggagatggcactgaaatttccaaggttctaatcatggtttggtgtttctggtgatcatctcccactggaagcccaccaagaagtgcttcattagaacaaaagacattcctatcacccagggaattc

SEQ ID NO: 120944 - DNA, 557 bp, Homo sapiens
ctaaggcttctgcttcttgactgatggtattccacaacctgctcatagcccaagaagaataaaatttaaggcttacgggattaaggtgtcagagcttgaactgacaaagcagcaggaagtgtagagggtaaaacttgaaaaagagaaatgcaggacgtgagcccccaaatctaaacactcaccaattccttgattgagagaaaagcagatgaacacaagagagaacctatctgctttcaggaggttagggtaaaaggcagcagctagaagcttgaagaactaagaggatatatcagctgctttacactgagcaggaagacaaagtttgatgtttgattacaagcaagctaattgcctactaaaaataataataattctcagaagaacataacagatataacagaattcagattacaatactatttatgatgtccagttttctagcaaaaattactaaacatgcaaacaaaacaaaacaaaaargagtggggggaataaaacctgtagtcacaaaaagacaatcacagaaactaactcctagtgggccctgatgtcag

SEQ ID NO: 120945 - DNA, 657 bp, Homo sapiens
atgagtcttataagtatcttttgtacattctataattctcaaaattctctaagtatatactatttttagcatcattttatagatgattaaactgagaatttggcacatgaaaataacacagcaaagaacacacacaaaattgagcctacttctgcttgacactcatgctattattctttcatggttataatcatrgaaaaaataacttactctttgtcaaagttatatgtaaatactttgttaagtaacaatgacttaatgaaataaactcacatgagaaccaaatcaagagatccctattctttctatttttggagtgacaatgactctcatatcgtttacttccattagttagtctttaatttttattcttcctctgcatttctccacatacatcccaccacacactaaacctatttattttctctcatctcatccctctattaccatttagtcattgatttcttgtaatatgtatatcatgatacatatatatattacataatatcatgctaacaacagttgataagagggatatgcatatttgttaaatcccagtttgattttgaaatatgcaggtgatctaaattatttatttcactctaagaggaaaattggtctttttaaaaatagtagtagctattttaaccttgtagc

SEQ ID NO: 120946 - DNA, 597 bp, Homo sapiens
attgtaatagcttggaaaattgaactattaacctcgctgtgcttcaagttgctcacgaatttaacagagtttttgttaggttgattgagttaataaaagattgttggattaaagatggctgcacatcttttacctttccttaaattaataggccaatccagtttctttcctccagaatctgcactcttgtgaaattgccttcacctgcagaatgtggcaaatgtgacactgtgttacttctgaacttggtctttaaaagattttctgctttcacttttatatgcttgagttgtttctccttagaacttattctccctgctgtcagaagcccaagccaagatagaggtcccacagaggaatatcaaaatgtcctggttcagagctccatgcaagctcccagacaacaatgccaaagatcagccatgtgagaaaatcatcttggatattgtaggcaaattgaacatccacatgacttcagtcacagctggtacaacaygaagcagcagaaccacctagctgggcctagtcagctcacagaaccatgaaaaataataggtttttttgttcttgttgtttttggtaggtaaggtttgttac

SEQ ID NO: 120947 - DNA, 576 bp, Homo sapiens
  misc_feature (1)...(576): n = A,T,C or G
nnnnnnnnnnnnnnnnaaagatttttaagatacaacaccaaaagcagaatccataaaagaaaaaaagtgataaattagacatcatcaaactgaacatttcttcttgggaggacagtgttaagagactgaaaagacagaaaagccatagacggggaaaacaagtttgcaaattatatatctgataaaggacttgtaaccattcgacatataaagatcctcaaaactcagaaataagaaagcaatgctttttaaacaatggtccaaatatctgaaaattcaaatagatttatgaatacctaataagcatataaaatgtgttcaatattattagtcattggggaaaagcaaataactataatgtgatattactctgcattaatgtactggctacaattgtaaacaattcaaaatgctgacagggatgctgagtaactggactatcacacattgtttttggcaacgcaagatartacagatactttgtaaaatagtttggcaatacaatacaaaattgaacatatacttaatatagtgaccactctgaggtgtttatccaggtgaaataaaaggttttgt

SEQ ID NO: 120948 - DNA, 529 bp, Homo sapiens
agatgaaaaatgtactagataggatactagataggattaactgcagattggacactccacaaaaaatgattaatcaacttgaagacatagcaatagaagctatcccaaatgaaatgtacagagaaaaaaaaactgaaaaaaaaaaaaagaaacagagaagccagaaaattgtaaaaaacaaactgaaaatgctggaacaggtaaaaagtgaggaagatattgaaaactaataaacaactagagcccagtaagatgcaatatgtcattggttaacacaggacaaattgctctggtggtgactacacaccakggctccagtattatctaaatgtaacacatttctgttgaccagaaataagcaaggtcttaaaacagttgcccctggctaagccaaaatggtaggcacgaaagatgaacttcagggagatcactgaatgtaagtggagtagtcactatttaagatcatcaagggccactttgtgatttctatgtattatttatttaattatacatttaaccgtatttttac

SEQ ID NO: 120949 - DNA, 606 bp, Homo sapiens
agaacagggtattctaggtgcaggtcagcagaagtgtcctgaaatggagcataatgttcytgcttcatgacattatgtccatattgtagctcagaagtgtattagtttccttttggctcaagtcttcagacaaactaatatgtacataatttggcctcccataaaatcgcaacttttagaactttgccagtatatgttaacatattaaaatttacatactctcaagtaatcacatgaattatctattgttccaggcatttgaaatcgtataggttagcaaggaaaatattttgtatattaagtatatgacatatataattacatactaaattaagagtgttatttttgctgttgcaaaaatactatatatgatgagtgtattaaacagggtaaatgcacataaattttttctttttcttccacatatagaactccctttgaagattggcagtctggcaagggagatcattttccaaactcttgaaaacgtgtgaggactcatgacctgttacatcaatggaacatgaagagaattgaagtgtatcacttctgcgccagggagcctaatggaagaggtgcccatccaccctctttcctcatccgaca

SEQ ID NO: 120950 - DNA, 606 bp, Homo sapiens
agaacagggtattctaggtgcaggtcagcagaagtgtcctgaaatggagcataatgttcctgcttcatgacattatgtccatattgtagctcagaagtgtattagtttccttttggctcaagtcttcagacaaactaatatgtacataatttggcctcccataaaatcgcaacttttagaactttgccagtatatgttaacatattaaaatttacatactctcaagtaatcacatgaattatctattgttccaggcatttgaaatcrtataggttagcaaggaaaatattttgtatattaagtatatgacatatataattacatactaaattaagagtgttatttttgctgttgcaaaaatactatatatgatgagtgtattaaacagggtaaatgcacataaattttttctttttcttccacatatagaactccctttgaagattggcagtctggcaagggagatcattttccaaactcttgaaaacgtgtgaggactcatgacctgttacatcaatggaacatgaagagaattgaagtgtatcacttctgcgccagggagcctaatggaagaggtgcccatccaccctctttcctcatccgaca

SEQ ID NO: 120951 - DNA, 606 bp, Homo sapiens
agaacagggtattctaggtgcaggtcagcagaagtgtcctgaaatggagcataatgttcctgcttcatgacattatgtccatattgtagctcagaagtgtattagtttccttttggctcaagtcttcagacaaactaatatgtacataatttggcctcccataaaatcgcaacttttagaactttgccagtatatgttaacatattaaaatttacatactctcaagtaatcacatgaattatctattgttccaggcatttgaaatcgtataggttagcaaggaaaatattttgtatattaagtatatgacatatataattacatactaaattaagagtgttatttttgctgttgcaaaaatactatatatgatgagtgtattaaacagsgtaaatgcacataaattttttctttttcttccacatatagaactccctttgaagattggcagtctggcaagggagatcattttccaaactcttgaaaacgtgtgaggactcatgacctgttacatcaatggaacatgaagagaattgaagtgtatcacttctgcgccagggagcctaatggaagaggtgcccatccaccctctttcctcatccgaca

SEQ ID NO: 120952 - DNA, 606 bp, Homo sapiens
agaacagggtattctaggtgcaggtcagcagaagtgtcctgaaatggagcataatgttcctgcttcatgacattatgtccatattgtagctcagaagtgtattagtttccttttggctcaagtcttcagacaaactaatatgtacataatttggcctcccataaaatcgcaacttttagaactttgccagtatatgttaacatattaaaatttacatactctcaagtaatcacatgaattatctattgttccaggcatttgaaatcgtataggttagcaaggaaaatattttgtatattaagtatatgacatatataattacatactaaattaagagtgttatttttgctgttgcaaaaatactatatatgatgagtgtattaaacaggrtaaatgcacataaattttttctttttcttccacatatagaactccctttgaagattggcagtctggcaagggagatcattttccaaactcttgaaaacgtgtgaggactcatgacctgttacatcaatggaacatgaagagaattgaagtgtatcacttctgcgccagggagcctaatggaagaggtgcccatccaccctctttcctcatccgaca

SEQ ID NO: 120953 - DNA, 490 bp, Homo sapiens
ctctggtctcaaatgcagatacggcattacctggaaagaagctaaagctattatccagtgatgcccaacttgccaagtggtacgttcctcatcttttacagaaggagttaatcctcgaagactagaacctaactctggcaaatggaggtcacacatgttccctcatttgggagactagcttatgtacatgtagtgtggacaccttttctcactttgggctacatgccaaacaggagagtcttctgcctgtgttaaacatcatcttttacagtgctttgcrgtgatgggcattccagcttctattaaaacagataatgccccaggctgtactagccaagctctagctacatttttctctatgtggaatattaaacacattactggtatcccatacaattctcaaggacaaaccatagtagaaagaatgaatctctccctaaaacagcagttgcaaaagcagaaagggggagacagagaatatggaacacca

SEQ ID NO: 120954 - DNA, 536 bp, Homo sapiens
aaatgtggaagtgactttggaactgggtaataggcagaggttggaagagtttggagggctcagaagaagatagtgccgagaccagctcggktggggagaccctaacccagcagcactagaggaattaaagacacacacacagaaatatagaggtgtgaagtgggaaatcaggggtctcacagccttcagagcttagagcctcaaacagagatttacccatgtatttattaacagtaaaccagtcattagcattgtttctatagatattaaattaactaaaagtatctcttatgggaaacaaagggatgggctgaattaaaggactaggttgggctagttaactgcagcaggagcatgttcttaaggcacagatcactcatgctattgtttgtgtcttaagaatgcctttaagcgtttctcccccctgggcaggccaggtattccttgccctcattcccataagcccacaaccttccagcttgggctttagggccattatgaatatgttacagtgctgcagagattttgtttatggc

SEQ ID NO: 120955 - DNA, 536 bp, Homo sapiens
aaatgtggaagtgactttggaactgggtaataggcagaggttggaagagtttggagggctcagaagaagatagtgccgagaccagctcgggtggggagaccctaacccagcrgcactagaggaattaaagacacacacacagaaatatagaggtgtgaagtgggaaatcaggggtctcacagccttcagagcttagagcctcaaacagagatttacccatgtatttattaacagtaaaccagtcattagcattgtttctatagatattaaattaactaaaagtatctcttatgggaaacaaagggatgggctgaattaaaggactaggttgggctagttaactgcagcaggagcatgttcttaaggcacagatcactcatgctattgtttgtgtcttaagaatgcctttaagcgtttctcccccctgggcaggccaggtattccttgccctcattcccataagcccacaaccttccagcttgggctttagggccattatgaatatgttacagtgctgcagagattttgtttatggc

SEQ ID NO: 120956 - DNA, 462 bp, Homo sapiens
caacatggccaggacttatcttgtgatcttcccaaatctgtacttattttactgtttactaacacagcaatggcactatattgcaatcattctgcaattaagagagcttcaagtcatcttgctgttttcttttttttccccaatttccaatgaatcaacaagtcctgttgatttatcctgttattactatttgaatttcaactcttaacatcatcaccaggctacctagattaccacacaacctttgaatgtgattttctatctttactgttgctttastccatatcttttccaccctgcagtaataaggagcttccaaaactgcaaatcaaatattgtctctctttcaacatcatcactggaataattgctgtaacattttggggtgccattcctgcctagctctttagctttacctcttgccattgacacatttaattttatctttttttttttaatctg

SEQ ID NO: 120957 - DNA, 517 bp, Homo sapiens
gaagaggtgtaaatacagttgaaaatagagttgtaaatacaggaactagcacaaagacatgagggatcataaataaacagggaaacatgacaccactaaaggatcaaagcagggcttttggcagatcatggcatacaggagggaggactagattgcagctcygacttggacggacagagcactgtgtggaggctcccatcatgaacttttgctccagaacaactgcaggaatacatgaggaaacctgagaagaaccacagatcccctgaaggaagcggattgcttctgcaggacctgggagacactccaaatactgtgagtgcccaaactgtggaagggggaaggggagatcgtccgccctggaacatacacccccactggggaaactgactgcctagattatgggagaagattctgaccttacctgaagctgagtcaatttagagagctgagtgaaatataggggtagaggaagcagcaggaaaagccctgggagctcgctgggctccctagccag

SEQ ID NO: 120958 - DNA, 517 bp, Homo sapiens
gaagaggtgtaaatacagttgaaaatagagttgtaaatacaggaactagcacaaagacatgagggatcataaataaacagggaaacatgacaccactaaaggatcaaagcagggcttttggcagatcatggcatacaggagggaggactagattgcagctctgacttggacggacagagcactgtgtggaggctcccatcatgaacttttgctccagaacaactgcaggaatacatgaggaaacctgagaagaaccacagatcccctgaaggaagcggattgcttctgcaggacctgggagacactccaaatactgtgagtgcccaaactgtggaagggggaaggggagatcgtccgccctggaacatacamccccactggggaaactgactgcctagattatgggagaagattctgaccttacctgaagctgagtcaatttagagagctgagtgaaatataggggtagaggaagcagcaggaaaagccctgggagctcgctgggctccctagccag

SEQ ID NO: 120959 - DNA, 567 bp, Homo sapiens
acacccttactgccacgccatctttgtttcctgacctggtgacaccagcttaccctctcttagtcatctggtctcctcttcaactttgcctcaaacttacacagacaattctggacttccagatatttggattttagagttttgcacattagaacccacagatgccaccagcgtaccttctgtcttctgttgttgatttcacacgacttcctggagacctgatggccagactcgcctctgatggaaagcaactgacctcaattgactgagcaggaatgcctgcaactggcaggatagaacatgtggcccaacgctgagcacatcttccgcatatgtcctctgcatgtggcttgtgaataatgctgtttgggatctgatctatttactggttgttccayatgagtatatgcagttttccttctctgaacctgatgtcattacttcactgtcatagctttacctggctggctgcctcctgtcacactagcccatgcactggtcacagaaatacatttgggctagaaaaaaaccaagaccttgagtaagcaattgctccaatggctaaat

SEQ ID NO: 120960 - DNA, 634 bp, Homo sapiens
cagttatgatactaactacctgaagttaatgcagaccccataggtaaagagatcagtcccacaaaactgtcccccacttcagacactcaacacaagtagtgggtccttatgttacccagatttctgtccaacttggctacaagtcaggggttcccatgaacccctccttaacttcaatattttgctagaatggctcacagagcaatgagttcataagatcagagattctcccttctaccagaaggggctgtcccctgacttaccttgtatgggagatcagaagacgccttgcagagaggggcggtggtttgatccacttggggaycttctgggtgtctggaccaagctgggggccaccattattcgtgggccatcttgtctctctggcagaggaattgaataaatctatcactcaaggtttccttttccaccccaaatccactgctggttcgtttcccaaggactcctgagtactacaaacccattaaaacactgcggctttactggtctgtggctatagaaactacccagtcacctaaggactatttattgagtaccacaaattactgatttcagcaccagggagcaaaaagacaaatatccctgtcctgtggcacttacattctaatgggct

SEQ ID NO: 120961 - DNA, 295 bp, Homo sapiens
gaattctacctccatttagtaatcagcaattaaaacaaaataatgaagcaaaacggttaggcaaacagataaacaaaacttggcttttgcaatccctttgaagtttgccgtcttcaattgttctgaacactctccagttttgtgtaccatgaccaccttagatcatatmaaacccactctcctctgcccactttttttggctctatttgcaagaagcttatcaagagaagatgccaataaatatgatgttatcaggaaagcaatacatagagttagaagcagaagaaatgttcta

SEQ ID NO: 120962 - DNA, 626 bp, Homo sapiens
acctttgtgcttgcccaggtgtttcttacaataccaaatgtaggatctcacccattgccctaagcccaggcatgagagtaaacatctctcttatttttgggtccaggtaggagagtcatttttgttcctgttatctggttacagaaattggtcaacatccctcctgtggctcaatccacatgtgacagacatgatccaactgtggactgtgtctgtcagtgagattcaggaactcactattttgctgtctcctatgtaaaggtgacaattttaacagtcagctgagtgtgcatacaatagtcacaacctcagtgtggtactgggtcctatgatgacactctctgtaccatctgagggctttacagaatatgcatgtgtgtggtaatcacctgtgatattttttaaagtagaaaacccagaactttattttttggcctaatcccagctatgagagagagycaacacctctcttattggtggggtccaggtataagagtcatcactggacctgtaagctgggtccagatatgatccaccatctgacttttggccagatccacatgggatgtgaccaatattctaactgtgtattgtgtcctcatatgagagtcaggacctcaccagta

SEQ ID NO: 120963 - DNA, 555 bp, Homo sapiens
cacaaaaagagtgtttgaaacctatttaatcaagatgcagtttcaatttcatgatataaaacagcacatcacaaagtattttcacaagtaggttgtttcaagtttttagggctgsgtattcatatgtttctataagggctcaataggcttggaaatgtcactcgttggcatctacacaaagagtgtttgtaatctgtttcacgaaaatgcaggttcaattctgtgatgcagaacagcacattacaaagtatttttacagatagattgtttctagtttttaggactggaaattcatattttcttataaggactcaatagtttggaaacatcacttttagattctataaaaagggtgtttcatccttgttgaataaaaacaaagatttcattttgtgatatagaacagcacattataaagtgttttcacagatagcttgtttctagttttcagggttgggtatttttatgttcctataagtgctcaatagattcagatacgtcaattcctagaatccccaaaaagagtgtttcaaacatgtttcatcaaaatgcatg

SEQ ID NO: 120964 - DNA, 542 bp, Homo sapiens
cataaattcaaacctaggtgtaactgaaatttcaggagaaaagaaagaaaataggcagaagaaatatttgaaaaaataattgctgagaattttccaaaattaatgacagataccaaatcacagatccaaggagctcaagaacatcaggtatgataaatatcaagagtgtgcacgcatgcatacatgtacacacacacacacacactccyaggcatatcatattcaaagagctgaaaaccaaagacaaaaataaaatcttgaaagcagcaaaagaaaaatgaaacatcaaatgaaaaggaacaaagataggaattacagaagacttcttgtcagaggcatacaagaagagaatgaagcaacatttttaaagtcctgaattttttttttaaattgtcaacccattgcttctcagccttttagctaagatcaagcgtaaaaactgtcaacccagaattttatacccagtaaaatatctcccaaagatgcaggaaaaatagaaatcaaagagaaacaaaaacttagaattcattgccaggagacct

SEQ ID NO: 120965 - DNA, 611 bp, Homo sapiens
caggctaattgactcaaaggaaacttaaaaacagggttggaaagttgttgggaaacagcatatttgcactttgcaaaatatcaccccacaaactattactaactgcaattaaaagtgttttattttattttattttatttttgagatggagtctcgctctgtcgcccaggcaggagtgcagcagtgcaatcttggctcactgcaacctctgcctcctggttcaagtgattctcctgcctcagctgggactacaggcgcatgccactacgcccggtttttttttgtttgttttgtttttgttctttgttgttttttgtttttttattttagtagacacagggtttcaccgtgttagccaggatggtctcgaactgctgaccttgtgatccaccctccttggcctcccaaactgctgagattacagacatgagccactgcaccyggcctaaagtgtacttctacagcggaaagatccactagtcatcagctcaacatcagtaatattgagacagcagcacatcgtgccatacgaacttcacagcatcacctatgaagtagctttggcaaaaaatgtttaacctgaatctactcacgcctgtaaacctagcttc

SEQ ID NO: 120966 - DNA, 600 bp, Homo sapiens
tagaaacacaaagatctggagaaacctatgaataccagttccctgtaaactttttagaaatatgaagacctcttgggacttccacagagtggaaacagtgggcattacaccaactgtacttagacactgagaagtaaaaaaggtgtctgtattaaaaatagaacacaaattaacttaagaaaaaggttgccagatttagcaaatgaaatcacagaatatccagttaaatttgaacatcaaataaacaacaaatttttttataaatatgtcccatgaaatatttgggacaaacttaygccatctttcaaacccaacaatgggagttacagtgtgtgtgtgtgtgtgtatcagaaactacaaatatgctcacaataattataaatatatgaaacatatattagttataaatatataagtattgatatattttatgtatataaaacccttagttgtgataaatagaataatctccaccttcttcatttttgcatttatttctgtcttggtcatcctgatttttcattgtctctttaccctttgttttccgtgtgctccatgctaatatgtaataatcattgtgtttgaagcctgttattcaaa

SEQ ID NO: 120967 - DNA, 494 bp, Homo sapiens
atgaaatatttgtttttattgtttaatcaattagattatttttcttgtccatttgtatagtatacatactaaaacttgatcatctttacttatggatttgtttttagttgtttttgttgttgttgttgttkttttttttttttttttttttttttggagagacaagactttgctgtgttgctcaggctggtcacaaactcccggcctgaagcaatcctcccgattcagcctcccaaagcactgggactacagatgtgagccaccatgcctggccttaattttgtctagctgaatatgtaatcttttagagcatccaggtttcttatcttacctaagaaagtcattccaccctggattacatgtgtagtctagctgtaattctaatatatttaatttttttgcatttgttattacttcatttgaaatgtattccagatattgtgttaaaataagagcccaaacttattctctttcagttggagagtcaattgtta

SEQ ID NO: 120968 - DNA, 618 bp, Homo sapiens
aaggcctcccttatgctttccaggaaggcaatgagattccatcaaattcctggtctatcatggataactgggtatagttcaggggtttggtcctagtcctgtgtaagccctccttatgcacacccgaaagagtctcctcttccagtttcccatctcatcattgggatcctatccagggtcattcactggtactgcttctctttcagttggataaagttcaaccccttccctgatgctatatgttatacaaaactcatccccaaatctctctgctgcttgcagatcagcattcttctcagtgttcatcagggtctgattcaaaagtaacataattggaactccaagatagtacaaatatttgggttgaattctggaaagcctctatatatctgtcagggtcatctgaaaacttgccaaaatcctccttaacttgctttaagtcctgtagagagaaggggacctggaccttactggagccaaattcaccaggcatctattggaggggcaacagtgagactgwggcttgtctaggatgaagatttctaggagggggcaagtgagagactgaagctggatagggaggtcagggtggacctggaggagcagggctgaagggag

SEQ ID NO: 120969 - DNA, 573 bp, Homo sapiens
aagactgcacctaaactgtctttatccctactccaagattctggtaacttttcttataagcttttcaagaacttttgaaaactrctgctttcctctccaggcacaagcatagatatttatttaagggtgtgatacactaaactttttcatcaactcacaaaatgtgaacccttcccagatagcaaaacagcacactcctattgtctttcatttccaagtgccagaggggaattgcttttaataaatacttttacactgcacttcagctgaattgctgtcttgtgaaaacaggcctgaggagataacacattgccaaattccctccagcaagtgcaaaataatactgtaggttctggcatagaaataaaatgcaaatctgattactttgttttattctatatggagataatgtgtgagcacatttaaatacataattcaacatatttcagctatggccctagataatgatttaatgtcagccttacactaaccttgtaacatgagagttgcatttagagctgacaacgaaaaagagagttgatgaaattacactttattttattttctggagag

SEQ ID NO: 120970 - DNA, 573 bp, Homo sapiens
aagactgcacctaaactgtctttatccctactccaagattctggtaacttttcttataagcttttcaagaacttttgaaaactactgctttcctctccaggcacaagcatagatatttatttaagggtgtgatacactaaactttttcatcaactcacaaaatgtgaacccttcccagatagcaaaacagcacactcctattgtctttcatttccaagtgccagaggggaattgcttttaataaatacttytacactgcacttcagctgaattgctgtcttgtgaaaacaggcctgaggagataacacattgccaaattccctccagcaagtgcaaaataatactgtaggttctggcatagaaataaaatgcaaatctgattactttgttttattctatatggagataatgtgtgagcacatttaaatacataattcaacatatttcagctatggccctagataatgatttaatgtcagccttacactaaccttgtaacatgagagttgcatttagagctgacaacgaaaaagagagttgatgaaattacactttattttattttctggagag

SEQ ID NO: 120971 - DNA, 596 bp, Homo sapiens
catggatctaacagaagtgcacagaactaatgcaatggaactaatggaagtgtcactacaatctggcaggattgggcaacaattgcctgaaatcattggaaagctggaggaaaccttagccagaggcatgacgtgactctgggagattaaatgagcatagaaaatcaattgcttatgtatgacctatgaatcaatgtacctccatatggatgacgcccacatttttttgtgttgattcactcagaactcccccttctaggaaccttagctcactgtccaatratgtgtgtgtgtgtgtgtgtgtgtatatatattttctcacatgccctttaatatgcatcaaaaatgcatggaagcatgtgtaagaaactcttaataatagttaataatggctccttccggagagctgggaagcaggatttgggaagcagatggtctgtgggaagggtagggaaacattactttttaatttttttttacaagaagaacgtattgcttatatagtttaaatgaaaaaatatcaattttaaataagtgattctaattagaagcatggggtttataacttctcttcgtggctttctggcagatagcat

SEQ ID NO: 120972 - DNA, 588 bp, Homo sapiens
aatttgtgaatcttcagcctgtaccttcagagtttacaaagtagaggctgagatacacataatcctgaaatgcaaaagagtgagtggtaatctttaaaagattaaagagcccttccatgactcttctacattttacagcaagattttcagatcagaatgtctaaagtagagcagatgaattaggttaatatgatttggccctgtatccccacccaaatctcatctcaaattgtaatgcccacatgttaggggagggacytatgatccccacatgtcgagggagggaggtgattggattataggggcagtttcccccatgctgttctcacaatagtgaatgaattctcacaagatctgatggttttataaatggtagtttttgcctatgctctcagacactctgtctcctaccaccatgtaatatgcgcctgcttccccttccaccatgattgtaagtttcctgagtcctcctcagccatgtggaactgtgagtcaattaaacctcttttctttataaattacccatttttgggtaagttatttatagcagtgtgaaaattaatgatgtagacagagacaagaatctgt

SEQ ID NO: 120973 - DNA, 620 bp, Homo sapiens
tgcataaatgcaaagattggattcagttgtctctcgagtctttataattctattgctttataaggctcttagttctcatagagaagggcaaattaatgaccaaaaatgagtagcattagcttacaagacagtgattttataagaaatatacaacaacttactaaactagatggtactacatgtaatagctacataaattaacaattaatcttcatagggcttttaatttgtttcttgtttttgtcatttgtgcaaagtgttttggcatttgttgataatctaacacagtctacgtctgacttatgtgtctgctatacacacactctaatatatccagacaattccaattgcttggagtctgctcacatctggtcacaatgaagataaagctgtaataaaatttctaaaaataagttaaaattatctcagaagccaaaaaccaataaccataataatagagattgctacatccggtgaaaaatgaggagaactactgcagattccccacatcttggtcatttttccctccaaaygttgctcatattttcacccatacagattaccctgtatcatactatctgtccaaatccatcatttctttcaaggtcaggctcaaaact

SEQ ID NO: 120974 - DNA, 585 bp, Homo sapiens
gttctagaactctgttgtgcaacatggtgactatagttaaatgtattgcattcttgaaaactgttaagagagtagattttaagtgttcttaccacacaaaaaaagataagtatgtaagaaaattcatatgttaattagttcaatttagtcattccacaatgtatatatatttcaaaatatgttgtatgtgacagatataattgtagtatatacaattttcatttggaaatttaaaaataaataaagagagaaaaagaaaattatggatcttctttgccagaaaaacgtgcataagaaatatacatctctacctccaaattattgataacaatttcacgggattcatgccccccacacatctctgtactgacctcagcacatgcacattcatacccaaattctcaaagactgcagactccttctttctctaaatctttactccataatctaaaacttgatatctaatttttatctttctccattratgtattagaatgtaattcttcctttgtcaaccataagataatctcttcagagaaatgtatcttttatattccagctggtacacagaggatgttatataat

SEQ ID NO: 120975 - DNA, 585 bp, Homo sapiens
cataaatccttgtctttgacataaattttaatttttgaggacttattatctttcctaagttttcttatagccggaagcatctatgtcattgccttaaaattatgatagattgatccagtctgttttaattattaaaatatrtgtatttctcattagtattttattaacattcataaaggtttatttataattagtagatgcttcatttcttaggagatgaaggattgaatctctctgcttacttttccttttcagaacattttatccacttataatttcaccacattctgttttgccacagtcattgtgtatacctgtatgccatagctgtaatcaactataataaacttggaagtcattattctataagatcattaatgctgatgagttcattagtatttagaatatccctccttctgtgatcttttctatagtaggaaaaaggtctacctcattgtgtagaaatcctatctcatattggttcattcacatatcttctttcttacacagatataaacaagaatatgtgctgaacatatggaaacataccctaaacaaaaagaagaaaacatcatatttaaatac

SEQ ID NO: 120976 - DNA, 585 bp, Homo sapiens
cataaatccttgtctttgacataaattttaatttttgaggacttattatctttcctaagttttcttatagccggaagcatctatgtcattgccttaaaattatgatagattgatccagtctgttttaattattaaaatatgtgtatttctcattagtattttattaacattcataaaggtttatttataattagtagatgcttcatttcttaggagatgaaggattgaatctctstgcttacttttccttttcagaacattttatccacttataatttcaccacattctgttttgccacagtcattgtgtatacctgtatgccatagctgtaatcaactataataaacttggaagtcattattctataagatcattaatgctgatgagttcattagtatttagaatatccctccttctgtgatcttttctatagtaggaaaaaggtctacctcattgtgtagaaatcctatctcatattggttcattcacatatcttctttcttacacagatataaacaagaatatgtgctgaacatatggaaacataccctaaacaaaaagaagaaaacatcatatttaaatac

SEQ ID NO: 120977 - DNA, 554 bp, Homo sapiens
ctgctgtgcttcagagcagcttttattttcacacatacatccattcattttgaaatctttcaaagctagtgtggatatggtgagactcccaattattcaaaaaaaaaaaaaaaacagaaacaaatgacagtcttcttaagagtggtcagtaagttacaactgggtgttttctctctgctaagtttagacattacactctattcaattttatcttgattaaacaattgaaaatcatgtgtgcacgcaactggtataaacagatcatttacctaatatcagcatttttctgaagggactaagtcaatgcgaatgaaaaaaatgtggttgactagaaaatacacatacacacacacacgagccatatattaacattaaagtagagccttacrtggattttttttaagtcaagaagttaattcaaatacaatcttatttttatacagtactgtgttaataggaaataatatatacctttgtgattaatccttataggagattcaaatgacagttattggactttaaatattgtaatccattaatgaagagaaaaagaa

SEQ ID NO: 120978 - DNA, 554 bp, Homo sapiens
ctgctgtgcttcagagcagcttttattttcacacatacatccattcattttgaaatctttcaaagctagtgtggatatggtgagactcccaattattcaaaaaaaaaaaaaaaacagaaacaaatgacagtcttcttaagagtggtcagtaagttacaactgggtgttttctctctgctaagtttagacattacactctattcaattttatcttgattaaacaattgaaaatcatgtgtgcacgcaactggtataaacagatcatttacctaatatcagcatttttctgaagggactaagtcaatgcgaatgaaaaaaatgtggttgactagaaaatacacatacacacacacacgagccatatattaacattaaagtagagccttacatggattttttttaagtcaagaagttaattcaaatacaatcttatttttatacagtactgtgttaataggaaataatatatacctttgtgattaatccttataggagattcaaatgacagttattkgactttaaatattgtaatccattaatgaagagaaaaagaa

SEQ ID NO: 120979 - DNA, 485 bp, Homo sapiens
aatgaaaagtcaatacaaagaaggcagagagaaggaaactatgaaagaattagattttatgaaaaaatttatactctactgaaataaaggaaaggtaatacaaagaaggcagagaaaaggaaattatgagaaaattagattttatgaaaattatgaaaaaaattacagtctactaaaatagaaaactgatgagaggaatgagtgagtctaagaacatattctctggaaagataagacaaatctccattgagacagataaagaaaaaaatggagaaggctcaagtggaggcaaaactttagattcattccagattaaaaagctaatgagaatcctrtgaactttatgtaaaattttggaaatctaatgaatgggataaaagtacagattgtgatataatatctacaaagaacagcacgcctgaatagccttaagactattatgctatttgcatctaaaataatgactgtgagtccaggtacccagg

SEQ ID NO: 120980 - DNA, 539 bp, Homo sapiens
aaggcagtttgtttttgtgaccaagtactatcctattgcacaggataataaatattccacaatgtacttatctattctataaatgtctttagatatttgagttggttccaagattgagatgttacagataacatttgaattaacatttgtttgcatgtttcttgatgcaaatgtgcatgcatttctctagaagtagattactgagtcttaggaaatgtttgcattcgaatttagtagttaatgcccaactcttttctaaagatactgtaattaattcttcccaaagtttctttgtcatcttattgaaaaccagtttttctctaattgatgtttatttaccacttataatttattttaattatagaatcaaatattttaagagttrtaaaggagtttgcaaagcaagtagctgtaacttttaatcctgtatgtgaggaaaccaaaatttgaggacggaaataaaatttctaagtatcccttttaatgtaagcagctttcatcttctctgctagattttattattcttagatttctaagta

SEQ ID NO: 120981 - DNA, 430 bp, Homo sapiens
ttaatgtgtatctttgatacttcttccaaatccatgtatttataggaaccaatgaaccaagaaggcaggcagacttgcaaggccctcattactctttgctatgagaaggcttcaagtgggcagcctatattttctgatacaattattctttttttaatctcttaaaacacatacatcacagacacacaagaacacacacccacacacacactcctcaaaagtaatgtgaacattcgttaacacaactttctgtcttccagtttgtctacacctagagcataatcctccctcaatatatttgtctctctstcatcatcctcagatggacttaatggtggaggagttagtaccaaaagcctcatgctgcattctggaagtttcaccattagcccaaaagggaaaaaagagtaacctctatgtctatcctaga

SEQ ID NO: 120982 - DNA, 606 bp, Homo sapiens
gattatgcgatctgaagaacagagagaaaaaataataaagaacaatgaacagatttggagagatatgtcaggcactatgtatgcacaaatatacacataatgatagtgccagaggagaagagacagagaaaggagtggaaaaaatttgaaaaatcatggccacaaataacccatatttggtgagaaacagyaatctgcacatccgagaacttagtaaacttcaaagagggtaaaaacaaagagattcatgaagatatgtcatagtccaaatgttgaaaagtaaaaataggagagaaccttgaaagcaaaaaggaaaaaaaaaaaaaaagacagtgtgtactgtcatgtacaaggtaatgccaatatgattaagagtagatttctaataagaaacaatgaagagttaaaggcaatggatggcatgtttaaaatgctgatggaggatagaaaaccacatttgtcaatgtagaatcttatatctagcaaaattatctttcaaaaatgaaagtaaaggtatttctggttttggctttaacaggtgaagttttaaatgttatcagtctattattatgacaaataaaatggagaacagaatgaaaatcaatc

SEQ ID NO: 120983 - DNA, 606 bp, Homo sapiens
gattatgcgatctgaagaacagagagaaaaaataataaagaacaatgaacagatttggagagatatgtcaggcactatgtatgcacaaatatacacataatgatagtgccagaggagaagagacagagaaaggagtggaaaaaatttgaaaaatcatggccacaaataacccatatttggtgagaaacagtaatctgcacatccgagaacttagtaaacttcaaagagggtaaaaacaaagagattcatgaagatatgtcatagtccaaatgttgaaaagtaaaaataggagagaaccttgaaagcaaaaaggaaaaaaaaaaaaaaagacagtgtgtactgtcatgtacaaggtaatgccaatatgattaagagtagatttctaataagaaacaatgaagagttaaaggcaatggatggcatgtttaaaatgctgatggaggatagaaaaccacatttgtcaatgtagaatcttatatctagcaaaattatctttcaaaaatgaaagtaaaggtatttctggttttggctttaacaggtgaagttttaaawgttatcagtctattattatgacaaataaaatggagaacagaatgaaaatcaatc

SEQ ID NO: 120984 - DNA, 502 bp, Homo sapiens
caaaatccagtggtctattccagagaaaagaaaacttacgttcacactaaaacctctacacaaatgttcacagaagctttattcaaaatagacaaaaatgggaggtaacccaaatgtctttcaacaagtgactggttaaagaaactgtggacactgtggtggtacattcattccctggaatactcccacaacaaagaggacacacaacagcttggatgaaaatgaaacgaattttgtattattgataytgtgttgtagctattcaagatgacactattgatagaaaccaggtgaagggtacacaagacctcctcgtacatttttaacaatttcttctgaatctataatcctctcaaataatttttaaataatattatttttaaaaagcaagttctatgcagatggtggtcactgcgccttacattctccatctctgctctttaggtatatttaagacaataatgagtagcttcctactgttgtgctagggattgtagaatag

SEQ ID NO: 120985 - DNA, 485 bp, Homo sapiens
atattttattaccttatttattgttttctatataataagcttttcatgaaggcttaaagagaaagtacaaattattattgtttttctttgacatttacatccacttactgttcctaaggacaattcagtccctcctcccatgcgtaaacctttctatctgattagatccaggttgttactgatagacataaaattattttataaaaagaaattatgttcaatgtaaaaatagtaatccattttaaattcccttcatttctgcagcctgtttctccagacaactcaaaattgtctgaatcccataagacagtttctctgagcatattgtttaatgagagaaactttagacattctgaataaaacaagggaattactgatgtcccartgctctttgcaatgagtacctccggtttaccattgtggaggaaatattgcattgactttctaccaaaatccatgtcttatctggaagaatgcctactatt

SEQ ID NO: 120986 - DNA, 576 bp, Homo sapiens
tgcacaatgtccttacagtaatgcaaaaatgaatttcacagagctctttttgtaaagatgctgatacatgaagtctcaaatttcatggacgtgacataaggaaggcaacagcttgggaagaaaatatgagaaatagcacttagattgggtttattctagaagaaaggacacctcatctaactttctagtagtcctctataaacactgttcctctggactgggcgtttgatacataccgagcagccttgttttcaaggttagagtccctagaaaatagatgatgttcagagacaaacctgtctaggtactgagaactctttctacttgatgtctgattgccatctccaacagattatattttgggatgaattattcatctttagcacataagtaatctttcttattttcttattatctttacaaatcagtgtaatgcccagaaagcccagtgtacaatcaaaattttagttgcttatttttttcttttgctcctttatgtccaactarttactaaattatgtttatgtgtctttgaaatcttttgccttttgcttgtcataagatgcccaaaagatc

SEQ ID NO: 120987 - DNA, 643 bp, Homo sapiens
ttgccccactctcttccagtctaaacttcctaatagcttcccattacactcagagtaataaacaaaaaawtttttttaataatcaaccagaacctaaatgacttgattctcactacctcttaaacttcatctcctactaccttaactttcatttactgtgttccaatcatattgacctctttgctgttccctgaaaaatcacccacttccctacctcagcctctttgatttttgttgttttctctgcttggtatgttctcttctcagatatacacacaaccacttccttacttccttttgccatctaaaatttcgactcctcctgccacagtagttaataatgcccttttctgctttattttggtctcttggcacttaatgctatctggcagggtatagattttactcttacgcattgtctgcctcaccaatggagagtaagctccatgtggaaatgaatttttgtcatttttgtttattaatgatttcctgaaacctaggacagaacttaaggaatagcagggaattgattatgaagtcaataatgagcaaataagaaattccatggagaagaatttgctttttggttcactacatgacatagaatgagacagatatgacaacatggtttaaaatgtttaaa

SEQ ID NO: 120988 - DNA, 643 bp, Homo sapiens
ttgccccactctcttccagtctaaacttcctaatagcttcccattacactcagagtaataaacaaaaaattttttttaataatcaaccagaacctaaatgacttgattctcactacctcttaaacttcatctcctactaccttaactttcatttactgtgttccaatcatattgacctctttgctgttccctgaaaaatcacccacttccctacctcagcctctttgatttttgttgttttctctgcttggtaygttctcttctcagatatacacacaaccacttccttacttccttttgccatctaaaatttcgactcctcctgccacagtagttaataatgcccttttctgctttattttggtctcttggcacttaatgctatctggcagggtatagattttactcttacgcattgtctgcctcaccaatggagagtaagctccatgtggaaatgaatttttgtcatttttgtttattaatgatttcctgaaacctaggacagaacttaaggaatagcagggaattgattatgaagtcaataatgagcaaataagaaattccatggagaagaatttgctttttggttcactacatgacatagaatgagacagatatgacaacatggtttaaaatgtttaaa

SEQ ID NO: 120989 - DNA, 643 bp, Homo sapiens
ttgccccactctcttccagtctaaacttcctaatagcttcccattacactcagagtaataaacaaaaaattttttttaataatcaaccagaacctaaatgacttgattctcactacctcttaaacttcatctcctactaccttaactttcatttactgtgttccaatcatattgacctctttgctgttccctgaaaaatcacccacttccctacctcagcctctttgatttttgttgttttctctgcttggtatgttctcttctcagatatacacacaaccacttccttacttccttttgccatctaaaatttcgactcctcctgccacagtagttaataatgcccttttctgctttattttggtctcttggcacttaatgctatctggcagggtatagattttactcttaygcattgtctgcctcaccaatggagagtaagctccatgtggaaatgaatttttgtcatttttgtttattaatgatttcctgaaacctaggacagaacttaaggaatagcagggaattgattatgaagtcaataatgagcaaataagaaattccatggagaagaatttgctttttggttcactacatgacatagaatgagacagatatgacaacatggtttaaaatgtttaaa

SEQ ID NO: 120990 - DNA, 593 bp, Homo sapiens
cttgaaaattttttttgattctaagagcaggtagaacatacttatccttaaataacaccttttccttttaataacatctaagcaatgagatttttacctttttttcttggtggtttcttctttagtcatttgtttctttctttaatgagtccttcctaatgatgttttatttttcacacttttatctgttttctctttttattaatgcttatagtattcatttttatttttgtagtatattttattctttttctcttttgaaaagtcatacttgaataaagtacatgtctcaaaaaaagacaaggacttttgcattttatattgattccttaattttaaaatttttaggttaagaataattctgtactatccataagtattgctttatgatgactatgcttaagttgttggtatatgttataatatagcatttcaaccccaaatacagatttctgttctgtactcttgggaatttatggaggaggagaagrcaaaatttaccttcttcaagtctaaaaattatcacatttgggacacataaatccccatgtatctctttaaggacagcatattatttttaaaattaaaatata

SEQ ID NO: 120991 - DNA, 558 bp, Homo sapiens
tatcagggtgggactaagtaagaactagttgagagggactgacactcagagaataagcctgaaaacacaaactttaagatatttctggattctttatccattagattattgaaactatctccacgatcttgatcattaagtaagtagaacattcagctgtctaagacccactctttgttaatggtaataaagagaatgaatgagacaaaaaaagggaggtcttaaaagcctgagatgctccatgaaacagctggactggtgcatttttaaagatgttaaggaaatgtgctgcaggagggcatcagcacgaagcttttacagactaattgtctcgactccagtcaccccatgaatcccctgcagcatctctgtgcatccttgcccagctgtgcttggttatagagaagcttccttgtttttttgtcatctgtgttttatgcgtattcaattgttgattatctgcatgagggtattcsttgttatggataattcacaaaacatgttttatgttttttttttttataaatcctggaccagcttcctgctataagcaataca

SEQ ID NO: 120992 - DNA, 558 bp, Homo sapiens
catgcaaacatagaatagcatctaaacaactgtgaaattcaagttataaaatgggataaaagtaacattaattataacaacatggaaataatatgattagcasagttttggggacagagtagcgtagagaacgtagggttattacaataaatcaggtttccttttagcagggaggtgagccaattgataatctccagaggttaaaaatcaaattataggaagaagtgtatcactattcttcattcgacaaatacttactgaactctgttcctctatgcaggcattaaggagacagtagtaagcaaagccaagctcctcctgcccacattttggaaagaaagacagaaaataaatagggaaatgaatcaatactttcggatagtgatatatatgttgaagaaagtgagcagggctggaggggtgctggggtgggtggtggactttctgacacaggacagttgaggaaggctcttcctagtaggtgacatttaagcgggaagctgaatgataaacagacatgacaactaaagatttggggaaagaaccttctaggcagaa

SEQ ID NO: 120993 - DNA, 558 bp, Homo sapiens
catgcaaacatagaatagcatctaaacaactgtgaaattcaagttataaaatgggataaaagtaacattaattataacaacatggaaataatatgattagcacagttttggggayagagtagcgtagagaacgtagggttattacaataaatcaggtttccttttagcagggaggtgagccaattgataatctccagaggttaaaaatcaaattataggaagaagtgtatcactattcttcattcgacaaatacttactgaactctgttcctctatgcaggcattaaggagacagtagtaagcaaagccaagctcctcctgcccacattttggaaagaaagacagaaaataaatagggaaatgaatcaatactttcggatagtgatatatatgttgaagaaagtgagcagggctggaggggtgctggggtgggtggtggactttctgacacaggacagttgaggaaggctcttcctagtaggtgacatttaagcgggaagctgaatgataaacagacatgacaactaaagatttggggaaagaaccttctaggcagaa

SEQ ID NO: 120994 - DNA, 617 bp, Homo sapiens
ctatattacttagttcttgggtatgaagagtctgtactgcacatagcactctgctaggcacgagttttccttgttttttctaatacaactttgatatgacctaatttcaccaccaaaaaaaccagcaccatatggcaagttccccatttcccctaaaataatttattgagcctttagtgtgtccmagtgactgaactctttatgctgaatttttctcaagatttcttcaggacatcagaacataatgcagattttttttcaggtggccctctaccaactggatatgaaattggatcagctggaggcaagaacagatggggttgagcagcagatggaaagatcctgtttaggatatgcagaatcactctggcaaaatcaatcatgccacaggagttagtttcagtttggtgaaagaaaatgaactcaagtagacaactgagttaccgggaaattaatacgagctcacactttagaaagtcttgattaagtgtcaataagacagatgagctaatgatgttgaattaaaagtcttaaatgtcacgtttgtcagtgatcataatagctctccatatttagtgcttaccctttaccaggcatttcaggtacagatctcattc

SEQ ID NO: 120995 - DNA, 549 bp, Homo sapiens
tgacaatgccaaatgctggtgaggatgtgttgttcaaaggacactctaattcattactggtgggaatgcaaaatgrtacagctattttaggagactcttcagcagtgtcttacaaagttaaacatacttttaccatatgattcagcagttatgctccttgttatttacccaaaggaactgaaacttgtgtccacacaaaaactggcacatggatgtttttagcatctttattcatgattgccaaaacttgaacgcaaccaagaggtctttcagtagttgaatggataagtataccatgtccatccagacaatggaatatcattcaatgctagaaagaaatacattatcaagccatgactagacatggaggaaccttaaatgcatattaataagtgaaagaagccaacatgaaaaagtgacatgctgtacaattccaactacatgacatgaaaaggaaaacttatggagatagtaaaaagattagtgatttccagggattagtggggtgggagggatgaataggcagagcaccggagatttttagggtgg

SEQ ID NO: 120996 - DNA, 584 bp, Homo sapiens
gaattgctttcctgtccaagaattaaacagtcatttaaaaacaacacattatttccttgcaaaataaagcgctaagcttaagaaataaaatacagaaaagtcaaatgagaaagtgytttgtaaggggctacctgctgctgcaacagggcacttgcttctctctcctacattctgcagtgactctggggtccccagagtttgggcataaataatccaaactatacccacagtgcagggagcccagtcagctttccttctctcccgctggcactggaaggtaactgacatgccctctggctgccttctaaccgttttagttaagcctaggtttcaattaagttcagtgctccagccctattcactccctagaactagctggaaggaagctgctaccagtcaatgagtagatccattacttccctaagtgctcagccccagagagagaaatgctgaatttagaaaagattgggtggacttcggacaatgtgtgggaaggaagtacatttcctaggctgtacacacaccccacagagcttctggggatgaagaaaagagaaaataggggtctctgaagtatttatttt

SEQ ID NO: 120997 - DNA, 588 bp, Homo sapiens
gggaattcttgtgccctgaggtgactttgtatgccaccagtacayatttgtgaccacaaagtgtgttgtggaacatattctcttccataatggaggtatggttagaatttaagcctttttaaaattttaatctggagatggacagtttttcacttctcaggttgtttatttcctagctgagatagatgtggctggctagccctgtagactctgacactcagctactgaccactgcagtccagcttgggtgacagagtgagacactgtgtgcaaggccattcttgcattgctataaaagaatacctgagactgagtaatttatgaataatagaggtttaattggctcacggttctgcaggctgtttaggaagcaagatgccggcatctgcttggcttctggggaggcctcagggagcttttactcatggtagaaggtgaagtgggaatagtcatatcacatggccggagcaggagcaaaagaggggagagatgccacacactttcagctctgtgcagtggtaacaatgaaaacagcctctcgagagcagaagataacctgaagttgagccaatgctggaagtcaagggc

SEQ ID NO: 120998 - DNA, 588 bp, Homo sapiens
gggaattcttgtgccctgaggtgactttgtatgccaccagtacacatttgtgaccacaaagtgtgttgtggaacatattctcttccataatggaggtatggttagaatttaagcctttttaaaattttaatctggagatggacagtttttcacttctcaggttgtttatttcctagctgagatagatgtggctggctagccctgtagactctgacactcagctactgaccactgcagtccagcttgggtgacagagtgagacactgtgtgcaaggccattcttgcattgctataaaagaatacctgagrctgagtaatttatgaataatagaggtttaattggctcacggttctgcaggctgtttaggaagcaagatgccggcatctgcttggcttctggggaggcctcagggagcttttactcatggtagaaggtgaagtgggaatagtcatatcacatggccggagcaggagcaaaagaggggagagatgccacacactttcagctctgtgcagtggtaacaatgaaaacagcctctcgagagcagaagataacctgaagttgagccaatgctggaagtcaagggc

SEQ ID NO: 120999 - DNA, 458 bp, Homo sapiens
gtcatgatgcagcctacatatggttgagtaggttgyacactgcataaaggcaccacaaatccagcctgcagttcatttgccaaatcatatgtctttttctttgcaaaaatattctggctggtaccaggcatgtacccaaagggatgcacctgcccaacagggctgctttttctaatttgcacaaagactctatgtaggccagctggtggccaattctgtcatgccctctttgcctctagtttcccagagactccttttaagcaaccccttagggcttttggatctgtttaaaaccccaggaccccactgttaagacagtttccagctgtgctatgccatgctctgatactgcatctaaatgggtcccagggcacccagagaacaaacagctttccaactatttaggttgtgacccaggggcaaagggagtccctgagatgcagactagctctgcctca

SEQ ID NO: 121000 - DNA, 619 bp, Homo sapiens
cagcaccctgtctctccctgatccctgtcctaggtggaacagaccagggagctggcagctgctatggcgcttacagcctggggagagggagaaccttcccttggagaagagagggtgtggcagctctcttaggcctccagaggtccagtctgccctaggttgtagcattttgaagaagtcygtcatagaattggttatttaagcctaggggcgtggcctcagggtggatggcaactaggtcagctctctgtcctcgccatggccaccctcacactgtccattcttaaggttttttttttttatttttttgggacgaagtttcactcttgtcacccaggctggagtgcagtggcgggatctcagctcactgcattctctacctcctgggttcaagcaattcttctgcctcagcctcctgagtacttgggagtataggcatgtgccaccaaacccggccaattttttttttttcaccatgttggccaggctagtcttgaactcctgacctcaggttatcggcccacctcggcctcccaaagtgctgggattacagctgtgagccactgcgcccagcacactgtccattcttgagatgggcaagtaggcaacgtgaactgcc

SEQ ID NO: 121001 - DNA, 619 bp, Homo sapiens
cagcaccctgtctctccctgatccctgtcctaggtggaacagaccagggagctggcagctgctatggcgcttacagcctggggagagggagaaccttcccttggagaagagagggtgtggcagctctcttaggcctccagaggtccagtctgccctaggttgtagcattttgaagaagtctgtcatagaattggttatttaagcctaggggcgtggcctcagggtggatggcaactaggtcagctctctgtcctcgccatggccaccctcacactgtccattcttaaggttttttttttttatttttttgggacgaagtttcactcttgtcacccaggctggagtgcagtggcgggatctcagctcactgcattctctacctcctgggttcaagcaattcttctgcctcagcctcctgagtacttgggagtataggcatgtgccaccaaacccggccaattttttttttttcaccatgttggccaggctagtcttgaactcctgacctcaggttatckgcccacctcggcctcccaaagtgctgggattacagctgtgagccactgcgcccagcacactgtccattcttgagatgggcaagtaggcaacgtgaactgcc

SEQ ID NO: 121002 - DNA, 525 bp, Homo sapiens
gtgtacgctcaaatctataaaaagtttttaaaaattaaatacaaaattttaaatatgcattatgagcattattcaccatagccaaaagtggaagcaactcaaatgactatcaactgatgaatggataagcaaaatatggagtgtggactatccacaccatgtaatattattaagccatagrgaaaaaaatgaagtactgatgcatgctacaatgtagatgaatctcaaaacatcacgttaagtgaaagaaggtagtcacaaaggaccatatatcgtatgattccatttgtatgaagtgtccagaatcagcaaatctatggagacagaaagtagcttagtgcttgcctagggcccaggggtatggggtttgggggatgacagataaaaggtggggcttcctttttcagtgatgaaaatgttctaaaattgtagtaacaattaactctgtgaatataataaaacccaatgcgttgtgtaatgaattgcattgcatgtgaattatattcaataaagctggtttttaac

SEQ ID NO: 121003 - DNA, 525 bp, Homo sapiens
gtgtacgctcaaatctataaaaagtttttaaaaattaaatacaaaattttaaatatgcattatgagcattattcaccatagccaaaagtggaagcaactcaaatgactatcaactgatgaatggataagcaaaatatggagtgtggactatccacaccatgtaatattattaagccatagagaaaaaaatgaagtactgatgcatgctacaatgtagatgaatctcaaaacatcacgttaagtgaaagaaggtagtcacaaaggaccatatatcrtatgattccatttgtatgaagtgtccagaatcagcaaatctatggagacagaaagtagcttagtgcttgcctagggcccaggggtatggggtttgggggatgacagataaaaggtggggcttcctttttcagtgatgaaaatgttctaaaattgtagtaacaattaactctgtgaatataataaaacccaatgcgttgtgtaatgaattgcattgcatgtgaattatattcaataaagctggtttttaac

SEQ ID NO: 121004 - DNA, 525 bp, Homo sapiens
gtgtacgctcaaatctataaaaagtttttaaaaattaaatacaaaattttaaatatgcattatgagcattattcaccatagccaaaagtggaagcaactcaaatgactatcaactgatgaatggataagcaaaatatggagtgtggactatccacaccatgtaatattattaagccatagagaaaaaaatgaagtactgatgcatgctacaatgtagatgaatctcaaaacatcacgttaagtgaaagaaggtagtcacaaaggaccatatatcgtatgattccatttgtatgaagtgtccagaatcagcaaatctatggagacagaaagtagcttagtgcttgcctagggcccaggggtatggggtttgggggatgacagataaaaggtggggcttcctttttcagtgatgaaaatgttcyaaaattgtagtaacaattaactctgtgaatataataaaacccaatgcgttgtgtaatgaattgcattgcatgtgaattatattcaataaagctggtttttaac

SEQ ID NO: 121005 - DNA, 525 bp, Homo sapiens
gtgtacgctcaaatctataaaaagtttttaaaaattaaatacaaaattttaaatatgcattatgagcattattcaccatagccaaaagtggaagcaactcaaatgactatcaactgatgaatggataagcaaaatatggagtgtggactatccacaccatgtaatattattaagccatagagaaaaaaatgaagtactgatgcatgctacaatgtagatgaatctcaaaacatcacgttaagtgaaagaaggtagtcacaaaggaccatatatcgtatgattccatttgtatgaagtgtccagaatcagcaaatctatggagacagaaagtagcttagtgcttgcctagggcccaggggtatggggtttgggggatgacagataaaaggtggggcttcctttttcagtgatgaaaatgttctaaaattgtagtracaattaactctgtgaatataataaaacccaatgcgttgtgtaatgaattgcattgcatgtgaattatattcaataaagctggtttttaac

SEQ ID NO: 121006 - DNA, 585 bp, Homo sapiens
catgatcaaccttgaacagatgaggagctgcttcttatggatgagcaaataaagtggtttcttgaggtggaatctactcctggtgaagatgctgtgaacattgttgaaatgactgcaaagttcttagaatactccataaacttagttgataaaacattggtgggatttaagagaattgactccaattttgaaggaagttctacttgggtaaaatgccatcagacagcattgcatgctacagagaaatttcatgaaagaaagagtcaatgaatatggtaaactttattgttgtcttaatttaagaaattgccacagccactgcaaagttcagcaaccaccaccctgatcaataagcagccatcaacattgaggcaagactcttcaccagcaaaaagatttatgacttgctgaaggcccagatgactgttarcatttttcatcaataattttacattaaggaatgtacattgttcttttagacataatactattgcacacttaatagactacagtatagtataaacataacttttatatgcacaggtaaacaaaaaaaattgcatgacttgtgtgatggttaatatt

SEQ ID NO: 121007 - DNA, 625 bp, Homo sapiens
gtcccgattcccgagtcacaagcatcatgcagtggcagctgtgtctccgtggagccattttacagtggacatcgttcctgcttgcataccctctgtgtatggttctcagatccttccagagcttctgtgagctccttgctatgtagctggtgctcctattcrtcatgtacttttgtttttccttccttccttccttccttctttccttccttcctctctctctctccctttctttctttctttcgttctttttttttgagacagagtctcactctgtcacccaggctggagtgcagtggcacaatctcggctcactgcaaccctcaccttccaggtttaagcaattctcctgcctcagcctcctaagtagctgggattacaggtgtgtgccaccacgcttgggtatttttgtatttttagtagagatggggcttctccaggttggccagactggtctaaagtgatccacctgcctcaacctctcaaagtgctgggattacaggggtgagccaccgtgcctggccagcatgtacttctttttcttcacctgcctcactcattctcattctgaaacattacctcctctaagaagccttccttgatatatccttccttccatcacact

SEQ ID NO: 121008 - DNA, 625 bp, Homo sapiens
gtcccgattcccgagtcacaagcatcatgcagtggcagctgtgtctccgtggagccattttacagtggacatcgttcctgcttgcataccctctgtgtatggttctcagatccttccagagcttctgtgagctccttgctatgtagctggtgctcctattcatcatgtacttttgtttttccttccttccttccttccttctttccttccttcctctctctctctccctttctttctttckttcgttctttttttttgagacagagtctcactctgtcacccaggctggagtgcagtggcacaatctcggctcactgcaaccctcaccttccaggtttaagcaattctcctgcctcagcctcctaagtagctgggattacaggtgtgtgccaccacgcttgggtatttttgtatttttagtagagatggggcttctccaggttggccagactggtctaaagtgatccacctgcctcaacctctcaaagtgctgggattacaggggtgagccaccgtgcctggccagcatgtacttctttttcttcacctgcctcactcattctcattctgaaacattacctcctctaagaagccttccttgatatatccttccttccatcacact

SEQ ID NO: 121009 - DNA, 471 bp, Homo sapiens
tataataattttcctattcatgaatatgtagcaactaaattttaatgaccaaatcatacaatgcagataaaaacatagtgtatatagacttatatttctgggcattttccagggtttttaatattcttgcaggcattgtaaataaatccgatttgaacgataatgcaaatagttgaaaaacctcacacgaagagtgtagattaattkgataagattgtggatacatttgataagagtgtaaagttatttgataaagccagtttgtccacttagagggcaccatttctaatcaggaattgatgacatttgcagtatttttaaattagatcctcaaatgagacacaataaaatggattaactaatacaacaatcagaataataatgatcctgtctttacctttaattctcttctatgaagttaaaaattgttttgcttatcttgtttattttcctgtggtgccaagtatatgt

SEQ ID NO: 121010 - DNA, 559 bp, Homo sapiens
catttaataggaagtaaacatgcctagaaataaatctaaataagagatatgtgagactagcacaaataaaatataacacatattattgaatgaaattaaagaaaacttacatagaaataaaatattttaccatgttcatggagtagattgaacactaaagatacaatttatccccaaattyacctataaattcaatgattcaatgcaaacctagttgatatcataaacgactttttagaatttgtcatgctacttctaaaatttacataaaaatgcaatggaccaagaatagtaaataaaatattgtaaaagctggaggactgaaactacataaaaagcaaaatttattataaagctacagtgaggaagatgctggggtattggcagcaatagaaaaccagatcaatgaaacagaatgatgtgtccagcaacagacctacacacacacacacacacacacacacacacacacgcacacaaatacacacatatatacacatacacacttgacaactgtagcactgtaaagcaaagagaatgaacagtgtttctaataatt

SEQ ID NO: 121011 - DNA, 559 bp, Homo sapiens
catttaataggaagtaaacatgcctagaaataaatctaaataagagatatgtgagactagcacaaataaaatataacacatattattgaatgaaattaaagaaaacttacatagaaataaaatattttaccatgttcatggagtagattgaacactaaagatacaatttatccccaaattcacctataaattcaatgattcaatgcaaacctagttgatatcataaacgactttttagaatttgtcatgctacttctaaaatttacataaaaatgcaatggaccaagaatagtaaataaaatattgtaaaagctggaggactgaaactacataaaaagcaaaatttattataaagctacagtgaggaagatgctggggtattggcagcaatagaaaaccagatcaatgaaacagaatgatgtgtccagcaacagacctacacacacacacacacacacacacacacacacacgcacrcaaatacacacatatatacacatacacacttgacaactgtagcactgtaaagcaaagagaatgaacagtgtttctaataatt

SEQ ID NO: 121012 - DNA, 559 bp, Homo sapiens
catttaataggaagtaaacatgcctagaaataaatctaaataagagatatgtgagactagcacaaataaaatataacacatattattgaatgaaattaaagaaaacttacatagaaataaaatattttaccatgttcatggagtagattgaacactaaagatacaatttatccccaaattcacctataaattcaatgattcaatgcaaacctagttgatatcataaacgactttttagaatttgtcatgctacttctaaaatttacataaaaatgcaatggaccaagaatagtaaataaaatattgtaaaagctggaggactgaaactacataaaaagcaaaatttattataaagctacagtgaggaagatgctggggtattggcagcaatagaaaaccagatcaatgaaacagaatgatgtgtccagcaacagacctacacacacacacacacacacacacacacacacacgcacacaaatacacacrtatatacacatacacacttgacaactgtagcactgtaaagcaaagagaatgaacagtgtttctaataatt

SEQ ID NO: 121013 - DNA, 622 bp, Homo sapiens
agttttttttttttattttggttattgtatttctgcttccacagttttgttgttgttgttgtttctttctttttagatcttctagctcttaattgttattttcattttgttcatatataattttcctgactttctctgtgtctttctttggctctttgaacatccttatgacagttgttttaaagtctttatccagtagattcatcatcaggtctttttcagggacagtttctgcttcttttttttttaattcctccttttaatgtgacacactttcctatatttctgtttcttttttatgccttgtgactttcttgttgaaaactattaatacatatttgaatatcataatgtggtaacttttgaaatctgattatctccttaccccaaggtttgtactttttttgttgttaattagtttttatgttttgtttgtttgtctttttctgtaccaagcatcagcctatggtataaatttaaggccttctctggtcttttctgagcccatgcctttccctcrgcttatgtggtgacttgctaatctctctttatgtatggttgcttttgaatctcctagtcctcaattactcgcttataaaagggaaaaaagagaaaagtgaaa

SEQ ID NO: 121014 - DNA, 558 bp, Homo sapiens
taactggtatgtttcctaaacaaagagcccatgtattctgagagtatcttgcccaaggctggagtgggaagtggagaggtaagtacttggagtcacttatttcttttttaaaaaaactcaagaaattggcctttttcttgtttacaaatttgagtgttcagtttgataaagaaggtaggttaagggagtttggattaataatcagtggtgaaacaatctccaaaataaattcagggaaacttgattttaaatatgattttatgattatatgtatgtgtacatatatatgtgtctgtatatatatatatatatatgtaaatatttattatatcaaaatatattggcataatgtgtatgtataacatatgcatcatatgcataacataaatatcttatatgtctatcatatgttatatgtctatattattatcaatatttttttgaaaggtaattaatgacattatcctaaatatttttttacaaatgtaattaataattttctacccatggaakatgtttaacttaaaccttaagatgacattttcaatgttatatatt

SEQ ID NO: 121015 - DNA, 568 bp, Homo sapiens
acaacactattctggcagtggctatttttataatcttgtggataaatctgtaagtagtgataaatattgaccttttctttgcctttgatgctctgtacaggaaaaatttatcaacaatgccacttgaaataaacagatattcatccaactggggttttcaaatatattgtatgtcaatctacaataaaaattagggacatttattaacttattctttaggtcatttagctaatatttatctaactattattgtgtgctaggaactgctgatgaataaggcacagtcactttcctcaagctacttgcaataaaatgcggttgactgacacataaaaaggcaatttaatatgagtgtggtaagtgttatagtaggagcaagataagtttctgttataaacacctaaaagaaggacgttacctagctttaagaaataatgaatagggccgggcrcggtgcctcacgcctgtaatcccagcacttcgggaggctgaggcgggcggttcacgaaatcaggagattgagaccatcctggctaacatggtgaaaccttgtctctactaaaaatac

SEQ ID NO: 121016 - DNA, 576 bp, Homo sapiens
tccaacattccctggcacctgatatgattttaatctctaccatttacacttccacaaaagttatattaatgaaatcatgcaacaagaaagaaggaaagattactttgcacctgtaatcccagctactggggaggctgaggcaagagaattgcttgaattctggaggcagaggttgcagtgagccaagatggcaccattgacagagcgagactcatctcaaaaacaaaataaaataaaataataaaataaaataaagataaaaataatggcctactcatggtgggtatttaactatactcgggggaataacagggtttgmtgcacttccccagcagtttaggcttattttctgccagaaagaattactgaggcagatatacttgtctttatggcaaaagaagccactatcctcttcctcctaagtaccaagaggaaagttttctctggtcttctgacctgcctccaatttttctcatgaattcccaaagcagatctctggaaaacagaatggatgtaagagcaaactctcttcatgtctgtggattacatgggttttataacctgatgccagattac

SEQ ID NO: 121017 - DNA, 539 bp, Homo sapiens
aaagtgtaatcacgcagtatttgtacttctgtgactggcttatttcacttagcataaggccctccaggttcattcatgttgttgcatatagaaaacagtctgaataagactacattgtatgcctcacaaactaatacattaagatcttaaataagttctgcagaagtttattttgtacaataaatatgrtattcatagtgagaaaaaatatatcattcatttacttttgtttaagtcctctttccagtttcagataactgttttatttattcatttattcttctcccttttctttgtcattaacctgtttgtcatgggtttcactctagcattatagatgattggtaatggcaattaaatataatttaatgtattttaatatctcaaaatgggctatttcagatatataagaaattaatattttgttatattttaattgttgctgaaagatgaacaaaggctatatatacacatatatgcatggatatacacaagaaagaataatataaacaaatatcaggataacttgagaaactgaa

SEQ ID NO: 121018 - DNA, 548 bp, Homo sapiens
gcagtatttgtacttctgtgactggcttatttcacttagcataaggccctccaggttcattcatgttgttgcatatagaaaacagtctgaataagactacattgtatgcctcacaaactaatacattaagatcttaaataagttctgcagaagtttattttgtacaataaatatgatattcatagtgagaaaaaatatatcattcatttacttttgtttaagtcctctttccagtttcagataactgttttatttattcatttattcttctcccttttctttgtcattaacctgtttgtcatgggtttcactctagcattatagatgattggtaatggyaattaaatataatttaatgtattttaatatctcaaaatgggctatttcagatatataagaaattaatattttgttatattttaattgttgctgaaagatgaacaaaggctatatatacacatatatgcatggatatacacaagaaagaataatataaacaaatatcaggataacttgagaaactgaaaataagtcaatgaaaacttaga

SEQ ID NO: 121019 - DNA, 539 bp, Homo sapiens
aaagtgtaatcacgcagtatttgtacttctgtgactggcttatttcacttagcataaggccctccaggttcattcatgttgttgcatatagaaaacagtctgaataagactacattgtatgcctcacaaactaatacattaagatcttaaataagttctgcagaagtttattttgtacaataaatatgatattcatagtgagaaaaaatatatcattcatttacttttgtttaagtcctctttccagtttcagataactgttttatttattcatttattcttctcccttttctttgtcattaacctgtttgtcatgggtttcactctagcattatagatgattggtaatggcaattaaatataatttratgtattttaatatctcaaaatgggctatttcagatatataagaaattaatattttgttatattttaattgttgctgaaagatgaacaaaggctatatatacacatatatgcatggatatacacaagaaagaataatataaacaaatatcaggataacttgagaaactgaa

SEQ ID NO: 121020 - DNA, 608 bp, Homo sapiens
tcattcttcctctaaatctcttaaagctattgttccataccaacagataaagttcaattttaagccattttggaggttagcttacctttttcatcttaaatgcagaaatccaatttagaacttaatccttccatatgataatagatgattccattttcatttaktttttaaaacaattatagcaggatttgaataaatcaaactcccttcattgcaatagcccagaactctgatcctttgtgaactctgcttattgccagatgccgatttcacaaagtaagttgttcttttatcaaccaaaattgtttgtacttcatagccatagaagtaaggctttaaaattgataaagaagttatttgttttgtttttaacccatttcatgaaataatgtgattttaaaaggcaaaataaaataactatgagcagcatatgttttagagacaataaagatctaattctaaactctggcttttgtccaaacctgactatctttgtaaacctggaaatgataataatcttgtctaagtctctgtttctgctttataatatggggttaatacactacttaaggcttaatatttagggaggacggaatgaggtataatgg

SEQ ID NO: 121021 - DNA, 608 bp, Homo sapiens
tcattcttcctctaaatctcttaaagctattgttccataccaacagataaagttcaattttaagccattttggaggttagcttacctttttcatcttaaatgcagaaatccaatttagaacttaatccttccatatgataatagatgattccattttcatttagtttttaaaacaattatagcaggatttgaataaatcaaactcccttcattgcaatagcccagaactctgatcctttgtgaactctgcttattgccagatgccgatttcacaaagtaagttgttcttttatcaaccaaaattgtttgtacttcatagccatagaagtaaggctttaaaattgataamgaagttatttgttttgtttttaacccatttcatgaaataatgtgattttaaaaggcaaaataaaataactatgagcagcatatgttttagagacaataaagatctaattctaaactctggcttttgtccaaacctgactatctttgtaaacctggaaatgataataatcttgtctaagtctctgtttctgctttataatatggggttaatacactacttaaggcttaatatttagggaggacggaatgaggtataatgg

SEQ ID NO: 121022 - DNA, 608 bp, Homo sapiens
tcattcttcctctaaatctcttaaagctattgttccataccaacagataaagttcaattttaagccattttggaggttagcttacctttttcatcttaaatgcagaaatccaatttagaacttaatccttccatatgataatagatgattccattttcatttagtttttaaaacaattatagcaggatttgaataaatcaaactcccttcattgcaatagcccagaactctgatcctttgtgaactctgcttattgccagatgccgatttcacaaagtaagttgttcttttatcaaccaaaattgtttgtacttcatagccatagaagtaaggctttaaaattgataaagaagttatttgttttgtttttaacccatttcatgaaataatgtgattttaaaaggcaaaataaaataactatgagcagcatatgttttagagacaataaagatctaattctaaactctggcttttgtccaaacctgactatctttgtaaacctsgaaatgataataatcttgtctaagtctctgtttctgctttataatatggggttaatacactacttaaggcttaatatttagggaggacggaatgaggtataatgg

SEQ ID NO: 121023 - DNA, 598 bp, Homo sapiens
gctctgattactgggacctgaatcaaaatcccaccctgagatcagcaggacctgaaaagcatgcactgaaagtggacgaatgaatgggtctttagaggaaaatcggggcggttttctcttatcacagggtcacatattagaaaaagaggtgataatattaggttggtatgaaagtgatcgcaatttttgcctttatattcaatgtaacatattcaatggcaaaaccgtgattactttcacatcaacctaatacttagttaattgactattaattcaccgatcggctgaggaactatctagggccagctttggaagarccccttcttggagagaagatatataaacagaaatttgctagcagaatggactgactgagtggctgcagacttgggctttttatgatctaagtggctgtggtgctttcccattcaaccgattgactactgagccttattcattggtcattgtttatctttgcttggattatgctgggagagaatgaccaaggcatttggaccaatccaaggaaaagcatatttagggttcctacctggtccactgtatatgtaaacatggcttaccaaattcctggccaggc

SEQ ID NO: 121024 - DNA, 532 bp, Homo sapiens
ttgacaaccacagacgatgcatgggctctcggctgtctcttttgtaattcaccagcaacaaatcccaatgttctgctactctggtggccattaatttttctgcctttgtcactggttttcatctccaaaacctgcatgcaaatggctctctgctctttgctttgggattctcaattatgaatcttgatgagttggagtctatgccagaaatctcgtggtaggtgaatttaccttaaattaagcatccatggtttcacatttcacttgtcttctacctaaatgcataactgatagcatttgacatcctcttcttggkggttccaagatatgttcatatatcagctgatatttgcacatatgcttgctatcttaaaaaagctttctccttgtctcattttaaagaggaaatttttatttattaatttatttattattacattttatttttattaacaaatagcatgctgctgaaacaaattgactttgtacatgtctgacaaccaaaaacatcggcatagataggtatagtgga

SEQ ID NO: 121025 - DNA, 605 bp, Homo sapiens
aatattatatattccatacacaacatttctttctgatttgattgttaatatgttctacatatagacacaattcttcttatggcagattttatataacatctgaattgcttatcattaaatattttataacaggtaaaatgatgaatgaaaaacttgaattggtgaattaaagttgggctgcatcaaaatttcttgtctctgcatgaaaattgatgagtttgttgatgattcattgcattttgcatttagaagcattatatttagtgccaccaggttaccatataaaatgtaaaagsctagaaaaattaatatcatgtctctcaaatttgatgatgggatgagaaggtaaaatctaaatctcaactttcaaggtcaaagagggatttcttgccccattcaattactgctcaatttgatagcagtaaaggagttaagagcatctctcctataatttggctagactttcattatagaaatagaatacattaacaggaaaccattaaatacaatttacgtatgaatagccccctcagtggaagctttgtttcttccatttgcaggataaagtaaaggtaactgtttcatatcaattaccagtcactgtg

SEQ ID NO: 121026 - DNA, 574 bp, Homo sapiens
gaggaacaccattcaacacataacagtgtatcattctgtttctgttttcttcagtgtccaaattggcacctgccacactgtatactcacatgttcctgtcattctccattgcctatcagctccttgagcgccaaggcttagtttyacctgctgctgttttcttggtacttgtagcagtataggcatctcatagtcactcaacaaatattttttaaataagtgagtgagtgaatgaatgaatacatcctgtgtgatttgactttgtctaattaataagtaaaagttgtcatcatatattttagtacatatcctaagcatcgatttttcatttaaaagttcaattctttcaccaaatatgagaacgctatccaatcccatttcattttcaaggcatcaactgatcttgctgcatcattgtcggaatttattttcttcaataaatcatacttgttatttacaattaaaccttttggtcagcctttcccagttgcacatgatgaatagcaggcagataattgccagttcaggagctcatttgtttttcctacagtgtggttcctaggagattttcttc
